United States Patent Application Publication US 2013/0129668 A1 - sequence listing, part 17

SEQ ID NO: 275520 - DNA, 122 bp, Homo sapiens
cagaccatcagggccaggtttccctgctgggcctgcaggacccaccgggcctgtcttccccggggcacctatagcgccaggatctccctgaaacacacacaaggaatgtgtcctgaatggca

SEQ ID NO: 275521 - DNA, 122 bp, Homo sapiens
ccagaagccgcgtcagaattccacgctggccaatcggaactgtccatgtactactgggggcggggctgccaagggaggaggaagatggcggcgggggcgaggtgaggtgttggcagtggaaa

SEQ ID NO: 275522 - DNA, 122 bp, Homo sapiens
gtagcctcatccaggatgaggacccgcgggtctcgtacaagggcccgggcaatggccagacgttgtttctgtcccgcagccagctggcttcccttctcccctacatctgaggaaatcagaga

SEQ ID NO: 275523 - DNA, 122 bp, Homo sapiens
gctcaagcctcgactgtcccctcgctggaggccagaggccaagatgatgtccatgctgggcggcttgcagaggtaaggggggcagttggaccccccaggtggacaaagcgcttcatctgtgg

SEQ ID NO: 275524 - DNA, 122 bp, Homo sapiens
tcccagttgtccctctcgcttttttcttgacatgaccaataaaagcccagagttgggtggcgcctgaccctcccactaatgagtgatagtgcaggtattgtaaacctggcgtttgctttggg

SEQ ID NO: 275525 - DNA, 122 bp, Homo sapiens
ccgccggagtgtgtgctgaacatccagcgagctgtgtgcattcagccacaggggaagcgccgggtggaagaatgctttctgctcattgtgactcacacaagcttggatgagacactctggga

SEQ ID NO: 275526 - DNA, 122 bp, Homo sapiens
ggcaatctcggttagcgcttcagcttagacacttcttgtgcgttctgtcgtcttgggctgcgtgtagtctcttgtttctgcgctttctccacgcccttcccagtttcctgttagccgaaggg

SEQ ID NO: 275527 - DNA, 122 bp, Homo sapiens
taacaaggcctcaacagtacaaggctttgaagaatcaaacctgggcagcccaacactgatcgtgaaccacttaaatgtcccctcaacctcttccctcctgacatccaaccagaaaaggtact

SEQ ID NO: 275528 - DNA, 122 bp, Homo sapiens
tgtacatttatccatattgccatatttctggcctaggatttttttttttttttttagctccgtgtacctgtgggtttgaaatttacagcaaatttagaaatatttcaaccatgattttgtca

SEQ ID NO: 275529 - DNA, 122 bp, Homo sapiens
ttttattgcctatccgcttttcattctggtgccctaagcaaagcataggcagtatctgtacgtgagatttgggcttaagaataagatttctgctaggctcggcgtgccctcctacgtgatac

SEQ ID NO: 275530 - DNA, 122 bp, Homo sapiens
ctggcatcggtggttttacttcttcgattgaaccctgcttcctcgacccccctgggaggccgccttcttcaggcgcctcccttctctccacgagctcgctctgacagctgaggaactggcaa

SEQ ID NO: 275531 - DNA, 122 bp, Homo sapiens
tgccacatagttgggaaaaactttgtgtttctgtgattcaagataaacactagcagtctccgtcagaagggtcaattatggcttagctaatacaggtagttgtgaaacattttgtaagtata

SEQ ID NO: 275532 - DNA, 122 bp, Homo sapiens
gctcccgggagccacgcaggctgccttggatgaggcgggagtgcgacttgggcgcttgcccgccacctggtggttggaaaaggaacagcacaatctgtattgaaatgtgctgcgttaaaagg

SEQ ID NO: 275533 - DNA, 122 bp, Homo sapiens
agagagagagaggagctgactcagcagggactggggtactgggtcgagagtgcgagcaagcgagccagaaggggaaaggcggctgctcgtgcctgagctaccgcagaggggagtgggaacag

SEQ ID NO: 275534 - DNA, 122 bp, Homo sapiens
gctctctggtggatgggttctaggcaaacaactccgcccaacagcagaggccctgcactgcgttgtgcctgcagcacctcgtgcgccttctgcagccggccaaccacctacaccgcagcccg

SEQ ID NO: 275535 - DNA, 122 bp, Homo sapiens
ataatgtcctaaaatggagatgcgagctgataagaagtcttggagtttctgcctgggcatcgaggatgcactctggggaagccaatttccttgaaagaagtctaaccaccctgaggccatga

SEQ ID NO: 275536 - DNA, 122 bp, Homo sapiens
gactgcactctgattaggtacagccttaggacgcccagcgttcaagttgttcaaacagtacgtagagcctcgcagagacaagtcaatggcctcttttagcgggactcctgcctggagcgctt

SEQ ID NO: 275537 - DNA, 122 bp, Homo sapiens
aacatttaagaaagtcatttatggaattctcactaccctcttggaagtcaaaatgaaagacgatgtattttatacataactttgtaaagtctgccctctatcattcctcatagtaaatgcag

SEQ ID NO: 275538 - DNA, 122 bp, Homo sapiens
gacatgagccggcagtggcctgcgcaccacaggaggcccttcagccgacggccatgtctgcgctgcgcgatcctgtccctgtcagagccgctgacctgggtctagtcccacagaacctctcc

SEQ ID NO: 275539 - DNA, 122 bp, Homo sapiens
agcaggtttccagtgcggcgttctaatcagtgagtctagagcaagcaggcacaagttccacggaggcacttgtggactaagatggtcattgaggcatatctgtgaagtccatgcagggtgtg

SEQ ID NO: 275540 - DNA, 122 bp, Homo sapiens
aactaagattcaaggtcatgcaactagagatgagactagaatctagcctttgaaactcaacgcattggtttctgctatgtcatgtttcctctctatgagccctagttgcttatgctggggtc

SEQ ID NO: 275541 - DNA, 122 bp, Homo sapiens
ggcgcatgcgtggcccggggtctcggggcgttgctgggaaacatctgccgttggttgcggcgggcaccggccgacatggcggcagcggtggcggctgcgctggcgcggcttttggcggcctt

SEQ ID NO: 275542 - DNA, 122 bp, Homo sapiens
gattggacattgcactcttggacccgccttcgttgcctgagtgacagctagtagggaagtcgcgtctctaagcaacctgcattcgtccggggtcaggaatctgttcccctgccacggatatt

SEQ ID NO: 275543 - DNA, 122 bp, Homo sapiens
cgtccctcgaacctgctgcagaagtaaggggagctcgcggttctttttcctggcaactaccgaagcttcagctgcctggggcacaaccttaagccatagcccttcactattccaccaaacat

SEQ ID NO: 275544 - DNA, 122 bp, Homo sapiens
ccccccattccgggctgggccagccgcagcgcctgctgcacgcggtactcctgcctctcccggagccaatgtaactcgcagagcccggccaggctaccctccagccagccccgcagccggcc

SEQ ID NO: 275545 - DNA, 122 bp, Homo sapiens
gttagcaattttatgagtccagttttattttcattagactttggaaatttttacccagtccggtgatacagtttcaaagttatcagaaacctttatttgtcagcattcttcccatgctttcc

SEQ ID NO: 275546 - DNA, 122 bp, Homo sapiens
tgagtgctgtgttctgagctatttgggtcacggctggcacagccctgagcagctcttccccgcctgctcctcgccgccccctctccccacacacggggaccgccgtcccctcgcccacagcc

SEQ ID NO: 275547 - DNA, 122 bp, Homo sapiens
cccacttttcacttccctgggtgaggagcccagaattgctttaagtcatcatcccaatcacgtctatgaatgcacagccaagcagggctaagcaaatggcttgccctaaaaagctgccgatg

SEQ ID NO: 275548 - DNA, 122 bp, Homo sapiens
ctggcgcaactccgtgcgccacaacctttcgctcaacgactgcttcgtcaaggtgctgcgcgacccctcgcggccctggggcaaggacaactactggatgctcaaccccaacagcgagtaca

SEQ ID NO: 275549 - DNA, 122 bp, Homo sapiens
cctgtgggcactgggacattttctcatcttggaacatctctttgcctactgtgccgaagccgccccccaaaccccctagccccccagccccaggtgcccctgtcagccgcatcctcttcctc

SEQ ID NO: 275550 - DNA, 122 bp, Homo sapiens
atgattccagaccacagtgtttcaaccctcaacacagaagcagaatcctggactggctaccgaggggcccctgccagctgctggctccaaagttggttttgtctgtgggctagatcggtgta

SEQ ID NO: 275551 - DNA, 122 bp, Homo sapiens
ctaggtgtgttttgggggaggacactccttccccgaacttgtgggtttcgggaaggggcccgctgtcgggcatacgcgcctggaattgagagggggccgggggcggcaggggcgcgcgctcc

SEQ ID NO: 275552 - DNA, 122 bp, Homo sapiens
gctgaaggaaatggcatttaagagcatcgaacaataataaatgtttgattaaataaaaaccgtgacaagagagtagggaggagaaggtcctatgtcgctcactgatgcacttaacaaacatt

SEQ ID NO: 275553 - DNA, 122 bp, Homo sapiens
ttaggatggctttggccatcctgcatttttaacccttttcccattttcacccagaatactcgctggtggcacttgcagctgcagggtttaccctgagataactttgccacaaaatatctcgc

SEQ ID NO: 275554 - DNA, 122 bp, Homo sapiens
aaaaaaaaaaaaagagtattggaggatgattggtgctgggaacggatacaggaggtttttcgggtgaaggcaagaagccaaccactgaaggaagctaacatggacaacagaagggtctgaag

SEQ ID NO: 275555 - DNA, 122 bp, Homo sapiens
ccctgtaacaggcggtttttttttcttgtctctctcatccctcctgccctgggtgcagaccgcgaacagcgccgccgaacttcccaacaggcagggagagggccgatccgggctggcacgcc

SEQ ID NO: 275556 - DNA, 122 bp, Homo sapiens
cggggagctgcgaagcttgcctgggcatcgatcttgtagtccagacaacagaacgatgagcgcgctcccggcccctgcggggctgcccagggtctccgcgcatcctccctctcacgcgtcag

SEQ ID NO: 275557 - DNA, 122 bp, Homo sapiens
gagggggcgccactaggcgcggtcacgtgcattcgcggtgcattcgcgggggcgtcggtgcgggtcgcgtctcttaagacacccagggagacagacgtggggcagaactcatgggctgaagt

SEQ ID NO: 275558 - DNA, 122 bp, Homo sapiens
aaattctcccagggtctgaagccctttctccttcggtacttggtggaggtggaaggcagccggagctagctcccctaaacccacagactcccggcctgacacagccatcccacgggctcccg

SEQ ID NO: 275559 - DNA, 122 bp, Homo sapiens
gtggacacaccttctgccggctctgcctccccgcgctctcccagatgggggcccaatcctcgggcaagatcctgctctgcccgctctgccaagaggaggagcaggcagagactcccatggcc

SEQ ID NO: 275560 - DNA, 122 bp, Homo sapiens
aaccagggtcgctccgccgtagacgccgagcagacgcggtccggcgctcggccggagagccggctaaggggcttttcattagcaccgcattaggaggacactcatcctccagagtccttccc

SEQ ID NO: 275561 - DNA, 122 bp, Homo sapiens
agcaggcactcaataagtgtttgttgagggattgaatggcacaaaactagagctgggaaacgccctttgccacaggcacgccctcccctgtgtgttctgctgaaccaaccacggctccagga

SEQ ID NO: 275562 - DNA, 122 bp, Homo sapiens
ctgaagctttatagtttgaatgagtcatttgctaacctgagtctccaaacaccttactctcgccctcacttacagaaattagagatacaggtatggaagttagtcccacatgatagtaagat

SEQ ID NO: 275563 - DNA, 122 bp, Homo sapiens
tccggagcctagcgccccagagtccagagcaaagcgccccgccccgccctctgatctccccgtcccgcccccaatcaccccgccccgccccgattgctggccccgtggacgccctaccccgc

SEQ ID NO: 275564 - DNA, 122 bp, Homo sapiens
cgttgcgtgtgtctctcgggagacaacagtttaaaagcataaatttgaaccggcccggcgcggtggcttactcctgtaatcccagcactttgggagtccgaggcaggcagatcacttggtta

SEQ ID NO: 275565 - DNA, 122 bp, Homo sapiens
ctggatcgtccagcctcccgggatcgattgggaatctagcttctgcttgcctttccagcgcgacgcacagtaggagcctaataaatgtttgctgaatgaatgctgaatatcgaactcaggta

SEQ ID NO: 275566 - DNA, 122 bp, Homo sapiens
ttcccagatattggctttataaacctttgatatcttcatgaatataatgaatcaggcattcgtttcccttttcctggtcatctatttccgtcattgagattacccccataatttcaaacatc

SEQ ID NO: 275567 - DNA, 122 bp, Homo sapiens
cccccctcccggcagaaacctggaagtggaaatctcgggcattcaccgtttgggtgaagacggaggcgggttctggacagacgtaggctgtcagggagtgtttacttcgcctccacttctgt

SEQ ID NO: 275568 - DNA, 122 bp, Homo sapiens
cagcaggttgaaggatgacgggtgcccagattcccaccttcaaactgcctggcagcagcacgttcagtgtgatacagtgctgtcttcatttctgctttctcaaacatcaagattccaattgt

SEQ ID NO: 275569 - DNA, 122 bp, Homo sapiens
gggacatccagagaaaacagtgccatgaacaacaagagattgactgacagacacctcaaccgaacacacacaggagccttgacgaggccccggtatgcgcacgggaagggccgggtgcgacg

SEQ ID NO: 275570 - DNA, 122 bp, Homo sapiens
aggccagccgggggaaacttccgggaatgtccgcactcccgcgttccacggggcagcatccggcggcagcggagcctgtggctccccctgcgggctgctcagcggcgtgcacagtcctgccg

SEQ ID NO: 275571 - DNA, 122 bp, Homo sapiens
acgatcatttcccttgatggtcccgatcgccacaaagacgtcagggattagggtcgcaggcgccttgtttaatggccttttggcttggagcatttccaatgcgggtcaatgcgtagtagcac

SEQ ID NO: 275572 - DNA, 122 bp, Homo sapiens
caaagacagtaagaaatgaaactaattatttgtattagttgagactctttctgttgcaaacgagagcaatctaacttacaattagcttaggcaaaaatgaaaggcaattcattggctcatgt

SEQ ID NO: 275573 - DNA, 122 bp, Homo sapiens
ccagattcaagctaccctctcatctcagcctcccgagtagctggtagctgggactacaggcgggtgccatcatgcctgtattatattttacatacattttggagagacagggtctcaccatg

SEQ ID NO: 275574 - DNA, 122 bp, Homo sapiens
caaacacccccgggagttttgctcgcaaagggaccacgaggcagctgctggcgcgtcctgcgcgtacccgcccagaggctccccggcttgctcctcgcgggtctgtcccgaaactgacgtga

SEQ ID NO: 275575 - DNA, 122 bp, Homo sapiens
gtgcttccgactgcgagaccccggtttgggtggggaaggcgctgagaaactcggcgcaagcggggagagctccgaggtccgtgcccttgcgcaccccacaccactgactacagcggccgagc

SEQ ID NO: 275576 - DNA, 122 bp, Homo sapiens
aataaaaggaagccagaactgccacccccacagtcctctgaacacaatcaggtggataaacgatgatgcccgcgagcaccagctgggttctttcagggggaggcatgcatagtgctgtggag

SEQ ID NO: 275577 - DNA, 122 bp, Homo sapiens
ttgtttgtttgtttgttgttgttgttaccacaacataacctaacctggcctgactgttaccgtaaaccaatcaattgcttatcctcttgctggtgagtgacttaggcctcagttttcacaga

SEQ ID NO: 275578 - DNA, 122 bp, Homo sapiens
gtacagggagatgctcagggtcttggctggatcaggccagagcgggggtccccccatagacgatgaggccactttgcatctgccagacaggaaacctagggaggccagaagcagaggaggaa

SEQ ID NO: 275579 - DNA, 122 bp, Homo sapiens
acggtcaggcgttttcccgggcagcttacctgctcggcctgggtctttctggacagcaggcgctggaggtgcgcgtcactgtccgccgccgtgtccgcggctgcgccagacagtgtagaacc

SEQ ID NO: 275580 - DNA, 122 bp, Homo sapiens
ccacggggcatgggcggtgctcacctccagttcttggtgtgggggggaccgtgctccacgcgcagcagggcgtagcgggcggcgttcagggataggccacggatgccatcgccccactcctt

SEQ ID NO: 275581 - DNA, 122 bp, Homo sapiens
tcctgggaaaggtgaggctggagatcttgaaggatgagggagagtttctccacgaggggtcgcacttgcccgaatggtgcccggagctgaacctgtatcctggtgtgttcttgttcgggaca

SEQ ID NO: 275582 - DNA, 122 bp, Homo sapiens
cgcacgccggacccgcggcgagcagagctgcctcttaaaggaaaccgcacagtgtccccacgggtgctagccacctgtttagcagctttagttagggaccccagctttttcccagcgaggga

SEQ ID NO: 275583 - DNA, 122 bp, Homo sapiens
ccaccctaattaatgtccattccctcctaacaaattctcttcccaagtcaactgcaactgcggctgaatcacccctcacccgctagccttgcctttgcttgtgtattcagaggcctgagctc

SEQ ID NO: 275584 - DNA, 122 bp, Homo sapiens
aaacagtgcagggagtgcgaatatgtgaccgagatgactggagtgggatgtctggcctggcgggaacaccagcattgttgtcacagttcagtgagatctcaagtttagtcacgtatttatgc

SEQ ID NO: 275585 - DNA, 122 bp, Homo sapiens
cacgtgacccgggcctgggaggagccggggcgggcgggggtcacctgaacaagggagtcacgtgagcggggggcgggggtgggggggcggtgccgggcggctgtcacgtgacgcggttccgg

SEQ ID NO: 275586 - DNA, 122 bp, Homo sapiens
acctggctcatttcacgtcgactcttcttgcccattacgtcatttcatcaggccttaccgcgactgcctcaggccttaccgtggccgccccaggcttactttggttcttggctgcttggact

SEQ ID NO: 275587 - DNA, 122 bp, Homo sapiens
gttttctccctttgtttgcgagattctgaacagctcggagcgattagggaatttgcggaccgagtccggtggcagagctggggcgaaagcagagagcgcaatttaatttttgtcatctcttc

SEQ ID NO: 275588 - DNA, 122 bp, Homo sapiens
ggcggaggctgtggcctctggctctggagagccccgggaggaggctggagccctcggccccgcctgggatgaatcccagttgcgcagttatagcttcccgactaggcccattccgcgtctga

SEQ ID NO: 275589 - DNA, 122 bp, Homo sapiens
gccccgggctgagggtttgcgtgcgggccgggtgcctgggggccccgggctgagggtgagcgcgccgcccaggtgccaggcggctccgggcagagagtgaacgcgcgggccaggtggctcca

SEQ ID NO: 275590 - DNA, 122 bp, Homo sapiens
agggggcagctccctccaccgccgccgccccctcttcctcccccgccccctctccctgcccgcccccgtcacacggagccctggaggatcccccgctgctgcccgccctccctacgccaccc

SEQ ID NO: 275591 - DNA, 122 bp, Homo sapiens
gtcctgcaggagcctggggcatgggaaccccagctgggattcctctgccagcagccctgccgatccctgggcccccggcagctccagcaagtggaactcgagcaataccagtctgaaaaata

SEQ ID NO: 275592 - DNA, 122 bp, Homo sapiens
aacgaatgttctaacacatagtcgtgctatttttctttaggttttctatcagatgttccacgtaataatgctggtaagtatggaataattaagaaaatatttgaagacagaaattagtttgt

SEQ ID NO: 275593 - DNA, 122 bp, Homo sapiens
gggggtggggtggggggttgggggaaagagaaagagtcgctggtcaggaaacttcaagcgcggatgaggtcattggtttaaaaataaagagatggcgtcacttgaaaccaatcccagtgaat

SEQ ID NO: 275594 - DNA, 122 bp, Homo sapiens
aaccacttacctcttttctgtttctgtggatgtttgcctaatctggacacttcatataaacggaatcatataatatgtgggcttttgtatctggcttctttctttgagcatgtttttgaggt

SEQ ID NO: 275595 - DNA, 122 bp, Homo sapiens
gactgcgcccatcactgaccttctcttttgctccagtgccttcagtccaggtcgggtgtccgcctggcaagcggaactccctgctctgctggctcacaggtaacgtggcacagctgagggtc

SEQ ID NO: 275596 - DNA, 122 bp, Homo sapiens
cacacttttatgtctgcttgctggtgaggagagactgccttctgaaggttaacataacctcgattacagccaagaagctccttggagatttaattggtttgtggaactactccaaaactagt

SEQ ID NO: 275597 - DNA, 122 bp, Homo sapiens
taaaatcctgaagtttctgtatatctttgcagatcattccctaccagactaaatttataacgagtttatggggccaggagaacattactggacaaaattaagtttatgagaattaggtgaga

SEQ ID NO: 275598 - DNA, 122 bp, Homo sapiens
gacaccccgcagcgtgtgcctggctggccgcccgagatgtgcctgcgcatggcatggggacgtttgcaagcctggatcctggcgcgggggcaggtagcgggagaacaggcacgcagatggca

SEQ ID NO: 275599 - DNA, 122 bp, Homo sapiens
gtatgaattcctgagctatggaatcacttgcttttcctactgggggttggtgagttggaacgcttcaagatgtcagtgtggaatcttctaaatccacccggcttcctgaatattatgaaaac

SEQ ID NO: 275600 - DNA, 122 bp, Homo sapiens
ttggccaagccacaggccaagggccccctgggaaactcacctgggccccgggtcagactccgctccctggggatgcagaagcagccacccatgtgtgtaccatcctaccctggccgaggccc

SEQ ID NO: 275601 - DNA, 122 bp, Homo sapiens
gtgtgatggtggacagtgtgggccacgcacttgctgtgtgatcggggacagtgtgggccgcgcactggctgtgtgatcggggacagggtgggccgcgcactggctgtgtgatcggggacagg

SEQ ID NO: 275602 - DNA, 122 bp, Homo sapiens
ctctgcgcacgagttatctcggcccaaacgggcttcagagcagtggatgcgggacgatctcggttttatgaactatttgcatgtgtacaaaaacctggagaggagataaaagaatgggctag

SEQ ID NO: 275603 - DNA, 122 bp, Homo sapiens
tcattgctggaaatgagatgcctaactccaggacttcatcctgtggactgcagaattaaacggaaccaaagaaaataagcaacaaaaaacagttggaacagcttctcagtggacttactgct

SEQ ID NO: 275604 - DNA, 122 bp, Homo sapiens
ctgtcccatctgtcatgtgctccctctgtgtggctgccctggaggttctgaggaggcctgcggggaggccctaggttgttccaaaccacctctataaatagccagcttcaggaattcactgg

SEQ ID NO: 275605 - DNA, 122 bp, Homo sapiens
gaccgctgtcaagcaaccccatgaccatatatgaaatcccaattacctgtacttatccatcgctagttcacttcgctgcagtccttcgtaaaccaaagagcaggtagaacgagttcaccctg

SEQ ID NO: 275606 - DNA, 122 bp, Homo sapiens
gcccctctatctcctcccacctttcctactcacccctccactccctcctgcacctgggcccgcccctccacagccagagacgttctgcagacgctgagcttgactgccccctctccctggcc

SEQ ID NO: 275607 - DNA, 122 bp, Homo sapiens
ccagccgcagcaggcacagcaccaccagcaaccagaggcgcccagagtcgaaggcagaatcggacagcctgtgcggagagggccgggggcaagggactaagaaggtcgcccccgacccccca

SEQ ID NO: 275608 - DNA, 122 bp, Homo sapiens
acactggagtcccggatcctacagatctgaaaggctgagtcggatgcagcaaaggcgaagcggggttcgcagccccagactcttgggcgggggggtcagcgagcaaccgggaggggcgccgc

SEQ ID NO: 275609 - DNA, 122 bp, Homo sapiens
ttcattggatctgggaaaactgagggagatgggggcagggctctatctgccccaggcttccgtccaggccccaccctcctggagccctgcacacaacttaaggccccacctccgcattcctt

SEQ ID NO: 275610 - DNA, 122 bp, Homo sapiens
atgtgtctgggtcgtggttgatgggaagaacctgaccatagattccccatgcagagctgacgattagcaattaactgggaggaatctcaggggtgaggttaattgggggacagagggagggc

SEQ ID NO: 275611 - DNA, 122 bp, Homo sapiens
ccccgctgcagccacgcgcccccggaaccggacctatagagccgggtaagtgccgccagtcggggcgctttcccggtgacccccaacatattccggccttctgggaaatgtagttccccgtc

SEQ ID NO: 275612 - DNA, 122 bp, Homo sapiens
gggtgtcgttccaccttcctgtagtctccttggcgcgcgtgaccgtggttgtgcagggagcgccttctgctggttttcagcactggagaaataaaccagggctcagagtccttggcagccgc

SEQ ID NO: 275613 - DNA, 122 bp, Homo sapiens
gcgaggtggggccatccttggagcagttgtgctggctcatgaggtcctctatgccatggacggccgagtggtaggccaggtcaccccggcaggtgcgggccgtccgccgcgtgcacagggcg

SEQ ID NO: 275614 - DNA, 122 bp, Homo sapiens
taattatgagatcatttggcctcagtaactaggcagactccactacctttcacctagtttcgtgggaagaaatggtaaagctccctcgatggaaatgttccttctttcgccataaccttcac

SEQ ID NO: 275615 - DNA, 122 bp, Homo sapiens
agggtctcaatacctggaattcgaaacgtctcagttcctccgccttagttcctcttttcccgggttcggaggccacctgtgcagcagggcacacctgccactctcatcgccctcggagccgg

SEQ ID NO: 275616 - DNA, 122 bp, Homo sapiens
tttcctgaagttatagaaaggacataacactaccactacattgcagctttatgctgcttacgtgtgtatacattatgagctggtttttcaaatccactgatttaatgtcatatgtttcacta

SEQ ID NO: 275617 - DNA, 122 bp, Homo sapiens
ggccccggggcggagcgggccaggtgtgggaaatgaacagggctgggcgctagatacctgcgtggggtaggacccgcgaggaagaggtacgtgcggatcggtgggagagccaggcaccagac

SEQ ID NO: 275618 - DNA, 122 bp, Homo sapiens
ttcaagtctgataaaaatatttacaatgtgttctcactcaagcctgctacctggaggcttcgtctgcatgataaagtcttggtctccataaccccttctcataatccagacattcctttcta

SEQ ID NO: 275619 - DNA, 122 bp, Homo sapiens
gctttggacttaatagttgaattgtggagggaaaatatagacaaggaaaatccattaacacgatgatgtattaaatgtcatgtgaaaaataattggcaaagaatcttattacagagtggaag

SEQ ID NO: 275620 - DNA, 122 bp, Homo sapiens
ccttcttcggcatcgtcggaaaaggctctcactccctccattcctgaagcagcaacctctcgaagtggggaagcaacacgagaacatcttgctctcttgagcgactcccaccaagtgagctg

SEQ ID NO: 275621 - DNA, 122 bp, Homo sapiens
tctgaacaaaactccttggcgaatccctaagcagtaattcaataaacaaagccattcactcggttttacccccacagtccttggtggcccagcagcgcacattctgaaggttcactttgtta

SEQ ID NO: 275622 - DNA, 122 bp, Homo sapiens
ctatgtcttccgtcaagatacgtttgccacagggattcgggtaccgctgccaaaaggcggcgaacacttggtcccaggaactgcggagcacgccctggcccagtaaatacttcaccatcgtc

SEQ ID NO: 275623 - DNA, 122 bp, Homo sapiens
cgggcagcggagcgcaggggcggggctggggactggcgaactccgcctctctggggctgtcgctttaagggcaaggcggggcgtgcgggccctttaaggccacgtgggggcgtgtcaggaag

SEQ ID NO: 275624 - DNA, 122 bp, Homo sapiens
taggggttgttggagactttctaagggatacctggacatggacgggctaaaaggaatcatcgcccaagcactcagcctctgtgtaatctgtactaaagctgatctgccaaagaatgaccccc

SEQ ID NO: 275625 - DNA, 122 bp, Homo sapiens
gtcctgcgcattcccgagtgtcaggagccctggaagaagttgcaggcttctcacctcccacgcagccactgcactccgaagcgcaaccactgagtcagggaggcagggccagagaggagttt

SEQ ID NO: 275626 - DNA, 122 bp, Homo sapiens
atagcgcctataactgcagagttatagacctataactgcagagcccagcacaccccatcccgcgccggcacccggctttggctccagcttcttcttcccatcatccgcctacgttctgggtc

SEQ ID NO: 275627 - DNA, 122 bp, Homo sapiens
tttaagtctcacatgacggcgcagagccctggcatgggggggaagctgcctgcagagtcgcggctgtgccccgtgcattccaccggaggccacgcagtgcttcttcattcctgccttccttc

SEQ ID NO: 275628 - DNA, 122 bp, Homo sapiens
cgtcctgcccacgctctgggcgggactcaccggtccaggtcgtagggcctccgcccgggccgccgctcctgctcgtaacgcagctgctcctgctggcgccgcagctcctcgcgctcgcggtg

SEQ ID NO: 275629 - DNA, 122 bp, Homo sapiens
gggtgctggaagggctgaagggggtggagggagaagccaccctgccacacaggctcccgtcggccccagcaagagcctccccagctgccggcagcatcctgtgatccccggagagatttttc

SEQ ID NO: 275630 - DNA, 122 bp, Homo sapiens
cccagcccctgctccaatcttggagcagggctgaagccaagccaggtaactgtcacagcccggccaggtatgtggacactcagggcggtgctgacgtgctagctgcctgccacctcagcccg

SEQ ID NO: 275631 - DNA, 122 bp, Homo sapiens
tggccgacgtcacactgctggtgggcggccgggagctgccatgccaccgcggcctcctggcgctcagcagcccctacttccatgccatgtttgcgggtgacttcgccgagagcttctctgcg

SEQ ID NO: 275632 - DNA, 122 bp, Homo sapiens
caaactccaaactcccacaacacagtacaaactggagtagcatgcaaacattaagactgacgtagcaccaacatattctaactgctaaaaagtaaaggtattctggccaggcgtggtggctc

SEQ ID NO: 275633 - DNA, 122 bp, Homo sapiens
gaggtgctgggatagataagctttgtctcttccatactggaccatcctacctcccccaagcgaggctcagcaggtgctgtattcttggcccatagcaggtactcaatatgtttgttgaaaca

SEQ ID NO: 275634 - DNA, 122 bp, Homo sapiens
tgcccaggcagataggggtgggtacctggtgaaacccaaccttaaagctgaagacagtcccggctaaatcctcatactgaattgagaacctgtcttcccatttggtgtgctttcctccgatt

SEQ ID NO: 275635 - DNA, 122 bp, Homo sapiens
agaaggacagactaaggcctcaacaggacttggtgcagtacctggctctatattcccttccgcgccgaccctggggagctgggcacgtaaggggtgtcggtatacgcggattcgaagcctca

SEQ ID NO: 275636 - DNA, 122 bp, Homo sapiens
ttaccaaaaaacaaagtgtgcgtaaaacctaaaattgtccactagtagcggacgaaagatcggcaacaagaatttgagcctggagctgaggggaagatgcttccctgcaggcacccggctgg

SEQ ID NO: 275637 - DNA, 122 bp, Homo sapiens
gggcaacaagagcaaaactctgtctcaaaatacaaacaagcaagcaaacaaagaaatgttcgataaaagaaaaactctgagtcattcagtggtgcaaggttggattcctttcagacccgacg

SEQ ID NO: 275638 - DNA, 122 bp, Homo sapiens
ggcattccgcgagctgcacccctgcccgggccagagtggggttctgctaggtgagaacttcggccgtccgccccgccctcctcccaggctccacctggtaattcgagctgttccggatttat

SEQ ID NO: 275639 - DNA, 122 bp, Homo sapiens
tgcaagcgcacaggagaggtctgccttcccaagggacagctggggcaggtggccacatcccggatggtgcctgtgtgtgaccatcacacgcactctgagcaccccgtggtgcagcgggcagg

SEQ ID NO: 275640 - DNA, 122 bp, Homo sapiens
tatttatagccctggcgattgacagccgcaacatccaatgacgactccgccaccgagaggcgggcttcctagactctaaaaggtgcaacaacctccggcttgcaaaaccgcttgcaacggga

SEQ ID NO: 275641 - DNA, 122 bp, Homo sapiens
ccggaaccggcggtcgagctacggtcgcggagcagtggaaccgagactgccccgcggagccgccggtatgagcgcccctcgccaccccgtgtcccaggcccggcctttctgacaagaggtag

SEQ ID NO: 275642 - DNA, 122 bp, Homo sapiens
tattgcaccatctcctcctatatgctgtgctatgagctgtgagtttctgctcaaggtgctcgagaaacagcaacaaggaaaacaaaaacctagttttcctggagcttacatgcaagtagggg

SEQ ID NO: 275643 - DNA, 122 bp, Homo sapiens
ttatcaagttaaccagtttgtttcactcaattagctttttgttcttccacctgtaaacctcggcatatttaataaaacctcaaagtttataggtaacttgaagacacctagctcaaattctc

SEQ ID NO: 275644 - DNA, 122 bp, Homo sapiens
aaacacagccctaccagtcactgcagctcatggcctgagaagacattccagtggcagcctcgggtgtccactcagttcacatattctggtttcacctgcccaagctgtcttcaggcatgagg

SEQ ID NO: 275645 - DNA, 122 bp, Homo sapiens
tgaggccgggaacctttgctcaactctcaggctgtccagggaagctttaggcggtgataccgagctacagaccaatataagagctcggggctgtggcactgaagagaggaggcggccgttgg

SEQ ID NO: 275646 - DNA, 122 bp, Homo sapiens
tgttctccaactcctgaccttggccaaagtgttgggattacaggcataagccattgtgcccggcctgtgtttttaatttcatcgtggcacagcttcaaaatgacatctaagtagctgacata

SEQ ID NO: 275647 - DNA, 122 bp, Homo sapiens
gctaaaatgcaagtatctcccatctccccatcccccgcagaccaagtacagtgaaggggacgaggggaagaagtccaccctgcgtttgagggctggggccaagacccctcattcccgcttca

SEQ ID NO: 275648 - DNA, 122 bp, Homo sapiens
ggtcggcggtgccgggggcgggccggaaaggacgcgctgcagggactccgggagctggggcggtcgctggtacccacggggagcaggggagccttcctaggggccgcggcaccgtgccgcag

SEQ ID NO: 275649 - DNA, 122 bp, Homo sapiens
cggcggcgcaggcgcggagaggggcacagcggcggcgcaggcgcggagaggcgcacagcgcggcacagcgaggcgccggcccagactccactccccagctgtgaaagggtaagaactgaggg

SEQ ID NO: 275650 - DNA, 122 bp, Homo sapiens
tccccaagaacatcgcccctctggctggagcgcaattggtgattggctacttaacccgtccgtcctttcccgcccaggggtccaatccaatccagcccggctccgctcggagacagttcgcc

SEQ ID NO: 275651 - DNA, 122 bp, Homo sapiens
ttcctagaaagttcctatttaaaagcacaacagggaaattactacacagtatccccaccccgagcaaacacacaaaaacaccaatgcacaccacagataataaaacattggaaaatgatagg

SEQ ID NO: 275652 - DNA, 122 bp, Homo sapiens
gagaatgaagtggaggaataagttataaatgaacagtggcttatgactccaagagttaatcgtgttattttggtagctgtctgtgtaggtgtgcatgtagttgcgagtttgtattgtgtttt

SEQ ID NO: 275653 - DNA, 122 bp, Homo sapiens
gcggggcggggcagagcgtcgtgaacctccctcgcgagtccgcccacacaacggcccaggcgaggggatccctgcgggaccacagcgcttcagcctgtgcctgtgcagtccgcggtgtgaag

SEQ ID NO: 275654 - DNA, 122 bp, Homo sapiens
gtagtgcgccatgagtgacatttttttaaacactggatgtgcttttctcaccccttctttcgtctgtgtcttgtgtgtaatcgtgtgatcctgtggccccgacccgcctggtccctccctgt

SEQ ID NO: 275655 - DNA, 122 bp, Homo sapiens
tccctaagtcagagagcctgcttcctacctagaccgaaccagtacgctttgaaaaccattcggagtgagatgttctcgggtggtggtgggaaagggagttttggccagacaggctgtggttg

SEQ ID NO: 275656 - DNA, 122 bp, Homo sapiens
ctgggaaggaaggaaggaaaacaaaggggaaagagaatacctatagaaatggatttttcccgcaagagactttgcagggcaatttcaagatatggcaaagaaatatattttggggttaaata

SEQ ID NO: 275657 - DNA, 122 bp, Homo sapiens
ttccacttctcatttcagaattcatgaatcttgtctccttaatgtttttctgtcatggcacggtattaagagtttgtcttcagagtatggtctcatcatccaaatcaactttataagccaca

SEQ ID NO: 275658 - DNA, 122 bp, Homo sapiens
tgggcgagcgcggaccgctgggaccccggggctcagtgccgctcaccgggggtgaccgcgcgcccagccccggcccagcctggccccggcgagcccatccaagccgcgcttcccggaggcag

SEQ ID NO: 275659 - DNA, 122 bp, Homo sapiens
catgggaactctactgagagccctgcatcctaccaaggagcccccagaagtcgggccctgcgtggggtcggttggcctggtggagtgtgtccaacctctgacccgcttttgggaggatcaga

SEQ ID NO: 275660 - DNA, 122 bp, Homo sapiens
agtggaggcagaacactgtagttaaaatctcagccctaccagcgagggagtggatcatctcgggaaagttacttagtgccagacacagtgctgatgcaagtgaaacaggccagcacacaaca

SEQ ID NO: 275661 - DNA, 122 bp, Homo sapiens
ttcttgtgatgatgtcagcttgtgagcagcgctgccccactgctgtccatggtcctggggcgggatggcctcccgtggacactggggacgcctcccctcctcttggaaaatgcgtgtttctc

SEQ ID NO: 275662 - DNA, 122 bp, Homo sapiens
tgtagatccgcaccatcccgtcccgcttccccgccgtcacagttgcagctgacggccccgcggatccagccaactagaaccccaacgggtgcactacacctgagaacaggttcccacagctt

SEQ ID NO: 275663 - DNA, 122 bp, Homo sapiens
cgcaggccggggctgcgcggggatcccgaggcctgggggtgggcggtggcccttgggtcgcgggctgcagacgggccgggcgggtcccgcggccatcgggcggacgcggaaggggcaagggc

SEQ ID NO: 275664 - DNA, 122 bp, Homo sapiens
ctgggggagataattagggaggtctccagccgctgcttaatgagccagtaattaaccagccggggaggggagctggcctctggccagactggggagagaaaaggcctctggcctcaccttcc

SEQ ID NO: 275665 - DNA, 122 bp, Homo sapiens
ggggtcttggcggagacatttgtgtttcgggggcagcgccccttcctacatccaggaggccgcgttgcccgggttaccgaaggccgccgcaccgacgccccgcccctgaccgccgatgcccc

SEQ ID NO: 275666 - DNA, 122 bp, Homo sapiens
gtgactgccatctgcaagcgagtttgcaaagcactgatgcccaggtgctgcgggggcgggcgcagcgcgcgccgctcgccactgggtggcgctgcccgctcggcccggcgctcctggagctg

SEQ ID NO: 275667 - DNA, 122 bp, Homo sapiens
gcgtgtgaatctgacggagagacttttagagttttgtttggttttcagttcagaccgctacgctgtcagagcaagcaactccgagccttgatgggaatgacttacaagccgcggtgcgggct

SEQ ID NO: 275668 - DNA, 122 bp, Homo sapiens
tgttagtgtaatgtctcatcaacactgagaacacgttatgtggtgttttactgtcatgaacgaaacctatttccccagaaaaactggcagatattagcattaatctgatttttcaaagaagt

SEQ ID NO: 275669 - DNA, 122 bp, Homo sapiens
cgaccagtgggcggggaggccgggggggcgcacggggcgagcggcggggagggcgggctgcggctccggcccccatggtgcgctactgcagcggagcacagggttccaccctttccttccca

SEQ ID NO: 275670 - DNA, 122 bp, Homo sapiens
aggtcatgggctgcagggcctcccaggagtcagtggtgtggtcatagcgctcggtgctgtcggcggccaccacgtacagcagtccgtccagcacagaggagctgtggtactcgcgggccttc

SEQ ID NO: 275671 - DNA, 122 bp, Homo sapiens
cccaagtttcagcaatcgctggaagccactcaatcacatccagcctcgcgatgtgagacccgatatgttttcagcagttacccagcgtcctgcgggtctctccgccactcccgttacatgtg

SEQ ID NO: 275672 - DNA, 122 bp, Homo sapiens
ggcatcacagatgaagtcataaaaccctccccttcaaacgtgtgacttctcagcaaacaccgccacagactttcgtatcaggaagtcaatcttagcccagcaatgggtgtggtttcaaaata

SEQ ID NO: 275673 - DNA, 122 bp, Homo sapiens
aaggagtggctttgggacgctgctctggtctgtcctgtgaagagtggttatgccagtgttcgtgtcgggaaaacatttcccgtggtcgctagccctgtgcttatggtgatggaggggccttc

SEQ ID NO: 275674 - DNA, 122 bp, Homo sapiens
ccgctatggggcctggccatagtgtggctgcaggtggaggaccagaactaccacgcgccccgcctggtggccccactgctctcccacggctcagcccagctgcctctgccctgggatgcgcc

SEQ ID NO: 275675 - DNA, 122 bp, Homo sapiens
gatcggtgctgggcaccggcagttcccacgccgaggggcgttcacaccgcggccacgccccggctgcgctacaggacttctccggcccgtacgcgacccccaaacccggccgcaggcgcgca

SEQ ID NO: 275676 - DNA, 122 bp, Homo sapiens
acctctaccttattttcctgaagtagatggagagctccttcatctttctctgcccccaaacgtgtaccttctctgtcatataattcccatccctgaacctctgcatttcttcccccaagtct

SEQ ID NO: 275677 - DNA, 122 bp, Homo sapiens
tgccctcgccccctgggccggcctcccgtggtaagttgggaaggaagccgtgcaaggcagcgttgtgcagacttgctcagaaagattcctgggttcagacctgtgaatcgccccagggtcac

SEQ ID NO: 275678 - DNA, 122 bp, Homo sapiens
cccaccccgctccgtggtctacttcagtcggcctccagcgacagagtcctgtcccctcgccgccaccccactgagaggacaggcaacgaccagggccgggactcttcagagcaactttcccc

SEQ ID NO: 275679 - DNA, 122 bp, Homo sapiens
caacacgttagccatctctagttgttactttaaatttgtatttcaatttcaagtttggctcggtctaagaccttactatacttagcaaaggtgtgttttttgctggtaatttgcccttaaat

SEQ ID NO: 275680 - DNA, 122 bp, Homo sapiens
agcggatcgcttggtcgctggagccgatcccgccggggccctagatatagttggacccagcgcgctggccggagcgggcagctaccctactggcgcagcggccctgtgtggggactcctagg

SEQ ID NO: 275681 - DNA, 122 bp, Homo sapiens
cagacgtcattattggagtgactaaataaattgggccattacgaatatcaccctttatctcgtcttgtgtagagacaaagtaaacagattgctgttagcagagagttggataagactgtcat

SEQ ID NO: 275682 - DNA, 122 bp, Homo sapiens
gaggaaagaaaggtgtcggccaacggactttatgccttttcccggcgtctacagctgccacgaaggccgcctccaacgagaaacccgtagcgccaggcgcccctaagatggcagctgcggct

SEQ ID NO: 275683 - DNA, 122 bp, Homo sapiens
tctggggctgagcccacttggctctcctgccgtctccccaggaggcagcttgttctgaagcgcctgcgtctagtaacctgtcgctgccttgcttctagcgcctcttaggcctttctgatgtc

SEQ ID NO: 275684 - DNA, 122 bp, Homo sapiens
ttatgtgtggctgacacttctgcctcacacgacacgctgttggagtttctccctaggtgtcgagcctgagagatgatcaaaatctgccaagaaacagtttatctatcctgcccagacagata

SEQ ID NO: 275685 - DNA, 122 bp, Homo sapiens
ggttccccaactctgttttccccttcctctgtctttgtcgttacagtggccccccatatccgtgggagatacatgccaagacccccagcgcatatctgaaacagctgatagtcccaagccct

SEQ ID NO: 275686 - DNA, 122 bp, Homo sapiens
cgcctcgggccgcccagcgcagccggagtatccacctcgatgaccacgggctgagccccgcgccgccaccatgtccgtggccttcgcgtctgcccggccaagaggcaaaggggaggttacgc

SEQ ID NO: 275687 - DNA, 122 bp, Homo sapiens
ggctagagaggcactctgcctcacgctccactcaatacctgcagcagccccctcctgtcccggtgcccctgcagtcaggaaggggtctaccctgcaggaccccacactcaggtgtgcccttg

SEQ ID NO: 275688 - DNA, 122 bp, Homo sapiens
ggtcccccccgccgcagccatgtaccccgcgggccccccggccggcccggtaccgcgccgcggccgccgtcccctgcccgggccccccgcgcccgccccagcccccgtccccgctgcacggc

SEQ ID NO: 275689 - DNA, 122 bp, Homo sapiens
tcaacactggggcagtgggtggactttgcccggtgtggcggcaggaagagctgctagcaacggtattagctctgggaggacacttttttaaatatataatatatatttaaatagaaaaaccc

SEQ ID NO: 275690 - DNA, 122 bp, Homo sapiens
gggccgctgcactagcgcgaaaagggacccttcttccgggagtgggccccaccgcctcctcgggatgcccaggcagctccagccgccatattatcaacaagccgcccgcccggagttccggt

SEQ ID NO: 275691 - DNA, 122 bp, Homo sapiens
gcgcccaggcgcttggagatctcggagttgtgcatcttggggttctgctgcgccatctggcggcgctgagcggagctccacaccatgaacgcgttcatcggccgcttcaccttctccagggg

SEQ ID NO: 275692 - DNA, 122 bp, Homo sapiens
agtaaagtttggttaggaagagaacacaatggtgagaagtacaaactggcaaggctgcagcgtaaagtcaaggacaagtatgtctgtgataggagatgaggaaaaccattcctgtattaaga

SEQ ID NO: 275693 - DNA, 122 bp, Homo sapiens
gtgaaatgggtcccagagagtccacaggtggagaacggccttcaccaggcagccagggaacggtgtggggtgctcaccaacaccccgtcactgctccagaacccctggcagccacagagctc

SEQ ID NO: 275694 - DNA, 122 bp, Homo sapiens
atggaaagccagccttggcgattggcatctcaaccagccagtaggagcgcgcagcggcttcgcagggggactgttaacgtcaatgggaagggccctccccgggaagtcccataggacacaat

SEQ ID NO: 275695 - DNA, 122 bp, Homo sapiens
gaggagcaccctctctgctccgcaggggtccactgccctcacctcttcccggaactgggccgggcccagctcgtgcagtgagggcaccagaagcctcagtccacgaacaggccacccgacag

SEQ ID NO: 275696 - DNA, 122 bp, Homo sapiens
gcgatgacttcatccccgtagagggcgcctccctaccccgacagtggattttcggtcagccggtttgcccgggatgttttctttgactacttgcttctcactggcgccccaagtcactttga

SEQ ID NO: 275697 - DNA, 122 bp, Homo sapiens
agatccagacgaccgctccccaagcaaggacaacggcctcccaggcgctcattgtccacccgcaggagggtgcccgcagacattcaagaagatggttctcacgcctctcgccctctccctca

SEQ ID NO: 275698 - DNA, 122 bp, Homo sapiens
catttgatatatcttgtttatatatttaaatttctgtctcaacatattagacgtaaaccccgtaaaagaacaagtactttatcactttgttcattgcagttaggataaatctgtttcacaga

SEQ ID NO: 275699 - DNA, 122 bp, Homo sapiens
agaggggcaagcagcggaggcagcgcgggatacggaaggtggaagcggggcggtacctttcggagaaagctggcgaccacctgctcgaaggggtacttgtacacctggtgcacatccaccga

SEQ ID NO: 275700 - DNA, 122 bp, Homo sapiens
cctgcgctcgcctggagtgggaccttcgcgtgcacactggccttcccacgcgccccgctgcgatggcacccgcgccgggccccctagctcacacagtcggagcgtgctcagcgcgtggccac

SEQ ID NO: 275701 - DNA, 122 bp, Homo sapiens
aggttgaataaagggatctctgtgtgcgaatagcccccttcagacttccatggagcagagcgcagggcgtgatggctgcttggcgggcgtctggcgtttgtacttgcgtatgtttttaccct

SEQ ID NO: 275702 - DNA, 122 bp, Homo sapiens
ttttcagtgcagaagtttttaattttgaccgagccaaatctatcaatctaggcctggcgccgcgtcagcagagggggcggggaggcgagcgcggaactgggggaggggaaggggcggggatc

SEQ ID NO: 275703 - DNA, 122 bp, Homo sapiens
ccaacctctcagcagagatgcaaagctacctgtccaggatggcggactccagatgggccccgccctgtggtgcagaagtgagatttgctgctcctcctgcgtctgcccctctcctgccctcc

SEQ ID NO: 275704 - DNA, 122 bp, Homo sapiens
aaaaaaaagtgaaatttataggggcaggaagaggtatggaggataacttcagggaggccacgaaagccttatttaatctgactcagaagctgacctttgtatgtaaacctctgaatggaaaa

SEQ ID NO: 275705 - DNA, 122 bp, Homo sapiens
acgtattggaacatgcttctacttgaacagatattacaataagaaaagggcaaattccaacggctctttctccgggaaagtcaagttaaagtatgttaggatacaggagaaggctgggcaga

SEQ ID NO: 275706 - DNA, 122 bp, Homo sapiens
aaaaaaaaaaaaaaaaaaagcgagttgctcgcttttggttgctcctcgactccattaggtcggacggtttgtccctaggcacggtgacctcgcctagtgacaaacacgccaccgtgcaaacc

SEQ ID NO: 275707 - DNA, 122 bp, Homo sapiens
gaggaggagctgtgaaaatggaacggggccggcgacgctggagggagcgctccgaaggagcgcggaagaaagccctgcttagctacagccaatcaggagcgcccgtgcggcgcttatagaca

SEQ ID NO: 275708 - DNA, 122 bp, Homo sapiens
aggccctgctgagaatacaccagggaggaaccttgttctattctttgtagtcaccatgcccgcttccagcattgacaccattctaatgttgacaccttgatgttccaccaggcaagtcagaa

SEQ ID NO: 275709 - DNA, 122 bp, Homo sapiens
ggcaaagcataggaattaaggccaactagagtctccgtgtcagccctgttgcatgcccgccgggaagccacggtcaaggcagcctccttcaaacttcgttttttgcatctctgaaaggaggc

SEQ ID NO: 275710 - DNA, 122 bp, Homo sapiens
atcatccagccatgaaagcacagctgagtgatccaagaggcagttccaattgttgactaacgtgtacctgcctatgtgagtgtgtcctatgggaactcaggccttagaatggtttcaaagta

SEQ ID NO: 275711 - DNA, 122 bp, Homo sapiens
tcagtctctcccgtgtttgactgactcccggccgcatacccagtccctgacacacgggggcgcacaacaaatatttcccgaaagatccaggagcagcatctccaccagcaagctgggctgct

SEQ ID NO: 275712 - DNA, 122 bp, Homo sapiens
ggccatcttggctgtcgccgggcacagctggagccggaccaccgagctgacctcgggctacgggggcctcttggaacctgcgttttcaaacttttgcagggtttctgtgcgctggaagggat

SEQ ID NO: 275713 - DNA, 122 bp, Homo sapiens
cggctggtcgggcttcatccagcaccaccgcatccacacgggcgagaagccctacgagtgcggccagtgcggccgcgccttcagccacagctcgcacttcacgcagcacctgcgcatccaca

SEQ ID NO: 275714 - DNA, 122 bp, Homo sapiens
ctcggtccgggaggtggtcctccgcgcctcccggcccacccgagaccccacgattgcgctcggttgccctggagatcccatgtcttcttgggtgaaatgagttgggtcccgatgcgagtcat

SEQ ID NO: 275715 - DNA, 122 bp, Homo sapiens
ggactggcagagctgaggccacctggggctggggatcccactcttcttgcagctgttgagcgcacctaaccactggtcatgcccccacccctgctctccgcacccgcttcctcccgacccca

SEQ ID NO: 275716 - DNA, 122 bp, Homo sapiens
tcatgagctgataaaagccggcctcctagtcccctgcaggagcccagtgctctggggtcccgggagctgccctgacctctcagaacgatcttccaagcatcactcaacagaaccagaaacac

SEQ ID NO: 275717 - DNA, 122 bp, Homo sapiens
gctggggcttccgctgccctctgcagacctggtgtgcgatgacgctgcagcgggggaccgcggttttaaaggcatcatcggtagaaacggcctcacgcatttccataattcactctgcatca

SEQ ID NO: 275718 - DNA, 122 bp, Homo sapiens
aacttggatgttccccagagcgagcgcaaggtcagatgagtttttcaagataggagtgatcggtctttcccagggtggggcccataatgcaagacaattatagattaacgggtaataagtaa

SEQ ID NO: 275719 - DNA, 122 bp, Homo sapiens
ggcgatccacaggggccacaggaacattccagggtacttgaggagaatcccctcagacagcgggcagggcaggataacaatctccggaattcccaagcccgtttccctcactcaatgccttc

SEQ ID NO: 275720 - DNA, 122 bp, Homo sapiens
agtgatctgcccacttcagcttcccaaagtgctgggattacaggcatgagccaccgtgcccggccaaggcccttctttatagcagtgtgagaacagactactacactcgcaaaggctccctc

SEQ ID NO: 275721 - DNA, 122 bp, Homo sapiens
gactggcagcagggtcagtggccatccttttctaccttcagctgttgtgcatctcctccacgttttcctggagtaaaggaacaagcaggttcttatccaaatacccaacctgtgaagatgag

SEQ ID NO: 275722 - DNA, 122 bp, Homo sapiens
ctgcctctccaaggagctgaggaagtccggtcccaacctcgcccctgccgtcacgaacctcggtgcactggcccagggaaacaactccagttttccgttccgccgaagtcagtcccccaccg

SEQ ID NO: 275723 - DNA, 122 bp, Homo sapiens
gaatctgcttggcagccgagggcggtgacgttcctgtagcttccgtggggaattcaggtgcgtgtgtgtgcgcgtgtgtgtgcgtgtgtgtgataagctgttttcattttaccatcctaaaa

SEQ ID NO: 275724 - DNA, 122 bp, Homo sapiens
taatgaacgaagtccttacttttatgtctgaggcaggtgagtatttctgagtctggtggtcgtgtcacacagtcatcatacacactattttagatgcaaagatcctcttttcaacaccagga

SEQ ID NO: 275725 - DNA, 122 bp, Homo sapiens
atctcatatgatcacaaggcagcacagaggggacattctctcccctggcgaggtgagcatcggtcagaacagacactgagggcagccttaacaggcaatgcctggggccaaacgtccagaac

SEQ ID NO: 275726 - DNA, 122 bp, Homo sapiens
tcgctccgcccctgcgccgcagctactgccgacaccgcgcacgccgcggtgcgacatcgtcgcgcgccgtcttcgtccccgcccgcaggttccagagcctgctacccctcctcttggccgcc

SEQ ID NO: 275727 - DNA, 122 bp, Homo sapiens
gcagtttagaaaaacaaagttccttacaaatgtcgggtattagtattaaatccccacccacggtatctaataatgggttttgcatttacttgctgccaagagaaactgcatgcttgaatatt

SEQ ID NO: 275728 - DNA, 122 bp, Homo sapiens
aggccggtctcccagattggccttctctatttcggccaccctgggcggtccgtgacttggcgtcttctgccctcgcctcctcattcgggttcccctaggggtctctcccgggcaggctgcct

SEQ ID NO: 275729 - DNA, 122 bp, Homo sapiens
ttggaggctggtgcagttgccaggatgccaggacaccagtctgctggggtggaagtgtgccgtgtgtggagggagagaagcagaggtgactccccagcaatgcctcgtgcccacgcccttcc

SEQ ID NO: 275730 - DNA, 122 bp, Homo sapiens
aaggaaaaacaaaggctattctgggctcccggcagtgcttgtggtgggggttatttgcagcgttaccatggcaggctgccctttccaccacggccaccccgtgattttctctgaaaactgcg

SEQ ID NO: 275731 - DNA, 122 bp, Homo sapiens
taggaacgcgcggtgcctgttccagcataggaacgcgcggtgcctgttccagcataggaacgcgcggtgcctgttccagcataggatcgtgaggtgcctgttccagcataggatcgtgaggt

SEQ ID NO: 275732 - DNA, 122 bp, Homo sapiens
aagctgttgttttgaggaaaaaggctatatggaacaaggtacaaccccaaatctggagtgcgttatattcaaaggatgtggtcattccttgactgacaggccactcatccataaacaaagca

SEQ ID NO: 275733 - DNA, 122 bp, Homo sapiens
cgggcaggcagggcagaagagactacagaagcacaggcgcctgctgggccggccttggctcggaggggctcaggaagacccaggaagtagcaggccaggaaatacctttaggtcctgccccg

SEQ ID NO: 275734 - DNA, 122 bp, Homo sapiens
acacaggcgcagcggcgaggcggccagcaccacgcgctccggggccgcggctgcgccgcccgcccgcaccgccaccacgaagcgcccacgctgccgcagcagccgctccagcgcgtcggcgc

SEQ ID NO: 275735 - DNA, 122 bp, Homo sapiens
cgcgttcagcgaacgtttgctgaatgtttggcgccctcctcgatggtgcggactttatctcgtgctagatcatagcgaggagagattactggagagcaaggaggatcagggacttaaatttg

SEQ ID NO: 275736 - DNA, 122 bp, Homo sapiens
tcttgtgcttgatgacaccaaccacgaacgggaacggctggagcagctctttgaaatggccgaccagtaccagtaccaggtggtgctggtggagcccaagacggcgtggcggctggactgtg

SEQ ID NO: 275737 - DNA, 122 bp, Homo sapiens
ccaggcacagtggctcatgcctgtaatcctagctctttcacaggtccaagacaggaagatcgcttaagcccaggtgatggaggctgcagtgagctatgatcatgccactgcgctgcagcctg

SEQ ID NO: 275738 - DNA, 122 bp, Homo sapiens
tcggcggcctggcgccaggcggagggggcgggtccagggcacggagataatcgaggaagtcgatccgccgagccctattcacctaaaagagcccgaacccacacgcagtttagatgcatctc

SEQ ID NO: 275739 - DNA, 122 bp, Homo sapiens
cccctctgcttgcaaaactgtgccagagatgtaattcccaacctctgttaaagtccttcccggggctactcccgagaacactctcctggaatgtttaaggcccaagtcctgcttgcagcagc

SEQ ID NO: 275740 - DNA, 122 bp, Homo sapiens
ttggtccctccctccccagcccagtctctggtcaaactggattcctggctgttcccagaacgagctgcctttccccaccttgccacctctgcccttgttctctctgcctgaatgtcctcctt

SEQ ID NO: 275741 - DNA, 122 bp, Homo sapiens
cccttgctgttccgcgccgggacctccgccagccgtcctgccgcagccccgactggcccgcgtgccgtcagagggaggcccgctttacaccggcctgagcctccattttgagtagggggttc

SEQ ID NO: 275742 - DNA, 122 bp, Homo sapiens
aagccccgagccgctgtctcagcagtggacagcgggcatgggtctgctgatggcgctcatcgtgctgctcatcgtggcgggcaatgtgctggtgatcgtggccatcgccaagacgccgcggc

SEQ ID NO: 275743 - DNA, 122 bp, Homo sapiens
cctccggccgggagatgcggatagacggacgaggcagccaattagagcccggccagacaccgcgacccctccccccacccgccccactctcgcccactggcgattgggttgcgggacgcgcg

SEQ ID NO: 275744 - DNA, 122 bp, Homo sapiens
cagcagaatccaggccatacctgccaaaaggattggagggtgagtctttgcagggtggggcgattgagctagagtcagtggttcccaaacctgagcctgtcaaaaatctcaatttgcagact

SEQ ID NO: 275745 - DNA, 122 bp, Homo sapiens
ctgggttaagtgctcatgagtcacagagaacctgccttagatctcagtttcagtgactttcgtcagagagataattggagggattctctaaccggttgtcaagggctctctttcttgattgg

SEQ ID NO: 275746 - DNA, 122 bp, Homo sapiens
atagagactcgcgaagtgccgctgtgttggttgtgaaatttccctcttgtagctgtctctcgtcagatttagaatttcttaggacaacttctaaaactatatttctatatgttatgtgcttc

SEQ ID NO: 275747 - DNA, 122 bp, Homo sapiens
tggaggggaaagaggccactgcagctttaagatttctctcgggcgtcccggttgccaaggcgcggttgccagcgccctgcgcggagctgcgtcctgctttagcgcgcggccttcgggtttcc

SEQ ID NO: 275748 - DNA, 122 bp, Homo sapiens
ccgctgctgcggccgcagctacccgggcacccgggaaaagcgcgcgccccgcgccaccctcggccccgcctctgcggccgctgcccgtcgcacaaccactctccagcctggcagggcggtct

SEQ ID NO: 275749 - DNA, 122 bp, Homo sapiens
taggacacatttcctgtattctcagaatccacctgttgaaatgcattccatcctttaaaacgctagtcctagcttatttgacatctaatcgtagcgttactactgtgttttctcctccggga

SEQ ID NO: 275750 - DNA, 122 bp, Homo sapiens
gctgcgctcatggtccttgtgatcacagttcctgcaataacctaggagaatgtttgcccacgtcataccctctccctttggtgtccgcggaggctgtgaagccagcaacacgacgttttgtc

SEQ ID NO: 275751 - DNA, 122 bp, Homo sapiens
tgaattttcccaagctacatggtgcacacattttggatcaagttcaaactcttctggcaccgggcgccttctgggaactggcatggacgaggcaggcagcggattctgacggcgtcagcagc

SEQ ID NO: 275752 - DNA, 122 bp, Homo sapiens
ttatcctgtatattaaataatagtggctgtgccagcggcttgttaaactgtaagatgtgacgcaaaataaatgaaggcgatgacagtgaaaggggagagatacgaggttccacagctggagg

SEQ ID NO: 275753 - DNA, 122 bp, Homo sapiens
gggccgctttcttctgcttttcttgctaacacctcccaaggaagcgaccgtgtggcatggcgaggggtggggaggaatcggctctagccaacgggagaaacattcagggcacccatcgcccg

SEQ ID NO: 275754 - DNA, 122 bp, Homo sapiens
ttgagcacagcagctgctggccggggtgctaagcccctcactgaccagggtgggcggggccggccgccggccgctctgagtgcaggcccgccgagaccacgcccacccggaacttgcgctgg

SEQ ID NO: 275755 - DNA, 122 bp, Homo sapiens
cggtcctcctcttaacctagagaaggccctgggttattggtgttgttcttggcggaccaccgagcccctcagcaaacagggaggtgagtgtgcacccggtctaggcctgtttgtgttggcct

SEQ ID NO: 275756 - DNA, 122 bp, Homo sapiens
tttcccatcctccgaactatcgtccatggagtgatctccagtctcttcttcatctcgtatcgtttcgggatccgtatccatacttttattttcactttcttcctcttcctcctcgaactcct

SEQ ID NO: 275757 - DNA, 122 bp, Homo sapiens
caacatagtactggaagttctagtgaagcagttatgtgagaaaaataaatacaaggcattcgtatttgaaaggaagaagtaaagctatctccatttgttgatgtgatcttatatgcaggaaa

SEQ ID NO: 275758 - DNA, 122 bp, Homo sapiens
tttctgctacataaagttgttacaaaacggggcgagtgaaggatcgaagatgaaacactacgaattaagcagaggttctctgtggtccctgacaccctcaggaggacgtcaacccctgacga

SEQ ID NO: 275759 - DNA, 122 bp, Homo sapiens
gaaaaataaaaaacatcattgcacagctcaagaaaaatataggccgggaatggtggctcacgcctgtaatcccagcactttggggggccaaggtgggaggattgcttgaggccaggagttca

SEQ ID NO: 275760 - DNA, 122 bp, Homo sapiens
cagtggggccaggggaaggggtgttgaagtcaccaaaggccaggccaggcctctgctgcccgttgccggtggcccgggagtcgactctgcttctgcctcgcacccggcctgggggtgttccg

SEQ ID NO: 275761 - DNA, 122 bp, Homo sapiens
gcgctcagcacccagggaaggcgcgtgtgtccccgatgctggctcctccctgagccccgacggctctcgaggttctgagcctgtggcctgcacagggaacttcctctccgactgcatttatg

SEQ ID NO: 275762 - DNA, 122 bp, Homo sapiens
taccgtggtaatttggctgtgctttatcatcgctggggacacctagactcggccaagaaacgctatgaagtctccttgcagcttcaccccacggcatcaggaactaaggagaatgcaaatgc

SEQ ID NO: 275763 - DNA, 122 bp, Homo sapiens
actgctgggctatgcaactctggcaggcaccattccacacaagagtacatgaaggctgggcgcagtggctcacgcctgtaatcccagcactttgggaggccgaggtgggcagatcacgaggt

SEQ ID NO: 275764 - DNA, 122 bp, Homo sapiens
tgcgggagtgaggcggcagcgcgtggacctgccggccctcctgggttggggcaggcttggcgggaacagcccaaagaccaacagtggttcccaacaagagctgggagggagtggggtcacca

SEQ ID NO: 275765 - DNA, 122 bp, Homo sapiens
ttgaccattgattggcagtagtttcagtttctctgtcctcagcttctgtgattattaggtcggcgcatcaacctaataaatatgtcatgatgtctaagcaaaaactctaacgtcatctagag

SEQ ID NO: 275766 - DNA, 122 bp, Homo sapiens
tccccgcggagggcctggcttgctgtccgctcgcttttcgcttccagagtcggagagacgcgactttggggtcgatgtggagagagaaacagatgccctaggcgccccccattcagggattt

SEQ ID NO: 275767 - DNA, 122 bp, Homo sapiens
aagacagagcctgagaccacagctgggctgggctggtcctgctgctgctctgacagctcccgctccacccccacccaccactgtagcccttgcgaaatccctcagcctgtcacgggtcagta

SEQ ID NO: 275768 - DNA, 122 bp, Homo sapiens
gctctgttaaccgtgtcctggggcaggcggcacttttgctattcatctacggatgaggcccgacaagctatttgcctccacagcggaatcttcctgctgctcttccggggcaggaatgcagc

SEQ ID NO: 275769 - DNA, 122 bp, Homo sapiens
tagctcttcttctacaattctttttcttttgcaacccttcaggtctttgtcctgtaaattcgtagaaaaactgctggcaagtggtcagcaactggacctttgaaaaacagtacaatcacccc

SEQ ID NO: 275770 - DNA, 122 bp, Homo sapiens
ccagaacagccaaggctctggtaagggtgtaggacggagcagaagggagctggaaaaacacgatagtaaaagaaagtcaggagaaaatccgggtggaaagacgagagggagagctagagctc

SEQ ID NO: 275771 - DNA, 122 bp, Homo sapiens
agccaccctcaattcttaccctttcacagctggggagtggagtctgggcctgaggtctcccgtgcgcctctcggcgcctgcgcccgcgctgtgcaccgccccgcgcctgcgcccgcgctgtg

SEQ ID NO: 275772 - DNA, 122 bp, Homo sapiens
gtaacattacaagacaaagaggaaagtcaaaataccttactccaaaacatgtttctttgccgtatcttgaaatggccgtggaaagctgtcctttgtggggaaaaatttacatctgtaaagaa

SEQ ID NO: 275773 - DNA, 122 bp, Homo sapiens
agtgcctgcagctcctctcagcactacccgctgccgcccgccggactgtcgagcaggtcacgcagcctttccctggccggaccaagaggctcgccaagaggtagtgcaggggtagggcacca

SEQ ID NO: 275774 - DNA, 122 bp, Homo sapiens
cattaggaagtcttgttgtttccaaggtacgcttgttttccaaggaagtgcctcggtggccgtctcatggggcagaaaaagatctgggcttcctaatccgatgtcaaccacagcagcttcaa

SEQ ID NO: 275775 - DNA, 122 bp, Homo sapiens
aattgaagattaattgaaggtcaaggaactatttatcagtgccaggcactgctctcagcacgccgaggagtaaaaagcagtctgggtatgaagaagctgatgggaaataagaaagtataaac

SEQ ID NO: 275776 - DNA, 122 bp, Homo sapiens
tggaggaagaaaaccaagagtactgttttgaacaaaatgttgaagactcctggtaaatatcgaagtgtaaatatcaaataggaagtcagaaatatgagaatctggagtttaggaaagagaag

SEQ ID NO: 275777 - DNA, 122 bp, Homo sapiens
tcagccagtctccccaaacatagtaccctaccggctcttggcttccctgccacgtgcgggcgttgctccaagccccaagccggcattgccgcctcgcggcaccgctccagctcctccgcatc

SEQ ID NO: 275778 - DNA, 122 bp, Homo sapiens
aaagcaaaaaactgaggagctaagggtgggagggggaatgaaaggatctcagaatgtgggcgtcgtgggtgggaaaagggatgccaggacaccagaagagcaatacaaaacagctcccgtga

SEQ ID NO: 275779 - DNA, 122 bp, Homo sapiens
gcaaaccacacccacggcgaggtgtcattttgtgcccactagaaaggtgcctcgcacccgcggcaggcgtgtggacagttcagcctggtgttgctagtaagctggacacacgtgacccagca

SEQ ID NO: 275780 - DNA, 122 bp, Homo sapiens
aactatcgcagtcggatcccggcagggtgctgcctagcaagcagcatgtcccttaggcatcgccttcccagataagcagcaaaaaccgcagcccgacttgcctccggagacgggccggatcc

SEQ ID NO: 275781 - DNA, 122 bp, Homo sapiens
tctcttccaggttgctaatacgagggccggtgctgtcctccaggctgggaagtgggagcgcggtgtcagttactatgggaactgcctcttggccaatcaccgagagaaagaggaggtgtttg

SEQ ID NO: 275782 - DNA, 122 bp, Homo sapiens
gatttaaacctcctaattctgctgatttcaatccctgtgctttcaaccagtatgtaattccgcatccccttcaggtgaaggaccttgtcctgtttgtatcttcccaatgcttggcatctggc

SEQ ID NO: 275783 - DNA, 122 bp, Homo sapiens
gggacacacttcccagcagccacgtgtccactgtgtgggagtcagtgcggccagggactccgtgtcctccacccagtccccctgaacagtgctccatttggctgaagaggggacaggccgca

SEQ ID NO: 275784 - DNA, 122 bp, Homo sapiens
gcatcttgattgactgatcgccagctctacagcggctccaatgtgaatatagcctggccacgtattatgtagccattaaaaatagtggcattgtgaaataaaggtctatgataggctactag

SEQ ID NO: 275785 - DNA, 122 bp, Homo sapiens
tggggagcaagacccctcagcctctccaagggtcacattgatgtaaatgaaggtgtcatccgctcttgtagggaacagtcacctctggctttaccttcatgcctttttgaattgtaaagggc

SEQ ID NO: 275786 - DNA, 122 bp, Homo sapiens
tgggggccctgatgccggccgccatgatcgccccggtggagtgcccctctgcggctgcttcggacgcatttgcgatggctagtcccatgaatggagaagaatgcatgctggctgttgatatc

SEQ ID NO: 275787 - DNA, 122 bp, Homo sapiens
gagaacagctcacctctggcatgatctcgatcttctcgtaccgacgtttgaagggcagggcgagaacctcagcccgccgataggacatggcggggggctggcagtcgatcatgaggtccatc

SEQ ID NO: 275788 - DNA, 122 bp, Homo sapiens
tgtgtaacctctccatcatttgtctttagcgacttcagttgcttgggaagttttataacccgatatgtagatcgtatagtaaatgtctaaaatcttaaagggagcttgatcataactaagat

SEQ ID NO: 275789 - DNA, 122 bp, Homo sapiens
acaaacagccacaggctaggagcagggccacaagatggaggctgcaatgacggcagtgatcggggtggggtcgtcgtgggaggttttttttttttacaaatataaaaacattatatatattg

SEQ ID NO: 275790 - DNA, 122 bp, Homo sapiens
gcaggcggctcaggtcgcggccagccaggtagtaaacgagggtgacgccaaggtgcagagcgcagacggccacgagcaggcggcaggcccgctgtagggacgcgcctggcatcgcggcgctg

SEQ ID NO: 275791 - DNA, 122 bp, Homo sapiens
tttaattaattaggttttaattggcttctgtttcacccatttcacagccccatgtcttaacggagagcttttttatttatttcaagatatagaaatctctactgaagaggaaaaggatactg

SEQ ID NO: 275792 - DNA, 122 bp, Homo sapiens
tcggaatgcatgttgttcagggtccgcaggtccggcagcttgagcagcagcttggtgaagcgggaagtctccaagggccggttcttcagcaccagagcccgaagagcccgcagcagcgtctc

SEQ ID NO: 275793 - DNA, 122 bp, Homo sapiens
gtggcaggagcataacagatgcctttgctgattacaaaaacctaaagactccatcatagtcgtccccaggcagggtatcacaatgaaagaggcaaaagtgtctgaaaaacactgtgacgcat

SEQ ID NO: 275794 - DNA, 122 bp, Homo sapiens
tagtataaacagcgctaaaggccttattagagaaggctgtggcagtttctccagggcagacgtcgcctcccgttcaagcagcgtcccttcccacaacccccgtgcagaaggcgcagcgcggc

SEQ ID NO: 275795 - DNA, 122 bp, Homo sapiens
ctcatccttcccctgccccaagtgggcactgggttcactctgcttaactgtttgaaaaaccgtcagactgttttctgaagtggcggcagcagcttccacgccacccgcagtctcaggcttca

SEQ ID NO: 275796 - DNA, 122 bp, Homo sapiens
cgggagcaggcgagcagggcgccacgtgctcccccagagcagcctcccagtccccgctgccgtccatcttggagccgggcaaagacgccacgtggggcctacccttgctccgctccacgagg

SEQ ID NO: 275797 - DNA, 122 bp, Homo sapiens
aaatatgagtttggtaagtcctgagctcccgtgataaggacttggtactggtgaggatgccgatgttgagttgcatgacagctgtttccactctgcttaaaaacactcagctccctcctaag

SEQ ID NO: 275798 - DNA, 122 bp, Homo sapiens
ctctcctccgccacccccgccgtggggctccggaggggacccagctcctctgagccataccgaccatcgtccagccctcctacgcagatgctgtcactggcagagcacagcccacggggatc

SEQ ID NO: 275799 - DNA, 122 bp, Homo sapiens
gcgttcactccgctggggcttctcatgccacgttttttctccaggtgtgacttggtcggacgcggatcccggcagccagctggggcttagtcttctgtgaaagagtaaagtgcctcctgcgg

SEQ ID NO: 275800 - DNA, 122 bp, Homo sapiens
acgacatctggatgggttcagtttgaaatcagaaggtatttctttgggatactgggagatcgagagttggaaaaaccttgttactgtcctcaaaggaagagaagggtcagcagagaagtcca

SEQ ID NO: 275801 - DNA, 122 bp, Homo sapiens
tttcaatggaggaataagttcagtttttccctcctgcttctctagtttcaaaaccacacacgttttgtcagaaagttgccaatattcttgtgaaacattcaattatcgtatctcctcccaga

SEQ ID NO: 275802 - DNA, 122 bp, Homo sapiens
tgattccgcccgcagactctttgctcaagtacgacaccccagtgctggtgagccggaacacggagaaacggagccccaaggtaaagacgggggctcgggagacaaaggagcctcgaaactcc

SEQ ID NO: 275803 - DNA, 122 bp, Homo sapiens
ccggagagagagtgagggatgggcagagccaggcccaagtccccgccggggcgacggtcacggtgcctcaccctcaaccgcctcacccagaccttccgacccaggaacagctgaactcagcc

SEQ ID NO: 275804 - DNA, 122 bp, Homo sapiens
gcagttcacgtgccgcacggggcggtgtatccggaaggagctgcgctgtgatggctgggccgactgcaccgaccacagcgatgagctcaactgcagtgagtcaggctgggagccccggtctc

SEQ ID NO: 275805 - DNA, 122 bp, Homo sapiens
aaaatatttaaagaaaattatattatacaataaaaccccgcccccctgcattcggggcagcgacactgggggaacgactttagaatttgcattgggtggacagcaaatacttccgtaaaaca

SEQ ID NO: 275806 - DNA, 122 bp, Homo sapiens
ctgcccgtctgctcctgtacttggctgtcctctgggtgtgctgtactgagctcagggccacgtcttcagatccctacaactctttgcaactcttactttgtgggacaattaaaattaggtct

SEQ ID NO: 275807 - DNA, 122 bp, Homo sapiens
cctcaatgtcatctgctgccaagtaaacccatttcccatctcattctatcctcaatgggccgagggccagcaagagcagactctcactcaccatagaagcagaagaagggcagcagggaaga

SEQ ID NO: 275808 - DNA, 122 bp, Homo sapiens
taattggcaaggctttactattttttcatttaattttagcaaccaattatagggtgaaaacgggttcacacagatgcaaggagcctggtcaatcaaaaatcattgacacctggcagggcacc

SEQ ID NO: 275809 - DNA, 122 bp, Homo sapiens
ccgaggggacaacgggacgaggggataacagcagccaggacccttcagcagggctgggcgcgctccaggcccggggcagggcggcgggagctggtgcaccgccgtcgccggcccgcaggggg

SEQ ID NO: 275810 - DNA, 122 bp, Homo sapiens
gggtggctctcaggagccagcatggcagcctcctcaggacgggtactcaggaatttcgcccgcagggactaacaccacttggacccagggactccagcttcactccgctttgtgcactgggt

SEQ ID NO: 275811 - DNA, 122 bp, Homo sapiens
gatatttatagactccgaattgcatttggttccgctttccgacacagttatcttcttgggcgtggattaaatgaagatctgggtgttgaaagacatttacataagtgctgtttgtgaacagg

SEQ ID NO: 275812 - DNA, 122 bp, Homo sapiens
ccccttctttattgttggtccgggagtaaggctcgaaggccgaggagctcagatatcgggcggagagttcttgcaaattcccagctagcgaaccagccattgttaacggggcggaggacagg

SEQ ID NO: 275813 - DNA, 122 bp, Homo sapiens
tgtcaattttggcttttgttgccattgcttttgcctcatttcagagagaagtctggtatacgcttggaaacttctgtgtctatcatccctaagaacattactgtttattgagagtttaataa

SEQ ID NO: 275814 - DNA, 122 bp, Homo sapiens
ccaaaccgcagaggtcccatgcaatctcatgctgacaggattacaggcatctctgtaagacgtcgaccaccctgacctgaaattcatagactgaagaaactcataggaccaacacagtgagc

SEQ ID NO: 275815 - DNA, 122 bp, Homo sapiens
cgcccgtcagcagcacctcctgagacaggtccggtcatgcctggctggaagcggtctaatcggtgcccattgctctagttctcagcactcactcacttgcatgtgcagtgggaggaaggggg

SEQ ID NO: 275816 - DNA, 122 bp, Homo sapiens
tagcatgggattgttttcttaaaagccgtgaaagggaaaagaatcaatattagggctttccgaatggcagctttttacagagcccccccagcacgattgattatagctgcttttgtaaagga

SEQ ID NO: 275817 - DNA, 122 bp, Homo sapiens
aatgtctgctgcatttcctccaagagaggagaagccagggcctgtgggagagcccaggaccgtggccacagccctgcagggtccccagctcctctgcggctgcctccctgggaccggatccc

SEQ ID NO: 275818 - DNA, 122 bp, Homo sapiens
acttgtaatgcccagcactttgggagaccgaggcgggaggatcacttgagtccaggagttcgataccagcctgggcaacatagtgagacccggtctctacaaaaaattttaaaattagccaa

SEQ ID NO: 275819 - DNA, 122 bp, Homo sapiens
ccctggacactcaaaatgtctttgaagagtcacgctgtgaggtcaaaaagttagggtgcacgcagaaaggcgcatgtagctttgcatcggtgaggcaaatacctatccctggaggaaggacc

SEQ ID NO: 275820 - DNA, 122 bp, Homo sapiens
caaaaagaaaaaaaacccaacaaacaaaaagaaaaagaaaaggccttgctaggatggtgacgtttttgctgagatttgctcccagggacgggccagccatttgaagacatgtcagaaggaag

SEQ ID NO: 275821 - DNA, 122 bp, Homo sapiens
tccccgggcttggggagggggcggaggcccggcgtgacaagcggcccagactcccgtgggcgccgcacacctgttgtttgcagcagccagcgacccgcactaccgctctcggcgggcgggga

SEQ ID NO: 275822 - DNA, 122 bp, Homo sapiens
gactgcaacctgctctcatgagtcacagcaggtgcctgtcgagacccacacggacccgggcgggcaggacctcggatgctgactccctgtggggtcaggacctccttcctccaggttctgcc

SEQ ID NO: 275823 - DNA, 122 bp, Homo sapiens
aaaactgtactttatcactcccaaagcctgcccttggctggaaacagatgttccaaaccccgtccgctccgcagctgcagcgtgcctgcttccggagccgcttgtctgtcttcagggccggc

SEQ ID NO: 275824 - DNA, 122 bp, Homo sapiens
gatgactgagggcaggccgactcctggggcacagatgcacatagtgggagcttgtggacacgctcctctgagagtacttaagtagggtggtcagttgagagcagatgatgggggatcttatg

SEQ ID NO: 275825 - DNA, 122 bp, Homo sapiens
gcagttaccgggctgcgcggtcccaacgcagcggcgagcgggaggcccgagcctgcgcaacgcaccgcccaccgccgtcggccctgcctcctctgccgtgcccccagttgcgggagcgagcg

SEQ ID NO: 275826 - DNA, 122 bp, Homo sapiens
gagtggccacgcttggtgggtgatggggcctgcctggggggcatccccaccttcccccaccgtggagaccccactcccagcaggagtgccacgggtgtgttgacttccggcagatgggaacc

SEQ ID NO: 275827 - DNA, 122 bp, Homo sapiens
gaccgggcttcggaggtccccggggtgagctcggtgggggcctgggaaggacgggcctggcgcggccgcaggacgcagggcctggagagcggggccccgccgcgctgggaggggccgggtgg

SEQ ID NO: 275828 - DNA, 122 bp, Homo sapiens
cggtgtccccgggggagggagacgcaaaggcccttcctggaaggcgacaccgtcccgggccgttgcatttgtgagagagagccaaggcagtatcctccaaaggttgggcctgggccaccctt

SEQ ID NO: 275829 - DNA, 122 bp, Homo sapiens
tacaacagcccaagcgttcctcgggaagcggaatggcgtgtagccggaagttcatgcaggcgttggggctgagctagcgagccaagagctttgacctcctctgtacacgccctctagcgggc

SEQ ID NO: 275830 - DNA, 122 bp, Homo sapiens
gagtgctcaggggaggggtgtggagcggctggaatcccactgatggcccctgagggcctccgaaaacgggcagatcccccaggcgcctggcccagcctacagggcctggagcacccgcctcc

SEQ ID NO: 275831 - DNA, 122 bp, Homo sapiens
gctcgccgggcccccacgtgacctactgcgcgggccgccgcctccaccgcgcccaggccccgcccccgtgacgtctcatcgccctctgcctgtccgagcgttcggctcttttgcgtttgctg

SEQ ID NO: 275832 - DNA, 122 bp, Homo sapiens
ggctccttattatggcaattaattacccagggacaatggagcacagccctgccctctgcccgcgccttccagtgacagggggtgggcggagggcgccgggagggggaagttaagcggctgcc

SEQ ID NO: 275833 - DNA, 122 bp, Homo sapiens
tgctatttcctgactgacttccgcacagctcccctgaggggctttttgttctgggagggccgccaagggcatgggctgcacccaggaaaccgcctgggagcctgggtcctttttgacattca

SEQ ID NO: 275834 - DNA, 122 bp, Homo sapiens
aaagaaagacaaatactgtatgatctttcttacatgtgaaatctaaaatagtcaaactcacggaagaaaagtgtagaatggtggtggccagggcctgaggcataggagaaatgggggagatg

SEQ ID NO: 275835 - DNA, 122 bp, Homo sapiens
cttccaccccatgcacacagcaccgggacattagctgtggccggagccgcccggggccaccggacaccacccccacgcccaccgccttggagcgcccgcgagctttcccgaccgcctccctg

SEQ ID NO: 275836 - DNA, 122 bp, Homo sapiens
gtattttataaaaacattatgagctgagcacagtggtgcacgcttgtagtcccagctattcgggaggctgaggcgggagaattgttctaggagttcaagaccagcctgggcaacatagcaaa

SEQ ID NO: 275837 - DNA, 122 bp, Homo sapiens
agacccacaggctggtggctggggaggtgggggtaaactcgcaagcccattctcaccccacggtctccatgcctttgcgcatgcgtaacacttcgagccagattctaacccggtccggccca

SEQ ID NO: 275838 - DNA, 122 bp, Homo sapiens
agttcagtgacccctttgttccttgaggagagaggacctatttctacctaaggacattcccggaaggcaatgggtttcaaacaatatcctgaagagactcatctcggggaactaagcaggta

SEQ ID NO: 275839 - DNA, 122 bp, Homo sapiens
gcgagagtctattggtcattggagctgcccatcaggagtgcaactcgggagcggattggccgcgtgaggcggggcacggcgcgacgaaaaaaggggcccaaggggtggggctgacgctgcag

SEQ ID NO: 275840 - DNA, 122 bp, Homo sapiens
cctgagcctccagttctgcgtcggtttcaaggctcctccctcctggtgaaagacagactacggggcgcctggaaaccggtccgagggcgcgcgaggcagaggagagggagcgagttgaggga

SEQ ID NO: 275841 - DNA, 122 bp, Homo sapiens
tggtgtgtgagtgtgtgtgcgcgcgcgcgcgtgcgtgcgcacgacagcagagtgtgtttgcggggctggggctgaatttggcagccagcccccaagctgacctctggagtggcccgcgtcgg

SEQ ID NO: 275842 - DNA, 122 bp, Homo sapiens
cgccgcgggagagcgcgtcgctattggctgtggggggtgcctgttgctggacggcacattcggttggtcagcgcagccgcagactccgcccacaatcccgggccgcgctctgggcgcggggt

SEQ ID NO: 275843 - DNA, 122 bp, Homo sapiens
ccaagccggcccttgcccccagctttggcagctctttcacttttggaaactctgcagccccggctgctgcacccacacctgcacctccgtccatgatcaaggtcgtgcctgcgtacgtgcct

SEQ ID NO: 275844 - DNA, 122 bp, Homo sapiens
caaactcctgaccttaagtgatctgtctgcctcagcctccccaagtgctgggattaaaggcgtgagccactgcacctggccagggtccctaaattattgtgcatggtttgttgttgttgttg

SEQ ID NO: 275845 - DNA, 122 bp, Homo sapiens
ctaaaattgaaatgcttacagaacttctgatgattaaaagaaactttgattctgtgaatgcggttgaagcagtctatttaagttatctactgatctttgtcaacagacaattagttattgac

SEQ ID NO: 275846 - DNA, 122 bp, Homo sapiens
aagggaggagatgcagacgagaagaaccgaaggactaggcggcatgccgaggtgctcttgcggaagccaaacttgggctctccgaaacaggccgggaaagctgaaagcacagtgacctcctt

SEQ ID NO: 275847 - DNA, 122 bp, Homo sapiens
gatcattgttccagggcagtccgtgcatcagagaggacttgccctccttcctctgagtatcgttcccaaatgtggtggagtggaaattgcaggacccaacccatggaggccatggggtcaga

SEQ ID NO: 275848 - DNA, 122 bp, Homo sapiens
cctagagagttcccaattcattcctttcctccggttactgagcgcctcctacatgccaggcgcactacagaaggtgcagttgattcagacagggccaccatgaccgtgaaaagggtgcttcc

SEQ ID NO: 275849 - DNA, 122 bp, Homo sapiens
taccagatcaaagcctgtgggtaatggaaacctcggggtagagggggtggtgccatgcagcggggcctacagagcctacttagctgaatgtcttactctgtatattctggagcttgaactgc

SEQ ID NO: 275850 - DNA, 122 bp, Homo sapiens
tcgcgtgctggcaagactggccgtggggaggcggcgcaggacgaagggccgctgtccccgcgctccttccagggcccagctggcccctcctgcagcagacagaggacggggcggagagggtc

SEQ ID NO: 275851 - DNA, 122 bp, Homo sapiens
agcgtggagctccagccgagatcccagcctacatcccagccagtagccagaacaccaacacgagacaggggcagacaagccttcccgagagtctccacccttggctctccgagctagtggac

SEQ ID NO: 275852 - DNA, 122 bp, Homo sapiens
acacggggacaaattattacaggatatctgcgccccctgttccgagtcactcggggccatcggttacttcagcaggttctctgcatcacggacccttttgaggctcaggtaaaagtttggat

SEQ ID NO: 275853 - DNA, 122 bp, Homo sapiens
tggaatttggtatcttattgtcagtcttatgtgcactattgaatattaatgctggtcagtcgtggctaaactccaaaagggagggggtataaggaggcgtgtccaacctcccttcctttcat

SEQ ID NO: 275854 - DNA, 122 bp, Homo sapiens
accctcttgaggtccaggatgtagtgacataagatccagggaggtcaacaccatctcactcgaccatcctctttaccaactctcagcagcttttctattccccctgaattctctcactgagc

SEQ ID NO: 275855 - DNA, 122 bp, Homo sapiens
ccgggtggccgcagcgccgcccctcctccatctcgcagtccggaccccagctccgcctgccgctctggatgatgcaggactagaggcatcatcgccatcgccaccgcctccgcgcatcccgg

SEQ ID NO: 275856 - DNA, 122 bp, Homo sapiens
ggacgtctgccttctctagcttcgagcagttggagttctgcgcccggccacgaggaagagcgacagagaaccaccaagacagaactttggccggctaccgtgcgcaccctcgctctagtcgg

SEQ ID NO: 275857 - DNA, 122 bp, Homo sapiens
tcaagcaaaatggcataactttggcttttcagaatattaaactagtgattctgcctttcccgcctctcaaataaatggtgtgtcaccctagaaagaaagataacacactccgcatacacaaa

SEQ ID NO: 275858 - DNA, 122 bp, Homo sapiens
agggccctcacgtgaggtgagccatgcagtacatgtcctcttgtgtctggctgccttcaccgagcactatgccctcgaggtgcgtccgcgctgcagtgcgtgtcagaactccctttccaagc

SEQ ID NO: 275859 - DNA, 122 bp, Homo sapiens
acgtgacccagggggacgtatctgtgtgctctgggaaggctgacatttcaacattcctggcgtctgaattcgacatctctcccaccaccgggaaggaggcgccccagaggggagggaggtgc

SEQ ID NO: 275860 - DNA, 122 bp, Homo sapiens
acgcaggatctttggttagctgcatccatatcgtttgcacgagagctgacggcacagacgcgtaagaggcgtgcacggcggggagctggggacagcagccagagcatggggccaccaaggcc

SEQ ID NO: 275861 - DNA, 122 bp, Homo sapiens
agattttatatataatgtccatattcagctgtgtgcattgaacacagcattaatgctccccgcgtaagaatccgatgacctacataagaaggaatttggatataaaggaatctttggcttat

SEQ ID NO: 275862 - DNA, 122 bp, Homo sapiens
aggccaaagctagaggaaagctctaaagtgtgccacacagtatacaaatgacactatcatcggctctgatcagaacttctgattttttaataatgcggctggaggttccattctttttagaa

SEQ ID NO: 275863 - DNA, 122 bp, Homo sapiens
tcctgcctggaagcatgctattttgggcctctgagcttttgcacttgctaattccttctgcgctggggagagctcaaaccctgcccgaaacttctaaaaatggtgcctggataaatgaaggc

SEQ ID NO: 275864 - DNA, 122 bp, Homo sapiens
ttctcaacagtaagaaccaatcaggcgcagtgcgcaggcgccttcagtgggtcctgggtccgcctcttccgcccggtgcgggcgccgattggtccgcgtggacacataagaggctgcgtata

SEQ ID NO: 275865 - DNA, 122 bp, Homo sapiens
cctgaggctggcgtttctaggccctccctgctctgatgctctggggtcctccctgggaggcggcgtccctgagtcctgctgaccttgcctccttccggcttctccaggccagggaggtgtgg

SEQ ID NO: 275866 - DNA, 122 bp, Homo sapiens
gaggagagacaagtcatactcattccaagggtacttttataggctcaaatatggaaaacacgtaacctcctcctctttcttaaaacatatttggcaaaacatgtttttggcattgaaggtct

SEQ ID NO: 275867 - DNA, 122 bp, Homo sapiens
tcctgtctttgtgaggaagccgtctctgcgcctgagacaagtgtccagggtcagggtggccggtggccagtgagagaggaggcagccaggtgaggacctctaaagtcagtggcgctcttgcg

SEQ ID NO: 275868 - DNA, 122 bp, Homo sapiens
aatgttgcttcctggtggagttccctctttggtttcaagctgtcagcctcagtctgtaagcgaccagctggctcttcagagcagtgccacctcctggcagaatgctgcaatggggaaccgca

SEQ ID NO: 275869 - DNA, 122 bp, Homo sapiens
ggaataacagaccaagatttgccacattctccacatttgccacattctaaatatacatttcgcaaattctaaataatttctgctgcctccacaagttttcacatgttattgtccacctttac

SEQ ID NO: 275870 - DNA, 122 bp, Homo sapiens
atgctttaatgtttaaatttgccattgcactttaatatggttctctgtttgtgccaatggcgtaacgtcagctctttcacttggcacagatcctggacttgcagaaggcaggagttcgattt

SEQ ID NO: 275871 - DNA, 122 bp, Homo sapiens
cggtattagttgatgtcttccaatacatctcaggagaaggtcgagcttttcctactgaaccgagtgacatttaaaagggggcatttggatggaacatggtagaaagtagcaaactgctttag

SEQ ID NO: 275872 - DNA, 122 bp, Homo sapiens
gcagtgactcaggatttaacctaaacacatttaactgaaactcctgcccagagacctccacgtgctggagaaggcagagtaaactgaggaatgaatgccctcattgtgctgtgagagcagac

SEQ ID NO: 275873 - DNA, 122 bp, Homo sapiens
gtcagtggctagactgtttccagctcctggatgccgtgaaggatgtggcggtgaagacagcggcactaatgcctgctcaagtcctgcttgccttgggttttcaaagaactgctctttcagtt

SEQ ID NO: 275874 - DNA, 122 bp, Homo sapiens
gaaaattaagtttttttataagctgcatcaaatgttacattaagagaaatgaggacaatccgataatgcaatgcaaaatacagagttgcatttggttactgatttataaattaaaatttggg

SEQ ID NO: 275875 - DNA, 122 bp, Homo sapiens
ggttcctctccagcagcctggggttctgaggaaggcaggcctgcagcaggtgccgggtgccgggaagcaggagacatctctgttactccactgtcctcagtggggagccacggctgagcgtg

SEQ ID NO: 275876 - DNA, 122 bp, Homo sapiens
gggcctgagaatgaaattattagtactacagtttaacctaacagtggcttaaaatagtcacgcggcctagccacactatcttaccacgtggtacagcttctacggcggaaattttacattct

SEQ ID NO: 275877 - DNA, 122 bp, Homo sapiens
gtcgagcctgccgagccccgtgcttttgcagggtttctgcacaggtccagcccggcagcccgcctctctctgagctcaggtcagcctcacagcaacgcccgtcaggcctggctccttccctc

SEQ ID NO: 275878 - DNA, 122 bp, Homo sapiens
gtaatatctttctacagggcttaccctgcttatatcataatgtcaagcaacctgtggcatcgtttgactctatggggatggcaaaatttccatcatcattatcaattctcatgtatctgact

SEQ ID NO: 275879 - DNA, 122 bp, Homo sapiens
ccctgagttcccaccggatgagacctctctcttttatagccagaagttccccatccagttcgtctggaagagacctccggtgagtagcttcctgcttgctggctgggttttccccccacgga

SEQ ID NO: 275880 - DNA, 122 bp, Homo sapiens
gaacagttgtttctgtcatccccagcctggctgcctctgcatggtgtggagcactcagcccggtgaggagtctggaggggcttagactagggtgatgggttcctgaaggaagctgggacaga

SEQ ID NO: 275881 - DNA, 122 bp, Homo sapiens
ggcagccactctggcctcctctgtggctctagagaatgaaggtccagacagaaagacttgcgagagagcagtttggaaaggggtggatatcagccagcagggaaagcaggaaagggacaggg

SEQ ID NO: 275882 - DNA, 122 bp, Homo sapiens
gttgctttttgtcttttcctgctacttctgttagcttttgtgttcctgtctctcagtccccgttcctgtctgtgtctccttgcttctggttctttttctccgtctcttcgtatctttgtcac

SEQ ID NO: 275883 - DNA, 122 bp, Homo sapiens
ctggactaatatccttttccccaagtgtgcacacataccctcctctcctataagagggcccgcccattggcaaagaggagcctgtccctcagagaggaccatgttgcccttttggacctggt

SEQ ID NO: 275884 - DNA, 122 bp, Homo sapiens
cgcgggcagaatgctgggcagcagcgtcaagagcgtgcagcccgaggtggagctgagcagcggcggcggcgacgagggcgcggacgaaccgcggggcgccggcaggaaggcggcagcggcgg

SEQ ID NO: 275885 - DNA, 122 bp, Homo sapiens
atggtgtatttaaggataaatattggtctgttttgaaacatcttgattgctaaacaaagtcgttaggactttatttcctagactatggggagcaactgaatgcttgtgagtaatcacacctc

SEQ ID NO: 275886 - DNA, 122 bp, Homo sapiens
tcttccaagtcttctccgctcccgtcgggcctcctgccggggcggcaggagcaaaggtggcgccgttctgtacacagacatgttctagcgttctagcgtccccagtctcttccctcttcgtt

SEQ ID NO: 275887 - DNA, 122 bp, Homo sapiens
ttaaatcggaaagccttggtgcttcctacaagcaagtaggatggtccccacacttggggacgagttggaaggtttgatgaataactcagcagagcccggtcgaggggtgacttccgatggag

SEQ ID NO: 275888 - DNA, 122 bp, Homo sapiens
ggggaggggttcaggctgtcccgggcctcgcagcacccgcggctcccccagagtggggcgcgtatttgtttcgtgtgtttctctttggcctccagcccgtggccagcagtggatccctgagg

SEQ ID NO: 275889 - DNA, 122 bp, Homo sapiens
gctttatggaaggctaagaccaagccctagatgcaagaccgggggaactgactgccggaacgtttgtgttgcagcgcctcgccccttgccggtgctctttcgcgaagggaccgtctctgcca

SEQ ID NO: 275890 - DNA, 122 bp, Homo sapiens
ccccccccctcccgccgcgcgtcccagttgctccgagggaggtggccccgggcagacgagcgtttttgttgtgggaatgggggtcactggcagcagatgcaccctaagaccgtgtgggcagg

SEQ ID NO: 275891 - DNA, 122 bp, Homo sapiens
tgacttcttgtttctagggcccatccatcttgtttccaatcccccactcacatttagacacggttcattacctgtcaggtaagtccctactgcaagggccttactcacattttgcgtgtcca

SEQ ID NO: 275892 - DNA, 122 bp, Homo sapiens
actcagatacgtgcagccacttcagtgaggcaatgtgtgctctcttctactatccactatcgcctccaccgccctcaatgagcagaagcaacgtgaccttagtttcaagggcaactacaaaa

SEQ ID NO: 275893 - DNA, 122 bp, Homo sapiens
cagccctctctgctggggaaagcagcaggaagttcagtgagtcagcgctgccggtgacagcgggtgccggcctggggcagccaggaagacaggcctccgaagcgtctctcctggcttagagg

SEQ ID NO: 275894 - DNA, 122 bp, Homo sapiens
ccgccatgcctgggccttcctctgcctccgtgggttcctgtgcagcccgagactccctgacgaatgccgctccctgctccacggtgcccagtcccatcggccacccaaggcctgaggagtgt

SEQ ID NO: 275895 - DNA, 122 bp, Homo sapiens
tcctgcaatcgaagtaacccccaacccaaaaagggcacactttgtcaagagcaacaaactcgcagaaagctattaggtttacaaaagactctcaagtgtatcagaatcatcgaaagcaacct

SEQ ID NO: 275896 - DNA, 122 bp, Homo sapiens
caggcgcaggtagtggcggaggcagtcccggcacgagcggtgcggacagctgaggaggcgcggggcccgctcaggcggcagccgcaccaggcacagcggacactccacctcctccgcgcccg

SEQ ID NO: 275897 - DNA, 122 bp, Homo sapiens
cagcccaggtgcggcgggcagcacactccctagagccaggaccactagttccgtcaaatccggggcgggccattcaaacagctaagggaggcgtctcctagtgtgccttttcctgagtcatc

SEQ ID NO: 275898 - DNA, 122 bp, Homo sapiens
aaaagaaaccttttgtttccgtcaagtttcaaacagaggaccttccgtgtgttaggccagcgtggtaactactacaccacagaaaccctttgcattgcaggctttttatgttttgcgatgag

SEQ ID NO: 275899 - DNA, 122 bp, Homo sapiens
ggttttcccacaatccaagctacattctgtttcttttgtgataactgagcctctggcctccgtatgataaatagcatatgctacctttcccaatggattaaatctttattgacaaaataagc

SEQ ID NO: 275900 - DNA, 122 bp, Homo sapiens
tctgtgccctgaccttctgcctctcattccttgcagactttaagtttgccatgtacccaccgtcgatgatcgcaactggaagtgtgggagcagccatctgtgggctccagcaggatgaggaa

SEQ ID NO: 275901 - DNA, 122 bp, Homo sapiens
agttccaggggcggcggtatcggtggctgccctactacagcggtgagcgcggccgggactcgctctctcggggcctcttgtatacctacgttgatgccacagttcctattgccgtattatag

SEQ ID NO: 275902 - DNA, 122 bp, Homo sapiens
ctccaggagttgcctgccttcagtataatgggcaacattgaaagcagcaaggcgttcggtcgacaaggtcagagtgcctttcattcctgcaataatcaaccagtgtagctcttcctcagacc

SEQ ID NO: 275903 - DNA, 122 bp, Homo sapiens
gccggactgcggggaccccaggagcgcagggcggaggagcagcgccacaggaggcgagggcgcaggcggcgcggccgggaaggaacgcgggaggggacagaaggaagaggaagaggaggaga

SEQ ID NO: 275904 - DNA, 122 bp, Homo sapiens
caaagctcctcctcaaatggggtgggtgcaggcatcagggctgcaccggggccagggcaccggggctccctgcagcgggtcctgggtgtgcggccgaggtgtgtctgctgtgccccccagcc

SEQ ID NO: 275905 - DNA, 122 bp, Homo sapiens
cggggctggggggtcgcaggagcgggcggggtgcggggcatggtggggaggtttggcccgcggcagggcgctggagcgggtggggggcgggcgcctggggcgcggggcggcggcggtgggag

SEQ ID NO: 275906 - DNA, 122 bp, Homo sapiens
cacgtgtgctcggctcacctgagcggtagctgctccgcaggcagaagaaccggaagacatcgggggaaaaggtcttcagaaagtcctggtaaagcgagagacaggcagtcacgaggctttgc

SEQ ID NO: 275907 - DNA, 122 bp, Homo sapiens
gaaggagcagtgacgtgctgctcggatttagaaacgatcccccagctgcagtgcaggacgcgtggaaggacgtcttgccggaggttgtagcgcccagggatttgtggtatctgagtaagagc

SEQ ID NO: 275908 - DNA, 122 bp, Homo sapiens
ccaagaaaaccgccttcgaagacacgcaaggcaaaattcttgccagtgtccggaaatacccgtctctggaacccaaaagtcaaactaaaattaaaagttcggcttagcaacaccgcgaaagg

SEQ ID NO: 275909 - DNA, 122 bp, Homo sapiens
caggaactacatttcctagaaggatgtgctagatactcgttcgcgtcgggacgcaagcaccggcccgaactcgctctaggaaatggagtctgacgcctgcgcggcgcaaacgctcccgggag

SEQ ID NO: 275910 - DNA, 122 bp, Homo sapiens
cagctatcagagacgacagttctattttaagccttccacccagtgtccccgacctgaggacgcgggcgcgggtccagggactcgggtaacaccttgccagcaggatcccgggcggtcgcgga

SEQ ID NO: 275911 - DNA, 122 bp, Homo sapiens
aaatatgctactactgaattagacatttaaaaatggttaaaatggtaagttttatgtatgcgtattttaccacaacttagaaaacaaagttagacaaatttagggaggaaaaaaaagtttgg

SEQ ID NO: 275912 - DNA, 122 bp, Homo sapiens
cattttgagcagcctctgtgggtgcagcttgttgaactcggagccagacgctttttctggcgaaacggagaaaaaacgccgcggaaacggtgcgcagggttggggagtataggttctgattg

SEQ ID NO: 275913 - DNA, 122 bp, Homo sapiens
acacgcctctctgtctcttggattccaacagctttaaatgtccttggattttttagaaagcgcccaagtctataatatatgtacagccgtggcttttatcaaaatgtagacatgcctctcat

SEQ ID NO: 275914 - DNA, 122 bp, Homo sapiens
cactcaccacggaaggtagcccctaagacgatgggcgtgcaaccacaagcttcggcagaacgcactccagctgccctcactccctgcaacaccggcactgaacagcgaacacgccctgtctc

SEQ ID NO: 275915 - DNA, 122 bp, Homo sapiens
ccctagtgagatgaacccggtacctcagatggaaatgcagaaatcacccgtcttctgcgtcgctcacgctgggagctgtagaggggagctgttcctattcggccatcttgcgattatggtga

SEQ ID NO: 275916 - DNA, 122 bp, Homo sapiens
ctggatcatccagctcctcccagggctgggatgcccactgccgagagagcactcagaagccgcccgttggctttgaggacttttatcgcccaaggtcccgaggtctgggtgggaccgcaagg

SEQ ID NO: 275917 - DNA, 122 bp, Homo sapiens
atgtatggttaaacctatggaatgattcatcaactgtgtttacttcagcctataacatggcgagcggagagttggtttgtaagacaaaggttctcactttcttcatttctaatatcagtctt

SEQ ID NO: 275918 - DNA, 122 bp, Homo sapiens
aaaaaacacgcctgaccacaccgcgtgctggtgggggtgggtggccttggaaacactcagcggagctgacgggaggaaaacgtgatgggagcatgggaacaccatttatttggcaggttcac

SEQ ID NO: 275919 - DNA, 122 bp, Homo sapiens
atcctgaggagccttccacggcactcagatcctcatggaccatgtgaaggcatggaggctcgcagctctgaagattctagaattctcaactccatgagacaggggtgaggccatggttaaga

SEQ ID NO: 275920 - DNA, 122 bp, Homo sapiens
tttcctcagcgtcatctggcaggtaacagagtggggcgggtccaagccggctagacttcccgtcctccccttcccgactgcattcagtcccgccgggaccgttccgcttcacctcccaccca

SEQ ID NO: 275921 - DNA, 122 bp, Homo sapiens
cagtgggaaatcggaaccctcctaaattctttcccacctttcttggggatccagaggtcacggaggcctaggaggagcctcttggtgacggtcctaacccacaagcccagccctgcaggaaa

SEQ ID NO: 275922 - DNA, 122 bp, Homo sapiens
taaagtgcactgtcttaaaatgtacagcttgatccttctttaaaaaaaatcatatacgtacgcccatgtaactactgttcatatctagatgttgaacacctccaacacatccaacataacca

SEQ ID NO: 275923 - DNA, 122 bp, Homo sapiens
ttatggcaaataaaactcctgataacgattcacgaatcctggcagccctgccttccttgccgtacctgggggcttgtactgccaggggaggcttcgtctcatttccttcactgctggggaag

SEQ ID NO: 275924 - DNA, 122 bp, Homo sapiens
tcctcaccccccttcctgaactccagcacatctttgcacagcctagaaatgggccgtggccgttggtccctgtctgcccgcagaggggactctcaaggccctttcctgtctcgtgtctgctg

SEQ ID NO: 275925 - DNA, 122 bp, Homo sapiens
ttattatcaaatctgttttccagatgggaaaccagaggctcagaagagtaattttcccaacgtaaattaaacagagaccctggatttaaactctgtgatcctgggcaagtcacttcactcat

SEQ ID NO: 275926 - DNA, 122 bp, Homo sapiens
ctgccctgccgcgactccaggctccgctcctgggtgggggtttattttctcttggcatcacgggacagaagaatcgatgcataccctttccggctattcagaccttgcggggtatgaagttt

SEQ ID NO: 275927 - DNA, 122 bp, Homo sapiens
tgcctgtgtctctcgcaaaaggctcccacaagcgtaaacagggctgcagatttttgtgagcgcgctgcagggactcacggggatgttgaagcaggcagaagggagaagcggtgagaacgcag

SEQ ID NO: 275928 - DNA, 122 bp, Homo sapiens
ccatgatattcaaactttaaattctataacactagtttgcttaagatatcagctgctatacggtaaagtttttaaggcagctgtaatttgcggaaatgctggcatttactttttccatagtc

SEQ ID NO: 275929 - DNA, 122 bp, Homo sapiens
aagggccagatcatttgttggggccaccgccacccccactgctgggccctcagccatggccgctcaggctccccctgtaatcacggcttcctgtttggcgctgagactgggcttggccagtg

SEQ ID NO: 275930 - DNA, 122 bp, Homo sapiens
gccttcttttgttggtggtcacctccttctctagcttcctgctctgtgcacactcataggcgcaaccagatacttgggaacacagatgccctcaagtgcagatttgccaggtacagccttgc

SEQ ID NO: 275931 - DNA, 122 bp, Homo sapiens
gttttgtcaggctcctcgtctttgtctctggcacagtgaccagggggcagccaccgggtgcggccagctccgccaggagcaacttccggagcagcggcagggcctgcctcagccaccccctt

SEQ ID NO: 275932 - DNA, 122 bp, Homo sapiens
gattccccttgactaatgttgaggagaggaaccctccactagattcccgtcacatcctttcgaaaaacaccagaacggagagggaggtggtacattacccggtgcacttaaaagccagatgg

SEQ ID NO: 275933 - DNA, 122 bp, Homo sapiens
gctacactgataagggaacaagacccaacacagaaacacctttgtcctttgtataaccagcgggcttccaggaaatagtctcttcctttgtgggcacgtacatggtgggctctggtgagcac

SEQ ID NO: 275934 - DNA, 122 bp, Homo sapiens
gctcactcaggcgagtaagacatttctgtcccaatcagaggagagagagaaagaaaaacacggcccaccgccaccccgaagagcctttagacactgggctggtaccccgagtcagggagaaa

SEQ ID NO: 275935 - DNA, 122 bp, Homo sapiens
agctgactcaaaacgtaacggcccaattgtccttgagacttcattccccagcaagctcagcgtgtaacgtgcgctatggagccgaaagtcgcagagctgaagcagaagatcgaggacacgct

SEQ ID NO: 275936 - DNA, 122 bp, Homo sapiens
cccccatcgggggcaaccattgttccgccggtcgcgccggagctgggttgctcctgctcccgtctccaagtcctggtacctccttcaagctgggagagggctctagtccctggttctgaaca

SEQ ID NO: 275937 - DNA, 122 bp, Homo sapiens
ctaatactattcctggcccttttctgttcactttaaatgtaattatccaaagtatggttccggagacattgggagattgagcactccttcagaacgattctacggggaaaaaaaacaaaaaa

SEQ ID NO: 275938 - DNA, 122 bp, Homo sapiens
ctccctcaggcagggaggctgctgttgtgaggcctttctacagcaccgtgaagtcccgtgcgcagacggaggccaaagccctcgggacggcggcggcaccaggcccagaccattctcattac

SEQ ID NO: 275939 - DNA, 122 bp, Homo sapiens
gaaatctgtaactttccttgatcccatcttttgaccatacctcgggataaatgtgttcttcgtctgcggtggtgagcaagattagggaggggaggggaggaattttccgtgattgatttgga

SEQ ID NO: 275940 - DNA, 122 bp, Homo sapiens
cacatttcaaaatggctttttgaaaaagtggtaaagggctcaactggaagggagagactccggtgctgttgagggcaaggttccattctctggagcggcaacttttgttatggtttgtttcc

SEQ ID NO: 275941 - DNA, 122 bp, Homo sapiens
tgggaccattggaaaaaccattaggccagattcttttgccttgaatccccattcccagaacggcctccgagccaaaccatacatgcctgatggtgatttattattaatctggttgtcctgac

SEQ ID NO: 275942 - DNA, 122 bp, Homo sapiens
agcgtggacgtccgcctcaagatggaccaccgcagtgacctggtgttcctggccgacctgcggcctgaggagattcgctaccgcctgcagcactactttaagttcctgtttgtgcgggagcc

SEQ ID NO: 275943 - DNA, 122 bp, Homo sapiens
ccatatgcgatgatgtttgtttgcccttgacgcacttactcatggatggtacttcagcctcgttagacagcctggtgatggaggatgaagaaaccatgtgcttctcattcagttctggactc

SEQ ID NO: 275944 - DNA, 122 bp, Homo sapiens
caactctgggcccttacgcttctgctgttctatcatggcggcaaccggtctcttcagcgccgccactgaccgcgctgccgctctcaggcgccacgcaattggttccaaattagtccttcctc

SEQ ID NO: 275945 - DNA, 122 bp, Homo sapiens
caccataatcttatgaacattaaaataaactgaggcgctacatcctcctgcaggatgaaacgagagacataagtgctcaggctgttatgctaataactgatttttaccagaatagtatgatt

SEQ ID NO: 275946 - DNA, 122 bp, Homo sapiens
aatgaaatgagtcagtggtgtgtgtgtgtgtccagacagccaaaagcattatgattaagacggtacataccagccagctttataatgtccaggaccaaagaattggtaattttgttcaaaag

SEQ ID NO: 275947 - DNA, 122 bp, Homo sapiens
ctggtgacctagctggattctgcctttatttctggcattgaattgttgccacagtaactgcgggggtggggctgggtaggggagagggtgaaagggaaagagggagggagggagaaaagatg

SEQ ID NO: 275948 - DNA, 122 bp, Homo sapiens
cctgttgggcctccgagtggactgggatgaccgctggatcaacgatgtggaagacagctacgggcagcagtgggtgagtgggcacctctgacctgaccagtgtcagagctcctcaagcccca

SEQ ID NO: 275949 - DNA, 122 bp, Homo sapiens
cctggtggaaaaatccagaagaccctctccctgagcatgagtggggtggtcagaggcctccgggtgaggagacagatggggcctgccttgctgccctgggctggggctgcacagccggggtg

SEQ ID NO: 275950 - DNA, 122 bp, Homo sapiens
ggtgaggctcagccgatgaggcaagaggcgggtccaggaaaccacgtgttctgccttctgcgcacgcgccagccaaaacaaaagggaggtctgccaagccccaccccccacgtgaccggcgt

SEQ ID NO: 275951 - DNA, 122 bp, Homo sapiens
agacccaggtcacggagagcaggccagggccaggggcctgagaccgacggaggggacagtcggggagggggtactcgtcacttttaatgacacaaggaaaacaaggcttgaagatctgagtg

SEQ ID NO: 275952 - DNA, 122 bp, Homo sapiens
gagaaagaagaggaaggccaaagacatggggagtgaataaaaagtgggttccggatcgtgcggaacagtccacagggtcatttacaggtcctcaggagatgaccagtccctttggcatgcag

SEQ ID NO: 275953 - DNA, 122 bp, Homo sapiens
ccgggccctgcctctcggtcctctgcagcggggaggacttcagcagctccccgggacgcccgttgcgaggacaccctgggcctgtgccctcctactagcaccgccctcctcgtctgcagtag

SEQ ID NO: 275954 - DNA, 122 bp, Homo sapiens
agacctgtattggaccttacatattagagagctctgcagatagctcacaaatctccaagtcgctagctgtaaattgagtgataattggtgtcaggttattttagcacagtttggggataaaa

SEQ ID NO: 275955 - DNA, 122 bp, Homo sapiens
tgttcctgcagggcggggctggggctcctcgatgtccttgcgcttgccctgcaagttctgcgccccaggccccggcagggacggaaacaggccgggaagcagtgacacctggggcagtcagt

SEQ ID NO: 275956 - DNA, 122 bp, Homo sapiens
cacttcctagtgtgatgtcacattccttcctacgctccactggggaaggcaggtctgccccgcccacggtggcggggaaatacctaggcatggaagtggcatgacagggctcgtgtccctgt

SEQ ID NO: 275957 - DNA, 122 bp, Homo sapiens
taaaaatgcctcaggtatcaggagaatccttactcccttttgacagagcaggagcaccatcgtcttggacaaacactgccactttaagtttcagctccctttctagcctcatgcatttcaaa

SEQ ID NO: 275958 - DNA, 122 bp, Homo sapiens
ataagcagataaacagataaagccgggacaagcacccaccctaggacacacagcgggcggcgctggccaccccttggtgggaggcagagaagcattgcttctttctaaagtacggctaaaat

SEQ ID NO: 275959 - DNA, 122 bp, Homo sapiens
cgcacaaggggcggggcttaaggccaacggaaaacagagcgagaggcgcctgcgcattaccgaagaggcaaagttgtttttgtagtttcttcgggcttgcttatcttgtgatactctaaaca

SEQ ID NO: 275960 - DNA, 122 bp, Homo sapiens
aaacatccaaaccatagcagtcaatgccttagcccttgatgttgctatcaacctgagattcggggatcaaggaaggacaggtatgatatctaggtgtgggaggaaacggtagatgcagtttg

SEQ ID NO: 275961 - DNA, 122 bp, Homo sapiens
tgcctctgccttctggacaccgtttcctctccgctgcttcagagagctttgcctcgcctccgcctgcgctcccctccagggtccttctgctggctgcggactcggcccaccactgctgtctg

SEQ ID NO: 275962 - DNA, 122 bp, Homo sapiens
cgcgcagttggagctacgggtacagcagtggtccgaaactagtggaagaccactagaacgcggagaatcagaaaattaccgggcatggttcaataatttttttctgtctcattattggcaga

SEQ ID NO: 275963 - DNA, 122 bp, Homo sapiens
agtatcacagattgttccaacactcactttcatcatttccttcacgaggaaagaggcccacgaaggttaaatgacttatatgaggtcacaaagtcacttggagacaaaatcagcagtaggat

SEQ ID NO: 275964 - DNA, 122 bp, Homo sapiens
actggagagtctctcgcgtgtctgggagggtgttttgcgcggggcggggtggagcagagccggaagcgggaggggagcgtcaaacaggaaaagaagggaagaaggaagaagagggtagagga

SEQ ID NO: 275965 - DNA, 122 bp, Homo sapiens
cacagcgccgtggtagaagctctgaagtaaacacttcgttcttcagttgattcccctccacggggaccctgttgcctactgggactgtattgtagccgggggatgcgggattcagacccggc

SEQ ID NO: 275966 - DNA, 122 bp, Homo sapiens
cgggctgcgcgatcttccaggacctgatccgctatgggaaaaccaagtgtggggagccgtcgcgccccgccgcctgccgagcctttgatgtccccaagaggtaaccgcgccccggtcccgag

SEQ ID NO: 275967 - DNA, 122 bp, Homo sapiens
gtccccgccagcccaatcgtgctggcgctttaaggacgggcggggcgggctgggcgacagcgctggacacctggagctgcccgaggacgcggaggagaggtggggcgggcgtcaccaccgga

SEQ ID NO: 275968 - DNA, 122 bp, Homo sapiens
cagagcctctccccaccgagaagcccggtctaactctccggtgtttgactgtccggtgtccgactgtcctgtgtccgactctccgatctccgactctcggatctccgacaccaaagcaccca

SEQ ID NO: 275969 - DNA, 122 bp, Homo sapiens
ttcactgggaagcctccttttattatatttatgcaaaaacatgagccaaatctcatcctacgctgatataagacacatttgataataaaatgcaaacgctgtttgcaaagaattagagagga

SEQ ID NO: 275970 - DNA, 122 bp, Homo sapiens
atggagggctcggtggggcccttttcagtcccttctcgtggtgcctggcaaccctgcagtcgctcagtgtccaagagcacaccaggccaagagctctgagggctccagcggcaagaacctgc

SEQ ID NO: 275971 - DNA, 122 bp, Homo sapiens
tgaagaaaaaaaggtagtcaataattggaaaagtagataacctcttgcattagtttccttcggttgctgtaaaaaccacagacctggtggcttaaaatgacagacatttattctctcacagt

SEQ ID NO: 275972 - DNA, 122 bp, Homo sapiens
ctcgggatccaaggaccttctgatcacagagcacccaggataagctggacccttggcctgcgggctgacgtgcagcggctgcccttgcttagcagagcgactcaccctcggaggccaccctg

SEQ ID NO: 275973 - DNA, 122 bp, Homo sapiens
actgtatcaatttaagaacaggctagcagtttctgggggcggaggtaaggggagtggctccgctagggcaataaagggtgggattcggaaacagccatgaccttgtgtgaactgtggcagcc

SEQ ID NO: 275974 - DNA, 122 bp, Homo sapiens
gcgctatagtttgtgtatattagcctcgagtgcatgtgtgttacatgcgtgctgtgtgtgcgtgcaggtgtatcacattaccgtgctatagtttgtgtgtgagcctcgagtgcatgtgtgtt

SEQ ID NO: 275975 - DNA, 122 bp, Homo sapiens
agtagctgatctcatggtcttggtggccgcaggcctccccaacataacagacagtatctacggttcctgggtctatggctatgttggatgcctctgcattacttacctccagtatttgggaa

SEQ ID NO: 275976 - DNA, 122 bp, Homo sapiens
acggctgtgagaacctcagtgagcctggccaggtcctgaactgccgaatgtggggtggtgcgtggcactgaggcaggactaagcacccccttggccaagcatgactacgtcctgctccgaca

SEQ ID NO: 275977 - DNA, 122 bp, Homo sapiens
ccccaagtaagagtatgagggttcgaggcagcttcagtaatcgccggaaggtggctggggcgtgttcggccatcccccgggagagcaagcccacgacctacttgcggtcgctctcctggtat

SEQ ID NO: 275978 - DNA, 122 bp, Homo sapiens
ataactgataaaatctgcatccttggccttccaacaacctttacaccagcagatggtgggcgtaaagatgtcattcatcatttatttacaatgggttttatttattctagtgtcaacagctg

SEQ ID NO: 275979 - DNA, 122 bp, Homo sapiens
gggtggggagacagtattaccataggtaaagtccaagtcacttcacttgcttccccgaatcgtttctgaagcaagaactggattagatgatctctaagataccttccagccttgacattcct

SEQ ID NO: 275980 - DNA, 122 bp, Homo sapiens
cccgctcgggctggggcgaggaaaggaggggacggcgctgcggcttcggaatctgtactgcgactttggcagagtaaacgctgcacttgcagcttcgaattgaatttcctgcctctcccccc

SEQ ID NO: 275981 - DNA, 122 bp, Homo sapiens
tcgacggttgcgggcaggcaccgggtcgggggggccgcactcctgaaacacctgcggcaccgggaagagacctcacacagtcaccctggggggaaaccacactgcgtccccactctgacccc

SEQ ID NO: 275982 - DNA, 122 bp, Homo sapiens
ggccccgcgccgtggcgatggtacagtccgagacggcccccggctataaatagcgccaggcgcatggctcttcgggaggcgctgagattccgggcccggcggccgcggggagcgggtgtccg

SEQ ID NO: 275983 - DNA, 122 bp, Homo sapiens
cagtctctgtcagggtccaacccgggtctctttgctctgcagatgccctgatgcacccaccggcttacccaccacccccagtgcccacgcccaggaagccagccttctctgacatgccccgg

SEQ ID NO: 275984 - DNA, 122 bp, Homo sapiens
tcaaggtgagaataatgtttgaggtacaggacttgaaatacgcgaccttggccacagtgtcgcgctgcggcatggtctggttcagtgaggatgtgctgagcaccgacatgatcttcaacaac

SEQ ID NO: 275985 - DNA, 122 bp, Homo sapiens
gtgcccagtgggttcattcattccctctagagcgctcgacaaatgtttactgagtgcccacggggtgcctagagcctggcgggacgtcgcggggatgcggctggaggaatcggagccggccc

SEQ ID NO: 275986 - DNA, 122 bp, Homo sapiens
ctatcttcaggtttgcctgagagggcgagttaccgggaaaggagcatcacaatggcagcgcgcatgcgcctaggaattctgggcctcgtagttccagccatagccgcaactccccgcctgtc

SEQ ID NO: 275987 - DNA, 122 bp, Homo sapiens
tcagtaacagtatatgacaacatgtgcaaagtattaccctccactccccccagggccactcggctgagccttggtgaccagcatttttattgggggtgggtcacataagcaagcagagccca

SEQ ID NO: 275988 - DNA, 122 bp, Homo sapiens
tgcgtctgggcacgccagcctctgcacccctactgctgggccccatgggaggcgggcgcccgggtgctcagagaccgcgccctccccgtcaggcagacgctgctctgccttccggttccctt

SEQ ID NO: 275989 - DNA, 122 bp, Homo sapiens
tgtcccactttacagataggtacaacgaggctcagagaggtgaagttccttctaaggggccgtagagagtggagagtcgatcgctgttcagatagcgatctggctgggcgcggtggctcacg

SEQ ID NO: 275990 - DNA, 122 bp, Homo sapiens
gtcgcagcgaccaggagtcagggggcgtgaccaacctcctgcgggaacggagccagctcccgggggtgggagtgcccactcgttcctgcgctcgccggtgggtaccggtatctgcacgtccc

SEQ ID NO: 275991 - DNA, 122 bp, Homo sapiens
acgttcggctcaggaccacctggatggagaagcagacacgcgagggtcctggtcactcaccgagggccgggaggggccctgaatcccggcatgctggggggaggcccacctgtgggaagatc

SEQ ID NO: 275992 - DNA, 122 bp, Homo sapiens
gaaataggtgtgtttatttgtatatatctgtgtatctttgttttggggagggggagggttcgtgatatgaaggagttcattttgaacatagtgtttttgaaggatgttcaagttattgaggt

SEQ ID NO: 275993 - DNA, 122 bp, Homo sapiens
tttggacagcacccctgcccctgagtgtagctgtgagaaaggggaggaacttgcattcttcgtgggagtcagtcacacagtttttactttcacagagacagagtgtgggtttgtatggtcag

SEQ ID NO: 275994 - DNA, 122 bp, Homo sapiens
tcctagtatccggagggggagaggatgataataattccagtatcgcaggctgtgttcacccgccctgtgatattgttattaatatcctggaagggagaggatgatattactccccatagaac

SEQ ID NO: 275995 - DNA, 122 bp, Homo sapiens
catccagccccatttgtgaaaattcataagccagtaatgacatcagtgataccattatagcgcccctatagtagtttccattggctgatttttgtcacttaagtaattcttcattgcctcta

SEQ ID NO: 275996 - DNA, 122 bp, Homo sapiens
cactttgggctcttctctttcttcatttcctaattagtcaccaatattgatccagatcctcgtccctacagattgtacattctcaggtaggactaataaccttttatattccccaaagtagc

SEQ ID NO: 275997 - DNA, 122 bp, Homo sapiens
cccccgtctttcccgtggacctccagcggggcagatgctgagccgcctgttgtcgagtggcgtgctatcccgtcctccagctcctctgtggcttacagacacccacctgcagccctgtcttt

SEQ ID NO: 275998 - DNA, 122 bp, Homo sapiens
taaacaaaaattttatgatcctgagcaatactgttttccagttctttcatcttctgagctcggcctttttcacaagctgttcctcaagccgccttattgcaggggcctgttgtctctaattg

SEQ ID NO: 275999 - DNA, 122 bp, Homo sapiens
gccagcagcccctgccccccgggggacgctgacggccgcccggcgcgccgccctagcagacggacagggggcgctgcgcgcggcctggggcaacccgggccacaggggcaggaaagtgaggg

SEQ ID NO: 276000 - DNA, 122 bp, Homo sapiens
gaccaggccgctggcagtgagccagccgggttccgtttccatcgcgggccttatccggggcgtattccttccaggtgcggcctccggggaagcccagtccccagcctggaggtgacgaggcc

SEQ ID NO: 276001 - DNA, 122 bp, Homo sapiens
atctgccgccacaaccccgtctttggagtcatgtcctagtgtctgcctgaacgcgtcgttcgatggtgtcacgttggggaacaagtgtccttcagaacccagagaaggccgccgttctgtaa

SEQ ID NO: 276002 - DNA, 122 bp, Homo sapiens
gttagtgcagcttcctagaatccacgttactcattcattcattcatggaaggcatgtaggcgcctggcgaccgcatatgcaaggagccgtggagtatcgggaacatggcacggcccttcctt

SEQ ID NO: 276003 - DNA, 122 bp, Homo sapiens
tgaaaatgagcacggatgttccttaccttcaacacaaacccagacaacagcggcagtgtgcgcggcctcccggccctttaccttcaacacaaacccggacaacagcggcagtgtgcgcggcc

SEQ ID NO: 276004 - DNA, 122 bp, Homo sapiens
ggtgtcagccgccactctgccgtgctctttattaccagcggctgcaatgccagacacatccgcgggtgtctcaaagccgaggcggattcgagcaggtctgacagcaagtgagcacatgaaag

SEQ ID NO: 276005 - DNA, 122 bp, Homo sapiens
aggtgatctgctgccttggcctcccaaagtgctgggattacaggcgtgagccactgcgcccggtcatatgtagacatttgataaatacgttgaatgaaaggaaaccaactctccattctccc

SEQ ID NO: 276006 - DNA, 122 bp, Homo sapiens
ctcggacactcttttgcaaaccccgggactttcccgacctgaaaggcagggcgggaggggcgtcccccagaacctggggacagaggcaaagtccaagaactacaacggctgctgccggccgg

SEQ ID NO: 276007 - DNA, 122 bp, Homo sapiens
cccatggatccaggcaccacaaatgctgctggaggtcagaacagctcgggggcgctgcaccggcagcctcccaggtgagggcacagtctccaggatggccccaccggctgatgccaactgaa

SEQ ID NO: 276008 - DNA, 122 bp, Homo sapiens
ctaaataaggaacataggaaacaattgtcctgaaatatgaacaccatgttttttttcctccgcttgatcaaagaaagactccagcaaaaggggaaaaaataattaaaaagtaaaagtcttac

SEQ ID NO: 276009 - DNA, 122 bp, Homo sapiens
gatcccttgcacttcccccagtgaggcaatgcctcgccctgcttcggctggcacacggtgcgctgcacccactgttctgcgcccactagtgagcgcagaagactgtttgtctggcactccct

SEQ ID NO: 276010 - DNA, 122 bp, Homo sapiens
taatgttttaagaaagtttatgaatttgtgttgggcctcattcaaagctgtcctgggccacgggttggacaagcttactctaaggtatttaccaaaaggaactgggacataaataggatgaa

SEQ ID NO: 276011 - DNA, 122 bp, Homo sapiens
gtcaatttgcatagttttctgctcaagggctctaatatactcactggtatatgtacaccccgttataactttaaaaggattctgttccaaaaagtggtcaataagaactataccagctttaa

SEQ ID NO: 276012 - DNA, 122 bp, Homo sapiens
agccacatcacacccgttattggcctctccaagacgcaggcaggcctgcagcccaagcttcggcctgagggacagatagtcattggtcccaagatctctaaggctctaccagcctggtggct

SEQ ID NO: 276013 - DNA, 122 bp, Homo sapiens
gagaaggaggatttaaccgcttcctccccggcgacctggcctatgaggcctctcgctgctcgcccggccctctgcccggagctggatgggactgcagaactggaactaagcacccgcgccgg

SEQ ID NO: 276014 - DNA, 122 bp, Homo sapiens
gggaaatggaagcagagacagggcctggagccggtgagtggcagagcggagggaagggcgcgctcatccccacgcggtgctcccgctaagcctcgcgctccttctggggacatgagaccacc

SEQ ID NO: 276015 - DNA, 122 bp, Homo sapiens
tgcttctcggatatcacggtggatgagagtgacccagagtcgttaaccagagtgtctatgcggccgtgacgaggcgtggactcggctgtccccatcacgtgttcatgagctgagtcttttat

SEQ ID NO: 276016 - DNA, 122 bp, Homo sapiens
taacactcaccgcgaaggtctgcagcttcactcctgaagccagcgagaccacgagcccatcgggaggaacagcaactccagaggcgccgccttaggagctgtaacactcaccgcgaaggtct

SEQ ID NO: 276017 - DNA, 122 bp, Homo sapiens
gtttcgtgtgctcctcgtgttccacggagcacctcatctggagtgggcaggtggctccctcgggtctctctccttctgatgataaaccccccagagcgggggtacagctctttaccgcttcc

SEQ ID NO: 276018 - DNA, 122 bp, Homo sapiens
aaaacatacgcatatacccagcaaacacagactgacagtgactcaccctgatctcatgctcggtaatcaggttcagatatcctggtccttcagcatgagtgtggttctcaggtctgtctctc

SEQ ID NO: 276019 - DNA, 122 bp, Homo sapiens
gttaggagctggagaccagcccggccaacacagcgaaaccccgtctccaccaaaaaaatacgaaaaccagtcaggcatggcggcgcacgcctgcaatcccaggcactctgcaggctgaggca

SEQ ID NO: 276020 - DNA, 122 bp, Homo sapiens
ctgccaggctggcggcagagctgtttggacagagggatgtttgcccaagaaggctcaaggcgttgctggggaggggtccatgcgtggcagcagacggtgccagggaaagctggcagctcagc

SEQ ID NO: 276021 - DNA, 122 bp, Homo sapiens
cgcctcccattgtttccccggggccgtggagtttggttaataacttcccctgattttcctcgggatgggctggaaagagccacgagccagccaggcgcatcctgcgtttgtttgtgcgggga

SEQ ID NO: 276022 - DNA, 122 bp, Homo sapiens
gggagcatcggcttggagtgactagccttgcggtctcgagtcccgtctctggcgccacggcgaagtgtttaatctcaggccagtgtgcagccgccctgggcccagtaaagtgggggctgtca

SEQ ID NO: 276023 - DNA, 122 bp, Homo sapiens
gactcttccctcggcttctgctctccatggaaacacaactgatcacatcatgattgatcacggtagccctctagggctttctttcttttctttttttttttttccagaagtcataaagggat

SEQ ID NO: 276024 - DNA, 122 bp, Homo sapiens
gggaacggggccgcggggagggccggagaagatggtagaaggtgacagtgcggggtgcagcgttcctgggtccttgaggggagccgggcttctcagccttgaagacccacttcttctctggc

SEQ ID NO: 276025 - DNA, 122 bp, Homo sapiens
gaggtaccgggttcatctcactaggaagtgccagagagtgggcccaggtcagcgggtgcacgcaccgtgcacgagccaaagcagggcgaggcattgcctcacttgggaagcacaaggggtca

SEQ ID NO: 276026 - DNA, 122 bp, Homo sapiens
gccaggggtctctccgttctcacatagggggactccaaatgtcgtcaaacctgccactctcggaatcaacagctgctttcattttgagccctgtgagcaaaagtttcagggctttcctggca

SEQ ID NO: 276027 - DNA, 122 bp, Homo sapiens
aaacaagtacttttaccccttgcatcattaccttgtgtctgacaacagttctaagcataacgctttttaagtgcttggtaatttaatatttaaattgcttcctgaatagtccatgttgaata

SEQ ID NO: 276028 - DNA, 122 bp, Homo sapiens
aggaatcaaatacctttcaaggagagactgaaatgaaacttgagggttttttttgttcctcgtccggtgaatggagcagttccaaagtaatgtcatttggtttgtcagttgaagatgcttaa

SEQ ID NO: 276029 - DNA, 122 bp, Homo sapiens
tgccaagaccatttaatgggaaatggacagttttctcaacaaatggtaatgcaaaaaccacgtatatggtaatagatatccacacataaagacctaaattaagagccagaactataaaattc

SEQ ID NO: 276030 - DNA, 122 bp, Homo sapiens
agagaatggcacacatttagtttttgctcttgatagccctgtttacaccagttgtatcaacgtaattattaactgcccccgctgtgcttctcaagtatcttggtttagataataaactatgt

SEQ ID NO: 276031 - DNA, 122 bp, Homo sapiens
gccagaggcaggaaggagatgagcacatcgtcctgtctcggaaagatcactttctgcaggcgacgggcatgggagacagaaaggaaagaaacactgacaggaagacgacaagagaatcataa

SEQ ID NO: 276032 - DNA, 122 bp, Homo sapiens
cggcctggcttggcggcagtccatgtaacactacctcactacaggcatcgtgcaggtggccgagtgccccagattttctaggacagccctggtttcagatccttcatctattgttcttgagt

SEQ ID NO: 276033 - DNA, 122 bp, Homo sapiens
ctcactcttcttgtcagcttctctgaagttactagccctggacaaccccttgtggtttcccggcactccggtcagtttcctgttggaacactaaccaaaacactgccagtgcataagtgaca

SEQ ID NO: 276034 - DNA, 122 bp, Homo sapiens
attattaaaacactgaagagtaaccaagaaagcactccctggaagatgctagagaaacagcgtcattttaagccatgcattttgactcaggctgtaaatctatatgttttatgaggtgaaca

SEQ ID NO: 276035 - DNA, 122 bp, Homo sapiens
caggcagctgcagtgagtatcgtggagaagcccgtcacaaggaagagtgagaggatagaccgggaaaaactcaagcggtccaattctcctcggggagaagcacagaagcttttggaattgaa

SEQ ID NO: 276036 - DNA, 122 bp, Homo sapiens
ttcccctcaccctggcagtggggcttgggggtgctccactggccctgactacagatgctccgggagctgcccaccagatggaagtcggggtcacaccggaaatccacccgggctccgtccag

SEQ ID NO: 276037 - DNA, 122 bp, Homo sapiens
tacgaagagatcttttcatctcctctccgtgaacacttggggaggggctgggactccaggcgacacggaaacgccaccacacgcacactcgacggagcacaacactttctgagctgccatcc

SEQ ID NO: 276038 - DNA, 122 bp, Homo sapiens
gtccttataagcaatgtcgtctacagcgtcctcgttagcatgccttgtgggtgtcattagcgatgtcatatacagcatcctcattggtgatgtcttatatggtgtcattagcgatgttgtgt

SEQ ID NO: 276039 - DNA, 122 bp, Homo sapiens
catggtggcggctgccgcgttgttgctgctgctgttgtcgtccggtgctctgccccctctcgcacccaccgcttcttaaacggccgcgtctcctccggccgctgccattggccgcgctcccg

SEQ ID NO: 276040 - DNA, 122 bp, Homo sapiens
ccgaggggctggagcgcggcattgcttaggggggtgggcggaccctgggcgggggctgcgcgccccggaggccgagcgggccgggggctccgagaggcggtgcttgggaagcctcggggccg

SEQ ID NO: 276041 - DNA, 122 bp, Homo sapiens
tggggagtggctttagaaatcgccggtggaacttgcctgttaccttcttacaattccccccgcccctgggcaacgcaaaagccgtcctaagtgcgataagagcatggagtgaagggagttat

SEQ ID NO: 276042 - DNA, 122 bp, Homo sapiens
cccactgcctgcttccagagcctttgcaaatccaggccctcagcctgaaattttcctcaacgtcctgtcactctgcttggtaaatacttgtttggtcttcacaatatttactcgaacatcac

SEQ ID NO: 276043 - DNA, 122 bp, Homo sapiens
tcttctcctagctactcttaaaactatgttttactattttcaaagataagaaaaggatgacgaagggagtttaagtgactcttctatgatcaggtaggaaacaggtggtagaggcaggattt

SEQ ID NO: 276044 - DNA, 122 bp, Homo sapiens
tccagatgggaaagccacccacgagacgggtggggtccgcctcgcccctcggccctgtcccgggggagggaaagatggcttctcagaaacctgcccccctgctagcgcccccgctgtctcca

SEQ ID NO: 276045 - DNA, 122 bp, Homo sapiens
acgctgctaagtggtgtcgggcggctccgagtggctggtctcccagagctgacagctcttcgcttggggaataattaattccaccgcccaaaaacccagggctgcaagttgccatgttactt

SEQ ID NO: 276046 - DNA, 122 bp, Homo sapiens
ccgctccgcacttctcaccaagttctggaagtcggcacccatcctgcatggaggaactttcgcagatgccacctcagcacggccctcccacaggccacgagggcccgcgggcggggacaggc

SEQ ID NO: 276047 - DNA, 122 bp, Homo sapiens
ccgggccccggcgcgcgctcggtcggaggtcgagcggggagcgtggggcctgagggagcccgccagaccctgccccccggagggcacacaggctggttctgctccccgctggcgcgggcccc

SEQ ID NO: 276048 - DNA, 122 bp, Homo sapiens
cagaggcgatgccgacggctgccggagaaagccgggcttagagcgccacagttccacgcccgccgccggcctctcagcccagccggtcgccgcaacctcgcctcttccgcagggcggggcca

SEQ ID NO: 276049 - DNA, 122 bp, Homo sapiens
gaagagaggaagcggccggcagggtctggatcccaactcggcgctcccctccaagtccggcgggggtattgagtaaagcccggcagtgtagtgtctgcagcccccttttactagcgaggaaa

SEQ ID NO: 276050 - DNA, 122 bp, Homo sapiens
gggtttttcttttctttctcgtatctctattgtcttttaaaaaattccaaacacagcatacgctttatgcaaggcatgttttcaactacctcctattaagtcaataattccagatcttcatt

SEQ ID NO: 276051 - DNA, 122 bp, Homo sapiens
gattatagtccacccaattcacagacttctgagactcagacacgaggagagatagagaaccgccaatctctagatcaacaagcaaaggaggtgccaagcctgtttgtcttcattgtgacact

SEQ ID NO: 276052 - DNA, 122 bp, Homo sapiens
ggactctgcggcggcgacccacgagctcgcggcccgcgcccggctcccgccccgccccggcgcggcgtggcttttgtacagacgttcccacattcttgtcaaaaggaaaatactggagacga

SEQ ID NO: 276053 - DNA, 122 bp, Homo sapiens
gtcctgcgaggaatctgggcgttatccagacagcgattggagcccctggcactgtcagcacggagaaagcttgcgttttggagagctcattccggctgcagggtggaggatggctgggagag

SEQ ID NO: 276054 - DNA, 122 bp, Homo sapiens
ttgcctcctgcttataacagaaagtcctgacagtctgtggcctgcacctgggggcctgagcggccctgtttgctctgtcttccacctgttgcaggagatagtgccaagccctccacctctgc

SEQ ID NO: 276055 - DNA, 122 bp, Homo sapiens
ccagacccggactggggtgttggggtggcggtccctacctcgcgacggggctggtggccgcgccccgagctctgccttggttttctgtccggtttaggttgtagggtgtgacactcccaccc

SEQ ID NO: 276056 - DNA, 122 bp, Homo sapiens
tcatagtatgttgtttgtagcttgttgacatttgttcagacactcttgcattaaacatcacgttgtacttgcctccccctccccctcagttggactgtaggttacctgatggttaagactaa

SEQ ID NO: 276057 - DNA, 122 bp, Homo sapiens
tggtggcccttggcctcctggtgcagagcatcagtcccacgctgggagtgtggagaggtgcgtgggaagcaagccattgaggaagtggggccaacagagaggtcagcagccccttagccctc

SEQ ID NO: 276058 - DNA, 122 bp, Homo sapiens
caggctgaatgggacggcgggagagctggacagagggagaaggtgtcagctgccaaggctcggctgagacttgggaaaaaaaaatgtaaatccagtgaaaaagtttggggaggggatacaca

SEQ ID NO: 276059 - DNA, 122 bp, Homo sapiens
tacatcgcaaggatataccatctcatgtgtatgacattcgccatttctcccctaccagatcgattaagacaaaggaaaacacatattcctggggaggaaagggaatagtcctggctttagaa

SEQ ID NO: 276060 - DNA, 122 bp, Homo sapiens
ctggcggcccagatactggagggccggggccgggggctcagggtcattgctgaactctggcggcggtgggatgacctcgaagttgaactcctcctcctcctcctccctcttgttcgaaggag

SEQ ID NO: 276061 - DNA, 122 bp, Homo sapiens
ggggctggaaaaggaggaggagcggggccgggcgcacgggcaccgctgccacgccggcagcgcactcccaggctcctccggccgagtttgcacaaacaaaacgccctaggaaaacttttccc

SEQ ID NO: 276062 - DNA, 122 bp, Homo sapiens
tcttgacttaaaaggaaagaagaaagacagtaccacaatacaggagtgccgctcgtcacacgctctggccacttgggacacctgcccatcagggtggcatgtcactgcctccccatcaccaa

SEQ ID NO: 276063 - DNA, 122 bp, Homo sapiens
tgaactcccgacctcaggtgatgcgccctcctcggcttcccaaagtgctgggattacaggcgtgagtcaccacacccggccaggaacatgttaaatgacaacatgactcaaggtaatgtgta

SEQ ID NO: 276064 - DNA, 122 bp, Homo sapiens
acaccttaggcacctctcactgagtcccaccatttacttgtctgccttcacattagacaccggactccccaacaaggggcaaccttacatgtttctttccccggtacctggcacaaatgtta

SEQ ID NO: 276065 - DNA, 122 bp, Homo sapiens
ttttctaattcatcaccacacaattgggctttttacctctctttaaacagaatgaaatgccgggagggagagaggttcgggggtgttgtattatccctcagcccctgtatttaccacccaaa

SEQ ID NO: 276066 - DNA, 122 bp, Homo sapiens
gaggaaggaaagggaggagacagaagttactggctgaggcccggaaggtaaaaccttgaccgaatcctgtctttgtagcctgcagtgggagtcagacaataatatcaacacttcactgggtc

SEQ ID NO: 276067 - DNA, 122 bp, Homo sapiens
cacacccggaagtcggtccgggagggagggggaaatctgagggaacgaggcttccggtggcgcaaagggtgtcgggagcggcttcctgcaaaccttccctggcatctggagggaccaccgtt

SEQ ID NO: 276068 - DNA, 122 bp, Homo sapiens
gaagttctggcgaggaaccttcaaagcggtggccaccccccgtcccgagagcatcattgtcgccagtatcacggcccgcaagccgctgccaaggtaatgatctccttcttagaaggggggat

SEQ ID NO: 276069 - DNA, 122 bp, Homo sapiens
gcggggcagggcttaggacctgcagccttccatgcctgagcctcccccctccccaccccccgccatgggctcctgcgcagcccaagcctccccgacaagcgccgctccctgctccacggcac

SEQ ID NO: 276070 - DNA, 122 bp, Homo sapiens
cacagaaactccttcagttccccaacacaaccttctgtctcagaagggactccggaaatacgtaaaaacagagcgccgggtccacgccttccccaaggaatggggcgtgtctcggcacccct

SEQ ID NO: 276071 - DNA, 122 bp, Homo sapiens
tcccggtcccgcagacactctgaaaccctgtgcactctgagaagaaacttctaaatcagtcgcgcacgcccagcaaaggcggccggcagccgtttcacgcgtggcctcgggcttctcgggcc

SEQ ID NO: 276072 - DNA, 122 bp, Homo sapiens
atagacctaaaactgaagcaaatccttacactagagtttgatagcatttttttaaaatctcgcatataaagttggctggagacctaaagcaaccagttacaaagaaaatgaggctgggcacg

SEQ ID NO: 276073 - DNA, 122 bp, Homo sapiens
ctctctaccttgctgtcacctctctcacttctgcttcagtgaggagactgtggcggaaggcggcaggtgcctgggagatctgcctgggagatggcctgacccaaagctggcgggggcttcgc

SEQ ID NO: 276074 - DNA, 122 bp, Homo sapiens
gttctgcggctcttagcagatgaactacaactcccaaaaggctatgcagcggcgggcccgcggagaaaagcgttttctctttggtgatcaacgcgaggatgttgccgcaaagccttttgggg

SEQ ID NO: 276075 - DNA, 122 bp, Homo sapiens
tgtgtgaccgcagattttcaacttttatccaaatagtttgtggtttctgtgaggctatcccgagacagtctcacaagaatctccattctccctgcacgctccgcacaaggtctccttggggg

SEQ ID NO: 276076 - DNA, 122 bp, Homo sapiens
ccacacctaactgaaagcccgaagcctctagaatgccacccgcaccccgagggtcaccaacgctccctgaaataacctgttgcatgagagcagaggggagatagagagagcttaattatagg

SEQ ID NO: 276077 - DNA, 122 bp, Homo sapiens
cagaactgcctcagcaagactctcgcagtcccctcggctgggccccaaaactcgagtccgcgaggcaagaagcgccaaagttggccacccagaggccgcataactcgtccgggtactaggac

SEQ ID NO: 276078 - DNA, 122 bp, Homo sapiens
tgtccggggagcctatgccttcgtccttgtcctctgcccgccgtcgcttgggggacgagccgctcagctcctggggaccccaaggagtcggtcagtgtgcctgacacctcggtaccaccacg

SEQ ID NO: 276079 - DNA, 122 bp, Homo sapiens
aatgtagacagaaaatttatttatctggggtgcggtttcctcagggggaagttgaggtcacgacccctgaggtaccttaacccaaaggcctccagggcactggccccagagtctccagcagg

SEQ ID NO: 276080 - DNA, 122 bp, Homo sapiens
cagccctcaggcaacatttcttgctatttacattattatggctttatcactgatatatctcgataactgataatgacttgcctttattgttttctcctccccaaaattcttggctcttcttg

SEQ ID NO: 276081 - DNA, 122 bp, Homo sapiens
tcacttcagcccatgttgttcaggtgacacccggggaagagcagactccagtgtgcaaaacgtttcggggtttccgggccagcggttccgggcgcgcctcgcgggcggcggcgcagaactac

SEQ ID NO: 276082 - DNA, 122 bp, Homo sapiens
gatccgtaaagaacccagccaacccccagagggaggggaggggctgagctgtgaggagagcggggcacaagaaccatgtgtacgcgggagtccttttaacccagaaagttacgaattggaca

SEQ ID NO: 276083 - DNA, 122 bp, Homo sapiens
aacgtggacttggatcctgaactgggcagagcaccgtgccactccgagcctcagtttccacgcctcccacgtggggatgatgagacacatgcggatgatgagacacgtgcgctataggggcg

SEQ ID NO: 276084 - DNA, 122 bp, Homo sapiens
tgggggtccgggaggaagtgtgcacgctggggggcacggctcagcccagaagccgccatccggtgggtcaggtgcggcctcagcctaggagggcgggcgggcaggcctgttgctaatggtgc

SEQ ID NO: 276085 - DNA, 122 bp, Homo sapiens
ataattcaggtaattgaatagcaacaacaacaataataataacagcaaatattcagcatacgaaatgcaactaataataacaataataatagctagaattactgaacacccaactctgggcc

SEQ ID NO: 276086 - DNA, 122 bp, Homo sapiens
aggcacaagccaccctgcccggccctgatggctcatctttaaagcaaccctctggaggatcgacagatgaggaaactggggccctgaggggctaagtaacctgcccaaggttgcacaggtag

SEQ ID NO: 276087 - DNA, 122 bp, Homo sapiens
aaacagttcagaatgaggaaacgcaacagagatggaaaaaagaaaagaaaaataaagcttcgtgtctcaggtgaaaccagcagcaattctgtattaatggaacctaagtgcaagacagtggt

SEQ ID NO: 276088 - DNA, 122 bp, Homo sapiens
ctcctggtaactcctgtggatgaacaccacttgataccaggctgtagagaagtgagctggcggttcctgggaaccaggcaggaggcacatactcaggtgagctgtggcatgggctgtgccct

SEQ ID NO: 276089 - DNA, 122 bp, Homo sapiens
ctcctgaatatgcggggggcggggcgggggccggcgtgagctgtcacctgagaggaccggcggggttgccgggagggaggccggcgccaggcatccagctccgccccgctcggtccagcctc

SEQ ID NO: 276090 - DNA, 122 bp, Homo sapiens
gggagaaaagcctggctgagcgctggcgaggagcgatgctttcaagggaccagctctggccgggagcgggagatgaatggtcgtgcggtgtcctgaccagctgggccgttagtactgttagg

SEQ ID NO: 276091 - DNA, 122 bp, Homo sapiens
tggctgtgtgtcctcagatcctagcaccaggcatctgcctcctgcctggcctgacctgtgcgtttatataatttatcccaggtcatttgaccagttagagatggagccaggaccgaagctca

SEQ ID NO: 276092 - DNA, 122 bp, Homo sapiens
cggtgaccctcgtgctacccccctttctccaggccctgggacatcttgctggggaggcagcggcggccccaggcccgggtactccctgcgcgtcccgcggagcccggcttcccggcccagtt

SEQ ID NO: 276093 - DNA, 122 bp, Homo sapiens
gactttatccagtttgaacagaggatggacagaacatctgtccaaatcaggtaacttctccgaaactttcctttccggtgattaagcaagttaataaagttgagattctttcagtgcacaaa

SEQ ID NO: 276094 - DNA, 122 bp, Homo sapiens
gttttgttttttgacggtggcggcgtgggataatcagagtggccgggtttgggcgtgatgcgtgttcagtggaagggtcataaatctcagagtcgccaaggaaacagaaacggacaaggtcc

SEQ ID NO: 276095 - DNA, 122 bp, Homo sapiens
cccactgtggcattttggggctgtagtgggttccaacaaggccccagctctcaggggcttcgagactctggcttcccccaagctatctctcagttccctctttctgcttaacctacttgcct

SEQ ID NO: 276096 - DNA, 122 bp, Homo sapiens
tacaaaggattgcacaactcgaggctgggagcgcggagcgcccagcggccggccggcgcgcgcggcaccgcggcgagcaggaaccagctctaccacttcatcagcacaactgtctcggggcg

SEQ ID NO: 276097 - DNA, 122 bp, Homo sapiens
gtagcctaggaggggcagtggaattcctggacgactgctgaaaagcaaatcacacactggcgatggtgcctacccttttgttccagaagtagaagaaaattcaggtccgcgatccagacaat

SEQ ID NO: 276098 - DNA, 122 bp, Homo sapiens
gggactgaaagcagatgtgacagtcttacagaaagagcatttagcttctacacatggtaacggtcctctttgataagggttacgcttttcttgtctgagctacacattttgttaggggcctt

SEQ ID NO: 276099 - DNA, 122 bp, Homo sapiens
gaggcttctaaacatgctgaatccacacagggctttgttgttgcagcctaaccccagctgcgggagccttgggcagccttgcacctgctccaataaaaagtggggaagttgtgcagttctgt

SEQ ID NO: 276100 - DNA, 122 bp, Homo sapiens
aaaggggagaagacagtgaggcaaatggttatgtttttgtgagactcttaattagtgtcccgtaaatctaagctatatggaagatagggtgaacactggaagaacagggagtaacagaagag

SEQ ID NO: 276101 - DNA, 122 bp, Homo sapiens
aggtggcaccaatgagaggacctttctgtcccccacgtgggaggtgtcagttttcttctgcgtctggacaggcaccagctcctcagcagaggagcctgctagcttctgccggcagccgcagc

SEQ ID NO: 276102 - DNA, 122 bp, Homo sapiens
tagggcgcgggacggggctcgagcagagggcactgggacagggcgggcgccgggagagggcggccaggctttcatttaaaaaggataaggcatcacgcctgtaatcccagcactttgggagg

SEQ ID NO: 276103 - DNA, 122 bp, Homo sapiens
ttctcatagagaacacggacccaaatctcaggttagagagaaataagagcaatatgacctcgtaatatttgggcataacaagttgttctttgttacgtgaaatagagttccattcatcatta

SEQ ID NO: 276104 - DNA, 122 bp, Homo sapiens
ctgcggctgcaggattcttatatgttgcgaactctcagcgcactgttcagccccaggctgcgctgtgagcacaacatcacgagggtcccacaaaaacgctgccaacattgcagtctgcagtt

SEQ ID NO: 276105 - DNA, 122 bp, Homo sapiens
ggttgcttatggtttccctaaggttcctgggctctggacatcagtccggtctgcaagccccgccctgattggctgcctccggcaccggtcgctgcgccctgacctaaggcgcccaggttcct

SEQ ID NO: 276106 - DNA, 122 bp, Homo sapiens
tccatggcagggagaggcaagagtgggcggtgagacacgaagatatacgcccctgttgggcggggccggcgcggcgtgatgtaatctcgggggcgggacgaagcctaggtgggcggggcctg

SEQ ID NO: 276107 - DNA, 122 bp, Homo sapiens
gagtcttctttctccaattgccttctgccccatcaccatgggccccacctgcgccacctgcgcccaccctgtgaccctggctcagcgaccttggcccttaatcgcccaacgccgattcctca

SEQ ID NO: 276108 - DNA, 122 bp, Homo sapiens
agaagggcctggggttagtcccggggtcagttgtgggacgctggtgctccctctcctccacggctgggcttcccggggtcatgaacctgtctcctgcccgcctcttctggcccccagcgaat

SEQ ID NO: 276109 - DNA, 122 bp, Homo sapiens
tttagcagctgaaccaggattaaaaattcaactggaggctagcaaagtggttaagattatcgcttttgggatcagagcccttcattcaaatcatagctgtgtttaatgactatgcgtaacct

SEQ ID NO: 276110 - DNA, 122 bp, Homo sapiens
tctttcatagagcacgtttgaaacactccctttgtagtatctggaagttgacatttggagcgctttgaggtctatggtgaaaaaggaaatctcttcccataaaaactagacagaagcattct

SEQ ID NO: 276111 - DNA, 122 bp, Homo sapiens
gccattccccaaggcagggaacacagaaggaagggagagattcagggcaggaacaaatgacgggttttggaatatgacgtatttaggtacggatgaaacacccaagtagagacgccaagttg

SEQ ID NO: 276112 - DNA, 122 bp, Homo sapiens
gggtttgtgcggagcccggcacaaggcgcggcccggctgatttctcctggacagccgaggcggcggtggtctttgtccgcctcgctgcccacgctgcctggagtctttgtgtgcgtgtcaag

SEQ ID NO: 276113 - DNA, 122 bp, Homo sapiens
ttcctcacacagcgccaggcttccatcttcgccctccgcgtgcgtccagttcccaggccccgggttccacctcaatctctataatcgatgcgacggcctaaagtatctagggaaccccatca

SEQ ID NO: 276114 - DNA, 122 bp, Homo sapiens
atctttatttttccagcctataaaggcggcagaaatcccctgggtagactctggccctggcgccgcccgcctcgggcgctccatgctgctccgcacctcgggctctgggatgctccggcctg

SEQ ID NO: 276115 - DNA, 122 bp, Homo sapiens
cgctgctctgcgggcgccgggggcggtgagaagggggagccccagcaacctccggaaaagcgaaggggtttcctgggtgttctctccacctgaaaaggtgccttcaaggctctctggatggg

SEQ ID NO: 276116 - DNA, 122 bp, Homo sapiens
actccccaggtgcaagaagaaaacccacgtcagaaagaggccacactgagcagagggctgcgcctgtgagaaactgaggcaatgcctgaagagctcgtgagccgttactcactggtgcaaca

SEQ ID NO: 276117 - DNA, 122 bp, Homo sapiens
ctggaaggcgtgggggctgtgccctcgtgggggtaggaagtgctcccgtggggcggggtgcggatcggagaggtgagtgggtgcgtctgtccagcggtccgcccggtgtggtcgtgcccggc

SEQ ID NO: 276118 - DNA, 122 bp, Homo sapiens
ccgtgtcctctcggccttcctccgagtccaggtggactctgtggatgtgtggatgtggcccgagcaggctcaggcggccccactcacccacagcatccgccgccaccccttcgggtgtgagc

SEQ ID NO: 276119 - DNA, 122 bp, Homo sapiens
gccgcctgcaccggggattctccagaaacacaggcgtgcctgggtgtgcgctcaacttcccgggcgagggacgtttctgcacttgccctcggcttctgaactttgtactttgcgagtgtact

SEQ ID NO: 276120 - DNA, 122 bp, Homo sapiens
atttgatcttctagggacgtgcaactgctaatggaagaatgcctcaagtaagcatgtatacgactccaataaacacactatgcatgctcccctcccaagtcctggcaagccactgtgcatgc

SEQ ID NO: 276121 - DNA, 122 bp, Homo sapiens
tgcctaaatgggctcctcctgtttctgttatttccctcgcaagctgcgggggcttccctccggctttctgggcctctgagtcccgctattaaaactgctccccatctctgtacaaaagagaa

SEQ ID NO: 276122 - DNA, 122 bp, Homo sapiens
ggggttatttttatttcccggctctcgggctgttactgagttgccaggaccttatcaaagcgcagccggctccagccgactcccccgggccaggctcgcggagccagtgatcccgccgcgcc

SEQ ID NO: 276123 - DNA, 122 bp, Homo sapiens
tgtagcccagataattcagtttcctctagatcaaattctatcatttggataaaaagcggacgctacaagaggcaagtcagaaatgtctgaataaaagtatcccatgagtggtgggtagtatc

SEQ ID NO: 276124 - DNA, 122 bp, Homo sapiens
tcccccattctttcccacctcctacaagcctcagacgcccctggcagccttaggtgtggccgcccagttctcgattggcagccacagccccgggcgcctcctcgcctccctccatccttcct

SEQ ID NO: 276125 - DNA, 122 bp, Homo sapiens
agagcatcacacgggagagaacctgcgtcctcaatgaacggcgttccaaaaaagcacaaccgcaccaagcatcagataagccattctgagctcagtctttggaatgtaatgaattgggggtg

SEQ ID NO: 276126 - DNA, 122 bp, Homo sapiens
cagaacgagccgtggtacatccgcaccgtggagcgtttccaggcatctagagaatcagagcgtgatcatcaccagaaaatcccagctgactgaggacgacatggacaagcgatgacagcgtg

SEQ ID NO: 276127 - DNA, 122 bp, Homo sapiens
acctgcccagggacccactcaggccctgatggaagcagctgctctttcttacctgcctggcggtgggcagcgcagctgggaaggtgtggctggtgcgggccccagctgggcatggttcggtg

SEQ ID NO: 276128 - DNA, 122 bp, Homo sapiens
ccttcggttccttaccttgtgcagctggcggcctagctgggagacaagcattaatcaagtcgtgatccgtgtaagaggagataaggggctgagagagggtgaggaggcgaacgccacctaat

SEQ ID NO: 276129 - DNA, 122 bp, Homo sapiens
tgatacatttcaagtctgtaaatacggacaccaacgccatttaccctaatttaagaacagcggggactgaccctccgtgccgagggctgcatgctaccgcactaagtcaatacatgggctcc

SEQ ID NO: 276130 - DNA, 122 bp, Homo sapiens
agaccatgaatttgcaaatgctctgcctgaagtgtgtactgaagctctggagacctcacccggattcccagggccataattatcataataatgtacaaacgagaatctttctgtaaatttaa

SEQ ID NO: 276131 - DNA, 122 bp, Homo sapiens
gctcgcgactggagggcggaactccgggctggagtcccggaagcccctgtggcagcttggcgtgagctccaggcgcccgccggcccaggacgcccggccgcccccaccccccccccccaccc

SEQ ID NO: 276132 - DNA, 122 bp, Homo sapiens
tgaaaactgcgacagactcgcagcctgccctgaattttcttcacacagcctgggggcatccgaatgcacgggagatgttttacactcagatgaaacaaactgtttagacctcggggaaaaga

SEQ ID NO: 276133 - DNA, 122 bp, Homo sapiens
ctctcatcagtcgtgttcattcacgggtggttacgcagccaggctgtcagccctgtgcagcgtgtactcaggacatgaccaagacgcatccctccctcggtcctgctaaatcctagagtgtg

SEQ ID NO: 276134 - DNA, 122 bp, Homo sapiens
gtgggaggcgttggagagggataccatgcggcaggttgggtgaaggctccgatgtcttatcgggacaaatgagcatgacagtcccctctagccaacgccggttgctccaaggggtgcaggtg

SEQ ID NO: 276135 - DNA, 122 bp, Homo sapiens
catgacattaggggctaagattttagcatatgaattttggggaaacacaaactttcagttcgtgacactgagtgaaagaatgagagatgaacgtactggagtgcttgtcagtaaacaaatga

SEQ ID NO: 276136 - DNA, 122 bp, Homo sapiens
atccgcccgcctcggcctcccaaagtgttgggattacaggcgtgagccagcgtgcccggccggcattccacttttacacagtgacaaagctctgggatgcagccagagttaaaggaatctcc

SEQ ID NO: 276137 - DNA, 122 bp, Homo sapiens
tcagctgaccatgtcgagtgggcaggaacctacccactttgtaggccacagagttcttggcgctggatgcctcattaaccccgcgttatgaggctccccctggagcctttagggaggggtga

SEQ ID NO: 276138 - DNA, 122 bp, Homo sapiens
gaggtagaagaacgaggcttttggggaaaccgagtcatggggcatggttcgaacatacagcgctgggagtgcagtcagacgtcagatcatgacaggccttgtacatcagtgttgtttccatc

SEQ ID NO: 276139 - DNA, 122 bp, Homo sapiens
ccgcgagtcgctcctgtgagagggacgggcggcgcctcgtggagggcaagcaggactccgcggaacaccagagcgggcctgagcccgcactgccctcgctgctgtccacgaagccgccgctg

SEQ ID NO: 276140 - DNA, 122 bp, Homo sapiens
aggttggcggactgcgcctggaggcggccggggccgagggggtgcgggcgctgggggctccggatacagcctctgctgcgccgcctgtggtgcctggtctcccggccctagcgcccgccaaa

SEQ ID NO: 276141 - DNA, 122 bp, Homo sapiens
tgaaatgaaataaacacatgacacagtggacattcaatactcagaaactactaagtaactcgctcaaggtcaagctaggatttaaacccaggatttgaatcttttgttccagggagcgcgta

SEQ ID NO: 276142 - DNA, 122 bp, Homo sapiens
ttgataaaaaacagggacagaaaggctcttgcagttgctttacatacctgtggcctgagtcgtttgtgccaaggagagtgtaatccacttccagctgacgcccccagctctctgcgacggat

SEQ ID NO: 276143 - DNA, 122 bp, Homo sapiens
tgcaagcacttagcaatcccctctcttgtcattttttaaaccgcatatatttcttttatacgcacaccaaatgttcattatacagaatgtgatattggcaaattggtgtttttgtaagttgt

SEQ ID NO: 276144 - DNA, 122 bp, Homo sapiens
gtgggtaaacaacacgtgacctacccctacagtgaaatatgattcagccacaaaaaggaacgaaggaccgacccacgctcgacacggatgaacctcgaaaacatgatgctgagtgagagaaa

SEQ ID NO: 276145 - DNA, 122 bp, Homo sapiens
gcagatgcctagctcatcctgggtttgcttctgaccttgtcatgtgtgtgccaccaaacacgttattggcacctttttaaataagctctcatgatcaagatggtgatggtagagaagctgcc

SEQ ID NO: 276146 - DNA, 122 bp, Homo sapiens
atgttaaaaaattagctgggtgtggtggtgcatgcctgtagtcccaggtactcgagaggccgaggcaggaggatcacttaagccctcgcactgcagcctgggtgacagagctagatcctgtc

SEQ ID NO: 276147 - DNA, 122 bp, Homo sapiens
catggaatcctgaatgtgatttacatgtcaaaggctgactcagatttaatacatttacttcggaaaaacttagagatgcctgtcaaattacaaagcaattgcctaaacattccagtgacatt

SEQ ID NO: 276148 - DNA, 122 bp, Homo sapiens
gctcggccggaggggtggcggtcgctggggacctggcggagcctttgacgtgggttccagcgttgccgagggaaccgcgtgtttacgcaggagcgcggggcgggacggcagcccagtacccg

SEQ ID NO: 276149 - DNA, 122 bp, Homo sapiens
tttgcaaggtctgtttaattatgtcagtgaccagagctagcctcccaggttaagtgagaacgagaactaacaagctgcccctagcctccttcaggacttaaatgataaagccatggcaatca

SEQ ID NO: 276150 - DNA, 122 bp, Homo sapiens
aattcattttctgacaggggtgtcagcacaatcatcagacgccaacaacaacaaatccatcgcggggtgaaaacctgacagggtggaaaacaagggccttggaggctgatctttccctctca

SEQ ID NO: 276151 - DNA, 122 bp, Homo sapiens
gcaaatgtagacgctcggtgcagtgagataatacattgaaatactgaacccacacttcctcgtgtatgatcctttccctaggtagtcagaagcatgcacattgcctggagaattaaactgtt

SEQ ID NO: 276152 - DNA, 122 bp, Homo sapiens
gctgcctgggaactcgaagaagcttgatgggggcagggagggtgagaggtggcggccgggcgagcgcactgtaggacccgagcacaatggagagagcccccgaactgctggagatgaaaagg

SEQ ID NO: 276153 - DNA, 122 bp, Homo sapiens
agagctcggagttcacatgggccacataagcgaattcccttccggagcgcacagaggtgacgtgtatgaattacgcttatggacgtattagtttctaatgaaagataagcaggtaccactca

SEQ ID NO: 276154 - DNA, 122 bp, Homo sapiens
ctggagcaaggattgcagcgtggctgaaggcggaagacgccttaggcaactgcctgcagccgagcctgatggggacccagggacagatccctggatcaggacccatgggacctacctaacat

SEQ ID NO: 276155 - DNA, 122 bp, Homo sapiens
aggagtgaatgatggtgtgctccaaggcccccatggagagcccggcacatggcaggcactcggtgttcaagcactgtgttcccatagactctgggctcctgccctcctcgcccccaaccccc

SEQ ID NO: 276156 - DNA, 122 bp, Homo sapiens
ggaaggtggagcgggacaggggctgtgggtgagaggcccctgtgggtcctcgctcggcttcgctccctttctcctctccagcagtgaagtttgactattttcctggtgcttgtaaaaatagt

SEQ ID NO: 276157 - DNA, 122 bp, Homo sapiens
ggaacggcgtcggcgcgcgggggcttttcggagcagtcgagtggaaaatagactttaacccgctttgtggcggccggggcgccctgagcgctctccaaaccacggctcccggcgctcaggcg

SEQ ID NO: 276158 - DNA, 122 bp, Homo sapiens
ctgttgctgtcatttgcaatgaaaagagacggcctgtggacggagctgagtgcagcctggcgaatagtaactgctggtgaagcatcacctgttagtatcattactgtatcactgcccaactc

SEQ ID NO: 276159 - DNA, 122 bp, Homo sapiens
aaggcattacagaaagacacaaaagtcacgctccagatcccagcaatatagctagtaggacggacacagagtacatagttgtactactgatcacagtgacttagagattggaacctatagtt

SEQ ID NO: 276160 - DNA, 122 bp, Homo sapiens
ggggactgggacgctgcatttccaacctgctagcaggaggccctgctctggcccatggaccgcattgtgcagccaggctgtggaacccgtggcctgattttcagcagagggctggagacaga

SEQ ID NO: 276161 - DNA, 122 bp, Homo sapiens
tggcgccccgggtcccgtccgaccctggggagacgcgggtggctgggatggcaggatgagcgcgccctggaggcgagccaggcccgtcaccacctcccagcggccccgcccctccccgcagg

SEQ ID NO: 276162 - DNA, 122 bp, Homo sapiens
actgtacatactggtgttttgtgcaaaaaaaggactgactgcaataaactgtgttaagtgcggcccaatttagaatggttgaataagaaaaggaaaacatgaatgagatataaaaagaaaaa

SEQ ID NO: 276163 - DNA, 122 bp, Homo sapiens
gaaatactgtttttatagaaccagagtgaacctgagcatagaaaactctccaagggccatcgctgtgacattaccgctaaaactcagtgaccttcatcaattcacttgtaaacaagcaatat

SEQ ID NO: 276164 - DNA, 122 bp, Homo sapiens
aggtagatacatggcttaaaaaccaactgctctcagaataaaggatattttccctaagcccgttttaaacaaactgaatggcacacactctcataaagacagatgattgacattacatagcc

SEQ ID NO: 276165 - DNA, 122 bp, Homo sapiens
aacacaaactcctacccacctgcaaagccggcgcctcgttttcctcctgagctgcggacacgagaccctcccacttcagaaaagaaaaacggtgtcgctgcccttcgtctctgtctgtataa

SEQ ID NO: 276166 - DNA, 122 bp, Homo sapiens
caaagcagcgaccaatgactagctgagttgggctgggccggccgacgaatcacgaggcttcgcacccggatatggttatgggctcggaaatctagttcgggaaaagtgtgaggggctcttca

SEQ ID NO: 276167 - DNA, 122 bp, Homo sapiens
gctgctgccgctgctgcaggcggcgactgcgtccccggaggcagcacgcgaaccaggcggcgcagtcctggaagatgagcagccccaccacgttgaccaacagccccaggacgccgacgatg

SEQ ID NO: 276168 - DNA, 122 bp, Homo sapiens
cccagttaacccttcagatgactgcacctccagctggtgtcttaactgcaatctcctgagcgatcccaagccagaaccacctgaccgacccacagaaactgtgagatcataaatgtttattc

SEQ ID NO: 276169 - DNA, 122 bp, Homo sapiens
cggcggcggctgtaggggagcagcggcagtggcggcgacggcgaggaggtgttcggtttgcgcagcgtagaaacgcccgcagcttcagagaaggagttcttgtgggaccaaattaggcattc

SEQ ID NO: 276170 - DNA, 122 bp, Homo sapiens
ctggaagcgctggcctccttggggaccccgagtgtgagggctcgccccccgagcacagcccggagcaggggcgctccctgagcacggcccctgtcgtccagcccctgtccatccaggacctc

SEQ ID NO: 276171 - DNA, 122 bp, Homo sapiens
acgcccaggtctgactgcaaacgtaccccaagagatctggtcagtcccagaccgtgtgcccgagtagagtagtcccagctcacagagcaagcatctgacccagagagaggcggagctggggt

SEQ ID NO: 276172 - DNA, 122 bp, Homo sapiens
acaaccaatcaggatgcagaggaagggcgggcgttgcccgggcaaattcaaactgacaaccgctgcaacttggcactgttccaaatcactaaccgacgggggaccgacgagtattttaattg

SEQ ID NO: 276173 - DNA, 122 bp, Homo sapiens
gtcttcctggagctcaaccgcaatttcacgagcctgtccctggatgacagctacgtggagcggcgccgggcgcccctctacttccagacgctgagcactgagagtagcatctacttcggcgc

SEQ ID NO: 276174 - DNA, 122 bp, Homo sapiens
ctcccccagttcaccatgggccccaatgtgaagatcaacgtgctgggtgagtctgcgcagcgccctctggtggccactgctggaaccgcagccccccgccccggtgcctgctcacctcgcat

SEQ ID NO: 276175 - DNA, 122 bp, Homo sapiens
agcggcagggagcattagctggctgagcacataaaagcctccctacgtaggtatccccgccgccgcgcgaggccggagcatctcttcgcgcgcgcttctctcccggatcaataacctccgcc

SEQ ID NO: 276176 - DNA, 122 bp, Homo sapiens
cctctcctcccttccttgcttcattaaccaccatattcttgggctttctacattctctcccgcaaggtatggtcccactggggctgtcctggcctcaggtcagaccttctttcttccctcca

SEQ ID NO: 276177 - DNA, 122 bp, Homo sapiens
tctgcaaacgttggtccctgtagtgctttgaatttccccgaagagctcttagacccgccccgggagagtggggttgcgggggtggtagcatggggagctcagcaggattcagcccgcacctc

SEQ ID NO: 276178 - DNA, 122 bp, Homo sapiens
tcctggcggcgtggagggtgcgtgcgggatgtctgtgagccgcggcgcaccgagagccttcgcgaagctgggctgcctggtcgctgccgctcctcccgccgcccgagctgctgagatcccca

SEQ ID NO: 276179 - DNA, 122 bp, Homo sapiens
tagagttttctgctatctttgctggaaatgagttgcaaaagtttttctcaagatgtagtgcgtaattgatcagagcaaaacatgcagagcccttagcagaaacccactttaatgcattttct

SEQ ID NO: 276180 - DNA, 122 bp, Homo sapiens
gtggggcacttcactgttacctataagggcttgaatttcaatcaagaatcatttatcaaacgcctcttatgtgccagacaccaaattcggctcaggggagccctatgtaagtgagacacagc

SEQ ID NO: 276181 - DNA, 122 bp, Homo sapiens
ctcggaggaggaggaggggaagatccccaggtggagaccaaggtgcccctcacgctgagtcgtctaggagaccctccctagtttaaaaagtgtttatttgctcggagaacatttcaggaggc

SEQ ID NO: 276182 - DNA, 122 bp, Homo sapiens
agagcgccagcccgtgtgagaagtcgatcacctcgtcctccatgccgtggatgatgagcacgggcgacgtgatcttggacaccttctcgatgttagggaaggcgtcgaagcagtaggtcttg

SEQ ID NO: 276183 - DNA, 122 bp, Homo sapiens
gagccgcgggccagagggtggtgcctgcctccccaagagccattcccacgccttcagagacggtgattcatctccaagggtaatacagcaggagtggaaaggaaaagagctccaatgatcat

SEQ ID NO: 276184 - DNA, 122 bp, Homo sapiens
gttcattatctatgtgaagctgcagacctttgcagcgagcgttacagctcttaaaggtagcgtatcccgagtttttcgttcctcccggtgggttcgtgggctggttactctagccgacttca

SEQ ID NO: 276185 - DNA, 122 bp, Homo sapiens
aaggcaccaaccatccacagcctggccgccactgtgcccactctcggactgggcagcgggcggccaagtaccatgtccgccagcccgccctgccacaagggtcgctggcttgccgcggggtc

SEQ ID NO: 276186 - DNA, 122 bp, Homo sapiens
gaggggtcagagtattgggaccgggagacacggagcgccagggacaccgcacagattttccgagtgaatctgcggacgctgcgcggctactacaatcagagcgaggccggtgagtgaccccg

SEQ ID NO: 276187 - DNA, 122 bp, Homo sapiens
attaactttctcctctataaatccttttgatagttctctaatattcatggctgccaaaatcgaggttttttttttttttttttttttttttgatggagtcttgctctgtcgcccaggctgga

SEQ ID NO: 276188 - DNA, 122 bp, Homo sapiens
aaattaaacatagaaaatatgatccagcaattccacttttgagtatacatcccaaaaagtcgaaaggagagacaggaacagatatttgtacccccatgttcatatcagcattattcacaata

SEQ ID NO: 276189 - DNA, 122 bp, Homo sapiens
cgctggtggtcttcgtacggatactcatgttctgcatcccagactccagccggctctcctcgccctccagcagctgtaggtggcgatctcgatgtccagggcagcttgacgttcatcagctc

SEQ ID NO: 276190 - DNA, 122 bp, Homo sapiens
ccagcgtccctccatcactccctcccttgtttcctcactccgccccggccttactcccctcgcttaccctgcccagccgggccagtcagcgctcccggctcagcaaccggctgtctcctggg

SEQ ID NO: 276191 - DNA, 122 bp, Homo sapiens
agaagaagatgaagctccgcctccgccgcttagtcccaaccctgcccaggaagaagggcccgtggggctttgcctgtgcccgtccaccaaaggctgtcatgtgtctcgaaatcagcagccct

SEQ ID NO: 276192 - DNA, 122 bp, Homo sapiens
gcctcgtggggcggggcctcagggcgccgccagggggcgcaggggtctgtcccgggcgcgcgcgcctctcagagccccgacgacgcctcactaataacacaggggtattttcggatttaaag

SEQ ID NO: 276193 - DNA, 122 bp, Homo sapiens
tgcacagcattgtggcaaacgtgtggagcttcctcagacaacgaaaaccagaactaccatcggatcagtgatcccactgccgggcatccccccagaggaaatgaaatcagtgtgtcaaaggg

SEQ ID NO: 276194 - DNA, 122 bp, Homo sapiens
gggcggggcttgataggcaggggcggtgcgggggcgtgggcagcacaagccgtgcgctcccgggctgcgaggtctggctaggctacgggccacgcgccgccgccgctgccgccgccactgtc

SEQ ID NO: 276195 - DNA, 122 bp, Homo sapiens
ggggaacggccgcttcccgttcaacgctttattgaggggcgtatcctagtggcccccatccggtctccgttttggaagacccgcctcggcacagccaggctcagtccggccttgcggtaagc

SEQ ID NO: 276196 - DNA, 122 bp, Homo sapiens
tgaggctaacgatccagtgtggctctcctgaaggcccaccgcgcccgcacctaggagacgcgccccttctgctcatgctttgaggcggggtgacccacacatctgtgcccctctctgagcag

SEQ ID NO: 276197 - DNA, 122 bp, Homo sapiens
ggcagagaggggcggccccagaaaccacttccagatgtgctcggctggccggctcggatgcgccagacttcctctggctaagtgcaaaacatgcaaaaaacaacgctgttctggaggaaaag

SEQ ID NO: 276198 - DNA, 122 bp, Homo sapiens
tgtttttttttgtttttgtttttttcctttgagcaactctgggaaaccaaatgcaagaaacgcccaccactgcaaagaaggaaatctcatgccttggcatcaaaggaagcaccaagtaaaac

SEQ ID NO: 276199 - DNA, 122 bp, Homo sapiens
atccaggtgagagacaacgggggcttggactgggctggagctgtggagttggagagacgccggcaaattcaaggacttaggaatggattaactgcgagggttgaagaaaaggaatgaggtga

SEQ ID NO: 276200 - DNA, 122 bp, Homo sapiens
tgtgttcagtgaaaggctgatcgagacccaaagaatgcagccctgtgtctcctctacctacgacctggaagcccctcctgcttcaggctgtccctttccggacagaaccgacgtaccccctc

SEQ ID NO: 276201 - DNA, 122 bp, Homo sapiens
tggaagtgggtgacctggtggcaccagagagggcgggggagagagaggaggacagggagacgagaccccgctgacccagaggccccaggaagagacactagccaataacttgttagtgagtg

SEQ ID NO: 276202 - DNA, 122 bp, Homo sapiens
atcctcagcccttgggtggtcgatgggactgggtgccctggagcagggaccggcgctcgtcggggaggctggggctgcacaggaacccacggagtgggtgggaggctcaggcatggcgggct

SEQ ID NO: 276203 - DNA, 122 bp, Homo sapiens
ttggtatgccccaggggacagatgtcttgggatctttaacatttgggatgctgcaaatgccgaagttaaatgaaatacctccggggagggcaggccgcagggaggctcggggggagggaaga

SEQ ID NO: 276204 - DNA, 122 bp, Homo sapiens
ttgctttgctgagaggagggggttctttgattgagcgtctatcatgctgccatgggaaagcgagaggcgaatgattctcagtggcttctgatttccagtatttgttcagcattaggcccact

SEQ ID NO: 276205 - DNA, 122 bp, Homo sapiens
tagcaggtcacactcccttccctccatcagttgttgttctgctgtcatgagccttgacaccgcagtacgacgcgctcaggaagacatcaggacagaggtctagacgcttacaaccctgagag

SEQ ID NO: 276206 - DNA, 122 bp, Homo sapiens
tattaggtgcgagagccttttgaatgcctcttcggaaagctttgttcccaagcaagctttcgttcatgggcattatgcgcctccctgcccttttttttttttttttttttgagacagtctcg

SEQ ID NO: 276207 - DNA, 122 bp, Homo sapiens
gcctgctgttggcacccccgctcctcgaccccacatacctggaatgtgtccttggacgcccgttcaaaaacttttgagcggctggagaggaagagcacttctgtcttgcctttctctccata

SEQ ID NO: 276208 - DNA, 122 bp, Homo sapiens
tacctgtgataggcaatacagcacttactatctttgaggtgtggacttctcttaagcattcgggactgcagcatttttgagagcatgcagcattgaaatagctaggcttgtcttcaaaccct

SEQ ID NO: 276209 - DNA, 122 bp, Homo sapiens
atacattgccagtctgaactccgcagctcttcctctggacctcaggtgtgccaagccccacgcttggcacctgggcatacagtggtatgcaagtgattcacgtgctctagcttccaggagct

SEQ ID NO: 276210 - DNA, 122 bp, Homo sapiens
gggaagagggtgtgactcccagggggacagaaggtgtctctggaggaaggcaggactgtacggctgtgagtggcaagtgtagtctcaatgagcatatttaatatttattttatttttgagac

SEQ ID NO: 276211 - DNA, 122 bp, Homo sapiens
ttggcgcgtaactcattccatcctccaaggtactgttgtgctttcagtctccaggtcacccgcagggtaggtgaccagagccagagaagcggtttattcccggggctccgcactgcacccac

SEQ ID NO: 276212 - DNA, 122 bp, Homo sapiens
gtaaagtgtcctctgctcattgcatcggattttgacagagctgtgcccagacaccccctacggttgaggctgggctgtggctcctctcagttctgtgaattcttgctctttatgttttgaag

SEQ ID NO: 276213 - DNA, 122 bp, Homo sapiens
tggggggggtcaggaggggtgggggctccagggaaagcccgggggtctgggccggggtctcgcggggcccttccggaaggatcgcggcccccgaaggtgggcgtcccgcggggctccagtct

SEQ ID NO: 276214 - DNA, 122 bp, Homo sapiens
cctcctccctcccaagtccgcgtgcctgcccagccccatctaaacgcggggtacggagctcgcaggtctctcttaatctgaaacctgttcctatgaagtgtaagatgaaggaaaatggaacc

SEQ ID NO: 276215 - DNA, 122 bp, Homo sapiens
gttcactctgttgtgaatggtgtgctctttaaccttcatatgtggcatgtatctgactgacgagggagcctattgtctgtagacattgaacacaagtatgtcttataatataaggaatagta

SEQ ID NO: 276216 - DNA, 122 bp, Homo sapiens
ggcacatctgctcccaaaccatggtgcagaagggctccagtgctgggtctgaagaggaaccgggatttcgtgcagaagcaggtgagcagagaggaggagaaggctgggtcacacctcccggg

SEQ ID NO: 276217 - DNA, 122 bp, Homo sapiens
gccaagcccccgcacaggagagccgctgtgagcggcgttatttgtctggacagcccatcacgctgaccttgcggacagacgtcatcgatgctccctttgtggccatttttaacactttctgt

SEQ ID NO: 276218 - DNA, 122 bp, Homo sapiens
gcagtcccgggccgctccccgggagagccgagcccgcccgtgcgtcttcccccgcgcgcccgcccctgcgccctgcgcccgccccagcccagcccagcccagcccagcgcggtcgggctccc

SEQ ID NO: 276219 - DNA, 122 bp, Homo sapiens
gattgccctcctgatgcccttgtttgaaaggcactgcaactcctccctgagtctttgccacgcatttttgtttgtaattgtttcaatgccttatagtggcccctgacttccgcttccaggaa

SEQ ID NO: 276220 - DNA, 122 bp, Homo sapiens
agtgagctcttacattacaataatacaaatgtttaccatgtggggacatctatatgtactcggcattatgctaagtgctataacttgatgagagactactttgtatttaagtgaagcagtgc

SEQ ID NO: 276221 - DNA, 122 bp, Homo sapiens
aactggagctagcagttttgggcaccttcaggagcaaactctatgcaggccccctagcagcgtccaggtgggggcgcctgcaacctctgaagccccagaggatatgttacagtgctctttta

SEQ ID NO: 276222 - DNA, 122 bp, Homo sapiens
ccacgccaagtagggccttgtgggtggccggtcccctcctccagcgtggcacggaggcgccggagcatgcaggtctatgcctctgcagagtctggggcatcttgttccatttccttgctgcc

SEQ ID NO: 276223 - DNA, 122 bp, Homo sapiens
cagacctctcctcttcgcccacaatcccctcagaaatgctagagggaatgtctactgagtcgaaagtcctacagatttgtctctgttccttcccattgcaaaaccaaatcgctttcatgttt

SEQ ID NO: 276224 - DNA, 122 bp, Homo sapiens
ggactccagcccaggtgacagaatgagcccgtctcaaaaaatatatatataaaggccgggcgcggtggctcaagcttgtaatcccagcactttgggaggccaaggcgggtggatcacctgag

SEQ ID NO: 276225 - DNA, 122 bp, Homo sapiens
cccaggccaccggctcgtgaatgtggggtcagctcagccatgttccctcttgagaatcgacgctatagatttgtattcattacccactgaattcagagccagccagacatccacgtctcacc

SEQ ID NO: 276226 - DNA, 122 bp, Homo sapiens
ggcggcccctcggagtcaggacacccagggtaacatgcgggtggccacgcgcagcccaggcgcttgcaaaacttagcggagccgggccggggccgggcccggggaaggcgggagggaggagg

SEQ ID NO: 276227 - DNA, 122 bp, Homo sapiens
gcatccctccttcaaggtcaagacccaggacatagttcaacaagtagttggtgatgatagcgtgccctgactgggccagaacagcctctttagtaaaataacgcagggaagtcatgaaacag

SEQ ID NO: 276228 - DNA, 122 bp, Homo sapiens
atacttctccagctccgagtggtatatgtgacggatctgggcaagtttgctgcgatagtccgagtgttcgatggagttgtcaggggacacaccaccaccagaggctgcagcggctgcagctg

SEQ ID NO: 276229 - DNA, 122 bp, Homo sapiens
attctgtgtgttggtacagagtgctctgtaccagtgctcatcatcccttcttcataccaacggtccctagttataggaatttaatatttttaaaagttttacattgctgtatattcaaagat

SEQ ID NO: 276230 - DNA, 122 bp, Homo sapiens
acagataactctggtcagcagcactaccacttttgtccactagatgtcgctccttcactacgttgtttcttcctctccaattgtttccacagtattttcagttgctcttcattttgttttta

SEQ ID NO: 276231 - DNA, 122 bp, Homo sapiens
cactgactcccatttctccccagtgccccagaccagccccccaattccttctacatggtccgtatcatttccaaggccccatgcatggttcttcgcctgggttttcccattggcacaccagc

SEQ ID NO: 276232 - DNA, 122 bp, Homo sapiens
agtcatgttaaagtctgctgtggaggaagatgggtagtctttaacaacatttaaacacttcgtacccgttttcattaaaaatgtaaggcacacgatggccaggaaaaataagaaaataaact

SEQ ID NO: 276233 - DNA, 122 bp, Homo sapiens
agtacattgtaaaatttagcagattaaaaaaagtacacagcattttttttctgtgcacgtcgcagagtcctgagcttgaggctgtgttactctactcattccaaacgaatgaaagatctctg

SEQ ID NO: 276234 - DNA, 122 bp, Homo sapiens
cctctcatgaccgggtcctcgccgctgagtcctggggtttggttttgctctgacgcctcccgtgcacctccacagatggtctgggagcttgggttggaaatcctatgcccactccaacccct

SEQ ID NO: 276235 - DNA, 122 bp, Homo sapiens
tgccccccacacacacacccacacagacatgctgcccacacaaagagacacatacactgacgctccccacaatacaggtgctgcccctacccttcactgatgggtcaggtaagagggcaaaa

SEQ ID NO: 276236 - DNA, 122 bp, Homo sapiens
ggcaaacaactcaacttcaagcctcgagtccttgcaaacccacgctggctgggctaactccgcttcccttctccttcccccgactcctgcaacagctcagagagcctggctctgacgtagtt

SEQ ID NO: 276237 - DNA, 122 bp, Homo sapiens
ctgccgattttcgcctacccgcacacggttggcaagtcggtcacagggggctacgtgtaccggggctgcgagtaccccaacctgaacggcctctacatttttggggatttcatgagcgggta

SEQ ID NO: 276238 - DNA, 122 bp, Homo sapiens
tccaggtcctgtgtcgtcgaactccattacttctttaggtccatacgatgtgtcttaccacgaaacaaacccacccagccttaatctgttgaccagcagcaaggcctggaggcgacacctct

SEQ ID NO: 276239 - DNA, 122 bp, Homo sapiens
cgtgtctttatagggaatatgcacagaaagactagtccaagatgttttctgtgactggttcgtagtgacttccataagttattatcaagagaagttagaatttagcaaagcagcagggaata

SEQ ID NO: 276240 - DNA, 122 bp, Homo sapiens
gcttggcagtagcctcgctggaggcagggtgggaggcggagtgtgggccacgtgtgaccacgtgtggggtgtctatggcgccctggtggtggtacagggtgctgtggagttgctatggggcc

SEQ ID NO: 276241 - DNA, 122 bp, Homo sapiens
gggagacagcaacaatgcaagtgacagttctgcccagtagattgaatttgtgatgtaaaacggtgatggggtgagtcagtcagccagagacagctctcagaacgactgaatattgacattgc

SEQ ID NO: 276242 - DNA, 122 bp, Homo sapiens
acaatagcgaaaaggtggaagcagcccccatgtccaccgacagaggaatacggataagcacgatgtggtctagccagacaacggaatattatccaacttttacaaagaaggaaaggccgggc

SEQ ID NO: 276243 - DNA, 122 bp, Homo sapiens
ttctaagtttaccacctgctggggcaagtggagattcttgtcttctcatctgtctgcccacgtgctaaggtcagccacacatccacccaccgactccggaggacagacacatccagaggcgg

SEQ ID NO: 276244 - DNA, 122 bp, Homo sapiens
tatgcttccagtgcctttggaagaggaagggaagaagtttgttctggttatgttttgtaccgcaaatgtggaaaagaaatgttgcctgcaaccacacacacataacttggcttctttggtca

SEQ ID NO: 276245 - DNA, 122 bp, Homo sapiens
ccctccactttctgaaatgaatggggacacgttctattgttattcgaattgtgggaaattcgacagttattcgagttgtggaaaagcaggctccagaacgtcttggagatatgacttagcaa

SEQ ID NO: 276246 - DNA, 122 bp, Homo sapiens
caaaatatatacatcttaaccacagccccaaagttaacattgacgtagaaagagcacagacgttctctcaaactgcaaatgaaatgagtagactaaataacaggattctttataaaaagctg

SEQ ID NO: 276247 - DNA, 122 bp, Homo sapiens
ggtgctctcatccttgctggcaaggggaggagaccccggccttggccccagctcctgatgcgctccttgagccggaggcctggtccctagtcacctgggcaggtgtcatccgctcccggctc

SEQ ID NO: 276248 - DNA, 122 bp, Homo sapiens
acccgctatgaggtgcgtgaagtgggcaggccctgtcagtctcgcgttcttcttggaagccgagacgcgggccaccctcggtcctcatgctcccggctgctccctaggcgaaagcccgcctt

SEQ ID NO: 276249 - DNA, 122 bp, Homo sapiens
tctagcggcagccgagacgctgctcacccggcgctcggcgccatcttggccccgccccctcgtgggagcaggtcctggcagagcctaagagcaagtcactgccccttccccgtaccagaata

SEQ ID NO: 276250 - DNA, 122 bp, Homo sapiens
gaaggctttgaagacgaaaagtgctgtagaggtgctaagcagcagccaacggaccgggcccgctgccagggggtcagggctgggccgaggcggccgcggtctcaggctctggccaattttgc

SEQ ID NO: 276251 - DNA, 122 bp, Homo sapiens
ccccacaaactggtttcgctgctttgctgggctctgttggaactagtccctttgactccccgtttctattttattttcttctggggctttattttgcggggaggggacggagggagggggct

SEQ ID NO: 276252 - DNA, 122 bp, Homo sapiens
gcgtgcaagtgccaggggcgggcgtgccaggcaggaggggccgaccagccttggggacagcggtgcgtgcgctagtgcccgcacccggtgtgtagaagggcgcgagcgttggcgtgagagcc

SEQ ID NO: 276253 - DNA, 122 bp, Homo sapiens
aaaccagcgccagcaccttccagagcctgacgctcgactcctgcctctgcagcaggctgtcgaagtcctggctgcttagatagtactgcatgccttgtttgggcggctgcaggcggacagag

SEQ ID NO: 276254 - DNA, 122 bp, Homo sapiens
aggcactggggtccgggacgcgggaaaggcttggaaatgtgcgacgcggctgtgtgcgaacgcgtggactaggtcttggctcgctgggagggaagggctgggccggcgctggggaggaggaa

SEQ ID NO: 276255 - DNA, 122 bp, Homo sapiens
ggcttcatcttaaagctcaatgtggatatctgatcagcaaagcctcttccaccctttgtgcgagttgtaacaaacgtccccttcctccagatgcacaatgctcgcatcaggatcttcagctt

SEQ ID NO: 276256 - DNA, 122 bp, Homo sapiens
tgggtgcttggccgtccctgccattagcgcgtaacgagagactgcttgctgcggcagagacgccagaggtgcagctccagcagcaatggcagtgacggcgttggcggcgcggacgtggcttg

SEQ ID NO: 276257 - DNA, 122 bp, Homo sapiens
agaaattgagcgccataagcagaagatcaaaatgctaaaacatgatgattaagtgcacaccgtgtgccatagaatggcacatgtcattgcccacttctgtgtagacatggttctggtttaac

SEQ ID NO: 276258 - DNA, 122 bp, Homo sapiens
tagatgtgatcagtagtactcggggtattcagggatagaggcatgtaggtatactggctgcgtaacataaaaccgtaaagtgtagaggaagaaatagggcggcatctcaaagaggaaatggc

SEQ ID NO: 276259 - DNA, 122 bp, Homo sapiens
tttctctactttgaacccatcccagcagagtccaggaagtagcctggcgccggagactggcggcggcgacgcccaatgggacgcgccagcggcggcggcagccccgcccagagagcaaatga

SEQ ID NO: 276260 - DNA, 122 bp, Homo sapiens
gctgagggggcccatgctgggttctggtgtcactgtgccccaaccccccctcatctcccccgccgtccctgcagcacagcctatgcccctgaggccaccgactacgatgtgcgggtgctact

SEQ ID NO: 276261 - DNA, 122 bp, Homo sapiens
ttcacttggcgctgtccgctgcggtggccgcttgtccctctgctcaggttttatatagcccgcgggcattccctccgcgccaccccgcaggaatgtcgctgcccttctcgagccatatttgg

SEQ ID NO: 276262 - DNA, 122 bp, Homo sapiens
gtgtgctcactacacaggcctgaggtgccatgtgaccttatctttgagcggtcagaagcacgtcagaaaggcttccaccatggctggtgaataagagcgctataaaacctgagaacacaaga

SEQ ID NO: 276263 - DNA, 122 bp, Homo sapiens
tgtattttgatgttttgaaatgcaagttgtctcaatggcacgctttcccctcttggacggcgtgcagactgtcaatccccggcgtcacgccctctggaaggctgcagagccgagaagggagg

SEQ ID NO: 276264 - DNA, 122 bp, Homo sapiens
tagagggcaggcagtgcttggaggagaaagttcttcagaaacagccatctgtgtttaggccgtgggcccagaatcgcaaatcccttctacgacacccttaaggtattaaagcctaaagttct

SEQ ID NO: 276265 - DNA, 122 bp, Homo sapiens
cgtgagttcccaaacagcctcctccccttcaagagagtaagcttgggccacaggctgggacggaagcagaggggcagacacgccaccacccgcccggcctcgaacctacggcggcacagttc

SEQ ID NO: 276266 - DNA, 122 bp, Homo sapiens
acagatccaatgggctcaggctttctatccagggttcaggatgtcacggtatatactgtacgcccattcttctacatggtgatgtgagacacagtagaggcagacttgaggtctaattttgc

SEQ ID NO: 276267 - DNA, 122 bp, Homo sapiens
cccgccacctgcttctgtttcaggatgcagaacgacgtgaagctgccccagggtcagcggcgcaagtgagtcatgggcggccttctcggggtggttgaggtgcaggaggctcgggcgggagc

SEQ ID NO: 276268 - DNA, 122 bp, Homo sapiens
cctccttaaactccagctaggccttgttttaggaagctaagtgttttcccatgactgcatcgtattttgcataataaaatccaagaatttggaacaccaatcactagatgcatacacctcct

SEQ ID NO: 276269 - DNA, 122 bp, Homo sapiens
gtcagctcgccgggccgcgggtctcgcggacaccctgcagcccttcccgacagcggcgaccgggaaagcaagaccgtctttttcgtccagcccaaattgcgaaaacggccacagtcccacaa

SEQ ID NO: 276270 - DNA, 122 bp, Homo sapiens
tttccctggtcattacgtctcctccgggccgagcctgatccaggacttgcatcccgaggccgggtctcccacccgcaccagggatgttccatttgatttaatgaaaataggaacaccaagct

SEQ ID NO: 276271 - DNA, 122 bp, Homo sapiens
ccaccagaatactgcgcttttccgatgggcttaaaaaacggcgcaccacgagattatatccggcacctggctcagagggtcctacgcccagggagtctcgctgattgctagcacagcagtct

SEQ ID NO: 276272 - DNA, 122 bp, Homo sapiens
ctgcctcccagatggccccggctgtttccacaacctggtccaccctcccttctctcgggccggcactggttgagggctgcgtcgcacgtgcttctcaccaaagcttcctaacagggacggtg

SEQ ID NO: 276273 - DNA, 122 bp, Homo sapiens
aagatccctctcattaagcccactgccctgcagctgactcaagccatcatcatgtatgtacgtgtataagaaaggacactggccgggcatggtggctcgcgcctgtaatcccagcactttgg

SEQ ID NO: 276274 - DNA, 122 bp, Homo sapiens
gcactccagactggataaagagctctttgggaaaacaaggttgttgcaccccttcctacacgttacctaggctttcccttttcccccaaataatgccttataaatggcaggcacatcattgc

SEQ ID NO: 276275 - DNA, 122 bp, Homo sapiens
tctttcttaagcctccttgttcctcagagcaggcagtgcaggctatgggattccccaggacggagaggcctctgccccggctgcttgatgcaaggctcagagaggccactaggtttctacca

SEQ ID NO: 276276 - DNA, 122 bp, Homo sapiens
agccaaagctccctgctggcacacagcagcaggcgacaggcactgaaggtggaggtgagacgtgggaagcagatctggcacttgagtcagtagaaaatggggagcctctgtgggctcctggt

SEQ ID NO: 276277 - DNA, 122 bp, Homo sapiens
ctggggagagtgcattcggtgccctctccttgcccgcccgggcagcagccaggttgggctcggctttgtgtccacagctcttagggttagagaatgacggctccaagctccccctgcctcac

SEQ ID NO: 276278 - DNA, 122 bp, Homo sapiens
ggcttcaatgtagcttctgagctaatttgatgtagtggttaatatgtaacctcctgacatcgaaaaggatatggatttgtttctgaatcataaagttttactgattgttttgtgcatgaaat

SEQ ID NO: 276279 - DNA, 122 bp, Homo sapiens
cctaccgggggcgggtgctacacttaatcaccgggaaacgcagctttccggggcggctgacggcccaccccctccgaccgggctgttctctcccgggccctgcctctcggtcctctgcagcg

SEQ ID NO: 276280 - DNA, 122 bp, Homo sapiens
ggctacgccggaagtggcctgccttcattgatggtgggacgactttgaaaagcgcgcttccgctttttccgcagcccaaacaggctcgaccaatctgaggccgagcgcacgatctagtcagc

SEQ ID NO: 276281 - DNA, 122 bp, Homo sapiens
cccgagcccctgtccgaaaattgagggctttttcggttggttggttgaagaaagcagcaccgtcaccacccaggtggcctcgctgcttacaccaaaggcgaactggggataatgggaacagt

SEQ ID NO: 276282 - DNA, 122 bp, Homo sapiens
ggcgccgactcccagacgcagctgtgaccctcttgcacgaacccctacggtggaggtcggcggtgcgatagcgtagttcctaaccagtgcttcaccaagcatatgcagagccgccttttggg

SEQ ID NO: 276283 - DNA, 122 bp, Homo sapiens
aagcattatctggtgggagatgtgttgcagcgagacctcccaccagtaggtggcactgcgcgcaatgctcgcacctcccctcaacaccctttctctcagcaatggcgggtgatggtgggggt

SEQ ID NO: 276284 - DNA, 122 bp, Homo sapiens
cgtggggtgcatcacaagtgcacctgtgcccaagtcctgccaccaggaggtgagttagtccggctggaatgagggccctaggttggatcttagttgtaaagctcccccaggtgatccaagcg

SEQ ID NO: 276285 - DNA, 122 bp, Homo sapiens
cctgaccgccccgggcttaagggagcctggctaggccggcagccggatggtcccgcagctcggggccggccatgcttcgcggtccgtggcgccagctttggctctttttcctgctgctgctc

SEQ ID NO: 276286 - DNA, 122 bp, Homo sapiens
aggttgcagtgagccgagaccatgccactgcactccagcctgggtgacagagtgagactccgtctggaaaaaaaaagaaaaaaatgagatataaagttcaaaggatgtatttattaagccaa

SEQ ID NO: 276287 - DNA, 122 bp, Homo sapiens
tctccttggtgagcccggggagccggcgcatcttgtgagtcgcgtctgtgcatggcgatccgctcctccggctctcatggcattgtgccacaggcagaggccaggaggagcagtatgtgcac

SEQ ID NO: 276288 - DNA, 122 bp, Homo sapiens
atttttgcattagggtgttccagaaaggaagagtctcatgtgtatgtgtgtgtgtgtgcgcgcgtgcgtgtgtcttcagcaaccagtactcaccagggacctagccataggagtgcccacaa

SEQ ID NO: 276289 - DNA, 122 bp, Homo sapiens
gctcaccccccgtgatcaccacacactcttctccaatgtgcagcgagtccagggagtcagcgagcggtcagtggctttccgtccttccagggaacctgcccttaggctgctgggcacgccct

SEQ ID NO: 276290 - DNA, 122 bp, Homo sapiens
tcggcttagcggctgaagaccgacgctgccggatcgtctcggaagccccgtagaccatcacggacgccgagctttaagtaactctcacagtggacggtaagtccgtccccttcttaatcaat

SEQ ID NO: 276291 - DNA, 122 bp, Homo sapiens
cgcgcacgcgcagtggcccacttggctggggagttatttgacgccgccgcccctggcagtcggaagttgcctgagcagatcccagccggctggctcgagtggccttcgtcgtcccttggcgc

SEQ ID NO: 276292 - DNA, 122 bp, Homo sapiens
cacaacagcaactcgtggcttttcctctaaggggcgggttctctccatttcccactcccacgtgtggggagagcagccccaccgccggctcatacccctgcagtgttccccaggcccgcagg

SEQ ID NO: 276293 - DNA, 122 bp, Homo sapiens
cccttgcccaggaggggttttaatcactacaaagagccagacaaatgtggcccatggactcgacagtatatatagaaagagcaatggcaatgggtgtgcagagtcactgtcactaattttac

SEQ ID NO: 276294 - DNA, 122 bp, Homo sapiens
ggatggcacagtgatagggtttacatgacctggcgcgtgagagccgtgggcgtggttgtgcgtgtgacacgtgtgttttggcttctcccaccgccacgccccttggcccctatggtctgcag

SEQ ID NO: 276295 - DNA, 122 bp, Homo sapiens
ccacgtcacgcaggcagacgccaggctccgccagctcacagaactgctcttgccgaaccccgaaggcctccacctggttgaccttggcagccagcccggccttccttggcagtcagcccggc

SEQ ID NO: 276296 - DNA, 122 bp, Homo sapiens
gccagcctccaactacagagaaagaaagagaatatcacaccacaggcaccactgtcaacacgcctcgggcggcagtctcacattttctaccccggtactggaaaaagataaagatatccagg

SEQ ID NO: 276297 - DNA, 122 bp, Homo sapiens
gccacgtaccttcatacctggggtccgtgcggagcaccctggggttcacgaggtactggacgaggacatacagcaggatggcgatcaggcagagcatgccagctgtggccgaggccacagtg

SEQ ID NO: 276298 - DNA, 122 bp, Homo sapiens
aggcatcttggagcacatgttcaagcattcggaggagacatgccagaggctggtggcggccggcggcctggacgcggtgctgtattggtgccgccgcacggaccccgcgctgctgcgccact

SEQ ID NO: 276299 - DNA, 122 bp, Homo sapiens
cgtgccgggaggctgaggctacggggactccgtgcggggaggctgagtctacggggactccgtgaggggtggctgagtctatggggactccgtgcggggaggctgagtctatggggactccg

SEQ ID NO: 276300 - DNA, 122 bp, Homo sapiens
aggcggcgacggcggcgacggcggcggtacaacaacagctgcaacaccagggaaaaggctcgctggacctgggtcaagagcactgatgaccaccgaccacagccttgcaaaagccaggaatc

SEQ ID NO: 276301 - DNA, 122 bp, Homo sapiens
tgcaattcggggccacaccaatgcacagcctgagcaaggctgcggatcccagaacaagcccgtctgcccaagtttgaggtctggttttaagcagcctttccggccagcacagataacactat

SEQ ID NO: 276302 - DNA, 122 bp, Homo sapiens
aggctctagcaaaaggctggggggtccccagcgacccccatcagctttgataaggggatccggagggtgccagtgggtaagtccaggtacagtgaactgggccagtgcctagctggactggc

SEQ ID NO: 276303 - DNA, 122 bp, Homo sapiens
ccctccggggctgagcctgggtctgaagactgaatgtaacaggggccgctggcactcctgcgcgtcccccggctctggcgctgcaggggtgtcggcgcgccacctctccaggccccagaagc

SEQ ID NO: 276304 - DNA, 122 bp, Homo sapiens
ttctgagaggagaatgtgagcgatgccggtgcccaggaattactgcatcaaaagacgtttcgggctagcgctctttatggatcctgtgatatctcttttgttacaattaataagcatttgaa

SEQ ID NO: 276305 - DNA, 122 bp, Homo sapiens
aatcacggcggctccacgtctccgggacagcagggaatcccaggggcctggtagtgacaccggagggtcctcagggaacctctggtctggccctcatttcccaggggtagaaaaggaaatct

SEQ ID NO: 276306 - DNA, 122 bp, Homo sapiens
gtggacacgcccccactgatattgtctctaattgcaacgtgggagaggaggatatgacaccgaataacgcagggagtagaaatacccctgtgatactgttcttaatattcagggaggaagag

SEQ ID NO: 276307 - DNA, 122 bp, Homo sapiens
gacagggagggctggctctcctgggcaggaggtaaggcactggcagggggaggacgaggtcggcaggtgcttttctgcaaactggggacaattcagtcctgctacatggatccgtggaagga

SEQ ID NO: 276308 - DNA, 122 bp, Homo sapiens
gtggtgagcacaagctgggcacctccggcgtctccaggaaacgtgaataggccctttcttcggagggcacagaacttcaggatcagggcccaatggagactgagcggacttaaccctaactg

SEQ ID NO: 276309 - DNA, 122 bp, Homo sapiens
gtcgtggtgtcggtcagatgaccacaggcaggccacttgtccccaggacagcaatgctctcggtttccctgcccttcagagcgggtccttgggagttcccagcgctgcccaaccggggatct

SEQ ID NO: 276310 - DNA, 122 bp, Homo sapiens
tctggttttagggtaaaccttgccgtttctacataaaacacctcgtaaggtaccaaaacacgttctcaagaagtcaactgcctttatacctgcagccattgcactcatggatgtaacaggga

SEQ ID NO: 276311 - DNA, 122 bp, Homo sapiens
ggccggtgtccagctgcctactttctgcccggatctctggctcctcatctctccggtctccgcagactaaagccctcgggatatgcagcagccatgcctgtgcacacgctgagccccggagc

SEQ ID NO: 276312 - DNA, 122 bp, Homo sapiens
tgattagcatttgtagtcacagaatagggtttcttgttatataaggtataggaggtgaagcgtgcttatggatttgagttaatagattttcatgctactcaatgtttattaaatgttaccta

SEQ ID NO: 276313 - DNA, 122 bp, Homo sapiens
tcggaatagcgcggcccgggcggcggcgtgcgctgggaggaatgctgggtctgtcgctagcgccaaacttgaccacgctgcgaccttttcactctgtgctctgaccttcaaatctccctccc

SEQ ID NO: 276314 - DNA, 122 bp, Homo sapiens
gtttttccactagctgcctcaggacctagcttttttttgctgagatcttaggtgctggatcgccttatgccttgagttatctttgtttattctttggtcctaggaagcatagacgttccaga

SEQ ID NO: 276315 - DNA, 122 bp, Homo sapiens
ggctgcagcaagttaaaaaccacagcctggcttccagctgactacagtcaggcaagaatacggaccagtgtttccagatcttctgatttttcaagaggaataccctctttatctattaggag

SEQ ID NO: 276316 - DNA, 122 bp, Homo sapiens
ccggactcgccccgcccccggcgccccggccccgcctccgcctcccacccccgcccccggcgccccagccccgcctccgcctaccgcccccgcccccggcgccccggtcccgcctccgcgcc

SEQ ID NO: 276317 - DNA, 122 bp, Homo sapiens
gagctgagggaaaaccttactttggggtcccgtgagtgctcggggcacagcacctggagccgcttacagtatgttttgctctgaggattatacacatcacagaagagtcgtgtggccctggg

SEQ ID NO: 276318 - DNA, 122 bp, Homo sapiens
cctgcttggtgaccgagtcgatgagcctgacatagaggtcctgttccgtgcggacacctgcggggaccggaggggcacgagtcaagggccgtagagccccttccgggcaccccaaacccttc

SEQ ID NO: 276319 - DNA, 122 bp, Homo sapiens
actaaagtggtgactctttgggtagaacgtaaaaacgaacggtcctcaacggccacaaggcgccccttctaggagtggtacctcccaggataacggaaaacagccccagccccatcaggagc

SEQ ID NO: 276320 - DNA, 122 bp, Homo sapiens
cccaagcgtttcgggcggccgcgcagttctccagtccccgcgtcgggcagggctcggccacggcactctgttggagccccactgaaaactgggtttggggtgtcggagcccgtggtgcagag

SEQ ID NO: 276321 - DNA, 122 bp, Homo sapiens
acccacgctcgcgcagatggccagccacgcgggcacgaagagggccctcgtcccgcgtgccgggtcttccccaggctccgcgctcgcacccgccctgcagtgccgccagccgcccgccgccc

SEQ ID NO: 276322 - DNA, 122 bp, Homo sapiens
tcacagcttaatgcagtaactgattctttccttccccacgctcctagcattgtgtatacacgtatgctgtagtatacaatgcacaattaatcatgtgcttatcttttggtcttgcagtactc

SEQ ID NO: 276323 - DNA, 122 bp, Homo sapiens
gggttattgtaaaaaacaaagggtgctttttgaggaaatgaatttaaaagcgggggggcacgcatagagacagaccttgggaaagtagcttgagacagaagggaaacaggttgatttacgat

SEQ ID NO: 276324 - DNA, 122 bp, Homo sapiens
ggccagcgggctaccctcagtgtctgcaacttctgaggagctggaactttccccagcacccgggtcagggtcctgtagtttctaaaatcactttgcaacctgttttaaagcaatgcgcgttt

SEQ ID NO: 276325 - DNA, 122 bp, Homo sapiens
gtgagcagggggaagatgtccgggtggatgaggttgagctgggtttgaatcttgtggctgcgaaggttgtgaactgaggcacagttctcattcaggaccaagtgctgggtgtcaggcccaaa

SEQ ID NO: 276326 - DNA, 122 bp, Homo sapiens
ttgtttgttgtgagcctcagagccccaagagcctgtcctatcttctttctctctctgtggcgctcaataagtacttgtcctgtcctgtcctgtcctgggcactgagggtggagagaagaaac

SEQ ID NO: 276327 - DNA, 122 bp, Homo sapiens
ggcagagggctgaagggatgtctttgcccttctggcaggcaggacagtgtcaggatggaccgcgctgccagaagccgacgctagcgagggaggtgtgaagagttggccagaatgaccaactc

SEQ ID NO: 276328 - DNA, 122 bp, Homo sapiens
gaacagtccacggtgcagggagaaagaacagtccacggtgcagggagaaagaacagtccacggtgcagggggaaagaacagtccacggtgcagggagaaagaacagtccacggtgcagggag

SEQ ID NO: 276329 - DNA, 122 bp, Homo sapiens
aacaaaacaaaaaatgagcactgatccgggggtgcctgtttcctcgacctcaggctgtggcgcctgccagtccccaacatccccaccgcccgacggcgtctccgcgttcctccccctctccc

SEQ ID NO: 276330 - DNA, 122 bp, Homo sapiens
ccagctatcgcacggtccccagcatttgtaggaaaaagcccccagggctttgggtagcctcgcaggcccgcactgccgccaggacgcagtgcacctgagggcggagcacccacgccccgggc

SEQ ID NO: 276331 - DNA, 122 bp, Homo sapiens
atttgcctggacgctgcgggcaccctgcccctctggctccccggggtcctgggcctctcgcgggcaggaatgccatctgtgccatctgaccagggctcccctcactgtgcaccctggcgttt

SEQ ID NO: 276332 - DNA, 122 bp, Homo sapiens
gtgggctcaggaaccgaggcgctgccgctgctgctgcagtcactaaaggaaagagattggcgagtcagggaatcttccccaatgccaaatcactccagcccaagtgggataaaaccattttt

SEQ ID NO: 276333 - DNA, 122 bp, Homo sapiens
tgctgagtccacgggctcctgcagctttctcaaagtcctccaaggcttccaggttgttctcggggtctctgcctgtgggtgccaggacgagatgcgggtgctcaaggcagcactgggcagac

SEQ ID NO: 276334 - DNA, 122 bp, Homo sapiens
agaagccaagggaaaacagaggcagagagtggaaggatgctgccatcagccaaggaacaccgggagccatcagcagctgggaaggcaaggaaacattctcccctagagccttggagagggca

SEQ ID NO: 276335 - DNA, 122 bp, Homo sapiens
tgtcacgacctgcacattagctgaaaattggaaattccacagcgtggccgtggccatggccgtggccgcggtgggctgggccagagcagggctcggaaaccgagaggcacaagggactgagc

SEQ ID NO: 276336 - DNA, 122 bp, Homo sapiens
gtgcatccactggctttggggctggcaactgggcaaggcgaccgctcagagttactgagtcgtgagtctcagggctggctggggagccagggcccctggctgggtttcgtgctctcgccaat

SEQ ID NO: 276337 - DNA, 122 bp, Homo sapiens
gaggaaggagcttaggtaaacagtgctgctttatttctgctgttaatcattcattgggcccgtcaaaagtttctgcccatctatttccatcaaccgtccttgaccagccaaccacatggctg

SEQ ID NO: 276338 - DNA, 122 bp, Homo sapiens
ctacccggcagcacctcgtctggctcccccggcccgcagcagaggcggcgccgcgcggaacgccagcacctgagccggtgcctcccgccaggctcggcctccgtaggcccccggcccggccc

SEQ ID NO: 276339 - DNA, 122 bp, Homo sapiens
acactgatcctaagatgggaaaagtaattcccccacaggaaatcaggatactgcaagcaacgagaaaggcatgttgagtggttaaacaagaatacatgtattcaatacagtgttcattaaat

SEQ ID NO: 276340 - DNA, 122 bp, Homo sapiens
cccctcccaaccccttcctgcccggggcgggggaacgttttcgtttttccgcggacgctccgaatgggggagttgaggtgagcccccacccagcccacttctaccgtgctccgctttccggg

SEQ ID NO: 276341 - DNA, 122 bp, Homo sapiens
ttggctgagggattgggaggaccaggaaaaagccgccaggccacgtggggcgtgacttggcgatcccggtggctccgggcgtcagcttggacctcagacgcccctcacagctcacagccctg

SEQ ID NO: 276342 - DNA, 122 bp, Homo sapiens
ctttctctaggtgcccggggagaaggcggcgcagcagcaaagccctggagggcccagtggcggaaacagacggacccctcgcagcctcccgccgacagcggccctgcccaggtctccaggct

SEQ ID NO: 276343 - DNA, 122 bp, Homo sapiens
tgagacatcactagtccccagaacggacccctccgtcctacacctctaggagtcttgccacgtggccaggacgttctaggcggttcagactttagctgcccaggagcgcccccccgcccccg

SEQ ID NO: 276344 - DNA, 122 bp, Homo sapiens
taaaaacgcatgctccacgatacatgctccccagcttcaggcttgacaagtcccaagtgccgagcaacatcagggtcagggtgcgtttcattacagaagagaatgcagtagtgatcagagag

SEQ ID NO: 276345 - DNA, 122 bp, Homo sapiens
tggacacaggattcagaaagacaccaggctgcacagaaagagccagatggacctgagtgtcggtcacagccccctacactcaaggctgagaggcctcaggaaagtcattcctttttaaaaat

SEQ ID NO: 276346 - DNA, 122 bp, Homo sapiens
tcacttacaaatctggtgctttatcaagattggctggaaatctgggcggatctgggagtgcgtgcactggatcacccatacatggcctccccaggataatcaggcttcttacatgcactcag

SEQ ID NO: 276347 - DNA, 122 bp, Homo sapiens
cgggctgcgtggcgggctgggtggcgggctgcgtggagggctgcgtggcgggctgggtggcgggacagaacggtgtcccacgtggcgctttcccatctctgctcacccccttaccatcccct

SEQ ID NO: 276348 - DNA, 122 bp, Homo sapiens
gctggcaccaaactcaaattttcccactcccagttaggcttaaagtagcccaaacaggtacgtttttagccacttagggcccgctgctttgcatacccagaggaacctcaaccagcagttgt

SEQ ID NO: 276349 - DNA, 122 bp, Homo sapiens
tcaggccgttctccaaggattttgcaaacctgctttctgacgcagctggtaaacttgccccggggcgaactgtcggaaggaggtgcggtcacctggagtttcccaatagatacttcgctgtc

SEQ ID NO: 276350 - DNA, 122 bp, Homo sapiens
tgaatgggcaaaatcaaaggtgtctgtggcacactgacgtcaccatcactgtcactctgtcgtcaccacgattgccagagccaccctcgactcacgttctcttacatctaaaatcgttcctg

SEQ ID NO: 276351 - DNA, 122 bp, Homo sapiens
cgctccccttctgtgccccgtattctccctatgtgtctcgactcggagacatcgcacctgcgcagatgctgacagacgcccatagatggcagcagccctctgaagcaacagcggaggtaacg

SEQ ID NO: 276352 - DNA, 122 bp, Homo sapiens
aaagaggaagcagtcaatgcattactgtcaatgataatagcagccctgcagaggtctggccgtgaatggctctagtgctagctcatcgctcttgcatggagccacatttgtggcagcccaca

SEQ ID NO: 276353 - DNA, 122 bp, Homo sapiens
ctccactcccttcccgccactccccgcccttttcccgcccggatgttattctagttttgccggatgttgttgtatgtccgagagacacgtgaggttctgctacgtcattaccaggcacgcgc

SEQ ID NO: 276354 - DNA, 122 bp, Homo sapiens
agtgccagacagtgagcgcaggccagtgtgtgtgtgcaccgtgggcgagccgaagcagggcgaggcattgcctcacctgggaagcgcaaggggtcagggagttccctttccgagtcaaagaa

SEQ ID NO: 276355 - DNA, 122 bp, Homo sapiens
gtcacctggtcctggcttattttctttgaggcccattctcggggagtaaatagacagtagcgagtttcctggcaactttgcactactctttaaatagaagagaattcctccagtttgcctcc

SEQ ID NO: 276356 - DNA, 122 bp, Homo sapiens
agccggaagtcagtggttttcgccccagtcccgcccaccgcgtttcgcgcgccaccaggccgtagtgtcgcgagatttcagggtgctttagagtgggaataattccagctttctagtgatgt

SEQ ID NO: 276357 - DNA, 122 bp, Homo sapiens
ttttttttttttttcatgcatcccaatgtcctttctctccaatctaagaccctttaagaccgtgactccaagtgtggtctgtctaaggagcagcagcatctgttgcctccaggagcttgtta

SEQ ID NO: 276358 - DNA, 122 bp, Homo sapiens
gattctccctgttctagtttctattttattattcaactgtagtggaaatacctcaaagtgcgcaacacaaaacagcagattcctgcccctcacctgtgtgcatctgagttctcaccctgcca

SEQ ID NO: 276359 - DNA, 122 bp, Homo sapiens
gcccaggaaaccacagaccccaagccaactgtgcctagcacagacaccaaggaatgacagcgatgccagtgacgccaggaggacttggcccctagccccatcatcggctgtatgatgatcgg

SEQ ID NO: 276360 - DNA, 122 bp, Homo sapiens
ccagccaccaaggctcaatgagctattctgagctcccggcctgcccgccgtggacacactcgggccttctgtttgcccacggccgccctgtggggctttcataaagcagccctgttctctct

SEQ ID NO: 276361 - DNA, 122 bp, Homo sapiens
tgtgaggacttcttcctgctttcctgccctgccttattccttgccagcaccagggatgggcggggtgcgacgggacgcggccttctcgttggcgtcgggcaccccctcgcctcggccgcgct

SEQ ID NO: 276362 - DNA, 122 bp, Homo sapiens
gcatttaccctctcccaccccgctcccacaacctccagggtcctagcggagtcatttaagcgctcagtactaccagcttcattttaggtaaaaatcaagactaattctgcactttattaacc

SEQ ID NO: 276363 - DNA, 122 bp, Homo sapiens
ttagcatatttgatcactttgattctctgttcttttctctccgcggtgtgtgtgtgcgtgcgcgcgtgtgtgttttcttcttctcctcctcctctccccgagttgcctcctttctccgggtg

SEQ ID NO: 276364 - DNA, 122 bp, Homo sapiens
agccaagttctgcagtgaaatgaagcattagcattcagggaccagagcagacccaaggagcgtcgaaggaggcagaactaacgcactgggcctgaccacagaatgaccctgggagggagcaa

SEQ ID NO: 276365 - DNA, 122 bp, Homo sapiens
ggcgccccgctggaggagctccccagctggtggctggagcgaccccttgttctttggtggcgctggtgagtgaggctcccgcgggacccttgccgcagccgtacccttttctgcgcgaaaag

SEQ ID NO: 276366 - DNA, 122 bp, Homo sapiens
ctggcttgggttgtataggagagactccgtgttaccaaattggctccagccctgcctggccgcacagcagcctttgacacgattgaaatgctccccacctcttagctttcgtgcggctaagc

SEQ ID NO: 276367 - DNA, 122 bp, Homo sapiens
atgccccgagccagcgggacagagacaggacacgcggtgccagcgggacggggacaagagcgagcggaaggccagggcacactgcacttactttggagtagggatccgggaagttgaactcg

SEQ ID NO: 276368 - DNA, 122 bp, Homo sapiens
gtggggccgagggcagggaaggccaggttcccatctaagaatcgaaggccttggactgaccgacctcctggctctgaccccacgtctgactcatagttgggaacaaacatcacatctacccc

SEQ ID NO: 276369 - DNA, 122 bp, Homo sapiens
accctggaactccgggacatccctctgcgtccccaccctcccgacccccaagctcctcaacgccgaagcgcccccgaactgccggaaggaatcctaaaaggaggcagtcttccccaggaaga

SEQ ID NO: 276370 - DNA, 122 bp, Homo sapiens
gcctcgtgccccagtgacacacttttccaacagccggcacgttgagctcttgcgcgcctgcgcaacgacaagactgtcgggatttgtagtccaccgacaaagtgggcggactgcgtgccttt

SEQ ID NO: 276371 - DNA, 122 bp, Homo sapiens
gtagttgcagagacacggtctgctttccaggcttgggaagtcccagcacttaactctgcgcgtcggtgtcgctcgtttgccagccagactataaagtgcacccaacggtgtatgcgtctctt

SEQ ID NO: 276372 - DNA, 122 bp, Homo sapiens
ggtggggagagagctgatggtgggggatcccgctccctcccgcgtcagtctggccggctccgtcctcccgtaggctccgctgtagctagcaatgtgacaccaggacgcactcgctctcgcgc

SEQ ID NO: 276373 - DNA, 122 bp, Homo sapiens
ccagctcctgagcccgtaagccaggtgcccccacactggggcactccattctcacagggtcgatggacacttgaacaacctcctccaacacagcggccaagagctaggaaacagttctgcac

SEQ ID NO: 276374 - DNA, 122 bp, Homo sapiens
ttctcttggcaaggctgggtcgggtgccttccagcctcgctgtggatcccgcgaagtggacggttcgcttcgtggcttcttcccagaccccgccactgcggaaaccgtcactcggtggcccc

SEQ ID NO: 276375 - DNA, 122 bp, Homo sapiens
agcacaaggcggggaacctgtgtgctctgggcgtggggtccccactcacgacggggttgtcgaagatctgccagaggtcggggtgcaggtgctccgtgtcgtatctggaagtggccaggagc

SEQ ID NO: 276376 - DNA, 122 bp, Homo sapiens
gtgtggggagaagcagctcccgggagacggagggctttgcgaagcggcggcaatcaggggcggggcctggaaaggagggcagcgcggaagcttggccccgagagggaggaggcgtggtctgt

SEQ ID NO: 276377 - DNA, 122 bp, Homo sapiens
gcctgtccaggaacatttgttgagatgttgtgcagagccgctggggacctctgccacaggcgggcatcaatctacctggagctcctgcggcagccctgcagagcctcaaaagggcagggcgg

SEQ ID NO: 276378 - DNA, 122 bp, Homo sapiens
ccccctccacttcctggtggcccagggcagtgtggagcaggtgaggttgctgctggcccacgaggtagacgtggactgccagacggcctctggatacacgcccctcctgatcgccgcccagg

SEQ ID NO: 276379 - DNA, 122 bp, Homo sapiens
ggcccagcgacctcacagctctcccagcttcctcgcaccagaagcgcacggggtgccctgcgtgtcccacacctgctgcaagaccagggcgagtccctagtcaggccacttcctggtgcaca

SEQ ID NO: 276380 - DNA, 122 bp, Homo sapiens
cccctccagccctgccgcttcccgacagcttggcccctcttcctcggggtccatccccagcgcacacccaggctcccgccccaagccagtcacctgcgccagccgctgtcggttcaggacaa

SEQ ID NO: 276381 - DNA, 122 bp, Homo sapiens
aaaagttcagctgagagatataaaagagcagtctttccagcacctgcaaatccagagcggcgggcactgacgggcacttgcaccgtgtggacagactctccggttctgtgagtggtttttct

SEQ ID NO: 276382 - DNA, 122 bp, Homo sapiens
tcgcgccggggcaggcgattggctgcagaggttagtgggcgggcatcaaggaccattgtgcgctctaattggcaggcgcggattcgctcgttggcgggcctcgctgcttggcgcaagcgcgg

SEQ ID NO: 276383 - DNA, 122 bp, Homo sapiens
ggctgcggggttctgctcacgacgagaacgactctcgggtgagagagcagcccaggggcacgcaggccgacctgtcctcgagatcacggatggcggcacgacttttggggagactcacccca

SEQ ID NO: 276384 - DNA, 122 bp, Homo sapiens
aacatacttcccttgggtctgaagctgattgatataaggcttatagctattaggtcttatcgccttcaatgacagaattggctagaggcccagaccaagatcatttcattggatgagtgatt

SEQ ID NO: 276385 - DNA, 122 bp, Homo sapiens
ggagcttctcacgcactggacgtggcacagcctgggcagcgccggcccctgtccttcctgcggacctgtgaggagcatccggctatctgcactggctcagcctcgcccccgggcaggtgggt

SEQ ID NO: 276386 - DNA, 122 bp, Homo sapiens
cgggagccgaccagacacgaaggctgaagccgcgacgccgaagacaggtgagatgttgtacgtcacccgccggacccccgccgcactcacctcgcggctcctttactccacaggccagtacc

SEQ ID NO: 276387 - DNA, 122 bp, Homo sapiens
cagatcccgtccgggccgctcagtcccttaaagctgtgtcccaaagcctaggggagacagcgaggctggggacgccgggaagtttctctgaggtgtggggctcctgagcagaaacgcgcggg

SEQ ID NO: 276388 - DNA, 122 bp, Homo sapiens
agagttggggtatgagagcttttatcttacggagaagctgaagttgtatactgaaaatgacgtggtttttgtgttccacctaggctataggagatggcctactcctgtctacctatccctcc

SEQ ID NO: 276389 - DNA, 122 bp, Homo sapiens
acgacgatgaccggaggttcatgtgccctgtggaaggctgtgggaaatctttcacgagggcggaacatctgaaaggccacagcataacccacctgggcacaaagcctttcgtgtgtcctgtg

SEQ ID NO: 276390 - DNA, 122 bp, Homo sapiens
gctcgctcgctcactctctcgctggctcgaggggcggccggcagatggcgatggcagaggcggcggcggcggcggcggcgcgaccgggatgggacgggcgctggggcgcaggagccgcggcg

SEQ ID NO: 276391 - DNA, 122 bp, Homo sapiens
tcagtaacccggatctcgcgagaaccggtcgagactgggtgactgggagatggtgtgtgccgggtgcggggggtgggagtgcggggggaggggagccatgggagctggggtcagggccgctg

SEQ ID NO: 276392 - DNA, 122 bp, Homo sapiens
atgactcagttatttgtttcactgttctcactgacagcttggctctggggtccttacattcggcctgtaactggaaaaatgtgtccatcaggcaccagaacccaatgcacaaagccaggaac

SEQ ID NO: 276393 - DNA, 122 bp, Homo sapiens
agttcacaatataaatcccgtgaaaacacatttttcatctctgcagtttataatactctacgtatatgaatttaaagcagttaaacaacatttgagattaaattggtaaaaaaaaattgtaa

SEQ ID NO: 276394 - DNA, 122 bp, Homo sapiens
tgagttaatggtgggctgcatcgtattccaggtgtgttttctgactgtcacaaaagcagacgtcttggtaattcaaataatttgaaagtgtgttttatagataggcacaaaaattcagccac

SEQ ID NO: 276395 - DNA, 122 bp, Homo sapiens
ggacggaaaggagaggaatgaggaatcaggagtccaggcgaggcagcagagtcgaggacccggagctggggcttatccctgcaatattgagcattagttaatagggcctcggcaattctcct

SEQ ID NO: 276396 - DNA, 122 bp, Homo sapiens
ttcctccaggtgaaagtctggtctgtggcatccagacactgaccgcagatttctcccagccgtagtctgggcggaaaggttaaaaaagagtgaatactctgtgctgttaataaattaataaa

SEQ ID NO: 276397 - DNA, 122 bp, Homo sapiens
ggtggggcgggcgctggtaacatttggacaatcgtggttaaaagtgaccccatcagcacccgctgatccttcttgaacttgataaccttggtgaaaacgccaagcgttggagaaattcaagg

SEQ ID NO: 276398 - DNA, 122 bp, Homo sapiens
ggcggcgggaaaggaaggcaccggtggctgcggctccggctccggctactgcggccgcagcgggagagctgattccaaactgagggagctgtttcctggaagacaatgactaagcagaaatc

SEQ ID NO: 276399 - DNA, 122 bp, Homo sapiens
gcctcggaggggagcgggacgcgaggtgccaaaaagtcgtctttatgatcaataaggtctcgaccccgagccccactggatgatagaggtgggcatcacctctgtcctatgccatagccttg

SEQ ID NO: 276400 - DNA, 122 bp, Homo sapiens
ttagtgtgtgttatagaaattttttagacaaccttactagctaacccaggtgaccctttacggatttctttcaaagccaatttgaataaacaactcttccctctcaaatgggcaagagtaac

SEQ ID NO: 276401 - DNA, 122 bp, Homo sapiens
cgcaagacacgccgtgaggacctgggccactccttacccgcctggggcaggagaccccctcgcagcatccccgccacggccgcagccatctccaccggaagaatggacggaagccgagtgga

SEQ ID NO: 276402 - DNA, 122 bp, Homo sapiens
tgaccacccaatctaaaaacccaaaagtttagaatgtatgctcttaccctcttctctccccgatcttcccacccaccctccaagaagaaaccatcctcttgaagtttgtgtttattattatc

SEQ ID NO: 276403 - DNA, 122 bp, Homo sapiens
atatttcatctcaagtaccatctttaattgatggcagttagaggaaagagtatcatggatcgactagcaatgcctgccacgagtaccgtcatggagaaatgactgcacactgagcataggta

SEQ ID NO: 276404 - DNA, 122 bp, Homo sapiens
ctcggggaggggggaggtggctgggcctccgaggcgggggcggggtctccagggcaggggcggggcctccgggggaggctggaggcgatccagaccctcgcagtgcagccctcgagcggccc

SEQ ID NO: 276405 - DNA, 122 bp, Homo sapiens
ctgagaacaagcatctgcgcattcccatccaaaagggtttgtcaggaccccactttctgccgccatccccacagcctgcgttcccgcctctcctaaaacccaccagagcccgaggtggctcc

SEQ ID NO: 276406 - DNA, 122 bp, Homo sapiens
cccgcggaccgtgggtcccctcgcgggcttctggtttcctttgagagttgcacttctgcccggctcccccgaaatcgctgggtcccacccggaggtggctgcgcccccgaccccctgcgcag

SEQ ID NO: 276407 - DNA, 122 bp, Homo sapiens
ggcaggactaaagtcacctccctgaggtggtgacaaggatgggtgaagccaaagggtgtgcgactccacagtgatgggggcttggggctctcagtcccccatcagagatcctcagcatctgg

SEQ ID NO: 276408 - DNA, 122 bp, Homo sapiens
ggagtttctcccctagctcaggccccatggggtagcgcgggagagtctgggcgaagtcggcggcgccgagacgggcgggccttggggcaggaggaaggaattggagtttcctctttttctga

SEQ ID NO: 276409 - DNA, 122 bp, Homo sapiens
tgggcgtagtggcgagcgcctttagtcccagccattttcaggagcccgaagcaggagaatcgcttgaacctgggaggcagaggttgcagtgagccgagatggtgccaaaaggagccgaggct

SEQ ID NO: 276410 - DNA, 122 bp, Homo sapiens
aacgtttccgccaccaagggggaaaagcggccgcgatctcaaaccaaacacaagaattggcgtgtgactcatctgcttggatacctccagtccccaaactgtgttccaggagttttcttggc

SEQ ID NO: 276411 - DNA, 122 bp, Homo sapiens
taaggagtaagccaccgtttcaagcctgccctgtggaggaaatgcccgtttattaaataacgagtaagccaccgtttcaagcctgccctgtggaggaaatgcccgtttattaaataaggagt

SEQ ID NO: 276412 - DNA, 122 bp, Homo sapiens
tactttaaaggccccccaaatactccaaatattgtcaaatatatagatggttactatttgcgattttcttaaaagagcagccctaaagaaaagaacttatataaagtgattgtgtttttttc

SEQ ID NO: 276413 - DNA, 122 bp, Homo sapiens
tcttgccccatacataccttgaggcgagcaaaaaaattaaattttaaccatgagggaaatcgtgcacatccaggctggtcagtgtggcaaccagatcggtgccaaggtaagaattttacacc

SEQ ID NO: 276414 - DNA, 122 bp, Homo sapiens
gagaaaaagcacagcccagcttgttccttaatgcaatcacaggaatgcacactggcaagacgagcagaaccaagcagctcagctcagcctagcccagatttcacaattgtgagcaaataaaa

SEQ ID NO: 276415 - DNA, 122 bp, Homo sapiens
gttatcctccagtttattttttattttattttatttttatccaggcagctttcaaataaacgagttgacttgaatcagggtcctgtcgctaaacctaaactcagagggcttcctggaagaga

SEQ ID NO: 276416 - DNA, 122 bp, Homo sapiens
cagtggagttgagcttgagagtgtctatttcctattcaactgtgaatcttcattgttctgcgtcctaaatcaaagaaaagtggctcacctcatgtggaaagggttattttcaaactccttgt

SEQ ID NO: 276417 - DNA, 122 bp, Homo sapiens
gcctccttcgcgcttcctctgttcagctcccacctcttcaccctctgagtcctgggctcccggcggttccgagccctcagatttcttgtccgacagcgctatctagtggtcagcgctaaccc

SEQ ID NO: 276418 - DNA, 122 bp, Homo sapiens
agtgtccggccatggccggagcccgcaggctggagctaggcgaggccctggcgctggggtcgggctggcgtcatgcgtgccacgctctcctctacgcgccggaccctgggatgctcttcggc

SEQ ID NO: 276419 - DNA, 122 bp, Homo sapiens
tcatacacctgcctgcacctgtccccactcaccaccccagagagccccctcactgacactcgctccctcaccaggacgcagctacgcggtgctgttgggcatcatctttgggggcctcgcgg

SEQ ID NO: 276420 - DNA, 122 bp, Homo sapiens
gtagatgcaaaatccaagcaaacagagaccctcaggagaattatgaaaaggtaggtgacacggaagtcactggtgtgaatatagtgctacagaggagcacagctgagattcaaacccaggaa

SEQ ID NO: 276421 - DNA, 122 bp, Homo sapiens
ggggagcctgcacaggtcgccgcgagagctgcacgcattctctgtgatatgagctgaacccgccaccctttccacgcagggcgtttcagctcacacttgcgctgtgttccttgatgctttaa

SEQ ID NO: 276422 - DNA, 122 bp, Homo sapiens
tggctgcaacacctattgaccaatgttcaagcctattggtaaaggtactccgggctcgcgcgctctgattggctggcctgaagtacaacgcctcctccccttgaggcacgggcgctctgggt

SEQ ID NO: 276423 - DNA, 122 bp, Homo sapiens
tgcccaggaatgtgacattgtgtggcccagaggtacccttaagactggaggatcaccaggcgggccctgacctcatcacaggagccctttaaaagcagtttcctttgcctggttgaagaaat

SEQ ID NO: 276424 - DNA, 122 bp, Homo sapiens
taggggatggggcgggacttgcggcaagggacttctaccagtaggtgggcgttggtggggcggggcccaggacggggcggtacctggagcttgcgcaactgctggagctggccgcgcaagtc

SEQ ID NO: 276425 - DNA, 122 bp, Homo sapiens
aggaatcatagtagagactgaagtcatcacccaccaccgtctcccactcctccagggacccggggtcccctttcgtcagggtcacttctcctgaacgccgggcagaacctaactcctctgac

SEQ ID NO: 276426 - DNA, 122 bp, Homo sapiens
actccggacgcgaggggcgaaatgggacgtgggcgggagtggctctctccgcgggcgtcccgggcgcggcgcctgggttctgcctaggggctgggtcccactcccgctcgcggggcccgcgg

SEQ ID NO: 276427 - DNA, 122 bp, Homo sapiens
cagttattttctgaaatggagatggcagacattagcctgcacttactccaatatggcagccgcatctttgcctctttgctatggacacatccccagcaggcctgtactttctactctccaga

SEQ ID NO: 276428 - DNA, 122 bp, Homo sapiens
ggtcctgggatctggagttggagtggggccccactttaccttgcccacatacaggggctccgtgcccgtgtactcctctaccacgaagaactggttccacacccagccgcgtttgacgcggc

SEQ ID NO: 276429 - DNA, 122 bp, Homo sapiens
cctcaggaggcggagggaaacctgtggaatgccgagaagccgtgtaatgaaataacgtcacgcctgcccctcaccattactctgaccagggttcgaaggtcacacttagagcctaaggggaa

SEQ ID NO: 276430 - DNA, 122 bp, Homo sapiens
tttgcggggcaggctgggaattgtagttcccagcttccgtggccatagccattttgtagtcgggggactacaacttccagaagatcaaggggaccattctaaggtgccccgggaataggcgg

SEQ ID NO: 276431 - DNA, 122 bp, Homo sapiens
cccgtctgggaactgaggagtgtctctgccccgccgccaccccgtctgggaggtgaggagcgtctctgaccggccgccccttctgagaagtgaggagcccctccgcccagcagccgccccgt

SEQ ID NO: 276432 - DNA, 122 bp, Homo sapiens
ttttacttctctggaaataaaaccttattgactgatagtagaaaggctggtaaaatgccacgggggactgtgattacttcctatctgtatttagtgggctgaaaaagagtcattggacaaca

SEQ ID NO: 276433 - DNA, 122 bp, Homo sapiens
catgtcacaggctgcttccaagggccagcaccaggtcctgtctgccaatagtgccaagcacgttaaagataatgcccagtctctcacagggaaagttcacggtcactgcagtctgctggctg

SEQ ID NO: 276434 - DNA, 122 bp, Homo sapiens
cagaaccacagcgggaaaagaggagcgattcgtccttgaggggctcagggccgtgcggaacgtcataggaacagagtccgggagtttgagagatcagaactctttgctgtgggcatagtgtt

SEQ ID NO: 276435 - DNA, 122 bp, Homo sapiens
gccctttctgcgcccttgccctctccggggcggcatctggcaaggagggcggcccaacaccgcaagcctgatcccaggggctgacctctggacggtctcagggactgactagggatgcggcc

SEQ ID NO: 276436 - DNA, 122 bp, Homo sapiens
catcctcacgattctgagacctcatcaagaggaatgacatagcctcctaactaatctcttcgcctccagttctatcagccttccctttgtttctaattacaccagaaaattctcagtatatt

SEQ ID NO: 276437 - DNA, 122 bp, Homo sapiens
ggcgaccgtcggggatgctcacagttggacagtttggtcccgaggcatgctgggataccgcgggccggtctccatagtaactggccgacattcgcgcaggccttcggcctgcagggaaggcc

SEQ ID NO: 276438 - DNA, 122 bp, Homo sapiens
cccgccccaagggtcctccccacccggcatagctctcccttgtcccaagcctcgcacccacgcctcccccagcagctggacaggagcgccagcctgggagacctcccggcacctcacccaga

SEQ ID NO: 276439 - DNA, 122 bp, Homo sapiens
agtcctgtccaatcctgagggcgggtctaatgaggggccgtaccttccaagatttcactccgcccctcgacgccgcgcggcgctgcgcgtgcgcaaacgcctttccctggcgagccggatct

SEQ ID NO: 276440 - DNA, 122 bp, Homo sapiens
ctcggtcccctccactgcactgggtctccccactgcactgggccccctcttcactgcacccggccactccaccgcacccggtaccccggccctctatggcacccagttctctctcctcggca

SEQ ID NO: 276441 - DNA, 122 bp, Homo sapiens
ttcacaccattctcctgcctcagcctccggagtagctgggactgcaggcgcccgccaccacgcccagctaatttttttgtatttttaacagacacggggtttcaccgtggtcttgagctcct

SEQ ID NO: 276442 - DNA, 122 bp, Homo sapiens
tcatctgacgtcactgcaacctcctgattccactcaataggccaagacaagcggaagctccggttcagggagaacgttccccaggaaatcagggcagcagagttttccaggaacggaggctg

SEQ ID NO: 276443 - DNA, 122 bp, Homo sapiens
gctttcataccctggatagtgctgagtacctaacagctctttaggtcacaacgtaaaattcggcttccagctggtccagttttcccatctgtcgtatccacggaatgtccaaatgtaaggga

SEQ ID NO: 276444 - DNA, 122 bp, Homo sapiens
ccaggacctgttgctatggtgacagcgtgaaaacaaactgtacactcacatatacacaagcgtaagcgtcttcattcgtgccaggaaacatgcaaaattaaacgcctcgtttcctcgagcgg

SEQ ID NO: 276445 - DNA, 122 bp, Homo sapiens
gccctgtcgggggagagagcaaagtttcctactgtgattattgtaacgaacctacatacccgtggattttgtatcttttgctttcataagagaaaaattagccagtcataaacataaaaaat

SEQ ID NO: 276446 - DNA, 122 bp, Homo sapiens
tttgggggccgggaggggtgaatgtcctggggtgctcgcagctcggcggggcagggccatcgccctggctccatctccgtttcccttggcttacctggctctggcagaggccgcggcggcga

SEQ ID NO: 276447 - DNA, 122 bp, Homo sapiens
cgacattaagtgcttgccagactgacgaccctcttgtgctttcccaagtcacctcttggccgagggtctcggcttccctgccgccccagcttcactacttaatctgccggaaccaacgctct

SEQ ID NO: 276448 - DNA, 122 bp, Homo sapiens
cgagtctatgagccccgagtccatgagccccgagtccatgagccccgagtccatgagccccgagtctatcagccccgagtccatgggccccgagtccatgagccccgagtccatgagccccg

SEQ ID NO: 276449 - DNA, 122 bp, Homo sapiens
ccatggcacagcaaggccacacatgcacccgccagccagggtgccctgggcgggaggggccgttacaaccaatcagtgcaacccaaagcccggggacggggcctgcactccataaactcccc

SEQ ID NO: 276450 - DNA, 122 bp, Homo sapiens
gctgtgggcatgaacatgttgacaaaggtatggtctggggccgctgcagcatggtggccacgcgggggcagcagagtcctagggaaaacgtccttcccccagggacagttccccaggctggg

SEQ ID NO: 276451 - DNA, 122 bp, Homo sapiens
agaaaggtacctgtctttgaaaacttctaatgatttatgtggtgggagtagtgactccagcgagtgggggttgatataatatctaacctctgtgctgacctctcaatgatgaaaagcagtga

SEQ ID NO: 276452 - DNA, 122 bp, Homo sapiens
tccgcccgccgccgccgcgcccggctcccgctccctccgcagagcccgttcccagcggcccggccggccggcccgggacccccacccgccccccgcggcccaaccaactattattaatggag

SEQ ID NO: 276453 - DNA, 122 bp, Homo sapiens
gagccggctcccatgcccttcccagctgcgctgccctcggcaccaccgggtgcgtccccccgcaaagctggacgcccttgtgtcctcccgcctgccctcggtgtcaagtctccctccaggac

SEQ ID NO: 276454 - DNA, 122 bp, Homo sapiens
tgtgatggcggccatggccctgcatagacacgagctggaatctgcaggtggcagccaggacgctgcgtgtgtcgagtgcacagtgtggcttggtgccaaccatggcgagggtggagagcccc

SEQ ID NO: 276455 - DNA, 122 bp, Homo sapiens
tgcacttggcctgacccccttgtgcatacgggtccaggcctgagggcaggtttccatgaacgtggcctattccgtgtaggtgtgttcgtgcccctgtgtgtgtcccgtgctccgtggctcct

SEQ ID NO: 276456 - DNA, 122 bp, Homo sapiens
ctttaagacgatctccaaatcaattttggtcactcggtcttttctgtgtattcctggaatcgttatggtctgcagttacaagttccaaaccaagttttggataaatgaatttgtgctgtacc

SEQ ID NO: 276457 - DNA, 122 bp, Homo sapiens
ggaagaatctggaggtcgggtgctgaggcttgagcgtctctcctgtaggttggtttcgcccggtcctcagggcggagttgctgctcattctcatgctgggcctgttttccgattcctggtgc

SEQ ID NO: 276458 - DNA, 122 bp, Homo sapiens
ccctcccccggggcagcaggcagcatcctctccgatgctcgaggctggtggggaacggaccggaccgctgggtcactttgctcagaggaaacaatggagaagagggggaggaaaccactcat

SEQ ID NO: 276459 - DNA, 122 bp, Homo sapiens
accaccgtaatgcaagggcacgcccatccccccgaaaaagaaaccccggcccgccgccggcggcccccgccctgcacccagccccgggagcccagtcgggcgtctgctctgcgtggcctgtg

SEQ ID NO: 276460 - DNA, 122 bp, Homo sapiens
gaagaaagaaaagaacatcgttcccctgtggtcagcaaagtctgtcagcccagtggaagtcggctggggagattccctccagggtccatccatcattaattccatctctcttgaagatggaa

SEQ ID NO: 276461 - DNA, 122 bp, Homo sapiens
acctgtagtgcttttcagccaagagcccgcagtgatgccatatcattcggcaggtccctccggctgtcattatctctgtgttaaatggagacctgcatcatgatgccggatgctatggagag

SEQ ID NO: 276462 - DNA, 122 bp, Homo sapiens
ggaggggctgctgcttcagagaggatgcttgttggggggctcggggctccagctcctcagcgtcacccggggacgcctggcctgagcgctggcggttcccgggagggacacgcaggagctgc

SEQ ID NO: 276463 - DNA, 122 bp, Homo sapiens
gaagaagaaaaatgagactctaggacatcccagcaatattcaaggggtacagggtgtcagcgggttgatattgtggatgtactgagtgcctcaaatgcctgtcatctagcacatcaaagggc

SEQ ID NO: 276464 - DNA, 122 bp, Homo sapiens
cccaacgtagttgagaggtaaggagtaaaagccggaatttgaactcctaatctcctgccacgatttcatgctgcctctgggtaatctcccagcacgttgcttaatcagctgctgagtcattg

SEQ ID NO: 276465 - DNA, 122 bp, Homo sapiens
ggtcactcagaagaggagaaccaagcagtcttggcggagagacacctgaagttggtcactcggcacattaccaggggctcagcaatgaccagcctgcaaccatcctgcctttccccaggggt

SEQ ID NO: 276466 - DNA, 122 bp, Homo sapiens
taaaacaatgtcccaggcaaccctcccagctaattaatcagtcaatgacactagtggcaacgatttaacaacacttacccagtgttacctatgttctaccacttcacatccactaactcatt

SEQ ID NO: 276467 - DNA, 122 bp, Homo sapiens
ggagtctagactaggacgactacaggatcttaccactgcttgatttcccataagattgagcggacttcctgaaacaactggggtgggcaccaagggaagtgcattggagtgacaaatgtcct

SEQ ID NO: 276468 - DNA, 122 bp, Homo sapiens
cctcagtcttcaccctctgtgcttctaggcacttggctctggggctcagcagtttatttgcgtgctaatgaagccacaggcacactttgtattccattaatgtcctgcagacccatgtgctt

SEQ ID NO: 276469 - DNA, 122 bp, Homo sapiens
cttctctataacgtggttaatactcatttggccgggcttccgtgtggattaaaggagacgcgtatccagggcccggcacatagcaagtgctgtaagcagtggcactcacaggctgccaggac

SEQ ID NO: 276470 - DNA, 122 bp, Homo sapiens
aagtagaaatatccccttttatgcaaatactgtatttgaagccacttcgccagggtttagcgttcctccttcaaaaattgtccggtgttgcccacttccaaaatggcttttgacccgtcgtg

SEQ ID NO: 276471 - DNA, 122 bp, Homo sapiens
tcttccctataggtggaatcatgctcacaccatatttcttccctttcctctattttataccgcctgccattcagttcattttacctcatccagtgtcccagactctcttctcactgaaatct

SEQ ID NO: 276472 - DNA, 122 bp, Homo sapiens
ggccgcggcggccgccgcccgactccacggcggctttgactcggactgcagcgaggacggcgaggcgctcaacggcgagccagagctggacctcaccagcaaggtaggcccgggcggcggcg

SEQ ID NO: 276473 - DNA, 122 bp, Homo sapiens
tatcaatgtgcgggcccgcgaacaacgtcagccggaccgattctctgcgtctgccagtcccgccacagattcatctgggatcttcaaacagacaagcccttagagacgagggatcaaggcag

SEQ ID NO: 276474 - DNA, 122 bp, Homo sapiens
cttcttaatgatgctatgaagtagattctattatcatcctcatggactgaaggaagaaaccgaggctcaaagaggttaagtgatatactcaagatcacccacacaggtggtcactggtgtta

SEQ ID NO: 276475 - DNA, 122 bp, Homo sapiens
ttatttagaatggttcatacgtctgctttgtttgcatactggtcttcagattatgagactcgatgataacagtatggtactgcttctgtgacaaatatcgtgccttaacaatgtggctgtcc

SEQ ID NO: 276476 - DNA, 122 bp, Homo sapiens
tgttgacggctttttcttcctgctcccgtcctttgagggtgtgccttttgctggccgtgacgggtgcagctctgccctggctccctcaggtgcgtgtggcccgtgcggccgtctgcttcccg

SEQ ID NO: 276477 - DNA, 122 bp, Homo sapiens
aggccagtaacataaacaagtaaagtggtccagttggggcctgtggcaaactgggcaacccgagcctccttgagggaggtagggtatggtatggtagggtggggtggggtggagtttactta

SEQ ID NO: 276478 - DNA, 122 bp, Homo sapiens
gcggagctcagcctgcagctgttgagcgagaccctcccagaactatcagcaagctgtcatcgcctccctttcccgctgtggggtggagggtggggggttcaagtcgattccaatgtacaaag

SEQ ID NO: 276479 - DNA, 122 bp, Homo sapiens
taattctgtattgttaaacttaatagtaagagaagaaggagtgaattacaatttgttgagcgctgctgtgccaggtaaatgttttacatgtgttactgcattatttttatactgtgagtcca

SEQ ID NO: 276480 - DNA, 122 bp, Homo sapiens
ctcaggggacccgcccgcctcggcctccgaaagtgctgggattacaggcgtgagccaccgcgcccagcaagcttgcaggtttttacatttctttgaaggcacatgtttcctttcacaagagt

SEQ ID NO: 276481 - DNA, 122 bp, Homo sapiens
cccttcagctggggaggcagggggtggggtggggaagggagtgaggaacgccacttgccgcgcctggagcagcgcacttgagataaacttcccaggcacagatgaaaaagggggcgccgctc

SEQ ID NO: 276482 - DNA, 122 bp, Homo sapiens
attctgcaaataaccagcccttataaaagccaaaacctggatcatttgaggtcaggtgttcgagaccagcttggccaatatggtgaaaccccatctctactaaatatacaaaaaattagcca

SEQ ID NO: 276483 - DNA, 122 bp, Homo sapiens
ggtgtctccaactcctgatctaaacacccatcctccaactcctacctcctcctcttgcttcgatcagaacagctttactttagatagggttccatttaagatttttgtaccaaaaaaaaaaa

SEQ ID NO: 276484 - DNA, 122 bp, Homo sapiens
gacctccgagcccgctcgttacagcagaacgcgcggtcaagtttggcgcgaaattgtggccgccccgcccccctcgtccccatttgtgcaggcgaggccccgcccccccgccccggcgcacg

SEQ ID NO: 276485 - DNA, 122 bp, Homo sapiens
ccctctttaattcaccctaggtgtttaccacagtaggtcacacctacgtttaacaagcttcgttctcttcccgttaaccttcccctccagaaatttcaagaaaatgtgctacctttcagtgt

SEQ ID NO: 276486 - DNA, 122 bp, Homo sapiens
aaccctcaagagaaagccagtcctcaggggtcagcaagttccacattcagcttcagctttcggccattcctgccgccaggccacgctgagagtctgccggggcacctcggttccctgcgcct

SEQ ID NO: 276487 - DNA, 122 bp, Homo sapiens
gagtcgcgggccctcagcgttgcctgcaggggcggggcggagcgcggtccagagtcctgacgtcacccccggggctgcgcggggttggggccgcggcgctgcgactcacctgcagtggggga

SEQ ID NO: 276488 - DNA, 122 bp, Homo sapiens
ttaagtttgtcctctactagatcgcttctcattcaccaggatatcttagatcaaggctggcgtttgaagcctctgcctgagttcaagccccttgcttccggtgttcctgtccaagcccgcgg

SEQ ID NO: 276489 - DNA, 122 bp, Homo sapiens
gcctgggcaacgagagcgaaactccgtctcaaaaaaaaaaaaaaaaaaaatcctgagtcccgcttgacaccttttgtcaggcaccaccacctttctgggcgaatgcggtagtaccgtctgct

SEQ ID NO: 276490 - DNA, 122 bp, Homo sapiens
tggatgtacaaagcagcccgggaacctgcagccacttcaaagaggggcagagtgtgaaaccgggggatcgaacccctccatgcccagcacgcaacagtaagaaacggacacacgcagcgacg

SEQ ID NO: 276491 - DNA, 122 bp, Homo sapiens
gggccgccaccgtcacctcggccgctgccgctgtcgccatcgccttgtttccccatcccccgccatggccgaggacctctctgcggccacgtcctacaccgaagatgatttctactgccccg

SEQ ID NO: 276492 - DNA, 122 bp, Homo sapiens
ggccagaggagggaaggaattaattagaggagctaacagaccaacaaacaaacaaacaaacgaacaaaaaacccaggtcccaggacagggaatcctgatggggcggaggtggtatctccgca

SEQ ID NO: 276493 - DNA, 122 bp, Homo sapiens
ctcgggacctgcagcctgccatgcctgagcctcccacccactccatgggctcctgtgtggcgcgagcctctccgacgagcaccaccccctactccacggcgcccagtcccatcgaccaccca

SEQ ID NO: 276494 - DNA, 122 bp, Homo sapiens
gccttcttgctgaggatgctggccagctcctcctgctgcttggtctccagggcctgcaaccgcttctcgagcgcgctgcggggtagggggcgcacagaggtgagcctggcatcctcgcgaag

SEQ ID NO: 276495 - DNA, 122 bp, Homo sapiens
gccagtggtgtgaattctgcattctctgaaagtgccaaagaacaaagtaccacattcaaacgtgaggggaggtggggctgcagccccaggtatccatctttctccttctcccggaggcaggc

SEQ ID NO: 276496 - DNA, 122 bp, Homo sapiens
ggcgaagggcggcagcgacagccccagcaactgcctctgccggcgcctcccgcaggccctcgccaactcgccccgcgcaccatgctgactcccggcctgcggaactcgtagtgcagcccctg

SEQ ID NO: 276497 - DNA, 122 bp, Homo sapiens
gagctgagggtctaggagggttcatggcgaggttgtcagagctgggaagcagaaagcagccgggcaggcctcacagtcacagagtccacgtcccgggcagcatatggagaaagggtctgggc

SEQ ID NO: 276498 - DNA, 122 bp, Homo sapiens
cttcaacaactgagttgcagggccccgtctacactggggttcaggactttagaggacaaccgagctgtcctgcagggctgctgagggttctgcccttgtcctttccctggaggctaacaaat

SEQ ID NO: 276499 - DNA, 122 bp, Homo sapiens
atccccaccattccccaccgtggcaccatggagtcttccttacctgatctaggaaggcggcgctggagcttgctgccccctgtctgatccagcccctcatgttgtaggagggaggtgggcga

SEQ ID NO: 276500 - DNA, 122 bp, Homo sapiens
agtgcggccccggcccgaggcggcgggttttgtggctgttgcaccgcgaagggcggcagccgcgcgacaccgggaagcgggaggcggtggcggcggcggcggcgcgctgacgtcacgcgccg

SEQ ID NO: 276501 - DNA, 122 bp, Homo sapiens
tccttcttgctcttttgagaacacatcaagcttattcctacctgagggacttcatacttgcggccccctctgcgtggaaggtttgggcccagaatgcctcctggctggcctcttctcatgtg

SEQ ID NO: 276502 - DNA, 122 bp, Homo sapiens
ttgcgtctccccagctaccctcagagaaaaccacatgtctaagctgaggggaaattcacccgcatggaacggagccagtctcttggagaagaacatggttgatggaacccctgaacaataaa

SEQ ID NO: 276503 - DNA, 122 bp, Homo sapiens
aagcctcagtacaagccttgctcatagcaaaagaaggcacaggccttacttgacattatacgcagaaaccctgatatcctacaggacctcctaatggctgaagcctagaataccattatgag

SEQ ID NO: 276504 - DNA, 122 bp, Homo sapiens
tcggctgtgccagcccggggcggggccagctgaacctcagttgtggggcggagtccgttgcggacaccctcaccccccgggcaaccgcagctcccaactccgctggctttcccctccctctg

SEQ ID NO: 276505 - DNA, 122 bp, Homo sapiens
gttccattgcaatctgtcaggacctgggagcctcttcttcttccgccctggcagggtctccgcagaagatttgttgccgtcatgtcggctgcgattgcagctctggccgcttcctatggttc

SEQ ID NO: 276506 - DNA, 122 bp, Homo sapiens
caatctatacccgcccacaccctttctactcaacatactgctccttgttcccagccagcccggcacacccaccatggacacagggcagctcttgctggccccattcacatgaaattcttctg

SEQ ID NO: 276507 - DNA, 122 bp, Homo sapiens
cggggcatgtatcccctagggctgactttccgctaagtgaacagccatgttagcctcctccgggcgtaaatccaccagggtgagccggccaacggcggtcaggagcgctcaccaggtcccct

SEQ ID NO: 276508 - DNA, 122 bp, Homo sapiens
ctggggatgggctgccccaggctgtgttgggcaggctgagcctctttggggaggccttggcgaggtccggtgccaggggtgaggcggtctcgtcggtatagaagacgcactcctcactgccc

SEQ ID NO: 276509 - DNA, 122 bp, Homo sapiens
tcctcgcacggtccccatttgaggttacagagagataaactgaggcacaagcagcacccgcggcccaagacctccccttggcctcactgtccccctttccgtatcttccccgggccaagttc

SEQ ID NO: 276510 - DNA, 122 bp, Homo sapiens
ctcacgtagcgttttcgggggctgtttgggaaccgttagcaaccggaagtggctagaggtcgcgagagaactgaaaaaggggaccggcctttcccggctgcctaagcacttgggttccggcc

SEQ ID NO: 276511 - DNA, 122 bp, Homo sapiens
ttctgaattcaagctgggctctttagattctgtcctgagggccatggagagccactggtgcgtcccaccagggggcgtggctgggagggcagctcagcagccgtggggaggaggcattgggg

SEQ ID NO: 276512 - DNA, 122 bp, Homo sapiens
agaagtcagaagaaggccatccaatcaaagcctacctggacgtagacattactctgtcctcggaagctttccataattacatgaatgctgccgtggtgcacatcaacagggccctgaaactc

SEQ ID NO: 276513 - DNA, 122 bp, Homo sapiens
aaagttactacttcaagctctgagcctactattaagaagtgccttctttctggtccggcgcggtggctcacgcctgtaatcacagcactttgggaggccgaggcgggcggatcgcctgaggt

SEQ ID NO: 276514 - DNA, 122 bp, Homo sapiens
ttcaagggtgagctggtggtgttaggcagcagctttcatggaagcagctgtgcacagcagcgccagagatgccgctccttgcagatcagggctgctccataggctgtgtgccctgagtagca

SEQ ID NO: 276515 - DNA, 122 bp, Homo sapiens
accctggggccgcactgttggtctacgtgtctgtcagtctgtctgcctctcttctgccgccgtcagagggacacctctgctccccgccccctttccccctaccggagagaatccgagcgggc

SEQ ID NO: 276516 - DNA, 122 bp, Homo sapiens
ggcagcgacaatgaggtgagtcggggccggcgcctcgtgggaggtggcagcggccagcgtcggaggggctgggctgggggcccgcggtgcccccgagggcgggaggggggctccacgggcgc

SEQ ID NO: 276517 - DNA, 122 bp, Homo sapiens
aaaaaaaaaagaaatactctgaacctacaacaagatggatagcggccaggcacagtggctcgtgcctgtaatctgagcactttgggaggccgaggcgggtggatcaccagaggtcaggagtt

SEQ ID NO: 276518 - DNA, 122 bp, Homo sapiens
ttataacaagcctgtgacactggcaccatgtgcctgccatgggccaccacggagacctgccgagttcccatgaggaatttggggtatgggggcctcctgctttggtgccatccctagtgatc

SEQ ID NO: 276519 - DNA, 122 bp, Homo sapiens
cgcagccgctctacacagggcgctctggcataactactgcagaggggctgcaggctcgagcgcgctgattggcttcccagcagccgtccgctctgactggctctgggagaagttccccagcc

SEQ ID NO: 276520 - DNA, 122 bp, Homo sapiens
tgtctttccccttgttgtttcttgtttgcattgggctccagactgatgccaacatttcaacggggtacacctcatcagtttcaaaagctcaatttgctttaagtagccagcaaagcttaccc

SEQ ID NO: 276521 - DNA, 122 bp, Homo sapiens
tgggtgaacactgggattctttttttttttttttttcatgtcacatgggtaatgtaccaacgacatgacaagatttaagggaggcacatctcacagacaagcatgaaaacccaatcatcatg

SEQ ID NO: 276522 - DNA, 122 bp, Homo sapiens
taacccgcacccgtgcacccaccctgaattaagacgtgtgtcgcaactcagcatctttatcggcagcactgaagctttccattctttattttcatcaggttcaaaatcaatttccaaacagt

SEQ ID NO: 276523 - DNA, 122 bp, Homo sapiens
gaggccaggggcagcctttcatcacccggaacccagagcagggacgaggcaggactggcccgggttcctctcgggacaggaagggcttcctgcagcccacagtccccgcaggtttcatgatc

SEQ ID NO: 276524 - DNA, 122 bp, Homo sapiens
aatccggcctcagggacgcaccggagccgcctttccgggcctcaggcggattctccggcgcggcccgccccgcccctcggactccccgggccgcccccggcccccattcgggccgggcctcg

SEQ ID NO: 276525 - DNA, 122 bp, Homo sapiens
cgcggcgcggaggccggggaggagccggggcctgcagcggagccgagccgagcccgagcccgcgccgagccctgacactgtctgcccgccttctggctccccgggagcccagactggtcgga

SEQ ID NO: 276526 - DNA, 122 bp, Homo sapiens
ccttgaacgtccgcttcgccttcgcttctgcaacctggatctgggggactgcgggccaggcgcggcgtgacccctggtgaacggtggccgccttttcccacccctgccctcccatcctccct

SEQ ID NO: 276527 - DNA, 122 bp, Homo sapiens
ctcgggagcctcccgcaccctccctgttgtgccttgggggtgctgcgtggtgcagaggaccgagaagcccttcgccctcggcgtccgccgcgctcccgccccttcctggccggggtgacagg

SEQ ID NO: 276528 - DNA, 122 bp, Homo sapiens
ccacacagcatgcacaaaacctgccccaccccacaaaaccttgctgttcaaagtggtaaacgacaggctacaatgtgaatgcttcaagtgagaaagcacatgttgacatttcggaaatcaaa

SEQ ID NO: 276529 - DNA, 122 bp, Homo sapiens
caggctgtgcagcttagagaagggggcggaagggaataatcgtagggcggagagaaaacacgaataacgagaccgcagggcatgctggaagtcgtagtttcttctgcctctgctgtcaggcg

SEQ ID NO: 276530 - DNA, 122 bp, Homo sapiens
gtaagtatttaccttccagtttggggctgacggggcgggggcagcgcgaaacgaaaattgcgtctctcttcctctctctttctcctcacaaatatttgggggtcacgggttccaaggcctag

SEQ ID NO: 276531 - DNA, 122 bp, Homo sapiens
gatgaccgctgtcctgtctagcagatacttgcacggtttacagaaattcggtccctgggtcgtgtcaggaaactggaaaaaaggtgactgaatgacatcggattaactttgtttctgcagag

SEQ ID NO: 276532 - DNA, 122 bp, Homo sapiens
aaagattcagatgtttcggaaagttgaccagatctcccaaaccctcttaaggttttgcagcggaaaaaaaaaataagtaaatttttttccctgccttgcttcttcctttccccctctctcgt

SEQ ID NO: 276533 - DNA, 122 bp, Homo sapiens
acacagttgacatcactcttataatctttatttaaaactgtttccaaggttacaaattgccgagcctcgtatgcaacaggttcctccaaagcggtatcattacagattaactgtaatgtgta

SEQ ID NO: 276534 - DNA, 122 bp, Homo sapiens
gacaccggccgctgggtggcgctgtggctcctcctacccaggctggaggcaccagggaggcggaggcgcagccgcggaactgggcctggcgctagggtccgtgggcgcctgcagagcgggtt

SEQ ID NO: 276535 - DNA, 122 bp, Homo sapiens
ccgcgctcctctcttgactttgagcgtccggcggtcgcagagccaggaggcggaggcgcgcgggccagcctgggccccagcccacaccttcaccaggtagggacgctcccctgctcagaggg

SEQ ID NO: 276536 - DNA, 122 bp, Homo sapiens
accgcgggggctcaggaggcgtgtgcaagggtgattgggtcgcagttgaggggagcagctcgcgagaagggggcgtgcggtcggcctcgctttacgcaaacgcgacatatcaaaatgcattt

SEQ ID NO: 276537 - DNA, 122 bp, Homo sapiens
ggcctcctcgtcctcggccactagcctgccgtggcccgtggtcatcggcatcccagccggcgctgtcttcatcctgggcaccctgctcctgtggctttgccaggcccagaagaagccgtgca

SEQ ID NO: 276538 - DNA, 122 bp, Homo sapiens
ctgatgttggtttgctcagatgtaacgtgcggttgacagcgtctatgctggagcacgtggcggcttaagagcaataggtgaaaggggtatctcagaagacgccctcaggacacggggatgcc

SEQ ID NO: 276539 - DNA, 122 bp, Homo sapiens
aatatgtaccccttaataacataccaattttgccacccttggcatagggagctagcagatcgacaaccttgataccagtcaccagaatttcctgctcaacactcatttccatgaactctgga

SEQ ID NO: 276540 - DNA, 122 bp, Homo sapiens
attggttttaagtatggaataattgtctttacagttataaaaagtaattagtggtgtttacgaaatgttgggaatttctgctttgacaaatagttaagtcccatggccttcagagagagagg

SEQ ID NO: 276541 - DNA, 122 bp, Homo sapiens
gataagcaagtttgacaggaagaagctactcttctccgaattacacagaggtgatgtgttcgtattgcacgtagacgtgtgtataacaggacctccttccccgcgccccgccaccccgacac

SEQ ID NO: 276542 - DNA, 122 bp, Homo sapiens
ggaggggacattctccttttaaaagtggccaggcccgtgagcctctgagaggctggcctccgggctgccccggacctcgcgcccctagctcgcgctgcaggcctttcctgctcctccgaggc

SEQ ID NO: 276543 - DNA, 122 bp, Homo sapiens
cggccggggaggaggcatcaaggaggccttcctgaaggagccttggtcgagcccaagacgcgacgctgagggcactcctgttggaggcagccgtgtacacaaacgcacagacacacgcaaag

SEQ ID NO: 276544 - DNA, 122 bp, Homo sapiens
gggaggggaaaggggtggaggaagaggagggaggagggggaagggaaacaaaacccaaaccggcttcacttccaagaagtgcagccttggaaaaaggaggaggagatcatctccctgcctcg

SEQ ID NO: 276545 - DNA, 122 bp, Homo sapiens
caagacatcaagatttcacgatttttaagacgtcaagatgctagcatgctaacaccatcacggttctagaactttaaaggtgtcaagattctaaagccttctggattctagaatcctgtaga

SEQ ID NO: 276546 - DNA, 122 bp, Homo sapiens
ccagcatggccaatcaatgagcttcattcaacggagcgtcctggccaagtgccacagccacgctggccagacacactgaccagttacgcatttcccaccagccaaatgccactgtttactaa

SEQ ID NO: 276547 - DNA, 122 bp, Homo sapiens
ccagaccccgaacactacagttgactttgccctgtttaggaaaccctaggacaaactctccgctccttcgcccgcccctgcccgacatgtcccggggcctcactcgggtcagccagcggact

SEQ ID NO: 276548 - DNA, 122 bp, Homo sapiens
agcacacagcgcccgtgaacttctgcgggggcagcacgaaggtgtaggtgcagcgcggggcgcccgcccgcgcccacgacgcgcccagcaggagcagcagctgtagcgcacgcagccagggc

SEQ ID NO: 276549 - DNA, 122 bp, Homo sapiens
gaggcgtgtgccggtgacgccccttccggtccgccccgcgtctcttcccgcccccggccgcgcccacaaggaacgggaggacgcgcagggtccatgtgcactttattcactcgtgtcgtcgc

SEQ ID NO: 276550 - DNA, 122 bp, Homo sapiens
taagctgcctttttttttttaacttcctactttgatgataagcactcagatatatatcagcgtaaacatgaaaaattttcatgtgagtaggctggtatttgtaattttgctttctttctgca

SEQ ID NO: 276551 - DNA, 122 bp, Homo sapiens
gccaagttcttttcctcgttcctgcctctcctgtggaatttctagggtgtaggaataaaacgaggctttggaggttatctgtgggtttattttttcctgactgtagcgtgttaactggtcca

SEQ ID NO: 276552 - DNA, 122 bp, Homo sapiens
ctacgcgtttaatgggacacagcgcttcctggagagatacatctacaaccgggaggagttcgcgcgcttcgacagcgacgtgggggagttccgggcggtgacggagctggggcggcctgctg

SEQ ID NO: 276553 - DNA, 122 bp, Homo sapiens
aggccacctcctttgcaaggacttctatctctccccctttgaggccacgacataattctccgcatttttaggtacttaacagtaaatcacttggttcacttggttctcctgcctgcctagga

SEQ ID NO: 276554 - DNA, 122 bp, Homo sapiens
gtctctgccctaccagatcttcctctctggcctctttgtacccatctcattctgtcttttcggtcacgcgcctctctatgttttcttcccaacttttccatctcaactcaccccaagtgact

SEQ ID NO: 276555 - DNA, 122 bp, Homo sapiens
tctaggtacatgtctgagtccgaatgtgtttcttgcactccccggactgtggcgaaatggcgtgctttgtgtgtctgtggttggggggaagtgggggaaatgacagcagggaaacctatcgg

SEQ ID NO: 276556 - DNA, 122 bp, Homo sapiens
gggctggggcgcccagggggctctgtagaccgagggcggccccctaaccatgatgtttcgcgaccaggtcggggtgctggcgggctggtttaagggctggaacgagtgcgagcagactgttg

SEQ ID NO: 276557 - DNA, 122 bp, Homo sapiens
cagccacaggatccctctgcagactggtcctttgacccagaagcctctcccagtatggagcgtggtcaggctgatcccaggaaatgcttcagaaaagagtctactttcgatttccagaaacc

SEQ ID NO: 276558 - DNA, 122 bp, Homo sapiens
aggtttgtaaggcaaaggtgactcctgccgagaatgcacacggggaggctcagggctgggcggggcttggcgtcgggacccagagctgccattggaaaggtctgagcccgtggcccggcgac

SEQ ID NO: 276559 - DNA, 122 bp, Homo sapiens
gcagagagagagagcttggaaaagtttaaagacggcagtgggcaaatggaaagttcaacacgtgagaccccgaatgacacctcaacggctggcccctacttgtgccaaaaagtctctcggcg

SEQ ID NO: 276560 - DNA, 122 bp, Homo sapiens
ctggtcatccaccgcaagagccacacaggccagcggcgtcacttctgcagtgactgtggccgcgccttcgactggaagtcgcagctggtcatccaccgcaagggccaccggccggaggttcc

SEQ ID NO: 276561 - DNA, 122 bp, Homo sapiens
cagaactagatgttcagactgcagttctgagggccagtccccctgctgattccacagccccgcctctgagggttctgggaagctcctgagctaatcataaacacaccatttaccctggcttt

SEQ ID NO: 276562 - DNA, 122 bp, Homo sapiens
accccgcgcatccggagccgcagcagactcggcggggcccggagccccacgcccccggcccgcccctggccgccacttgtttactccccggcgcagcctagtccgaccctggggcccgcccc

SEQ ID NO: 276563 - DNA, 122 bp, Homo sapiens
ggctcatcttgtaccacttgaccctccactctctagccatgtagaatgtctgctgtcagccgggtgtggtggctcacgcctgtaatcccagcactttgggaggccgaggcaggcggatcatg

SEQ ID NO: 276564 - DNA, 122 bp, Homo sapiens
gcccacgccgcgtgtgttctcattcgcacccacatgtgggctagcacctgaggatggaagcggcgaggagccgggcggtgtgtgggctttgctgtttcgtgtttgaaggagatcatgaaagg

SEQ ID NO: 276565 - DNA, 122 bp, Homo sapiens
tgagcggacgccgctccgggggcggggctggagctggcaggcgagggggcgggccagcgacgcaaagggccggcggtcgccagcagttgccccctccccttgggtcccgggcactcagccca

SEQ ID NO: 276566 - DNA, 122 bp, Homo sapiens
cagggggtggcgcctgtcagggaggctccagcctgctgctggagcacaccgcggggggctcgggcatggcaggctgcaggtcccgagccctgccccgtggggaggcggctgaggccccgcga

SEQ ID NO: 276567 - DNA, 122 bp, Homo sapiens
cccgcctcaaggtctttccaccctctttgagatcagcgttcggagaggtccccgccagcccggtggctgccctcaggtcccgtcacatgtctcaagggtccagcgttcgaggaagcactgtt

SEQ ID NO: 276568 - DNA, 122 bp, Homo sapiens
acttgttatttcacatttccatggatgcatctcatctgccttgctgcactgtaggcccttcggcttttatttttttttaattcttaatctttatgggtacatagcaggtatatatatttatg

SEQ ID NO: 276569 - DNA, 122 bp, Homo sapiens
aggaggccgaggtctgtggctggggcgctgggggagacattgcgtctggggacaggactccgggcagaaaggcccctgtgggaggctcgaggggttcacagcgggctctggcttctgggaac

SEQ ID NO: 276570 - DNA, 122 bp, Homo sapiens
cgcggaagaagtcgctgcagagcctgcagagcacggtgcattaccacctgggcagcctggcgctgtccgacctgctcaccctgctgctggccatgcccgtggagctgtacaacttcatctgg

SEQ ID NO: 276571 - DNA, 122 bp, Homo sapiens
cgccgcccccccacctcttgcgctgtcggccatcagcccagcagagcagggtgagctgggcgggcgggcggcaggattagctcaggagacgtgagtcaccccatccccagcagccccgagag

SEQ ID NO: 276572 - DNA, 122 bp, Homo sapiens
ctccactccggccacggtgagcagcccctcacgccccacccgtgactctttcttcacctccgttcctgtgtgacctcaaacaagtcctcagtgtcttaccctcggtttcttcttctccccag

SEQ ID NO: 276573 - DNA, 122 bp, Homo sapiens
cagcccgcccagagccagagtcaggcacgaggctagggcaactccgccccacccctcccccggggactggccctgcgttggacatttcttaacagcagggccaccaggcagagcgggacagc

SEQ ID NO: 276574 - DNA, 122 bp, Homo sapiens
cgaggcccagagaattctctgcaggcctttgcccgggcactgattaaggctgcgaagagacgcaccgggctgcgggcttagtagcttcaggcttctgaagtcagagggagggctgagagctt

SEQ ID NO: 276575 - DNA, 122 bp, Homo sapiens
gcggccgagattcccgctgacgcccccgaccctgccgccttcttcgtccgcctccagaggcgcccgacgtcccgacagctcctggagtgagaccaggactgagaacagggagaggcgacccg

SEQ ID NO: 276576 - DNA, 122 bp, Homo sapiens
aaagtgagccagtgcccttgctctgagtcggctccgtgagccttggtgggaccagaggcgcggcaaccggggccctgctgaccaggatcctgtgacttgtagtccaggggtcaaacctcctc

SEQ ID NO: 276577 - DNA, 122 bp, Homo sapiens
aaagttgaaaatccccatctgtatgaagaaaagcttcactggctggtcaccttggctcaacgcctgtaatcccagcactttgtgaggctgaggcgggtggatcacaaggtcaggagtttgag

SEQ ID NO: 276578 - DNA, 122 bp, Homo sapiens
aggacgtcccaaccagagacgcagggacgtctggcgcctcagcgcctgcgccaagtggcgcgcttaaggtgagcagagtcagctgtgggtagactccccctggcggccagggaaggaattgg

SEQ ID NO: 276579 - DNA, 122 bp, Homo sapiens
agggaaatcagagacaatgatggggctcttccccagaactacaggggctctggccatcttcgtggtaagtcctggattttcctaataatcacaaacttccctgcttcctcccttgttaaaga

SEQ ID NO: 276580 - DNA, 122 bp, Homo sapiens
ccaagctggggcctcttcattgtcgaagaaggcctcttgccagaccaggatctgtgggcgcggccaggctggaggactagggcggtggcagtggccaggtgagtgcacatggctgtgggtgg

SEQ ID NO: 276581 - DNA, 122 bp, Homo sapiens
tccaacagggaccccctcttcccttccctcgggccagcagctcttcctgtacaggagaagcgatctgggtagctcaggagctgcctgtaggtctgcgtatggcctgtttctctttcttcccc

SEQ ID NO: 276582 - DNA, 122 bp, Homo sapiens
tggcaaagagaagcatcgagcgagtgcgctccatctgcaccttcaggccctcggccgtgccgctgctcagtagtctgtcatccttataccactggaaatccgcgggggaaaccgccatggct

SEQ ID NO: 276583 - DNA, 122 bp, Homo sapiens
ccggaagtcctttgatgctttgttaacagtgaagctactggaccaatgaggtgcttcttccggttttgtccgcgctcgcctaattcttctttatcaaggttgcctttgaccccggaaaagag

SEQ ID NO: 276584 - DNA, 122 bp, Homo sapiens
ttagcagaaaggagccaaaatgcctgcccctagctcgaggttaaggtgctgccaacgccccgcccccgccgcccgcggtcgtagcaacgcccggcctcagccgcccgcggccctagcaacgc

SEQ ID NO: 276585 - DNA, 122 bp, Homo sapiens
gcgagtggccggaggaggaggtgttgggacggccggacgctgaacggccgttcacgtcaacgtagtgacgtcacgcgtcgacgctggggcgtacctttcgggctcctgactcctgccgcttc

SEQ ID NO: 276586 - DNA, 122 bp, Homo sapiens
ctgcccgtcttccctctaagccggcctctaggtgcagaggctgacgtccaggatggggaccggggaagcctctggagggtatatccgggaaggcaccaaggctgaagtgagagcggttctgg

SEQ ID NO: 276587 - DNA, 122 bp, Homo sapiens
ggtccactgagtcctctgcgcgcggggtcctgtgggatagaagggcggagggcgggtgtacgcggtgcttcagaggatgggaactacaattcccagaaggatgtgcggccgaaagcctcggg

SEQ ID NO: 276588 - DNA, 122 bp, Homo sapiens
aaaccacacacagaccattacttctcacttgtaagatgactgaggaggccattaaaacaacgtttaaggagggttggccatgggccatgaagtatgccaagtgctatgccaaggcgtatcct

SEQ ID NO: 276589 - DNA, 122 bp, Homo sapiens
gtgatcccctccaggaatcagaagacggccgtccttccacggagccagagagtacccacccgcgcgtgcagggatacgtggaggaggcagcaactccagcgttttaggggcgaggggacctc

SEQ ID NO: 276590 - DNA, 122 bp, Homo sapiens
ccaacccaaaagtttgctcaatgaacctctggcctaaagacaatgctccggggaacggttcgcgtgctgggtgtttcgcttcgagaacggcggtcccagcttcccgtgaggtggaggtcacg

SEQ ID NO: 276591 - DNA, 122 bp, Homo sapiens
cctgcgggggaggtgctcttcctgccacactgtgcctccccttgcactctctgagatcttcgttggctttgccttcgtgaaggtttcaatggaaagaaggacagaagagaagggctcaaggc

SEQ ID NO: 276592 - DNA, 122 bp, Homo sapiens
caaagcttaaggctgcatcatccgtcaggtgtggatgagatccatcgaaacagtgagcgacgcctgccatctacaggccacaatgtgtattgccgcataggtgccagtagaccttgaattta

SEQ ID NO: 276593 - DNA, 122 bp, Homo sapiens
gcttggtacgcgagggcccttaggccggcggatctgcggggcacgtgagctgccgtggagcgcgggtgcccgagcccacggcagccggggcagaggggcttcgccattcgccgcggcgcccg

SEQ ID NO: 276594 - DNA, 122 bp, Homo sapiens
ggtggtcgagggtcgcagccccagcgtgctcaggatgttgtagatctgcttgcggtcgcccgtgtcgctgcggggcgggaggaggtagggcggtcgctgagtgtcgctccgacagtccatcc

SEQ ID NO: 276595 - DNA, 122 bp, Homo sapiens
ccacttctgttaatcctcatttatggagatctcacttaccacagagagccagccccttcccggcaactctgtagggcaaatattatcagccccattccatagatgaaggtactgaggctttg

SEQ ID NO: 276596 - DNA, 122 bp, Homo sapiens
caggcttgctggggacacttggcaagtgctgcaagtagaactgagccaaaccaacggacccggctgccttcctggcagccactcccgcctctgaccttgccctctgtgccttttttctctgc

SEQ ID NO: 276597 - DNA, 122 bp, Homo sapiens
cttcacctctaacaggatggtttccatggggaagtgaaccaggacttcccctgcaggccccgccccaaagccaggcggcagggagtagggaggcggcctccctgcctcccctccaaaaaaaa

SEQ ID NO: 276598 - DNA, 122 bp, Homo sapiens
ggcagagcaccaacacctcccccttccaccaccccccatcccatctggtctgcttctccccgccccccagttgttgtcgaagtctgggggttgggactggaccccctgattgcgtaagagca

SEQ ID NO: 276599 - DNA, 122 bp, Homo sapiens
aaagaaaggcctatgggcatcctgggcttttttgtgctgggagaattgagagaaaagagacgtaaacatcaggaacctttgcacagggtgtctagtcagtttggacagctctccaagctcta

SEQ ID NO: 276600 - DNA, 122 bp, Homo sapiens
atatttatctatttatgaattacgcttccgtacaggagcttaacctctccactgcaggtacgttatctgttgtcttcctgcctgtcttcagtgcacggaagaaatatttgttcctttagcaa

SEQ ID NO: 276601 - DNA, 122 bp, Homo sapiens
taacaacaaaaaaaagtgttttgtagcgatggagtttcatcccattgctcaggctggtctcgaactcctgggctcaagtgatccccctgcttcagtttcccaaagtgctgggattacaagag

SEQ ID NO: 276602 - DNA, 122 bp, Homo sapiens
ccggccggctgcgccgctcagccgggcctgccacctgagttttagcgggagcagtcatgtcgcctaccgtattgcgacttgcagacaggcagggagggagctgccggggcggggaggggggg

SEQ ID NO: 276603 - DNA, 122 bp, Homo sapiens
agtctctccgggcagggtcggggagggacttttttgccggtggccgtggaggaatcgtcccgttgagcaatgaccccggtgacgcggctgagggctataaaagcaaaagttgtggcaagtcc

SEQ ID NO: 276604 - DNA, 122 bp, Homo sapiens
aatagccagcacttctgggtgctggtctttggctcggcccttttcctttcttgctggtctcgggctcgctgagatcattggacagacaaggcaggctgacgaggctggcctggcacgtgcca

SEQ ID NO: 276605 - DNA, 122 bp, Homo sapiens
tttgttcaagcagcgagtcccggggcgccccgaacgggcagcctgggccggagagcacggcgagctgcaaggtcgcgtggcccccaagacgccagggcttgatccccgtctgcagggatatc

SEQ ID NO: 276606 - DNA, 122 bp, Homo sapiens
gtcctctgggccacacccccaggttcccgtcccgcccttccgcctgcgcctgcgcaggcccgctccccgagccctgccaaccatggtgaacttgggtctgtcccgggtggacgacgccgtgg

SEQ ID NO: 276607 - DNA, 122 bp, Homo sapiens
aagtaaaagaaaagagaaaggagaagtcgcaagtaagccatggcagctcatcagaacttccggatccagccaggtttcccacaggaacccctcaagatgcgaagcgttctttcaccgacacc

SEQ ID NO: 276608 - DNA, 122 bp, Homo sapiens
tagcagctccattcttccccagagagccactccatctgagggtggctgcgtgtccacatacgaggggacagggctgaggatgaggagaaccctggggacccagaagaccgtgccttgcctgg

SEQ ID NO: 276609 - DNA, 122 bp, Homo sapiens
tgggtgggtggggaagagcagccggcagagtcgcgatggcaaacctgtcacgacagagctcgcaggtcccgaagtgggggtgagggtgggggttgaggatgggaagacctggggcaggggaa

SEQ ID NO: 276610 - DNA, 122 bp, Homo sapiens
ttttttttcttttttctttcctctataaattaagtaaccctcgaatgacggcgcgcaggacgcccggctctggcaaatctgggttcttttctggaacacgctagagacgtcctcgtcgtggg

SEQ ID NO: 276611 - DNA, 122 bp, Homo sapiens
gcgcggcggcagcggtggccgccccttggggcttggggtgtgtttatttgcataagcgggcgcgcgccgtccgggctgggtggatccggcgggatttgactgctccgctgtccagaggcgga

SEQ ID NO: 276612 - DNA, 122 bp, Homo sapiens
tcctcaggaagggaggagaagcatgtgactccctccagtcatctccaggctacattcacgcgaatgtccagggtactgttcatcgcctcctatacccagcccgggacaatttaggcaaatcg

SEQ ID NO: 276613 - DNA, 122 bp, Homo sapiens
cgattcaccactacagacagggagcctgaggcctgggtggtgccgacaagtcggcagtcacgccaggtcaggaagcgccgaagccgcgggaaaccctggactccatcccgggatttgtcccc

SEQ ID NO: 276614 - DNA, 122 bp, Homo sapiens
actctccggggacagacgcccctcggggcgccaccatcctggtcggggtgctgggctcggcgggagtccctttgaggagtttgctcccaggtaaaagggcagacgttgctcccgacctcccc

SEQ ID NO: 276615 - DNA, 122 bp, Homo sapiens
agtcctaaatttagaaggcaaggtgctacttttagctcctcttctcggaggaaaacagcacgcaccgcgccaggccaaggtccacggggatttgatttagcatttgggtaactggccgctaa

SEQ ID NO: 276616 - DNA, 122 bp, Homo sapiens
gctacaagcacgcttcacgcgggcgacaaactgatgggagctacaactggcgcttcattgcgctataaactgatgggcgctttatgtgccacaaactgacggatgggcgcttcagtggcgct

SEQ ID NO: 276617 - DNA, 122 bp, Homo sapiens
gggacatgctttttcctttcccgtggaaggctcctccaggcagggcttgggtgaggcaggcgaggtgccagtggttccctgggcacggggcagaatcggaggaggacatcctctttctgagg

SEQ ID NO: 276618 - DNA, 122 bp, Homo sapiens
aggtggttccggtctggggagaagacgtgcagggtttcagatgcgaaagtcgcacccaaccgcttcactcgggctctaggccatccgcaggggccctgcttccttccacctgcgagcttttt

SEQ ID NO: 276619 - DNA, 122 bp, Homo sapiens
tttgtctaaagttccatcctctgcggagctccttgcataattcaaacgtaattaggcagacggtgttccttttaaaggcgtgactttggggggtgggagggatgcttatttactttggggct

SEQ ID NO: 276620 - DNA, 122 bp, Homo sapiens
ctaaggtgagtcctttcaggaaatctgaagaggtgtctggagaggctgcctgggagccagcggtgtgcttatattcccaacacacataatgcccctttcagggggtcatctcttctatccct

SEQ ID NO: 276621 - DNA, 122 bp, Homo sapiens
cggcgctcgaccggacagtcccctctttgtcattcttaatgactccccttgcctcccaggcgccaacccattgagactactcgcttctctccactctcccaggcgggcgcagaaacccccgg

SEQ ID NO: 276622 - DNA, 122 bp, Homo sapiens
gaagagagatggctgcctgcaactggactgcctcttcctcacacaaatcagctacatctacggccagggctctctataccttcctgaatagctgtgaacaccgagcatccctgtgactatag

SEQ ID NO: 276623 - DNA, 122 bp, Homo sapiens
tgagcggggcctctaagtatgggtaggagacaggcggcctagggattccggttagcatgtcgcgttctgccgcagcagggctgggagcatccccagagcaggcggaggtcggaggtggtgag

SEQ ID NO: 276624 - DNA, 122 bp, Homo sapiens
tccccctgcctagtgcaggtatctcaggaacagcccacttgttcatctctgaggcatcagcgaatggcccttgttgggctcctggtccccgacctcactgcctcaccacacactgtgaccct

SEQ ID NO: 276625 - DNA, 122 bp, Homo sapiens
gctctgcttgttcgtgtgtgtgtcgttgcaggccttattcatgggctcaccgctgaggttcgacgggcgggtggtactggtcaccggcgcgggggcaggtgagcatgcgaaggttggaggcc

SEQ ID NO: 276626 - DNA, 122 bp, Homo sapiens
tcgcagaatcgctgtgagcctgttgctcatgggaacccgtctggggtggggggcaccaggcggccactgagagctcagcccctgttcctccagagaggggatcttgttgcaattgccacctc

SEQ ID NO: 276627 - DNA, 122 bp, Homo sapiens
tgactgtctactaatatttgccaagcactgagatactgggaattcagtagtgaaggaaatcgtcctgccttcatggagatgacattctaaatggtggagacggagagtgaaagtcgggtttg

SEQ ID NO: 276628 - DNA, 122 bp, Homo sapiens
ggtgtagctggcgggttgcttcctttcaactttccactctaataaaatggtcagaatatacgtgtgtgcatgcgggtgcgtgtgtgtataaggggaagagagaggatggaaaggggatatgg

SEQ ID NO: 276629 - DNA, 122 bp, Homo sapiens
cacacaattttgtgtagatagggagtggagggaagggagaggctatgataaatgtcccttcgtgtgccttaaggggacctggtaacttggtttcttttgctggtattaaatttttgcaatct

SEQ ID NO: 276630 - DNA, 122 bp, Homo sapiens
ttggatgcggagctgctgtttgggaactcagtcacctagcagcgactttggatgtcagggcgccagcctgctagggagtgggatgcggacgcgggggtgggaaggggacgcagagccgcgtg

SEQ ID NO: 276631 - DNA, 122 bp, Homo sapiens
ccagccaattttttgtattttagtagagacagggtttctccatgttggccaggatggtctcgatgtcttgacctcatgatcagcactcctcgacctccgaaagtgctgggattacaggcttg

SEQ ID NO: 276632 - DNA, 122 bp, Homo sapiens
ggaaccccgcccctctctgcgaggtcccgccccccacacctgatcctggttcccattgggcgaatctggatgctgtatacacagccgacacacgcacattaggctggggcgtcttcgcgcct

SEQ ID NO: 276633 - DNA, 122 bp, Homo sapiens
aactcaactctaatgaggtctattttcctgctaacacatctaaaaggcttcctattgctgcgatggtttaaactgtaaactttttcacagaagacttggttttccaagatctttccctcatc

SEQ ID NO: 276634 - DNA, 122 bp, Homo sapiens
gacctcctgcggagctcgcaccctagctctgccgccactgccgcctcctcggccccggaccgccgagggttaacaaaaaagccccacgccccctttgacggcttagagcccacctcgccgaa

SEQ ID NO: 276635 - DNA, 122 bp, Homo sapiens
agatcatgttactgcactccagctgggtgatagagactgtctcaaaaaatatcaatcaatcgataaaatagaggacgtgcgcctctttctgagtctgatttggctttatgtaaggataagtt

SEQ ID NO: 276636 - DNA, 122 bp, Homo sapiens
tgagttactctggcaccgagaaacctgttcttatctggcaagtacgccccctgctggccgcggtgctgaactccgcctcttggtcctgcgccagacagccctcggagctctctggtttagac

SEQ ID NO: 276637 - DNA, 122 bp, Homo sapiens
gctcacattttccatctctccttaagaaccgttttctccaggaagccttcccagatggagcggtgcatcccagctctggcgtcccgaggcccgtcccagtaccggggtctctttccagcacg

SEQ ID NO: 276638 - DNA, 122 bp, Homo sapiens
gggaagcctgcagccgaaagggctggtgtctgttcccacactctgtcatgcgtcttgtcacgtgtgtgtgtgtgtgtgtgtgtgagcaggaccaggaccacccaggagcagggctgctgggg

SEQ ID NO: 276639 - DNA, 122 bp, Homo sapiens
tggccgtggggggcggcggcgccgggactcgcgccctccggacccagccggactcgtgcccgcatggctcaactttccaggcgtgcaccccggcgctgtggtgaagagcttggaggcgggga

SEQ ID NO: 276640 - DNA, 122 bp, Homo sapiens
aatattgtaatacaaataacataaataacattaagctatggtaactttacggacttttctcgttccctggagtacattggaataacccttctcagggttagcggtgctcgggtccggtaaca

SEQ ID NO: 276641 - DNA, 122 bp, Homo sapiens
gcgcggggagaggagagggcgcaggggagcgggcggcgcggagtgggctgaggggccggccgcctcaccgcgccagggcacccatcctctccctccttcggacagtcttctcggggtcctgg

SEQ ID NO: 276642 - DNA, 122 bp, Homo sapiens
ctaaagagaaatgccggacttggcgggagacaggacaaagcagtggctcagctggggacacgcaccgtttgcaccagaagtcttcacgctcaagtagtttcttagctctcagcagacagctg

SEQ ID NO: 276643 - DNA, 122 bp, Homo sapiens
gcgaaagatctagacccagcaattagacggccagcgaaagatctagacccagcaattagacggccagcgaaagatctagacccagcagttagacggccagcgaaagacctgatgaagaaaag

SEQ ID NO: 276644 - DNA, 122 bp, Homo sapiens
ggccgggcgtcccgggatggccttcatggagaagccgccagccggcaaggtgctgctggacgacacggtgccgctgacagcagccatcgaggcgagccagagcctgcagtcccacacggtgc

SEQ ID NO: 276645 - DNA, 122 bp, Homo sapiens
ggggagactgaaaggacaagcagcttagcactgagaaaccatgaggaaacatgagtaccccgggcattttgctaagagaggctggcacagtcagacattctttctactggcttgacttcctt

SEQ ID NO: 276646 - DNA, 122 bp, Homo sapiens
aggggggattccagatcctcgcattttcacagacggcctaatccctctgcgcaatggacccgggaaagctgcctcccgttaagggcgcccaggcactgtcaaagcgccctccctgcccgggc

SEQ ID NO: 276647 - DNA, 122 bp, Homo sapiens
cttccgggacgctctagacaggctggaggactcagcactcggtggtgtctgggagccagacgcaggctttcaaagagctgggtggccgcggagggcgtgggaggagaggaggcctggaggag

SEQ ID NO: 276648 - DNA, 122 bp, Homo sapiens
ggcctcgctatcctagttctctgcttggggtcctgcttctgctcttgccgccgcctctcccgcttcttccgggggggacatgccgcagaatctagactgctcagtgctccgacgtctgctct

SEQ ID NO: 276649 - DNA, 122 bp, Homo sapiens
gggcgacagagggagactccgtctcaaaaaaaaaaaaatcaaagatccttccagcatcctcgcaccaaccattaaggcttgggaagggctatggtggaaactcaaccaatagcttcttctcc

SEQ ID NO: 276650 - DNA, 122 bp, Homo sapiens
ctggcccagctgcgccaccgcgccagccccggcgcacgctcccggcccggggcccgccagcgtctcgcgcaccagcgcccacagctcgcgctgcagggcctcgtacagcagcgccacgtccc

SEQ ID NO: 276651 - DNA, 122 bp, Homo sapiens
tcgttcatcccacaactacttggtgagcccctcctgtggaccaagtgcttttcaaggcaccggggacacagtggcgacaaaacggcgctccccgtgctgtgggactgactgtccagatgtgg

SEQ ID NO: 276652 - DNA, 122 bp, Homo sapiens
ctacatattccttccagagtatagatactttttcctcaagatacacatcctgggtctgggcgattgcagtgcagagatttacctgtcttgtagccagctgcctaagaccaagcttctgtttg

SEQ ID NO: 276653 - DNA, 122 bp, Homo sapiens
gaactctctccttgtttttgtctcccgcccccgccagaaggtgatgcttccgacgggagccgccttccggtggtttcagtgacggcggcggaacccaaagctgccctctccgtgcaatgtca

SEQ ID NO: 276654 - DNA, 122 bp, Homo sapiens
tttttaccggctcactcgagaccccaattccaggcgccctgcagcttccctcagactccccgggaccgtgtttggccttcccattcgtacgctgcggctgcgctttcctctcgtaacaccac

SEQ ID NO: 276655 - DNA, 122 bp, Homo sapiens
gaaatatgacatcattccttttgaattttttcaggacaaagaaacaaaaaccggcacatgcggttactgtgggctccagttcagacagcaccaccactagagcgtgtggcacgccgggggtc

SEQ ID NO: 276656 - DNA, 122 bp, Homo sapiens
tttttgtaattttagtagagacggggtttcatcatgttggccaggctggtctcaaactcccggcctcaagaaatccacccaccttgggctcccaaagttctgagattacaggcatgagctac

SEQ ID NO: 276657 - DNA, 122 bp, Homo sapiens
ctcctataaatgcatccatcagcagcgttctctgtgtccagcttctgttgctcagcagtacgtttgtgagattcacccaccatttttttttagacggagtctctgtcgcccaggctggagtg

SEQ ID NO: 276658 - DNA, 122 bp, Homo sapiens
gatctccacaggatggtgggcagaattagtccaaattggacaaatcatcaccactgatggcgatgattacaataaaatcagtttgaggagctgatgactgtgtatacctctgcctttttttc

SEQ ID NO: 276659 - DNA, 122 bp, Homo sapiens
ctttaaattatctggaaagagctttgacaccccatgagcgacggatggcccagaacctggcgctccgtgctgcgcggctcccccggctcccagagctgcgctctgcgtccggcctgagctgc

SEQ ID NO: 276660 - DNA, 122 bp, Homo sapiens
cgctgccatgcatgtgcggggtcctagggaccctgaggtctcgggttcacccccccggagcggctgcaccccacaaggagccgcccaaagaggcagggagtcttgaaaggggagatcgaggc

SEQ ID NO: 276661 - DNA, 122 bp, Homo sapiens
agtgcgcgcagcggaccacgcggtttccatgcgccccctagggtgggtgggctagctgtgcgccccagtgcggagaacggaggaggggtcggccccgtagcggctggaaacgcagttggcgg

SEQ ID NO: 276662 - DNA, 122 bp, Homo sapiens
ctgagatagtcagtcactttaaatgtttgccaatggagatgcaatcattgattgttgcgacgtccccacacatttttaaagctcgcatggcacacttagtctgtggtgtagctttctggccc

SEQ ID NO: 276663 - DNA, 122 bp, Homo sapiens
ttcggcctcaggctggaagtccctgccacaaaaaccgaatgtcccttccgggaagggccccggtcacagcctgtgtgcttctcagcaggaaaggcggcctggaagtcactctgcccagcaga

SEQ ID NO: 276664 - DNA, 122 bp, Homo sapiens
tcttagcattttttcaaatttaggtattatgtttatgttaacgtaatacctcaagtgatccgtagtacctttgcagtactgatgcaggaggatggcttgagtccaggagttagagaccagcc

SEQ ID NO: 276665 - DNA, 122 bp, Homo sapiens
acattcacagagcacttagtgacagacggcaggttggacgtgttaggcacagggacctcacgtggggctgcagacctcattgcaacaagggacctccagtcttgtttggcccacattttccc

SEQ ID NO: 276666 - DNA, 122 bp, Homo sapiens
tccgcgaggcgttttctctgagagtctcagagattccttggcttggagaagtcctggacccgggtccagagctcagaggtcccctccacgggcgggcgggccgaggactcaggaggagggag

SEQ ID NO: 276667 - DNA, 122 bp, Homo sapiens
cccgaactccttggcgaccactgagtccccatagcaacagcggtgacttcactctgggctcggcttacaaccccggtgaggtcaccggccgttgccaggggaacgggagggcgcaaggagtc

SEQ ID NO: 276668 - DNA, 122 bp, Homo sapiens
aattggtgagaggctgggcacaggcagcgggaggacctcaggcatggcaccctccctcagcgcagtccctggagagctgcaggggccggaggcacaggtggctctccgccagggctcaggcg

SEQ ID NO: 276669 - DNA, 122 bp, Homo sapiens
gcctacggaagccaagggcaaagtcaaggtctgccaagctccttggcgaccacagtgggccggaggcccagagaggatcagagaggaagaccacttggcccaagccatccagcacagcagta

SEQ ID NO: 276670 - DNA, 122 bp, Homo sapiens
tcattacccctcttatctactttagactgatataagaaacaaatcggggaaaacgcgtcacgtgacgactggccccgcctcttcctctcggtcccatattgaactcgagttggaagaggcga

SEQ ID NO: 276671 - DNA, 122 bp, Homo sapiens
ctcgatcgaaggcgagatggcggacgtgctagatcttcacgaggctgggggcgaagatttcgccatggatgaggatggggacgagagcattcacaaactgaaagaaaaagcgaagaaacaga

SEQ ID NO: 276672 - DNA, 122 bp, Homo sapiens
tttcgtggcaaggagtgattctctccagtaggcaatcctaagaacgagcgcagtgcttggcgcacagtaaatgctccatggaccatttatgaaattaagtctaagtggacttcaggaaaatg

SEQ ID NO: 276673 - DNA, 122 bp, Homo sapiens
aggcaaaagggaagcaagttgaggagatcccttttcactccactagctggctgctaatctcggcacgcaggtcagattgaactggagctgggacatggtctgaggatgcttggcttaacctc

SEQ ID NO: 276674 - DNA, 122 bp, Homo sapiens
ttggctgtccaactccaaatacacaagacagcccaggtccagctcacagccagtgcacttcgcgcaggcgcacagtcctgaggcgggctgaaagcccaggtggggctcggagaagaggaagc

SEQ ID NO: 276675 - DNA, 122 bp, Homo sapiens
gcgggccagggttcaaaggcagacgctgcgagctcggtaagtcggggcttggcctcagggcgccccttccaacacagcctgtgcctcagcctaggactgctgggccacagctgggtttgcca

SEQ ID NO: 276676 - DNA, 122 bp, Homo sapiens
cccggtattttctgccagctgacgcccacgcctttcctagaaggggctgggggctgcatgcggtgcgaggcacgtcccccaccagctgtgggctcttactcagcttagcactcgctctcagc

SEQ ID NO: 276677 - DNA, 122 bp, Homo sapiens
caccgctcctcctattgggcggcagcgaccaatagaatgtggggctcgcccgcgctgctacgtcacgtctgggaccgcggagtattccaggcgcctgcaactaaacgtggccgggtctgcaa

SEQ ID NO: 276678 - DNA, 122 bp, Homo sapiens
gtcacctacattctgctcatcaaataacactgatggagctatcggtcatgctggagccagcgtggactcctgctggtttccatatcggcaaaatgttttgcaaaagctacccaatgcttttg

SEQ ID NO: 276679 - DNA, 122 bp, Homo sapiens
gggggtgctggagcgcgagaggctggctgattgtgaccgaaaccagagggttgtccaccccgggcatctcatccctcaactgtaaaataatcgctaaggattccttcctgactttgagcctc

SEQ ID NO: 276680 - DNA, 122 bp, Homo sapiens
gaaactggcacacaggcataatttgtcattaagaataaattgtatgatgatgaactcagtcgattaatcaaggcactgaaaagggcaattgcttgaaaaatgaaagtactgttctggttgta

SEQ ID NO: 276681 - DNA, 122 bp, Homo sapiens
ggtcgtcactatatcaacagtcacaaacccaatggcaataaaggcactgacgatagctggcgcgcgcgacgtcacacaccattttcagatgccgttgcaattaaatcttgccacactgtcct

SEQ ID NO: 276682 - DNA, 122 bp, Homo sapiens
gggcagggactgggtaaaaggtttcaaagactcctgcactattgggaaggacgctacgggcgagtctatgttgcatgcaggcgactccatgttaagacgaagtgaactccctgaaccttcaa

SEQ ID NO: 276683 - DNA, 122 bp, Homo sapiens
gcagaatctatcccaaggagaccgcccatttttgctggggcaatcagggaactgcgtctgcggatggctgccctcgggggaccattcgccggggcggcgcgccgctggggactcggcgtgaa

SEQ ID NO: 276684 - DNA, 122 bp, Homo sapiens
gttcttcctcagtcttcttagatactagaatagtcactctttgtactattcatcacataacgtctgtcttgccaggtatattaggttcccctagagaaatagaatcaataggccgtgtgtgt

SEQ ID NO: 276685 - DNA, 122 bp, Homo sapiens
taacgattacaggtatgttttattttataatgaaaatacatttgtcttctaaacctttaccgaagggagtgaaaagaacacctcacccaaacgcccgcccttatgtgcgcagccccgcctcc

SEQ ID NO: 276686 - DNA, 122 bp, Homo sapiens
cttcagggcgccccctcggtggggtggccgaagagctgtccgtcaggtgcgggccacacccgcggccctgcagttccactcccgcctgccagccctcaactcccggtcgggttgtctccccg

SEQ ID NO: 276687 - DNA, 122 bp, Homo sapiens
gtgctgccaccgctgaaaaatcctgggttgcatggatatccttctgcacaggaggaaggccgcatcatcacagaacacaatagaaacactgcaagtggcagacaagccaaattacagtccct

SEQ ID NO: 276688 - DNA, 122 bp, Homo sapiens
gaagccaaggcaggaggatcgcttgagctcaggagttgcagaccagcctgggcagcatggcgaaatccccgtgtttaaaattaaccaggcgtggtggtatgtgtctatagtcccagctactt

SEQ ID NO: 276689 - DNA, 122 bp, Homo sapiens
gcggggcctgagcctcgccccgcccccgctgcccgccattcgggtcacctgacccacccgcggctcacgtgatccgtccccagcgccgccattttggagctccggatgaggagggggaaacc

SEQ ID NO: 276690 - DNA, 122 bp, Homo sapiens
gcggcgcctttccaatatggcggccccggctgacgtcaccggaggatgtggcagagtcggcgcgggagagctgggccgggaggcgccggaagcggcggccggggatccgctgccactgcagc

SEQ ID NO: 276691 - DNA, 122 bp, Homo sapiens
gatggggtttcccatttggtctgaggctgggagggagagcaaacgagagcagaacagaggcgttttggaagcgcagcaggacttggcccagcagaggatccgacatccccgcagtgccccgc

SEQ ID NO: 276692 - DNA, 122 bp, Homo sapiens
ctcagtctcacacctccaactgccccttcccgttaagagaggaagagaaggcaaggcctgcgcatggccattttaataattcgctgcccgtctcatgcctgggggtccgggcgagtcctcgc

SEQ ID NO: 276693 - DNA, 122 bp, Homo sapiens
cagagaaaaacaagagggtacgactcagatccccggggccagcagcagggccgcggggcacgactggataaccgcttgtgaagaaaattttaagagagccctcacgaccctttagcgcatcc

SEQ ID NO: 276694 - DNA, 122 bp, Homo sapiens
agagagcctttaatgcgttttaaaagcgacagaccctctctcctgagtagctcgggcctgcgccccatccccccgccccccccacacacacacctggcgcccgggctccctggtgctcgctg

SEQ ID NO: 276695 - DNA, 122 bp, Homo sapiens
cctccaggaaatcgagaagtttttggagaccggtgcggaaaataagatccaggagctcaacgcgatttacaaggaatacgaatccatcctcaaccaagatctcatggtaacgctgactcggg

SEQ ID NO: 276696 - DNA, 122 bp, Homo sapiens
ccccctaagtgggttttgtgtcctccttgctctgtattctgcagcatcctcccagctcaccgtctcctgtgccttccttgaacatgtcagatcaggtatgacagttctccaggggtctggaa

SEQ ID NO: 276697 - DNA, 122 bp, Homo sapiens
tactgccttaatctgaaaactagtgattgaacaggctggcattactgagtttgttcattacgatttttgtggtgttcagtttatattcctatgtagcatctttttgtatgaattttcctaca

SEQ ID NO: 276698 - DNA, 122 bp, Homo sapiens
tttcacgcctgtcgccctcgcaagcagccgcgggtgacaggagccttagccggcctggggcgcggaccctcccacccggggcagaggtgtccctacgacgcccctcggtttcgggtcgcagt

SEQ ID NO: 276699 - DNA, 122 bp, Homo sapiens
caatctgcagtgctggcggttcccgttgaatgagtgaaattggtgtgagggtgagataggcggtcgttgaacagagagcacacatcagacctcacgacaatgagcttcttgggaaaagagac

SEQ ID NO: 276700 - DNA, 122 bp, Homo sapiens
gagggagggtgatctgatgaatgtcggccgcacaggaagacttggcttggaaacgggtgtcggcctccgtccagtctcagatctgaaatggactgagatagcccccaagtggacagagtggg

SEQ ID NO: 276701 - DNA, 122 bp, Homo sapiens
tagaaactgaagtcctttataccctcgaaaaccaccatgtagaccagcagcttgacagggcggagctggctggtgctgggggaaatgtggactgccttgagctcaaataatcttacaacacc

SEQ ID NO: 276702 - DNA, 122 bp, Homo sapiens
aattaggccattatgtgctcgctgccagggttccttctctgatgaaaagcaagtactgagcggtatcgtcctctccgggcagatggacggggctgggggaggggtccctgggccgagccccc

SEQ ID NO: 276703 - DNA, 122 bp, Homo sapiens
agagtatcacaggggtgtttccactccctcggatatcgcgtgtcataacctcctctcccacgtggcaattagaaacattatcggtgggggcgtgtccaccttctgtgatattgaaagtaata

SEQ ID NO: 276704 - DNA, 122 bp, Homo sapiens
gcaagccattaacgtgagaaccacactggcatctcagcagccgagccggcgagccgttaacgtgagaatcacatctgtgtcctggcaaccgagccaggcatgtcattaacatggatacaaag

SEQ ID NO: 276705 - DNA, 122 bp, Homo sapiens
gtttggcttctctttctacctcagagaactggcggcagctcttccctgaagaagttgctgcggcctggtgatggggaatctccctgtgtttgctcagagctgaaattccacccacttccaac

SEQ ID NO: 276706 - DNA, 122 bp, Homo sapiens
agatggagtgggaaggggcgtgggatgagcttgctgaaggggcggccatctttctagtcccgcctcagtgtcatggtagccaggcagatgtctgtgaacacttgtggaaaagtgggatccaa

SEQ ID NO: 276707 - DNA, 122 bp, Homo sapiens
gcagagtctcctgtgattataatgactatgatccagtcatagagacgggataaagtgtaacgctttagtgtctttgccaaggcgatgtctgattcggaaatactgaacttattcagtctata

SEQ ID NO: 276708 - DNA, 122 bp, Homo sapiens
cagcctgttcccgggatggggcacacagctgccacctccccacaccccagcaccggggagcgccccagggctccgctgtggcctgccctgcggctggcaggccatcctccggttcgtccctg

SEQ ID NO: 276709 - DNA, 122 bp, Homo sapiens
aagctggcggcagtaccttatctggtacctcaacaggtgttggctcttcagatgttagctcggtggacgtgacatcggtagaaggttctgcagtttcgggggaatgttccgccgacagttct

SEQ ID NO: 276710 - DNA, 122 bp, Homo sapiens
atccgcccgccttggcctcccagactgctgggattacaggcgtgagccacggcgcctggccggaaatttgttatttagaacgatggaaacgggtaggaaaaagagcatatagggaaaaaggt

SEQ ID NO: 276711 - DNA, 122 bp, Homo sapiens
caaagaattgatgagtttcaacagcatggatctgaagtcgtagataattctaaacacacccgcgccagagttcacactcttgttcatctctgcggagttggagcagacagcgaccttcaaaa

SEQ ID NO: 276712 - DNA, 122 bp, Homo sapiens
cagagccgggagcagggagcagggagggagggagcctcacacagacagcatgaagttagacgtttttctgccctgcagggacaacaacggggtggacctcgctgcacagatctacgtcgtta

SEQ ID NO: 276713 - DNA, 122 bp, Homo sapiens
cctgcctccagacctttcccatgagatgagcccctccgggcaagtaggccacccctagagcggcctctagaaccttccgtgcttgtcctaggctgggggctggaagaggggtggaggccacg

SEQ ID NO: 276714 - DNA, 122 bp, Homo sapiens
caggaaaggaccctatctcagagcccttgttctggtttttaatgacaaatatcttcaaaccgagagaccatatataacctgattcctactgtcaaagccaagagcagtggggagagtttttc

SEQ ID NO: 276715 - DNA, 122 bp, Homo sapiens
gtgatcccgcccgcctcggcctcccgaagtgctaggattacaggcgtgagccaccgcgcccggccaccatgttttaaagtaagggaatcctgatttcagggattaatctcgtattgtcattg

SEQ ID NO: 276716 - DNA, 122 bp, Homo sapiens
tggtgccacgtctccagcttctgaggtcccagatccctgccgctctagtcgctaggagaccgccagccacgcgcagcccaggttccttcctggaggcggagcagcgctgacgccacctgcgc

SEQ ID NO: 276717 - DNA, 122 bp, Homo sapiens
ggcccgggaaccacctccagggtgagcggccagggacctggggcccgggtggcccagggtcggccgctggggcgccgcagcctagctgctgaggcgaccgagccccgggtggtgtccagccg

SEQ ID NO: 276718 - DNA, 122 bp, Homo sapiens
ttctcacttgccaaacggaggtgacaacacctactcccacctacacctcagggcattgggcgtaacaggagggagctctgccggttttgcacgcgagagcttccacacgtgtgcacagggtg

SEQ ID NO: 276719 - DNA, 122 bp, Homo sapiens
cccaactctaggttctcctaccagcaggatccgcacgtctttcttcatgtcggcggctctcgggggatggcctccgcccacatgcatggagtggactcctctcaccaggagcacccacccca

SEQ ID NO: 276720 - DNA, 122 bp, Homo sapiens
gtcttggctcactgcagccccgaccttacaggctcaagcgatcctcttgcctcagcctcccgtgtagcgtggactacaggcgagcaccaccatgcccagccgatgttttaatttttggtaga

SEQ ID NO: 276721 - DNA, 122 bp, Homo sapiens
ccgcgctcgctgacagccccgccgccgccgcggctccggctcgtctccatggaaaccgcgcgggataagccgctttcgtcagcagtgggctcgcgccaggccactgtcacccgtattctaaa

SEQ ID NO: 276722 - DNA, 122 bp, Homo sapiens
ccttacctgctaccaggtgggcccggctccgggagcacagaaccgcattgaacttggactcgtctgttcccaggcggttctccccggccgcatacagctcctggagagagaggaagacgcac

SEQ ID NO: 276723 - DNA, 122 bp, Homo sapiens
tcaaccaaagacagccccctgcaaacatgaacctgctctctagaaatgtacacaggtttgcgtcccggtggctccggggagaatgtggagccgagtggagtcaggagcgcaggcagccaggg

SEQ ID NO: 276724 - DNA, 122 bp, Homo sapiens
ccctttacactatttcattggttatcatttgtttcttcccttggaataataaaaactccacgaacacagaaacctactatctgtctgattcaccacatagtctctgttttccaaaaatgtgt

SEQ ID NO: 276725 - DNA, 122 bp, Homo sapiens
tctcaaactcctggcctcaagcaattgcccacctcggcctcccaaagtgctgggattatacgcatgagccaccaggccaggccctgcaggatatttgttgaagtcaacctctggttgttggt

SEQ ID NO: 276726 - DNA, 122 bp, Homo sapiens
atggttgcttcctaactccttcccttcatttagctgcactgctttcccacacagcagtttcgtgaatggactctgactagtctaagagaataaggtaattctatcctcctttcctcagtgat

SEQ ID NO: 276727 - DNA, 122 bp, Homo sapiens
gaaatcctagctcattgaactcgcctgcagctctcgggttcctgtggctttcttctttatcggagccagggctacatgccagcaaccatgtccaagggacctgcagttggtattgatcttag

SEQ ID NO: 276728 - DNA, 122 bp, Homo sapiens
cctctaacggtctccccgccgctggcctcaggcggccgccagactcccgtttccggccctcgcggtaccacagttcccagcatgcccttggcgggaattctttccggctggatgactaccaa

SEQ ID NO: 276729 - DNA, 122 bp, Homo sapiens
aaccagctgccttcattccttcactcatgcattcactcattaaggagtttctactcggaacgtcagcacctactataagcctggtccttgcccgtacgatgggaggtaggggttgatggctc

SEQ ID NO: 276730 - DNA, 122 bp, Homo sapiens
cccttcacgttgctggggagggggtagtgcgaggaggaacttggaaggggttgggggcagcgggatgctcagggcggcgtagaagaaccagggccccacaccaacccccgccctcgggagct

SEQ ID NO: 276731 - DNA, 122 bp, Homo sapiens
ttagtttgatatcactggttagtatttaaataacaacaaaaaacttgcctttacctcctccgcaaaaaatcttacctttctattagcctcatttatctctccaaaatctacagactctaatt

SEQ ID NO: 276732 - DNA, 122 bp, Homo sapiens
ccaacagtgggcggggtagagccgcgccgcaggacggagggtctggacactttggggtcacgtgctcattccgtttccctacctcccccaaccttatcccgcccctgggggttcgcgggcat

SEQ ID NO: 276733 - DNA, 122 bp, Homo sapiens
ggcgtgggggaggaatgcatcccgcaagctgtggcgaaacaactgctctgcccggaggaccgggctcgagaaggcaagagacactgggtcgggggtggagtggtggcgggggggttgggggc

SEQ ID NO: 276734 - DNA, 122 bp, Homo sapiens
cagctgtcagtgtggagagagcctgccccatggtacttgatcctgctccccagtacaggacggccttgttctctttagattctgcctggtctcagggcccgccccatgctgaccccccaccc

SEQ ID NO: 276735 - DNA, 122 bp, Homo sapiens
aaacagatgttgtggccagcatgggaggtgcaatggtgagttgctctgtttcctccctcccgtccccctccccacccctcccctccccctcccctccccctcccctcccttccccttccctt

SEQ ID NO: 276736 - DNA, 122 bp, Homo sapiens
agagctactgctgtttaagatggttgccagattggccatctgctgtttcccactagtcatcgatttttcatcaggtacataaccaaagcatttcttcttttcagtccttttggggagtttca

SEQ ID NO: 276737 - DNA, 122 bp, Homo sapiens
ttcctctccgcgtggcgggcgcgggtgcggggcgggtcaggggcttcccgggggtctggccgcgtccccatcccccgtccggcccgcttccggcccccgcgcgccccgtccctagcgcacgc

SEQ ID NO: 276738 - DNA, 122 bp, Homo sapiens
cctcctttcaactctctgcgctttgaaaccgcggagttggggtagctaggccctccagcccggcgacaggcctcggccacaggcagcggggcggggtgtggacaggaacaaggaggtggggt

SEQ ID NO: 276739 - DNA, 122 bp, Homo sapiens
tcgaccatgctgtgtcatccctccagcccatgccgaggcctggttctctgttagggatgccgtccccctgccagtgcgcctggggaggcggtcgcccaccccgcggagggtcgggaccctca

SEQ ID NO: 276740 - DNA, 122 bp, Homo sapiens
tatatccccctgatggatgctgagcctggtctccctgggaccagggtgagtccagctaaccgaaggtcttcaaggggaggagctgaggacccagcatctcctggcagtgtacctggatgaag

SEQ ID NO: 276741 - DNA, 122 bp, Homo sapiens
gcgccaggcctagccaagagccaggcaaagcgaaaccaagccctggaagcagatccggtgcgggtgacagccggcgccacccctgcccccatccctgtgaaaaagaggcgactgcgcggcga

SEQ ID NO: 276742 - DNA, 122 bp, Homo sapiens
gtacaaacttattggtcgctgcaatggaaactcccagtgcactctccacggcctggcagccgccgctgatgggtggagtcgcgctcccggccccacctatgggacggagctgcttctcccgc

SEQ ID NO: 276743 - DNA, 122 bp, Homo sapiens
tggagcacagggaaagggtgcaggggaaagtggcaggcctttcccaccatggatcctggacgtcttttgatttcagtattttcagacctaccctcgttcatgatgatgagcatatgttctca

SEQ ID NO: 276744 - DNA, 122 bp, Homo sapiens
agttatctgacttggagcccagaggaacctaccactggggcgaaacaggctgtgtcctcacggggattctggcagccccaagaatacagtgctgagagccagaaggtccacaaaaccaaagg

SEQ ID NO: 276745 - DNA, 122 bp, Homo sapiens
gcgataatggaagcattccttggcagtgcctagtatctctgtagttattttccacggctccgaaagactcaagtaaatcacaaatatagctgagaggcaagtggagtctccccgctggaggc

SEQ ID NO: 276746 - DNA, 122 bp, Homo sapiens
ggtacctttcagcttacgtccatttactacacatttgtgtagtatgtgtttgcagttgtgcgtgctttctattcatacatgtttatgccattgttcatgatagtagggcatgatggctgatc

SEQ ID NO: 276747 - DNA, 122 bp, Homo sapiens
gctctggaggcccagatgctggcaaagtggcgggagcgctccagggacgaggactcaggtcggggcgcccccgccagcgccaggatccccgctcaccctccgccgcgccccgcccccgcccc

SEQ ID NO: 276748 - DNA, 122 bp, Homo sapiens
caggctccaccaacaatcacccagtatgctgtaggacgcaaggtctattttcccattactcgtactcttggaaaaattgcagaagtaatatttgaatgcattctttttgtaaaagcttagtg

SEQ ID NO: 276749 - DNA, 122 bp, Homo sapiens
aagccccctcctcactttgagttggcccgcctctgcttcaatttgtccctcctttctggacggaaccaatgttcatcttacatatattgattgatgcctcatgtctccctaaaatgtataaa

SEQ ID NO: 276750 - DNA, 122 bp, Homo sapiens
acttccatacctggacaatgggtatggtccctcctgatcctccccaggaacccaagacttcgcctgaagcgctccgactccgactggcgggcctgaaggcatcaccgagcttcaaggacccg

SEQ ID NO: 276751 - DNA, 122 bp, Homo sapiens
gacaagtgttttaccaacaaacacatgagtcgggggaagttacatggtgaggtgggagggcgagggatagagaggtccccctggattggcctcagccaattacatcccgagtctgggaccca

SEQ ID NO: 276752 - DNA, 122 bp, Homo sapiens
ccgtgggtaggggctgccgcctgcggtcagcggtcagggaagctgagggcgagggatccgcgcaggatccattttgcagctgctggtcatccaggtaatccaggtatttgcctcgcagggcc

SEQ ID NO: 276753 - DNA, 122 bp, Homo sapiens
ggccgctggccccgacgaccctgcgaccgaggcgcttgcagctgcccggggcgaggcgggcgaccccaggccctcgagcatcttcgagacacccgcgccaagtctggtcccgggggtggctg

SEQ ID NO: 276754 - DNA, 122 bp, Homo sapiens
ccgaagcagggcgaggcattgcctcacccgggaagcgcaaggggtcagggagctccttttcggagtcaaagaaaggggtgacggactcacctggaaaatcgggtcactcccacccgaatatt

SEQ ID NO: 276755 - DNA, 122 bp, Homo sapiens
ccctcccaccttttttttaaatcaggataaatgcatgacaagacccaggacgcttcctgccgatggcctttaaccttgctattcccactgcctgggaagctcttgtgccatatggtcacatg

SEQ ID NO: 276756 - DNA, 122 bp, Homo sapiens
ctgccccgccccattgcttgcttccccaattccttcaggtttctagcaacgctcctgtcccgtgtgcgctcttccccccacatcagcgacttgtgtgatgtggtgcatgcccacgctgtggg

SEQ ID NO: 276757 - DNA, 122 bp, Homo sapiens
tgcggagctccatcggccggggaggcgggaaacatgcccggcgtttcttcaggggcaggacgagatccctgacagatgtcgcgtggctctcaatcgtccttattcgcgggcagctattcatc

SEQ ID NO: 276758 - DNA, 122 bp, Homo sapiens
acgaagccgacgctcgcaggaactgaggattctaactgcccacagagcctgatgttttgtcggaaacgtaaaagaaagggaccggaagtgaaagggaggaccggaagtgaaagggagatccg

SEQ ID NO: 276759 - DNA, 122 bp, Homo sapiens
ggtgcggcagccttgttggacagcgaggctacctcctgccctctgaacttctgccagcatcgggaccaccccggtacccacagccggacccggacaccggagtcctctgggggcggggcgcg

SEQ ID NO: 276760 - DNA, 122 bp, Homo sapiens
ctccaaataattagtagtggccacctgaagcatcctgttgagaactcttggggctgcttacgaattcggcagcaaaaaatgcggtaactgattagcagttatatgcttttggcatggggaag

SEQ ID NO: 276761 - DNA, 122 bp, Homo sapiens
cctcggacaaacaagtcagcaccatgtggccctccgcaccacccagcatcactgggccctcggtcagcaccgcgtggccctccacactgtggaatattacttagccctgaaaaggaaggaaa

SEQ ID NO: 276762 - DNA, 122 bp, Homo sapiens
agacattgatgtttataagaatcatctggggagcttgttacaaagcacgttcctgggctacggccccagagattctatcaactctactgatgaagtcctgcagctagactgaggcaacacaa

SEQ ID NO: 276763 - DNA, 122 bp, Homo sapiens
cccctaagaggagagaacttggtgatttcaaggaatgtataggtcagaaatattacaaagcggagtgtgggagtaggctgcttaaggttgagggcaaacctcaaagactcggtaaacaatgt

SEQ ID NO: 276764 - DNA, 122 bp, Homo sapiens
tctcccaacattcggggaagggcgtgccttcaggatttggagtagaaatcctcaggcattcggtgctcagtgttgccttgtgctgtccaatataatagccattcgccacgtgtggctatata

SEQ ID NO: 276765 - DNA, 122 bp, Homo sapiens
cccctgggaagaatcgagttagactgggctcccggaaggccacccaggggagcaggggcgcgcacctgcctcggccacaatgatgaggttgctgctggtaggagtcccggtgggagtcgggg

SEQ ID NO: 276766 - DNA, 122 bp, Homo sapiens
ggaattgccaagtcaaatacagccatataaagccccccttcgacgtgccaggtgtgcctccggagagcagccaccaaaaccaccagcagcccgtccgcgccgggaaatgcgccctcgctggc

SEQ ID NO: 276767 - DNA, 122 bp, Homo sapiens
ctttcccctcccccagaaaggctcttaaaggaacttttaaaacataagcctttgttccctcgatctacggtgcccaggtcaggcggaccctgcggcgtggctgaaatatttcaaacagtcac

SEQ ID NO: 276768 - DNA, 122 bp, Homo sapiens
cgccctcgcctttccggaggaggcagggagctctgcggcggccgcggcagcagtaaatggcgtcatgtggatccgaggcggaacagagcagttgttgtcccagaggatatatcgcatccggt

SEQ ID NO: 276769 - DNA, 122 bp, Homo sapiens
ggggtgtggggaacagaaaggcgatttggactagtttccccggacgggatgaggcagcgccggaagtatgacgctcatttctttaagccactagaagctcaccgtgagtccattcacagggc

SEQ ID NO: 276770 - DNA, 122 bp, Homo sapiens
cctgcgtcctttcctagcttttagtaacagcagcagctgcctaaagccgtacaatttctccgtgttgttcttgtcctcttcctatctgcagttttgttgttgttttaaaggagcctaccttc

SEQ ID NO: 276771 - DNA, 122 bp, Homo sapiens
tggctggaggtgcacttttataataaaatgttgagtatttgcaggcgttcacttgcagggcggctgcacacttctgattgaaggctctgtggtagcgtcgctctcccaggacacagagctgg

SEQ ID NO: 276772 - DNA, 122 bp, Homo sapiens
ggatgtgtaggagtttgggaggattttcagcatctagcttgtcttggttatctcttttgccggttgggcctctgagggcagtaggaggtccctggggaagaggccctggttattgcaggtca

SEQ ID NO: 276773 - DNA, 122 bp, Homo sapiens
gtttatataaactattatagagtaacactcaccattcacacaatgtttactgtgtaccaccgtatgagctaagaactttacaaacatcatttcatataatcctcgtaaaaactgtcagatta

SEQ ID NO: 276774 - DNA, 122 bp, Homo sapiens
aaagccattgcggccccagaaggtaaatggctttcgcaggaacacaggtctcctgactcacggcctaaccttcctttcccccacaccaaagctcgcgcggcaccagctagagtgaaggtcaa

SEQ ID NO: 276775 - DNA, 122 bp, Homo sapiens
gtcagccagctaaggaggggcagaaccaggatgcaaaccccagccgcctggctccagactcgggttcccaaggtcccactacacttggtcactccactgcattgtggtatcctggtctttgg

SEQ ID NO: 276776 - DNA, 122 bp, Homo sapiens
ttcttccccaggtcccctttccccgttgctccttctctagggataggagaggtcgcttcccggccctccgcagggtcacagctcggttcctcccagcccgccctccggggagcttagcaacg

SEQ ID NO: 276777 - DNA, 122 bp, Homo sapiens
tcctccatgatcactttggaagccgggggaagactttgccctgccctgagagctggtctgcgtttcccaggcgcggcggcggcggagcagcagctgcagcagccgagtccaaataggagcgg

SEQ ID NO: 276778 - DNA, 122 bp, Homo sapiens
cgccccggtcgcgtgcgtgcgtgtacgcgtgtcagtgtgcgcgtgcgcccgggccagagccgcgccgcaaccgttaagactgaaacgtagatcgccgggatctagctcttgtctcattgggg

SEQ ID NO: 276779 - DNA, 122 bp, Homo sapiens
ggtctgaacccgcatggacctgagggtgcaccgagaaaagaaaggctgacaactggatcccgggaatgtcaaggccaccctgggcttgaagggaccggccatgcctccaagccttgcccaga

SEQ ID NO: 276780 - DNA, 122 bp, Homo sapiens
ccagggttcggggtccaggggaagagaggggcgctcacccagtaacagcagcagcagcagcgcaggccccaggcagcggaccatgctggaccttcaacagagaaggatggctggcagagccc

SEQ ID NO: 276781 - DNA, 122 bp, Homo sapiens
acatccttaatccaaaacaacacttctcagtgtaaaccaattttcagtcaaaatgaagcccggcagggcttgttggaatgtataaagttatgagctgaatggaatcctgggatctcattcta

SEQ ID NO: 276782 - DNA, 122 bp, Homo sapiens
gtgctggaggaatggatcgtggagcagctgggtcagctctacggctgcgaggtacctgggcgcggggctgggagggtcggggacctctctagctcctctgtgcccgcgcagtaattttcccg

SEQ ID NO: 276783 - DNA, 122 bp, Homo sapiens
gaaataagagacaggggaggctggtacggaagttcatcaggcaactgaaggcacagtttgcgcagcaaccaagaaaaggtgggatgtgaggcacgcaagatgtagaggtggggaaaggtttc

SEQ ID NO: 276784 - DNA, 122 bp, Homo sapiens
cagcctggaaccgagggaaattggattgctctgcactctattttgaagaccttttcacatcggcgtactaagttcctcctcattctttttaacccaactgccacaggtttttcagccaagac

SEQ ID NO: 276785 - DNA, 122 bp, Homo sapiens
gaccacaggctcagcgaagtgcgcaagggtctgcttattaaccagcagagcgtcaagctgcggggctacaggcccaagtctgagaaggtgggaccctcccccacgcccaaccccagcctaac

SEQ ID NO: 276786 - DNA, 122 bp, Homo sapiens
tgtcggtcccttcctgggaaaggaatcgcggggacttcccaaccgctaggacgcgtaagccgaggctgggagtagaagccttctgaactctggacctaccccagaaggagggggcgaaactg

SEQ ID NO: 276787 - DNA, 122 bp, Homo sapiens
tcaggaactgggttatggtaaggcttcctaccctcaaaaccacaggggggagggcaagggcgagaggccccgcagtttgtggtcatggcaatacaatgataataacactcctcattccttat

SEQ ID NO: 276788 - DNA, 122 bp, Homo sapiens
caatggaagctaattaaacatagatggaggaggtggagctgataaatacagagaagacagcgagaatgcaaaggccagaaaaaaataagagtagcaatgaatttgtataaaagtcaatgcat

SEQ ID NO: 276789 - DNA, 122 bp, Homo sapiens
gaggaagggtcattctgaggctgccacgaagtcagattcaggcctttctgggtgccttcgcgcccctcccctccccccaggactttttttttttttttttttttagaaaaaacaaaacccca

SEQ ID NO: 276790 - DNA, 122 bp, Homo sapiens
gctgggaggtgtctgggggcagaccagagcctcctcttgggtagggagggggatggaccccgcagccaggacacagaccctgagtggttcctctgctccgtctagccaaagcctctccatga

SEQ ID NO: 276791 - DNA, 122 bp, Homo sapiens
gcaactgttgcttctgactagctcaggctctggagacccgcgcgctctcttatgcggctgcgcatcccagcagctcccgcgagaagggtcaggccctgattggctctggacaaacccgcgcg

SEQ ID NO: 276792 - DNA, 122 bp, Homo sapiens
ctcatggaccttttctttgctttgtggtaccccaagctgtcccgaggctcaccctgggctcgaaccagggtcgccagggtccaccaggcccagcatagggcctgatgggaaggcactttcat

SEQ ID NO: 276793 - DNA, 122 bp, Homo sapiens
tgttgcctccctgtacaaggccatgtgaggacacagtgagaaggcagctatctgcaagcccggaagagaagcctcaccagaaaccaacacgattgcaccttgatctcagactttcaggctcc

SEQ ID NO: 276794 - DNA, 122 bp, Homo sapiens
ggctgaacgcgcctgacaggccgggccagtgacaaagagccggcggctcaggctgaaccccgggaagcgatcctttcgaggaggagagcccaagtccccttatagataggaaagacgcaact

SEQ ID NO: 276795 - DNA, 122 bp, Homo sapiens
ggtgtacccgcattgtgaaattagtagtgaactcccactaggatattacgaatcttatgacggggtctacatgccctgtgacattagtaggaacgttttcctagaatattatgaagaatatt

SEQ ID NO: 276796 - DNA, 122 bp, Homo sapiens
tcaacagtttccttttcctggcatttgtcaaatcgggatttggccggggccagatgagggcggaacaaattcctgaggatcaaattactttaggagagggaggaaagaggggctgagggcta

SEQ ID NO: 276797 - DNA, 122 bp, Homo sapiens
ggctccggagtcggacggcgacggtgcagatgagggcgcacaggggacggtcctggagcccgggaagggtgcgagatggagacggcggttcagaaaagttgtcaggtctccagcccgggcag

SEQ ID NO: 276798 - DNA, 122 bp, Homo sapiens
taagagtgtgtggagcccagtcagcactcaacatgaggtcccgtgggggctgcctgagggcgtagcttccagaattcagcccctggccctcagaaggtgtcaccaaaggcttctttccattt

SEQ ID NO: 276799 - DNA, 122 bp, Homo sapiens
aagacacggtgagctcaggtgagcaggtttccaggagccacacggagccggggcctggagcgcctaccttggattccgtacagccggttgaggcgcgaccgccgggcctcatccgtgtaggg

SEQ ID NO: 276800 - DNA, 122 bp, Homo sapiens
tgccggacccaataaaggcactcaataaaggggcatgaattgtacggctgagccatcatacggctagagcattgtgtccaactcctgttaacatggacaaagcagagagtgaccagaatgga

SEQ ID NO: 276801 - DNA, 122 bp, Homo sapiens
tccgcctgccttggcctcccaaagtgctgggattacaggcgtgtcaccgcgcccggccgacgtcctgtatttttatttgctaagagtggcgatcctagtctgggacatacttgtactaaaca

SEQ ID NO: 276802 - DNA, 122 bp, Homo sapiens
cgacccgccgcctcctcatgtctttttccaggaagaagaaaaagaaggacaaagacaaagcgaaactcctggaagcaatgggaacgagcaaaaagaacgaggaggagaagcggcgcggcctg

SEQ ID NO: 276803 - DNA, 122 bp, Homo sapiens
gtcgattggaccttgcaggaagccccgcctcatcaactcagtcaagggctttagttggcccggcgtcggtgagtggcgggtcttagctccgccctggccgtccgctgcgctgcctgggtcgg

SEQ ID NO: 276804 - DNA, 122 bp, Homo sapiens
gagtctctctgagcaacccaaacagaaggtactgctgtgggtcccccacttggcacgcgacggcgctgggtcggcctggcgcgccctcccgcgcccacgggcgctaggctaggtctgtgcgc

SEQ ID NO: 276805 - DNA, 122 bp, Homo sapiens
ggtggcgctagggaccaggaggggtgggggtggcgaaaggaagggcgggccctcaggtgacgcagattggccctccagagaaggggcggccccttctcaggtgccgtcacccccaaacctca

SEQ ID NO: 276806 - DNA, 122 bp, Homo sapiens
tggggcgctgacccaggctgagcgcgcacagcagcgccaggccgcacagggcccgaaacgcgcccatcgccccgtgctgtgccatgctcgggtttcaagagcccacagccagttggacacgc

SEQ ID NO: 276807 - DNA, 122 bp, Homo sapiens
acccgagacgttcttcaatctgtaagagatcgtagaaggagaaagggacgtggacatggacgatcccctcaactcccgctacttcccggagaggaagcaagggagctggttgctgagcacat

SEQ ID NO: 276808 - DNA, 122 bp, Homo sapiens
actggaatctgagtggactttctgtcagaacagcaaggaatggaagagcaagagaagcctcgagaatgattcgaggcctctggcccaagcacaggggaagacggcaccaggatggacactgg

SEQ ID NO: 276809 - DNA, 122 bp, Homo sapiens
aatttgtggaaacctctcggcccctctggcaggcatccctgaatgtggcttggattcggacgcgggccctgtctcgcaggttttcagctgcccttggcttttcttcagctttgtggctgacg

SEQ ID NO: 276810 - DNA, 122 bp, Homo sapiens
tttctgacttccacagctgcaggaaataacgagggtattgaaagatggagcgctcccctccggcagggtcatgtggtgggaggcttagaagcagattccagtcgcgatttccgtgccaggac

SEQ ID NO: 276811 - DNA, 122 bp, Homo sapiens
gtctggatctagcagttctgtttctggggccaacccccttgccggccccaattccctgcccgcagtatcctgctgcccgcctgctgcctgctcactgccagcccccgggtgccccctcccgc

SEQ ID NO: 276812 - DNA, 122 bp, Homo sapiens
attatgaatatctgtgcataaagtaatacagacaccacctttataaagcaaaaatacaggcgatgtatataaaagcacactaaaaagaaactttaacacatcattttcattaaacaacaaat

SEQ ID NO: 276813 - DNA, 122 bp, Homo sapiens
ggcgtgggtagagtacatcagggcagcatggagaaggctgggtggcttgggggagggtggcgatggggtcataacaaaaacataagaaggtggtttggggccaggtgatggatgccttggga

SEQ ID NO: 276814 - DNA, 122 bp, Homo sapiens
gtttgagaagaatctacaaattcaacaatggaactgattgagcaggttttggtagagccacgcaacagagttttgtgcaaccattcaaaatgatcatatggaagtatatttatttactggag

SEQ ID NO: 276815 - DNA, 122 bp, Homo sapiens
ggaaccttccagggctcggtgattcggggctgcggtgggagggccctgagttcttagacccgcgtgcagatccggccgcgacacaggcgagacccctgccggcgaggcgcggaactgcaggc

SEQ ID NO: 276816 - DNA, 122 bp, Homo sapiens
cgcaggctgtccgtcaagggggctagtaagccactaaacaaagggtagccttcagccctgcggcgcgggccagcgagcattcagaggcccaactcgctgtggttgctccccgggtctggtcc

SEQ ID NO: 276817 - DNA, 122 bp, Homo sapiens
ccttttatttagtcgtgctggtctgtgcatgcggtgcacgcatgttgtgtgttcctgactcgggggcccctgctgtgtgggggagtccttgctggagactccccgttctgtgcttgaggtca

SEQ ID NO: 276818 - DNA, 122 bp, Homo sapiens
aggatcacattctaccttgtgtgtccctagctccccgcacagtgcttgatacataggaaacgtctgctgaaatgcagagctgcacagaactcaagaaaaaaaaagggaggctacaaacccag

SEQ ID NO: 276819 - DNA, 122 bp, Homo sapiens
ctcatggttacacctgcctacattacactatctcctatagcccaccaggtatactgagcccgtgactactccaggccctcaccactaagccccatcagacacaaggccatgctagaaccctg

SEQ ID NO: 276820 - DNA, 122 bp, Homo sapiens
ccgcatcagactgcctgctctgccaccttctgctgcgtgacctcacacaactgacttaaccgctctgaaagtcagttccctcgtgggttaaacagaaataagaagagaacctagttcacaag

SEQ ID NO: 276821 - DNA, 122 bp, Homo sapiens
cccaaactgtatcctacactgtcctgttgtctggactataatggaacataacattaacttcggacagtggaggttgtgttggtgccaaccttgctaatgaacatgtggtttccataataatg

SEQ ID NO: 276822 - DNA, 122 bp, Homo sapiens
cactctcttcagggttttgcccagggcaagtttatcatccttattcctcaaactgtagatcgaagggttaagcatgggaaccacattggtgtaaaagactgaggcaaatctgccatggttca

SEQ ID NO: 276823 - DNA, 122 bp, Homo sapiens
cacaaacttctatttcttctcctttgaacccctaatttgctccctatgtccctcatggagcgtgtaaccatccaaaggttggcccagggataaggccaggaagcaccagctgcttgacagta

SEQ ID NO: 276824 - DNA, 122 bp, Homo sapiens
gccgccgccgccgccggagggaccttctgctgagccagctctgcttcctggcctcggtggcgctgctgctctggtcgctgtcgagcctgcgagagcagaagggtgagtgcacgctgcctgcc

SEQ ID NO: 276825 - DNA, 122 bp, Homo sapiens
aaacatagtagaggctgcagctatcaggtacgtttccaaagcgagtgtctttgacacctccgtgcttctcaagttgtatgtgaagctacattgctgtgtcagttgtgccattcatagcaagg

SEQ ID NO: 276826 - DNA, 122 bp, Homo sapiens
aggccctgttttgtcatctctcactgctctttagggattatacctgagaattgcttgtcacggtaaatgctcaaatacctaatgtattgtagaaattaatataagtttaacagattattgtt

SEQ ID NO: 276827 - DNA, 122 bp, Homo sapiens
agcagcctgccctagcccgtgtaaccgggcagaggaggagaagcaggcggcccccgctcacgcttcccacaggctatgctccctctgctttgcagtggtcccgagaatccgatgggccaccc

SEQ ID NO: 276828 - DNA, 122 bp, Homo sapiens
cacccacccggggcttcggggcattccattggcctgagtaaaacgccagttaaataactacgcaaaagacgtactcacgggtaccctccccagagctccacccgggcgacttccgcaatcgg

SEQ ID NO: 276829 - DNA, 122 bp, Homo sapiens
atctcagcccttggcgccgcgtggctctccgcccctctgggccgccagggtagcgccgcccgccgctcgcccccggctagcacagcaaatcgcagtcccctcgccccgggagagactcccac

SEQ ID NO: 276830 - DNA, 122 bp, Homo sapiens
agggccatttggttctgcagtccgtcgtttcgcagattgaacatttctggaacacgtgcacgttctgatcctgagggtttgaaggagacagccctaacgcctgtcttcagggcgtttagagt

SEQ ID NO: 276831 - DNA, 122 bp, Homo sapiens
agaactttgcagtaaaagagccatggtccacaggccacacatctccctgcaactcaacttcggacccaaacgctcgcgcctccacactttcaggaataaatcctactcttccgcccaaaacg

SEQ ID NO: 276832 - DNA, 122 bp, Homo sapiens
ttgggcgaggccatttgtccctgggtcgggaggagcttaaccgtggggctcggctgtatccgcgaatggcaggggcacaggacagcggggactgtgacggaacacatgccgttattccatgc

SEQ ID NO: 276833 - DNA, 122 bp, Homo sapiens
aagccatcttgttgaactggcaactgcttttcaaactgatccaggagtgtaggaggcaggcggggggcacccttgccctgtgggtggcccacacagtcttcacaggtgtcgaaggggccctg

SEQ ID NO: 276834 - DNA, 122 bp, Homo sapiens
ccccagacccatccaggtatgccctgcggatggcccacacctcgtcatccgtccagtagacgtggccctccattgggtcatagttgatggcgatggcatgctggatgtcgtccagctgcagc

SEQ ID NO: 276835 - DNA, 122 bp, Homo sapiens
gtcacgcagagacacacccatgtagtccccagtggcctgcggcagtgacagacacacagtcgggatggggaccggggaccagggaccaggcaccgctcatttccaaacagagcctgagctcg

SEQ ID NO: 276836 - DNA, 122 bp, Homo sapiens
aatctagtgctaatttcgtgtgtgtaaccttgtcaggcgaaggcatttctgtaactcctccgctctgcatataaaagattaagaccctgaggtttcaggaccaggtcgtggcctctgagagc

SEQ ID NO: 276837 - DNA, 122 bp, Homo sapiens
acccaggagaggaaaaagaggcctggcgagagcgccccctttgggcctggaggcgcactgcggacaccggcgccatctgttgggccggcgagggctttctggtccaaaccctgggagcgaca

SEQ ID NO: 276838 - DNA, 122 bp, Homo sapiens
atgttcatatgatttctcttctttccccaatcacaacccaacatccatatataattaacacggattatataaacaagtagttgattatttgggccatgttgcttaaccactcatgaacatca

SEQ ID NO: 276839 - DNA, 122 bp, Homo sapiens
gccatcccagacaaggcctgctccctttgggcggacctctgtggagaagccagcttggcacgttctttctcctccactgcaaagttaaatgcgagaaggtagaaacccagaggccatgctgg

SEQ ID NO: 276840 - DNA, 122 bp, Homo sapiens
aattgacccgctccatttctgacctggaccagttcacccctccttaggcaacctggtggtcgcctgctcccaggatgtcactatattgatgcggaacttagtgcagacacctgatcagcata

SEQ ID NO: 276841 - DNA, 122 bp, Homo sapiens
cgtagctgtcatggtgcgggagctgggcccactccggcgggaaggtggccctgctgtacacgaagcactgcaccgcggtgggcgctggcggctcctctgcgcccggggcccggtcctccagc

SEQ ID NO: 276842 - DNA, 122 bp, Homo sapiens
gcttagctggggccatcctctaccgcctactctactttacaggaggaggggatagtggggcgaggaaccaggtcttgcctcctaaaaccagggaaaagagctccttccctctgccccaccct

SEQ ID NO: 276843 - DNA, 122 bp, Homo sapiens
ggtcaggctgggggatgagaaactacggcgactgtatctttggccgaggagttttaaatgcgctggaagtgaagggactgtgtcgtcaagggtagagacgggaaaaaacgagaagtcctgag

SEQ ID NO: 276844 - DNA, 122 bp, Homo sapiens
ccagcagcagcagggggagcatcagcatggccatgactcccatcttgttctgggggacaacggagtaaaaggggattggctttgcaaagagacgctgatcaggactcccagggcagggggag

SEQ ID NO: 276845 - DNA, 122 bp, Homo sapiens
tgagcgagtgaatgaatgaataagctgcctaaagcagatgcgtttatgcgtgcattctctcgagtgaaggaagaaggaagaggtagggacggaggaggagagagagcacgcgcgggaaagat

SEQ ID NO: 276846 - DNA, 122 bp, Homo sapiens
gccgtctgactcaggaacagcgggcccgccgcagcttaggggagaaacgtccaaaaacctcgctggccctcagaggtcagggtggcagggcactgactcgacccttttgtactatttaacat

SEQ ID NO: 276847 - DNA, 122 bp, Homo sapiens
ttcaggtggctgctgagatctttccctctgtcgagtatttatggatgggtttaaaccaatcgtgattcatcccagggccagggataaattatgattggtctaaaccagccttagtaatctta

SEQ ID NO: 276848 - DNA, 122 bp, Homo sapiens
gctgagacacagctaggacagagagtgcccacttctcctctggtgggtgtgggaccctgccgggcctggtggccataggacctggtggcgcaggaccccctcccaggtgcagtgtgggcaga

SEQ ID NO: 276849 - DNA, 122 bp, Homo sapiens
cacgcgcagccctgggagcgggttctcgcgcatagggaccacaactcccagggtgctccgcgtcctcgccgctgtcgccgccgcggagacaaagatggctgcgagtaagtgcaggttccggt

SEQ ID NO: 276850 - DNA, 122 bp, Homo sapiens
ccttgcttcaatgccattggtctgtgcctggccggtcctgcagcaggttccaccctcttgcgggcgagcgctggctaccattggactgtccggcgcgaggggaagggtgatctataaatagg

SEQ ID NO: 276851 - DNA, 122 bp, Homo sapiens
gacagggcatggccgtctcgatccttagcgctggcctgctgtaccgggacagggcatggccgtctcgcccacctcttgtgactctgctgacaccgctgcgccctgcaccacctccaggccac

SEQ ID NO: 276852 - DNA, 122 bp, Homo sapiens
gtagcggcgggagaagtcgtcgccggcctggcggagggtcaggtggaccacaggtggcaccgggctgagcgcaggccccgcggcggcgccgggggcagccggggtctgcagcggcgaggtcc

SEQ ID NO: 276853 - DNA, 122 bp, Homo sapiens
atttctgactgtcataaccaggtgtcacctaaaatctgtcctgtaggccaagatgctacacgcagcgcccaggcagtcagaggtaagtgagcgcctcccgcctcagaaagcttttacagggc

SEQ ID NO: 276854 - DNA, 122 bp, Homo sapiens
tccctgggggtcagcattcgggcatcagaggtttgtggagagggcagcccagtatacaaccgcagggaagggaggaagggcaagtcagtggagtcagaacccagcagggatgggaggaagcc

SEQ ID NO: 276855 - DNA, 122 bp, Homo sapiens
caaagcttagggcacggacaacaccaaaagcaggtgaggatgtggggcagcaggaacgctcgttcacggttggcagaaatgtaaaatgcagcaaccacttcgaaagacggtttgcccatttt

SEQ ID NO: 276856 - DNA, 122 bp, Homo sapiens
aggcaatgccagctcctgtggggactctgggagaggagctgggagggtatgaaccttgagcggttggtgcttatggtgtttgtcaccacaagggggaggctgagaaagaccaacagaaatgg

SEQ ID NO: 276857 - DNA, 122 bp, Homo sapiens
tccaggctgggcccggaccccacgccgaccccggccccggggggggctcagcgacctcggcgcctcctcaggcccccagtgaacctccggggcccataaaggctccaggccggctccccgga

SEQ ID NO: 276858 - DNA, 122 bp, Homo sapiens
ttctcatagggaatgttgttctctctggggctgggaagctttggatggtggtgagggtagcggcagggctaacctgggacctgccatatagagcccctgtttcttagtggcagtggcagcca

SEQ ID NO: 276859 - DNA, 122 bp, Homo sapiens
ggaagagactaaaaccaacatgaatcaataaagacaaaatcaccaggttgagcggagtaacgatttgagtttcctgatataggctcttcacactaacactaggtcagctctaaacatcactg

SEQ ID NO: 276860 - DNA, 122 bp, Homo sapiens
ggtgtccaccagctccccgccgcacagggtctcactggggcggtaagcagcaatgcagcacgaggcgaaggccaagaaggtgagaagcaccagcatcgacttccccattgggattcccattg

SEQ ID NO: 276861 - DNA, 122 bp, Homo sapiens
cggttgctcagggatttggcggccaagccttccttccttgtccccggggctttctactgccgggtccccgtgctgctgcagccccaggcaccgctccacgccactccccacgccgccgccgc

SEQ ID NO: 276862 - DNA, 122 bp, Homo sapiens
aatcttgctcaaggctgagggtttgtaatcaaacactgtgtttgtgagtcactgtatcttcgttctctctgtccttgtctgtctgtctctctcttcgttgtggttatggcgtctgttggaaa

SEQ ID NO: 276863 - DNA, 122 bp, Homo sapiens
ctagtcttcagagctgaggcgaggcatggccagcatcacggctcattctgtgaccagggtcggggctcaggctggggaaggatgaccgtctttgtcaccaaatttgatcactgtgtcaccag

SEQ ID NO: 276864 - DNA, 122 bp, Homo sapiens
aggcccctcagcaagcgccgcaccagggattcccccccgccgctctcggacgaagcaggtcgacgtggagcctggcagaatctccccaccttaatacaagcccgcagcctgcaagaatgaac

SEQ ID NO: 276865 - DNA, 122 bp, Homo sapiens
aaacaaaactaggggcagtgcagagcttcccttccctttctgggcatgcatctcactgagcgcgttgaggtgatcatcagcctgggagctcgctaaaccctgttgttaatggtttttatttg

SEQ ID NO: 276866 - DNA, 122 bp, Homo sapiens
gtcggtcccgactgccgccgccaccgcagctaaaacttcaggcgccggaaccgcggagcgcgccacaggttaacccagccagcggcttccgggctgttgcctgggttaccagagctccgccc

SEQ ID NO: 276867 - DNA, 122 bp, Homo sapiens
taatggttacaaaatagtatgtacatgcattataagtctgtactctgtataaaaagtgtgcgtttatgtgaactgtaggtgaacagaaaaaataacaatgtttgtccacaaggggtggtgtt

SEQ ID NO: 276868 - DNA, 122 bp, Homo sapiens
gagagctcccgtggctacgccttccccggcctcggaacggccccatccttcctctttccccgcctcccagcggcgctccactctcggattggctgattgatccgagtcagtttttttcctcg

SEQ ID NO: 276869 - DNA, 122 bp, Homo sapiens
gtcttcagattaagccgaagcaaacaacggagttttatgagcaggagagcatcaccccgccgcagcaggtgagggtgcgcctcagtttgttaattacctcttccctgccagtgacttcacac

SEQ ID NO: 276870 - DNA, 122 bp, Homo sapiens
agccagtccacccctgtcagaatcctggctgggtggccttaagccagcaacatgtccccccgagcctgtttcctctctgtaaagtgaaggtgacaagagctcttcgtcatagctgctgtgag

SEQ ID NO: 276871 - DNA, 122 bp, Homo sapiens
cacatcattatccttgggcctggggctcagtgagtcgtaacgagagtaataggaaatccacggttggggagagaaacggtcgtgcttggccagtagagagagaccatacagggggatggatg

SEQ ID NO: 276872 - DNA, 122 bp, Homo sapiens
ttgggctgggcctgagcactgccgagcgagcttctctgcgggctgagcgcttcaggagttcgacgcggccgtcctcggcgcagactttctcgccggcggacgtgggctctggtgcagtcaca

SEQ ID NO: 276873 - DNA, 122 bp, Homo sapiens
gaatgcgcatcccgtaggcgcaggagaccctgagggtaaagatgcggcacttgagccctccgcttgcctcccaggccacctttgctgcttgactttgcgtcgtctccactcagaagctttta

SEQ ID NO: 276874 - DNA, 122 bp, Homo sapiens
ccctgaaaggcccttggacagtattagcagctcaggggcaggttctggaaaggccttttccggttaacaccactgaatggttcatggggtcagagcaggcaaaacgagcaccatttcctccc

SEQ ID NO: 276875 - DNA, 122 bp, Homo sapiens
catggaggggctgagtgcctggcagcttagaagggtcctggggaaaagcttccagggcagcgtggcaaccaggttatgtggtagggagaggggatcactacacccccacagctaagggcaag

SEQ ID NO: 276876 - DNA, 122 bp, Homo sapiens
cttgctctgaaaagcgccgagcgtggaagggtgtcttggaatggggtctaaaagggagaacgacatccttatgacttgctttaggctgctttctggatgtattttcagagctggggatgagg

SEQ ID NO: 276877 - DNA, 122 bp, Homo sapiens
aggaaagaaagaacgttctcaatgtgagatcctacaggaccactgtactgggtcgaatggcgtccccccccaccaaattcatgtctgcatggaacctacaaatgtgactttgtttggaaaga

SEQ ID NO: 276878 - DNA, 122 bp, Homo sapiens
gctgtctccctcaccccgtgactcacccgcatgcgaacctcataggtggtgaagcgcgcgcgtcccacgcccaccgtctgaggattaaagatgtcgatctccaggaagttacttggcggccc

SEQ ID NO: 276879 - DNA, 122 bp, Homo sapiens
gtgaggaagagtagtaaatcaattcaatacactcacacttctgctgtgctcccaggactacgagaagcgggtagggggcgactcccggcctctttcacttcgtaaaggccttcaactgggtc

SEQ ID NO: 276880 - DNA, 122 bp, Homo sapiens
ggctttcagtttctgctcaaattgtgcggaagggcctgaggtgtttgctaaagcctgccgcgccctgctcgacccgtatcaccgcacaggcaccccacctgcatgttacctcctggtaatgc

SEQ ID NO: 276881 - DNA, 122 bp, Homo sapiens
gtggcgatctgtaaacgctcctgaggagagctggaatcccaagtggaagggaagctggaccgggtgggaactgctccccagcccaagggctgctagaaccccaagactccagccccgagcgg

SEQ ID NO: 276882 - DNA, 122 bp, Homo sapiens
attctgttaacaagaactcatacattggtaaaattcattctaagaaaacttggcaaataacgctttggcctggaattggcatttctttctctacttttccttcccaccatttcttcctttta

SEQ ID NO: 276883 - DNA, 122 bp, Homo sapiens
tcccgcctcctggcttttgaccccgtccttggtcccgccccgggccctggctcctggccccgcccttggtcccgccccgggcccctggctcctggccccgccccagcccaggcaggtcactg

SEQ ID NO: 276884 - DNA, 122 bp, Homo sapiens
cagagacaaactttatgtgtttaaaaagctcaataaaggcaaagtggctgggtcattgggcgtaagaggaagagtggcagatgactggagcaagacagatgggtttgattacattggatctc

SEQ ID NO: 276885 - DNA, 122 bp, Homo sapiens
ttcaactggctcctctcccttcagtttgttggccacacattcaaagtcagtatccagggccgcaaacactaaatgctcaaattctaaagatctgttaatacctgcacttaagaaatggatga

SEQ ID NO: 276886 - DNA, 122 bp, Homo sapiens
cttggagggcgagtgagaaccccccaggcgttccggaggtggcccccagcccgaacccggcgcccgccccggcttcccgagtcaggtctttgccccgcctctcggccccgcggcctggccgg

SEQ ID NO: 276887 - DNA, 122 bp, Homo sapiens
gccatgccttcgtttcctcggcaagaatcccagccacttgtacactctgatcctatacaccgtcaggagtctcccatcattacccctttacttttctccattgggttgtcccataccaatga

SEQ ID NO: 276888 - DNA, 122 bp, Homo sapiens
caacttctgaggaaagtttggcacccatggcgtggcggtgccccaggatgggcagggtcccgctggcctggtgcttggcgctgtgcggctgggcgtgcatggcccccaggggtgagtgatgg

SEQ ID NO: 276889 - DNA, 122 bp, Homo sapiens
gccgcccagaggacctcgacaggagcacagggaggacaaactgaagtccgagagaggcggcgtggcctccggcctcggggagcgctgccgggggtctcgggcttgggagagggcctgggggc

SEQ ID NO: 276890 - DNA, 122 bp, Homo sapiens
tcccgcggaaggggcgggtcaggttagggggcggtgcttaatgggagctggtcttggggccgggcttccgcgtgcgttggcctggcggcgagagcgcgcggcgggggcgtgcccggcgggcg

SEQ ID NO: 276891 - DNA, 122 bp, Homo sapiens
gagtggcctggccctgtggggagccgcagacaggcctgtgggtgctttggataactactgcgcctgtcaactctccttggtagtctagggttcaaagcccaggtccattctagaagtctgct

SEQ ID NO: 276892 - DNA, 122 bp, Homo sapiens
gctgagccatgcttctctcgagctcctgctgtcaggctaccggggtagttctgacctaaacgcccagactagcgtttcttggccctagctctgctcttattccggcaaacagccttagccac

SEQ ID NO: 276893 - DNA, 122 bp, Homo sapiens
ccagcaatgcaagattagatctctaaatgcagcaaaacactgcctgaaaacagaccggcccgcgcagcaagcagacatttcacggtgcgctggggaagcttcaaaatatatctgtgactctg

SEQ ID NO: 276894 - DNA, 122 bp, Homo sapiens
ctgggcgggagcaggaaggctgagccgggacagcgctgtgggttctgcctcccttagctccggactgaccctgggcaccccaggaccctctcccttcctgagcacaggctaggctgtgaaca

SEQ ID NO: 276895 - DNA, 122 bp, Homo sapiens
gggagagggaaggtagaatgtgcctagagttatccaataactttggtctctgagcgtgaccgaattcctttgggacaccgggaaagtgccgggtttaaggctggagtgttcttcggtccggc

SEQ ID NO: 276896 - DNA, 122 bp, Homo sapiens
atcttttcatgtcaataaataggaaaactacgtaatcatttttagggctgcagactgtcccgtcacagaagctccataatttatttaagcaatcccctattgtaagacactaatgctgttta

SEQ ID NO: 276897 - DNA, 122 bp, Homo sapiens
gttctcagtaaatggttgattgcatgattggcaaatgcctttgtgacacatcacagagcacggtggccatggtgaaaatttggcagctgtgactccttacttcctgctttaatcaacgtcat

SEQ ID NO: 276898 - DNA, 122 bp, Homo sapiens
ccatccctctccgaggcgcgccgggatccggcgcccagctgcggggcgagggcagggtcccgcgcagcaccccacccccggccgctggccccgcccccgcccccgccccgcctcccagggga

SEQ ID NO: 276899 - DNA, 122 bp, Homo sapiens
gccgcctagctggagccgaagcggggcgaggcgctagttgggagcctggaggttcccgcccggccacacccacctcaggtatactagcaacagtcacatagggatgagcagatgaaatgtat

SEQ ID NO: 276900 - DNA, 122 bp, Homo sapiens
cccagcggtggtgaccgggtgtgtgcctggtcctgtggtagctgttgcgcagcctgggggcgcgcccccggcccaggctttcctacagctgcagcctggactggcggggaggaatccggaag

SEQ ID NO: 276901 - DNA, 122 bp, Homo sapiens
cctccgcggcagggcgagggacgagggacccctgcctcctgctctgtgtctgaccccccgcgcgcgaggcagcgatgacgtgggccctgccctcccacgccccattccccttccctgaggcc

SEQ ID NO: 276902 - DNA, 122 bp, Homo sapiens
ccaagcagactataaagtctctaaatgcaggacctgtattttactcatctctgaatagcacggtaattacttctgagcctccttggaattcagtcagattctggcttgaatattgatcccac

SEQ ID NO: 276903 - DNA, 122 bp, Homo sapiens
accttctgcccaccccttctctggccaccgggggctgcttctcctgccacccctgctcaccgtgccccgtggctgcacccctggggctcgctggtctctcccaatgcctcgggcagccatca

SEQ ID NO: 276904 - DNA, 122 bp, Homo sapiens
ccctgaatagctaccagatgtgctcttttgtcaatgacctcatctgaaagagttccaaaccggatatatcaaggcaatcattttaggactgatgggatcatatgagttgaaccaaaagaacc

SEQ ID NO: 276905 - DNA, 122 bp, Homo sapiens
gcggacagagatagaaaggctctcagagatccgagcctcaccgcgaacacccggggcaaacgacattgcggtgcatgttaagcagcatcttgcagtgcctggcccttactcacaggtctcag

SEQ ID NO: 276906 - DNA, 122 bp, Homo sapiens
aagactgcctgactccctcataagtaggtgtgtgaccttgggcttgttgctgaactttcccgtgcctcagtttcttcctctgtaaaatgggaataataatacctagcccacaggatcaaaaa

SEQ ID NO: 276907 - DNA, 122 bp, Homo sapiens
gtgtgtggccccgcccgagcccctgcccacgcccttggagccttccaccggcactcatgacggcctgcctgcaaacctgctggtggggcagacccgaaaatccagcgtgcaccccgccggag

SEQ ID NO: 276908 - DNA, 122 bp, Homo sapiens
ggtgtaggatggaggcacagagtgcctcagggcgagccggctgtggtggctgctggcacacggctcacaggacagggcggctgcattctcatggccttgcagagtggtttgcattttcccca

SEQ ID NO: 276909 - DNA, 122 bp, Homo sapiens
ggcctgggggaagggagaaaggacatgattagacacctgccctcacatatgaagtgggcccgcatttcaggacccagtctcttactgttttatttgtaggtgaagtatgtttcttgttgaca

SEQ ID NO: 276910 - DNA, 122 bp, Homo sapiens
accaacatggtgaaaccccatctctacttaaaacacaaaaattagcccggagtggtggcacgctcctgtaatcccagctactcgggaggctgaggcaggagaatcgcttgaacctgggaggc

SEQ ID NO: 276911 - DNA, 122 bp, Homo sapiens
ctgtcactgtaaaacgttacctgacagagggggaagctctttcttggggagttacaacctcggcaagcagaagggagatttgtcactgttactgttctctcatttgctttactgatggtggg

SEQ ID NO: 276912 - DNA, 122 bp, Homo sapiens
cccacccacccccgggcactgacctgtctaacgctctaaggcagcggcaaaatttcggtccgggctgtgccgggctctcgccccggcctgagggtcctcatggggctgggggctgcccgatg

SEQ ID NO: 276913 - DNA, 122 bp, Homo sapiens
cgtctgccgcccccgccccctccccagccttccaggccctggctgcggtggatgggggcgcggaaggcccaagtgcgcgaacttcacctggcccggccgtcctccccgtggggggcccaggc

SEQ ID NO: 276914 - DNA, 122 bp, Homo sapiens
tgtccacccagcagtttgcaagtggctgcgccaaggcggcagaagaggcacccgaggaggcgccggaggatgcggcccgggcggcggacgaggctcagctgctgcacggtgagggcatctgt

SEQ ID NO: 276915 - DNA, 122 bp, Homo sapiens
gggagggaagaaggggacacagagcaaccctgtgtgatccagaacgctgtcactcacatccgcactcttgctgtccctgaggtttggtgcactgcggttcaccaacagagactggacaatgc

SEQ ID NO: 276916 - DNA, 122 bp, Homo sapiens
tgtcaagggtcggaattactttgatgccaggcaagggaaaaccaccaccatcagcccaagcgcacataagggaggcgggggcatcgggcgtgtgatgcaaagcaggtcacaatccagcgatc

SEQ ID NO: 276917 - DNA, 122 bp, Homo sapiens
tccatgctcagttccttcccgtcttgttcagagagacgtggcctgcccacgtgcagtcagcggcatccgcaaccctgccaggggccccgtgacacgcccccgctgcacagagcatgtgaccc

SEQ ID NO: 276918 - DNA, 122 bp, Homo sapiens
ggccaacatggcaaaaccccgtctctactaaaaaatacaaaaataagctgagtgtggtggcgcatgctggtaatcccagctacttggcatgagaattgcttgaacccaggaggcggaggttg

SEQ ID NO: 276919 - DNA, 122 bp, Homo sapiens
gtcactaaagagaccagaagagcacttttttgtccggcaaaacctaaacaatgatctcatcggaggaccggaacacactcagcacagcctggccagctcaggcaccaacaaggagccacggg

SEQ ID NO: 276920 - DNA, 122 bp, Homo sapiens
cacgttctcttgcaagacagagaactctgtatcaattttaagctaggaagaaaacactggcgttttaggacagaaatgagtcacttaggaggattcataggattaaggaaaatatgagaatt

SEQ ID NO: 276921 - DNA, 122 bp, Homo sapiens
catatgcctgtagtcccggctactcaagaagctgaggtgtcgagaaacttcctgccgccgcgttcgcacctcgctgctccagcatctagggcatattccaaccttccagcctgcgacctgca

SEQ ID NO: 276922 - DNA, 122 bp, Homo sapiens
gtccggggcacaggaggttcgtgggggaggcagcagcccggccttgtttcccatacactgcgcttcccatcagttccacttgaaaagcagctgcgctcccgagtccgccggcctagggacac

SEQ ID NO: 276923 - DNA, 122 bp, Homo sapiens
gtcttccacgcggtgggggcgaaggaggatggagctagaacgaagcctcagcgcgtgccccgcacaaacatggcagcattcccagcagccctaaaccgcccgacgcgagcgcgcgcgcggcg

SEQ ID NO: 276924 - DNA, 122 bp, Homo sapiens
gcaggtctcacagtctctgaacagagacataaatgtagcccggaaccaagtgtgcggtgacgactctcaggcgtgttcctaagtgtggggttgcctagctgctgctgctccggtcagagcat

SEQ ID NO: 276925 - DNA, 122 bp, Homo sapiens
gcttgggacccgaaacgcctcggcttttctgcggacccgcgcccggccgctgccgccggacgcttgaaaaggtttgcctggcccagggaccggggttaggactagcagaaagtggcttcttt

SEQ ID NO: 276926 - DNA, 122 bp, Homo sapiens
gatcctggcgccagagaccttgccccggagcagggtgggcaaagtgacagctgctccccgcgcgcatcgcacgaacgcagtcactcacccccagacacccgattacagcccactcatgcgca

SEQ ID NO: 276927 - DNA, 122 bp, Homo sapiens
tcaattgttttgtgaagggaaaaaaatctcaatttgctttggaaggctgggagacaataccgcaatttgggggctccaggaaaatcgtttttgaatctaaagatctagggaagttgctcaga

SEQ ID NO: 276928 - DNA, 122 bp, Homo sapiens
gctgcgctgggctgtgagccccgcaaaacactgacccccgagccagcccccagcctctcacgccctgggcctgcggcccctgtgacacccacaccaggctgctgcacagacctgcggggcct

SEQ ID NO: 276929 - DNA, 122 bp, Homo sapiens
aagcctctaaaaaagtctaatgataaaattttcttatacttcagtgcttccatcttttgtcgttttgagagtagtcagcaattgtgctgaattgtgtggcactcacactgcctttgttgtgg

SEQ ID NO: 276930 - DNA, 122 bp, Homo sapiens
ggacctgggcgaggcctgcgacctgggcggggccagggttgggctctgccagagctgcgccgcagccgccctgcccgggcctccccgcccccacctgtgacctggattccgcggttcctgcg

SEQ ID NO: 276931 - DNA, 122 bp, Homo sapiens
aaatctgaaagatctattccagtgcttgtattccatagcttatttttggccccagagcagcgtgaagaacccgatgttatcaacagcgttttatttggacgctctgaatccgttttccccta

SEQ ID NO: 276932 - DNA, 122 bp, Homo sapiens
gcgcggccgcagggagcggcggagctgcgtgtactgttgtcatggcagcgcgctgtcacccggcaggttgctggatgggcgaagtagttgtattctgattaactgattttgtgggattatta

SEQ ID NO: 276933 - DNA, 122 bp, Homo sapiens
tatcagtcttcaaaggtttttgtaaactgtattatttctttactaacatatcagatcagtcgctctgaggaactgtgtttttaatagtcttggtaagggaagagaaagggtcatcttagagt

SEQ ID NO: 276934 - DNA, 122 bp, Homo sapiens
aaatagcatctgccacccaaatcttgctgaatagagtgatttatcttcaggcctactagccggcgacaggagcgcacctcctcccttctcctagctgtcccgggtttattcattccctgagc

SEQ ID NO: 276935 - DNA, 122 bp, Homo sapiens
ggtgacggaatgctctgtgcggggatcgcaggcccccgagctgcagggggcagcaaagcgcgcccacctgcccgcctgcccgaggagaacaccgcagctctgctaatcgagggacagccgca

SEQ ID NO: 276936 - DNA, 122 bp, Homo sapiens
ggggaccccgccccagctgacacgggagcagccatggcccagacgagtggtaggaaggcccggcgtcatcgcacaggtgtttatggagcgcctgctgagtcgctgtcacttcctctcttccg

SEQ ID NO: 276937 - DNA, 122 bp, Homo sapiens
caagcacacagcagtgtgacagccccgagctcgcctgtgcagccttcctgggtatcactccgttctgcccggaaaggcaccattcaggccgtgagtgtaaacgtacgagtgggcagggggag

SEQ ID NO: 276938 - DNA, 122 bp, Homo sapiens
gggcgagtcgggtgccttgctcctcaaaaccctggtccacgactctgcggttgggggagccgggcagccggcgcagcaggagccgggccccgtccacaagtttcctacgagcagggcggaat

SEQ ID NO: 276939 - DNA, 122 bp, Homo sapiens
cgcgcccactgcggggtcaggaatgagcggaggccgagcgcctgcaggagccgggcgctacggcactgaccccgggaagggcggggcgggggcggagcacgccttaaaggggccacggacgc

SEQ ID NO: 276940 - DNA, 122 bp, Homo sapiens
atcgtccgtcatctttcggggactgtatacaccaggggttctggggcctttcctcagcagcgttcgcggccacggaccccacatgtcctctgctgacccctgtgtgtcctctgtggccaccc

SEQ ID NO: 276941 - DNA, 122 bp, Homo sapiens
gccagactttttcttaattacaaactgatagatggtccacatctcaactaacagtattgacgctgtaagagcatcaggttggttcccattgtatcttctttactaatacgttcgcgtttttg

SEQ ID NO: 276942 - DNA, 122 bp, Homo sapiens
gaaagagtttcctgagacaccttccagagagcaactctggcctccccagagatcctgcagcggcaccgcctgagcaagcatccagcccttccaccaggcctggccgtgggtggcagggcacc

SEQ ID NO: 276943 - DNA, 122 bp, Homo sapiens
gtcagcacagccatacactttgtctttcacttttgcatttaggttgtctgtgtgaagattcgaagcaaaagaagtcaccctgggcgccgtttccattagattcccatctttagagatgttag

SEQ ID NO: 276944 - DNA, 122 bp, Homo sapiens
ttgtctgggacaagctccttctgggctactggagcacccggggtaagtgccgcaaaatcccgcgaagagcgccagtgagaggtgaagccggctaggcttctgggaccggtggggacttggag

SEQ ID NO: 276945 - DNA, 122 bp, Homo sapiens
attctgggacaatagtagaggtcccactaaacatctttaagtgggtgctatgattctctgcgcagactcttcctgcaggactggaggacatgttccctgagctgctaggagtattggtctca

SEQ ID NO: 276946 - DNA, 122 bp, Homo sapiens
tgccccaaagcaggaactttcaggatacaagaaacggggcccattcagatgggggcaggacgatattgggaggcagccaaagagaaggccatgctcatcctcaatgaaaatgttgaccagag

SEQ ID NO: 276947 - DNA, 122 bp, Homo sapiens
aattacgtctgggaggcccggtgcttagggcccctaggttagaggacttggagaggagagcggctttcttgagaatgtggttaggagccagggagtcagacctcagcggccatcccaaaccc

SEQ ID NO: 276948 - DNA, 122 bp, Homo sapiens
gtcggacgccaggccgggccctgtgacaaggatctcagcgctggcggtggggctgccctgcgggttcgaggcctggctcttcctgccccactgcctggtgtgtagcccaggggccgggccgc

SEQ ID NO: 276949 - DNA, 122 bp, Homo sapiens
attagtgaggcactttccaggctattagtgaggcaggcctttcagctctcccctcaagctcgacgaaccacattctttatattgttttactgtttctctgagacaatgttttaagcaggaac

SEQ ID NO: 276950 - DNA, 122 bp, Homo sapiens
actgggttaacacacatagcaagtttccttaagggcaaatggaaaatgctggcatctgagcggggtggtcagaacgcaccccacagccagaggcgccttcccggtaacacagcacgccttcc

SEQ ID NO: 276951 - DNA, 122 bp, Homo sapiens
ctccaaggcccaagtttgggaaattgatcacaatcaatgatcgatccggtttacagaaagcggctctggctgccacgttgctctcttggcaatgggggttttccctctttttctccctgcag

SEQ ID NO: 276952 - DNA, 122 bp, Homo sapiens
cgcgcggcagccggaactcggggcatggccggccggcagggccgggagcggcagtggtagcgggagcgctcggggccggcagcgcccgccgtgcgctcttctgggcggtggaacccgccccg

SEQ ID NO: 276953 - DNA, 122 bp, Homo sapiens
cccctgcaggcctttagccgggctcatcggattggccaggccaacaaagtgatgatttaccggtttgtgactcgcgcgtcagtggaagagcgaatcacacaagtggccaagagaaagatgat

SEQ ID NO: 276954 - DNA, 122 bp, Homo sapiens
cttcgtggttgccaaaatgttacggggaggtccttgctcccagaggtcccaagatggtggcgggccgcttccaagatggcggcaagcctcttgttccctgacccggggttcttggcctcatg

SEQ ID NO: 276955 - DNA, 122 bp, Homo sapiens
tttttttttttgaatgggggtggtacatagggaacctccctgtattgctcagtctgatctcgaacttttgtgctcaagtgatcctcctgccttggtatcccaaagtgctgggattacacatg

SEQ ID NO: 276956 - DNA, 122 bp, Homo sapiens
tccttgtcgtcctgcagctgcgtctgggggtctccttccacaggcctgtactgcaccttccgcggcagcgccagctgcacttctttccaaaaatcggaggaaggagtctgggggccaggtcg

SEQ ID NO: 276957 - DNA, 122 bp, Homo sapiens
cctgttcctgttgccacttcgtgtaagttagcgcaggcaacaacacacaagaccagcacacgtgaaatggtccattttaatgcactgcccccagggaaaggaacattaccggcttctggcca

SEQ ID NO: 276958 - DNA, 122 bp, Homo sapiens
cggaagtgtgggatactgcgagtatggcggcgtcaaaggtgaagcaggacatgcctccgccggggggctatgggcccatcgactacaaacggaacttgccgcgtcgaggactgtcgggtcag

SEQ ID NO: 276959 - DNA, 122 bp, Homo sapiens
ccggagccccatgtcctcggagaggaagcctccaggtctgaagagggaacaccccagctccgcagacgggcacagccttctcgcggtcctaactgcaaagcccgctggccgccctagcaacg

SEQ ID NO: 276960 - DNA, 122 bp, Homo sapiens
actcacccgcagctcacttgctgacgtgcagtccggttcctaacaggacaccaacaggtccgtggcccaggggttggggacccctgacttaaaggacactccccggcccgataagcaccatc

SEQ ID NO: 276961 - DNA, 122 bp, Homo sapiens
tggtctgtgtccacatggacgtagccccagcttctgtctctttctgtctatccctgtccacgtgtctgagtttggccaaccagtcccttaacgtgtctggggcatgtcgctgtgtccgtctg

SEQ ID NO: 276962 - DNA, 122 bp, Homo sapiens
agacaggtttgtagactctcttcccactcgcagccgcctgaccccacccaacacaacccacgagcaattctaaaagttgcttaactcacgtctaaaaagtgcaaaacttcagggctgcgcgt

SEQ ID NO: 276963 - DNA, 122 bp, Homo sapiens
tcagcctaaactctcccccgtgctttaaaaaacttgcttaaaaaaacacaacaggattttcgaagaatcctttcttagaaaacaaacaaaaaaaccaaacaaaaacgtactttctccccact

SEQ ID NO: 276964 - DNA, 122 bp, Homo sapiens
caccgggaaatttaaatcgcgccggccggctgcacgagccacacggtctttgagctgagtcgaggtggaccctttgaacgcagtcgccctacagccgctgattccccccgcatcgcctcccg

SEQ ID NO: 276965 - DNA, 122 bp, Homo sapiens
agaccagttagaaaaggaatcagataaggaggtttctagtttgggagactgggtgaaatgcgacaccattagctgagactgaaagggacagatggaggagtagaaatataatttaatatagt

SEQ ID NO: 276966 - DNA, 122 bp, Homo sapiens
taaaagaatagagacccactgccctctacctgtcacaaagagccaagtcttggctctggccggctttgacgaacatcatcttggcgctgaacagcagctgcttcatgatgtccgtgagcagc

SEQ ID NO: 276967 - DNA, 122 bp, Homo sapiens
gctgcacccctgacctactcacagccctcaaggaactcaccgaccagcctagccttacagcggctatcacaggtgtgctgggcccctgacgtcgagggatttagggttttgttttatttgct

SEQ ID NO: 276968 - DNA, 122 bp, Homo sapiens
aaaatgtgatatggagtctctgttctccattgtcaccaaggagtccccagaagccaaaaccgagagaatgttataaagaacaaatgggatactgcagtgaagcaagtaggaaagatactttg

SEQ ID NO: 276969 - DNA, 122 bp, Homo sapiens
aatacgggaggaaagaagtgctttacaaggacatacgcattaatttcttttcatggaaaccggtttgacaaactgatagttctgccctgattcttcagtgggtgcattcctggttgattaac

SEQ ID NO: 276970 - DNA, 122 bp, Homo sapiens
gagaatccaggacttgaatcgtatcttcccactttctgaggactactctggatcaggcttcggctccggctccggctctggatcaggatctgggagtggcttcctaacggaaatggaacagg

SEQ ID NO: 276971 - DNA, 122 bp, Homo sapiens
ccgttggggccaggggagccgacagttagaatgcgcctcggggcgactagtcccaagtcacggaaacctcggcgcatccccgcccgcccttcccccggggtcgcccccgccgcctcctggcg

SEQ ID NO: 276972 - DNA, 122 bp, Homo sapiens
acttcacaaggaaatggtgctgaaggaaacgatgttactcggggacctgccatgtgtcctcgggcccaaagtcacagtttccaggaacccatcgtggagattaggtgagggcgtcccgtgct

SEQ ID NO: 276973 - DNA, 122 bp, Homo sapiens
gcgcgcggcctggaggggcggggcggacgcagagccgcgtttagtctatcgctgcggttgcgagcgctgtagggagcctgtgctgtgccgcgcagttaggcagcagcagccgcggagcagta

SEQ ID NO: 276974 - DNA, 122 bp, Homo sapiens
gcccctcagatctgctgaatcagatagctaagggggccctggaatctgcattttagcaagcggaggtgggttatgaagcactccaaagtttgagacacgcctcaaaggtggagtggttctgt

SEQ ID NO: 276975 - DNA, 122 bp, Homo sapiens
agtttccgttttgaaacttctccgacactcctatcccgggctggctccgggcgccagagccgagaggagttacctgcgagaccaagcccccccgcccccgccgcccgacccccgcaggagcc

SEQ ID NO: 276976 - DNA, 122 bp, Homo sapiens
ttccctttgttagaagacactgggctccctctccagtgggtgtcccaggagcctgggaggcggtggttgcttggccgaagggtggaccattgtccttggtgctcagggctctcctcagcgat

SEQ ID NO: 276977 - DNA, 122 bp, Homo sapiens
tactcgggagactgaggcaggagaattgctagaacccaggaggcagaggttgcagtgagccgagataaggccactgcaatccagcctaggctacagagcaagactccatctcaacaaaaaaa

SEQ ID NO: 276978 - DNA, 122 bp, Homo sapiens
tgtccaggtctctgcttttgccgctactgctggtgtttccgcattcagaaagtccatctccgcctcgctaccgacccctggcggttaacagggtgaccgacgagtggcaagcttgtaataaa

SEQ ID NO: 276979 - DNA, 122 bp, Homo sapiens
cagcatgctgatcctcagcacgggggagggaggcccggggccccctgcaggccctccccacgctggaaaaaaacacagaggagcctcaatacccccacagcggccccagcaagccagccaag

SEQ ID NO: 276980 - DNA, 122 bp, Homo sapiens
ggaaacgtcgttattagtggaaataacactgagggcacactctggtctaccaccctggtccgtgtgctgcgtgagggcaaagaccaggaccgtcttgttcacctcttgtagagatgttgttg

SEQ ID NO: 276981 - DNA, 122 bp, Homo sapiens
cctgtggcttcaagtgtagttggacaaaagaagagtattttagtagccttttcagataggcgtgggacttcttcaataccacgccaacagcgacacaggccgtcccttgaaggtcactcaca

SEQ ID NO: 276982 - DNA, 122 bp, Homo sapiens
gtctttcggatttccaagacccgcaaggagcagtttctcagctaaccactaatggcatggcgagttcctctcctagagtggatagtctgtgctcattgctcagtggcatcgctctagtgggg

SEQ ID NO: 276983 - DNA, 122 bp, Homo sapiens
tttgggtgtttctaaaatttaaatccacgtgaacagattaggaaagaccacgaaatcctacgtcacctctaaagtcacagcttgaagccttgcgaaaggaactggccctagaccccaccccg

SEQ ID NO: 276984 - DNA, 122 bp, Homo sapiens
ccccaaaccccaacacacactggaaccctcaaggtcccatcctactgaaagccaggtagccggtgcagtgagcaatggacagatggatggatgatggatggtggatggatgatgggtagatg

SEQ ID NO: 276985 - DNA, 122 bp, Homo sapiens
ggaggacgagcagcctgacagcctggagggctgggtgccggtccgggagggcctcttcgccgagcccgagaggcaccggctgcgcttcctggtggcctggaacggcgcggagggcaagttcg

SEQ ID NO: 276986 - DNA, 122 bp, Homo sapiens
ctttcctccccctgtatctagaattatccacaagctctggattcttattcagattacttgcgatcaatcctgggtactccgtcctagaaattgcttttgttttatgccaaggagaaaatgac

SEQ ID NO: 276987 - DNA, 122 bp, Homo sapiens
ttttaaaaacacaaatgcctatgtctcactccctgaaattctcctttaattggtacgaggcggggctattctaggaactattttctatcccttggcaattagccatctgtatagtattttta

SEQ ID NO: 276988 - DNA, 122 bp, Homo sapiens
aggggtgtttgaaaaaggggcagggcctgggacccaggaaactgttcttccagagacacccgtgaagctgagctttgcctctcagggaagctgtgaccccacgggtgctgcccagagagatc

SEQ ID NO: 276989 - DNA, 122 bp, Homo sapiens
cccacaaacatttccataaaagcaatcagcacgacataattttattgggcactggagaggcgggggtcacagagaaaggatcatagcacgcaatagaaaacaggaagcaatttgcttgaggt

SEQ ID NO: 276990 - DNA, 122 bp, Homo sapiens
gctggcgagtgtctgtaatcccagctactcaggagggtgaggatgagaattgcatgagcacgggagtgtaggttgcagccagctgagattccaccactgtactccaacctgggcaacagagc

SEQ ID NO: 276991 - DNA, 122 bp, Homo sapiens
gatgccgcgccacgagggacacttatggcttcattcgagagctgctgccaaaacgcctggcgccgccaccgtcgggggctggcttcgaggacgcccgcctgcctcgcgggtcgtgtccgcgg

SEQ ID NO: 276992 - DNA, 122 bp, Homo sapiens
ggccccctccgcccactcctgcctgtccttcccacagccgggccccgtcaccgaggtggacggggcggtagccacagacttcttcacggtgctctccagcggccaccgcttcacagacgacc

SEQ ID NO: 276993 - DNA, 122 bp, Homo sapiens
ctctctagaccggaactccccactagagcgatggggtgccacagggtatcccagcaggcccggcaagcacatcacaggagcgtggagaagcgggaccagccgtgcccccatccctgggagcc

SEQ ID NO: 276994 - DNA, 122 bp, Homo sapiens
gggcgtggaggggcgtggcacgttcagtctggacacagcataaagtgcattggagagaggcgggagacaggatggaaaggagggtgggaagagctatgaagctccccagggccttgctaacg

SEQ ID NO: 276995 - DNA, 122 bp, Homo sapiens
ctggcaaaggagcccttacctcgtgcccacttgctggggcgggttggggcaagggatgcacgtgaaagccaggggagattttctgacctccacctggcacttgaggatgggcaagctgtcag

SEQ ID NO: 276996 - DNA, 122 bp, Homo sapiens
agctgcggtgacttggacaggcagacggccctgagcggagggagagtggctgacaccaagcggcccatgagcgagtccttaccactttcggccggaacggtgggtcaatctccttccgttca

SEQ ID NO: 276997 - DNA, 122 bp, Homo sapiens
gaacgtggtgacaatgacatctctttgcaaggctgctgcagggctttctggaaatacgcccgtgaggtatctgggcctgcgcacagcctcccccgcccaggacccagacgtctacctggggg

SEQ ID NO: 276998 - DNA, 122 bp, Homo sapiens
caccagcaggaacttgagcagaaagtcgtaggcccggaccgggctgcccagggcgctcatcgtgacggcccggcgcccccacccatgcccggcctgcggggctgagcgcagaggcggcggcc

SEQ ID NO: 276999 - DNA, 122 bp, Homo sapiens
gctaaccttcatagcttctttaaccaccaccacctgccccgaggccaagattcgagaacgcgatttaatttacttaggggacttcattttgtgagaaacccgaattcacctgaagccaccca

SEQ ID NO: 277000 - DNA, 122 bp, Homo sapiens
gccgcgggaagaacttggaaattctttaagagaacgtactttttgctctctgtgatccggcggccatttttttccgactgtctgtgggtaaacgagcagcccctgttggctccgaaggtaat

SEQ ID NO: 277001 - DNA, 122 bp, Homo sapiens
ccctccctggcagtccaggttgggttaggatccattctaggattccatggcctcctgtgccgccatcccagtcctggactgtcagttactatatggactgaggaacgccccgccgagggcag

SEQ ID NO: 277002 - DNA, 122 bp, Homo sapiens
cccgtgcccacttacccagggagggccaggaatgaggatgccactgtggctcagtgatggcgccgagacacaggtgaacactgtaaaatgtggatgcctggaggcagcccacaccctgggcc

SEQ ID NO: 277003 - DNA, 122 bp, Homo sapiens
gccataaggtgccaagggctgctgctagtgcccagggagcccttaccttttccctcacagcgggcagcagagcgttgaagcacgtggccagaaacacccctcctccaaaggtgttgcagaga

SEQ ID NO: 277004 - DNA, 122 bp, Homo sapiens
cgtcctcatcttcctcctcatcttgctcctcctcagtcgcccccagccagcatttacagccgatggccaaagaccaccacacggacctgacgaccttatagaagtggggaccctgggcccat

SEQ ID NO: 277005 - DNA, 122 bp, Homo sapiens
acctgtagcatcttccaataaaggatgtggccacgagccaaagaattctagagcagctgccgtttccaagacacagtctttcccacgtagagcttgggctgcaagagagctgaggtcgcgca

SEQ ID NO: 277006 - DNA, 122 bp, Homo sapiens
aggaaaggggaccaggtcacgtagaacctcgtagaccactgcagaaccttggcttacgtacgcagagacagcaggaaccactgataggtttagggagatttgaggagagggacatgatttgg

SEQ ID NO: 277007 - DNA, 122 bp, Homo sapiens
gcgtctctttcccgggaaagcctccctcggttcctgcgcggccgcacagcctggacgcagcgcacgcgggcaccggcctgactctcccaccccgaagcctgctcccaacctaagtccgccct

SEQ ID NO: 277008 - DNA, 122 bp, Homo sapiens
gaggaagcagcagccttccccggctgctggcggaggcagtgggtgtaacttgtgaagtttcgtgctatgatgaatctggtcacttgggtgtgttggagagggttggtcgctcctcccttcct

SEQ ID NO: 277009 - DNA, 122 bp, Homo sapiens
ctgggggagctttccgcacagtcccgcagcctgcgcccagcggaggtgtagccggggccgcgcacccccgccccgcccttgcacgtgactcccacaggccagtcagcgccctagggccgagt

SEQ ID NO: 277010 - DNA, 122 bp, Homo sapiens
agggcgcgcgcggcttcgccagctacaaatactgagcggaggcccttgcggtggtggccccgaccccccggccgctgcggcccgggccccgtcccaggatctcggggcccggagctccgcgc

SEQ ID NO: 277011 - DNA, 122 bp, Homo sapiens
aaaaacttttctttgtttaaaagcactcatgggtatctggaacgcagctacagtggggagcgagcaacgccccaatcctcaggctctccggggggtctggggtgcaactcgaaacccaccgc

SEQ ID NO: 277012 - DNA, 122 bp, Homo sapiens
atcaggcacgcggcgcccagcagcagcagcagcagcccgagcgctccgcagccgcctctccgcagcgccatgcccggtccccgctccccgcccgggccccgacccccaccgccgcgccgcgc

SEQ ID NO: 277013 - DNA, 122 bp, Homo sapiens
tcctggtgggtgttcgcctctgatggaactgagaacccacccaggtcagacgcaggaccgcgctctccctctgcggatgccccatggagcactgctcttacctgatacccacgcttcgggtc

SEQ ID NO: 277014 - DNA, 122 bp, Homo sapiens
tcgtagtttgcgctgggtgcgcaggaaggtcagtgtgggggtcgcccgacatttcccccccgcggaggtgggagccgagccacatcttggagtggggactggccgcggagcgggttgcccag

SEQ ID NO: 277015 - DNA, 122 bp, Homo sapiens
tcttgttgcagatcatcaatgctgtggtactgttgattttattgagtgccctggctgatccggatcagtataacttttcaagttctgaactgggaggtgactttgagttcatggatgatgcc

SEQ ID NO: 277016 - DNA, 122 bp, Homo sapiens
gtgcacctgaggcgaatgggccattaaacacccaatactgagacggtttcggggaggatgcggagggaggagcttcacctagttgagcattcagaactttgggtgggaaagggggtgttgag

SEQ ID NO: 277017 - DNA, 122 bp, Homo sapiens
caagacgcccaacgtggctccgcgtagcaatcagcgctgcaatcctggcggttacctcagcggcggcgtctctctctgcgcctcacactcgcagcccgcggccctccccaacttagggcgtt

SEQ ID NO: 277018 - DNA, 122 bp, Homo sapiens
ccaacgtggaaaacagaggttacaggaaggagttttctcaagatcgcccaaggttcctggcgccgttattcatggaggacagaatcccccacccagctttccaaggtgaagggcaaactcca

SEQ ID NO: 277019 - DNA, 122 bp, Homo sapiens
tccactggcatgttaagtatgttctccttcccttctaatgcatattttcccccaagtcctcgtgttatactcctttttcaccctccattcaagagatgattttatttatttatttatttatt

SEQ ID NO: 277020 - DNA, 122 bp, Homo sapiens
gagggggtggggaaggccgaacggcttcctgggagtcgtagttcgactacgtagtcctgtcgtagtcagaacaaaagctaaacaaggatggaaatggttagggtttgcccaccacagctgtc

SEQ ID NO: 277021 - DNA, 122 bp, Homo sapiens
acggtaagggaacggagggaagagatgaggccgtgctctttaggaagttcacctgctctgcggctgcgcacacatgaaaccacttagcatagtcagcactgattaaaccgcccggcactaca

SEQ ID NO: 277022 - DNA, 122 bp, Homo sapiens
cactaactcgggccgcttcttgtcttgtttgagtagcaattgaggggctcctgggtgccccgggctgggctgggcctggagtcagcaagccccaagtcttgccctcccttgccagggaggaa

SEQ ID NO: 277023 - DNA, 122 bp, Homo sapiens
catctgcagctttggcgcaatgaatcaggcgcggccgccgccgccgccgccgccgccgagcgcgtctggcatccggagtctcccgggatcgaaaataatttgggcaaagcggtgggaggtgt

SEQ ID NO: 277024 - DNA, 122 bp, Homo sapiens
atcagcacatcaaagtgggctcggggcttggagggggcggagcctgaccctttgaatccacggcggggggccaaggtgccagccccttgactgcgcctgtttcgccccacctgggccctcgc

SEQ ID NO: 277025 - DNA, 122 bp, Homo sapiens
tccaccattccctggagcactctgaaggagcccgactggcgaggctgtgtgggctcattccgattgtcgtggagcatccggtacacgtccgactcggggggcaccgaggctgtgggctcgct

SEQ ID NO: 277026 - DNA, 122 bp, Homo sapiens
accaccccagagccccagctttggagctccccaacgccacagccaggcacagtgcgaccccggcagcagagggggcacttggaccatttgttcatagtctgggacctccggtcccacgagag

SEQ ID NO: 277027 - DNA, 122 bp, Homo sapiens
gggactgagcacctgtgctgggcggccagggccaggctcttttgctggtgctgccagagacgcctcaggtcacccaagagtctcaggttcctctccttcctccagaggcggggctggaaatg

SEQ ID NO: 277028 - DNA, 122 bp, Homo sapiens
gaggcggaggcggaggcgagcaccgccccaccgcgcacgctgcggttgccccggcagccgcgccctgcgtggcggaagctcacaatcagcccggtccctccggcttccaccccgccccctgc

SEQ ID NO: 277029 - DNA, 122 bp, Homo sapiens
acctaagcatttaggcaccttaaccaagcaaaaaccctagtacatttcatgcacattttccgagtcattttccttacctttcccattttgccatgtagtataccaagacaaagtaaggaagg

SEQ ID NO: 277030 - DNA, 122 bp, Homo sapiens
ctcctccccaccattgccaaaaggcagcagtgccagtttattaccctgaaacagaaagcacgacagtaatttcagtgtaataaaaatgctttaaaaaacacttccctgcagattttttttaa

SEQ ID NO: 277031 - DNA, 122 bp, Homo sapiens
cgctggccgtttgggactctcctaccggaagtgaaaccgaagaaaacgccacgtcgaaggcgtgggttgccgtaagtgcgccgtcgtcacgcgcctagcttccggcgatgggtggtcctggg

SEQ ID NO: 277032 - DNA, 122 bp, Homo sapiens
atcagagagacctcttggagggtgtcggggttttcctttctttttcatttgaattttatccgccttttattttctgtcatccttgatgtgcttctggcttctggcttccctttccttctctc

SEQ ID NO: 277033 - DNA, 122 bp, Homo sapiens
gggcacctgctcccaaggggctgagcgacgcggacgtggagggtgggaaaagcggggtaacggatgcttacacagttgcgtttcttgcataggaagactgagtctgagagactgcaaagctt

SEQ ID NO: 277034 - DNA, 122 bp, Homo sapiens
ccgggcggtgccagctcgcgggccgggctgctggggagccctagtccgctagagtccgcgcgccgggcaaccgcccggggctgaagtcctccccacaccatgatccttccgtcctttatttt

SEQ ID NO: 277035 - DNA, 122 bp, Homo sapiens
actggccctgtctctggttgaagtagggcatgaaggatggaaaagagtatccctcaatcccgcctgtactcagctttatagacaaggagctttcctgctttggttatataaaccatgatcaa

SEQ ID NO: 277036 - DNA, 122 bp, Homo sapiens
tgtgtcacggaggcccaagggcaaggggcttaggctgtgggttgaggggactgtctgagacggacttaaacctgcaccagctccagagccctgcggaaacagagatcggtcccctccggcgt

SEQ ID NO: 277037 - DNA, 122 bp, Homo sapiens
atttaagtgtttgctaaccttttgtcctttaagctctgtagaacaaccagaaaaacattacgtgataaagttacattggttaatgcacactgagtaatagtatcaatcttccaatattcctg

SEQ ID NO: 277038 - DNA, 122 bp, Homo sapiens
cagcgggaggctcagaggcaggcgtgactcccccagtgagaggcaagcccccaaggccgccgcgggactgtgcccgctccccatcacacaccaggctcctgtgcccaccacttttttctagg

SEQ ID NO: 277039 - DNA, 122 bp, Homo sapiens
cccacgctgtggccccaggagaagcttctggatgtagctcctgtatgtgaagggtgggctcgcgccgctgccggaataaagggaaaccacaggcaggagggaggcgcgtccaggatccgcgg

SEQ ID NO: 277040 - DNA, 122 bp, Homo sapiens
cggcagtgccacggcgttggcggaagcctgtaggtgtctcggtcgctagcctggacactccgagggacgcggacgctcccccgctcgctcgccccggccccgggccccccggaccccccgct

SEQ ID NO: 277041 - DNA, 122 bp, Homo sapiens
ccctgtggacactgcacacagcaccctctgtcctcacggagcctggggctgctgcagggccgtgggaaagaagttataaatccttgggtgctggaacccccgggtgctgggcaccttgattc

SEQ ID NO: 277042 - DNA, 122 bp, Homo sapiens
agcgccatgaagaacattcgtgttgcggcgcggccattgtcaccgtcagtctccagagctcgtctcatcttccaggctgagactctgtgcctgctccacactgactcctgcccctcccccag

SEQ ID NO: 277043 - DNA, 122 bp, Homo sapiens
acccctccccggcagctcagccccaccccgacagcccctgttttccttggttgtgttttgcgggggtgcctggcacccccagagattcagcttcatggctgacaggtgaccatggcaggggc

SEQ ID NO: 277044 - DNA, 122 bp, Homo sapiens
aaattcactgtcatcatttagtatctgtttaatttttcagtccaaagagaggaaatcagtcgctgagtattatttgactccggtctccttggtgcaaaaacaaaatgggaaaaataaataag

SEQ ID NO: 277045 - DNA, 122 bp, Homo sapiens
gatgatctgcccacctcggcctcccaaaattctggggttacaggtgtgagccaccatgcccggccagtttctgactggttttgaagcctcctgaaaagaagtaggtgttacaaatttatttt

SEQ ID NO: 277046 - DNA, 122 bp, Homo sapiens
cggtcaggagagagaggtgtgtcctggcgggcccgcagctccgattggccgacaggctgacgggaacgtttacggtcagcgtgtgtcagcgacgtgcaacccggaagggaagaaggggcgtg

SEQ ID NO: 277047 - DNA, 122 bp, Homo sapiens
gctttccctaagacgtgcccaccagtgtgcatgtcagtttaccactgccatggtaatacccggaagttacggctcctttccgtggcaatcatctgacgacctggaaattaccacccttttcc

SEQ ID NO: 277048 - DNA, 122 bp, Homo sapiens
cgaaggcaggcccgtgggaggaacgcacctgctgctgtagacgaaggctccatatcaccccggactctttcagccattaagagagctcttgacgatgacgaagatgtaaaagtgtgtgctgg

SEQ ID NO: 277049 - DNA, 122 bp, Homo sapiens
aagaaaagtataaatataaaatctgctaagattcgccgcccttgcgaggagcctcggccgcgtgttgagatgctgtgacctcaccactcacctgtgagtcttgctggaacttgaggccttag

SEQ ID NO: 277050 - DNA, 122 bp, Homo sapiens
gcatcccaaagccatgctctgtctctgccgtcccagtggctcccacaaggccctgaaggtcgctgacccccaggcgtgcaggaggaggcattgtatagatgggtgcacccacgtgctggctg

SEQ ID NO: 277051 - DNA, 122 bp, Homo sapiens
gcgggtgggggggcagcttcggcgtccgggaggtggcaaagtgagtttggactcttggcgcggcccccccgtcccctccccctccccatctcggcgaggcctgccgcccggttccttctcgc

SEQ ID NO: 277052 - DNA, 122 bp, Homo sapiens
cccaccccccgaggggcggggccagagcgggcggcaccgcctcctccccgctgtctgggtcgcaggccttagcgacgggctgttctccggccccgccccattcccaggctccgccccccgcc

SEQ ID NO: 277053 - DNA, 122 bp, Homo sapiens
ggtgtctcctgctggccctgtcttcacctgtggaggagagcttgggctccaggaacgcttcgagcacggctgctctgtcacctctgctgttttccactctctgtgctgagcctcctccctgg

SEQ ID NO: 277054 - DNA, 122 bp, Homo sapiens
gcacctccctgagtacggacatttccccgaggaaggacatttctagtcggagagaaagagcgaactttggggttaactctctcaaaactctgaggtggggagagaggcagcagcccattatt

SEQ ID NO: 277055 - DNA, 122 bp, Homo sapiens
ggaaaataacgtttgtctctcctgctgctgcctcggatttactgatcagtaggattaatacgctttggttgcctaagaaagaaaagggaggcctccccaggcgcgtgaagaacttagaccct

SEQ ID NO: 277056 - DNA, 122 bp, Homo sapiens
tgttgcatacagttggccctccatgtccacagtgggttggttccaggaaacccctggccacgcaaataccgaaatccgtggatgctcaagtcccttatataaaatggcatagtatttgcata

SEQ ID NO: 277057 - DNA, 122 bp, Homo sapiens
gccactcctcgaccatcaccacagactgccggttggcgaggaggccgcagagaaacagggcgagcgggggcgtcagcagcaggcccaggccgtagagtgcattgtagtgcaccaggcaggga

SEQ ID NO: 277058 - DNA, 122 bp, Homo sapiens
gtggtacattcaggtgcccggccctttgcttgtgaccagtgtggcaaggcctttgcccgccggccctccctgcggctgcatcgcaagacccaccaggtgccagctgcccctgccccttgccc

SEQ ID NO: 277059 - DNA, 122 bp, Homo sapiens
gtcattttgaagggttggcccattgtcgattcccagtgctaggatagcagtgtggtgtgccggagatacaggggatgcgacccagtgacttctccccatcctttagctgaggggcaggctca

SEQ ID NO: 277060 - DNA, 122 bp, Homo sapiens
ccctgggtgcccctgggttgggagcagtcggggagcgctgagccagggcgcacgccctgtcggcgctgcgggtgtggggcgcaggagtccttctggccggcccctccgccccccggggaggc

SEQ ID NO: 277061 - DNA, 122 bp, Homo sapiens
aggaggcaggagctccccaaagaaaagatgtttgaagcactggacaagaagaaagcgggacgaatgttcattacaggtaaataaaggtaaattactttaaagctcagaccgtcaggtatccc

SEQ ID NO: 277062 - DNA, 122 bp, Homo sapiens
cctctgccggacgtccttatctgggccacggggtcagctttgtctggagagcccaggggccgggcgccggcgaggctgaggaaggtccagcaagagcaagagtctgaggcggaggaggcaag

SEQ ID NO: 277063 - DNA, 122 bp, Homo sapiens
ggtggggccagagtggatgtgttcccagcgtggtcactcccctgcctcgccagcaggtctcggctccaatcaggaggcctaagccaagtgataagcagccagacaacagccatcccagctgg

SEQ ID NO: 277064 - DNA, 122 bp, Homo sapiens
tctgataccaagtagatagaaagaaattaacttccctatgcaattcaattcaggttcacccggccggactttaagagggtaagtcaagccctcccaaggggttttgaaaaagccgaactacc

SEQ ID NO: 277065 - DNA, 122 bp, Homo sapiens
gtttcagccctgaactgaccaggatgacccgcctacgcggccgtttcagccctgaactgacgaggatgccccgcctacgcggcccatttcagccctgaactgaccaggatgacccacctacg

SEQ ID NO: 277066 - DNA, 122 bp, Homo sapiens
ctttttttttctttttctttacactgcttcctaatttcaaccaacagccctttagactagcggctcctctcctcggttctctagctgcggtgcagacaggtggtttcccaactaacaggggt

SEQ ID NO: 277067 - DNA, 122 bp, Homo sapiens
acacctcccccgtgtgtgacgtcaaaggcaatcccagcccagacacgtgggttggagcagcgtcgcgtttctgggcaattgctcctgagacccaacaggcagcaacggtcccaagggtgagg

SEQ ID NO: 277068 - DNA, 122 bp, Homo sapiens
cgggcgtagtacatctccagtcgttccatctcccgcgctgtcactgtgtccggattgactcgagcctcacgggggatggcgtatgctgtcaccaccagaagaatcccactcaccaggaaaac

SEQ ID NO: 277069 - DNA, 122 bp, Homo sapiens
acactcatagcattggtaaggcttctctcctgtgtggatgcaccggtgaatgtgaaggttcgagctctgactgaagcccttcccacactcaccacacttgtagggcctctctcctgtgtgta

SEQ ID NO: 277070 - DNA, 122 bp, Homo sapiens
aagagcccatgatgagctggatgtttttgttctgttttacaacagcatgcctgacccaggcgaggggccccagctcaggctagtttcccttttctcctctccacactgtttttgctgctgtc

SEQ ID NO: 277071 - DNA, 122 bp, Homo sapiens
ccccatttaagtttctcgtctttgcagtggctttgcttagatccggtgccgccttgaaggcggggctgggtcccagccgtagccaatggagccccgggtgagggttgaggggtggaaggtgc

SEQ ID NO: 277072 - DNA, 122 bp, Homo sapiens
cagcctcattttccttaatacattatgtctgaccttgggtgattttaattcttctaggcccgtaattttcttttggtgactcaggaggagaaagctgtgctttaatctcatggcatgtttgt

SEQ ID NO: 277073 - DNA, 122 bp, Homo sapiens
ctccgctctgctccctggtgtgttgattcttcccccagctgctgcctaatggagtccaggcgctcgcgtcacaggaaatgcctatactgccctcctcactcacttccggtggcaggtatgga

SEQ ID NO: 277074 - DNA, 122 bp, Homo sapiens
ttgcgacatcactcagaaaattacagtcatcagtgtcctagctttattacacccccagcacgcacacaagaaatgtaacttaactgattatcctcacaaatcagtccggaaaaaattcaaaa

SEQ ID NO: 277075 - DNA, 122 bp, Homo sapiens
gcctttgtcaggctcacggcctgaggtttctggcctctgtgatctcccctgggaacaggacggggaccgggccgcactccagcctgcccttcgtgagtttcctgaggtgtcctgcaatggcc

SEQ ID NO: 277076 - DNA, 122 bp, Homo sapiens
tgcaagtggtctcacagctagtaaaccacagataggggcccaagacctggtgagatgatccgagctcgagttcctctcccatgactcagattaaattgtcttctaggagaggctccctgact

SEQ ID NO: 277077 - DNA, 122 bp, Homo sapiens
gggctggttccccagctccttccagcgtggccgaggagtccctcctgagcgtgtgtgtctcgtgaaagcgcacatgtttgctaacatatctagttgggttcgatccacacaagtgctattct

SEQ ID NO: 277078 - DNA, 122 bp, Homo sapiens
gactggaatgagaagaaaacatgttttttatgtctagtctttataaattgctctccttgacgttcctttgtatatcatagaaagaagaccccagggctttccgagcagaatggcaaaggagc

SEQ ID NO: 277079 - DNA, 122 bp, Homo sapiens
gttggtggggcaactcttcactgtgcttgcacctgggctggggcaggatcctgaacctctcgggggcgtagcccgcggaacgtggtcggcttgttggtgaaggggtgccactggccctggat

SEQ ID NO: 277080 - DNA, 122 bp, Homo sapiens
ggctgcagccggcatggggggttgctgagagcgagcactcctttcctctggcacctcccccggctactggccactggactctggccagcgaggctcggcccctctggcccccagtctggcgc

SEQ ID NO: 277081 - DNA, 122 bp, Homo sapiens
ttcagaatatctgtgcatggatatattgtcctgcctgtgttccagcatgcttatttcaaacgtccagtgttgtgtgtgaatatgtgttacacctaggatgggcattatgcaaaagcacaaag

SEQ ID NO: 277082 - DNA, 122 bp, Homo sapiens
tggctgcagtcgctggtctgtctgtgacttccattcatgaactctctgaagtcgctgctccgcaagtccgccacacaagcctggttcaggggatcacacacacactctccttcctcccttcc

SEQ ID NO: 277083 - DNA, 122 bp, Homo sapiens
tgaaactgtgtgaaggataagattgttcgcatcaagatccaaatcttgatttcatattaacgcctaaggattgcctgtgtgctggaaatatatttgaaactcaaccagtatgcccagcctat

SEQ ID NO: 277084 - DNA, 122 bp, Homo sapiens
atcaacagtgccaaggtcgcacaaccccccgttaaagataggaaactccccaaaggcgggcgccatgtctgtttcatccagtattccagggccaacccctcgaatggcagatggatggacaa

SEQ ID NO: 277085 - DNA, 122 bp, Homo sapiens
gatggaagataattcacatcagtgtctttcccaatgttaaatacatatttaccctggcatcgtgaaagggtatttgatcctcttatcctccctgaagtgtaactcatcatgccttgttcttt

SEQ ID NO: 277086 - DNA, 122 bp, Homo sapiens
ctgcgaccctcttctctcagtctgccttactaccatgccgctctacgagggcctggggagcggcggggagaagacggcggtcgtgatcgacctgggagaggcctttaccaagtgagtggccg

SEQ ID NO: 277087 - DNA, 122 bp, Homo sapiens
agtatggagcctgtcacatagcaggcctcataaatacttattgaaagaattaataatagacgtagaaccaacgggcttagtaagcccctggagaaaggaatcaaagatgtttctgaggcctc

SEQ ID NO: 277088 - DNA, 122 bp, Homo sapiens
gcttctcggaggtagagagagagagagagcaagaggggagagagcgagccagcaagccagcgagcctgcagctggagtcagcagggaggtcccgcaggcaatgccgcctttggtgaagaggc

SEQ ID NO: 277089 - DNA, 122 bp, Homo sapiens
gcagccgaaaggctgaagtgttccctgttcgtgcatccctgggacatgcagatggatggacgaatggccaaatactggctcccttggcttgtaggtttgtgtctgtgtggggtctggaacag

SEQ ID NO: 277090 - DNA, 122 bp, Homo sapiens
ggcagcccctgcggaaggcgagccgggcggccagggctgcacctctgcagctggcgacggcgctgccacctcacgtgcctagcgcgccctgcagccgtcagcccgccgcctgctggaggaaa

SEQ ID NO: 277091 - DNA, 122 bp, Homo sapiens
ggtgttgcttccaggagaaaccctgaacggagagctcgtcctcttaccaggtcaaggtcccggatcctcgggtcccttgacgctctacccatggaggaggaggaggaagaggataagtacat

SEQ ID NO: 277092 - DNA, 122 bp, Homo sapiens
gaggtggaagatctctccaataccacacctgaggtgagacaggaagaagaatagagcctacgccagtaagtcaggtgctgtcaccatgctttgaactccatggacgtttagcaggctgtgag

SEQ ID NO: 277093 - DNA, 122 bp, Homo sapiens
aggggaaaggaggggtggggcggggagcgcgcgcgggctcggccagtgcggggtggtgggcgggctgagcccggggacggcgcgggaggggggagggaaggggggcagctgtgggcagggag

SEQ ID NO: 277094 - DNA, 122 bp, Homo sapiens
ggcgcgccgcgtgcagctggcaggagaggtaggcggccgcctcggtgtgcttctgcagctcggtgcccagcacggtggcgcggtggctgcggcggcgcagctcctccaggaagcggcgctcc

SEQ ID NO: 277095 - DNA, 122 bp, Homo sapiens
cgttttgaccgttgggccttgtcagttccttaggactcgcctgggtctccagtcagtggccggaggcgactcccggattgagcctaagtgcgtgcgttgggtgcgcgcccaccacagaggtg

SEQ ID NO: 277096 - DNA, 122 bp, Homo sapiens
tgacctcgtgatccgcccgtctaggcctcccaaagtgctgggattacaggcatgagccaccgtgcctggccttccatgttgcttttttaaggctagtcaagtgaagcagtgggaatgagaag

SEQ ID NO: 277097 - DNA, 122 bp, Homo sapiens
tgtatgggggtgttttttggtctgttgttcacagggctcgttctcactgcttatgttcttcgggattctgggagccaccactctatccgtctccattctgctttgggcgacccagcgccgaa

SEQ ID NO: 277098 - DNA, 122 bp, Homo sapiens
tgcgcagactggagccggttcattcataaagaaacagaaaggaacccggggtcctaaaggcgtttgcgcatttacagcctagctgaagtggcttcgaagaattatggatggaaaatacccgt

SEQ ID NO: 277099 - DNA, 122 bp, Homo sapiens
gctgagcacactgctgggagcggggatgagctgtgtttctctggatttttcaagctcatgcggacgacagtggaattgacgcaatactgacgtaggtaaaggcgttgctaagttcgtagtgg

SEQ ID NO: 277100 - DNA, 122 bp, Homo sapiens
acaacaaagccccgggatggggatgatgcactccgcctccgccgccgccgccggggcccccggcagcatggaccccctgcagaactcccacgaagggtaccccaacagccagtgcaaccatt

SEQ ID NO: 277101 - DNA, 122 bp, Homo sapiens
gcgcctgccgggagggcgagcaggaggcggcgggcaaagcctacttcgcttagttttgtgcgcctgacagcagcccttcagcaaggtgaattctttgaggaagggtctcattcacaagctgc

SEQ ID NO: 277102 - DNA, 122 bp, Homo sapiens
ttttgcccctccgccgccgcggctttttgcccccaccttgcctcggctttttgaccgccgcggctttttgccccaccaccgacacagctttttgcacactcgtcgccttggctttttgccgc

SEQ ID NO: 277103 - DNA, 122 bp, Homo sapiens
gaggtcctgtaaagcgcacagagctctcgcatgcgcttaacccccaagcccgccctactccgtgcaacactctggagagtaaaaaccagctttgtccatatcttgggaaaaaatccgttaca

SEQ ID NO: 277104 - DNA, 122 bp, Homo sapiens
tggtgaagctttttcccattaaccatgggagctaagaggcaactctgcaatgccatgtctcggcaagtggcagcccccggggtttataatcccatcaggctcagaaattgggcctattatgg

SEQ ID NO: 277105 - DNA, 122 bp, Homo sapiens
cagacgtcttgacctccttttttaagcctttctgccgccttgggctggctcctgtgggcccgaggcactctgtgggcacaaaccagggaagcccagggtcccctgggccctgcccatgggcg

SEQ ID NO: 277106 - DNA, 122 bp, Homo sapiens
ataggtccctcccccaccccgcccaccatgacatagtctcctcccctgccccgcccctcgcgaaaccacaagaagccccacccccagggccatagcactaaatacctccctcgcccaccccc

SEQ ID NO: 277107 - DNA, 122 bp, Homo sapiens
cttagggctttttctgtctgtactcattgtcagttacacatgctgagctgctttagtcctcgggccagattatacagaaagtaaagcaaacaaatgaacaaaaataacaaaatccccaaact

SEQ ID NO: 277108 - DNA, 122 bp, Homo sapiens
taagaaacgtttctttttaaacctctggccagatagacagaggcttctcacgtgcacatccgtgattaaagacctcttcttacttaaagtgaattacaaattacaagtgagctatccagttg

SEQ ID NO: 277109 - DNA, 122 bp, Homo sapiens
ttatatggaacccccaccccctcccccactctcccactctgttcgttctgaatgtcttcacgagcgtgcatcagggcgcctggctcccccacctcagccagtgagtcagacacgggtttcgc

SEQ ID NO: 277110 - DNA, 122 bp, Homo sapiens
cagcaaaaactttaataaggtcacagacatgttactgtagaccaagtgcactgttgagagcggactgttactatgttaggtgcgggacagaaagatttctagagagctttgtggaagaggtt

SEQ ID NO: 277111 - DNA, 122 bp, Homo sapiens
tctgaagagaaaactgccgtgagttatatttccttgcaacgcaattctgctctcagcaaacgttggcggcgccactggacacacgtccctccccaagagcacagccgggcatcccggccttg

SEQ ID NO: 277112 - DNA, 122 bp, Homo sapiens
cacgaatctgtgggttggctgtgggttctgaggacttgcttgggcctgtgaatccgtggccggctctgggtctccctggacttggccatgttcacccgtgaatctgtgggccctgtgggtcc

SEQ ID NO: 277113 - DNA, 122 bp, Homo sapiens
tacagggacaggctcccaataacaacacccagcacggtgccatcaacaccaccacgcacacgggggctcaacggaacagacatctccgcttcttcaatgaagacactggagggaaattgctt

SEQ ID NO: 277114 - DNA, 122 bp, Homo sapiens
ggcatctagggtcttgtaaggaaggtaagttccaccccagcctcctgcatcagagcaaagcgatagacagaatgattgtgagtcgatcctggcgtgggcgttctgtggatgctgggcctcct

SEQ ID NO: 277115 - DNA, 122 bp, Homo sapiens
tctctgggccactggggtactcttgttgaatgggggctggcagggccgggttgaagctctcggggctgtacttgtgaccccagccgatgtagatgttctcaaactttctggagaagcagtga

SEQ ID NO: 277116 - DNA, 122 bp, Homo sapiens
cgctcaccgacctgctggagctcccgtctatttgccgggggtccaggctgggacctgggacgagcagacacagtgcaaagtgcacacagttgctgcgcatggagtgataggatggtgggtcc

SEQ ID NO: 277117 - DNA, 122 bp, Homo sapiens
ggtgtcggcccaggcagaacggggctcctcgagttctgcccgcccccgcccacatcatcacgggtgagcagactgggtgctctgggactgtacccccgaccctggtgctctccctgcaggcc

SEQ ID NO: 277118 - DNA, 122 bp, Homo sapiens
ccgcggcacatctggatggagtcagctgcctagcgccaggggccagcacggcccagccagcggagcgcggcggtgagcgctagggaggccggcgcccgggccgcctccgcggccgaccccct

SEQ ID NO: 277119 - DNA, 122 bp, Homo sapiens
cacggccgtctccaatgcacagtgcacggatcgcgaggggggcccacggggaccaccttccgtggtctttcctgactcccactaaggtctggagggagatccaggcagcgatctgccccctc

SEQ ID NO: 277120 - DNA, 122 bp, Homo sapiens
tctcgattctacttttgttgggtattggcctgcctactggctgccctctttcctatttctcggccaggcgctctgggaagtagataccgtacctgtggtcactgctggcgacactgaagctc

SEQ ID NO: 277121 - DNA, 122 bp, Homo sapiens
cagcagaggaacgcctcagactttgttgggaaacgaatggctctgaaagttagctgaagccgctggaatagccccccagccccgaggcggggcaggtgcctgccgttattggcttttcgacc

SEQ ID NO: 277122 - DNA, 122 bp, Homo sapiens
cactgcttatggcctgtttccgcctctgtctcctgggtaatggggaccacaggtgcgcaccgccacgccaggctaaagaaataaagtgatgtactgtatgaagaagtgccgtaaagtgatat

SEQ ID NO: 277123 - DNA, 122 bp, Homo sapiens
cctcgggatggtggcctgtgcttgagagccccctccgggtagagtcgtggctgctccatccgaggacctctgcggtggtgggatggacaaaaatgccgggaatttaacctgcagttctgcta

SEQ ID NO: 277124 - DNA, 122 bp, Homo sapiens
ggccccgccgcgggtgcgcaggttggttccggagggagaacctggggaccggctcggcgacgcgctcgggctgagggggcccggggtctttctgccggggccccgtcctctcagccgggacg

SEQ ID NO: 277125 - DNA, 122 bp, Homo sapiens
gcaggagattcactgtcctatccctttgattgttttcttcccctcttttccactcccatacgaccacactcatcaaaataggaaacgatgtcatcacttatgtgcatgcctccccttcgtgc

SEQ ID NO: 277126 - DNA, 122 bp, Homo sapiens
gggagggaacgtggagtcgggatctcggcggcgtgggcgggccggctggcagccggcaggcgagaaggaatctcccggcccacgcgccccctcccagcgtccagcctcgcacttcctcgcgg

SEQ ID NO: 277127 - DNA, 122 bp, Homo sapiens
aagttacaggaagggcttggcagatgggtcagggaacctggtgatttggacttggcaactcggcctcagtcagactcttgctggggccagtgcagtcccatcttgtgtttaacctactttga

SEQ ID NO: 277128 - DNA, 122 bp, Homo sapiens
atctaacacgagggcatggaagaaggagttggatgagcggtggcccgaatgaaaggcatccgtgctctggagtctgcaagtaatttaagcttccaagcctctaaagatgctccccgcaccct

SEQ ID NO: 277129 - DNA, 122 bp, Homo sapiens
tagccggaagggcctgccttcagcgggtgctgtgcaggaaaccaatagccgcctcttggacgggctcctgtcagtcacgcttagctccgcccccaggattaaggcccgcccaggggcttccc

SEQ ID NO: 277130 - DNA, 122 bp, Homo sapiens
caggcgtttcggcctagctgccgccggtccaatccgcagcgcttccgtgccccactttcccgcgtcagcctggctccggcctccaccagggggtgctagtgagatcccagccagcctcagag

SEQ ID NO: 277131 - DNA, 122 bp, Homo sapiens
gttagtggtgaaatagggctctagttaaccttttatttatgaagtctaatttagtgttcccgtggctagttgcaagcattttacagtgatcacccagtttaatcttttgtatactttttaga

SEQ ID NO: 277132 - DNA, 122 bp, Homo sapiens
gtaaatgtggaaggcgcaagggtaactcgaggcctgcggagggaacgagatgagggaggccgcaagagtcaccgcagagaagagggattggctgtcttggaccctccgagggcctcggggaa

SEQ ID NO: 277133 - DNA, 122 bp, Homo sapiens
ctccagatccaacaatcttattacacattcataagaatggtggaaaggaagaaaaaaagccggcacagttctgtctgtttatctgtttatctagcttgaactcaccttacaaaaaggttgtt

SEQ ID NO: 277134 - DNA, 122 bp, Homo sapiens
gaggactcccagtacggcaaagggaaggcgccaaaagttgtcagatggcgaaggaaaccgcgaaattcgccattgtcacatgatggagcaacctatcgaaagcggagggaaaggtgccgaag

SEQ ID NO: 277135 - DNA, 122 bp, Homo sapiens
ctaacacattataaccaggtcccccaaactcctctccctttatctagtcccacagggacccggtcactctttctgccacaaagatgccgatgcttggacatctccagtttcgaggaactcac

SEQ ID NO: 277136 - DNA, 122 bp, Homo sapiens
agaaagttctagtggcttgaggtatccgcaggagcggccgggtggcgggaggaaccgttacgggaactgaagttgcgggtgagcgccagccgcggagcagggccctgattggaggccagagg

SEQ ID NO: 277137 - DNA, 122 bp, Homo sapiens
gcatcatgtttgtgagatgcagcttgctcattctcacctgctctctggtcatcccgtgcacgaacagacagaacttattctttctactgctcacagacatttggggttgtttccagttttta

SEQ ID NO: 277138 - DNA, 122 bp, Homo sapiens
taaagtcaaagagagaaatcaaggttaaacctgacaaataaaaacagatgtggtctcaggcgagtagagacattatgcagaaagactattgcatcagggggaaagatggctgtaaaaacaat

SEQ ID NO: 277139 - DNA, 122 bp, Homo sapiens
cctactcttgtctttggctttccctaccccttgcttaaaccaggctgctgtccaagctcccgctggtcgggatcatccagcattccctcctgtctccagggatcacagacaccagcaccttt

SEQ ID NO: 277140 - DNA, 122 bp, Homo sapiens
gcggtgaaacgctgtccgaatgagagggcggccacatgcttaaggtgccagtgaaaaaaccgacagccagaattctacagccaggaaagatgtcctccagaaataaagtaaagtaatgccaa

SEQ ID NO: 277141 - DNA, 122 bp, Homo sapiens
tgcttcaggagattccttcattttagaaaaggccctggaaatcctcagcctaaccacgtgcgtgtatgagaaagcagagtactgtacactcgctcttgtatttacctcctgaggcaatcgtc

SEQ ID NO: 277142 - DNA, 122 bp, Homo sapiens
acgcgcgctcctggaccgcatccaaatagaactctcccttatgcccagggctcgatgtggcgaccggctgtgggggtcacggacccctgcttttctggggtgtggctgtagttgtagtataa

SEQ ID NO: 277143 - DNA, 122 bp, Homo sapiens
gcaggacagcctcatgtgattagaccactttgaaactcagcttagtttttcacaacataacgcagcttctgaagtctcagagacccagcaggcagtttaattctcctgttctcaattatttg

SEQ ID NO: 277144 - DNA, 122 bp, Homo sapiens
ccatcccgggctctgggctcctagaccggggtgggccctgccaggagtgggcctgagcctcgcacgtcctctgaaactacgctatgctctgcttttgcggcgcgatgggcgtgggagcgggg

SEQ ID NO: 277145 - DNA, 122 bp, Homo sapiens
gcctgggagcctgagttggggaaacgggggactccagacaacacccagcttggatgccggcgtccacttctgctcagagaatccagtcaactcagggctttgggctttcccatgaccaaaga

SEQ ID NO: 277146 - DNA, 122 bp, Homo sapiens
ctccttctaggcagcacaccatgaatccccggtgccgtctcccggaggaacggcggtgcacggccccacactcaccaacgccggcctgaggtcgtattactgtaatttcccataatgcttaa

SEQ ID NO: 277147 - DNA, 122 bp, Homo sapiens
ccggcggcgcggagctcctccacagagtctgggaatttgggggccatcccgtggccaggccggcgagttgggagctccttccttcctcccccgtgtggtgcggcacaccttccgggcgcaag

SEQ ID NO: 277148 - DNA, 122 bp, Homo sapiens
aagtcctgctgggattagaagcggcttgtctgggatttacattattgtggtaaaataggccgttggtcttaggtcagagcaaagaggagggttaaatcccagggagaaagtccgtctcaaag

SEQ ID NO: 277149 - DNA, 122 bp, Homo sapiens
gcacggagcctgggccggcggagaaaatcagatgcagtctccttccctttggtgactatccgtgggggtttctcccggtggaaatgagcgacacacacaccacaccacacactacgttcaaa

SEQ ID NO: 277150 - DNA, 122 bp, Homo sapiens
ttgtctggaaacagactcaggacaagtgtgctgcacagccagcttcctcaaacccactctcgccactgtagctgcccacagaggcacctcccaagccataggcccctcctaggccagctcag

SEQ ID NO: 277151 - DNA, 122 bp, Homo sapiens
gagcctgttattctctatcacgtaaattgtcctccgtgtatttacgttaaattttttgtacgtttttctgggaattctcagggcctagaaaaatattttgttaaagatttattgactgacca

SEQ ID NO: 277152 - DNA, 122 bp, Homo sapiens
gttccccgcggaagaggggtggagtttcaaccttttaactccaccttggtctgtgcagcgcggaccaacccaaatcgccagaaaggaggggcgtggcttgaagtcccctcctccatcccggg

SEQ ID NO: 277153 - DNA, 122 bp, Homo sapiens
aggggtacgtgagaggccctctggagcagatgagggaggatgggggcggggagcctgggccgggccgttacctgtcctgggtgtttatcatcctcggcggctctgctcagggtgggaggagg

SEQ ID NO: 277154 - DNA, 122 bp, Homo sapiens
gagaggaggagcaggcgggggtgccaaggtgtgggctgcgccctggttagggggcgagcccggcttgtttatgaggaggagcgcggaggaggatccagacacacaggcttgcgcgcccagac

SEQ ID NO: 277155 - DNA, 122 bp, Homo sapiens
cagagctgcaagatggcgggggggctacgccacaagctgcaatgagctgcccccactctccggcccccacagtcacccccacattcagcaatgggaggacacggctctgcgtccatgaccct

SEQ ID NO: 277156 - DNA, 122 bp, Homo sapiens
tgagtccgggcccagcaggtctctcttgcggagcaggggtggcgcagggagcatgcgcggcgcagggagcatgcgcagggccggctgcagccattctgccatccggcgcttgtgcaggtgcc

SEQ ID NO: 277157 - DNA, 122 bp, Homo sapiens
gacacaggtataaaggcctctctacgccgcgaacttgcttctagagcgcactccagcctgcgaactgataaaaccttcctcgagctccgccgcgaggccctgccccaacaccccctctctta

SEQ ID NO: 277158 - DNA, 122 bp, Homo sapiens
ggccactcgctgcaaaaaacgttcgaattacccgccctgcgggaaaggaagcggaagtgacgtagggctagcggtctgcggccctcggaaccccgagtcttttccacccgtcttcacctcta

SEQ ID NO: 277159 - DNA, 122 bp, Homo sapiens
aggggctggctgaggggctgggatggggtccccggggcgcggagctgcacaccagcccctcgcacctaggcagaaggtccattgccctctgccccgcagcctgcccgttcccaggccagcga

SEQ ID NO: 277160 - DNA, 122 bp, Homo sapiens
tgaatattggttttttcatctataagaggccgaggcaggcggatcacgaggtcaggtgatcgtgaccatcctggctaacacagtgaaaccccatctctactaaaaatacaaaaaaattagcc

SEQ ID NO: 277161 - DNA, 122 bp, Homo sapiens
tgggctgcggcgaggcgagaatcacgcgcggcgggcgggcgcctggagtgtttgggtttgcgggccggggcgggccgcggcggaggggaagaggaggagccggcgcgcgcgccacccaggcg

SEQ ID NO: 277162 - DNA, 122 bp, Homo sapiens
ccgcgcccgccgcccccgaccgccctgcacaggcgcggcccgtcctgccgtcgcccccgtcgtccccgccccggcgccccagccgcatcccccgcccccgacttccagcagcttccagcggc

SEQ ID NO: 277163 - DNA, 122 bp, Homo sapiens
tgtggaaaggccgtgcgggtcctgagtgtgtgtggaaaggccgtgcgggtcctgagtgtgcgtggaaaggccgtgcgggtcctgactgtgtgtggaacggccgtgcgggtcctgactgtgtg

SEQ ID NO: 277164 - DNA, 122 bp, Homo sapiens
cacgacgactgaaatctgcaactactgcaaagacgcgggcacttttacagtgttctgctacggagccaggacaaaggccggtcagaagccggaccagcagtcagctggtgacgacgagcctc

SEQ ID NO: 277165 - DNA, 122 bp, Homo sapiens
gcattgcacagtcatcaaagttaagtgtgtttgtggggtgcttctgtgccccaggggaggcgcggggtcaggaggagcggaggctccactctgcaccccaccccccccacctccgcgggtca

SEQ ID NO: 277166 - DNA, 122 bp, Homo sapiens
tctggcttgtgacatggctgtgtgggtttaatatcctgtcatgtcctggcttcttgacttcggacacattgtagactccctctgtgtcttagtatcctaacctatgaagtgggtatacttat

SEQ ID NO: 277167 - DNA, 122 bp, Homo sapiens
gaaatcagttgtttgctgtcaggtttggatccacctctccgtcctttgatccagagctgccgaaagccacatactgttttcatcacctcagccaacgtctggagagcctatattcgtatagc

SEQ ID NO: 277168 - DNA, 122 bp, Homo sapiens
ctctggcagggaggacgtgctcatctctggtacctgaaaagaagttgcccatgttattttcgctttatatgtgacgaaacaaacatggtgcacttctttttcggtatcaaatatctccttga

SEQ ID NO: 277169 - DNA, 122 bp, Homo sapiens
cgcttgacagtcgggcccggcaacccggcccccgggcggaaacgaggaaagtttcccccgcgacactcacgcagcccgactcccgtagctgcagggattgtgagtttttcttgaaaaagaga

SEQ ID NO: 277170 - DNA, 122 bp, Homo sapiens
gctggagccgcaacgcaagttccccctgactgggggacgccgcccagctcctggagcctgcgaaggctcttgaagctgagcttcccagggataccagaagggacactctcgtgcaattccgg

SEQ ID NO: 277171 - DNA, 122 bp, Homo sapiens
cccattctctcggtgacccgtaactgatcaaaagtccccccgcaccgcgctacgctctcgcgattcctcttagatcccaaccgtgggtccggccggtccgctagatgcgcttcccgccaaat

SEQ ID NO: 277172 - DNA, 122 bp, Homo sapiens
gagggtgagaaacatgctctgagtaacgttcattcctgctgcagtaaatctatgagtgcccgatgtgggaaaatcagaccccgagcccagctgcccagacgagcctctagcgttttgcctgt

SEQ ID NO: 277173 - DNA, 122 bp, Homo sapiens
tggaattgggtctcaaataggttaagtcatttaaacttggtcatgtgttcagcaaggcatcggtgtcaggattgaaacccaaggctgctggcttctgagctcatgctgtaccctgggcaggc

SEQ ID NO: 277174 - DNA, 122 bp, Homo sapiens
cctccgcttcgcacctgggccaggggcgtgtccggggcgtgccggtgtgaaagtcaccttcggtgcccccagctgggcgggagggggcgcgcggggcgcggccgggattggagcgccgcgga

SEQ ID NO: 277175 - DNA, 122 bp, Homo sapiens
tgtgatccgcccgcctcagcctcccaaagcgctgggattacaggcgtgagtcactgcgcccggccaatatgaactcatattctatataggattctgggagtaatttttgtgttcatttgttt

SEQ ID NO: 277176 - DNA, 122 bp, Homo sapiens
ggaagtgcctgcatttgtcccccgactctctcctctgcacccactttctgcaggtatcggcgcaaggctctccagtggcacccagacaaaaacccagataataaagagtttgctgagaagaa

SEQ ID NO: 277177 - DNA, 122 bp, Homo sapiens
ttctgggcatgcgcagaaccgctctatgtccagctgagggagtgcgctgtagccctcgcgcgcatactcgtacaggaggttccggtttcgtttctctgtagtgaaacttctccttggactat

SEQ ID NO: 277178 - DNA, 122 bp, Homo sapiens
gagctgcccatcaggagtgcaactcgggagcggattggccgcgtgaggcggggcacggcgcgacgaaaaaaggggcccaaggggtggggctgacgctgcagctggcgcagctcaggattaga

SEQ ID NO: 277179 - DNA, 122 bp, Homo sapiens
tagaagaacatccaaggagaaacagagacaggcccaagagatgaagagtgagagggcatgcgcacaaggctgaccaagagagaaagaagtaggcatgagggatcacagggccccagaaggca

SEQ ID NO: 277180 - DNA, 122 bp, Homo sapiens
agactggcccggtagtcaggggctcaggagcagatcccgaggcaggctttgctcagcctccgacgagggctggccctttggaaggcgccttcaacagccggaccagacaggccaccatgacc

SEQ ID NO: 277181 - DNA, 122 bp, Homo sapiens
gatgtgaagccggccaagaccgtcaacatttagtgcctcctgagcagctcttggttttggcgtcttttgggtcggcccatgtggtttgagcacccagccaggcggtctctttagaggatcct

SEQ ID NO: 277182 - DNA, 122 bp, Homo sapiens
ctggagcacctggcagagactgtcagccctgagtggccagcagagactgtaccgcagccacggggaaaggagccattagactcagcatcttccgttcccacttggtaatctgcccggtcctg

SEQ ID NO: 277183 - DNA, 122 bp, Homo sapiens
ggagtttgaggttgcagtgagctatgatcgtgctgccgcatgccagcctgggcaacagaacgagaccctgtctctaaagaaaaatataaaaagattctgctgtgttgcagatgttgagattt

SEQ ID NO: 277184 - DNA, 122 bp, Homo sapiens
gtggccgcgttatatgacattccatgttatgtgacattccggtgtgctggcgtgtggctgcgttatatgacattccacgttatgtgacattctggtgtgctggcgtgtggccgcgttatatg

SEQ ID NO: 277185 - DNA, 122 bp, Homo sapiens
tggggaccggcgtccgggattggtggaaggagaacggcctggggtttgcaaagcccaggtcgagtgaggccttgagccggtggatttagcagcactagactggcttggcaacaggtccgtct

SEQ ID NO: 277186 - DNA, 122 bp, Homo sapiens
aaagctgaatggaggttacttgggagctaccccaggaagaagcgctgtgcagaccatcatcgcagggtggagagtagccatgagacgtgtgtggtggcctctggatgctgctgtgctgcctc

SEQ ID NO: 277187 - DNA, 122 bp, Homo sapiens
cttaggtggcagctgcctcctgtcctctgttgctttcccaagggtgaggtgagccagcctcgaccaggggcctcctcggtcctgggaagcaggcggctgggccggcggcttcctgccttggc

SEQ ID NO: 277188 - DNA, 122 bp, Homo sapiens
ttttatacattttagggagacatatcaatcagtacatctaagatgtacatttgattggttcgatctggaaaggcaggacaactcaaagcaaggcttccaggtcataggtagatttaaagatt

SEQ ID NO: 277189 - DNA, 122 bp, Homo sapiens
tccggcctggcgtgggctttgctgctttctctgcccggtggcctgaggagctcgagtgcccgcctgcccccagagccctttcacggtcagggcctgagctctgtgggtgccattaggaggag

SEQ ID NO: 277190 - DNA, 122 bp, Homo sapiens
aaaaggtggcagggtctgtgttggaagttcaagttgagtttaaagattgttaggggcaggcgcggtgactcacacctatattcccagctttttgggaggccaaagtgggtggatcacttgag

SEQ ID NO: 277191 - DNA, 122 bp, Homo sapiens
cctgtttcacaaagtcgtgttaagatccccggtagctctttctcttgaggtgctcatccccgagatcttcctgcctgtacttcaaatttcaattgaaatatcacctccttagagtctttccc

SEQ ID NO: 277192 - DNA, 122 bp, Homo sapiens
ctgtgcgccctaccccagctaggccccttccccgcagaggatgtgtttctgttgtcctcgcgggaccaccggaccccgctgctctatgccgtcttctccacgtccaggtgaggggcaggagg

SEQ ID NO: 277193 - DNA, 122 bp, Homo sapiens
cggagcggtaatttgtcctaggcctctcagatgaccagggccagggtcagagtgaggccccgagtccggagccgtggacggggccctaggcgacaccagggcgccctgactgcggcctccca

SEQ ID NO: 277194 - DNA, 122 bp, Homo sapiens
tgtatcgatttcaaaggatacaatgaacttgacagcagtttgagaatcactaaacttccccgcatacaacctcggtgtcaaaacaagggaataaaaagggaggcgtgagaggaggttgccca

SEQ ID NO: 277195 - DNA, 122 bp, Homo sapiens
tgctcatggggatgccacttggcatgccgtaggccacagggtgcatggccattcccagcacgtgaccacggcaggtgctctagtggacgtgagcagcgactctggttgacacagaggccaca

SEQ ID NO: 277196 - DNA, 122 bp, Homo sapiens
aaaataatgcaaatgcacaataaccaggctgtctgtttccaatttccttggactggatggcgagaatcccactttcctggacttttccacccacatttatgatccctcgcagcgtataacca

SEQ ID NO: 277197 - DNA, 122 bp, Homo sapiens
agaggctgggtgcgtgcgccctgggcggggcggcgggctccctccggagaggccccagcccggcctcgtgcccctccccagcaggcttccggccctgcgcacagacccaaatggcgcgggag

SEQ ID NO: 277198 - DNA, 122 bp, Homo sapiens
tccaggctctggtcggtgatggccatgatctgctgcaggacgtcgctcgtgtcgaggcgccgcggggcggggggcgatggcgcggggcgcggcggggcggccatgagcggcagggccgggcg

SEQ ID NO: 277199 - DNA, 122 bp, Homo sapiens
ggcgcagggccttgggcggattctgtgagacgccaatgcagcggagaaggcggcagggggcgccggtccctaacatgcgccggtttagctcggtgttaagggtcgcgccaaccgggcaatcg

SEQ ID NO: 277200 - DNA, 122 bp, Homo sapiens
tcactaaatattggaaggaggccacgttacagagcagagactgaatttctcatccacatccggagccaggcattctggaaatgaggtctgtttgccacctctccccaaagcattgatctctg

SEQ ID NO: 277201 - DNA, 122 bp, Homo sapiens
ggcagccctaggcaggtagccagatggagatagagttggaggagaagttggtccactgcccgctgactgggccaccctggcacccccctcgaggggagctgggctttcttctccaccttgct

SEQ ID NO: 277202 - DNA, 122 bp, Homo sapiens
ctggccagcccagccctgcccgatgcctggcccagcagcccttgtcccacctcccgctcacgggctgcctgagcacactcttcctgcaggcggccgagatcttcgtggagtcagaactgcct

SEQ ID NO: 277203 - DNA, 122 bp, Homo sapiens
tccctcctcttccccaccttcctccactccctcccttcccctccccttctacctcctcctcggccagctcaggttgcagcttctctggggaactgctcacctttccggagcaggggaagctg

SEQ ID NO: 277204 - DNA, 122 bp, Homo sapiens
gccgagagtgacagggagtgagctcacccatgccgacagctagggcagtgttgggagcgccgctgccctcagttctgtactgggtcccaggcgctgccaggaggagccgaggcgagtgggcg

SEQ ID NO: 277205 - DNA, 122 bp, Homo sapiens
catcctgcacgcttgtgttctgaagcaggtgctaactctcttctgggccttaatacctctcgttttttctcttttcctctcaacaactgtcctcactacacaacttggccagggcctcccgt

SEQ ID NO: 277206 - DNA, 122 bp, Homo sapiens
aagtccctggtataaaatggctaggacagtcagccttttgtatctgtgggttttggtccacgactcaaggttggttgaatccttaaatacagatgctggacatatgtgttttattattattt

SEQ ID NO: 277207 - DNA, 122 bp, Homo sapiens
gaccccaatggacagctgctctgtgctcccgtgagcacagacctgcaggggagggtggcgcgtgtgaggagcacctgctgggacattgaaaaggacaacggcagatgcagcagcctcagggc

SEQ ID NO: 277208 - DNA, 122 bp, Homo sapiens
gcgccccgcctgtgcgccggccctgagacttggaacgatggtgcaggcaggaggggtcaccggtagggatgccactggagggactgggccgtccacacggaccagctgacacactaagtgct

SEQ ID NO: 277209 - DNA, 122 bp, Homo sapiens
agacaattatgggacaaaatgacgtccccaaaggacgtggggctgtggtgtggtgagactcgtcggagacgctggacaccagtgctgatgccaatggaaagaaagggcgtggggggctgtgg

SEQ ID NO: 277210 - DNA, 122 bp, Homo sapiens
ttgagaagtatgtatagaataaatgtgaaaccatatttttttatttagctatttttctcccgagtcaactgttgatctgttataataggatatgccagatgctatacatttttaatcttctg

SEQ ID NO: 277211 - DNA, 122 bp, Homo sapiens
ctcccaacgcatcactcccgctgtgcttggatctctccctatctcacccttattccactccggctgcttcagttatgaagcccgggctctgagcgttcaccaggcatcagccacataaccag

SEQ ID NO: 277212 - DNA, 122 bp, Homo sapiens
agactgcactctcctccctggtggccagggagtgaggcatggctctgagacctggtggatcgatgcgcttgactgcacaggtggatgcagggactgttgaggattttgcccatggaggtttt

SEQ ID NO: 277213 - DNA, 122 bp, Homo sapiens
gggggctgtgcgtgccaatctggctggcaaagagccgcagttatttgcggtccaggctggcgtgtagctgggcctcccgcaccatgcggtcgaaggatcgcgtgttggtctcctcgcgcacc

SEQ ID NO: 277214 - DNA, 122 bp, Homo sapiens
gagcacacgtgtggagcatggttgtggcatgggcgtctgggcccctctcctagacctccacgaggtgcggacgcgcctctgccccgcccttttgtgcgccctcaccactagaaaaagagttt

SEQ ID NO: 277215 - DNA, 122 bp, Homo sapiens
tgagatagtttacattcctcttttgaaacctagtgtgtattttatgtttgcagcacatctcgtttcatactatccacatttccaatgctcaatacctcatgtgtctagtggctgccctattg

SEQ ID NO: 277216 - DNA, 122 bp, Homo sapiens
tcgagggggaaaatggcgccggcgcccctaggcgtcccggaggagcagttgctggggtgtcgatctagagtgctttctcggttactcttcattgcccagaccgctctcctcctgttgcccgc

SEQ ID NO: 277217 - DNA, 122 bp, Homo sapiens
agcagcggtagcgtccgcaccgacatggtgctggaaacgagctggactggtgaagagccccggggttcggtagccagtggcctgaaggccaggccgcagcgtcccaatagtccggttgctgg

SEQ ID NO: 277218 - DNA, 122 bp, Homo sapiens
gcggtgggggagacagcggcgaggaggctggtttcccagaccccagtgctctccgcattccgtttgtctccaagtttccacccaactctgccagcgtagaggaacggtcctggccccagctc

SEQ ID NO: 277219 - DNA, 122 bp, Homo sapiens
cttggctacaccaaggcctggagaagactcagtgtcctctttgtagagtgtgctcgtccccggatgcccccacggccatctcactcacccacctaggtccctgctccaatgccccctcctca

SEQ ID NO: 277220 - DNA, 122 bp, Homo sapiens
accagcctatcccacactttgcgtcccacacttttgcctttattgcattccttggtctggcgtccggggatggaggagggtggaattaagttagtaggtgatgcgggccgagcaaagaccct

SEQ ID NO: 277221 - DNA, 122 bp, Homo sapiens
ctttccggaagaaagcgaggaacgcgctctgcggggtgagccggactccccaactccggacgatcagcccaggactgagagccccgaagtccccaaccacaagtaagcggccccagaaggac

SEQ ID NO: 277222 - DNA, 122 bp, Homo sapiens
tcgaacctgcgcggggagaccccaatgggtttctagtccatcaccttaaccactcggccacgactacagacatgacagcatgactacagacatgacagcacaactacagacatgacagaact

SEQ ID NO: 277223 - DNA, 122 bp, Homo sapiens
gcgccttcctcatgacggtcacgctcgggggcggggcttcccttcgccgctcccgagttccgggaaccccctttgattggtctggacggcctgggaaacactgtagtgacgcccaatcaaaa

SEQ ID NO: 277224 - DNA, 122 bp, Homo sapiens
catgtgggtatgcaggtggctgagctgcttgaagagcttcccgcagtgcgtgcacgcgtgcggcttgatcccactgtggcccaggatgtgggtgaccaggttgtacttggaggtgtaggact

SEQ ID NO: 277225 - DNA, 122 bp, Homo sapiens
gagaagaaatgaattcctggagttcagggataatgcactttcccagaactctgttaatatcgttgacttcactagcagattaaaggagaaaaccggtatattgatctagaaaatctcgacag

SEQ ID NO: 277226 - DNA, 122 bp, Homo sapiens
ggccatccctgtgctcagtcccctgtggccctgggcaaggctggtccttctctgctcagccgggtgctgtcagggagggtgagcttgtcaggatcatttgggggttgataggctggcggggg

SEQ ID NO: 277227 - DNA, 122 bp, Homo sapiens
gtgggtgattgagatggaaattccaccaagttttctggagtagatactctatgacaagaacggcatttaatttcccttcagccactgtgggtttaaaaccaacaaacttaggtcgcatcttc

SEQ ID NO: 277228 - DNA, 122 bp, Homo sapiens
aagcccagaatgactatggaccacagcaaaaatgtgagttaaccaaggtagcatggaagacgatgcatagcaacagtaggctatggatgaatggggagtagaataagtttaaagcagagggt

SEQ ID NO: 277229 - DNA, 122 bp, Homo sapiens
ggcgggtggcgggtggcgggcggcgggcagtggccgggcgctgaggccagaggggcggagcggccgagctgctggggcggggcggggcagggcaggccggacccagcctctgggtgcctcca

SEQ ID NO: 277230 - DNA, 122 bp, Homo sapiens
aatctcccctcacccagccccttctttcgcccctgcctcttccccctcgtcacccggtcccgaacccccgtcccgactctccagcgcccccggcccgcgcctgggctctcaccatcgccgcg

SEQ ID NO: 277231 - DNA, 122 bp, Homo sapiens
acctgctcagtctggtccccacttttaaggcagagtgtctagagttgtatgagatcaaatcggacaatcttagagccaaaacagaccaaccttgctccttgtataaactcagaaactgagac

SEQ ID NO: 277232 - DNA, 122 bp, Homo sapiens
cagcctcccctccctggcttccccccgcgggcaggggctcccgcgccccctcgcaaccaccgccctgtccaaggctgcccaggcagcgcccctacacccacctccagcttcccgctcctctt

SEQ ID NO: 277233 - DNA, 122 bp, Homo sapiens
agcctgccagttgatggtagggtggaaaagaagaggacaactagaagagagttcctacaccgcaaagtaaactttgctggctctgcgaggagcaggaaacctgcatgatgagaacaaggact

SEQ ID NO: 277234 - DNA, 122 bp, Homo sapiens
ccagcagtagaaaagcactagggcatgtggggcacgtgggtcgtcctcaccgtgaagacccgcatctgctcaggcactggagatgcagcttaggatgctgcccctcgggaagaaagacactg

SEQ ID NO: 277235 - DNA, 122 bp, Homo sapiens
acactggcttaacgagcccatccgaataaaacaaattataaggccaatggcacttggtatcgtgtaagatcgccagaattttacaactcggggtacccaggaaaccagaaaagcccccacca

SEQ ID NO: 277236 - DNA, 122 bp, Homo sapiens
cttatttctgggtctacggcaaactccaaggtctacaaacgtagaggtcagctgtgaccccgggccaggccgtgaaggtccccaggacacagagctgctctctcctcctagtaaaggtgaga

SEQ ID NO: 277237 - DNA, 122 bp, Homo sapiens
tgggtgtgtgtgtgcgactgcgggagcgggagggtgcaccgccgctggatgggtgcgggtcgctagccaggtcaggcgttctgtggcctccgcccctcccccggggtccctgggctcggtgc

SEQ ID NO: 277238 - DNA, 122 bp, Homo sapiens
ccgccctaggtgtcgccgcctggcggttacgaggaggccgcctcctgcttgccggcctggcggtcctactcaacaccgcaagatttcaaaagggaaattcctccagggctgagtcacaggga

SEQ ID NO: 277239 - DNA, 122 bp, Homo sapiens
ccagctctgtttctacactgggaaactgtacggccagttttccttttaagggttgagcaacgtgccggggctggcacagcttggtgcctgacacagagtgacccctggagactgtctgtgga

SEQ ID NO: 277240 - DNA, 122 bp, Homo sapiens
cccatcccaaacaggaaagcaagatctctagacccttggagcagaagcatttgagtcctgcgaagggctgttggaagaatgctgggttcagcagcagggaacagagagatttaggaattctg

SEQ ID NO: 277241 - DNA, 122 bp, Homo sapiens
aggaagacataccctctctgacagtgtccttcagcccatcctgcctacctcacaggggagcggagccatgcaacactattttcgtgtaagctaccaccagaagcgtaaagtctttgaggtct

SEQ ID NO: 277242 - DNA, 122 bp, Homo sapiens
gtggggccaggttctcacaccctccagtggatgattggctgcgacctggggtccgacggacgcctcctccgcgggtatgaacagtatgcctacgatggcaaggattacctcgccctgaacga

SEQ ID NO: 277243 - DNA, 122 bp, Homo sapiens
ccgctcggccgccccgcagtgcccatgtaaatgacagcaataaatatctaatcaaggccccgggcgacgccactgctgcccgccaaagcccattaccgaacgagtagggaggggcgctgggg

SEQ ID NO: 277244 - DNA, 122 bp, Homo sapiens
caaccaaggctcactccctccaaatgcccactatggaggaccacagagatcgaggcttcccggggagccgttcgagattctgtctcccatgttcttgaggttcctaaacccctaaaccagga

SEQ ID NO: 277245 - DNA, 122 bp, Homo sapiens
ctacattgcaattacttttgcaccaaccaaatacttcctgtcccagctggcgcagtgcaccgcctgggctgcggatctgggctaacgtgctgtcttcctctttccagtgcgccggtccaagg

SEQ ID NO: 277246 - DNA, 122 bp, Homo sapiens
gagcagcttctgcttcccagatggggagagggggtgggggccgcggcgtcccggcgaggccgcagagtctgttaactttttgttacagtccgcctggttaccggaaccccaagggtgtcaga

SEQ ID NO: 277247 - DNA, 122 bp, Homo sapiens
agggatgaacgcgatctctactggtccgctgccctctgtgtgagccggtggtgttatacacggcagtgacgcgcagcccgccactgcccccgtggctgggctgagtgcccgtctcctacctt

SEQ ID NO: 277248 - DNA, 122 bp, Homo sapiens
cagtgggtacgtgcctagatttccacaggtgtgattgcaaacctgtaaattaccggcttccgtttgctgggacaagtgtaaaatgggcctctttgtacgcaggtgaagtagatttggcaatc

SEQ ID NO: 277249 - DNA, 122 bp, Homo sapiens
cgcggagctccgccagaagctgtccctgaacttccacagcctgtgtgagcagcagcccatcggtcgccgcctcttccgtgacttcctagccacagtgcccacgttccgcaaggcggcaacct

SEQ ID NO: 277250 - DNA, 122 bp, Homo sapiens
aaaaaaaaaagaaaaaagaaaaagaatatctgctacatttaggaaaaataaggcagtatacggaaggcattatcaactaagagacttaatcccaaatcttcccaggaacacaaaagatgcat

SEQ ID NO: 277251 - DNA, 122 bp, Homo sapiens
tccctctttctctcgtgttgggggtggggttggaagaaaggctattatctgagacaggctcgcgttatggctccgctttctgcggctctcctaccctggcatggtgtgtgtgtgtgcctgtg

SEQ ID NO: 277252 - DNA, 122 bp, Homo sapiens
cacgaagtctacctagaagaagtagtaaagtgttggctgggttccaaattcaaatgttttcgctatgcaaggcctgaagagggacaatacttattctttagagttcaggcagtatgagatgc

SEQ ID NO: 277253 - DNA, 122 bp, Homo sapiens
tgaagcaccaccagcttcctccacaagaactctgaaggtcaccagccagcttgagtcctccgaaggtgctgtggctcaaccagcagcctgtgtagcagagagcacaagacctgggactcgaa

SEQ ID NO: 277254 - DNA, 122 bp, Homo sapiens
gtaggacctgaactctctgtgacaaccctaggcctgggtcaggcctccactgaggtgaaacgcagctgagcggctcctccctgctgccaaggagctgcagaaccaacatttgcatattttaa

SEQ ID NO: 277255 - DNA, 122 bp, Homo sapiens
ttcagagcggagaagagcgagcaggggagagcgagaccagttttaaggggaggaccggtgcgagtgaggcagccccgaggctctgctcgcccaccacccaatcctcgcctcccttctgctcc

SEQ ID NO: 277256 - DNA, 122 bp, Homo sapiens
ggtatgtccagctccaaaacttgtacattctttctaccatattgcactgcctcaatttgacgtttaaatcaatcttttcctccaaatccaggatgaaaaaaatctttaaagtggttttattg

SEQ ID NO: 277257 - DNA, 122 bp, Homo sapiens
tagagacggcgtccccgacaacgcctcgggaaagaacctaaccaacatgcgaggaagtggcgccaggctcgttcttcaagagaagtgacagaactaaccctcagcctgcaatcctgaccagg

SEQ ID NO: 277258 - DNA, 122 bp, Homo sapiens
aaggagttcgagcagatcgacaagtccgggagctgggcggccatttaccaggtgcgggagcgccccggagcgtggcgggcccttcgcttaggccgcttgaacatcccctcagacctccaggc

SEQ ID NO: 277259 - DNA, 122 bp, Homo sapiens
tcagttcagatgatgtgtcatcttcccccagaaatggtgcagtggcctcagtgatgtacacggtggtcacccccatgccgaaccccttcatctacagcctgagaaacagggatattaaaagt

SEQ ID NO: 277260 - DNA, 122 bp, Homo sapiens
gttccggctcttaaacatgagctgctctgagaatgaggactgaccacttggcagccgacccgggcttctgtttgccacagtgggaaaaggcggcgtcttgctattccctgtgccctcccata

SEQ ID NO: 277261 - DNA, 122 bp, Homo sapiens
tccaattaattagcattgtcagtggttactttatttgaatgacgatcctcttgataacggcgatgtaaggaacatgagctgcctttatgtggcacttaaaagcaaaaaattttgttggaaga

SEQ ID NO: 277262 - DNA, 122 bp, Homo sapiens
ctgttagtcctatttatcttctcagctgagtttccttgctcagggccggctgctttaaaacgccacccagtagaggacagttcactccacatcatcctctctcaacctcacctcatgtatta

SEQ ID NO: 277263 - DNA, 122 bp, Homo sapiens
acgccattgagcagcacccggtggtggtcatctctggggacacgggctgtgggaagaccacgcgcatcccccagctgttgctggagcgctatgtgaccgagggccgaggtgcccgctgcaat

SEQ ID NO: 277264 - DNA, 122 bp, Homo sapiens
cgggactggagctctggcgcccacctctcccttcctcgcaggctggagacctgcgtgttgcgacttccggcatagcagctagaggccgggtgctgcttcaaaccctggcgggtcgcctgtgt

SEQ ID NO: 277265 - DNA, 122 bp, Homo sapiens
ccggtcggctggccgcacccacgcggcgcagctcccaaagttgcagacagcccggcgaaccgcgcaatgcgcttcttctgcctgcagcagagaaaaggaaagaaaactccgcaggggctccg

SEQ ID NO: 277266 - DNA, 122 bp, Homo sapiens
accatttccgccacacctccaacccacttccggccccaaacatggcctttccaggagccccgcccacttcctgcacatgcccgcctaagttcctgcctcggggaggtaacagcataactgtc

SEQ ID NO: 277267 - DNA, 122 bp, Homo sapiens
ggggccggggcccggggccttggagataaggcctggacaggatataacccgcgcaagagccgaggagcaggggtgtgcagggttccagcgacagcagcactggactcgtccagagggcggcg

SEQ ID NO: 277268 - DNA, 122 bp, Homo sapiens
gtggatagcggggattctcaggattagggcctagggccattaaaggctgggaggtgggggcgtaaacctgtggccaccctgacccctgtcctcggggggcctcaccaccaggccgaggagac

SEQ ID NO: 277269 - DNA, 122 bp, Homo sapiens
aggattcacgaagccacctccgccggggaccgccttctctcggagtggcctcccctccggcgttccgctttagtaagacgacactcaggccaaacagccgcccccggccagcccgactcggc

SEQ ID NO: 277270 - DNA, 122 bp, Homo sapiens
acaactgcagctggttccctcagggctatagtgcacccctctgctttaaagaggcagccccgttcctgtggaaccaccttctggacccaggaagggcttgctgtgactatggccagaggaca

SEQ ID NO: 277271 - DNA, 122 bp, Homo sapiens
ccgctgcgccctccttagtgacccaaggccgggaggtgagcccagccgggtccaggcctgcgccccgcctagagccctcgggggcgcaataggaagcggcgaggagaggccgcggccgcctt

SEQ ID NO: 277272 - DNA, 122 bp, Homo sapiens
tcacattatactaattggtcaatatctttccacaaaaggtagaaataatatgtgtggttgcgaggctgcttttcaaggcataactttgagataagataggtgacaaaaatgtcgtgcaggtc

SEQ ID NO: 277273 - DNA, 122 bp, Homo sapiens
atgagaaagatggtggccactgtctttgtctttggtgatggccagccaaagtgaatggaccgaatgtaaaaagatcagatgtaagaaagatccaccaagataagcaaacccagggccaggct

SEQ ID NO: 277274 - DNA, 122 bp, Homo sapiens
gcctcacaatcatggcggaaggtgaaggaggagcaaaaacatgtctaacatggtggcaggcgagagaacatgtgcaggggaaccgccctttataaaaccaacatatctcatgagacttactc

SEQ ID NO: 277275 - DNA, 122 bp, Homo sapiens
cggaatactgtctggctgtgcacgtggaggtggcgaaatgtggaagcttaacgaagttggcgccatgaagctaaagactgctaccccggggctctagctcgctccgcctaatggcgggccgc

SEQ ID NO: 277276 - DNA, 122 bp, Homo sapiens
gtggatcgagaacatgaactccgtcatggacgataacaaggtgttgaccctcatcaacggcgagcgcatcgcgatgcccgagcaggtcagggacgcggctgactcctggaggcctgcagagg

SEQ ID NO: 277277 - DNA, 122 bp, Homo sapiens
cacacatccccgcaggactctcgggctccacgctgaccccacacacccccgcaggaccctcggtctgcacgctgaccccacacacccccgcaggaccctcggtctccacgctgaccccacac

SEQ ID NO: 277278 - DNA, 122 bp, Homo sapiens
tgatagttaacaggctctttctaaaaaggaaacaaggctgagaatgcaataggaagtagacgacaaagatgacttggactgtccttgtggacttcccgagttgttccaataagtacaggcag

SEQ ID NO: 277279 - DNA, 122 bp, Homo sapiens
gccgcgagtgcgcgggcgggaggcgcgagggcgggagggcgcgggctgggggggtccgtgcgcgcacctgtcccggccgggccgctcagcccggcatccccggctggggaggggggctgggg

SEQ ID NO: 277280 - DNA, 122 bp, Homo sapiens
agggatttatttaatggggatgtgttcaaggcaagagcgaattcagaaggatatcgacgtcgtgatccagaagtccagagctgagaaggactgcctgtttgcaggtgagttcttgcttttcc

SEQ ID NO: 277281 - DNA, 122 bp, Homo sapiens
ctagaatcttcacgtacaacattctgtttttgtttttaaagacctcagggaactagaactcggttgtgggaaccctgcaccaaggagagttgagggccagctccttagcgcagcacagcacg

SEQ ID NO: 277282 - DNA, 122 bp, Homo sapiens
aattcgcagagagggcaaggagcagaagaagaatattctgctgaagcagcaggtgccattcgccaagcccctgccaacttttgccaaacccacagctgagcctggtcaagacaaccccgagt

SEQ ID NO: 277283 - DNA, 122 bp, Homo sapiens
aagcacctttggcccgggacagaaatctggagagcttggctacctccatcctcctcaggccggagcaggcttcctgagagagtccaggtcgtaggagttttacgacttagaaaagcgggctg

SEQ ID NO: 277284 - DNA, 122 bp, Homo sapiens
ccgcgccgctgtctgcgccgcgcctgacccgaggctggggtctctcctttgaaaacgacgcgtttgcatcactttcctgagccagaatctgcgtcttatttaatttgcaagaaattcagaga

SEQ ID NO: 277285 - DNA, 122 bp, Homo sapiens
atcttttgaaagataggcgcaccccgggatgagaggtcagcgggcctgccctgtgccgagcggtggaatttttcaataaccagcagctgggtcaccaggcacacaaaggcagtgtaatatcc

SEQ ID NO: 277286 - DNA, 122 bp, Homo sapiens
tatccctaacaatcccaaactaaataaagaggattgtgacatggaccctaaatgtcgccacgtttgcgtctccatcccggaatatgacgctggtagctcattagctccattcaagcctacaa

SEQ ID NO: 277287 - DNA, 122 bp, Homo sapiens
tgcaaccccctgggagggtggtgggagggaggcaggaagtcctcactgtcagaatcagcccgggcttcctggggtagatcgctgaccgtccccagcctcagtttcccgtgtaaaacgagatc

SEQ ID NO: 277288 - DNA, 122 bp, Homo sapiens
tattttgaagtgaagagttcccagtaatagcaaggttcctgactgatgtgggtcatgagccggctgacctgaacccccagagatggtccccagagaaaacatcaaggaagacagaggccagc

SEQ ID NO: 277289 - DNA, 122 bp, Homo sapiens
ttcatctgttatatgtttggcttagtattcattcagagactcaagaggacccaaatgtggcgttttagagctctttatgtgcatggctccctcttgtctgatattctacctctcaaatccca

SEQ ID NO: 277290 - DNA, 122 bp, Homo sapiens
ccagtgttcctgccaccactgggctggctgccctgagccacggggcacaggccatagccccggtcttacacaatggaccctttcccagaagctgaggctgttgcataaaacagaaacccctc

SEQ ID NO: 277291 - DNA, 122 bp, Homo sapiens
ttggctggccctctgatatgaggtggtggtgaattggtgggcgtcagtgcagtaagtgagcgagccggacgtcgattgactggtcttcagaagcaggttcggttttgttttgttttggtttg

SEQ ID NO: 277292 - DNA, 122 bp, Homo sapiens
accctcgcctcttcacactcctagaggttccctggaggccacaggtgtacttctgggctgcgaagctgtcagcccaaagctctacatgtgtgaccctgcaaggccagccactctgagctgca

SEQ ID NO: 277293 - DNA, 122 bp, Homo sapiens
tttcagtaggctgattggagcagcctttacttggaggtcgagtccctccccgagggaatccgtgtacagttacactagcggtcgctgccagtgctagcccattcaggatagcccccctcacc

SEQ ID NO: 277294 - DNA, 122 bp, Homo sapiens
ggccgcgtcggccggggccgggacgatgactctggagtccatgatggcgtgttgcctgagcgatgaggtgaaggagtccaagcggatcaacgccgagatcgagaagcagctgcggcgggaca

SEQ ID NO: 277295 - DNA, 122 bp, Homo sapiens
ctgtgagctgcaaatctcaggaacaccggaatgcatttataaacccatcagaaatatcaccgtcactatttggcattcagtattgataagaaatgcgtggtcctccttggcctctggttttt

SEQ ID NO: 277296 - DNA, 122 bp, Homo sapiens
taccctgacattataaaggctgggaggcaccgcactaaggggcatggaggcgctctcccgcgcagacaggactgatggagctgctcacccttcgggcagagcgaggcgagaacccaggcctc

SEQ ID NO: 277297 - DNA, 122 bp, Homo sapiens
aggaagactgtggagaccatcttgtcttcctccccttcctcctccagagcctgctctatgcggatctggaccatctagccctcagcaggccccgccggctgtccacagcggaccctgctgat

SEQ ID NO: 277298 - DNA, 122 bp, Homo sapiens
catccctgcctcggggcttgccagtgtcttcggagctgctggaagggctggccatggctccgggggctctgcctgaacttggggaagaggaaggacacggcgcgagcggcctctcggcggag

SEQ ID NO: 277299 - DNA, 122 bp, Homo sapiens
ggaagtgctcgcgcgtaaggcaggaagtctctccccacgccaatctccatggagacgggacgccgttcgagaagaggcggaactttcaaaacccccgggcggagaaagggcgtggcgagtgg

SEQ ID NO: 277300 - DNA, 122 bp, Homo sapiens
gagctatctactgccagcagggcttggccacacctggctcagggccatccccaaacccagcgacaacacagccaagttctgggtactacccaggacagagctcaagtcaggcataaaaagag

SEQ ID NO: 277301 - DNA, 122 bp, Homo sapiens
cacacccagataagcagggcgatcagcacccacggagccccaactggtctttggtgaacacgggattctgagtcagagacaaacttttagccgaactttcagcccttgacttgttctgggac

SEQ ID NO: 277302 - DNA, 122 bp, Homo sapiens
agccagggagtctcggtccagggcgtccggggttctccccaaggcgtagttctcaggggccgggaatagggaataagcacacagacctgaccgtcgtaacttcatggggaaagatggaaaca

SEQ ID NO: 277303 - DNA, 122 bp, Homo sapiens
agcacctggatcttagacttcccagcctccagaactatgggaaatatgtttttaagtacccggtccatggcattttgtcactgcagtctgagctggtaaaacacagagttttattggctttt

SEQ ID NO: 277304 - DNA, 122 bp, Homo sapiens
ctatgaccgggatgtcctccatgaccgggtgtcctccctgaccgggatgtcctccatgaccggggtgtcctctatgaccgggatgtcctccatgaccggggtgtcctccatgaccggggtgt

SEQ ID NO: 277305 - DNA, 122 bp, Homo sapiens
cagcatgcaggcaccgcctcctcatctgcatagagccgccctcctctcagccaaacctgccgctcatctgcataagccccgcctgctgaaggctctgcagcttgaatattttctgagcggaa

SEQ ID NO: 277306 - DNA, 122 bp, Homo sapiens
ctttttagactcctcttgaccagtttgctgctcaaaagaaagacattgctttcttgtccgcgcgtagccctcagcagtacacagaggagaaggaggaggaggaggaggagggaaaaatgcag

SEQ ID NO: 277307 - DNA, 122 bp, Homo sapiens
atatttcctggtggtcgctgtaatacggaaaacttactacgctgctgtgggacttgtgctcgctccgccaggaggccgagggcgtctttagttcgttaacagaggagcaggcggaggcgggt

SEQ ID NO: 277308 - DNA, 122 bp, Homo sapiens
ccctacttctagggaagtagaaggaaaaagcaaggctcctaagttttcccaataatgtgtcgactctgctattgtacatctgtgacctacggtgcttcctgtgagccacactaaatattgct

SEQ ID NO: 277309 - DNA, 122 bp, Homo sapiens
gtggctggtccatcaggaatgcctggctcctgctgcgttttggagctggtgctgccggcccgtttgcctaggcacactcacagggcacctcccagttaccaaggagaaagccaaactgtcaa

SEQ ID NO: 277310 - DNA, 122 bp, Homo sapiens
ccctcgcccgcggcccgcccgggctgtgacacatcagcaccgccctcgcggctggggccccgtattgtcctccgccgcctcccaccgcatgcccagcctcgcgtctactcagcccggtggct

SEQ ID NO: 277311 - DNA, 122 bp, Homo sapiens
ttgaacttttgagtgcaagtgatgcacccgcctcacctcccacagtgctgagattactgacgtgggccaccgtgccgggcctgttgttgccattgtaaagagttttatttccttttctgatt

SEQ ID NO: 277312 - DNA, 122 bp, Homo sapiens
atacaaagtgaatctgtggccacggctgcactcctcattttcatggtctgctgcctgtcccgggaggctgtggctctggactggaagggctggaggtcccctccctgaggacagcctctgca

SEQ ID NO: 277313 - DNA, 122 bp, Homo sapiens
ccgctcctctgagcggccgcccaccgcaccagtgcgcatgggcgcacccggccaccgggccgcccaccccgccccacgggagaccacgcctccggctcgcaacgggcaaatgggcggaggcc

SEQ ID NO: 277314 - DNA, 122 bp, Homo sapiens
cctcgtggtgtgtgtgtaggttgtgttctgggtgcatcctctcatgcgtgtgtcctggctcgtggcccgtgtgtaggtcgcgtgctgggtgcatcctctcatgtgtgtgtcctggctcgtgg

SEQ ID NO: 277315 - DNA, 122 bp, Homo sapiens
ctcacgagatcacacgctcctcacttacaggggttcgcgccgtccgccactatcagcattcgcagagaggagaggttgatgtctctctgatctctgtgtgctactaatgcccaatgcatatc

SEQ ID NO: 277316 - DNA, 122 bp, Homo sapiens
tgccttgatagaaattatcagaactcaattcattaggcaattgttaatttcattcaaatccgaaggtcagtggcacaatagggcttggcataggttcctatgcttctttcacgtggctcaga

SEQ ID NO: 277317 - DNA, 122 bp, Homo sapiens
ttgcatcagaacaatctcaatatgcccaattgtgcacaactttaaggaacctatctgccccgtctaattctcattgatttctgttgataaggattgggagaaaaggaaaagcaaagggagag

SEQ ID NO: 277318 - DNA, 122 bp, Homo sapiens
tgtccaaccagcacctggctctgcccccgtttctccgtgtgagatggcacatccatctcccggcccgggactttcctgaccacctctctggcaggcttggggaggtcttcatgagcctggcc

SEQ ID NO: 277319 - DNA, 122 bp, Homo sapiens
caggctgtggccctgcagtgccatcgctgtcctcacttgaactctggctcctctgttcctcgatggcccctccacatggtgctccaccccagtcttcagaagcttctgccccaaggccaggg

SEQ ID NO: 277320 - DNA, 122 bp, Homo sapiens
gtaccagcccttcacctctgctgaccttctcaactgggaaaacaataccccatcctacagcgaaaagccgcaagccctaattgatttgctccagactgttatccagacccacaaccacacct

SEQ ID NO: 277321 - DNA, 122 bp, Homo sapiens
ttgtagcctggagaaattggagaaaagtaatgcagaaatcttagtaaacttctgaacatgcgattaccaattcaacaatgtttatggagcatgtgctctgtgctaatcaccatacaaagccc

SEQ ID NO: 277322 - DNA, 122 bp, Homo sapiens
gctcaggaatactgagcttgcagccatcagctttgagtgccattatctgaaccggccctgcgtgccagtctcgagcgcttacacctcccaggccgccaacgaggaccctattgacttgatac

SEQ ID NO: 277323 - DNA, 122 bp, Homo sapiens
gcccgcagcgactttctccacagggtggggcatcctgtgttctggagtctgggcgctgggcgggaacctgggagctttctccagtggagctgaggccaagtcttggctcacaacatttctcc

SEQ ID NO: 277324 - DNA, 122 bp, Homo sapiens
gactctttatggtatgccgaccagatcgattctgcttgtacctgtagagaaactcctgagcgacaattatctccatagtcatgagacttgatcctgcagttctggagccccagatgccgcaa

SEQ ID NO: 277325 - DNA, 122 bp, Homo sapiens
gggtggggggaaggtgccacacactttaaaacaactggatcttgcgagaactctgactatcgcgagaaaggatagcaccaagccatgaggtatccacctgcttgacccacacaccttccacc

SEQ ID NO: 277326 - DNA, 122 bp, Homo sapiens
ggacccaggtggaagctgaggctcacgctggggcccgcatgcccggccttgcccacatcccgcacctgcccacctaggccgtcgcaggccagcgactcacagtccttgggcctcttctcctc

SEQ ID NO: 277327 - DNA, 122 bp, Homo sapiens
cggcccgcgccccccggaccccgccccgcggctccctctcacccgctgtaaccccctgcgcgaccccgctggagcgcggtccacggggacaagagcatttccaggatccaggagtgttcagg

SEQ ID NO: 277328 - DNA, 122 bp, Homo sapiens
tgatccccagagctaacttgaaagacagtccctagctaatgctttttgcagtatctatatcgtcattgtctatgaaattaagtgtagagcccttggcatggcgtagaaggttcttcccttat

SEQ ID NO: 277329 - DNA, 122 bp, Homo sapiens
cccagccactttctgtttcttaaagtttgtgcttcatgggctttctcctactcataattccgaatttacaaatttcatggcccacctttaagaaaatacaagtcttctttaaaaaaaaaaat

SEQ ID NO: 277330 - DNA, 122 bp, Homo sapiens
gaagctgaccaggattggtttcagcagcaactgaagtcagaggggtttttatttcctggtcgccagatagcatggcgactgtgtcagcagctgttctcattggccaggggattgcatttggg

SEQ ID NO: 277331 - DNA, 122 bp, Homo sapiens
tacacttgtttcatagacttccccaccagactgtgagctccatagggctgggccccaggtcggtttcaccaccaggctctctcgcctaactcggcccacgggaggccgtttccagctgctct

SEQ ID NO: 277332 - DNA, 122 bp, Homo sapiens
ttcgccaagccgaggtctcttggttgcggcactgcttctggctcggtgcctgtattttctcggtgcctacagcgcccaggtcgccgatctgagggcttcggagtaccggccgggcgcggtgg

SEQ ID NO: 277333 - DNA, 122 bp, Homo sapiens
ccaggccacagaccccgcccagcggccagcacccggcgcaggcccggcagccgagctgcgcggcggcaccatgcaggtcaccctgaagaccctccagcagcagaccttcaagatagacattg

SEQ ID NO: 277334 - DNA, 122 bp, Homo sapiens
ggtggaggcatcttcaggatcccctcacttcctggcctctcgctgtgtctctatggtgcccgtagctcctggggagcgtggcatgggctgtgcacctcttcgccccagctgccagttcgttt

SEQ ID NO: 277335 - DNA, 122 bp, Homo sapiens
gcaggcgcatcaatgaggtactgcaatgtcccggaccgtatagtttccaggacgtctcgccgcgcgcatgcgcagaaacactgggcacagggggaggtaactgcagtaagtcccgcttggcc

SEQ ID NO: 277336 - DNA, 122 bp, Homo sapiens
ttctcaggtaatggaaggttatccaaatatttttcgtaagtatttcaaatagcaatggctcgtctatggttagtctcgcagccacattctcagaactgctcaaaccctggccctgcaaagct

SEQ ID NO: 277337 - DNA, 122 bp, Homo sapiens
ccggtacataatacaattccccaaacgttgactcaaagcctgaaaagggagctgccaggacgtaccccacgtaggacaggttccaggcgaactttctgtaaagtcctctccttgtcagaagc

SEQ ID NO: 277338 - DNA, 122 bp, Homo sapiens
taagcagcacatcctgttagaacaaaataggtactgaaagcaataaatataacaccacaccgagcacccctccctgtcacatcccccaccctgccaaattccccaagaggtgtcacaggggt

SEQ ID NO: 277339 - DNA, 122 bp, Homo sapiens
cgtctcatcaccatttaaagaaaccgtggctcctagaggtaaagtacttcggtcacaacgcgaggaggtccagacttgaccccagacctccagactcgagctgggaagtggccgaggctcct

SEQ ID NO: 277340 - DNA, 122 bp, Homo sapiens
tacggtcaggcacaacagaagtctccatttctccgtatccttcccattcctttcattacccgatgtgcttcactcgtctttattatgtgtctggtttctgaagttatttaatattgggaact

SEQ ID NO: 277341 - DNA, 122 bp, Homo sapiens
gggcgtgaggccccgccctcgccgctctctgcccgcccccagacccgcggcccgcctggccgcctcacctggccgatggcgttggtggtgagcacaggaaggccattatagtcccaatcctt

SEQ ID NO: 277342 - DNA, 122 bp, Homo sapiens
ggctggttctgattcttaacctgctccagcagtgacacactcagtcccacagggagtggacgacccccaggaagaagatgatgttttggaggaaactccccaaagccctcttcattgggctg

SEQ ID NO: 277343 - DNA, 122 bp, Homo sapiens
ccgcagccggcttagcggcaggaaggcgggggcgggggcggaggcaggggccagggccagcgggaggaagcacagcctggaccacgacccccagtgccctttgtggtcctcagcaggccccg

SEQ ID NO: 277344 - DNA, 122 bp, Homo sapiens
tgagcagagagctggcctcagattgagaggtgacagtgtgccggcagccctcgaagccctcgctcgctcttggcgcctcctcggcctcggcgcccactctggtcacgcttgaggagcccttc

SEQ ID NO: 277345 - DNA, 122 bp, Homo sapiens
actgataaataacaaatgagggagactcagggtgctcttccactgaaaaatcctgactttcgttctagtttgtagttccattactggacgtaccatgctgggctgtgtaggcttagctttag

SEQ ID NO: 277346 - DNA, 122 bp, Homo sapiens
ggttaccatcctggttgcaggcacctgtgcaccccacaggtgagaggggtctagagacctcgccttctacagtggcatcagtcctcgctcctgtccccttactcctggtctcggaccagtcc

SEQ ID NO: 277347 - DNA, 122 bp, Homo sapiens
agagaaaccctatgaatttactgaatgtgggggaactgttactcatatgttgcatttcgtcgaacgtgcaagtcatgctgaagagaaaccctgtgcttctaaggagtattgacaagccctta

SEQ ID NO: 277348 - DNA, 122 bp, Homo sapiens
tggacttgccctgaattctttcttgtgggagatcgaagaactctctcttggtgtccggatcgggactcctttccggtaacatcactatgttgcccaggctggtcttgaactcctggcctcaa

SEQ ID NO: 277349 - DNA, 122 bp, Homo sapiens
cgcccaaaggcttaggcaaggtggggtccaagggccgtgaagctccgctgatgtccaagacgctgtccaagtcggagcactcgctcttccaggccaagggcagcccggcgggcggcgccaag

SEQ ID NO: 277350 - DNA, 122 bp, Homo sapiens
cttccacacacatcccctcagataacccggcacacccgttcacgttacatcatggggcagcgcagatgccacaatgccctgccccccagcccagacctggctgcaaggccaggggttgggga

SEQ ID NO: 277351 - DNA, 122 bp, Homo sapiens
ctctggagggtgcgggcggctgcgggttccaagctcgggctctgagccgggccaggcgcgcgcttcctagttctagcagcagagggcgcgcctgtcattggagaaggaaccgcgcggccgca

SEQ ID NO: 277352 - DNA, 122 bp, Homo sapiens
ggtgctcaaaagcacacactgtatgacatggcactttttgaggaagtctccttgattccccgcagaaagtatctccatattaccaattgcactccttgaatgaagtttttcaaatgcaattc

SEQ ID NO: 277353 - DNA, 122 bp, Homo sapiens
aaatttggggatatagctatactgtaggcaaagatttggggaagagggagaagttgaggacgaagagtggtgggcctttagttgaactgaagaggcagccccagccaaaggtaccaaattca

SEQ ID NO: 277354 - DNA, 122 bp, Homo sapiens
atcctctacatgtaccccagaacttcaaataaaagttggacggccaggcgtggtggctcacgcctgtaatcccagcactttgggaagccgaggcgtgcagatcacctaaggtcaggagttcg

SEQ ID NO: 277355 - DNA, 122 bp, Homo sapiens
caaggtcaaaggacagggtaggttagtctaggcatacaaagtaggggagtaaagtggagccggctggactgcaggagacacagttccccacccatggtagaggatatgcaaatataactttt

SEQ ID NO: 277356 - DNA, 122 bp, Homo sapiens
ggaccagggacaggggtacctgctccacagaaggaagtggctgcggcggtgctggacctgcggagaggagaacaggaaggacggccaagagctcctggtgcagctggctccccagggctctg

SEQ ID NO: 277357 - DNA, 122 bp, Homo sapiens
gtgtggaccggcggctccatggtggcctccctgcactccttccagcgccgctggataactcgggccatgtaccaggagtgtggctccaggctgctgtacgatgtgttcaactgagtcaggct

SEQ ID NO: 277358 - DNA, 122 bp, Homo sapiens
tcacttgttagtaagtggtagaaccaggacttcagtgaagatatttgctccaaagacattcgcaaaaccactgacactgtgcaaaatgacacaggcagaaaacaaacttgagggacttctca

SEQ ID NO: 277359 - DNA, 122 bp, Homo sapiens
ctgacatgcatcagtgcccaccggtacagcggtgtggtgtaccccctcaagtccctgggccggctcaaaaagaagaatgcgatctgtatcagcgtgctggtgtggctcattgtggtggtggc

SEQ ID NO: 277360 - DNA, 122 bp, Homo sapiens
ggacactggagaatccttctcgccacacacgtcccaccgtggacaccggagaatccttctcgccatacatgtcctgctgtggacactggagaatccatctccacacacgtcccgccgtggac

SEQ ID NO: 277361 - DNA, 122 bp, Homo sapiens
gccgggcgcgggcgcggcgggcaggctggggtggggggcgggcagctatgtcgtcaggaacggggcggccccgctgcggccgcgtctgcctggcccgtcccctccagcccagctcgggctcc

SEQ ID NO: 277362 - DNA, 122 bp, Homo sapiens
ggctcctttccgcgccatgagccgcaggttcacggtcacctcgctgccccccgcagggcccgccagaagccctgacccagagtcccgccggcattcggtcgcagacccccgccacctcccgg

SEQ ID NO: 277363 - DNA, 122 bp, Homo sapiens
gaagcaacagtgataaatctcaggaagagagcgggtctgggatggcaacagcagcagggccgggaatctaggcccgtgtctctacagccagagctaaagagctgccgcgggctccccgttcc

SEQ ID NO: 277364 - DNA, 122 bp, Homo sapiens
ccggctgcacacgttctaccctgaaagcctgctgtataaagaacactttctgagggcaggcggctgtggggtccaccgtctctgtctctcgggggcttctgttcgtacgtccctagccaatg

SEQ ID NO: 277365 - DNA, 122 bp, Homo sapiens
gagctcacagtgcccacggcatggtaaggaagccagggcggtggagcacgtcggtgagggcgagaccagacttgcagtaccacaaaggaaacaagcttcccgccgcagttccatccacatgt

SEQ ID NO: 277366 - DNA, 122 bp, Homo sapiens
gggcccagcctgtgtccctccctcgtttttacaaatgaataaagagatgctggataagcccgaggtcacaagctttgcagtgtagcatcccccaacttgatcccctgtctctttggctccaa

SEQ ID NO: 277367 - DNA, 122 bp, Homo sapiens
aacgtctgttgcctgatcctcctgtggatgaaggctatgagctctggcctgccccgggagcgggcaccagccaatgccagcggagcaagggttaactttgggactgtgacagttctcccttc

SEQ ID NO: 277368 - DNA, 122 bp, Homo sapiens
acccttgtacttcaaaaagcaaaatcacttctatgatctatgatatggtggtctctaaaccgcctactatatatatatatatacattttttttttttctgagacagggtcttgctctgtctc

SEQ ID NO: 277369 - DNA, 122 bp, Homo sapiens
cgagcaaacagggggccggggcccggggccttggagataaggcctggacaggatataacccgcgcaagagccgaggagcaggggtgtgcagggttccagcgacagcagcactggactcgtcc

SEQ ID NO: 277370 - DNA, 122 bp, Homo sapiens
gggtagatccccacacacatacaaagataaaactatgttttttggtaattctagttgatacggcagcaaaaattgtcatgacaatgttggctggttttcagagggttattttcaaatataac

SEQ ID NO: 277371 - DNA, 122 bp, Homo sapiens
agcgtagctgggctctgattggctgctttgaaagtctacgggctacccgattggtgaatccggggccctttagcgcggtgagtttgaaactgctcgcacttggcttcaaagctggctcttgg

SEQ ID NO: 277372 - DNA, 122 bp, Homo sapiens
aaaaggtgtggtgtggcagggacacacagagtaaggtcaaaggcaaaacagctgggagagcggtggagccagacagatgaaaagtcctcaaagagaattaggggcgagatcagggtagaaag

SEQ ID NO: 277373 - DNA, 122 bp, Homo sapiens
gagagatggtgtagaatcaggagacccgctccatccctcacagagaccaaggagcccgagcgccgcgtcagcgcttggcgtacgtcctgctggagctcttgctcagtccgcccttcggggtg

SEQ ID NO: 277374 - DNA, 122 bp, Homo sapiens
ctggagctgcacacacaccacctcatcccgtccctacgccaagtggtgttccagggggatcggctgcccttccagtgctctgccagctacctgggcaacgacacccgcatccgctggtacca

SEQ ID NO: 277375 - DNA, 122 bp, Homo sapiens
agaaacatgacggtgggctcgatccagcgggggtggaggagcacggaggctgtcatagcccgagccgcatggagaagaccccagtggcgctgttttaaaaagcccccaagaagtgaagagcg

SEQ ID NO: 277376 - DNA, 122 bp, Homo sapiens
cggaacgacagcttgacgggcacaaaagccagccagtgagagccggaagcatcctccctgcggccaatggagtggggctctgggcgggcccccgagtgtttgtgttgtggttttgggggagg

SEQ ID NO: 277377 - DNA, 122 bp, Homo sapiens
ttcgatatcttgacctcgtgatctgcctacctcggcctcccaaagtgctgggattacaggcgtgagccaccatgccaggccctaaattgctttaattcatcgaaaagtaactgggggctagg

SEQ ID NO: 277378 - DNA, 122 bp, Homo sapiens
atgaatgggaactgagtaaagaaaatgtacaacctttaaggcaagggcggatcatgtccacgcttcagggagcactggcacaagaatctgcctgtaacaatactcttcagcagcagaaacgg

SEQ ID NO: 277379 - DNA, 122 bp, Homo sapiens
ccccctccccgggcccgcccctcaccaggggcccctgggtctggacgccgcctgcaaccccgatcccacaggcgccgccgtgccctaagccctggcctgtatctagtgcccagtgcagtgcg

SEQ ID NO: 277380 - DNA, 122 bp, Homo sapiens
ctcaagctatcctttcaccttggcctcccaaagtgctgggattataagtgtgagccacctcgcctggtcagaaatggaagttttctagtcctatttattgtctgttatttttcttatagctc

SEQ ID NO: 277381 - DNA, 122 bp, Homo sapiens
acactgtcttattacccattattttaaactgataacactgactgcataaacaaacaaacacgcaaaaaggaaactaataaaaattctacactttaattttattcccccattttaactttttg

SEQ ID NO: 277382 - DNA, 122 bp, Homo sapiens
gatcacctgctatctaattggcttaagctgcatacggcccatgagaagacctgtgtcaagcgtcatgtggtttttggatagaggtgctgagacacttagccagcacagacgccagaaggtat

SEQ ID NO: 277383 - DNA, 122 bp, Homo sapiens
tcgccttctgtaattttggcttcttgcaaacacgcttcctgccagtcctgctccgtcaggcgggaggcagcaaaccccagccctggctccaggacagggccgaaggcaggatagacggagca

SEQ ID NO: 277384 - DNA, 122 bp, Homo sapiens
tggcttcgcactacaattcccaccaagcatctgtccctctctggcctctaataacgagtgcgccttgtggtccagcgtctggcaactttcacgcctagcgtcgcgtataccggaaaactgca

SEQ ID NO: 277385 - DNA, 122 bp, Homo sapiens
acaggggcgggaagtggcagctgctccaactgagggcgctctggggaacacactgccattcgccaggcctccagggcgcccccaccacccgcacccctcccgcaccgaggtgtccaggcccg

SEQ ID NO: 277386 - DNA, 122 bp, Homo sapiens
gagggagggttgaggcatactcactagggatggagggttagtatccacttggaagcccagcgggggtaaaaactgtaggagatgaaagcaatgaaacctctatgctgaaaaaaaatgcacat

SEQ ID NO: 277387 - DNA, 122 bp, Homo sapiens
tcagcctcacactgccaggttgccctaggggagattccacaagggcgcattccctcgccacgcacatgcgcaggcacgcacatccgtgtgcacgcactcacccacaaccagggcttcagatg

SEQ ID NO: 277388 - DNA, 122 bp, Homo sapiens
tttaacagcagagatttaaatgtattttaatccctacaaaggagaaaaagggaggaaatacgtgacaggctctcaataagtatttgcgaaggatttaatctcttgaacgaatggatgaatga

SEQ ID NO: 277389 - DNA, 122 bp, Homo sapiens
agttcgtgcttacctggatgagaagaataaatgacacggatacactcctgagaagacactcgttaaacattgcatcggagagctgcctttgataaatgtgctgttaaacacttgaatgaaga

SEQ ID NO: 277390 - DNA, 122 bp, Homo sapiens
gcagcaagccagggaccaccacgaggggcagcggccgcaggcgcatggtgccggctggcgcggcttttcacgagctgcgcgccctcgcctgcctctcgcgcatctccacttcgcggggcagg

SEQ ID NO: 277391 - DNA, 122 bp, Homo sapiens
tgacgaatgttgaagatgcttttatgttctgagccacatgcacttggaggccgctggtcacgctgctcaggagtggtgcccagaaaaggaaagggcttggtggtacatgaagtgggggcagt

SEQ ID NO: 277392 - DNA, 122 bp, Homo sapiens
actgtttagggacagaggccttgtcacagtcatatttgtgtcctgagcagtgtaaagcaccgtgccatgcacatagtggctggtcagtcacatattcaaatgagtgaacttgctcagtaaaa

SEQ ID NO: 277393 - DNA, 122 bp, Homo sapiens
aacaagccttgccagggaagggcggggtgaacggggccagccctatcagacgctaaagcacgcagtggggcctctttaatgagaacagtgccaaatgacacaaaaatacacagggccgtggg

SEQ ID NO: 277394 - DNA, 122 bp, Homo sapiens
ggaaccagcctctcctgaagcacacagcttagggagttcctgaggccagagacatctccacgggaaagtcaaaggcctggaggaagtgcggacctgacgacagatgccccgcacgctggccg

SEQ ID NO: 277395 - DNA, 122 bp, Homo sapiens
tccccaagcccagaggacaggggtggccctgactcaggcgccctcttccgggtaggggtccgcgtgcgccctcccaagcccgcgccccgcaggggcgcccgcccctctccccgcccccggcg

SEQ ID NO: 277396 - DNA, 122 bp, Homo sapiens
tcacacaatagtaataatcattgccatttcttgaacactaaccatttgccagaaacagcacgaagtatttcacatgggttacatttaatccttccaaccccaagaggtagaaactattatat

SEQ ID NO: 277397 - DNA, 122 bp, Homo sapiens
cctcaagaacgtgtacgcgcaggggcgtttccttgtccgttaataacacaagctacaggccgagcgtggtggctcacacctgtaatcccagcactttgggaggccgagacgggtggatcacg

SEQ ID NO: 277398 - DNA, 122 bp, Homo sapiens
ccctcggcgcgcagcgcgccgccgcccgtaggctccattgaaccgctcacgcgccgctcacgcgcaagtcccgcctcccagcgctgccccgccccccgagcccacgcaggcgctggactgct

SEQ ID NO: 277399 - DNA, 122 bp, Homo sapiens
aactttcactcctgctctaaaagttatcttggtttcttactctaccttatgccccttgggcgaattttttcctctgaggagggaagaatagagttgctgctgcagacacatcagattcccta

SEQ ID NO: 277400 - DNA, 122 bp, Homo sapiens
accctacaacttcctgggcctggacttcctgccagaggccgacttagtcttccctccccacgggccagttcctacacctggacctcactctgtccagagcttcaggtaggcctcaggaggtg

SEQ ID NO: 277401 - DNA, 122 bp, Homo sapiens
gctatggcaaggataagacagactcaagacttcacataaggaagccagggacgaggagcacgtgatgtggacaagaggctagagggccgaggggggaggaggaaaagcgtgaggagggagca

SEQ ID NO: 277402 - DNA, 122 bp, Homo sapiens
tctccgttgtctgttctgccccgaaaagcttcccccctttaggtttaacctgcgcccccgcgctctgcatcagcgccgcccccgaccccgtgcagttggaaacactgggcgcctccctgccg

SEQ ID NO: 277403 - DNA, 122 bp, Homo sapiens
gggggcggggtcaggagccgagacggggcggagctaatgccctaaggttgtagagattatcgctgaaagaacgtgggagcacatctgagggtcttcatttctaaagtttccaggtgaggctg

SEQ ID NO: 277404 - DNA, 122 bp, Homo sapiens
cagagtggacactgagctccccatggtcgctaagatcctagctctactgtgtgacctcatcgatggcactggtctgttctgtgacccatggcgagggcagaggctgaggctggataccagga

SEQ ID NO: 277405 - DNA, 122 bp, Homo sapiens
ccacctgccttggccttccaaagtgctggcattacagggattacaggccatgcttggccacgtaagagtacattgaacaaatgcatatgttaacattgtttggatctagattcaaacaaact

SEQ ID NO: 277406 - DNA, 122 bp, Homo sapiens
gggttcgggtccctctagagccgggacgcggccggcgggacacacccttgccctgggagacgcgagggtccatggcctcttagtgtcggtccagctcagtttcgtgtcatttgttgttagcg

SEQ ID NO: 277407 - DNA, 122 bp, Homo sapiens
ggaaaagagattccctagctccctgcctcatcttactcccctttctgtccagcctctttccgcctctcacagactgcttccccagcagggtgcagcttcttacagactgggtctctatctcc

SEQ ID NO: 277408 - DNA, 122 bp, Homo sapiens
gaggaaggagggcgagcgaggaggatggcggagtcggggctcctgacggtaactcggggccgatgaggcggagggtgtctgttggtcggttcttcctgcctgccttcctgtccgtcgggcag

SEQ ID NO: 277409 - DNA, 122 bp, Homo sapiens
aaattttaagtcagaaattcaaagtaagtttgcacaatggcacatcaaaacagagataaacgtcagatgtgaaggaaatcagcagccaggcctccttgtttcccctcaaattttgtgttatg

SEQ ID NO: 277410 - DNA, 122 bp, Homo sapiens
ttcatttgcctttcagaaagctcagtttttagcctgggaagggcagacttcacgcagcaacgcttacaacacttcgttttccgagggaacagacgatattaaccatcccatcctcaccgttg

SEQ ID NO: 277411 - DNA, 122 bp, Homo sapiens
ccaccccactcctcacattgtcgcgcgcgcccaaaaaagaccatatttaaaggatgtggccgcgccgactcggccctgcgtgatgacgtctcagcgacatagtgggcggggccttgcgtctt

SEQ ID NO: 277412 - DNA, 122 bp, Homo sapiens
gaaaaaagaaaacacacaagatgcgcctagttaacaccgccaattggtcactgctagtcgcgattccatatcgggagcttaacaaggtaatgaccttaatgatttgtggaatttctgagtat

SEQ ID NO: 277413 - DNA, 122 bp, Homo sapiens
ccaagggagtctcccaagggctccaagggatggagcgtccgtagatgcccggaggagttgcggtgggcggggggcgcgttgtgtccaaggctgtgtcgagggtcatgtgcagccgcccttgc

SEQ ID NO: 277414 - DNA, 122 bp, Homo sapiens
acacgcctggcagggtgggcgtggggctgactgggtggtgcacagctggagtcccagctacgcggaggcagaggtcgcagtgagccgagattgcacctgggtggtgcacagctggagtccca

SEQ ID NO: 277415 - DNA, 122 bp, Homo sapiens
gccctttgctaataagccaatcagaacgtgagacgctccggtggggcggtgcgcgtcgagcgcggggtggagtctgggtgacttggctggcgggatcaagtgcagctgcttcaggctgaggt

SEQ ID NO: 277416 - DNA, 122 bp, Homo sapiens
gcaggcgggcaggagctccgaggccattggctggcgcgcgggctgccaaggggcggggagcgccgccgaaggggactgtttgctcctacgggctgtagatggagctgtccggccccggagag

SEQ ID NO: 277417 - DNA, 122 bp, Homo sapiens
cgcccagctgcggggcgagggcagggtcccgcgcagcaccccacccccggccgctggccccgcccccgcccccgccccgcctcccaggggatgtgcgagcagtctccgccctcgcgcgggag

SEQ ID NO: 277418 - DNA, 122 bp, Homo sapiens
tcttgtccctgcccaggagacacccaggtcctttgaatgcacctgcccgcgtgggttctacgggctgcggtgtgaggtgagcggggtgacatgtgcagatggaccctgcttcaacggcggct

SEQ ID NO: 277419 - DNA, 122 bp, Homo sapiens
tacttcctggccgtagcaattgaccttccgaacttcctcactccccagctctttcaggatcgcttcctgaaccctgagcgttgtggtgggcgacttgccgtcctcctgactcgggggtgtgc

SEQ ID NO: 277420 - DNA, 122 bp, Homo sapiens
tttctatgatccaggggcagcttccccagtttgtggttgatgaaaatcttttgattttcccgttttctttttctagctacttgccttctatactcctcccaaagaggtggcaatgggaagga

SEQ ID NO: 277421 - DNA, 122 bp, Homo sapiens
gcgcgatgtgtgcggtgtattcacagagagacaaagccagggcggggcgggggcgccgcccgcgaagcgggggcgggggcgaggggtgcagactagtctcccccggcgcggggtgcccaccg

SEQ ID NO: 277422 - DNA, 122 bp, Homo sapiens
ttcggctctgggctggtggtagggggctggtggtaggcgaggtggctgcggtggcccttccgccaggtgtggggtagaccgcttagaagggaaaggggatcctgaagtgcctgaggaagaaa

SEQ ID NO: 277423 - DNA, 122 bp, Homo sapiens
aggcattaaatcagccctcctcatcctgttgttgcacatcctgttgttattccccagcttcgcctcacgctcttcctccgggcaaaccctgccctcggaggactgggctggcaagagcccca

SEQ ID NO: 277424 - DNA, 122 bp, Homo sapiens
ccacaggcagcccccaccgggggagccggacgtttccatccacccagacagcagcgttcacgcccaggaccatgtgggcctgcgccccgggccgcacctgcctctcctgcattccgtgtctg

SEQ ID NO: 277425 - DNA, 122 bp, Homo sapiens
tcccgagtttgtgccacagggctgctgcgggcagtgccgctgcataactgacaacgaaggcggtagggtgacttccccagtgcagtagcctggtgctatccgcggacccgggggctccccat

SEQ ID NO: 277426 - DNA, 122 bp, Homo sapiens
agatggaaaaatgagcagaatcccgggacccccactgagtccccacttggagaggggcagcgtcagagcacgggaaagaaaaccaaagtcccagccctaggaacgtcaccttcccatgaaaa

SEQ ID NO: 277427 - DNA, 122 bp, Homo sapiens
ccagagcgtgagtgccgcaggctgggaccccgggcgtgagatatggggtctgccagggcccgggtatctggaaagcagcggcgttctatagacatgcagaggtagtaggagtgtaggggagg

SEQ ID NO: 277428 - DNA, 122 bp, Homo sapiens
ctgcctgcatgaggaagggtggacacagacagcagcagaggcctcggctgagtggacatgcgctcaggtgctgagggctgagagtgacccaggagcaacagctgagccatatttacagcccc

SEQ ID NO: 277429 - DNA, 122 bp, Homo sapiens
ttatctcctgttcttcaggtaggtgcagggagcgcggcgcggtggggctgctcctgcggccgcggcggccgctgctgggggccgcggctggtgttgagtcggagagtccagtggagcctggg

SEQ ID NO: 277430 - DNA, 122 bp, Homo sapiens
gggctgagctgtaatgggcggggcttaggactggtataggcataggcgggccttggaaggcgaaggcctcaacctcaagggaaggtgtgagtggaggggcgtggcccgcacctggagggcgg

SEQ ID NO: 277431 - DNA, 122 bp, Homo sapiens
ccaacatggagaaacctcgtctctaataaaaatacaaaattagccaggcatggtggcgggcgcctgtaatcccagctactcgggaggctggggcaggagaatcacttgaacccgggagtagg

SEQ ID NO: 277432 - DNA, 122 bp, Homo sapiens
tcagttcctcctggggtcctcaccttcactgggtcaccaggggagttgctgtgcctctgccgtgcccttcgtttgctgtgaccccacatcttaacactctgccttctcataagctgaattgc

SEQ ID NO: 277433 - DNA, 122 bp, Homo sapiens
acttacattaaccaagtgatcaaaactagaatcaccaataatgggacaaactgccttacacgcctgctgatgtgatgcaacagagagtacacgtctgcagaaaagtcttgtcaaagacacat

SEQ ID NO: 277434 - DNA, 122 bp, Homo sapiens
gtcagccaggaaggtcccacagccggcaccgctggccaccggcgcggctcccggcatgggcgcctacttacactcgtccctggccttcatgcgggcgatgaaggagtagctcttgttcctgc

SEQ ID NO: 277435 - DNA, 122 bp, Homo sapiens
ctggcgaggggagaggtcaaggcgcggcctgtccgcctggagggtgcgggatgctagagccgcagaagggtgcccagagcgtgggtcgccgcgccgaaggctgagccaggctcccggattcc

SEQ ID NO: 277436 - DNA, 122 bp, Homo sapiens
gctttttttgcagttagagtgaaactttccattggtggagtcaccccaaaggaggcgggacggagcgggaaagtcctgcctaccttggccttcccagccaatcgcagcatctatgcgtcagc

SEQ ID NO: 277437 - DNA, 122 bp, Homo sapiens
gtcgggatgatacacaaagctgcgtccaggggaacgcgtgggagctgcagctgaggctcccgctgaagagaaaagaccagtctgaaatctacaagaacaggtgtcgggaactgcgggctgca

SEQ ID NO: 277438 - DNA, 122 bp, Homo sapiens
ggggagccccggtgtgagggcatctgcacaagggctgccgtgcacacaggctgaggtctgcgtgcgtgcgtgcgaggtcagggcctgcaggccgccatgtgcctgaccacacctccgcccgt

SEQ ID NO: 277439 - DNA, 122 bp, Homo sapiens
caaacccatggagtggggttgatgctcacagacttcgcttggcattcagatgtttcagcacgagcccatctctacttataacaagagcagtctgcgaggtggagagcagccgtccttatctg

SEQ ID NO: 277440 - DNA, 122 bp, Homo sapiens
ccccaacttaggcgagcgcagtcgggacccttctgtcggggctctttgttcgccgcccctcggcgttccagctctcaaccttgctcccagcagcccccgccggcgcactcgacctacaggaa

SEQ ID NO: 277441 - DNA, 122 bp, Homo sapiens
tccccttctccagggctcctggcaccagctgggcccatgactccagggctgccggccaggcgctgggtcagcgggaagggaagggaagatctaagaggagctaggtcctctagaggagagag

SEQ ID NO: 277442 - DNA, 122 bp, Homo sapiens
gagagcctcagacggcaatgcagatctgaccaagtctctgccagcccagcagggagatcccggtggagactgccgatttgaagagtcccgcaatgggatgacgtggccgggcacttgcaccc

SEQ ID NO: 277443 - DNA, 122 bp, Homo sapiens
cctgctgccggcccctcttccccgacggctaataataaacccgggttcctgtttcccggccgcggccactccagattcggggctgaggggctcactctgcaaccaaggcacgtgcattctgg

SEQ ID NO: 277444 - DNA, 122 bp, Homo sapiens
aaaaacggaaacggttacaatgttttttaataagcgtcccccatcaatctccctccccctcgtcccgggccgtgggcaccggggaggagggggaagggtggggggcaccggggcgcgctgct

SEQ ID NO: 277445 - DNA, 122 bp, Homo sapiens
actatgcaacttcttggcagcaatacatgtacttaccaataccaatcactgttgtgatcccgcctagccaactaccagcaagtctgcactaagtctacaattcaaaggtgagaactttcctg

SEQ ID NO: 277446 - DNA, 122 bp, Homo sapiens
ggctgtgttgttcaatttcagtgtatgtgctgccaaagcgagcacaggctgcctcattcacgtttgtaccccggcccttggtacaatgcctgacatgaaatgggtgctcacagcttgtttgc

SEQ ID NO: 277447 - DNA, 122 bp, Homo sapiens
ggctaggccggagctgctggtgggaggcagccacttgagatcaccaggcctcctgtagaccggcgggtgcagggcccggtcccagagttaagggtgtgagtgagactgctgcgggcaggggt

SEQ ID NO: 277448 - DNA, 122 bp, Homo sapiens
aaatattagcaacatgcttggcagcttaactccctcattgcaatactcaagaaggtactgcggatcttattccttacctggaacaaaatcttcttagtcaatgagcaatttcatagggtggt

SEQ ID NO: 277449 - DNA, 122 bp, Homo sapiens
cgatcctcaatttcccatgtctcatgggggacagtgacaaggcagcaagcacacggaagacggcttagctgtgcccagactccaggcccaagagcccacagcacctgcagaaaaagttccaa

SEQ ID NO: 277450 - DNA, 122 bp, Homo sapiens
cagggccggcagggcgggtcagctgctccaagtgcggggcccgccaagcccacgcccacccggaactccagctggcccacaagcgccacgcgcagcccctgttcccgctggcgcctctccct

SEQ ID NO: 277451 - DNA, 122 bp, Homo sapiens
gagtgtgggtaaaagcttctggggtctgaggggaccactgtacctgatcagcgcgcaatccgcccttttgtattatttaagaaaggcaccagtaagccttctcctctagggcgaaaatgctt

SEQ ID NO: 277452 - DNA, 122 bp, Homo sapiens
gtcctgccttggccctcgccctgcgaggaaggggtaccttaaagaaaagcttcatgttcacgcagcagaagtcgtacgtctggtagagctccttcagcacatttacagccagggagatgcca

SEQ ID NO: 277453 - DNA, 122 bp, Homo sapiens
agtaggaggggatgacactgtactttatgcttcttgtctgggattcctaaaggaggcatacgtgcagaagcactgaatgactatgagggagcagtaggcagaacccagacacactggcagag

SEQ ID NO: 277454 - DNA, 122 bp, Homo sapiens
tgcgggggagaggcagacataccacgaaactggtttcatccgtgacgaccttgagcacgtcggtgacagaaatgtagcccaagcgcttggctatggccagaggtgtggttccatcctgggga

SEQ ID NO: 277455 - DNA, 122 bp, Homo sapiens
gggtgtcctcgaagaagggcctgagcagcagcagaggaccccaggcgaccgtgcctgagccgggcgccgacgacgactgagcacctgatatgtccccggcactcgcagccccgcggccggag

SEQ ID NO: 277456 - DNA, 122 bp, Homo sapiens
gccccgagcacacggacgtggcagcgggcagcgggcagatggtgcacagtctcacatcctcgggcatccggcggcgcggggacccctgtggtctctgcactgcgggcacctgcaagcagagc

SEQ ID NO: 277457 - DNA, 122 bp, Homo sapiens
aggtgcaaggtggtgaacgagttcctgggctcttcttttgtgtgtgatccaatccaattccgatgcagaaatccggcgagggctgggaggaggctaagtcgggcgtggggaggaagggtgat

SEQ ID NO: 277458 - DNA, 122 bp, Homo sapiens
ctagcggctgcggagggtgtactgggtccgccagcagcgccagcccaccgacgctgcaatcgatttctcactgggccttagctgcattcccgcggggcaaggctcgggacttgcaacccgtc

SEQ ID NO: 277459 - DNA, 122 bp, Homo sapiens
ctggaggaaaacaggacttggggtgctcctgtgagagcggtgggttgagatgggagcccacgggggctgttaatgcctagttcagaggatgggaaaggcagttggagagacgaaggaagggg

SEQ ID NO: 277460 - DNA, 122 bp, Homo sapiens
agataacattgtcctagtctccttatttctgacgaagagtcttagctttcttacagcttccgtgaaatggtggccaactaacttgttagcttgcaagtagagtaaaatcttatactcttcac

SEQ ID NO: 277461 - DNA, 122 bp, Homo sapiens
tagtattcattagcagtattctgcctggaagccagttcttcctatatcaaattgtggacacgaagaaaggaagggagcagccactgaaagtgagaggtactatacacacattaatttattta

SEQ ID NO: 277462 - DNA, 122 bp, Homo sapiens
gctgcgccccgtgctgcctccccccagagggccacccgctgtgctcgtggactgaggctgcgctgcccgggaggccttactgcttggtgtcagactgcccagctcagagtgcccgtcagggc

SEQ ID NO: 277463 - DNA, 122 bp, Homo sapiens
ggcctagcgcgcgacggtggggtggagctagcctcgtgaccttttaccccaacatggctgcgcccgtgggaccggtgaagttctggcgacccggtaaggcccttggtggaacgctgggcaga

SEQ ID NO: 277464 - DNA, 122 bp, Homo sapiens
tattgagccctcagagagtccacagtccctcctctcagttcagtcttgtctccagatggtcgtaggggagcgtgtggggcataaagtgctgtgaacttttccatcttgttgttttatttttg

SEQ ID NO: 277465 - DNA, 122 bp, Homo sapiens
ccggagccgcgcaccaggttgccaggaggaggcgggagcgcggaggcgcccggggtgagacgggggcaccctctgcatcataaaggacccagacgccagcaccctcaacgtcataaggaatc

SEQ ID NO: 277466 - DNA, 122 bp, Homo sapiens
tgtggtcagtgctgttcccatcccttcttctaggcacagagccagctggagagtttggagcgctggatctggagaggcaaagagatttttagcgcagaggattctcaggggtgtacctccaa

SEQ ID NO: 277467 - DNA, 122 bp, Homo sapiens
ctactgacatcccctaagatttctgagctgctctcttcatcaagatagattttcagtgtacgcctaacacatcagcttctctgttcctctgccttctgccatgctccctgagttagttaaac

SEQ ID NO: 277468 - DNA, 122 bp, Homo sapiens
acgcggaactgcctagttggggaaaatttcaccatcaaaatcgcagactttggcatgagccggaacctctatgctggggactattaccgtgtgcagggccgggcagtgctgcccatccgctg

SEQ ID NO: 277469 - DNA, 122 bp, Homo sapiens
cagggctcagaggttctgtttctctaaacccagaccaaatgtgtttgggtggccaggcctcgtaatctcagcagaggaatgtgcatgccacagggctgcagaaaacagtttccagcggtctg

SEQ ID NO: 277470 - DNA, 122 bp, Homo sapiens
agggtcttccttgcaagatgagcttctacttactccactttctgcagatgacaggtgctacgggttacgtggtcacaaagaatccgcacagaagagtcactcaggaagctttgtttcacttc

SEQ ID NO: 277471 - DNA, 122 bp, Homo sapiens
attcccaaccaacagccatttcagggaggggctacccaggaccaggcttttgatgaaccacgactgttcggggtgccgtcttgggagagccacgtcagtccctctgagattccaaacggccg

SEQ ID NO: 277472 - DNA, 122 bp, Homo sapiens
aggaaggctgatcgcttgagcccaggagttcaagaccactctgggcaacatggtgagactcggtccctatgaaaaatttaaaaattcaaaaattagcctggcgtggtggtgcgtacctgtgg

SEQ ID NO: 277473 - DNA, 122 bp, Homo sapiens
cacgacaactctgaaggagatcttgaatgtggcctaaaaagttcaggtgtttttgatggacgttgtcagcaaacatcactgaaattctcagcacttgaggactttcagcctgaacttgaggg

SEQ ID NO: 277474 - DNA, 122 bp, Homo sapiens
tgtcgcgacggcagtgaccgctcgggacagaccctaactagaaacctagaatgaggggaccgctatgccgtgcggggcccgcgggctgtcccactcgagggctggagccggcatcgcgcatc

SEQ ID NO: 277475 - DNA, 122 bp, Homo sapiens
gtggctggtgactctagtgtctctagggccacctcactttcagcagtctgtcccaggtgtcggactatgggaaacaaaacagacagcgttggaagccatggcgcctctgtgcctgcacgtcc

SEQ ID NO: 277476 - DNA, 122 bp, Homo sapiens
actcgttctccgccctaatttcaagtcattcaaaactctgtcccttttcattggctgaagcggcggcatgggtacctctcaggaactacaattccagccaagcaccgcgacaagtgaacgga

SEQ ID NO: 277477 - DNA, 122 bp, Homo sapiens
tcggtagacttcgggcgggccctgagggctgagccaggcttaagagggcgggcggggccgcggggcatcgacaggtcgagggtagggaattgacccggcccacgcagatccccgcgtcgtct

SEQ ID NO: 277478 - DNA, 122 bp, Homo sapiens
ggtattcctggccgcgggggcgggggggggggtccgggggccgggggagcgtcgcgctgacggcagccagagcctgcgatgacggggctgctataaataacttcttggaggctcccacaccc

SEQ ID NO: 277479 - DNA, 122 bp, Homo sapiens
tgaggagccctgggaacaggaaggagaaaagaataccaaaagtgacaacagtttgccaatcgcagtctttaatctgataaagcggttatctcgtcttgagtcccaggtgccgagtcaatccc

SEQ ID NO: 277480 - DNA, 122 bp, Homo sapiens
ctgggggatggggtctgaaggcagccgccgagattcagatgagattggcgcagttatgaacgtgatagcagcctagcatactctagaaagaaaagatgaaaagcgtcgggtggaagagatgc

SEQ ID NO: 277481 - DNA, 122 bp, Homo sapiens
cattcaacaaggcagtggaagaagaagcagacaatgatgacatctgcttcccagtagagccgggagaataaaacggctcaagtccaataaagcgctgaacacagcacctgacatggcagcca

SEQ ID NO: 277482 - DNA, 122 bp, Homo sapiens
ggcccgagtggccctagccccagttcccggtccaccccagggcgcccggcccctcacctccggcatcggtcatcttcagcgtctggcgccccgggaacccctcaggcccatggtgctcgagg

SEQ ID NO: 277483 - DNA, 122 bp, Homo sapiens
actgggacagaaattttttaagaatcttagccagtcatgacggcatgcacccatagttcccgttaattgggagtctgagccaggagatccctcaagtccaggagctgggggctgcagtaagt

SEQ ID NO: 277484 - DNA, 122 bp, Homo sapiens
cacgaggcgagtgggcgcgcgggatggggaatcgtgtggccgtgggagctgcggggcagccgggctgagcgctggctcggggacttgaggggcaacggccggcgcgcctcagtctacacagc

SEQ ID NO: 277485 - DNA, 122 bp, Homo sapiens
agaggctgaggcggcagaatcacttgagcccaggagttgcaggctgcagtcagtgagctccgattgcaccactgtgctctagctggagtgacagagcaagacccccatctctaaaggaaaaa

SEQ ID NO: 277486 - DNA, 122 bp, Homo sapiens
atgtgcctgcatctgtagtctctgccagtgcatgtgcttgcatatctccatatgtttactcgaggtgtatgtagcacagtccctcccttctgaagttaggtgtgtacatgaatacacgtgtg

SEQ ID NO: 277487 - DNA, 122 bp, Homo sapiens
gttcttcagaattccaaaattaaaagctcttctggccccacgccattagtgccctctgtgcgtacccaggactgagtacgttgaagaagaaagaagagaaaggtatagctaactcatgtaaa

SEQ ID NO: 277488 - DNA, 122 bp, Homo sapiens
gccgcgcccgccaagccggggggcgcgggcggctccaagaagctggtcatcaagaacttccgaggtgggtgcggcggccgggtcgagggccaggcgccccgggcggggaccccacgagaccc

SEQ ID NO: 277489 - DNA, 122 bp, Homo sapiens
tcggttatggaacatttcgttcattttaatttttcagtattataatgctgcagtgaattacgtagctgtctctccgtgcagatgggctgttcctctatggtagacggtgaatggtggaatta

SEQ ID NO: 277490 - DNA, 122 bp, Homo sapiens
gttttgaaaccctctttttttggaatctgcaagtggatatttgtctagctttgaggatttcgttggaaacgggattacatataaaaagcagacagcagcattcccacaaacttctttgtgat

SEQ ID NO: 277491 - DNA, 122 bp, Homo sapiens
tggggagccggggcctctctgctccgccagaacccagcgggggcaggaccccctagaaggcggcccattccccgctcccgattcatttccttgaagcagaagtgcggtaaagggcccgccgc

SEQ ID NO: 277492 - DNA, 122 bp, Homo sapiens
tgcacgtgcatcgacggcgcggtgggctgcacaccactgtgcctccgagtgcgccccccgcgtctctggtgcccccacccgcggcgcgtgagcatacctggccactgctgtgagcagtgggt

SEQ ID NO: 277493 - DNA, 122 bp, Homo sapiens
tggagaatgagttcaaactgccagggtcttcccttggtctttgtgcgtcaggaaggactccgagtaattattccctatgcagagacaggagagaggtcttgtttacatgagtgtgctggggc

SEQ ID NO: 277494 - DNA, 122 bp, Homo sapiens
ttcccgtgctgccctgggtccctgtgacgtgctttcccttgctgctgtgcgtccctgtgacgtgcgttcccttgctgctgtgcgtccatgtgacatgtttccgtgctgccgtgcgtccctgt

SEQ ID NO: 277495 - DNA, 122 bp, Homo sapiens
cctctgggactgaggggatcagagagtaagctctcatatctggctcccaggaatggccatcgtctgaccaaccctgatcacctttggtcctggtgacttttgtatcttgccccatgggggct

SEQ ID NO: 277496 - DNA, 122 bp, Homo sapiens
acatcacttcctggaagccctagtcagcctttagcccaagcaatgctgagcccaatccttcggccttccgtagtctcgctcggtttcgcgagatcgaggctgagctccgccgcgccgccgtg

SEQ ID NO: 277497 - DNA, 122 bp, Homo sapiens
ggggaggaggaggaacgctggtcgctgagtgactccagaacctgccggccgagcagggcccggagttagacccactgggaccctgcccagggcttgaccaacaaggagaagccacagaggcg

SEQ ID NO: 277498 - DNA, 122 bp, Homo sapiens
gtggtgatgaccgtgatcgcaaagtagaaggagccggcgaatttccactggacgccggcgcggtgcggttccgactgcaggatcaccagctccagctgccggtagtcctcgctgctgatgtt

SEQ ID NO: 277499 - DNA, 122 bp, Homo sapiens
tctgtccacgtggccttcgcgctccgtgggtcccacctttggttttggagatggttttctcgatgggggctgggaggcctttgttggagaccttgcacttgtactccttgccgttcagccag

SEQ ID NO: 277500 - DNA, 122 bp, Homo sapiens
gatgaagtcaggcttggggcaggagttgctggcgttgaggacgtagcttattccattttgcgtcatcagatcctggaggggcgggagggcgggttggaaaggggtgggagaagctcggggcg

SEQ ID NO: 277501 - DNA, 122 bp, Homo sapiens
gccccaaccctaggcctgctgccttggggaatcgacagtgaatgcactgtgggtcagtgtcggggaaagaggagtcagcctccatgaatagccatagaatgttgaggaagattcctgcttaa

SEQ ID NO: 277502 - DNA, 122 bp, Homo sapiens
tgaaccgatttgcaggattcggtataaatcctgaaaggcctcatccctgagcatcttgttcggttttccttttaggtaaaccggagcactgctcttctgaagagcttgtctgctgaacgtga

SEQ ID NO: 277503 - DNA, 122 bp, Homo sapiens
gaccccgccccgcgctgcgttgcagcatggtctgcaaaccaggccgggggcagaggggctcgcacctgagtagcggcctcgcgcagctgcgcgctcagagccgagttcttgagcgtctcgcg

SEQ ID NO: 277504 - DNA, 122 bp, Homo sapiens
ctccttccacactgtccccgcttccctctgccctgcattcctggtccctgcctgcagccccgaattcctgcagtgtgcgaggcagcatgtgcataactctggaattcactttctcatctgcc

SEQ ID NO: 277505 - DNA, 122 bp, Homo sapiens
agctggtgcttccaccaccgcactgcctgacagaactttctcgacggtaaaaacctcctgcgtctgcactgcccagtgccgtcacggctggcgccatgtggctgttgagtgattgaaacgtg

SEQ ID NO: 277506 - DNA, 122 bp, Homo sapiens
cggggcggcctcacaacccacaggggtctctgtccctccgccactcatcccgaccagttccgcccacccgcggccacgctgcgcctgcgcaaacccggccgccctcttacaaggcgcgcccg

SEQ ID NO: 277507 - DNA, 122 bp, Homo sapiens
agttaccgtagcagatactgaaattcctccggagctcgctcggcttcgggggttacaccgcgttagatgcaggacatcaacatccaggacccgccggaagctgttacagcggaatagcgccg

SEQ ID NO: 277508 - DNA, 122 bp, Homo sapiens
agtccttcatgtccaccagcatgaaggggacgttcagggcctgcagctggctggctgctgcgatcccgccaaagcccccacccacaatcaccacgtgcagagctcccgattccaccgagacc

SEQ ID NO: 277509 - DNA, 122 bp, Homo sapiens
tcacaacactggagtggagaagcatagcatgccatattcccacaatggagtctcgtataacgatgacagtatatgcacgaccacatgaaacaacatggagagacctcacaaacggagtgttg

SEQ ID NO: 277510 - DNA, 122 bp, Homo sapiens
ctggaggtagacaggttacctaaatgaacgccagcagggaacgagccctgcaatccctcccgagggctacagacctgagacgggctccaggaaaaggagggaaggctcgccccgacaccgac

SEQ ID NO: 277511 - DNA, 122 bp, Homo sapiens
agggccgcctgcagagcggagggtgctgccccatgcccggctgcagaaggtcgtgtggcccgaggtcacacctagcagatgaaatggcaagagacaggaacaaagaggaagccccgtggtct

SEQ ID NO: 277512 - DNA, 122 bp, Homo sapiens
tttcctcttcatctgtctcttttatttatcaaaattccaacctggctttttgctcaaagacgctgaacagagcccctggctttgcctgcgctgcccattgctataatgcagggctctgttcc

SEQ ID NO: 277513 - DNA, 122 bp, Homo sapiens
ttatgattctcacacaaacacatactatctacaaacttttggccacaacaccatggatgccgttcccaagatagagtactatcgtaacaccggcagcatcagtgggcccaaggtcaaccgac

SEQ ID NO: 277514 - DNA, 122 bp, Homo sapiens
taaaaatacataaaattctgccacacttgtttcatccatctccattttttcttgctgaaacgttttaaagcaaaccccaaatatcttactttcaacttcattatgcatttattttaaaaagg

SEQ ID NO: 277515 - DNA, 122 bp, Homo sapiens
cggtgtaatgtccgaggctgcggtgtaatgtccgaggctgcggtgtaatttccgaagctgcggtgtaatttccaaaaatgtaaagtctatatttgcctggatattgaggctatgtcaggtga

SEQ ID NO: 277516 - DNA, 122 bp, Homo sapiens
acctcatgagccacctgccttggcctcctaaagtgctgggattacaggcatgagccaccgcgcttggcctagccacaagattattaatagttgtgacgtataatgttttgtgtcgacttgcc

SEQ ID NO: 277517 - DNA, 122 bp, Homo sapiens
gtgagccgagatggcaccattgcactccagcctgggcaacaagagcgaaactccgtcccccgaacaaaaaattcaaatgggaaagagaggcagatggcagagaacaggggaggggctgggca

SEQ ID NO: 277518 - DNA, 122 bp, Homo sapiens
tacttggttagtgagagggagcgagccccggcgcctttgcagcccaggcgtgtgtctgtgcgggctgagtcccgtctccatagatgggggcctggactgccagctgtgcctgtggacacggg

SEQ ID NO: 277519 - DNA, 122 bp, Homo sapiens
aaaataatatttgagaatctatactaataatcttagtaggtcctttaaagactcaacagacgtgggggctaaatatgttgctttggtatcctgatataaacttaaaagaaaactacagtagt

SEQ ID NO: 277520 - DNA, 122 bp, Homo sapiens
ctcctcctcatgagcccacacatgtggacccagtctctctgaagtgagctttgtaggactcggcggcgaaggggacgagaaaatacagatgacaaaacgacgccgaaaggcttgacctctgg

SEQ ID NO: 277521 - DNA, 122 bp, Homo sapiens
gtggccatttcttctcaaagggtctgcagtcacttaagatagcaacgcgtaaaggacagccgttctgagaagacaaccagctcccctgagatgggaggcgggctgcacgctggtaaagagga

SEQ ID NO: 277522 - DNA, 122 bp, Homo sapiens
tgcagagatgcacagccctcttggcgctgggccctgcctgggccccggggccagcccctgcgcctacctcaccacggccctgggcccgcttctggttccgggcctcctgcttagcccggtgg

SEQ ID NO: 277523 - DNA, 122 bp, Homo sapiens
atctcacataattttggttactggagggtacacaacacaaatctagcaagctttcaaaatcgatgtgcccagcctaaattgacgggctgtcactgggactgtcaatgatggaaaaatgaatc

SEQ ID NO: 277524 - DNA, 122 bp, Homo sapiens
aactggtaattttctcccttcgcaggggagggtgcagaggctgaggctggcgtcaccttccgttgctaaggtaacgtgctctggccattttatctgataaaggaagtccagtggactgtatg

SEQ ID NO: 277525 - DNA, 122 bp, Homo sapiens
ctagcatacagctagttgattgtttagggaaatgggaggaaagggagatgggagaatacccgggaagtgattcagagcatgtattgccaaaatttttacactgtgcatgctttgcttttcca

SEQ ID NO: 277526 - DNA, 122 bp, Homo sapiens
cgcctcaccgcagtggggtttttccagcctaccttgtgcagctgcggttctcagcatccgcgggcggaggcctgcagccggtcagccggtgcgtcccgcccacggcgcggggccttctggca

SEQ ID NO: 277527 - DNA, 122 bp, Homo sapiens
gtttaggaaatcactcctgtatgctagcaggaatgttgctggcaagacacttctgagcatcggggtgtggactttacgaaccaaccttttaacagtaactctaggagagaggatatcaaaaa

SEQ ID NO: 277528 - DNA, 122 bp, Homo sapiens
tgggaattgtagtcccgggccggaaacgcaggagacgccagaaacccaagtttgggacggcgcgtcccaagggtttctggaagttgtaacctgtgctccgagtgcgtaggcgcaggaaccct

SEQ ID NO: 277529 - DNA, 122 bp, Homo sapiens
ctgcctcatttgatggatttcttacatttgggcttgccataccagttctcctccccacctcgttttatgatacatggccacttactctcttccaattcctaggcttggggtaaaaacagaac

SEQ ID NO: 277530 - DNA, 122 bp, Homo sapiens
gtccttagactcaccgcggggaggaagcggaccaggcaactccacagcacggaaacacagcgccacgagctccaggcggatgctgagagccgccccgagtccccgccctcctctgccccgaa

SEQ ID NO: 277531 - DNA, 122 bp, Homo sapiens
tacccgcttcagatgaggaagcaggggcagaaggcagttgggcctatcgcagcagcaggtcggtggtcaaggctagattcaaacagcctgtgtcataattgtcactaagctgttctcctgcc

SEQ ID NO: 277532 - DNA, 122 bp, Homo sapiens
tacgtgatggaactcgccaggcgggcgcaacaggaggcccgcccgaggggagtgcacagccggcgcatcacgtgactctccctgccaacaggtcgcctgaggctcggcccgcggggtcacag

SEQ ID NO: 277533 - DNA, 122 bp, Homo sapiens
agcacccctggaggaaaaggctgaacggcactttaaaggccacgggctcccacaggcttccgtcctctctcgcgagatcggactgacaacccccgcccgctcgccccgctcccggcatcccc

SEQ ID NO: 277534 - DNA, 122 bp, Homo sapiens
tgaggcgccccaggattggctgcgctgctgtgggccacggaaagcgacctgttcaggtgccgtgttccgcattcggcgaatagttgtgcttcgctcttaagtaccaggcaccaagtccccag

SEQ ID NO: 277535 - DNA, 122 bp, Homo sapiens
ctcctagcatttaacacaaagtaaaaaccaaacaccagtattttgagatccacttcacaacgagagaaaggtaaaagcaatttaccttacctcaccctacaacgaacttgtttgttcccaac

SEQ ID NO: 277536 - DNA, 122 bp, Homo sapiens
ggcccaacgtaggcttctggaggcaactgatagactacgagcgccagctctttgggaagtcgacagttaaaatggtacagacaccttatggcatagttcccgacgtctatgagaaggagtcc

SEQ ID NO: 277537 - DNA, 122 bp, Homo sapiens
agagaagggggcaggggaggcagactctatctgcgggaaccttccagtggccggctggaacgcctccggagggcggtgctcttttctcagcggccgcagggcagggggcggggccgggtttg

SEQ ID NO: 277538 - DNA, 122 bp, Homo sapiens
agggagggcgatattccagtgctgatcccattttcctcccctcctcgtgggaggccatcccgggagatctataggagatggggaaggctccccactgcccctggtacctgcgcgctgcagcg

SEQ ID NO: 277539 - DNA, 122 bp, Homo sapiens
acgatttaggatatctggcagaagaaatttctaagcagcaaagcattcaagaggtgacctcggtgctcttaaaaggattcaattttatgcatttacagagagattgtttgaaattggaactt

SEQ ID NO: 277540 - DNA, 122 bp, Homo sapiens
tgacgatgctgcaaatgagcggtgtacagggttggcgggtgttgcaggcaggtttcctgtcgttggcgccacgtgctgcagaaagaggacccctccccctgcgggccgccgctgcgcccgtg

SEQ ID NO: 277541 - DNA, 122 bp, Homo sapiens
agaccagctctgcctgtagcctctgcacttacggctgccttcgctggactctcgcccgcacgactccgccctttcactgtgctctgctgaagcgttcctgactgccctcccccagaacgcct

SEQ ID NO: 277542 - DNA, 122 bp, Homo sapiens
cggcggaaggcgtgcaggcggcctctgggcggcggctgcaggggagacagtggaggggcccggcgcccttgtccgcccgcacgtgctcggggcggggcggctggggcccgacgggcggggcc

SEQ ID NO: 277543 - DNA, 122 bp, Homo sapiens
ggctggtcgaggactaagaagagggaagagaggatctacctggaagttgggcctccggagcggctcggaggcggcgtctccaggcacctgcttgctcttcgtctcctgagggcacggggcgt

SEQ ID NO: 277544 - DNA, 122 bp, Homo sapiens
atgctcaatcagactggtcaggaataaaggggaggatgggaggaatgagacagctcctgccgggtgtacgtgtcctcctgagggcggttttcatacatccattcaatgcaaccacagtatct

SEQ ID NO: 277545 - DNA, 122 bp, Homo sapiens
ctgaggctgtggggatggaatctgttcgcactgcctggctctgcacgggcccctctctcccggggtgtgttggccaatgcccatgccttaccttgaaggcagccttccgttcccgccggtcc

SEQ ID NO: 277546 - DNA, 122 bp, Homo sapiens
ctgccagggtctccactgagaaggagtcctttgtaatctatgcgtgtactgggggagattcgccgagactgaaaacaccacgtttctctgtgaacgttgccccgatctccgcacccgttggt

SEQ ID NO: 277547 - DNA, 122 bp, Homo sapiens
gcagaggcgctccgctcccccaccccaagaagaaaaccggtgtgtatcacattgcaaaagcgattgtctggcacttgatgaggtgaactccaggttaatctccccattacctacctgggtct

SEQ ID NO: 277548 - DNA, 122 bp, Homo sapiens
atcagggctgctcttactctggagtaaggagaggaaggctaagacacaaaagggggactccgcccaacccagcttatgtcctgtgataccagaagggagcattgcaatgacctattaaacct

SEQ ID NO: 277549 - DNA, 122 bp, Homo sapiens
gcccgggcgctgttacctggtggggctcttcttgtctcccatggcttggctatcaccgcacgccgagagtcgccgccgcgaccgctctgtttgtcaataaggaggataataagccgggcgga

SEQ ID NO: 277550 - DNA, 122 bp, Homo sapiens
tctcacatgggactaaccaggtctactagccagagttatcacaaggattgagttggttaacgttcccaggacaggcccagcacatagtagggacttaatcaatggcagttgttgtggatact

SEQ ID NO: 277551 - DNA, 122 bp, Homo sapiens
cgaaaagcccacctgggatccgagcgggcggccgcgccactctcgcaggctccatacacccgccactacccgcctgtaccacctgcagccggcagcgcagcctcctcgcgggtcccgcaggg

SEQ ID NO: 277552 - DNA, 122 bp, Homo sapiens
gactcggcatctgttcaagtcgaccagaagccagaaggccgtacagtgcggggtagctggcggcgggtaatcaaattgaagccgtagcctaaccgtctcggaagctgccatcttgcttggtg

SEQ ID NO: 277553 - DNA, 122 bp, Homo sapiens
agaagacagaacctggtcttctgattccctgtgttctgcttttttcattgttccactggacgctcatcagagggaagatctttttcctcaattggtgagtcccgcacacaaaaagaacacat

SEQ ID NO: 277554 - DNA, 122 bp, Homo sapiens
acacagcgccttgcaactggtttgcctaggctgacaggaagcttgcacttcaagaaaactcggctctctcgagaaagggaccggtgcgcgcctccacctccccaagggacaaaccgcggcac

SEQ ID NO: 277555 - DNA, 122 bp, Homo sapiens
gtgctttgataaaaatcactactaggtttcccaactgggtgtcattatcatgcattaacccggcatttctcttcctttggttaaactcttgaattcctgtatcaagcttgagggagagaaat

SEQ ID NO: 277556 - DNA, 122 bp, Homo sapiens
cacccacagcaggttctgagtccgaaagagaaatcacaccactctccgtggcacagccagcgaccaatctcgcctgtctcaaagggccccctagtggggccccttgcctggagctggacaag

SEQ ID NO: 277557 - DNA, 122 bp, Homo sapiens
aataacaggcatttgccccagaggccgtggagtggcctcactttggggtcgtgggcagatcgctggctcccacgcctggacttcgggatcgcaggcaggatcccttccagcccaagcactcc

SEQ ID NO: 277558 - DNA, 122 bp, Homo sapiens
tcccacttccggtggggtgtcatggcggcgtctcggactgtgatggctgtggggagacggcgctagtggggagagcgaccaagaggccccctcccctccccgggtccccttcccctatcccc

SEQ ID NO: 277559 - DNA, 122 bp, Homo sapiens
ctgccttccaggttcaagtgattcctctgtctcagcctcctgagtagctgggactacaggcgtgcgccaccacatccggctaatctttgtattttagagacgggatttcaccatgttggcca

SEQ ID NO: 277560 - DNA, 122 bp, Homo sapiens
tggacaacaaggtgaaatcccgtctctactaaaaatacaaaaattagttgggtatggtgtcgtgagcttttaatcccagctacatgggaggctgagacaggaaaattccttcaaccagggag

SEQ ID NO: 277561 - DNA, 122 bp, Homo sapiens
catctggaggccacaccctaccttctaagtcaccaggccatcaagtccagacaaagggatcgaaagagtgagacagtgccagccacctcccacccaagccactagcaagactccacaatgtc

SEQ ID NO: 277562 - DNA, 122 bp, Homo sapiens
tccgtcttttagttgcttctcttccttttttctctctggtttctcatcactccaaccagccgcaaccatgcccaggaagaaggcggcggtggcggcctgggaggagctgagctcgggcaacg

SEQ ID NO: 277563 - DNA, 122 bp, Homo sapiens
gcgggcgacagtcatctccgaagatctcagatcccagtagtgcgggagcactagccgcctcgggttgtagatttcactcaaatgacaagtgaagctagttctcattgagaatgccacccaca

SEQ ID NO: 277564 - DNA, 122 bp, Homo sapiens
cttgccctgagagctgtgggaacaggatcggatttgcatttgagaaggggaggctgggagcgggaggggacgtcatgggctgatgaggaaccacatacgtgctgaccccatggaggagagag

SEQ ID NO: 277565 - DNA, 122 bp, Homo sapiens
gcacacgcgtggacctgcaggtggcacggcgccctgtacatacagatcaagagcagcatgcgtgtggacctgcaggtgacacggcgccccgtacgtgcagatcaagagcagcacacgcgtgg

SEQ ID NO: 277566 - DNA, 122 bp, Homo sapiens
aggtaaaagtgccccgtttttggtcggtttcagcggccgcgcctttccagccccgcctcgcgtggctgcggcagcagacactttcagcagacgctcactgcgatcaacaagtgcgcggccgc

SEQ ID NO: 277567 - DNA, 122 bp, Homo sapiens
ctgggccttggagcacctcacgctgggggaatcaatccctgagggactcagaatcttctccgtgcaacctggaaagttcatctcttgtttccttcagtcaaagaaagtccattgtacataac

SEQ ID NO: 277568 - DNA, 122 bp, Homo sapiens
gccgttcccagcgccagcgcggtgtggtggatcgtgattccggcccggagctgtgctgagcgttcacggccccgcggggctcaggtgtcccggggccgccccttagaaagccggaaggccgg

SEQ ID NO: 277569 - DNA, 122 bp, Homo sapiens
tccccagccctcaggaccaccactaggaacgcacatacccacaccaccaactcagggatgcggtctatggatttcacacagcacgagctgcacgaattatatggaacacaaagggaagacca

SEQ ID NO: 277570 - DNA, 122 bp, Homo sapiens
gtcataggaacaccctgaaagcttgcaggagaactccatggtgggagcccggcaaagccccgatggagcccacgttgctcactcccaagcagaggccgtccccacagcctggtggctctcac

SEQ ID NO: 277571 - DNA, 122 bp, Homo sapiens
ttcgtacatgattctaatgagagatgacggccaggtgttctcagcagcccctggccctcacggggcgacctgaaagttcccactctacccgagacgaaactcagagccgaggtgggggcgaa

SEQ ID NO: 277572 - DNA, 122 bp, Homo sapiens
tagactgatacccagtttgctggaagccgggaattcctgtctgcatttgtcttgacttggcgccatctagaggtgcgtgaaatcctgccacccggcagaaccccattgtttctgcgggaact

SEQ ID NO: 277573 - DNA, 122 bp, Homo sapiens
aacacgctaaacaacagattttcagtgcagacaaaacagccttctgttggaagaagatgccgtctaggactttcatagctggagaggagaagtcagtgtctggcttcaaaggacaggctgac

SEQ ID NO: 277574 - DNA, 122 bp, Homo sapiens
tgggcaattgccagttcccagaaggacgcgccgggggcttcaggatgtttgattccctaccggtgaagcgcttgtccaagtcttccggatgatcagaatagagtctatatttgccaaaatca

SEQ ID NO: 277575 - DNA, 122 bp, Homo sapiens
caaatctgttttcagagatctttcagccctgtaggtatctaactaagcacttaagtgatgcgattgtgggagaaggcagttaagggcacactctggagccttataataggttgggtccaagc

SEQ ID NO: 277576 - DNA, 122 bp, Homo sapiens
caacgcgcgattttaaaggcgagtggtgaggacatccgcatttcctcactccaccttgcacggctatgaggtcccctcctttttttttttttttttttctttttttggatacagtctcactc

SEQ ID NO: 277577 - DNA, 122 bp, Homo sapiens
ggggctggagcaggcggttccgaaagcgggaagggaccggcttagccacttggctcctaacgccgtcttcttgttaggactagtggttacccagcgcccaccgcccaccgccaaccaggcat

SEQ ID NO: 277578 - DNA, 122 bp, Homo sapiens
aagagacacttaggtctgtgagcacagatgtggtgtgtgccctagcccacccaggggcgtcgtctgtagtgaagccacggaggtgctccggccccggggcgactttgccagggctgggccat

SEQ ID NO: 277579 - DNA, 122 bp, Homo sapiens
cgtcgcggccacaacaaaagccttgggcgccggactgtggcgggctgcggagcgggggcccgggcccgcggtggcggctgggggcctcggggacgcctagtttgaggctgggggctgagggc

SEQ ID NO: 277580 - DNA, 122 bp, Homo sapiens
tgtcctaacggcggctgcagtggcttttgagcgctgaggaagcagtctgggaactgaagccgctgtgtatccgctctctggagacctgaggggcggccccgacgccctccagggctgagtac

SEQ ID NO: 277581 - DNA, 122 bp, Homo sapiens
gcaattccgtagtggaggcgggctctgggagcaacggccccgccccttttgggggttcaccgaggttgggggagggatggggcctggctcaaggcggagaagggggttgcagtctagggtct

SEQ ID NO: 277582 - DNA, 122 bp, Homo sapiens
ctgtggctgcaccaggctttcttcagcccatggacattactccgtggaggtgagtgagtgcggtccctgcagctggtccccatgaactcttccttctttttttaatttttttaaattatatt

SEQ ID NO: 277583 - DNA, 122 bp, Homo sapiens
cctttgcctccacatttccatttgcagtctaaggggaggaaaaaaacaaaaacaaaacaacgtagcagtggaaattgatcatctgggaacagaaatgcacaaagagacaaataacagtaagt

SEQ ID NO: 277584 - DNA, 122 bp, Homo sapiens
ttaagctttaatttaaaacgaaggtggggactttgttctgaccttattttccagcccattcgagtcaatcccttcacccttaatcagtggacaaatatttgctgagcacctactatgtgcca

SEQ ID NO: 277585 - DNA, 122 bp, Homo sapiens
gtttataaagtggagatttttttattagaaagcttccagttaccagtatttttaataaaacgaggaatgttaatgttaattaatgttaatgtttgggaattatagatggagatttcagaaat

SEQ ID NO: 277586 - DNA, 122 bp, Homo sapiens
agcgctctcccctccctcccgcggccccattgggccgctgagcgcaagccggccggcttccgggcactccaggccctctggaccaccgggtgcagagaactttctaggaggtgggcctccta

SEQ ID NO: 277587 - DNA, 122 bp, Homo sapiens
ggcgccagggatgggtgggggctcacacgcggggaacgcgactgctccgccccggccccgcgcacctcctcatcttgagcagctgccgcaggaagtgaaaggaaacaaacactgcgtggcag

SEQ ID NO: 277588 - DNA, 122 bp, Homo sapiens
caacctggcacatcccctcttgctaccagacccgtttccctttccaggaggaagtcaactcggttgctaaaaaacaagttctgatgagtgtttaaggaggagcaggataatgggagtggctc

SEQ ID NO: 277589 - DNA, 122 bp, Homo sapiens
ggcatcccaggaaatagaccgctcaggccgctgccttcagctgggaaagactcttgcatccgggtcatacgcggcactttgcctccttcctcccagtgtgaatccagcccaaggtggaagag

SEQ ID NO: 277590 - DNA, 122 bp, Homo sapiens
ggcgggagaagagcggagcagtggtcggagatgtggcgaccggtgaggactctcccggcccggggcgcccgagatcctgcacaccagccccagagacccgagacccgcaagtccccagaccc

SEQ ID NO: 277591 - DNA, 122 bp, Homo sapiens
ctcttttcgaccaccattttgggggctgaggcactcacggggcctccccaggtttcactccgtttctacacagtcggagccccatggatctcccatctcccggaggaaccgtgaagccaaac

SEQ ID NO: 277592 - DNA, 122 bp, Homo sapiens
aacctgtgcagagatgatgtacagctttaatgagatgagtgctgtcagagcagcaggagccggggagttagggaagtcttcacacaagcagttctgtgtttaaccaagtctgcagtgatttg

SEQ ID NO: 277593 - DNA, 122 bp, Homo sapiens
gcctcttgggagaggcagaataaggtcttaataatgtcttacaaccccctgttgtccctccgcactcttgtccatggtcctacaagacccaaaccagggcctcccttcttcctacccttctc

SEQ ID NO: 277594 - DNA, 122 bp, Homo sapiens
tttttgatagcttcatcatctctgttgtgtcttgcttcctgtacttgcttggtgagtctccgaagctgctcagtcagcatccctgctagcccatcaagcttaatgaaagcctcttcaggagc

SEQ ID NO: 277595 - DNA, 122 bp, Homo sapiens
gaattccaaaagggaggaaggcataatgaggtatgtctgaccccttgttactctcatgaccggaaccaatctttcaggttaactttggggtgcccctagctgacagcagagagttcattcag

SEQ ID NO: 277596 - DNA, 122 bp, Homo sapiens
attgggtgaatcagggggcgtggtggggaatttcccgcagggcggaagctccagaactcccggcaaagcccagctacaggcgggcgactgcggggggcccctgaggcggcgggggccatggc

SEQ ID NO: 277597 - DNA, 122 bp, Homo sapiens
taaaccaccctgtatggttcaactgatgcatccatgcagggctaggattcattctgacctcgtcatagcagctttccaggggccaatcccactccagcctaaagcaccccatatgctatcat

SEQ ID NO: 277598 - DNA, 122 bp, Homo sapiens
gcagcggccggggagggcgcagaggcagtaggcgccgagcaccagggccacgagcagcatcggcgcgcgggacgcccgcagagcggccccttgcccggcccctgcgccctggccgcccccgg

SEQ ID NO: 277599 - DNA, 122 bp, Homo sapiens
ctgggtggctctcgctcttcttggggatgggtctgtggggcgccacctactcacctcctccgcagcatctgcgtttacaaaacacactagggtactagggagccagtctgtgaccgcaacgc

SEQ ID NO: 277600 - DNA, 122 bp, Homo sapiens
acaggagcacggtttggattctaacaggactatgaaggaataatttgatcgggaggtcatcgcacagggctccagagcccaactgaccttttgaagtctgctcagggaacctcattatgttg

SEQ ID NO: 277601 - DNA, 122 bp, Homo sapiens
atttactgtctaactgggttatggagatactgcaccaaatcagataagattctaccttcacgaagttaagtttcaaggaggggagacacaaacgcctacgtaaatcaggtggtggtgacatg

SEQ ID NO: 277602 - DNA, 122 bp, Homo sapiens
ggcctaagatgcagagttgagcccagggagaagggacgggttgggggaggaagaaagagtcgcaaattcccaggcagattggctccatcggtctaatcaagctgcacttgacgctccgcggg

SEQ ID NO: 277603 - DNA, 122 bp, Homo sapiens
aactttttgaaagccatgcaagcaaaatcatagccaagcaaagattctgctccccatgaacgtgtagtgaattcctcttggtgccaaaaacttgcatgacattctttaatgtttaaaatgat

SEQ ID NO: 277604 - DNA, 122 bp, Homo sapiens
gtctcgtctcaggcacctcacccagatgacacccacgcggccctttggcggaaaaatatccgcaactcgaagcagggaaggaggatatcagccgcgagaccttcacaagacgaagggctgaa

SEQ ID NO: 277605 - DNA, 122 bp, Homo sapiens
tcaggcttctgaagtcagagggagggctgagagcttacacttctggagctccccgggagacggcaactacccaaccgtgtgggtgtgtttgtgtatgtgtcttttgttgagcttcggctggc

SEQ ID NO: 277606 - DNA, 122 bp, Homo sapiens
aaagggcatgcatatctttaatgaagtagtcttttaaaaaggaaacaaaagaacaatttgcgatttgttgagttctgtcataatcctggcagcaggaagcaatattaatactgactttaaag

SEQ ID NO: 277607 - DNA, 122 bp, Homo sapiens
tccactgtgggccctctccgcaccagaccctgggccgcagtgcctcgtgggaccggcgcccgcaggccgagcccctgcagcctccttgctgcgcaatgtcccggggcccccctcccgtggcc

SEQ ID NO: 277608 - DNA, 122 bp, Homo sapiens
gtggcgcttgctgctggttaagaccagacctctgctgctttgtagcaaacgcgcgtctcccggtttcacaagtggctgactcgttaacctcgtggttagctcagtttttaaaaaatatgtat

SEQ ID NO: 277609 - DNA, 122 bp, Homo sapiens
gaactcagcagcccctcccttcccatcagctgttcctgagagatgcaatatagtagtcatcgacatcatccttatcaacagcatcatcactcagacagtggtgaaagtctttcttcacaagg

SEQ ID NO: 277610 - DNA, 122 bp, Homo sapiens
ggggcgtttgggaggtgggcctgaggtttgcctaggactcgagttcctttcaaaggaaggcgagagggagatggggagaaggagactcggagacttctctattaaagccgcgctgaactcta

SEQ ID NO: 277611 - DNA, 122 bp, Homo sapiens
tagctgggattacaggcatgtgccaccacgcccggctaagatcttttttttttgagacagcgtctcacccagtagcccatgctggagtacaatggcgagatcttggctcactacaacctcca

SEQ ID NO: 277612 - DNA, 122 bp, Homo sapiens
acaacctccacagccactggcctgggtgctaagcccctcattgcccgtggctggcagggccggctggctgctccgagtgcggggcctgccaagcccacgcccacccggaactccagctggcc

SEQ ID NO: 277613 - DNA, 122 bp, Homo sapiens
cacctgggttatgcgcttgcgaacctgcgccacctccttttgaaactcgacatcttcctgcggattaagcgacaggattggcccagccgggccagaaaaagtcgccatgccaaaagccgccg

SEQ ID NO: 277614 - DNA, 122 bp, Homo sapiens
tcgccccctggcgggcgagcggtaggtgtcgaagcactggggtggggggtgcaaaccccgcgggcagcggaaaagaggccgtggggggcctcccagcgctggcagacaccgtgaggctggca

SEQ ID NO: 277615 - DNA, 122 bp, Homo sapiens
tggcaaaaccccatctctacaaaaaaaaataccaaaaaaaaattagccgggtgtggtgcacgtgcctgtactcccagctactcgggaaactaaagcggcaggatcacttgagcccaggagag

SEQ ID NO: 277616 - DNA, 122 bp, Homo sapiens
gctagggaggggtccctttcgttcctagggtgaagactgggcccacagagaggcactgaccgggctcgagcggcggccccgctgcctccgcctccgtcctcatgacccgggcggcgcggggc

SEQ ID NO: 277617 - DNA, 122 bp, Homo sapiens
acacacacacacacacactgcaagaaacactgcaatgctatgcaaccagggagagagaatcgagaggccctggggagcaatactgtaacaggaccagagaaggcaaaggagaaaagggggtt

SEQ ID NO: 277618 - DNA, 122 bp, Homo sapiens
cgcccggccagctctttttccttgggaagaaatgcctttcattctgatatttgaccctgccggagtgacagcaaggataattttgctccctttaaagttctcatttggcaaaatacaaatat

SEQ ID NO: 277619 - DNA, 122 bp, Homo sapiens
tggggtcagggcagggggagaagtagcggccaagacagagacagggggtgagattagagacggagagacccagagagctggagacagagcccagacaagccccccagatgcgctgggagggg

SEQ ID NO: 277620 - DNA, 122 bp, Homo sapiens
agaaaataagggagatcaacattcaaggccagggaaattatatgtgcaaagaagatacaacgtgtgaatatttcccactaatttgcctgtaatgtatttggaataaaaagatacatttggca

SEQ ID NO: 277621 - DNA, 122 bp, Homo sapiens
ggagactcagtaaacacatctgtgaatcctgggcctgtttttgtttcctgtaaccaaagccggttatttgttgtatatttttagtgtcatgacctttagtttttggtatatgatatgatctt

SEQ ID NO: 277622 - DNA, 122 bp, Homo sapiens
gatctccttcacgtctgacttcatcccgcgcctggtgtacctctacatgtacagtaagaacgggaccatgcacggcttcgtcaaccacaccctctcctccttcaacgtcagtgacttccaga

SEQ ID NO: 277623 - DNA, 122 bp, Homo sapiens
ctggcgcatgcccttaggttctgcagctgtgtgggctgcgctgccttcgggggcacgtgacgccacgtgggaagtgctgtgaggctggtgcggagagcaaacctcctgcaactcttagcgag

SEQ ID NO: 277624 - DNA, 122 bp, Homo sapiens
cggaggcccgggttgcttaagtccctagtctcagccgggcacgaggacagcgcccgggagcgactgcagcctctgaccccggctgggccagcccgggctgcttaagtccctagtctcggccg

SEQ ID NO: 277625 - DNA, 122 bp, Homo sapiens
aagggctccgcggaaaggcgcgggaggggcgctctgtccacttcctactgcagcccggagcgctgcgtgagctggggctggagggacagcgacctgggccgggtgctgaggcgaggctggag

SEQ ID NO: 277626 - DNA, 122 bp, Homo sapiens
ggcgtgctgtggaagaggcctttcggcaggccgtcggccaagtggtcccggcggtgagtgcgcccccgcgccccaaggagaccgccggggagagagcctgggcgtcgttacccctcccaccc

SEQ ID NO: 277627 - DNA, 122 bp, Homo sapiens
caggccagcagcacagacccaagaactgcgtggtcaggcctttccgcgtagccccgcccgcgtagccccgccaaacagccaatggacgcgcagctcgacgctccgcgcacctccgccaacca

SEQ ID NO: 277628 - DNA, 122 bp, Homo sapiens
caagaaccttgggaatcaggaaggcccaggaaaaataagtatctacaggaggttcagggacgatttggacctcacacccaagtgagaagcctggaaatccccaggggtgagagaacactgct

SEQ ID NO: 277629 - DNA, 122 bp, Homo sapiens
agccgtccctccatgctgtcctccacacacggggtgacatgggaggcaggcggcctcctccgtgctcaggaggaatttgtggcactttgcgtcctcactgccctgctccccgcagcagcacc

SEQ ID NO: 277630 - DNA, 122 bp, Homo sapiens
aacgactccatcttttatttgacaaagtgagcacagtgtgaccgtaatgtcccactctggcgttcatggagctgcgccaggcgccgtgtgcgattctggggaggaagaggtggtaggagctg

SEQ ID NO: 277631 - DNA, 122 bp, Homo sapiens
ctttgggctcttcacctttgtgagtgttattttgtatacactgttaaaaaccactgtgtacgtaaggttgacttgatctcattatccttatggtggttgtattttatgccatacatagtacc

SEQ ID NO: 277632 - DNA, 122 bp, Homo sapiens
ttttttttctgttttgggtgtactctaggggccaggttgggagggggaaggtgagggcttcgggtggtgctataatgtggcactggatcttgagtaataaatttgctgtggtttgtacacgg

SEQ ID NO: 277633 - DNA, 122 bp, Homo sapiens
ttatttaggagtttcacggccgtctgcttttcgtccccccgattcagcgggccttcaggccgtgtggtcggtgcttttctcgttgggtattttctgcttttaaaagaagttgtggatgcgcg

SEQ ID NO: 277634 - DNA, 122 bp, Homo sapiens
gctactgagggtctaagtccaggcagccgaagagtgtggtgagcaagatgaacaaagatgcgcagatgagagaagccattaacatattaaagtaatttaaagtttgggtggtctggatatca

SEQ ID NO: 277635 - DNA, 122 bp, Homo sapiens
attatctggggatacagtggggtcctctccctgggaggtgggtcttccactggttttccccgccagggctccagggggcgccatgcgattcagcgctgggctccgctgggggccgggccttg

SEQ ID NO: 277636 - DNA, 122 bp, Homo sapiens
gtgagcaccggcaactatgagtaccgcctgatcctgcgctgccgccaggaggcgcgcgcccgcttctcccagatgcgcaaggatgtgctggagaagatggagctgctggaccagaagcacgg

SEQ ID NO: 277637 - DNA, 122 bp, Homo sapiens
ggggtgggccagagccaggcagggggagtagcgaggagagcaggagacagtgtgcctgctcggtcccaggactctgtttactttgtctgctttgctaaagaaggccggtgaaccaggaccac

SEQ ID NO: 277638 - DNA, 122 bp, Homo sapiens
atcctcgagtcccgcacactgcccggccgagcactcagctgtcgggctctgccagccacgcggactctccacatgcggatgccaccaccaacttgcccaacagagacagccacctggtccct

SEQ ID NO: 277639 - DNA, 122 bp, Homo sapiens
ctgggttcccgatcgaacacagaggccgagcgcagcagtcccccactggggtgctgggaccgcccctcgggtgggcggacggctttagcttcctaccccgggttgtgaccgggtggggtcac

SEQ ID NO: 277640 - DNA, 122 bp, Homo sapiens
tcttggagactaaaaagcagtggacttaatcggttgaccctactgtggattggtgggtttcggggtgaagcaagttcactacagcatcaatagaaagtcatctttgagataatttaaccctg

SEQ ID NO: 277641 - DNA, 122 bp, Homo sapiens
catgcgacacttccttttctgtggctgcaggtggatttggtgttgacttctctcaagccacggaggacgtgggttcgggggttgccctcgtggcccggaggatcctgtcgcacggcgtcacc

SEQ ID NO: 277642 - DNA, 122 bp, Homo sapiens
ccaggacaggcagaggacaaacaaggatgctgatgaagtcttcttgcattccccatttctcgtctcatgctcccttctcatgcctcccttcatcttcagatgaaacacaattccctctcttt

SEQ ID NO: 277643 - DNA, 122 bp, Homo sapiens
aaatatcatttcacagccactgaacaggttataatagctaaaacagacaatgacacatatcgatgaggatgtggagaagtggaaaccctcatacattgctgagaatgtaaaatgaccagcca

SEQ ID NO: 277644 - DNA, 122 bp, Homo sapiens
gcctaggtgacagagcaagccccgtctcaaaaaattaataaggctggatgcggtggctcacgcatgtgatcccagcactttgggaggctgaggtgggtggatcacaaggtcaagagctcaag

SEQ ID NO: 277645 - DNA, 122 bp, Homo sapiens
gagagagagagagagagagagagagaaggggggggaggtgtgtgtctgcgtacgagagagcgctctggagcaaagcagctggaaaatgcccagaaatactttcacagcggtcaagctggaac

SEQ ID NO: 277646 - DNA, 122 bp, Homo sapiens
tgcagcttctgctggtcaggcttgtggtagctctccatggtgcggcaggcggggaccgggcgcacacgcggacacacagagatagcggctgctcccgcggcgacaggcggctgccgaggccg

SEQ ID NO: 277647 - DNA, 122 bp, Homo sapiens
caaaaagcgcccttttctttggcgggctcacctcagacgtgaggtaccagagagccaaaccgtctgctaaaaggacatccccagcacatttctccctaggcagagggtctgtggctggcggc

SEQ ID NO: 277648 - DNA, 122 bp, Homo sapiens
ctgtcatcttagaaaaagatgtagctgtgtcaaccatctcaaaatttgtcagaaagatcacgtttggtacttggggtttcagtggtctaggaggaagcccatcaatcctctgccgaagaagt

SEQ ID NO: 277649 - DNA, 122 bp, Homo sapiens
gcaagctgcgaaggaagtgtgaagagcaatacctcaaccggtgccccttgtgaggaccgccgtgtgaggaaagccgtgtgaagagccgtacttcacagcaataatgtagaatgtgattcata

SEQ ID NO: 277650 - DNA, 122 bp, Homo sapiens
acctcaacactgtgcccagaagcctccaggcctgtggagacacacaaggtggcccgacggcgcccacagcgagtgccggcaaaggatattcacagccacggcaggcgggtcaggaggctgag

SEQ ID NO: 277651 - DNA, 122 bp, Homo sapiens
taaatattcagacacattttatgattgtcctctgcccgtcttctgcttaatggctcctcccgtgcccaccaatacatcaataccgttgtgtgtattgaatcgcgggcagggatgaggaggaa

SEQ ID NO: 277652 - DNA, 122 bp, Homo sapiens
aactctgcgtctcacgtctccttctggaaaccttttagggtgtacttccgtcctctccaccgaaagggctacaggaagaagtgaagttactgcgtgttcaagttcgtctcctcgtggatccc

SEQ ID NO: 277653 - DNA, 122 bp, Homo sapiens
tctcgcaagctcagaactgaatctggagaccttcgcggtgttacagatcttaagacagcacgtactggaggtgttccttcctcctgtgggcttctggtcttaccggcttcaagagtgaagtc

SEQ ID NO: 277654 - DNA, 122 bp, Homo sapiens
cccgccccccaccttggggcaggtgagcggcggccaatgggcgagcgcggggcaggtgcccgctaactcgcgcctcgcagcgctgggcggccggggctgggcagggcagtgcggggacaccg

SEQ ID NO: 277655 - DNA, 122 bp, Homo sapiens
gtccccaccttctctccccgctcctctcgccactctgtcgcagaggggtccggctagccacgaggccccggcccccggcagcccagccccttggcaagcaccctcccgccccctccgcccct

SEQ ID NO: 277656 - DNA, 122 bp, Homo sapiens
gtgtggccgcgatagcagcctgactgctgggggccgtgtgtgcccctcaaaagggtggggcggtggggtcttttcagcttcctgtccagctgggtttttgtgactcttggactttggggacc

SEQ ID NO: 277657 - DNA, 122 bp, Homo sapiens
gaccttgggaagcagagaaatcagggctaatgaaccatctaaggacaggccatgagggttcgattttgtgtaagagacatggccagatctattaggtggaccaggaatgggtgggtatctcc

SEQ ID NO: 277658 - DNA, 122 bp, Homo sapiens
gcaggcttggaagacaggcatgacattgacaggtaccaggaggtgacccagcgtgggccgcgaacacagaaagaatcatgtattgattggagccttggaacttggcatactgcctctccttc

SEQ ID NO: 277659 - DNA, 122 bp, Homo sapiens
ccgtggcccccagcaggagacacattccgtgcttcgctccacccggcacccgtagctcggcgccgcggctcaaggcccgcccaccggccactctcattggatagttctcaccttcggacttc

SEQ ID NO: 277660 - DNA, 122 bp, Homo sapiens
agctccgcccctctcccctcagcccgcccctctctgttactggctctcgctcagcgttctcggtggaagtggtttttccgggagagaccacgcttcccctcaagctccccaacggctccgcc

SEQ ID NO: 277661 - DNA, 122 bp, Homo sapiens
gatttcagaatttgagatcaggagaataaagtgtcctgggagtctgttcaggttctgctgcgcagccttcatacccgccgccaggacgggtgggactctcatacccacggccgggacgggtg

SEQ ID NO: 277662 - DNA, 122 bp, Homo sapiens
cggtggtgattggtgagggcggggcctgccgcagggggcggggcctgcaggtttggcccccgcagggagcgcagctggcgccgctgggagctggtggcgcggcgcaggtcccggccgagtgt

SEQ ID NO: 277663 - DNA, 122 bp, Homo sapiens
tctggctgcaggcggagtcttgggccaggatcccattcatgacctggaagagctgctccacgcgctggtcctgccgcaggtcctcgccacccttcaccaggaaagggtgttccctctcgtca

SEQ ID NO: 277664 - DNA, 122 bp, Homo sapiens
aacttgttaattacagaagatcagcacagaatctgaaacagatcaataggaatcagagaacgcccacgctgcagctgctgcccccagcccacgccactgccgtggggcagagccgctgtccg

SEQ ID NO: 277665 - DNA, 122 bp, Homo sapiens
gggtgcaaggccagcagcgtgtccaccatgctcttgccggctattttgagtgactgacgccggcctggcctctgactgaggctggaatgcacaccacgggttccctgttggagggggcccca

SEQ ID NO: 277666 - DNA, 122 bp, Homo sapiens
tgcccgtcttggcctcccaaagtgctgggattacaggtgtgagccactgcgcccggccgacgctgtgattcttgtagcgactttgatcccagcagattctgacttcggtaactggggaccat

SEQ ID NO: 277667 - DNA, 122 bp, Homo sapiens
tcagaaaaaggaggggcgacaaaggaaaataattaggctgtagcctcaattgtgcattcccgtgcaaggtgccctgactcgccacagcggtaacagttgacttcacttgtcttgctgcagtt

SEQ ID NO: 277668 - DNA, 122 bp, Homo sapiens
ctgtccgccgagctgagcccggggagggctgggctgcccagctgatcagaggctttctcccggattgcgagttctctggcccgcggcaccctcccgcgcgggggccgcccacccacaagccc

SEQ ID NO: 277669 - DNA, 122 bp, Homo sapiens
cccctccagccccccccttcacggaggcctggacgactgggcggtgccttacgtaagaggcggagactgggctactgggctcatgcagtaaagcgagtcaaggcctgagtggcaggagggcg

SEQ ID NO: 277670 - DNA, 122 bp, Homo sapiens
ttaacaatttcagccgactgaaggctcttggacacttggaacatttgtagggtttctctccggagtggatgcgctggtgctccttcaggctccccctgtaggtgaaaactttcttgcagtct

SEQ ID NO: 277671 - DNA, 122 bp, Homo sapiens
gaatagagaagcaggcctgaagaggaataccagcggtgcaagtttagggagttggtggtccgggttctcccatggctttcttatgggctgtgtggctacacaatgctgatttgtacaagccg

SEQ ID NO: 277672 - DNA, 122 bp, Homo sapiens
tttctatgggttaggtatatgggagcagcttagcttaaccctaagtgagggttctcactccggatctcaaaaagctgttaaagagtgacggagctgccgtccccggaaggctggactgggac

SEQ ID NO: 277673 - DNA, 122 bp, Homo sapiens
ttctctcccttcttcacctatcttgtattattctctgaattgaattaagaatttaaagtccggttggtggactggactacagtctctatgatgtttggtagggttgttagaattagcaaatg

SEQ ID NO: 277674 - DNA, 122 bp, Homo sapiens
cagtgggacagtaggaccgcgaaagcctgggcttcgagcctcgggctccctgtcttcaggcgaagtgcggtttccacgggtgcaggtttcgctgcataagggaagactcagatttcgagccc

SEQ ID NO: 277675 - DNA, 122 bp, Homo sapiens
acttgaaattgaagtgcgagagtctattggtcattggagctgcccatcaggagtgcaactcgggagcggattggccgcgtgaggcggggcacggcgcgacgaaaaaaggggcccaaggggtg

SEQ ID NO: 277676 - DNA, 122 bp, Homo sapiens
ccattacctgtggcgcagagccgcagggccgtccaactcttccacgctgccatgctagcccgggagagctgcagaagctgactgtgcaaaagagggataaagacactggggtccgccgcctg

SEQ ID NO: 277677 - DNA, 122 bp, Homo sapiens
ggggctcaggcagaagtcctgactgtcagtctgtggctcctgcacttagtttgtagactacgtggagatagcagagatgctgggggaggagacaatccgaactgaattctgtgaagatggac

SEQ ID NO: 277678 - DNA, 122 bp, Homo sapiens
gtgttacagctgttaaggtggcgcgtctggagtttgctccttctgatgttcagatgtgttcggagtttcttccttctggtggaatcgtgatctcgctggtttcaggagtgaagctgtagacc

SEQ ID NO: 277679 - DNA, 122 bp, Homo sapiens
cctagggcacgagtatcaccatgggagtgggcaggacacgggccgggcaagtgggcctcccgctgcacctggctactcctgctgtggaccagctactcctgcctgagggtggggcacacaca

SEQ ID NO: 277680 - DNA, 122 bp, Homo sapiens
agaactcttaggtttaaacacattgttttatagattttaatacatccatctacagagcttcgctgggtgttctttgcagttggcctttaatatcttatgtgggtctgcctagaaactaattg

SEQ ID NO: 277681 - DNA, 122 bp, Homo sapiens
caacaatcaggaggctagtaatcccaaaacctaaggtaatcttttcctaggtctctccctcgttggtgtctgtggcacctgatactgactgctgatccttcctctccctgatggtctctctg

SEQ ID NO: 277682 - DNA, 122 bp, Homo sapiens
tctgcagatctgtgcggttgggggacccctggggcatggaggggaccacgcgtcccttcccgtccgtgccctgccaggctgtcctcacagcagcgtcgtcacaggggaggaaaccagggcag

SEQ ID NO: 277683 - DNA, 122 bp, Homo sapiens
gcacggtaggggagcagagtgggcaggccgggggtgagggctcgcgctccgggagctgcacggggctgcgtggaaagagcgccgagcggtggcgtcgttgtcgccccctcctcgtcgggaag

SEQ ID NO: 277684 - DNA, 122 bp, Homo sapiens
gtgggaggaagccaatgaggtaagacactaaccacagcccggcaatgcaggccccggccacgaacccactcatgatcttcaagtagcggaagggctgcttgatggcaaggtacctgtcaaag

SEQ ID NO: 277685 - DNA, 122 bp, Homo sapiens
tggtcacacgatctgggcttgtgaagttgactggcaaggttgggggtatttggtggccagcgtgggacatttgtggtagaagggactgaaagggattcatggaagctagattttaggagtga

SEQ ID NO: 277686 - DNA, 122 bp, Homo sapiens
ggttctcagaagcagtacctaccaattctcaacagcagatggcaatgttgtacaagttaacgacagaactacttttatgccacaggagaggaagacacaaggagtcaaaagggggaaaaaaa

SEQ ID NO: 277687 - DNA, 122 bp, Homo sapiens
atagggcagctccattataatcttataggaacactgctgtatatgctgttcattgctgatcgtgacatcatgtggtgcatgactataatttaatgtgagagtcgcactaacgctgaagactc

SEQ ID NO: 277688 - DNA, 122 bp, Homo sapiens
tatacttaagggaccacacgcatgcagtggagtattcttcgatggcagcattttcttttgcgggaaatagcaaatcaggcagtaatgaggtgtaaggtcagaaaaactgcatagaaatcaat

SEQ ID NO: 277689 - DNA, 122 bp, Homo sapiens
acaagggcattgatagagaatctacccagggcagtgatggggaacctaccaggagcctggcgtgcctgagctgggcagtttctctaggggcacctgcagtggcaaaagggggccccctctgg

SEQ ID NO: 277690 - DNA, 122 bp, Homo sapiens
catattctgcacatgtatacccataagcattcgtatacagttttgcaaaattgggatccacgtgctgttttgtagcttgctatttttctcttattatgttatgaacatgtcataagccagtt

SEQ ID NO: 277691 - DNA, 122 bp, Homo sapiens
tgtctcgtgttgctatgaggtttgcatctgtgtggctggaatagcttgtttgtgggggcccgcgcgtgacctgtgtgtgcgttactgtgtgtgtctcaggcaggatagtgacgggccgtgtg

SEQ ID NO: 277692 - DNA, 122 bp, Homo sapiens
acttcacccagtgtgagttgctgctgctggcagtgggtacgcactcatgagggcagagcccgtgactgctgtgtccccagtgagtgagggtgacccagagctcagaaccctctcagagctcc

SEQ ID NO: 277693 - DNA, 122 bp, Homo sapiens
aaatcgcggcggttagggggagacggccggatgcgtccccatctccacctaacacggcgacgccccaacgctggtgctcggaaagggaactctgcccccgccccgcccccgcaccatttcaa

SEQ ID NO: 277694 - DNA, 122 bp, Homo sapiens
ttaaccctgccccagctgtccctttattaaacagtcttcagttagcacatgggaatataccgtctctttgctgctgggactgtgactgctgctacatctatgtggctgtgatccagagtcag

SEQ ID NO: 277695 - DNA, 122 bp, Homo sapiens
tcactaggaatccacggcaagacagttattcattcattcaacaaatatttattgaatgcccgctgtgggttagtcaccggagcggcaacagtgagtaaataggactatctctgtccccaaga

SEQ ID NO: 277696 - DNA, 122 bp, Homo sapiens
tctcaaagctaagtgctcaaaccccgttccatggctctgctgctttctggaggacatctccggtagccccaggggattgtccgtgtgaggttgggtgggtggagtagagccagaggcgcaaa

SEQ ID NO: 277697 - DNA, 122 bp, Homo sapiens
gaggtctgactgcagctcatacagctggagtgtggcctggtgaggaagggtttagaagaccgagaggaggctaacatcctacaaagcacaacagtcacttcctgaaacataccttaggtgtg

SEQ ID NO: 277698 - DNA, 122 bp, Homo sapiens
caccattacctgttgacagtgctcagccagcagaggcaggactctgcctgcaactattcccgggtagaaatggggaggctgccttcccagctcccactgggcatagcctgtgtgtttatttt

SEQ ID NO: 277699 - DNA, 122 bp, Homo sapiens
ctaagcagggcctggccagattccaccccagctgcaccagagactcctggaggaaggagccgctgctggaaattctgagcttttgtagggggtcaccccacccaggccaggggcgggccaag

SEQ ID NO: 277700 - DNA, 122 bp, Homo sapiens
accccttctgctctgtacagacctctctgggaggcgtctccggtcctgcccggggattctcgtagggtctccagcaaaggcagcctaggtgggttttataagctgaccccctcggggggtag

SEQ ID NO: 277701 - DNA, 122 bp, Homo sapiens
gctgcttctgtaactagaaccgggggcggcgttaccagggcccttaatgtgggtgctgtgcgggtgtctccagagctgcctgagccgccgggcaggctcctgggccctgtgttcctgctgag

SEQ ID NO: 277702 - DNA, 122 bp, Homo sapiens
ggctccttctggtgggagaactgcaaactacttctttcctgctgaaaaagtgcttcctaccgccaatctcaaaaaaaaaaaaagaaaaagaaaataccaaaaaacacaaccaaaaaataccc

SEQ ID NO: 277703 - DNA, 122 bp, Homo sapiens
tgctggccgcgaagccccatctccatcgggactgcttggtggagccgccttcttcaccgacgtcgctgttcctcggatctgggagccaaatgctttgctagagctggtaaaatggaaccaaa

SEQ ID NO: 277704 - DNA, 122 bp, Homo sapiens
ccaacccggcgggcccaccctctgcacccacggcgaaagcactctttctaaaccacgccccggatgtcccgcctccagcggctcggaggtcttcacttattggcctccccaaaccaacatgg

SEQ ID NO: 277705 - DNA, 122 bp, Homo sapiens
ggcgtggccacggcccgaggggcggggaaacacccatatttggccttatatgggcagccgcgtcacggacggcactcattcacataaaacgctgcgcggccggcggaatccccggcttctag

SEQ ID NO: 277706 - DNA, 122 bp, Homo sapiens
atctttgctttctatgttgctcagtcgccctatgtctgctttttcatttttcctgttcctcgtctcctttctcccccaaccccgtttttcttcttgggcctctgcccccttacttcgttgtc

SEQ ID NO: 277707 - DNA, 122 bp, Homo sapiens
aacaaactgaactatctcagagctcaagcggaaggccggactacaagtcccggcatgctccgcagggtccccgggcgcccggccaccgtcgtaggtgcgggccgcatgaatggagcgccggg

SEQ ID NO: 277708 - DNA, 122 bp, Homo sapiens
aaggaatgaagttgtcaagataaataattaagagtaagaaagaaaaaatatgagaaaagccggtcaagaagactggcatttagaagaaagaatgctttctggttttttgttttgttttgttt

SEQ ID NO: 277709 - DNA, 122 bp, Homo sapiens
actgtgtcacggccctcccccgtccccattttttctttaaatggggaaaatgcctattcacggcctccaccagggtgaaaagatagatggccataagaacatctccaagtgcaaaatccttt

SEQ ID NO: 277710 - DNA, 122 bp, Homo sapiens
aataggcttctcttcgtgacagggatgtggaggaggaaggcagccgtgttggggagggggcggattctgggtgtagtgctgtttgtcacttgaaatccggccacttcagtttttgatgcgtt

SEQ ID NO: 277711 - DNA, 122 bp, Homo sapiens
tggaggatctgcttccaagctcactcacatggctcttgtcagaaggcctcaatacctcaccggttgttggctagaagccttaattactcaccatgtgagcctccttataagttgcctgagtg

SEQ ID NO: 277712 - DNA, 122 bp, Homo sapiens
ctggcggcgttggctgcctccggagcccgagcggacagctaatgagatgctaatgacatgcgctggaggcggagtccgggcagaccaatcacagcgccgcgagcccaacccggctctcggag

SEQ ID NO: 277713 - DNA, 122 bp, Homo sapiens
aagtcttagcttcaagcctgaatatgtgatttcctgttcattaactaaagccttttgagacgcaactcagtgttttatctttcctaactcagagtagggtcagtccatctaataagagattc

SEQ ID NO: 277714 - DNA, 122 bp, Homo sapiens
cgcctcgccgctctgggggcggccatctttgagtacgtgacgtacagaaggcacagcggccgggagacgcggtggacggaggcctcttaaactgtccgatttccagacacctcagccctggc

SEQ ID NO: 277715 - DNA, 122 bp, Homo sapiens
gcggctgcggcgacggtggccgcggtggagccacggggcgggcttggcttggtgtgacggcggctgcggcggcggtggcggccgcgaccaggtgagtcctgactggccctcgtggcgggggc

SEQ ID NO: 277716 - DNA, 122 bp, Homo sapiens
tccaggggcgcggaggggcgggcagcgcgcggagtggtgagactgagccgcgatggaacgcgctggggagacccagcctgttcggctccagggttcggagacatcctgggctgaaggcggcg

SEQ ID NO: 277717 - DNA, 122 bp, Homo sapiens
tttgcatctcatggcactgcccgcaaggaaacattcaccaagaatgaggcattaaacagccgtgtagacagcatgactcagccagttgatgtcatcagcatttcattgcccaatgctggcct

SEQ ID NO: 277718 - DNA, 122 bp, Homo sapiens
gccactccctgctccacggcgcccagtcccatcgaccacccaagggctgaggagtgcaggcgcacagcgcaggactggcaggcagctccagtcctgcaggcagctccacccgcagccccggt

SEQ ID NO: 277719 - DNA, 122 bp, Homo sapiens
gtcacggtgcaatcagcagctttcattggaacaaacaagactgttttagaatgaaggcatcgcatcagtccaggaccgtgattccttgcttatttgcatgcatgaatacactccggggccat

SEQ ID NO: 277720 - DNA, 122 bp, Homo sapiens
gggagcaaggcaggtcctggaatcccacagcttcctacaacaggcatgtcatctcaaagacgtctttcttgacatgaagataatgccgtgtaaactacttatgttctttttttatgaaacca

SEQ ID NO: 277721 - DNA, 122 bp, Homo sapiens
aggcgctttgatgcgggctggagaaggtcctgcccggtgggattgcgccctggggcaccgcgcacgggtcggggaagcccggggcagggccgtatgcaaatagcgcgcgaggaggccgcgga

SEQ ID NO: 277722 - DNA, 122 bp, Homo sapiens
aaacgtaggtcttcaaatcaaaatttgaaatggtccatttgctaccactatttacataaccgaatctctcctttctgttgacatttacattacttttaatttttttgattttaagtaatgct

SEQ ID NO: 277723 - DNA, 122 bp, Homo sapiens
agctcgctcccaccgcacagctcccaacagctaagaagcaacgccaaggactttcttccccgtcagacatgccctcggccacaccaaactgacatcaaaaccccagttagcccagcctgacc

SEQ ID NO: 277724 - DNA, 122 bp, Homo sapiens
agacggacatgagcgtgggtgctgactcctggaagagcaactctatctgatctcaaaatgcgtatactgggaacaggatgccttagcccacaacagaaccagaatgaatctttgaaggcaca

SEQ ID NO: 277725 - DNA, 122 bp, Homo sapiens
tggtgttgctttactaactatcgttgttaataaaataaccaccttacctactagtcttcacgctttttttttttttttttttttttgaggcagggcctcactgtcaacccaggctggagtgc

SEQ ID NO: 277726 - DNA, 122 bp, Homo sapiens
agcctgatgccacaattccagcatgtgggagtccgatcaccttttcccaagacttggagccggactggctcccagccagcccagcagacagatggaaacacactccacgagcatatggaact

SEQ ID NO: 277727 - DNA, 122 bp, Homo sapiens
agcggtactgcccgtcgtccgaaggtctggcactgagtatctgcagggtcagtctgccctcgtcaatggcgtcactcaccagtacagtcctccctctgtactctgccatctgctctccagcc

SEQ ID NO: 277728 - DNA, 122 bp, Homo sapiens
gtgaatagagctctttcccttcggcgtgccactgaagatcctggtgtcaccatgggccgccgccgcgcccgttgttaccggtattgtgaaaacaagccgtatccaaagtcttgcttctgctg

SEQ ID NO: 277729 - DNA, 122 bp, Homo sapiens
ggggtgtaaaggtcgctctggctgaagcggggaggagccaggagagtgctcgccccaacccgggtcagagggccagagtcctggggtcacctgtgtgtcccccaccttggggtcctaaggtc

SEQ ID NO: 277730 - DNA, 122 bp, Homo sapiens
acagccaagctgtccgcctcctgccttccctttaaagaagccgcacacaagggagctgcccgggagttcaacttccggccacatagtgagaggatgttttcctactggagctgagccgcggg

SEQ ID NO: 277731 - DNA, 122 bp, Homo sapiens
aaaattgggccggttggggtaacatctaacctggggtcccgcgaaagagcccatcagttccgcttgggggccccactgccctcccacctcctacgctgggcgcttctcctgcgaatgacgtt

SEQ ID NO: 277732 - DNA, 122 bp, Homo sapiens
tcctccttttcctgcttgggcctggtgttgacacagaatggtgcccatcatcaaagtccccgctgacactgctggaaggggaggtagctcttcttctcttggaacccatggaatccaacttc

SEQ ID NO: 277733 - DNA, 122 bp, Homo sapiens
ccttcaaggcccaggtcacacggcaccgcctcctcagggaagctgttcctccccacaccccggtggatggctgtcccgtacccccagtctgccccatggccaaggcaccacccctactggct

SEQ ID NO: 277734 - DNA, 122 bp, Homo sapiens
tgcccacccaccaggccttcagcatgcatagctcactctcaggccgagaaacagcacacgcgtgcagaccccagcctcgttccctgcaccgcccaccggcacctccccacgagccggaccga

SEQ ID NO: 277735 - DNA, 122 bp, Homo sapiens
ccagccccagctactcacgtgccaaatggcgaagaagatgagcgcggcagtgagcagcagcgccagcatgtagcagaaggccgcgaacgtgaacgccatggctggggaggaggagcggggag

SEQ ID NO: 277736 - DNA, 122 bp, Homo sapiens
gccctatcaacttcctgctgtgatcatctgcaaagggaacctaggcatcgggaagacattcgttaaagttcaggaaaaaattaggtgtgatttcatggcatgacagcctaaaagagactttt

SEQ ID NO: 277737 - DNA, 122 bp, Homo sapiens
gctcagaactgcagctcagtgacccagaaacactatgggtgtgatcagctcagccccaggcgtgccgtgtgtaccggaatgcatgtgtgcacgtggtggtggtggggccagctctcacctct

SEQ ID NO: 277738 - DNA, 122 bp, Homo sapiens
ggagcacgaggaggatggagagaaggactccgaaaagaaggagaagagtggggtgacccacgctgccgaggagcggaatcagacggagcccagccccacaccctcgtctcctaacaggactg

SEQ ID NO: 277739 - DNA, 122 bp, Homo sapiens
tttgaaatgaagaactcggaccaggccgacaacgtgggcgatccggcaagggaggctggccgccggatggggctgacaagcgcaccgctgtcgagacctgcggaaccttctgaatgacgagg

SEQ ID NO: 277740 - DNA, 122 bp, Homo sapiens
gtgtgaatcatccgtgtgaatcactaaacagtggagagttgcacttggtcataaatcacacgtgactgcagccacacgcaggtgagtcgcacacgcattccagcacatgtcaaatggtcagg

SEQ ID NO: 277741 - DNA, 122 bp, Homo sapiens
taaagacctcacctttactccctcagatacacggagggatgaggtggacagacacgcaggcggccgtgccaacctgatccgagtgaaacagggctacactcgcaaaatggtcctcccacggc

SEQ ID NO: 277742 - DNA, 122 bp, Homo sapiens
gcctctggggcaggctccaaggcgagcgacggaagcagccgctcttagtttccggcaacacgacagcggctgccgagcgacccggaagtattcccattttgcgttgtctgggctcggcggca

SEQ ID NO: 277743 - DNA, 122 bp, Homo sapiens
tcagggcctgagggggcgggtccttaaacatcctccaatcagggacgctgggctgggacccgtccaatcaggcacgcagctggagcggacaggacggcttccgggatttggcggggcctttg

SEQ ID NO: 277744 - DNA, 122 bp, Homo sapiens
gaggacacggcttattcccacgagccaaccggggcttattcccaccctcggcggtcccagcgggctcagcaagcgagagcaggcttccggagttacaggggcttccctgcctccgcagcgag

SEQ ID NO: 277745 - DNA, 122 bp, Homo sapiens
tttggctgctaaagaacagaactgagagaggccgagggaggccaggagatgctgcgagggcgcgggctgctcaaaccgggcagctgaagtccttagtgacctcagatcgtcaagtcaaaacg

SEQ ID NO: 277746 - DNA, 122 bp, Homo sapiens
cagttcactggtgtgatctcagctcactgcaacctctgcctcccaggttcaagcacttctcgtacctcagactcccgaatagctgggattacagacaggcaccaccacacccagctaatttt

SEQ ID NO: 277747 - DNA, 122 bp, Homo sapiens
gagctcggagcaggcgccggaaatctcaactcagagaatgcgcgggagccagttctccatcggagcgctagatggcgccagcagcctgtccgggctgaaccgccttcaccctcctcgttctc

SEQ ID NO: 277748 - DNA, 122 bp, Homo sapiens
gctgggtgtggtggctcgctcctgtaatcccagcattttggaaggccgaggtgggaggatcgcttgagcccaagggttctagaccagcctgagcaaaagagtgagaccctctctctacaaaa

SEQ ID NO: 277749 - DNA, 122 bp, Homo sapiens
gccgctgtttaccttcctgagcggcgcccagagatgcacacacgctgccctgaagcgggacgtgacctctgggcacctgtgaggtcctgggtgagacttcatgggacactcacggccatggg

SEQ ID NO: 277750 - DNA, 122 bp, Homo sapiens
gggacgcagtgagcgccgaatttgcctggggcaggggaaatgcgctctggcccatgtctgcgcactcgtagttccacccctcagccccagtgtttgttatttttcgggttcagcttgctttt

SEQ ID NO: 277751 - DNA, 122 bp, Homo sapiens
ccctcctccagctccgagcagtccctcctgggccgaagccccggcagcggaggtcctggccggactgccccctcgactggcaggcgcccaaagccctcgaaactgtgccttagggtcccgag

SEQ ID NO: 277752 - DNA, 122 bp, Homo sapiens
ccgcatctctgcatcttagtgcgtcctctgagcgcacggaactgaaaccccagcagatgacgcagcttccagccgggagggccagcgggggcagaggcaacaaggtcacagctggatgaggc

SEQ ID NO: 277753 - DNA, 122 bp, Homo sapiens
gtttacatttttgcgcaccaggaagatacaaagtatcattggagcacgttctgatgtcctcggttctcttttgttatataacttgctgttgcagcgcttgcatcttgtctttggcgctgccc

SEQ ID NO: 277754 - DNA, 122 bp, Homo sapiens
tctctctgtggcttatcagggccgggccggtgtggagttggaacagctggccccaaagcccgccagccgggctctatgctgtggggaccactgcccccacagggaagcgcctggctcagcac

SEQ ID NO: 277755 - DNA, 122 bp, Homo sapiens
tagtggaaatgctctcgtatccagacgtgcaccgtctccagtcagcagctgaaaataactcgttcttgaaaggagaaagccaaccgccccctttctcctgcacaactgactgagggcttgaa

SEQ ID NO: 277756 - DNA, 122 bp, Homo sapiens
cggactgcacgggtcgcagcctcccgggagcccctccgggttgcggggttcggcctgcggcgctcgtcacctcatgaggtagtcccggaaatccttgcttcggacatagtccgccgctttcc

SEQ ID NO: 277757 - DNA, 122 bp, Homo sapiens
ggcagccgccgccaccgctgcccaggacgtcgggcctcctgccttcctcccaggcccccacgttgctggccgcctggccgagtggccgccatgctcctgccttgggccacctctgcccccgg

SEQ ID NO: 277758 - DNA, 122 bp, Homo sapiens
gatgaaacaagtaaagaagaaacaacacaatcatattaatagaagagtcttcgttccagacgcagtccaggaatcatgctggagaagttctgcaactctactttttgggtgagaaattacat

SEQ ID NO: 277759 - DNA, 122 bp, Homo sapiens
cgtgagccgcccgcctcggcctcccaaagtgctgggattacaggtgtgagccaccgcgcccggcaaaaagatcgccttgcttttgacacaaaagtgctggcagcccccatcccctggtacca

SEQ ID NO: 277760 - DNA, 122 bp, Homo sapiens
ggccgtttccacacctgccctttattggtctcttctagcagagtggctccaggcccttcacgcctctcagacaccacccatgagggtttaggaaggtgccatcattctgtgaaggcccagag

SEQ ID NO: 277761 - DNA, 122 bp, Homo sapiens
ccgggccaggccgcggccggggcaggagcgcaggtgggtccgggccgaggtggggcgtggcgcgagggccgcgcgactggggtccggcggcggccaccgtggccgctccccgccccctaccg

SEQ ID NO: 277762 - DNA, 122 bp, Homo sapiens
tttcatggtgctcacagcttgctccattaggctgagatgcaaaggcctggaagctgagcacgtgaggttggctgcatggatactgtgcttggagcacttgttatttgagtcctcaggctaag

SEQ ID NO: 277763 - DNA, 122 bp, Homo sapiens
cagaaacattccaaactcctccccgaccagagacatgttaagggataaccccactctggccgggaatatgccagccgggaatatgccagccgggagataaaccccctcgggccggaaaaatg

SEQ ID NO: 277764 - DNA, 122 bp, Homo sapiens
cgccccccgggcgccctctctgccagcgcccggtgactgcggacggatgaatagacgctgcgggtcactgcgctctcccctgggtgagcagagcttctcacgcttctcacgggtctcgacgt

SEQ ID NO: 277765 - DNA, 122 bp, Homo sapiens
gagtctgcaccgtagctgctaggtgttgggaaagggagttgggcttcttctttggagacacgagagtcacaaggcgggaaattactctaatattggaagggtcttcaaagacaaacataaag

SEQ ID NO: 277766 - DNA, 122 bp, Homo sapiens
ggaagcagtggtatgaaagcagggagatgaggcatggaagggaaggaagccaattcagagcgcatgaatgagccagttactactgtggacacctagggctcaatctcggtggggaccttaat

SEQ ID NO: 277767 - DNA, 122 bp, Homo sapiens
gtccaggaggcagccgagaattggagcagttcccacgccaagtagggccttgtgggtggccggtcccctcctccagcgtggcacggaggcgccggagcatgcaggtctatgcctctgcagag

SEQ ID NO: 277768 - DNA, 122 bp, Homo sapiens
tacagagattttacatgtagcaaaaaaaaatttgtaacatcgacttcattgtttattccacgtgttgtaccggctcagatcctgattctataacttaacatcttcagacatctaagctgaag

SEQ ID NO: 277769 - DNA, 122 bp, Homo sapiens
cctcactcggagcctctctctttcagatgtcatcctcctgctctgtatctttcattttaacgggaacgtgaagcaggccactccttacatcgctgtgtatcctttctgaatctgagccagaa

SEQ ID NO: 277770 - DNA, 122 bp, Homo sapiens
ctcaagtgatctgctcaccttggcctcccaaagtgctgggattacaggcatgagccactgcgtctggcctactttgggatttttctctacagtgttttcatgttgttaatgtagctgggggt

SEQ ID NO: 277771 - DNA, 122 bp, Homo sapiens
ccgcgatggccagcaccaggagtatcgagctggagcactttgaggaacgggacaaaaggccgcggccggggtcgcggagaggggcccccagctcctccgggggcagcagcagctcgggcccc

SEQ ID NO: 277772 - DNA, 122 bp, Homo sapiens
gctctctgcgagcccggggccgcggggactccgttccagccgccgcgtccgaggcggacccgttcctccaccggctgcgccccatgctcagctccgcctttggccaggtaagggccgcgcct

SEQ ID NO: 277773 - DNA, 122 bp, Homo sapiens
gttgttgaccaggtagaggattgtcatgggcagcttcccagaggaggcaaaggaaaatagcgtctttagcagcaaataggagttatatgaaaacagaaagctattctattcaaggaagatat

SEQ ID NO: 277774 - DNA, 122 bp, Homo sapiens
ggcgctgggaaggggatggggcgctccgccctgacgggagagagccttaggcccttctgccggcttccgggatgcggctgcagcggcaggctggggaggtagctctcggtgcgcgtggcgcc

SEQ ID NO: 277775 - DNA, 122 bp, Homo sapiens
ttcacctgcacaaactgctccatggcccactggtccaggcaggtgtagttctccaggaagcgcagcttctccaactgaaactggtccctggactgagcctccgcctgcctctctagcagctg

SEQ ID NO: 277776 - DNA, 122 bp, Homo sapiens
cactttctgtaaggtcggcttcttcattgtttgaatttcttgaggtttcacggagccacgcgctggaaccttccatagtctctcctgaggctccttctttgccctgggctggaggtctgtag

SEQ ID NO: 277777 - DNA, 122 bp, Homo sapiens
aaccacagttggggagggaacacgaggaaatttgtgcgggtttgcttaagtacaaactcccgtatttccactgggtaaaagggaaatacacgtgagggagtaggaggtttcacgaggctggg

SEQ ID NO: 277778 - DNA, 122 bp, Homo sapiens
tccacgtgcgccttgcggtctctccatttatcgcttgagatctccagccttaccgcggctcgaaatggaccccaactactcctgcaccactggtaagagaagcccaactctgcgccctggga

SEQ ID NO: 277779 - DNA, 122 bp, Homo sapiens
aaagggggcgtggctggaaacggagctactggcttcggagaattctgtgaccctcaccaccgcgacgaccccgaggaaacgctgtcaggtcgcctttggttggcaaggcgtggttgtcctcg

SEQ ID NO: 277780 - DNA, 122 bp, Homo sapiens
aagaatgctcagtgaaaccttattccatgaataaattaatgccacccatgtggctggtcccgggcgcccagtcctttagagcagcgcagtccaatggaaatagaatgccagccacatagcta

SEQ ID NO: 277781 - DNA, 122 bp, Homo sapiens
tccaaattagagcactcacctttatttatcaattaatgaagctatgccctgggctcacaccgaagatccaagcattttgaaaggccaaggcaggaagattcctagagcccaggagtttcaga

SEQ ID NO: 277782 - DNA, 122 bp, Homo sapiens
ctagctcacacacctttgtgggggccctatgccataacgtatatgaaagtgctttgcatacggtaaaatgttttccaagttgaggcctcctggggcaatgcctttatccttcagggctgact

SEQ ID NO: 277783 - DNA, 122 bp, Homo sapiens
tccctctgctctatgaagagggtgctatttaaattctacccatttagcccttctttgagtcgcatatttcacatggctcccatacacacttgcacatttacaaatctgtatgctttttctgt

SEQ ID NO: 277784 - DNA, 122 bp, Homo sapiens
ccatggggtgcgggtcctgggagtcctggctggacctcattggcttgtggcgccttcactcggagagacgcgcctcaacccggaagtgtgcgaggcgaaatctgcctagcaaccggggaagc

SEQ ID NO: 277785 - DNA, 122 bp, Homo sapiens
taggtcatgggaaacttagaaaagataaagaacctaggaagaaaggcttcggttgccccccgaccagtacgccatcctcatacggagtgcgggagacgaccctttgttgtcggtgctgtcac

SEQ ID NO: 277786 - DNA, 122 bp, Homo sapiens
ggctgctctgcctgccgtgccgcccgacaccaagctctccaagttggacgtgctggtgctcgccgccagctacatagcccacctcacccgcacactcggccacgagttgcctggccctgcct

SEQ ID NO: 277787 - DNA, 122 bp, Homo sapiens
gaccaaacagctggccaatttttctgcccagtttcctcctgaagagtggcccctgcgagacgaggacacgccagctacgatccctcgggaagtagagatggaaatcattaggcgcattaacc

SEQ ID NO: 277788 - DNA, 122 bp, Homo sapiens
cagcacaccccgccctccagcaccatctggaaggtgcagaagtcatcgctggtgatctgtcggatgcccttgatgtggtcagtctgcttcacgaaggtcttgagcagcccgtggaccttgac

SEQ ID NO: 277789 - DNA, 122 bp, Homo sapiens
atcaaagatccagctaacaggcgctacgaggtgcccttggagaccccgcatgtccacagccgggcaccgtccccactctacagcgtggagttctccgaggagcccttcggggtgatcgtgcg

SEQ ID NO: 277790 - DNA, 122 bp, Homo sapiens
agagacaagggtcagctctcaaaatcatcacttgtcatcttaataacagggactcaaagccgagtgatggcgcaaagcaggccggtgaagcctcggcgctgggcccggcctggcactgcgca

SEQ ID NO: 277791 - DNA, 122 bp, Homo sapiens
ctgtgtttcctaccgccatgtgacccttggccacttgagccagtcacaacctctcggagccgcatctctaaaagtccaaaatgctgagagcggcaccaggctcacccagttgttgtgaggat

SEQ ID NO: 277792 - DNA, 122 bp, Homo sapiens
cggccgccctcaacccctagtccatgggcaccgccctccctaccatgaaaagtcggaggacgcaggagtctccaaacccggactgagagaggcaggaaacacccagctcacgccagccgggg

SEQ ID NO: 277793 - DNA, 122 bp, Homo sapiens
ttcccaggcccagcttttgcctcacagcggccttccccggccattttctagccggcctcgcggtagcctcaacaagcccagctcccgcctcacactggcctctctaggcccagctcaggcgt

SEQ ID NO: 277794 - DNA, 122 bp, Homo sapiens
ggtcgggcatgggctggaagcagcaggtgcacagggcgtggcttccttgcagagggcacacgtaatcctggactgctgaagcacacgcacattcagccggagcacgtgggacccagggcaga

SEQ ID NO: 277795 - DNA, 122 bp, Homo sapiens
tctcttcataggccgcgcaggattgctcgagaggctttgattggctcaacaggcgctgagcgttcattggctgcgctgggtcgtcagggcgacgaaaaaggggaaggggtgctgggcctggc

SEQ ID NO: 277796 - DNA, 122 bp, Homo sapiens
gcatattcagtagggaaagcgagggcggaggactaggctggcttctacggccccagttctcgccacccccaccgtgttggtcctttgtgccctctgggcggtcgagcacccaacggtccacc

SEQ ID NO: 277797 - DNA, 122 bp, Homo sapiens
atatcggatttgtcagacatggttacggaggagaagcggagcgaggcacgcgagaacgagcgaagtctggtctgcgtagtggccaccactgagttgtccaattttatttatttttttgagac

SEQ ID NO: 277798 - DNA, 122 bp, Homo sapiens
tgggctgcgggggtccgggagggtggattccgagaaactatgtgcccagctgaccctgcccgccccgccgcggccctgcagtccccgggccaggacccacgcgcccctgccaggagctgggc

SEQ ID NO: 277799 - DNA, 122 bp, Homo sapiens
tgtcaaggtgacagagcagctccagggtctgtgcagtgctggatgaatcatcaggggactcgtggctgcctgattccaattccttcggcatcctccacacggctgcacatgtcaggactttg

SEQ ID NO: 277800 - DNA, 122 bp, Homo sapiens
ccagaggccggctgcccagttgcagcgcccgctgtctccatgtttaggtcgcctctagtgcgtccgtccccaactgggcccgggtggaagcgagaaccaggcggaggagaaaggttccgcta

SEQ ID NO: 277801 - DNA, 122 bp, Homo sapiens
agagcgacactgtctcaagaaaaaacaaacaaacaaacaaaaaacaataagcaatctatccgagtttacaaagccagggaaaatatcaggatagtctctttggctataaaatttgggttctt

SEQ ID NO: 277802 - DNA, 122 bp, Homo sapiens
tggttgtcagactttctcctggactttctccgccccgcaccgcccgccccggatgccgagcgtggtagactctgcagccgggctcctcgctgcccgctggcgctgcctacacccccttgggc

SEQ ID NO: 277803 - DNA, 122 bp, Homo sapiens
cctgtctcaaaaaaccaggggtgagggggacgtgaaaagggaggaggtaggggggtatagcgaggcgtgtccgtccttccgtcccgtcagggcgaggaattcagcttttaaggtttatcggg

SEQ ID NO: 277804 - DNA, 122 bp, Homo sapiens
ggtttgtaagatcctgttgtggaagccagttggggagggatgctctaagtcctagctcttcgtgctttcttaccatcttatactagaatgctgttcccccctttcctaacagcaccctgcct

SEQ ID NO: 277805 - DNA, 122 bp, Homo sapiens
caactaaaatccagggcttgtcgcaggcacaggctcctccttcggtgggtgggacggcggcgcgcactttctctacgccccactgctaggatgtgcggccaccactcctcctccgccgccgc

SEQ ID NO: 277806 - DNA, 122 bp, Homo sapiens
atttgatgttaacagtggcagtggcagccattccccagtgaatcccagcagttgtgatggcgatttcctccagcagcaatcccagtcttagtattttcctcatcaggccagttttcagcttg

SEQ ID NO: 277807 - DNA, 122 bp, Homo sapiens
tgcatgtcgagatggtcgtagaatgttgagtatcctactttcctacctcgcttttatttgcgcgggtttaaatgcgccttaacagaacccgtgcaaaggcttgcctacttgtctggctgcac

SEQ ID NO: 277808 - DNA, 122 bp, Homo sapiens
cacagggggacctggctgcctccctaggtgagactgggggccctgagggtgtgggtaggccgctgggttgggcactgcctcctctgccatcctgcctgggccctgccacccaccctgttctc

SEQ ID NO: 277809 - DNA, 122 bp, Homo sapiens
aacatgttccctaggtctttatttcaatcaagtttccctgtgttctgcaggagaagagatcgagaggggatagaaaaattgaaaagggctgtcccagcagggagccaagccggaaaaaaggg

SEQ ID NO: 277810 - DNA, 122 bp, Homo sapiens
agtgtggggagacacaggccatctccagccgtcccgcccaccagtgcgctgtgtctctcccgcctctggattgtagagtgtctctctgcacaacacactcacacggaggcacggggaagggc

SEQ ID NO: 277811 - DNA, 122 bp, Homo sapiens
ctccaagtcaagtctctgtcttctcctctcccatacacagcactaggagctattctggaccgctcagaatctactccactgaaggaacctgaggggcgaactcatctagctgaccgaggagg

SEQ ID NO: 277812 - DNA, 122 bp, Homo sapiens
acaggtcacaaggcacctctgcagccgtgtggtccagcgagttggccggcagtgtccctgcgtctacggaggccctggagcccacgtgtcaggtccgcacgccactgtgcccttgcccgtct

SEQ ID NO: 277813 - DNA, 122 bp, Homo sapiens
gagaaatgaatgcagaggggccctgccctactcacacgcatgcacctgccgcctgctgcgcgcaggggagacacgtggattgcaaaccccagcgagcccagggtccaccgccaacgcgtgga

SEQ ID NO: 277814 - DNA, 122 bp, Homo sapiens
aggttcaagcgacacttatatgtcagcctctcgagtagctgggactacaggtgcatgccacgatgcctggctaattttttggtatttttttggtagagacgaggtctcagcatgttggccag

SEQ ID NO: 277815 - DNA, 122 bp, Homo sapiens
caccactctgcatgtggttgatgagatcctttttcagagcgtccccgctgatgtcggaatcgctgtcgttgaaatcactgtcccctttaccgctgtctttgccgctgaacttctctgcttct

SEQ ID NO: 277816 - DNA, 122 bp, Homo sapiens
gcggatgggcggggcaggcgtcagcttgcattcgctcaccgtccagcaccgccctctctgcgcgccacttagactggaaggcggggccacagaaggccacgcctccacatagcaacaaatag

SEQ ID NO: 277817 - DNA, 122 bp, Homo sapiens
gatgagggctgagggcgtttggagggaagcgctctgcctactgccgggaggtgacacccgcgaggccgaccgtcccccgaagcccccgcaagtccagactgggggacctcggagatccacga

SEQ ID NO: 277818 - DNA, 122 bp, Homo sapiens
tcaggtcctcgacctctccacactccagggcggcacagctcaaacacgcttggctctcctcgtacccaaaatgccaccaggcactcagagaaaggaaacatttcaagcgctctccggggagc

SEQ ID NO: 277819 - DNA, 122 bp, Homo sapiens
aaaacgggctagaccaggacttcgacgggtcccccgggcgcggaaggggatcctgggagccggcatgcggaaaaggcgccccctgggcaccgggaccgcaccaaactccaacgaaaggcaaa

SEQ ID NO: 277820 - DNA, 122 bp, Homo sapiens
ggggcgggccaacttggcactggctccccctccctctctccccatccgcggcggtggcggcgtcagcagtggtaagaacagatgagggttccagaaaaacagagcttctccacccccggcag

SEQ ID NO: 277821 - DNA, 122 bp, Homo sapiens
tgtgttcaagtcgggaagaagcctcccagcatgtaattgagccctagattcggctctgggcgggctcgagcagagcctcatagtcttaagaggcgggcaaggtgcaacacagaaccacaccc

SEQ ID NO: 277822 - DNA, 122 bp, Homo sapiens
ccggacgccgccctcagggcactcacctgggcgcgagcggcttcagacaccagctgtctccgccgaccccaggctcgagtctccacacccccgccggtcccgcccgcccttcttatagctgc

SEQ ID NO: 277823 - DNA, 122 bp, Homo sapiens
aaaactcggtctcaaaaaaagaaaaatcattctgtcattctggccgctgtttgaagaatgcgaataatgcaacagggagatcagatacaagactggtaaccgaggtgtcagagttgagactc

SEQ ID NO: 277824 - DNA, 122 bp, Homo sapiens
taagcccgcagagaacccccgatcccagaattagctggcgggcccgggaggaagtgttcccgccctctgtcccgccccgcggccccagccacttctcggcccgccctcaggtttactctccg

SEQ ID NO: 277825 - DNA, 122 bp, Homo sapiens
tggggaaggagtctggattttcaagtagggcatggaagagtgtgtatgcatacttgtagccgagcacatgtatgcaggcatgaggtcacgcctactccacaaatgtccttccaaaggagtgt

SEQ ID NO: 277826 - DNA, 122 bp, Homo sapiens
cttactggcgctgacagagcctcgcgcccgcggcccaattagcgcgcggcgcgagggacgcggcatctggaattgcgctgcgctcacggccaaggccgattgtttagtctgcgcggcggggc

SEQ ID NO: 277827 - DNA, 122 bp, Homo sapiens
ggccagggccagcggccttcagtcggtaggcggcggcggaaggaggaggagctccagccgcgctctctcccggcagtggctgtgcttcacagcgcttgttgggttccccaccccttttaaat

SEQ ID NO: 277828 - DNA, 122 bp, Homo sapiens
ctatgtccaacatgcagaatgaagagcaaaggcttggtgctgacttggtggctagggaatcggatgctgtatttgcaggatgcaccgagtctgctcaagtaaccagactccatagcttaata

SEQ ID NO: 277829 - DNA, 122 bp, Homo sapiens
ctccgggccggctgctaagagagttaatcattacttcgccagcgacactcagcctccctccgactctctcgcccggcctaggggaggaggggaggggacagctggccaggtggggacttcgg

SEQ ID NO: 277830 - DNA, 122 bp, Homo sapiens
atcaaatggcgccttccctctgcaccacgtggcagtaagagaagccaaacctcaaaatagcggacgtggtgcagtctcagacatctgctccctgagcccctgcttactgaggccgaggctgc

SEQ ID NO: 277831 - DNA, 122 bp, Homo sapiens
ttaacagttccacaaaaacagtttttaaaatactgaaacactgcctccctagagcttgatcgcaacatccctttcttcctggcatcacacaacagtattaataaaacattagttttcaaagt

SEQ ID NO: 277832 - DNA, 122 bp, Homo sapiens
accggttctcagggacagtgcacgcaggtaatcgggtgggggcatttggccgactgccggcgacctaaaccctgatgtgacctctaccctgccctaacccctgccagccggaatccgggagc

SEQ ID NO: 277833 - DNA, 122 bp, Homo sapiens
ggcgggacgcgccggcggcggggaagttggttattgcgaagtgccgtggctgccggcgggcgctgcgggactctctgcaatgggacccgagcagctctagagggaggcggcggccccagaag

SEQ ID NO: 277834 - DNA, 122 bp, Homo sapiens
tgtaggatttttagaaccccagcatcgctctggtgcgacttaaaggataggccccagcatcgccctggtgcgatgtaggatttttagaaccccggtgtctccgtggcgcaccttaggatttc

SEQ ID NO: 277835 - DNA, 122 bp, Homo sapiens
agcactctttggaggaaggtcacggtgcacagcccacaccgcggggtggggagtcacggtcgcctccttgggggcagaggatctgcatgaatccttccgaatccttctgcttggagactcgt

SEQ ID NO: 277836 - DNA, 122 bp, Homo sapiens
tcctgggactgaggggtttcgtgtggatgggggactttcagtgctgaaacgtggtgtgtccgagggtaggttgttaccctaccacatcagccctcaccgggaacctggtctgttttccgtca

SEQ ID NO: 277837 - DNA, 122 bp, Homo sapiens
aaagagaaggaagcggaggtcccgatccttcgaggtcaccgggcaaggggtgaggcgaggcgcaggggtgggtgtctaggcactcccatagcagctggaggcctgagggctggatttctcca

SEQ ID NO: 277838 - DNA, 122 bp, Homo sapiens
ccgggaggcggtggccgagagcctgctcctggagctggaggaggtgacccccgccgaagacggcgtctatgcctgcctggccgagaatgcctatggccaggacaaccgcaccgtggggctca

SEQ ID NO: 277839 - DNA, 122 bp, Homo sapiens
ccgcaggtcttcagagcagcctaccctggccatgccaggcgggaacagcagatggaccctcggggcacccaggtcccacgagagagtgacagctcagggacatctgtcctcggggcccacga

SEQ ID NO: 277840 - DNA, 122 bp, Homo sapiens
cctgctcttcgcttttcctcctctctcctaagggctgcagccttctggagctgactcaggcgagaggcgtccagagcccaaataggggtcacacctgctgtcgagagagtcctctgcataaa

SEQ ID NO: 277841 - DNA, 122 bp, Homo sapiens
gctgcccctgccctgactcccagccctgtctgaccccacctcaccctgctcaggctctggcgcaaccctggctgccctgccactgcctctgccccagaggtgggaccttgacagcctggctg

SEQ ID NO: 277842 - DNA, 122 bp, Homo sapiens
aaaagtacaaaagctcaaggagtcttcagtctagcaattaaatatctgctttaatcagttcgccctgtattgcacaccggaagtaatggcaactgggataaatgtagatgttgtttggagtc

SEQ ID NO: 277843 - DNA, 122 bp, Homo sapiens
tttttttttttttttttttttagatggagtctctctgtcgcctaggctggagtgcagtggcgtgatctcggctcagtgcaacgtctgcctcccgggttcacaccattttcctgcctcagcct

SEQ ID NO: 277844 - DNA, 122 bp, Homo sapiens
cacccacagcgacacctgcggacggaggtggaggcgcacgcggctgtgtatgctactgggcgctgctggtaccagagtagggccagcgggggcagaggctgatttcagggctggtcctatta

SEQ ID NO: 277845 - DNA, 122 bp, Homo sapiens
gcggcccctggccaaccaggaaggcacaggcagggctgagtttgcatgacaggaggagctcgggctcggaggaaagcattttagacctgaggtatcgacgaagggtcaacagggatgaccag

SEQ ID NO: 277846 - DNA, 122 bp, Homo sapiens
tgacagggcggagcagaaagagagggagaaaggagactcacccctggaaagggagtttgccgtcgaaaactgggcttcttctgttggaaatcttagagacactttcagtgcaggtctttggc

SEQ ID NO: 277847 - DNA, 122 bp, Homo sapiens
aagctattggaatttggggagggtagcacgaggggtcctgcagctccgcgtgtgaaaaagcgtttaggtaggcgatgaaagtagttgatctgagccatggcaggcgagccccgaatttttgc

SEQ ID NO: 277848 - DNA, 122 bp, Homo sapiens
gcgagagcggacccaccctccggcttgacctgcgacctccctgcgcccgccgctcagaaacgccccgcgcttcgctgccaaccctgcggctccctctgtgacccgggaccagccccgcgccc

SEQ ID NO: 277849 - DNA, 122 bp, Homo sapiens
gtcgctctctcctatgttggggaatcagtctcgggaggactgagcagagagacacggggtcgtggaggtgaggattccgtgtgttgatacacaccaaagacacagagaagagcccagttcac

SEQ ID NO: 277850 - DNA, 122 bp, Homo sapiens
agttcttctagctacagggccacttcttgtggtgcttgtggtgtgtcaaaaggaactccccgcttagcctctttagagggtacttcttccattacactctacacacccacacaccctgggag

SEQ ID NO: 277851 - DNA, 122 bp, Homo sapiens
atgggggcgctgccaattaccccggaacggcggggcggggaggaccagggtgggcgtggccgcggctgtttgcaggagccgcgcacctgctgctctgcccctcccgtacacacgtcgcacag

SEQ ID NO: 277852 - DNA, 122 bp, Homo sapiens
cgacctcccaatctcaggtgatccacctgcctcggcctcccaaagtgctgggattataggcgtgagtcaccgcacctggccaaattgggttatctttttattcgtgtttgatattgtctttt

SEQ ID NO: 277853 - DNA, 122 bp, Homo sapiens
ggatccctcccgccctccgcccaaggagccgacccggggtagcaaggtagggaaatgagccgtaaaggagagcaaaggcaccaaataaaaggaacaagggaagaaaaaatatcccaacccct

SEQ ID NO: 277854 - DNA, 122 bp, Homo sapiens
ccattggccccccggtccccgccccccaccgccccctcccgctccgcagcccccgagtggcgtcagcacgcccgccgggcatgggctttaaatgcccactagcgggagctcaggcgcttctg

SEQ ID NO: 277855 - DNA, 122 bp, Homo sapiens
ccagggagttatttttatccccaatttacaccagaaaaaacctgagactcagagagaattcgacagagccaggaactgctccctatccaacagagatcacagaatagcagcaagagaggcaa

SEQ ID NO: 277856 - DNA, 122 bp, Homo sapiens
agggggcactgcagggatgaggaccatgccctgggggctccctcaaggaccccaagcacacgtgtcataggcatagcccctcagataccactagctcacccactgccctcattcaacaagct

SEQ ID NO: 277857 - DNA, 122 bp, Homo sapiens
gcagtggcaggctccacagagatccccctggggcgcactgggagctggcacctgtggtcacgcccgcgacgcggttggaaccagcacaggggaagggccctgttgccacctggggcctcaca

SEQ ID NO: 277858 - DNA, 122 bp, Homo sapiens
tgggattcagtgaggctctcttaataccaaatttcctctctaaccagagaagacttcatccgtcccggtttccatcctatccaaaaagtccacccccctagcacctgcctcgttttttgcag

SEQ ID NO: 277859 - DNA, 122 bp, Homo sapiens
tagctcagcaagaggtataactgtaaaaaggaccacagtttgttatccgtagtcaggctacgcagaaaccaaatcatgttcaaaaatcaatttattaatttactatgagaaatttttttttt

SEQ ID NO: 277860 - DNA, 122 bp, Homo sapiens
aaagagagggataacaatctgtgagccaatgcttttattgagtctggggcattatccaaacggggttcctgcagcaagttttaatgggtgggtttgaagcaaggaggcacaagttccagaag

SEQ ID NO: 277861 - DNA, 122 bp, Homo sapiens
tgtgacctcagatgtatatacatccacatctctaagagtctcctggttactagggaattccgcacaagttcctcacaaaattcacaagcaagaatatttagaatcatgaaattctaaatctg

SEQ ID NO: 277862 - DNA, 122 bp, Homo sapiens
attttgggagaacacaaacattcagtctatagcggagacacactgcttcataggagagcacgaggaactcctttggcagctttctgcgctatctggggacattgttctcaaaaatttgtttt

SEQ ID NO: 277863 - DNA, 122 bp, Homo sapiens
cctctgtgactgtcttccctgttccccagtatgagcccatctgcacctgtggccccctagcgttgtgactccgggttggacaccagcagtggggcagccacagccaggccctcggagggcca

SEQ ID NO: 277864 - DNA, 122 bp, Homo sapiens
agaggtccaggtaaaggtttacggttgccacaggtcagtcctgacgaaaaccgcaagctgcgccaaatctcgcgcagcggggcgggagggcgggtggggaatgtaaggtatcgcgagatgac

SEQ ID NO: 277865 - DNA, 122 bp, Homo sapiens
cggcgcggtcccctctgggcgactgcgggggcggcctggcagggagctggggcgagtggccgccgcggggcctcgcaggcgcggggaggcaccggccgggcacccgcgcggctgaggcgagg

SEQ ID NO: 277866 - DNA, 122 bp, Homo sapiens
tgaagtgctcagaaagagacagatcgtaatgagaagagaaaaggcacctggcatttgcatcgccctccacctggagccctgactggagagggtgtaattagagcgctctctgtgcagggaac

SEQ ID NO: 277867 - DNA, 122 bp, Homo sapiens
ctcggcagtaacatctgagattaatcttctcaacagcatgacctgaccacgcagtgcccacgacagaggagacctgcttcctctccaggttctgtggcctcacagcacccaggaagcagcat

SEQ ID NO: 277868 - DNA, 122 bp, Homo sapiens
taagtgaccgaacgggcagacaagcatgcagggagggccgtcagcatccacagaacttaccgacctgactgagagcgccacgtgcaccaggctcacgtcctgagcgtgtgcccacagccctt

SEQ ID NO: 277869 - DNA, 122 bp, Homo sapiens
ctccacacacactcacatgctctcatttgcttgattctgttctctctctacacacactcacgcgctctcatttgcttgattccgttctctccctcgacacacactcgctctcattcgcttga

SEQ ID NO: 277870 - DNA, 122 bp, Homo sapiens
aacagtgagaaccagaatccacaaaggccaaagtgcggaaggcactgagacaaagcaaagcgacccacagagcaagaggaccgagccgccgccgccgctcaccggaaaaagcgttgcacagg

SEQ ID NO: 277871 - DNA, 122 bp, Homo sapiens
atttcctggtttggacatggttttgcgggctcggtggaccttgggctgtccctctgggctcgtggtggctggagggggttcagaccctgctgctgcagctccctgggctcctggcatactca

SEQ ID NO: 277872 - DNA, 122 bp, Homo sapiens
gctcccggagtggctctaggcagatggggcagctgaagggtccactgccgtccatgactccgcggccgcccagggcgccgccgattgtgctccggcctgggagggacccgggccgttcgcgc

SEQ ID NO: 277873 - DNA, 122 bp, Homo sapiens
aagaacaaagcttcaagagtctgtaatcagacccaaaacaacagatgcttagaagcagggcgggcaggctgcccaccccatgagagcagaaggtaggacggacgtgcatggacgcctgtcgg

SEQ ID NO: 277874 - DNA, 122 bp, Homo sapiens
agagggggaatcaactctatcttcaggatggtgaagacttggtgcagaatacattttgggcgagaaaaatcagttgtatttggatatattaggtttcagatgcaaaacaacagcattggaag

SEQ ID NO: 277875 - DNA, 122 bp, Homo sapiens
caaggctggtctttgccccctactagagtctgaggctccagcagctgatctgggccagctcggcagagagctggatctgggaataggctttcctcactaggctacaggaaggagcgatgctg

SEQ ID NO: 277876 - DNA, 122 bp, Homo sapiens
cggccctgaacactgctttgagtggtgtccaaccttaacgttctgtggaaggtgattccccggtagatggagatgatgagttaggtcagagccagtgggcagtgaacggaggccactggggt

SEQ ID NO: 277877 - DNA, 122 bp, Homo sapiens
gctggctgcggcccgcgccaatgagcggcgggggccgaggctgggcttatttgcgggggccgcggcggcccgggtgcccgcgcgttagatgtgccgccgccgccgcccgggctcggcggagg

SEQ ID NO: 277878 - DNA, 122 bp, Homo sapiens
tcctaagggtcggcccaagtccaggacctgtctgggaattgtggacatatcggtaggacacgggcaaggattgccatctcgctcagcacctgtttccttgaacgatgagaataacccatctc

SEQ ID NO: 277879 - DNA, 122 bp, Homo sapiens
ctggggcggtgcagggggcggggctgccgcggcattgcggatcggcgggcactagggcagcgcggagctccggcggtgggcggggcgtggcggcgcgcgcagcggcaggcggcggcgggatg

SEQ ID NO: 277880 - DNA, 122 bp, Homo sapiens
attggcattgagcggggtaagggtgattgtgttttaatgggatgctaaggggtgcatgatcggtccccaaggagggagtaaaggtgtcctatacttgtggattaaggtggggagatacaagg

SEQ ID NO: 277881 - DNA, 122 bp, Homo sapiens
ggaccacacagaaatggataccattttactcaaatcagtgagggtggcccactgtgaaaacggctatggaataattggttatgggacaggtcctagagtgcactaagttcttatcagagtac

SEQ ID NO: 277882 - DNA, 122 bp, Homo sapiens
tcagggtcttttccacgtgtggaggctagtgtttgatgctggacggcctggagtaaagggcgaaggggagaaggtaaccaaccaggctggcctcgggattcgcagaggagggctggggcttt

SEQ ID NO: 277883 - DNA, 122 bp, Homo sapiens
ccaggccctgctgaggcctgtggcagtaaccgcaggtctggactagaagagagcagccagcggcacccggccactgtagcggtcactggtgcagccactgccagcagccagggcctccggcc

SEQ ID NO: 277884 - DNA, 122 bp, Homo sapiens
ggcccctctttcctgaaagccagaggtggggtcctggtgtgggaatataggcatccatagcggatgcctggatggtaggaataggatgtggcaaaaatccttcccgaagcctagcggtcatt

SEQ ID NO: 277885 - DNA, 122 bp, Homo sapiens
cgccttgggcgagatggtgccccacctctgcagtgcggcctccagcgacggcggccagttcgtgaccacgcccagctgctctccgcgcatggccagcatctgggccccctccggctttggtt

SEQ ID NO: 277886 - DNA, 122 bp, Homo sapiens
gactactccctgcagtctccaatttctcttcagcacaacccagcaggttgacttacaactcgtaataggacagtgggactctcatttcagctttttattttcctttgtcggcatcttcattt

SEQ ID NO: 277887 - DNA, 122 bp, Homo sapiens
gacacgtgggatgtggcacgaaatcagtgtctcaggactgagttccttgtgtgtgtctgccgggagcattggaagtgaaggaggcggtctctgcacatttttagccttggaatttaattgtt

SEQ ID NO: 277888 - DNA, 122 bp, Homo sapiens
ccgatttgaccgtctagggcctttgagaggactttccttttgggaaagcttttctcaattcgtggcctgtgggcaggctggggggtggggcgccaagtcatccgagcgcggcttctgcttct

SEQ ID NO: 277889 - DNA, 122 bp, Homo sapiens
atgtgttccgctggcagtgggactggatgcccctccctcccgtccttccttccttccctccgggagtggtctgtcaccagtcccctcccagggcaagtcacacaccgtctccactggggccc

SEQ ID NO: 277890 - DNA, 122 bp, Homo sapiens
tcttcactgaggtgatctcttcctcttctgaattcctatcatgaaggagcatagctagaccgaggtttgaatctcatctccgctatgtgattgttgaagtcaatttccttatctataaaaga

SEQ ID NO: 277891 - DNA, 122 bp, Homo sapiens
atggtgaataatgggtgagcctgtccaacttccaacctcgtttggctgcccacagttagccgggtgcctggctctgctgggtcagctggtgggggaagcaggaaggagggggtgagggctga

SEQ ID NO: 277892 - DNA, 122 bp, Homo sapiens
aacttccccaatggaacaacatgccttatttttggcacatcttaaattgatcaagatgtccgttataagttaatttataaatttaatacaaataaccatgagtattttaaaagaccaacaca

SEQ ID NO: 277893 - DNA, 122 bp, Homo sapiens
aggtaccaacacgaccacacatgcaaccacagcagtcaagtctttctaaggcattggccacgggcatcctccctacttctccactccacccagccttgcccgattctattatactaagaagc

SEQ ID NO: 277894 - DNA, 122 bp, Homo sapiens
acagttcttagagtcagggtgggttttaggaaagagatcacccaggagactcgaaaggtccgtttgctttaggcatgtccttgcctatggggccaagacctcactctagccacccacagctt

SEQ ID NO: 277895 - DNA, 122 bp, Homo sapiens
gagagaagggaggacagagaggtcagtgcacctggtcgcagcctccaagtttccctagtccgctccccgggagtccgcggctgcacagaactccatggcttcctggcccgccccgcccctgc

SEQ ID NO: 277896 - DNA, 122 bp, Homo sapiens
cggagcaagaacctaataaatgtgagccctggactctgaggccgggcagcgaatgttctgcgggtgctgtctgcggccggatgtgggttttggcatcatgagctcaggagagaactggccgg

SEQ ID NO: 277897 - DNA, 122 bp, Homo sapiens
cctcccagaacaggctgcccccagtgcttgcaacttaccccttcgcggcgctgcacggctcggctcacttctccaagaaggcaggcttgtgggtgtgagagtatgtattaaggagtgtgtgg

SEQ ID NO: 277898 - DNA, 122 bp, Homo sapiens
cgtccggcccccgcctccccaccccgcccgcggggccgggggctgcagtctcagcccccccggaccaatgcaaacgaagcgccgagccagcaaaccagctcccactgcccctcccctgcccg

SEQ ID NO: 277899 - DNA, 122 bp, Homo sapiens
tagactcagggcttgaacatccttcagcagcagaacttcaccagacttgaaagaaaccaacgtgcacattgagaagacagcaaatgagttgtttcctttctttttgggcagacaaacctacc

SEQ ID NO: 277900 - DNA, 122 bp, Homo sapiens
aggcagaggtccctggaagacagcaggggctgctgtggcagattcgcgattccttcagcccgccttctcctaactagctcttggaggatgtgatgcaactcaggaacaccatggtccttgcc

SEQ ID NO: 277901 - DNA, 122 bp, Homo sapiens
aggtaagtcatagggataccaagggaagggacagacgccttcaccggccagccaactcagcgtcaggcatgatgcttctttgggcttattcatccttgccccaaagtagtaatcacatattt

SEQ ID NO: 277902 - DNA, 122 bp, Homo sapiens
cccattttacagaaaataaactcaaatgtcctgtgacttgccaaggattacagagaggggcgaatgctgtgctgtctaccgctgagtacaatccctaataccattcccactcccgaagtggt

SEQ ID NO: 277903 - DNA, 122 bp, Homo sapiens
ggtcctgcctgtcagctccaggtcctggagccacgtccagcacagagtggacggattcaccgtggccgactcttttccctgctttggtttgtttgaaatctaaataaaactactttatgaga

SEQ ID NO: 277904 - DNA, 122 bp, Homo sapiens
tccctcctaggagctggagacctgcaggcaggggcaggggacccggtcctctgcagaacccgagctcagggttgcgttagacccactccggggcgcacggtcttcagcggagggacggcggg

SEQ ID NO: 277905 - DNA, 122 bp, Homo sapiens
gcggcctgccgtaaagacagaggcgggttgttaagtatactctctactttacggcgtacccgagaacgcccccgcaggggcggtgctttggaggtgaacccgggttgggaggttcagctcct

SEQ ID NO: 277906 - DNA, 122 bp, Homo sapiens
ggactgggtagaaggagggcagcgcgacctggcagggcggggcctgcggggggcggggcgcgccgcacaccaggccgctttgacccggactcccgtccaggcgcaccggccggcctcggagc

SEQ ID NO: 277907 - DNA, 122 bp, Homo sapiens
cacagctggggcccctcgtctaagaggcagcacattccccaaccagaatttaaggaagtccggggaacttaagttttacagcctgcttagcatcctcctgggtgcaaaatagataattttgt

SEQ ID NO: 277908 - DNA, 122 bp, Homo sapiens
cctttggccgcgcaagcgcagtggggccggcgggaagcgtaggcgtgtgacgtcatcaggcggcgcgggccagccaggtgcacgtgactaaggccttgggcgcggcaggtggtagccttccc

SEQ ID NO: 277909 - DNA, 122 bp, Homo sapiens
gagatctaactcatcagatgtgccaaattcctgttgccatggaaattaaactgacgttgccgtgaccacatctcttactgcaccactaaagaccatctgggtaagaggaaagtgcttctgca

SEQ ID NO: 277910 - DNA, 122 bp, Homo sapiens
aacttctctcattcttaacctactcattaggtagctccctcagaggcctggagcacagcccgggcgtttcggaagagcttgatggttacctttcattccccgtttcccaattgtgtttttct

SEQ ID NO: 277911 - DNA, 122 bp, Homo sapiens
ggggagaaaacagagctggtggcgctgctgagtgtcaaaccctggagcccatcgtcaagacgttatattggtggcagttctgctgtgagtgcacttgccgaattgaacagagccagagctgc

SEQ ID NO: 277912 - DNA, 122 bp, Homo sapiens
gagcagtccctggagcgctgccccgacgggcgcctgacaggcagagcagcccggctggcacgatgggaatccgggtatatttatctcggctgctccggacaagggcttgagggcagatcggg

SEQ ID NO: 277913 - DNA, 122 bp, Homo sapiens
attatcttctaatcattataccctcactaataatggctcggtatgccaggcatctgcaaacgtttcccacttcttttgtttacttttcagatgaagaggacaagtaagctttttgtttgctg

SEQ ID NO: 277914 - DNA, 122 bp, Homo sapiens
ttggtgcagcaggcgttagaagaatgacactctgatagagggaccagcttgagcagtctccgtatcagagttgagatgtgcctttacccctcacgagggccttttggggagtcccaggaggt

SEQ ID NO: 277915 - DNA, 122 bp, Homo sapiens
acctttcaaaatcattctttttttttttttttcagtcctaggaaattgggtcagaatctgcgtatctaatgggatcgttactgttacacttgtaagatttggaatccgttcaaaaaacaagc

SEQ ID NO: 277916 - DNA, 122 bp, Homo sapiens
ccacgctgaggaggttgggagatggggcgggcggagacgccaggcctgggcggggctgcccgtgtgccacgccccgcgcctccgcgcaagcgcgcgcaggcgcactcgtccgcccgtgacgc

SEQ ID NO: 277917 - DNA, 122 bp, Homo sapiens
accgtgaattattaacacttttcacagaggccacgctccacaaagggaacttcagcgatacggaaatctcccaaggtgggacgcccgtgcggtggaggcaacgtcactccatcgagccttgc

SEQ ID NO: 277918 - DNA, 122 bp, Homo sapiens
cgccgccgctgcagtctctcgggcagagcagagaaaagtccctgatctcggggggcggagcggcaggcgggaacccaggcacccgccctcacccatatccctgagaggtcgccgcccccccc

SEQ ID NO: 277919 - DNA, 122 bp, Homo sapiens
aggtaggaggggccgaccaccctcgcccggggtcggggtggggtagaggaggggacgccgcggctctcaaccctggagagcacctagagctgagagacaggagactttctggccccgccaga

SEQ ID NO: 277920 - DNA, 122 bp, Homo sapiens
tggggcccctgcgtgtggagtgggagagcctgggctcaccctccctagccctggcgtgggcgacaaggctccaggcccctgaagcccatctgatcctgcttagtagaaggagacgttgtctt

SEQ ID NO: 277921 - DNA, 122 bp, Homo sapiens
gccagctccaacaactaggtgcagctgtggccccacggtggctgagcctcctctgtctcccgcgggaagtagaattcaaggttcaagtaccggagcacctggggccgctgctgtttgggaaa

SEQ ID NO: 277922 - DNA, 122 bp, Homo sapiens
caccgcctgcactcaccacgtgtgtaacctgggtgcgtctctgcaggaccagggcctgcacggtacccactccctcccgaaggtgcccctgcgcccccaggcctgggtgcacggccaagcgc

SEQ ID NO: 277923 - DNA, 122 bp, Homo sapiens
ttaacagggtgggctagtttctgttggatggaagagttaccctggatccctgagaagtaacgacagtatccaggattaattaggttgtaaagtagtaaccaggagttttacatatcttttaa

SEQ ID NO: 277924 - DNA, 122 bp, Homo sapiens
cctagttgttcttgtttttcctgtttttcactgagttcttttatgcctttagtcctgaggcgcaaacagctgttgtagggctgcctaaaggtccgaaagagacacccctcggcttggaaata

SEQ ID NO: 277925 - DNA, 122 bp, Homo sapiens
gctcacttatgctacagagaatgcgagagaggacaacggagatgtcgccaggcagaggatcgactgatgggtcagaacacaaatcagccaattcagcatcacgaggcgtggggcgtgctgtc

SEQ ID NO: 277926 - DNA, 122 bp, Homo sapiens
ggggcgtgggttgggggatggcctggccaggtatggacatccagagccccctctcttttacgcagagcgagagctcgccaaggctgagaagctgtctctggaggaaggcgggaaggatgccc

SEQ ID NO: 277927 - DNA, 122 bp, Homo sapiens
cggtcactggcggggtcatacgcaccctggcaggggcaaacactccacacccaagttattcgtcggaggccggggacctaagtggaggtgcaggcgtccgcacttacacgcaccgggccaca

SEQ ID NO: 277928 - DNA, 122 bp, Homo sapiens
agggatgtggggaagctggccctgccacaccttgctggggggacgcagcaccagtacagccgctcttgcaaataggcaggcggtttcttaaaaagtgaacacatttaccatgtaacacagca

SEQ ID NO: 277929 - DNA, 122 bp, Homo sapiens
gaagtaggactatctgtctgcaattcttggaccttgaaaggtcctttgggttacctggcccgctgtctgcacagcactggctccctggccagcaggaaggctagcctccaggctaagccccc

SEQ ID NO: 277930 - DNA, 122 bp, Homo sapiens
ggcatcgccggggtgagctggagacacgggccagttctctgcgtgatgtgttcaccaccccggggtgaccgcgtgaggacagcggccgcaccccgacactgctgtgggccctcggtgtggag

SEQ ID NO: 277931 - DNA, 122 bp, Homo sapiens
gtagaaagaaatgtcatgggcctcataatccacgaagattcccacccggcgaggagggaccggcaaggacaggattgggtactcatcggtgcctgctcggtactcatttcccttcctcagcc

SEQ ID NO: 277932 - DNA, 122 bp, Homo sapiens
attcgctcattcattcattcattcatttccctcaagcctgcgtccccgcccggtcagcatcgcaggtgttacccaaactctgacggtccctttaagaactcacccggagtcgcgccctccga

SEQ ID NO: 277933 - DNA, 122 bp, Homo sapiens
agcccttgatccgccaggcgcagtgtctcggccagagcccagatgtagttgtaggcgaagcgcagcgtctcgattttggtgagcttggtgtcgtcggggaacgagggcagcacgctgcgcag

SEQ ID NO: 277934 - DNA, 122 bp, Homo sapiens
tatccacctcgggcagctcgtcaggctgcggcgccctgttcagtctgttgcagctgagatcgagcactctgagcttggctggcagtcctttaggcacctgttccagcccagcgaacgacaga

SEQ ID NO: 277935 - DNA, 122 bp, Homo sapiens
tacatatgtatgcagtaaaatctagtccttttttcctagaatactcagtgtgtctgagcacgcacaaacaaactttgcatatcatttcaagttgtcactattccttggattaaaactctttt

SEQ ID NO: 277936 - DNA, 122 bp, Homo sapiens
ctcctgacaactgcatggagtaaaccacaccgccttgttaaatgccgtcgccgccgccgccgtcttcgtcaccgtcacagtcgccgccgccatctttgttgtgtctccgactcccttcccgc

SEQ ID NO: 277937 - DNA, 122 bp, Homo sapiens
cagtcccaaccccctggggctccgatccccccccccccccgcaatccccgctccgactcgcgtgctctcgcctgctggtccccagtgggtgccccgagtcctgccccaccccgagggcgcgt

SEQ ID NO: 277938 - DNA, 122 bp, Homo sapiens
tgagcaggaatgcttggtggcacagccactgcacggcctcggagggcagagggccggcggcgcccttggcccccagcgacatccctgggggaaaacagaggctgaggagtcacaggcccagc

SEQ ID NO: 277939 - DNA, 122 bp, Homo sapiens
cgtcgcagcccgcactcaaggaggtcttggggcgcggcgaaggggctccgggtcccagcccgaaggcgacctcagttcccccgagagcggccccgtgactaggcacatttttgccggcaccg

SEQ ID NO: 277940 - DNA, 122 bp, Homo sapiens
ttggacatggaaagcaagaccaagttccagttgggtttaattttccctcttggttattttcggacacaaagggaatgcttaaaactgagtttagtaataaaaagcataaatctcttctgtaa

SEQ ID NO: 277941 - DNA, 122 bp, Homo sapiens
atttcagtttactatagaggtgaaaatacccgactggatgaacaaataatggcatccagccgggataaatcgcctgagactttctctctactcgcaaggctgaggccagcatgaccttgtcc

SEQ ID NO: 277942 - DNA, 122 bp, Homo sapiens
ctttcttacctgctgttgaatcatgactgattcttggagtattttttctagaacatttcccggtctggaatactagtgcatccttgaactcccaagctctttatttgtacgtctcacatatt

SEQ ID NO: 277943 - DNA, 122 bp, Homo sapiens
acaggtcctcgtctaccctagaagacctcttagtctagcaaggaagggaggagtacacaacgatttcccaactaagtggttagaggaacacaccaggaaccctgtaatgcatgggtatccca

SEQ ID NO: 277944 - DNA, 122 bp, Homo sapiens
ccgaagtcccttcaagaaagaaaaatgatgttggaaatactagtaacaaataaagtatcacggaaatccccacccaagcgatacggtttccttgacgcgcccttaaccaaggcgttaagttt

SEQ ID NO: 277945 - DNA, 122 bp, Homo sapiens
atccactcagttgcacttaaaggctgttctttcagtctctctggctgagctcccaccaggcgagaagccagtaagtgggatcaagccacgtgccccctctgatgatctgccttagctgattg

SEQ ID NO: 277946 - DNA, 122 bp, Homo sapiens
gatgaaattagaagtcccgaagcatgcatccgccctcgcagtaggcactcgggcgagggtcggagtggaggcttcctccaggcagccccagagggtcctcccgcctaatgagaaaagaacag

SEQ ID NO: 277947 - DNA, 122 bp, Homo sapiens
aagcaaggcaggtgccaatcaagattcatttctgaaaagattagatgtccctaactcatccggtgctattccaggtgctgggaatacaaatgaacattggctaggctctgcctctgagcagt

SEQ ID NO: 277948 - DNA, 122 bp, Homo sapiens
acacgccactcacacacacactcgttcacaagtgcgtagcacacacaagcacccagcatccgttcacgagcatccgttcacgagcacccaggcacacaagccctgcagagccctcacaaacg

SEQ ID NO: 277949 - DNA, 122 bp, Homo sapiens
tttttaagccagtcggaaaagcatagtatttgggtgggagtgacccgattttccaggtgccgtcggtcacccctttctttgactcagaaagggaactccctgaccccttgcgcttcccaagt

SEQ ID NO: 277950 - DNA, 122 bp, Homo sapiens
acaatcagctgtggacacatccatttctgacttgactccagggtcctggacggcagggaccgtacaggagtcatctttgtggctcccctgtggtccggcacaccataagcacaccgttttca

SEQ ID NO: 277951 - DNA, 122 bp, Homo sapiens
tcccgggatgcctccgaggtcgggacaccgaagtgcgcgttcctcctccccaagcttccgcggagaaagccccagaagaggggcttgtagaaatgcactcgagggagttaaccagagcggga

SEQ ID NO: 277952 - DNA, 122 bp, Homo sapiens
tcttctgaacaaagacaaaagttgtcaggtggagcatgagatccaatcatggatgctgttcgtaatggcctttttcctacttctgatgactgcggttcacgcattgaccgtggttatccagg

SEQ ID NO: 277953 - DNA, 122 bp, Homo sapiens
ctgttgaagaaaatgtcttattcacgcttcgttccccagcacctggaacggggtctcaaacggggtcagggctctcggccagtgctgctgaaactgggtacagggatcacatttcagcaggg

SEQ ID NO: 277954 - DNA, 122 bp, Homo sapiens
ggaggctcccactctgtcccagcacccccgggtcgcttgcagcctgggtgtcaccggcgacggtgccttcacatgccagctgcctgagcccaggccagtaggcagtgggcgctggatgaagg

SEQ ID NO: 277955 - DNA, 122 bp, Homo sapiens
tgtgaggggagggtgttaggggcgctatcccgggtccaacagctggcggcgggttaggggcgctatcagggggtgccctgcaggtggcggcagaggtttcagcaacaccagtggcctacaaa

SEQ ID NO: 277956 - DNA, 122 bp, Homo sapiens
tgtacctgtgcctccctgtgtccaccagagggtagcacacaccactgtgagggactgggtcgctgaccatggaaggggactgaccttagaagaggcttagcccagcttccctccccgcattt

SEQ ID NO: 277957 - DNA, 122 bp, Homo sapiens
aattctgtgacaattactcaaggtgtcaaacagaactataatcggcccaccattcctgcacgttccacactcatggattcaaaataataaaaaatgctacaaaattaaaaatacaatataaa

SEQ ID NO: 277958 - DNA, 122 bp, Homo sapiens
aactcaatcaaatgagcttaggtttggaaaatgctctgacttgagaaaggagaatcaaagcgcatagaaatttgggtaatggttggagtttacctgaggattaatccagactatggtagcta

SEQ ID NO: 277959 - DNA, 122 bp, Homo sapiens
cagccgtttgcatttcctgaaaccggatcttagtgtcagagccgcccccagccgggcgggcgcctcagccatggccctgcgcaaggaactgctcaagtccatctggtacgcctttaccgcgc

SEQ ID NO: 277960 - DNA, 122 bp, Homo sapiens
ggtgctgtggcgcccccagcaggggagtcacaacttgtcatcagtcatctctagaaactgcgcgtagacatctcggatgcactcccccttggggttgaacaggagtttgtagtagctgcagt

SEQ ID NO: 277961 - DNA, 122 bp, Homo sapiens
gcacctaaggtggagtcggggaagcttacatggtgcctagggagctggggaccgaggggtcgggaacagagattaaaagatgcatcagagaaggtaaaagccactgtttatgacttcacagg

SEQ ID NO: 277962 - DNA, 122 bp, Homo sapiens
tgaaactacttaaggctttaccaagtgcttacattcacagggtctatctccaatgtgtttcgtacaagtatctgaaatgaaataaaattaataaatgctttcccacattccatacatttaga

SEQ ID NO: 277963 - DNA, 122 bp, Homo sapiens
tgcaagtagaagcataacccacattttccctggataacatagttaacgcccaaccatcgacggcaatgtcctgagtggcggccaagaattcaaacaaaaagaacgccacagtgagagcaatc

SEQ ID NO: 277964 - DNA, 122 bp, Homo sapiens
tgtcatagaagtgggtgtggaagagggctgtgatgggagcaagcaggacgtggaacaggacgaccaccagggcaaaggccaccagcagcaacaggcgcagcatggcggcccggcgctccagg

SEQ ID NO: 277965 - DNA, 122 bp, Homo sapiens
ctgcccagctgcccggctgctgccagccccactctgcggagccagcagcacagtgaggcccgtcctgatggcctcctggagctggagcttaggccaagccacagggcatcagggaggatgga

SEQ ID NO: 277966 - DNA, 122 bp, Homo sapiens
ccacgggctccgcaatgtcattgatgacactgtcactcggctgcagctggagacagagatcgaggctgtcaaggaggagctgctcttcatgaagaagaaccacaaagaggaagcaaaaagcc

SEQ ID NO: 277967 - DNA, 122 bp, Homo sapiens
cacctgtaatcccggcattttgggaggccgagtctggtggatcacttgagcccaggagctcgagaccagcctgggcaacatggtaaaatcccatctctacaaaaaaaattagctgggcatgg

SEQ ID NO: 277968 - DNA, 122 bp, Homo sapiens
ccccctccaccctctccatcccagccacaataatacaataaccgcagtcatcgcgcggcacgtggaaaggctacttttcagtgggttttgcagaaagcaatcagacagcggaaggccacgag

SEQ ID NO: 277969 - DNA, 122 bp, Homo sapiens
tgctggatcctttttgtcccctactgcgtgcggtggcagcttccttgcggaagtggtgaccgtgagagaagaagatggcggcccctgtagtggcgccgcctggtgtggtggttagtcgggct

SEQ ID NO: 277970 - DNA, 122 bp, Homo sapiens
ggtgcagctctctgatggacacaaaacacagccaggctgaggcagccagagccaaggcctcgagaaagcctgtgagtagcagcagtgcaggcggcacccagcctcctgcagaggcctagcct

SEQ ID NO: 277971 - DNA, 122 bp, Homo sapiens
ggtcggcaggctttgttcgttattctgagtggcagtcgggaagggcagctgaaccccgcccggggatctagagttgctggtcaggaactggagagaggcctggcgggcctggttgtgtttgt

SEQ ID NO: 277972 - DNA, 122 bp, Homo sapiens
tgtggtgcctctggctgaaatcaaaacgggagccagacccaaaaagtcaaggaagggaagcgccttccaggccactcctgagaagaaacgaactacaattcccatgaggcggtggggccacg

SEQ ID NO: 277973 - DNA, 122 bp, Homo sapiens
tggaagacccggactcccagtaagtcacttttgtttcttctttcctttgcatctcttttacgtgcttttctcagtctgaggactggctaggttgggtggctggtttttctccaggtgtatct

SEQ ID NO: 277974 - DNA, 122 bp, Homo sapiens
ccttgagcgcgggagtgcccggaggaaccacatgggcaggaagctctcagcagaagccagcgcctcggagccacaactggcagacagcctgtggcgcggcaaccgtgaggggcggggcctcg

SEQ ID NO: 277975 - DNA, 122 bp, Homo sapiens
tgtccaacatcacagccttcctgggattaagcaaataaggcgataaaggcccaatcatttcgttgcaccatggtatcaatctgaaggaaaatattctggagaacctaacctgtgacaaagaa

SEQ ID NO: 277976 - DNA, 122 bp, Homo sapiens
tcaaggtctgaggcacaggagacaaatcaaatgcccaggcaccagacagttaaggtaaaacgttgaagtcaagaggaagtagtgagtctgttgccaactggatagggttggtcctgtcccat

SEQ ID NO: 277977 - DNA, 122 bp, Homo sapiens
ctcacaagtcccacaggttttcatctttacagaacatactcccagttctatttgctgtggcgtaaatccagttactttagtgattgattctgaatctcatgcatctttaaacaagcagagac

SEQ ID NO: 277978 - DNA, 122 bp, Homo sapiens
agctactcaagaggctgaggacgaattacttgaacacaggaggtggaggctgcagtcagccgagatctccactgcgccactgcactccagcatgggagacagagcagaaccccgtctcaaaa

SEQ ID NO: 277979 - DNA, 122 bp, Homo sapiens
tgcgcgccccgcggtggcgggaaacgtaccatccgggattctctgttcctcccctccctccgcctcactcactgacgagcaaactgaccaatagggctgagaggaggctcacagaggctggt

SEQ ID NO: 277980 - DNA, 122 bp, Homo sapiens
ggtgaagaaacgctcgataaaggaagtaactccgcaggaggcagagcaatgtggggtattcgcgaatggcggttacaagtgcagctagtataaaaagctgagataagggtgagtgtgaggtc

SEQ ID NO: 277981 - DNA, 122 bp, Homo sapiens
gactgaagggatgcaaatgtttccatgattttttttcccccaaatgtctttgcaattgcacgttcacatagctaccatgcagacaagggtaggagacactgatttcccagtgaaaagattga

SEQ ID NO: 277982 - DNA, 122 bp, Homo sapiens
tctagaaagaggtgcctggctatcactcaaggggttgtgggagcccaggacggtcggaggcgctaggagctctgggattgcctgtgaggccgcgcagagacaggagtttaagatgaatgaag

SEQ ID NO: 277983 - DNA, 122 bp, Homo sapiens
gcgcttgttcaatgttaagatctttgacaattcttcctgcggagagttcagatctgatagcgacgctgcgcttgaagtcccactatttatacttcctaacggcggcctcttgttttgagtaa

SEQ ID NO: 277984 - DNA, 122 bp, Homo sapiens
tctgcgcctccggaacgtttcatagatttttgctgagtgaaatcgacttgctgccgccaccgccgaaaaactcccggggcacagagctccgcccccaccgggccaggccccacctcctctgc

SEQ ID NO: 277985 - DNA, 122 bp, Homo sapiens
aaaaaaaagcattaaccccagatgtctttaaacacaaaaatttgtgcacaaaacaccagacgagacggtaagtttatgtgtttagatcagcttggacaaacaccgctgttcaggactgcagt

SEQ ID NO: 277986 - DNA, 122 bp, Homo sapiens
ctgcacagtgtttggtgcatggcagattctaaataaacatgcattaatgaaattgaagtacgccaccctctgtgcttggtacccaaggttcaagggcaacttgctatgtaaccatgtaactt

SEQ ID NO: 277987 - DNA, 122 bp, Homo sapiens
atggagtcagtataaatgctttccaataaagcatgtccagcgctcgggctttagtttgcacgtccatgaattgtctgccacatccctcttctgaatggttggaaattgggcatctgttcctt

SEQ ID NO: 277988 - DNA, 122 bp, Homo sapiens
agcctccccagagaagcaaaatgtggaatttgtaagcaactatgtgggggttcaccaaaacgttcttttgctttgcgtttggaaatttttggtttgagatttttggggagtgggaagctagc

SEQ ID NO: 277989 - DNA, 122 bp, Homo sapiens
gactcccggggacagatttttgggcacccgagggagtcacccggcgcacctcggggtccgcggagaggcccagcccctcccgcggtcccttagacgcgccctccgcctggcccgtgtggacc

SEQ ID NO: 277990 - DNA, 122 bp, Homo sapiens
gaagacaagtgagagattcattcatttatttactcattcatacattcaacacatatttaccgagcactactgcatgccaggtacatagcaatattagtaatcatcttaataaatactaaagt

SEQ ID NO: 277991 - DNA, 122 bp, Homo sapiens
ggggtggtgcaggtggtgggtgagatctgccggaagtccattccctgtagtgttcagtgccgggagttggctggggctggggtggggatgctggggctggggtggggatgctggggctgggg

SEQ ID NO: 277992 - DNA, 122 bp, Homo sapiens
aagaaagcagtagaacaaaggaattgtcaaatcgataaaccacacaaagacagttggatccgacatcttttgccattaaactcctgagcttggtggacagtgctactcctacagagagacca

SEQ ID NO: 277993 - DNA, 122 bp, Homo sapiens
tcaggtggggactgcacagagtgatcactggcttttgcctcccaggctcagcttccctgtcgctagcccagcctgttcttcccattgtggaacaggcgagtgtgaagatactgatttgccag

SEQ ID NO: 277994 - DNA, 122 bp, Homo sapiens
ctgagatgttcctctgtctgccatgcctcacggcctgactgaccgtaccagtgaacccagcgtacccctggccctggcagccggacggctgatgcatgcaaagcgggcatctccttgcccag

SEQ ID NO: 277995 - DNA, 122 bp, Homo sapiens
cgcgtccccgcagccagggctgggactcgggcctggctagggcgggggccctgggacgcccggcagttggaccggggcggggagctaatttgggatggggggcccgtcccaggcagtgagtc

SEQ ID NO: 277996 - DNA, 122 bp, Homo sapiens
ggagcgggtggggtctctggctggcggggagccagggctgcgggaaaccgcacgaggtcgcgttcgcgagtggcggagaagcccagacccccgggcgcacgcggccgcgcccacccaggtcg

SEQ ID NO: 277997 - DNA, 122 bp, Homo sapiens
ttttttttttttttttttgagacggagtctcgctcttttgctcaggccggactgcagtggcgctatctctgctcactgcaacctccgcctcctgggttcacgccattctcctgcctcagcct

SEQ ID NO: 277998 - DNA, 122 bp, Homo sapiens
acgggccggcgcccccgctctgccacacgccggccgccacagctgccgccgaattccagccgccctacttcccgccgccctacccgcagccaccgctgccctacggtcaggcgcccgacgcc

SEQ ID NO: 277999 - DNA, 122 bp, Homo sapiens
acccggacgtggtggtcggattcttctcactaccctctgcctcacctgagctctcggtgacgcctgagaagtgaaagagcagcagtttcaaaagacacgtccactccggcttttgccttgca

SEQ ID NO: 278000 - DNA, 122 bp, Homo sapiens
gctggacagccttgtctctgtcacccattgcttcctgttggatcagccaatgggatgctccggcaggggatggaagtgaaagaggtgactaaaatcagggtatttatcctcttaggtccttc

SEQ ID NO: 278001 - DNA, 122 bp, Homo sapiens
ctagatctttgtatctacatctttgtggcctgttttcccatcaggtactctgcctgtaaacgtcagctatcttgaccttcctggctccatctacttaactcagagaatcttctgggactttc

SEQ ID NO: 278002 - DNA, 122 bp, Homo sapiens
tcgttttgggggctgtaggttaggaagcggagatcatggggtctcggaagaaggtttggtcgtgaactgtcagaaaggaggcgaaagctgtgcacgtggaacaaagtgaacagtgcaagttg

SEQ ID NO: 278003 - DNA, 122 bp, Homo sapiens
cgttccctctgccccgcaggtaacctataaccattttgtcttttagtccaacatgtttaccgtggctgatgtgttgagtcaagatgaactgcgcaaaaagctataccagacgtttaaggatc

SEQ ID NO: 278004 - DNA, 122 bp, Homo sapiens
cccaggctggagtgcagtggcatgatctcagtccactccaacctccatctcccgggttcacgccattctcctgcctcagcctcccaagtagctgcgactacgggcgtccgccaccatgcccg

SEQ ID NO: 278005 - DNA, 122 bp, Homo sapiens
agaccttgtctcaaaaaagaaaaataaagccagagtcttcgcagtgcccacaagaccctacgtgacctgatctcccatgactcattgctcctcgacagccaccactccgttccatggagtag

SEQ ID NO: 278006 - DNA, 122 bp, Homo sapiens
cagaggcagcggttgcaaatcttcagggcctgagatcgtgccactgcgctccaggttgggcgacagagtgagactctgtctcaaaaataaacaaataaaaataaatataaacaaaagtagag

SEQ ID NO: 278007 - DNA, 122 bp, Homo sapiens
ggccacctacacctctatccagggagtgacatcaggggccgtccacaccaccctcctgggcgatgtcagggccacctacacctctatccagggactggcatcaggggccgtccacaccaccc

SEQ ID NO: 278008 - DNA, 122 bp, Homo sapiens
gctcgagtgctggggttgagttggatgacccggcgaagggtaagcattcctgcagggacccgaggccctggagggactgatggtcatctgaggttaagccggcaggaggcgtctggggcagg

SEQ ID NO: 278009 - DNA, 122 bp, Homo sapiens
tgctcttcaaagggtgtgttctgagctgaggcgagacccacacgaaatccgagcgggctccggagtcaccagacacctagggaagtatggaaggcccggaaggacacacacagccgggtgag

SEQ ID NO: 278010 - DNA, 122 bp, Homo sapiens
attttcaggccacgagcaaccgggagctcccaaacttgccactaggggactgcttttcaccggccctgctgagcggcaggtgccggaagttgtgtctggggaggcgctggctccttcctgct

SEQ ID NO: 278011 - DNA, 122 bp, Homo sapiens
aagacatgcctgggcatgtcaggacaacaatttaggtcaagatttcccagcaagcacttacgatgccccaatctaggctggcatcataccaggctcttacctcctatccagccccaattcca

SEQ ID NO: 278012 - DNA, 122 bp, Homo sapiens
acacacaaaagctctagagagcctcgcggagctgtaaactacagctcccaagagacttcgcggccgaggcctccgcccacttccggatctcactttcattgcttccaagtaccgggaggtgc

SEQ ID NO: 278013 - DNA, 122 bp, Homo sapiens
actttgaaagcctataccaaggaaacaatgctctttacctgcagcatgtcaatgcacaggcgtttgtctggcatgtagacacgaggctgtagtagggtcctgtcactccacagctgtgactc

SEQ ID NO: 278014 - DNA, 122 bp, Homo sapiens
aggtgccgagtcccctttataaggccgagggggcggggcgcccgtgggtgtggacagaaccgaggtgggaggagggtgcaaagcaactgagcgcctctcttggctgttgcctatcctgatcg

SEQ ID NO: 278015 - DNA, 122 bp, Homo sapiens
ctgaaggggcaatatatgtgtattatatacttatataatttacatgtatcaaaaacattccgtttattggatttaagtgtagttacaatgtatttagataatgatggtatgtaagatatatt

SEQ ID NO: 278016 - DNA, 122 bp, Homo sapiens
gcttggagcagtcacaagaatactgtgcagcagatgcagtcactaaaaccctgttagtgtcggaaaagcaagtgtgtggggagggtgggcgaattgggaggattttttggggggggggcgat

SEQ ID NO: 278017 - DNA, 122 bp, Homo sapiens
aataaggagatgttattgacctcttttcactggaagtgggagcgtcttgcgggggggcagcgggctgaggatgcggctgtgttaggacgtgacagctcgcacaactgaagcaccgccacttt

SEQ ID NO: 278018 - DNA, 122 bp, Homo sapiens
caaatagctccatcttggtttcctcctcaggatcggaatgcggggtcgagagctgatgggcggcattgggaaaaccatgatgcagagtggcggcacctttggcacattcatggccattggga

SEQ ID NO: 278019 - DNA, 122 bp, Homo sapiens
gtcagccctccccttctacagatcttgcgtctgtccccttccctctacccctggctcactcgcccagcttgtgcttcatggtctcctgccctggctatgacgtcagcttcctccttggtctc

SEQ ID NO: 278020 - DNA, 122 bp, Homo sapiens
agcttgcttgcattaaacatgaggcgccgctaagtgctgttgccaccagggactgcaggccgctctgcagccctggatgggctcagttccgagggaaggaaggcggccggcggaggcagtgc

SEQ ID NO: 278021 - DNA, 122 bp, Homo sapiens
ataaaaacaactgtactcttaccaaacagttgatattaagaataacaaaacatggtagttcgtaagctgagaatgtggcatgtacaattggtaaaatgtgagtcaggagatttaaatttaaa

SEQ ID NO: 278022 - DNA, 122 bp, Homo sapiens
gggaaatagattaatagtaaaactgttttagccatcaagtttcctttcccattccccaaacgtactaattaaacagttacttcaaggatttatataaacctcttaataaagctgataaaagc

SEQ ID NO: 278023 - DNA, 122 bp, Homo sapiens
acgcgcgggactcagcgctgcagggcgggctcctgcggcgccggggacccggggcgggaacgcaaagccgagaggccgaccccgccgcgttcccagcccagagctgccactcgggggggagt

SEQ ID NO: 278024 - DNA, 122 bp, Homo sapiens
cccgcccccgccggggccccgtggcccggccgctctttgtgaagcgctgtcgctccatctcggcgcgagatcatttccaaattaaattttatggtccattacttatcgctccgacactggtc

SEQ ID NO: 278025 - DNA, 122 bp, Homo sapiens
gggcgaacaaccccacacgaggcagtggtgtgggagccagtacccggaaccgtaaaagcacgactttcccggagcccaggcactgaatggcacccactgcgcatgccccagagcggcgacga

SEQ ID NO: 278026 - DNA, 122 bp, Homo sapiens
ggaaggtggagaaaaggagcgtcggggtctcggaggcggcgtgggaaacgccgggcggagcgtggcgctgtcacggcaacagagagacgcgacggggccccgccccaccgccagtttccacg

SEQ ID NO: 278027 - DNA, 122 bp, Homo sapiens
taccgtatgttgcctttaagagcaagccaagccccctcctgtctttggagtcggggactccgtttcccagctcccctgacagtgccactgggcctttatctgccatataaggactgatcaac

SEQ ID NO: 278028 - DNA, 122 bp, Homo sapiens
cgcagcgtcctggaccagcgcctagaccctggctggtctcgcaatggagagggctggatccgaggtgggagccgagataggggcgggtctgggaaaggggcggagcctggccttcctagttt

SEQ ID NO: 278029 - DNA, 122 bp, Homo sapiens
tccaccccttcgctcccgccctcttctgcctcgggtaaccaatggtattgttgaccagtgcggaaccgccatttttaaagggccaggaagctttgagtgtttgtgttttgggtatttttccc

SEQ ID NO: 278030 - DNA, 122 bp, Homo sapiens
cgtgcggggaggctgaggctatggggactccgtgcggggtggctgaggctatggggactccgtggggggaggctgaggctatggggactccgtgcggggaggctgaggctatggggactccg

SEQ ID NO: 278031 - DNA, 122 bp, Homo sapiens
ggacaccaccaggcacgtaccaaggcgtccgcggcgcttgggggggagcccgcggcgcggcggcctaaggtgcgtaacgccccatgaacgacatcttccggtgggttagggagagacacccc

SEQ ID NO: 278032 - DNA, 122 bp, Homo sapiens
tttcaaatctttcctctggtttccctgtgttgactgtatttttacagctgactttccccacgttgtggcaaaaatggccaccgggagttcaggtttacattaaaccagcacagcaaccactg

SEQ ID NO: 278033 - DNA, 122 bp, Homo sapiens
agaaacactacaaatgccccaagtgccaggagagctttcggcggcgctcagacctcaccacgcaccagcaagatcacctaggcaagcggccataccgctgtgacatctgtggcaagagcttc

SEQ ID NO: 278034 - DNA, 122 bp, Homo sapiens
agacacccttccccggcccggccttctccgagccaccccagcgcgtcctcctagatgcgacgacgtgtttttcctagcgaagtcatcacgaggttagccacctcggacacttccccggcagc

SEQ ID NO: 278035 - DNA, 122 bp, Homo sapiens
cttccagaggccccagacagtgcctgtctttgcctgaccgcgaatcaaagttccatagcccgtgagcgaaggcacgtctattagctgacgtttgcagagagcataccctgccccaggcccta

SEQ ID NO: 278036 - DNA, 122 bp, Homo sapiens
acatttctagaaacaaccttatgcgcctcagccagctgggcagcacatatcaaatttcagcgtgcacacaaacctcccaggggcctgcaagaagcactctgatgcaggagatctggggtggt

SEQ ID NO: 278037 - DNA, 122 bp, Homo sapiens
gcggcccggaaagcgggtccagacgatccggctcgaaatcccctccccccacaacagcgtcgcccgccagagccgccgcccggtacctctcgatgactgaggccaccagctgcggcaactcc

SEQ ID NO: 278038 - DNA, 122 bp, Homo sapiens
cggggagtttgcaggagtgtccccacagatttgggggtgtccctggtgtttgtggggacgcgtccggcgattgtgaggacattagagccaacgcgggcggctttggggtctgcgggagagtc

SEQ ID NO: 278039 - DNA, 122 bp, Homo sapiens
atggcggcacctacttggaaaagatgaccatcagcttcctccggctccgccgcggctccgcgtcctcatcaaagccacccaggtccttgcctaggaagacctcctggtggaagccgcgattg

SEQ ID NO: 278040 - DNA, 122 bp, Homo sapiens
cttgtgatggaggcgtctttggggattcagatggatgagccaatggctttttctccccagcgtgaccggtttcaggctgaaggctctttaaaaaaaaacgagcagaattttaaacttgcagg

SEQ ID NO: 278041 - DNA, 122 bp, Homo sapiens
agctgagattacaggtgcccgccaccacgcccagctaattttttgtatttttagtagagacggggtttcactatgttgggcaaccttgtctcaaactcccaacctcgtgatccgcccgcctc

SEQ ID NO: 278042 - DNA, 122 bp, Homo sapiens
gcctgatgtccaaggggcagatacgtgtggtgggcttgctggagaaataggctcttctcacgtgagaacagcatccttccaatctagagctcctggctccaggaagtggtggtggctctacc

SEQ ID NO: 278043 - DNA, 122 bp, Homo sapiens
aataatggaaaatgctttgcctggaaacttccaagaacaaaactccgggggctaagagaacgcgatgatttttaagctgccagttaagatgcagctccttcatcatcacaggtgaagcacca

SEQ ID NO: 278044 - DNA, 122 bp, Homo sapiens
gggatgggggttgcaggaagacgatgcgggaccccatcccccaggagtgggtcgaagtcacgggtgtgtccagaagcagccctggtacagggagccaggcgacgctggggcaggaaaggggc

SEQ ID NO: 278045 - DNA, 122 bp, Homo sapiens
gagcgcgcgcgtgggggcggagcgcgcacgggagcgggaattaggggcgggtgttccgcgcgctgccggtcccttgtacccagcagccccggccaccgcccctccgtaccgaactgcgagcg

SEQ ID NO: 278046 - DNA, 122 bp, Homo sapiens
ggccacgcccccgatgcgtaggccgggcaacatggcggcctccatgcgggcgtcaacgtccgatccaagcgccaaattcaaatttgcggccatcttgagcgggcggaattcagtcgcgcgcg

SEQ ID NO: 278047 - DNA, 122 bp, Homo sapiens
cagcaagaatggtgcaatggcgtgacagctcggccctggttgccaaggagatgcgagtaccggaaatgcggaattcggggagagcgcgcatgcctggtccggtggagggagggtgccgggcg

SEQ ID NO: 278048 - DNA, 122 bp, Homo sapiens
tccctgcaacgctgcctgcagctgccagccagaacactacagccctgtgtgcggctcggacggcctcatgtacttctcactgtgccacgcagggtgccctgcagccacggagacgaatgtgg

SEQ ID NO: 278049 - DNA, 122 bp, Homo sapiens
agtaaagtgttttgtccaaactaaattacaacgactgcttcccaatagatggaagcaaagcgtctggacgaaggagagcttttttctcatggtgctgctgtgttagcctagtgacagctctg

SEQ ID NO: 278050 - DNA, 122 bp, Homo sapiens
acctcaggtaatctgcccgtcttggcctcccaaagtgctgggattacaggcttaaaccaccgtgcccagctaaaggagattatatttaaaatgagctttgcatttccgtccagaccagaacc

SEQ ID NO: 278051 - DNA, 122 bp, Homo sapiens
aagtcagaggtttgccctgttcctctgtagacccaggcagcttccggccgtcagattagtcgtcagtgcgcagacaccacccttcgtggacacgccctctaggcgtaaggttccatgcgagc

SEQ ID NO: 278052 - DNA, 122 bp, Homo sapiens
accacaaggctctgacttaagtccttgccactaggttgcaataatactaattctgaattacgggatactacacttaaacagcactatactagagactgagaaggaaattggggcaaagaacc

SEQ ID NO: 278053 - DNA, 122 bp, Homo sapiens
cctttctgaggcggcccttccggcggaggacaccggcggaatttgagtgcacagagtgcgcgagaggagctccctgtagacacacagtccaagccacgtaggtaattctaatagcagccaca

SEQ ID NO: 278054 - DNA, 122 bp, Homo sapiens
gagccaaatatccttatcctttcttggtcctgatgaattctgaagctgttacttgctcttcggtggatactttgactggcagggtggggaaggtgtcacaggaggatatttctgctggcact

SEQ ID NO: 278055 - DNA, 122 bp, Homo sapiens
gtctagcagcctctaggatcttgtcagagctgcacctctctgtgaactggccattcctttcggtgctgctgtcctttttgggggggttcctgatttctgtatacatgtagctttgccagata

SEQ ID NO: 278056 - DNA, 122 bp, Homo sapiens
caaggttagaggtgccgccatggattggtagacggcaccatgccagtcacgggctgtggccgcccggatgtgaacaggagaagagtcctctggataggcaccagtgcgatccagacatacga

SEQ ID NO: 278057 - DNA, 122 bp, Homo sapiens
ccggcgccgcccacttcctgcgaccaaataaggccggggaaggcgtccttaaacctcaggcggcggccggggctggggatttccagcagacctcacctccactcacgagtcggtcgccgtcc

SEQ ID NO: 278058 - DNA, 122 bp, Homo sapiens
ttcccttccggggactttagagggttcctcaggtcatctaactgggagacacaggaggcccgaagcgccccccctccacccggtccggaggaaccccagtggaagtggagaagtcaggcgcc

SEQ ID NO: 278059 - DNA, 122 bp, Homo sapiens
gtcctcccgacctgggggcacggggatgagagcgtgaggggagagtgggcctcggaccctcgcccactccccaggtggctgggagtgcccaccctggaactgccggccccgccggtgccaca

SEQ ID NO: 278060 - DNA, 122 bp, Homo sapiens
ccccaacccccgcggctccccgctgcccggggccagggagggggccgggcagaggcctcgcgggccacattagactcaccataggtgaaagaaactacagggcatatgggaatcatgggctc

SEQ ID NO: 278061 - DNA, 122 bp, Homo sapiens
agctgtcaggggaaagtcctccagagtgttgatgccttttctacacccttggagctggaacgaacttcagggatgggcgtttagtccactcccctcgtccagagctcagagacggggagagg

SEQ ID NO: 278062 - DNA, 122 bp, Homo sapiens
gtcagttcgcccacccgggcggcgatggcctccaggtcccgctccgtgccggccagcttgcgctgcagggccagcaccccagccagatcgttgcctaggccctgggtggactcgatgacttt

SEQ ID NO: 278063 - DNA, 122 bp, Homo sapiens
ctctgcggcggcgggaaccagctgccagcgggccccgcctgggccccgcctggccccggccgaacacccctcgctgaatgcgcgctccgctggaccgaccctaggcactcctggcccggagt

SEQ ID NO: 278064 - DNA, 122 bp, Homo sapiens
gatgggcttcccttgctggagctatttttgcatcgttttctggaaggatgcctctttccccgcaggcagcctctgaccgtgtgccagagagctccgcgtttgcatcttatttttctgagcac

SEQ ID NO: 278065 - DNA, 122 bp, Homo sapiens
acaggcacctagccctggcacagttcctgggcaatggctgagcatgttacagtccccagccgggagcagggaaatctgcttacgtgactgataactaacatactacacagactgcagagtac

SEQ ID NO: 278066 - DNA, 122 bp, Homo sapiens
ggacagcaaaatgagacgggtttttcctggaggctgtgggcaatcgcttaaccccgtgaccgccggggaagggaggccgggggcccaatgcacaggcctgcctttaatcagcaggaaacact

SEQ ID NO: 278067 - DNA, 122 bp, Homo sapiens
ctaacaactgattctggagactggacttaggtctatcacgattcactccggtagaagacacgatgactctatctcccttgaccgacagaatgatcgaagccacagggcatggcgtgtgtcac

SEQ ID NO: 278068 - DNA, 122 bp, Homo sapiens
gccgaggctggggtcgggagcacagtgggaccacgccccggatttgatctagggctggggcgttgcacgaggcagtggcccccgggtaccactcctaatccttccgtcctatccattagcac

SEQ ID NO: 278069 - DNA, 122 bp, Homo sapiens
cacccagtggtaagtgtattaaaatagatctgtatcatacagcacagtttctcccggagtcgtgagaatgacaggagggaccgtggcagctgcgggatttgccggcctcctcgctctgcacc

SEQ ID NO: 278070 - DNA, 122 bp, Homo sapiens
cgtctggtccctgttcaacaccctcttcttgaactggtgctgtctgggcttcatagcattcgcctactccgtgaaggtgcgtatggccctggcggaaatccagggggtgccggtgagcctgg

SEQ ID NO: 278071 - DNA, 122 bp, Homo sapiens
tctagcgagggcatgtcgagctaccttttgggcaaacctgagaaacttgcgggtttgacccgccctgagatagcctgtggctccgcaccccgccctatgctgctgttatattcctgggagta

SEQ ID NO: 278072 - DNA, 122 bp, Homo sapiens
ataaactatttctttaagaaacacagactgcctgcagcatgattcatacttgccccacaacgtatcctgtccctccatttagatcccaggtctaaactaaactctccagaaaacaggcagtg

SEQ ID NO: 278073 - DNA, 122 bp, Homo sapiens
ttgctcttctggaggttgactgggctccgctagctatttcttgcttagagtctttcatggcgttgcagtcagatagtgactgcggttggactcatcttgacaccttgctcactcgcatattt

SEQ ID NO: 278074 - DNA, 122 bp, Homo sapiens
ctcttcccactcttcaaaacctgcgatgcgactattggtcacattttaaactagtaataacgctccctggtcaacttttattgaatggcatattattagattagcagacgccctgttagatg

SEQ ID NO: 278075 - DNA, 122 bp, Homo sapiens
ggggacatattgattttctgggttttgctggggttccaccccagagggtctgccttaccccggggagtgggttgggttatgggcagtgctcggaaacctctgggagttgtggctggctcaga

SEQ ID NO: 278076 - DNA, 122 bp, Homo sapiens
gtctttacggaacctttggtgtcggggcttggaagtctccttggcgccggcttctgggcccgggcgaagctggtgcgtggcgccggggtggaggcggctaagtcccagggacttctgccctg

SEQ ID NO: 278077 - DNA, 122 bp, Homo sapiens
catgacgctttctgggttgctgcggcaacagcagaaggcggggctgggccttattgctggcggcgcggtctcgtggggcggggcggagtcttatggggcgagacctcagcgcctgcgcaagc

SEQ ID NO: 278078 - DNA, 122 bp, Homo sapiens
atgcctccttcccggctcggagttggaagggtttcctcagggctctcatttcctgcagcccggcgcctccacgcgggccagatcccgtctctgcagcctccccccggcccgcgcccattccc

SEQ ID NO: 278079 - DNA, 122 bp, Homo sapiens
gaggtgtcaggtttgctaatcctgtccccagtgagcaagatacctttgcaaggtcattcacgttaccctccccgctttgtgagtgtgtgcttacgcgcgcgcgcgtgtgtgcctgtgcgttt

SEQ ID NO: 278080 - DNA, 122 bp, Homo sapiens
ggcccctttcggtgagcagtgtctaaagttctgtcgcgtgttgcccacgcgtcggtggctcgctccttgcaactgctgagcattgtatggctaggctgtagtttgttttcacttcaccagtt

SEQ ID NO: 278081 - DNA, 122 bp, Homo sapiens
ttttacagatgaaagaggtgaggtgcgtagggacctttcttggggatggcagcgcgcacccgccccacacctgacctgcacctgccccgcacctaccccacatctgccccgcagctgcccca

SEQ ID NO: 278082 - DNA, 122 bp, Homo sapiens
agagtagagggctccctttcctgatgtgcgtttatgtctcctcctgtctccttgcatcggcgatttccagtgagatgagtcagaaaccggccaaggagggtcccagactctccaaaaaccag

SEQ ID NO: 278083 - DNA, 122 bp, Homo sapiens
gcgtggacaaatcttgatcaaaacgaaaggttacttagccacagcagggacactgcgtcacgatagcagcactgagaaggctatagaacttgtcagagcaaagatctcaaggacagaggtca

SEQ ID NO: 278084 - DNA, 122 bp, Homo sapiens
ggggaacgtccccataacccgagcacctcctgcaggccggggcttccgatgcacccgtgtcgccattcccgttttacagatgaggccgagcaccgacttgccccaggtcccggctgtcctct

SEQ ID NO: 278085 - DNA, 122 bp, Homo sapiens
cctgggcgacagagtgagactctgtcccctcaaccaaaacaaaacaaaaaaaaaacgctacggggagaagtagaaaaactcacaaccatagcgggagaagtgcacagattatctctctgaag

SEQ ID NO: 278086 - DNA, 122 bp, Homo sapiens
cagagggccatgaaggacctgacctatgcctccctgtgctttcccgaggccatcaaggcccggggcatggagagcaaagaagacatcccctactacttctaccgggacgacgggctcctggt

SEQ ID NO: 278087 - DNA, 122 bp, Homo sapiens
gtggagcagctctgtgccgggggctgggtggtctggcaggatcaaggaactggctaggaccgctgcctgctcccctcacacactggtgctgccggtgctcctgcaaagagagaaaccgagtg

SEQ ID NO: 278088 - DNA, 122 bp, Homo sapiens
agctcgtagtggaggtgttaccgcatcctgcctttggacgctactcttagttgagtgacccgattcggaccttaggggcgttagggtctcctccaccgcctccctcccctgttaaaagtgtg

SEQ ID NO: 278089 - DNA, 122 bp, Homo sapiens
gtaggcttgcaaggaaagtagacctggacctgagggtggaagttaccaggacagaccttccgctggaatatgtgaaagaacttccaagcaaatggaatcctgcaaataagcatccttaaaag

SEQ ID NO: 278090 - DNA, 122 bp, Homo sapiens
tctccatctgccataatttcaagtccttcactgcgtccctgcccatctgacacatcaactcgcctccctcgcaccgcccctcgcccatacccggcacccccgctcatcctggcaccatccca

SEQ ID NO: 278091 - DNA, 122 bp, Homo sapiens
ttaaaattgcaggaattcaggtatcctgatttcttagcaacttcaaacagtgctggggaacggtgcaatctgcctgcatgcaggccctttacccccagtgtttcccttgggtgtctcaaatc

SEQ ID NO: 278092 - DNA, 122 bp, Homo sapiens
ccgagagtcagtttttacaagcactcagatgtgggcccgaaaacaaatcaaaacaaaagtcgtgacttcccagatcttaggtaaggcatagattcgtctgcaaggagggccgaaatctctac

SEQ ID NO: 278093 - DNA, 122 bp, Homo sapiens
tcttgatggcccattctgcaaggtagcgggcagcgtcccatgtgaccaggcctgtggtaccgtgggagatgatggctgtgctcggagagtgtgaccgagccttccgagggctgtaccaagag

SEQ ID NO: 278094 - DNA, 122 bp, Homo sapiens
agaagacggccagggtggatttgcacatcatgggaaggaccgtcaccctgtgctctgtggcggacaccctccttgtcacaccgggagttcttcctcagagccacagtccacacagcaggggt

SEQ ID NO: 278095 - DNA, 122 bp, Homo sapiens
aggggccgggccgagagggacggcagcggggtccggggcgggggtggggaccgagcgcagcgcgtgacgcggcggcggggcccagcgacaacgaagccgaggccgtaggctcgggccgacct

SEQ ID NO: 278096 - DNA, 122 bp, Homo sapiens
gactacttgacagtattcttttaaaacaggcaaatgaaagtcgcaggtgggttctgccgccgtcccgttctcacatctccctctccgtcgcagatgcagaagctcgtgaaggccgcgaagga

SEQ ID NO: 278097 - DNA, 122 bp, Homo sapiens
ctccctgtcgtcgcggccgttataggccgaaagcaaaatccaatcccgggccattgtgggcggattgccaggacctggatcgcaacacttgggaagacccccgccccgcccagcgatctccg

SEQ ID NO: 278098 - DNA, 122 bp, Homo sapiens
atttctcccttgacggcccccggccgctgggcgatccttcttgttgctgccgcgtggggacggcccgtccgccacactccgtcttcccgccacccgccttgatgtctccatttcattactgt

SEQ ID NO: 278099 - DNA, 122 bp, Homo sapiens
agacacacttttatttgcaaacattcatgtggaacattaacgtgtacacatatatacaaacgctaatatactctctgccttttaagagtttatgatttaaatagggataagattattaccca

SEQ ID NO: 278100 - DNA, 122 bp, Homo sapiens
ttgccttttgtatgcctttgatgtgattgctcagcttccaagggaggggaacgagtgtctcgtctctcccacctagaggctcgtgctgcctgtggtcaggaagagagcgaacaaaggcgtgc

SEQ ID NO: 278101 - DNA, 122 bp, Homo sapiens
gccggggcagccctgggacgtggcggcggggcccaggctgttccaggagaggccagcctccggcttctgcttctcctccggctcctgcttctcctccggctcctgcttctcctccggctcct

SEQ ID NO: 278102 - DNA, 122 bp, Homo sapiens
cccggcgcccggctggctctcaccggcccgcgtggcgcgctacgtacccagcgcctccgccgtggcccaggcctccgcctctagcccaatctccgcagcgcttacaggccggctcagcgggc

SEQ ID NO: 278103 - DNA, 122 bp, Homo sapiens
acacactctgtgcacattcattcattcagctttcacaacaaccccatgaggtgaatactacgagtatctctattttacagctgggagacagaagcacagaaagctcatataatttacccgag

SEQ ID NO: 278104 - DNA, 122 bp, Homo sapiens
ggccagggctgtggaagggaagtgtagtttgcatcctaagtggtgatcccaggggacaaccgacccactagagagcaaaactgaggctttccatgcaatgttttggaccaatgtatatggtt

SEQ ID NO: 278105 - DNA, 122 bp, Homo sapiens
ctttggttagctgcatccatatcgtttgcacgagagctgacggcacagacgcgtaagaggcgtgcacggcggggagctggggacagcagccagagcatggggccaccaaggccagagagttc

SEQ ID NO: 278106 - DNA, 122 bp, Homo sapiens
gtttttctccagccactttcagttgctctggtaagggcagagaattgggttcaactaagccgggatattatcaggtgagtatggcaaattgggaggcggaaacaagcaattatattgctaga

SEQ ID NO: 278107 - DNA, 122 bp, Homo sapiens
cctgccttgccaccagagccacgcttttcaccctcaagctgcagttaagaagtatcacgccgtggctaggcccacggcctctggcttcacatcccactagctctgccatctttagctgtgtg

SEQ ID NO: 278108 - DNA, 122 bp, Homo sapiens
agttctgtgactagcttaggtttcctcctactttgatcctaggagacctacatgaaagcacgatcgacttcataagcctgagaatgtctctgttctctaacctgaagtggtcacattggatt

SEQ ID NO: 278109 - DNA, 122 bp, Homo sapiens
ctggacttggtatggcctggaaatgcagacgtgggaccccgggaggttacttggaaatcacgggcagagcgggcagcctttcacctgccaggccttcctggttcagcttctccactaactcc

SEQ ID NO: 278110 - DNA, 122 bp, Homo sapiens
ccgcagcggagtgcccagacttggcagggtcagagccccccagcgggatccagagcccgccgccgaggccccttttgggatttctcaggctcggcagcctcagcgcaggcaggggcggggct

SEQ ID NO: 278111 - DNA, 122 bp, Homo sapiens
ccttgctaatctgatcgaaagtctcgtccgattcggagtacagttccttgatctcatccacgtgccgggtcagggtggccctcatgtcctccagggtgtactgcaactcctcctccctgcgg

SEQ ID NO: 278112 - DNA, 122 bp, Homo sapiens
cccacatctgtggggtgtggagaccttttaggaacacagaaggacccgtttccttatccacgatctcgagaagtcaccatggacacctacggcatcgactgtccccacggaggtctcccttc

SEQ ID NO: 278113 - DNA, 122 bp, Homo sapiens
cccccatgcggcctgcaagacacagccgggcctccatctctgcaggaccctcctgcccctcgcctggccagcggagtttccctgggcttcacccttgagactgtgttgcccattgctcggcc

SEQ ID NO: 278114 - DNA, 122 bp, Homo sapiens
aaaataaaaacattttaccccaaaaacatgtttgtcacattttgaaatggccctgcaagccgtcctttgtgggaaaatttgcatctctaaataatctctattaactaacatagctaggcctt

SEQ ID NO: 278115 - DNA, 122 bp, Homo sapiens
ctgagcataaattatgccaagtaaagtctcattaagaaataatgcacttaaagcgggggacggggcgatgaggagagaacgccccctccccttggcatttgcagctctgaatgtaggcatag

SEQ ID NO: 278116 - DNA, 122 bp, Homo sapiens
agtgtggtcaagaagctatgtgtagttgcaacacttccccctggagggtaaaactgtgaacgtttactccttgggcattctgggaagtgtcccaacggtcggtggggttgcgggcacttccg

SEQ ID NO: 278117 - DNA, 122 bp, Homo sapiens
tgcaatgggctcaggctgggccctctgggccccaggcatcatgggcataggggtgggggtcggccaggggcatgccaggatgggctttgcttccccgtcgtggggttgtggtcatggtcata

SEQ ID NO: 278118 - DNA, 122 bp, Homo sapiens
gaagctggaaccgcgaaatgagttagttgtgggccgctggcctcaaggagcgaacgtcagcgcgaagaggagaagcttgtgcatacgctctgataagggttttaatagaggtattaccacag

SEQ ID NO: 278119 - DNA, 122 bp, Homo sapiens
tcagattatttatcatgatttggaatgattttatattttggccggtttgtgtgtttcctgcgtgtctccctactctagctgtgcctcagtttgcctgtctgtaaatggggataataataatc

SEQ ID NO: 278120 - DNA, 122 bp, Homo sapiens
caataactgaatgcaattataaaacaactatttaagttgtccagaaatgagtcatgcaaccgatgtagaaacgtttattcaggaaaatctactaaattgcagtaagaagagctggagtctgc

SEQ ID NO: 278121 - DNA, 122 bp, Homo sapiens
acgccgatggcgacgttgctcaggccttcacagacccccaaactggaaccgccgggacgacgactgccaactggccacacgacccaggcagagaggcagggagaagctgaccagaaaaagac

SEQ ID NO: 278122 - DNA, 122 bp, Homo sapiens
ggatgaggcatagcacaggcggctctgcccctggacaccaggttgtgtgggactggagggcgctggctgttttctgtgggccctccttgtcactttgcttctctgtggagcaaaatggaggc

SEQ ID NO: 278123 - DNA, 122 bp, Homo sapiens
ggaatgcataaaattagtggactcctctgagtgacgttccccggctccaatcagcgggcgcgcaggcgcccccggccccgccccactgctgactctctttggctgattcctgcagggaggga

SEQ ID NO: 278124 - DNA, 122 bp, Homo sapiens
tgaaatcacgtggccggtggacaagaggacaaatgggtgacgtgaatatgtgtgttttcccgtagccaccaaccgctaaaatgcacgccatcatcgagcgcacggccagcttcgtgtgcagg

SEQ ID NO: 278125 - DNA, 122 bp, Homo sapiens
atacaaaattacctctacaagatgtctcagaactttccatagaatctaactttaaagcatcgaacacctcaaaatcagatttcttgacatggatcaaattgttaattgtgccaagctgactg

SEQ ID NO: 278126 - DNA, 122 bp, Homo sapiens
gggcggcggggaagggagtccagctccactgccccacgcccagagcggagccccaagaagcggacggcccggagccgagtccttgacgctctccccggcagcccctccctccccgcctccgc

SEQ ID NO: 278127 - DNA, 122 bp, Homo sapiens
tccgcgggagagcgaatgggcgccaggaggtgggacagaatcctgggaaggtacagcggacgccctggaagctcccctgatgccccagagggcccttcctgggaaacctcccgggggggtgc

SEQ ID NO: 278128 - DNA, 122 bp, Homo sapiens
agaggcggggctgtgtgggcgggacggggcagtgggcggagctgagcctgcggggcacgtcgagcaggcggggtcgcagcgctgacggcctctctgcggctcccggttgggggcgtggctaa

SEQ ID NO: 278129 - DNA, 122 bp, Homo sapiens
cgggagaaaacgggaggagggcttcgggagcgtggggcagccccagcgtcctaggtacaacgtcaaagcacacacagcagcagcagcagcacgaagatgatcgggcctccccaaaggcgagc

SEQ ID NO: 278130 - DNA, 122 bp, Homo sapiens
tgctggccactcgtgtacacgctggctccagccagtgctgcactcctggcagacaggggccgggcaggggccgggcagggctgggctgggctgggctgggctgggctgggctgggcagggca

SEQ ID NO: 278131 - DNA, 122 bp, Homo sapiens
gtcagcaaagacacataaggaactcgccctccggaaagacgcgggggaattctgggagtgcgcggccttggagcgcgcacatgcgcggcagctcccgctgctgaatagctgagaggcgcacc

SEQ ID NO: 278132 - DNA, 122 bp, Homo sapiens
tttagatgtttggcctaggcaaaggcgtgtggggctggaatgacaacgagggctgggacccgggcggcagctgcctagatgaagacctcgtcgccaaggtcggggccgcgggctcggtgtga

SEQ ID NO: 278133 - DNA, 122 bp, Homo sapiens
agcctcatcccctcagaattaagaatcctttgctgtgcttcactggtcccatctaatgaacgagagaaactctcaggttccacattagtcaacgacagaaccatccagagaatacataagtg

SEQ ID NO: 278134 - DNA, 122 bp, Homo sapiens
gtgcttggccagcacagtcctggagcaagggagttaggagaagcccggagatacctgctgcgcacctgggaggcctgagcatctctccgggatactctcgaaatgcctgcctcccggcctcc

SEQ ID NO: 278135 - DNA, 122 bp, Homo sapiens
cgtccaccagatctgggtgcaagtcagggccacctgaaagtacataccccccattgcccacgcagtgagcgatcgctggcgcctgctaacgcagacattcctgctgaaagcttagatggttt

SEQ ID NO: 278136 - DNA, 122 bp, Homo sapiens
gtgtccagtcagccggcgagctcggcagcttccccagggacacaaagggttaaatccaggcgaggggactcggtcggatttgcctcctaaacgcattttccagttcattccccagcacaata

SEQ ID NO: 278137 - DNA, 122 bp, Homo sapiens
ttcgccttgcaggcccttcctcctcttactgctaccccggccctgcctacctaggaggcacggctcgagccccgcctcccagcagctctcccaggcctcctagcagtcttcctccgctggga

SEQ ID NO: 278138 - DNA, 122 bp, Homo sapiens
ggaccggcaccccctcccccaaagctgttgccatggccacaggggacatttgatgtgaagcgcggctcccccctctccactcgctttctccgctcgccttcaggatgacgtcatgaacatcc

SEQ ID NO: 278139 - DNA, 122 bp, Homo sapiens
ccctctcaaaaatgaaaagacactgctttctcgacataaagccatttgggatggtttcagcgtgttcgctggggcacccatttaccctgcagtaagaattctgccgtgactcgaggcagagc

SEQ ID NO: 278140 - DNA, 122 bp, Homo sapiens
ttgtatcgacatgttctttcatttcttgcaggtaaatgccatggagtgcagcggctgggtcgtatggggagggtgtgcttagctttttaaggagctgccatcgtgttctccaaagtgctcgc

SEQ ID NO: 278141 - DNA, 122 bp, Homo sapiens
agattgtgaacagtgtgttaaataatattaatggctgggattgtcagtacttaacagtaccgtccttctacaagtgattttattgatcgatacagactcaatgtaacgggggcagattattt

SEQ ID NO: 278142 - DNA, 122 bp, Homo sapiens
cggctgcgcgcagcgcgggagcccccgggctggggccggcagcggggggcggtgtgtgtgcgggggggtgtccaacattcccagaactcaagtattctcccggcgctgagccgggcgggggc

SEQ ID NO: 278143 - DNA, 122 bp, Homo sapiens
agtatatgcagagagcctcagaccatgatgcacgcctgacaattttgcagaaggaaaagacgaaggaaggaggattaggtggaaagaacctaagactacagtgcaggtctgcgaaagtctca

SEQ ID NO: 278144 - DNA, 122 bp, Homo sapiens
gtagcacccttattgggaaagcatgctgcctcttccagcttggtcagtctttgagcttcccgaaagggaacagatgaccgcagtcaacaggaaactgcatagttagaccttcttgaactctt

SEQ ID NO: 278145 - DNA, 122 bp, Homo sapiens
tgcagataaaccagagactactcataaccgtgtactttttttttcccccatttctgatcccgtctcaacggaaggatgtaattgaggaagggcttgattggccagtgagtcttgaagctgac

SEQ ID NO: 278146 - DNA, 122 bp, Homo sapiens
cagacggacggcggcggggacccgacggcggcgcctcggcactccccagactccggccagcgcccccctgccagccgcaagcacccagccccggcccaccccgggctctcgatggcccccga

SEQ ID NO: 278147 - DNA, 122 bp, Homo sapiens
gccactctggccttttgatcctcaaacacactcggtcacgtgttaaactgccaatctgcccgggtgaccaaccaggttaaacccctcaatggctttctggtgctccaggaataaagtcaaaa

SEQ ID NO: 278148 - DNA, 122 bp, Homo sapiens
gcacaagcgcgctcctgactccaggtgcacaccgtggaggcctgaaacgagagccatgaccgcgacgcgctgaacaaaccaagccgccagttttccgtcccgtcccggccccggccctggcg

SEQ ID NO: 278149 - DNA, 122 bp, Homo sapiens
gtgcccagcaggggcggggtcagtggagccccgcgcgggggtcggagtagggaggattgacgaggtcggccagcacccaaccctccaggtcagaggcccttcacatttgcaggggcctgcgt

SEQ ID NO: 278150 - DNA, 122 bp, Homo sapiens
tcttggccgggcccctgacaaacgttctccacccgcagccaaactcaaacggctgtttcacggcctccaaaacccaacgacgcgtcttcaaacccgcccccggctcgtgcccctgccagctt

SEQ ID NO: 278151 - DNA, 122 bp, Homo sapiens
ccccgccgcgctggcctcaaggagcggctcctgagtgtagcgcgagccctgggcctcctgcgctggctgcggcggcggctgcggctgcggcggcggccgccagagggcgaggggcagggtac

SEQ ID NO: 278152 - DNA, 122 bp, Homo sapiens
gttttctccagggccctctctgagaggctgcaggctctgtagtgggtgttgccttactaccgtgggcctactagagaggcatggaccctgccctcagggaacttgccatcgaagggagcttt

SEQ ID NO: 278153 - DNA, 122 bp, Homo sapiens
gctttccttccggtcttgtgggtgggtgcacgtgtgaggaaggaacccttggctgtgacgcgaacgcttctcaccctcagagtagagacccgggctgagggacaccccacgcgggcgcgggt

SEQ ID NO: 278154 - DNA, 122 bp, Homo sapiens
ctggcctaggctctacggtttcaagatccatccgatggcctaccagctgcagctccaagccgccagcaacttcaagagcccagtcaagacgattcgctgattccctcccccacctgtcctgc

SEQ ID NO: 278155 - DNA, 122 bp, Homo sapiens
ctggccgccttcgccctggggcctgggactgtgcgctagacgtggctgacactccctgcacggcaaccctggaaggagggagaggaaggagagttctataacccaggcttcactgccaaccc

SEQ ID NO: 278156 - DNA, 122 bp, Homo sapiens
cacaaccacggtaagtgggcattggggaaagaggaaggagggcaggacatggggataaagcggtttcttaactgcgcgtgcgcccctggcaaagctgactaaggcgcctgaagtgacgtcat

SEQ ID NO: 278157 - DNA, 122 bp, Homo sapiens
ttgattctccaaatgaagtgttcccacaaggcgaagaggtggagctccggaaatgctcaccgtgtctgtcttctccctggcatggtggggctggctgcacaaacactcgaagaagtctttga

SEQ ID NO: 278158 - DNA, 122 bp, Homo sapiens
ttgtgagaccccagtgaccaggaaccccggggagaagtctcctccatgagtcatgatagccgcaggcagctgcgaaggagggggacgtgtagccaagaccgggaagctaggtaactgcagtg

SEQ ID NO: 278159 - DNA, 122 bp, Homo sapiens
gagggacgacagcttttactgtcccaaatcctgagattaagacctcagggctaaatcttgcgtggcggtaaaaattatttggaagttctgtgcaaccgttccaatattccgcttttacgtgc

SEQ ID NO: 278160 - DNA, 122 bp, Homo sapiens
agactgtgcggtagcaagtttctccccgccctgcagcgcacactcggcagcagccacagtcgtcgagcactgtcctcttgcagcgcgggctgcttttgcactcactgctgtcacagtgttga

SEQ ID NO: 278161 - DNA, 122 bp, Homo sapiens
gtgaggggggaggagatggcagcacccccactttctgcctcaccacttgccgagtcttgccgctgacattttctctggtacattttcgtatgacgccgagcagcatatggcacctctttgtc

SEQ ID NO: 278162 - DNA, 122 bp, Homo sapiens
atccacccgccttggcctcccaaagtgctgggactgcaggtgtgagccaccgtgcccagccggaagtccccatggaagaactgacatcatgggaaggaaccagccccaagaaggactgagga

SEQ ID NO: 278163 - DNA, 122 bp, Homo sapiens
ataggcctccggtggcttagagtccctgttctgcctgtgactgttgtgccacattggggacgtcatttagcgtctccgaggctcagttttctcatctgtaaaatggggacaatatcagcgcc

SEQ ID NO: 278164 - DNA, 122 bp, Homo sapiens
gcagtaaacatcctgtgttaatctcaatcccagaaccagaccacagaatgctgactacaccgctcacgggaaagactatgttttaggtgacccgtgtggcctttttgttgaggcctttagga

SEQ ID NO: 278165 - DNA, 122 bp, Homo sapiens
ctcctctgggccaaaccccaggctgggctccctcagtgcacctctgctagaatctccccacgcaccccatcaagtttgtatcgctggctctattctcctgaacagaaaattgagatggagag

SEQ ID NO: 278166 - DNA, 122 bp, Homo sapiens
tctgctggcctcaagcgatactccagccttgtcctcccaaagcgctcagaggtgagcgaccgcgataggcatgtttaactttttagtagcaacttttaaacacagtttgggtacctagttta

SEQ ID NO: 278167 - DNA, 122 bp, Homo sapiens
actgtcccatttagttgaaacactgcaaaagttatacagaaaaataaacaaattgagactcgggccagttgtgggatggaggaacatcaaagcttggccagtcaccaagctcattttccact

SEQ ID NO: 278168 - DNA, 122 bp, Homo sapiens
cttccttttatcaatggattggtaacttttgtgaaaaatccccaacctcttcctctctgacgacacagagtttactctgcaaatgagcaatctttctgagatgattcactcttccgtgttct

SEQ ID NO: 278169 - DNA, 122 bp, Homo sapiens
gaacttttgagtcttaagcgctacatgatagtactctttctaatggtttctaatgttacacgaatgcctctctttcccatttcatccctttctctctgttggttttgactttaagctctctg

SEQ ID NO: 278170 - DNA, 122 bp, Homo sapiens
atgtcatttgacaacttagtgcaatgtaatgttaggaaaaaatgtttaaaaacaagcatgcgttgaattgagaaagtgcaagctttattgaagacacaggttactaatctgtttctcacact

SEQ ID NO: 278171 - DNA, 122 bp, Homo sapiens
aggaaagctgtaaaaaccatactgtagtgaatgacctctgacatctgcttcctgcttgtacggcgcacctgcaggacatgcttccggaggcgaggctgctggccaggggcaagtgtctctgt

SEQ ID NO: 278172 - DNA, 122 bp, Homo sapiens
gggagagaagcatgaaggcccacagacgctcgggggcagaccaagacgccctggggtccccgaaacagagatgtacagagtcggacacggaaagggagagaccagctcacggttaagaaagg

SEQ ID NO: 278173 - DNA, 122 bp, Homo sapiens
gttcgtcctgacctggtcggaccatcatcattccacttcatagtgaaatgccttcattgccgtgccatgcatatttctgaggggaatttttttggtcgaaacgaggactcttcgattgacca

SEQ ID NO: 278174 - DNA, 122 bp, Homo sapiens
ctaaatgcaatggtttattttgcttgcttttgaactctatagaaataaaatcaggcctggcgcagtggctctcgcctgtaatcccaccactttgggaggccgaggcgggcagatcatgagat

SEQ ID NO: 278175 - DNA, 122 bp, Homo sapiens
aacaatcagctacagctaactgccaattcttcagtctgaataacttgttcaggtggaggacggtcagaagagggcaccactagtcaccgagaacactagttcgctattcctagagcagtact

SEQ ID NO: 278176 - DNA, 122 bp, Homo sapiens
tttatctgccttattacatctctcaccaaagtgatccagtgtctgaaatctcctctgtaacgttgccaaggacagctcaagtagcagatgcatagctgggatttgaacaggaatctttctaa

SEQ ID NO: 278177 - DNA, 122 bp, Homo sapiens
gtcgtgacctgcgccccgggccggggtcactcaccgtcctcgctctggttgtagtagccgcgcaggttccgcaggctcactcggtcagcctgtgcctggcgcttgtacttctgtgtctcccg

SEQ ID NO: 278178 - DNA, 122 bp, Homo sapiens
tcataaagttcttatccagttctgctgcttcagagcagccagtcaggtggcaggcgcaaacggggcatactcagttacccagtgatttcagttacacagtgatacattggggagagagggca

SEQ ID NO: 278179 - DNA, 122 bp, Homo sapiens
cgatttcggctgggggcggggaggcccctgattggggcgcgggaggcgtgatgtcacgtccggcgggggaagccctgcctcgcgcaccctccgcccccgtccccgcccccacaggtggtgcc

SEQ ID NO: 278180 - DNA, 122 bp, Homo sapiens
gggaagccaggagccttgacaaccagtctccgagtttgaacttcatcctgtgggcagaggcgtcctgaggatgtttgaatagggccaagtggctgagcctccccaggggccagttaatcaga

SEQ ID NO: 278181 - DNA, 122 bp, Homo sapiens
acgggcggtcatcacgggtggtcatcacgagccagttatcaccagccagttatcacgggccggtcatcacgggcggtcatcacgggtggtcatcacgagccagttatcacgggccagtcatc

SEQ ID NO: 278182 - DNA, 122 bp, Homo sapiens
agccgagggccgggcacaaggcctggaggccgagctggcccgcgtggaggtgcagcggcgcgcggcggaggcccagctgggtggcctgcgctcggctctgcgccggggcctcggcctcggtc

SEQ ID NO: 278183 - DNA, 122 bp, Homo sapiens
cgttggcgtctccggcactgctgtgtgcttcccactgtgttgcgtgggcccggcggagcccgctattccgtcagtggcagtggatctgtgggaggggcctctactcgtcttctgtgatttca

SEQ ID NO: 278184 - DNA, 122 bp, Homo sapiens
gaaagtgggccgctggttgtgcttgcggtgcatcttcttctggctgagcacctccaacagcgcgataagccgcagcccgtcgctcaggtccgtctgcaggttggcgatgcgcttgctcacgc

SEQ ID NO: 278185 - DNA, 122 bp, Homo sapiens
gggaaacggccggggagtgacagcagcggccagccagccacgaacctggcggccaaggggcggggcatccggcagcaccgcctgcgggcgcccgggcaacgggtctgagcgacggcaacccg

SEQ ID NO: 278186 - DNA, 122 bp, Homo sapiens
gctcgggtcagtcggcggccggactgggaagatggacgcaggtgaggagttgccgggggtcggtctttccgcaggaggtgctcgccttatcattggcctcccctgctcgggtcgggctgccg

SEQ ID NO: 278187 - DNA, 122 bp, Homo sapiens
aattaatgaccatctgagtctaatcagagcagtttctctgttaagatattaaagatctgtcgaaaatggcagacttatcactttgaagctcacgtagcttccttaattagatggacaatggc

SEQ ID NO: 278188 - DNA, 122 bp, Homo sapiens
agacctggacaacggatatgacatcactacagctcctgggggtttcggggggatattttgcggggaatttgttaaccaaacaaggattgactctcgtgctccagttcagcatttgccggcaa

SEQ ID NO: 278189 - DNA, 122 bp, Homo sapiens
gggagaatgagaaaataaacccgcaaaagggagaggagggggcgagggcgcctgttacggcgtgggtggggttgacaagaatagagtacattatgcagttcatttagttaacaagtgaaata

SEQ ID NO: 278190 - DNA, 122 bp, Homo sapiens
ctgttttttagatactagttgaaatccagtgtatattttacacttatggcacatcttagtcgggattggcacatttcaagggctcaagagccacatgtggctagtggctactgcgttgcaca

SEQ ID NO: 278191 - DNA, 122 bp, Homo sapiens
atactggtcgcttgtacaaaccagatccaaaaaacgcactacacaaatccttggaaactgcggtaccaacgggatcttctcaattccttgagtgcaaaatgatcccactctctatcccgaca

SEQ ID NO: 278192 - DNA, 122 bp, Homo sapiens
ccctccagcaggctagccctggcatgttctcacagtgaaggcagagcttccactggagtacgtgtctccgggtactctttttccccaagctcccaacataggcttctttagcgtgttcccaa

SEQ ID NO: 278193 - DNA, 122 bp, Homo sapiens
ctggtatatattggaggatctgagagccatacagtatctgtttcaaccactctcttctgccgctgtagtgagaaagcagctatagacacaagagaaattcatttataaaaacaggaagctgg

SEQ ID NO: 278194 - DNA, 122 bp, Homo sapiens
ggacggccgggctgggtggcgcctgcttgcaggggcagctcccacagcctgggcagcgtccgctccatccctgctagttctccgtggcctcgggcagctccaggagctccctgtgctcggtt

SEQ ID NO: 278195 - DNA, 122 bp, Homo sapiens
caccccctccccatcccatggtgggctgctctgacctggcctgggtggggtgcggcgggtcgggttagcggggaagccgagtcctccggggcctggcatacccccacacccgacagccggcg

SEQ ID NO: 278196 - DNA, 122 bp, Homo sapiens
tgggtccctcccctctgtcttctaggccgtgtgcagaacaaacggcttctactcgctccacgtgcagagctggtttggcctccacaagaccctgcagcctctggtgaagcgggtctgcgaca

SEQ ID NO: 278197 - DNA, 122 bp, Homo sapiens
tccaaataagtttacctccaaggacatatatgtatgaagaatccaggggaaaggttaattcgatggctgttaatcacagccaaatttagcacatctgctgttagtcaaaatacattcaaata

SEQ ID NO: 278198 - DNA, 122 bp, Homo sapiens
gacccgtgcacgcggcaggcaccgagcttgccgactgcatgcccgcgtgggtggccctcccgggctgccggcacctccgtctccctggagaagctgtgctgcggctcctaccgtgccagctc

SEQ ID NO: 278199 - DNA, 122 bp, Homo sapiens
tggtctgtgcaccatcgacccgagggccagaaggtgggcttggtctgtgcaccatcgacccgagggccagaaggtgggcttggtctgtgcacaatcgacctgagggcgagaaggttggcttg

SEQ ID NO: 278200 - DNA, 122 bp, Homo sapiens
tcctgcgtcggaggagggtctctgggtcgggcaggggccacctcttggcccgccccttgtcgctggacgtccgaagattgggccatttcccttgccgcgcccttaccgcatatcggggtgcg

SEQ ID NO: 278201 - DNA, 122 bp, Homo sapiens
attcctaagcgaatctcgcacaaatctcgaggcatattttgtacaaggggacactggccgcgcgcatcgcaatcgcatctcagcgacagaagcggtcacgtgccttggcgcgcttccgcacc

SEQ ID NO: 278202 - DNA, 122 bp, Homo sapiens
ctaatactgctcagtactttaaacgctcagatactcagggacggaaggcccctcctgccgcggccatgctcatgcttttcagcttattatcttttttccacttcattctccggttttggaac

SEQ ID NO: 278203 - DNA, 122 bp, Homo sapiens
aggatggaatcccgctggtgcgaattccagacttcagcttgtgcaatgcaagtcttaggacgcttttctctccccgccctcattccccgattctccctggcattttctcgctttcctggaaa

SEQ ID NO: 278204 - DNA, 122 bp, Homo sapiens
ctcccggctctgcctcaccctgagcaggtcccggaaggggatagataggaagccgtcggacgtctgggcctgagggtcctgggctgcagctgaggccactccccatctgcggttctatttgc

SEQ ID NO: 278205 - DNA, 122 bp, Homo sapiens
ccgcagaactcacgtggcagctgaaccctcccagctccccagccgcctggcaagaccccgcgtattgataggcttccaccgcccgccgggccccgcctcctactgctccattgggtccttct

SEQ ID NO: 278206 - DNA, 122 bp, Homo sapiens
gctactgtcttgttacctgctgttctgcttcccaaacacaatccacattttcttgaaagccgtttgagattatgtaaatataaccattcttatgtacgctaaagatggtagaatctaaacca

SEQ ID NO: 278207 - DNA, 122 bp, Homo sapiens
ttgtaggcatcgaggaggaagctcttccagacgcagcgcagtccctctgaggtcagcatgcgccgccactctccgcgagtggacttggagcggctcaacagcagcaccacgtgcttgagcag

SEQ ID NO: 278208 - DNA, 122 bp, Homo sapiens
gaacaagccaattaggtgcatttctcttgcccaggggtgcggggctgcaacagccacctgcgtttgtttgaatgagctttgcttctccagggtggtgcacagatcccccacagggactctcc

SEQ ID NO: 278209 - DNA, 122 bp, Homo sapiens
aacaagagctacaaaaacaggtttgtttaactcttgcattcactagctgaaagaataaaccgcaaacaagctactgtgttaatcttcagattagccctctagtctgtcgatgtaatactgat

SEQ ID NO: 278210 - DNA, 122 bp, Homo sapiens
tctgggattggctgtgcctgagcacatcttccctcagcgtttctgattggtcgctggacgcgcgggatgcgagtccccattggctaggccagggcgcctgcgcggcggggttctcggtcgcc

SEQ ID NO: 278211 - DNA, 122 bp, Homo sapiens
catggtaggttctcaataaatatttgttgattaaatgtataatgatagagagtgaggggccggagaggtaggtgaaccagaaagtactgggttgcagaagctaaagaagggagggattgggc

SEQ ID NO: 278212 - DNA, 122 bp, Homo sapiens
gggagggagagaggagggcgggagagcggcgcggagccgggccgggctgggggctggggccgctggggcgggggaggggaggacctggcgcggggggcgggggggcgaggggccggggccgc

SEQ ID NO: 278213 - DNA, 122 bp, Homo sapiens
catggcacgaaactgagactggccaaaggaaaaggcaaccttttcttatttgctcaaaggcgttgcttgcctgctaaactctgcatccagtgggctgcatggcttgaggctgtgcctagctc

SEQ ID NO: 278214 - DNA, 122 bp, Homo sapiens
gctgcctttgagaaacaagttttgttgtgctgatttaacagcctgtgaattctgcaaacacgatcgtgaaaaaatgccaatctgtcctgtgtaagccctgtgtgaagttttgactttaatct

SEQ ID NO: 278215 - DNA, 122 bp, Homo sapiens
cgaactcgtggcccacaagcgacgcgatgtcgtacacgtccatgacggtcagctcggccacgttcttctccagcgccgactcggccgccagcgccgacccccgctcctcctccatggccacc

SEQ ID NO: 278216 - DNA, 122 bp, Homo sapiens
gggttaaaaataacagcgtcactcaggcggccacctgcgctggcccatcccaccctccctcggggacagctgcagctcctcaggctatgcctgggacattttgggaacactttctcctctta

SEQ ID NO: 278217 - DNA, 122 bp, Homo sapiens
tgactaatgaaagaccctggcagacagcatgtgatcacagacgagtattatgtgtctgtgcgtccatccttagttaaatcgaagggtccaatttggtctgctgaacaaacatatttgtggag

SEQ ID NO: 278218 - DNA, 122 bp, Homo sapiens
aaaaaatcagacttatatgataaatatacataaaatgaagacaccaactgctatttgacacgactacgggtaatgcctgtgctatgtgaaagcacctttaaaaagcctatgcggcaagagat

SEQ ID NO: 278219 - DNA, 122 bp, Homo sapiens
ggggtgaccacagagtgtcctgtgttctggatttcagctccaagggcctcaccttcctgccgccacctcctaggacagccagtccagggccatgaagaccaagaaccggcccccacggcgcc

SEQ ID NO: 278220 - DNA, 122 bp, Homo sapiens
gcagagaggatggtgggggccgtgctgtgggcggggcaccggcggggagggggctcccagcgcgagccggaggcgctgggttccctctgctccactcgcagctgggcacccgagctttcttc

SEQ ID NO: 278221 - DNA, 122 bp, Homo sapiens
catcgccttggcttttctgtcccaatggaatgaatttcattgtcctggaccaaatgacttcgctggggccgtagagaatgggaagggtggacgcctcccggcaaaccgtctgcatttgcata

SEQ ID NO: 278222 - DNA, 122 bp, Homo sapiens
ttatatttgaaacatcacaaacagatcaacttttttgacattagtgagctgtttgggccacgagggtgccaagttggcattcagatttagtttagttttagatgagaaagttatagatgcag

SEQ ID NO: 278223 - DNA, 122 bp, Homo sapiens
cagtaggagtatcttggcagtcgtaggtcacgggcacaattgctcaaggcctcgtgcgtccgatgccctgtgtgtgcaaaagtgtgtgattgcacttgaatgtacgtgtgtgaatccgtgtg

SEQ ID NO: 278224 - DNA, 122 bp, Homo sapiens
tggatcctggaaatgacccaaacatagctcactaaactaatttctctcagagtttttaaacgcatgtgcatttgagcataaacactatccatatgtttctgattcatttacactgaactcat

SEQ ID NO: 278225 - DNA, 122 bp, Homo sapiens
tctctgatacttgaaagctggcttgacagactgtcttagggttgggggtatgggataggacggggaagatgtgtactctgtggacaacacttgtatggacatgcaggaatagttcagtgatg

SEQ ID NO: 278226 - DNA, 122 bp, Homo sapiens
cctcttttcgcccttttcagaccatttggattttcttaagctgcccctttccccaacccccgtttttgccatttgcctctcctcccattctccaaagtgcaaataactggttatccctcagg

SEQ ID NO: 278227 - DNA, 122 bp, Homo sapiens
tccgtggcaaccgccttctgacgtcaagagttcttgacgtcatgccagcatgagatcacccgtggcactccccgccttggtttcctgtgtaagcagccaaaggagaatctcaagaaaggcaa

SEQ ID NO: 278228 - DNA, 122 bp, Homo sapiens
ggtattctgtttgtttttgttttgtttcgttttgttttttgagacagggtctcgttctgtcgcttagctggagtgcggtggcgtgatcatggcactgctattcttgaagcactccacccacc

SEQ ID NO: 278229 - DNA, 122 bp, Homo sapiens
tcaactcctggtctcactcgattctcctgcctcagcctcccaaaatgatgggattacaggcgtgagccactgcacctggcctcaagtattttgtatacagtataggttggatccacacaaca

SEQ ID NO: 278230 - DNA, 122 bp, Homo sapiens
agtgtttatttaggaaacaacactgcacatgtgtaacagccagaatgacgattaagatcacgtgtaactggcacattacaaaaaggtggaaaggacactgtgaacaaaatgcaactctatct

SEQ ID NO: 278231 - DNA, 122 bp, Homo sapiens
ggtctcggggcggcagccaagtgaggctgcccacagtggtgatggccgcggcggcggcctcgccacgtgacccggacgggcggaagcggaagtgccggcctggagcccgctctaggtgggtg

SEQ ID NO: 278232 - DNA, 122 bp, Homo sapiens
ggtttcaccatgttagccaggctggtctcgaccccctgacctcaggtgatctgcccgcctcggcagtagcgtcgtaagcctgagcgcttgtgtaccgtgacatactcttctgctcaggacgt

SEQ ID NO: 278233 - DNA, 122 bp, Homo sapiens
atcagtgacatttgggctaagccgcctaatgcagagtggctataagcgcgctgagccgctcgtgaaattcagacaaccccaccggaagtgagagagaggacggctgtgagctcagggcagcg

SEQ ID NO: 278234 - DNA, 122 bp, Homo sapiens
cgcgaccctggcagctagactccacagagtcgggagtcagctgacccggaccctttaaagcgcagatgtcacccttaagcccgccccggtctggaggccccgccgcgcttcccggactctaa

SEQ ID NO: 278235 - DNA, 122 bp, Homo sapiens
tagctcaacaaacccaggagatattacttcttttaaggacaattttgttcatagatatgccgaaggtaccagagctggttggtaaaaagaatattaatatcctattggatcctggaaccaca

SEQ ID NO: 278236 - DNA, 122 bp, Homo sapiens
cactgcttggaattaagaatggttttacgaagctgcccactaggacccattggtgggtttcgtgtgagcatacttctgctagcagggcgagggcaggatggaggcaatggagggcttggttc

SEQ ID NO: 278237 - DNA, 122 bp, Homo sapiens
cgggcgggggcggaggggccggtgttgggcttacatctcctgcttccctgagcgcctgcacggcagcttgcccttcttatagaggaaatagaggacagcgcccagcaccgccaggaccagga

SEQ ID NO: 278238 - DNA, 122 bp, Homo sapiens
gacgccgaaagtgagctggtaaacttccggcagtggctccgggggcaactcgagtccggacgctggcgggcttcgcgggcgaaggcaaagtcgatttccaaaagtgactttcctcactcccg

SEQ ID NO: 278239 - DNA, 122 bp, Homo sapiens
tttttctcaatcaatcttactaaccagttgggctggttttaacctgttgtttgggggctgcgagtgatacaaagacaatgttaaaaagaggcaacaagaggtcttgaaccaatatgtatgca

SEQ ID NO: 278240 - DNA, 122 bp, Homo sapiens
ggtcagagatggtgggggcggggctcggggaaggagctctgctggctctcagcccctgcccggctcaggagagctggcagcaggtctgggcaccgtccccagagcactgtgcccgccgagga

SEQ ID NO: 278241 - DNA, 122 bp, Homo sapiens
ctcagctcctagaggccgcgtgtattccctgccctgcagttccctcaagggcagcagtggcgtatgtgtccatgtgcttcaaatcaccctttttttttttttttttttttttttgagacaga

SEQ ID NO: 278242 - DNA, 122 bp, Homo sapiens
ggagctctgtactgtcaggggcggggctctgagtagcgaggccgggtctgaactatcaggcgcggcctctgcgagctgggggcggggttctgcaccggcgggggcggggttgtgagtggtgg

SEQ ID NO: 278243 - DNA, 122 bp, Homo sapiens
actgtccccaaatgctcatgacatggccttgagagcagcgcagcgggcaggaagcccaggcgcctcggagaacctgaagggctgcaggtcccggtgtctgcggcagcttccgcatccctgca

SEQ ID NO: 278244 - DNA, 122 bp, Homo sapiens
ggagacagacactttagtcagaagctggggtggggggcagcctgcggggacaacaggggtcgcgggcaccgcaggaggtgatctggcagcataaggacaagatagaattctgcaggggctgg

SEQ ID NO: 278245 - DNA, 122 bp, Homo sapiens
gcttaagtaaaacaaacaaaacctcacaaaaactggctgttcactcagaattcctagtatcgctaatattttgtagattcaaatttcagcctcctatccagacttcctccctcttggcttca

SEQ ID NO: 278246 - DNA, 122 bp, Homo sapiens
gcccctccctgtgtgtgtggtgatgggctgaggtgatgggtgtttcccggatgtgggcagcgcagcagcgcctcccttcggcgctggtctgtttcccagtgcttagaaaatgcctgccggga

SEQ ID NO: 278247 - DNA, 122 bp, Homo sapiens
accccgctccgggccagccccgcagggagactaccagggctggcggtagctgggcgtggtcgggtcgggggcggctgtgggcggccggcaggcagcgcgcggggcagccctcggcagacggc

SEQ ID NO: 278248 - DNA, 122 bp, Homo sapiens
atggaatcttggaccatgcggtgagtgttatacctctattcagctcgattaggacgaactcggggcacttagccctcgcaggaacaatggcgagcctctagcccgattgggagcggcagtgg

SEQ ID NO: 278249 - DNA, 122 bp, Homo sapiens
gagcggcggggcccgtgatcgggtggtcctggggtctccggaggcgtcccctgagctaggcgtgcggtcccgcggggctgccttacctccttcccgccgcgcccggccgatcctctgcgccc

SEQ ID NO: 278250 - DNA, 122 bp, Homo sapiens
gcgccgtcacgtgacggcagagcctgtgagcgtttttctcacgtgacggaggcgcctgcacgtggaccaatggggaggcgggggcggggccggcaggggcggtgcgcgggaagggaccccgg

SEQ ID NO: 278251 - DNA, 122 bp, Homo sapiens
atctatgaatatctgttacattgatctgggaatgtctattaaattaaatagcaggcagtccgagcagtccacaggatttagggttattatcacattaaaacaaaagcatgttcaactcctta

SEQ ID NO: 278252 - DNA, 122 bp, Homo sapiens
gacaatcttgagaaacaagggcacaaagacacaaacacccggtagtttcactctcacacacgggttcgcacccggacccccgctggctcccctaggggagtgggcaggccccttctgcggaa

SEQ ID NO: 278253 - DNA, 122 bp, Homo sapiens
atgtcgtgtacagcgtcctcgttagcgtgccttgtacggtgtcattagcgatgtcatatacggcaccctcattagcgatgtcgtatacggagtcctcattagcaatgtcgtgtacagtgtcc

SEQ ID NO: 278254 - DNA, 122 bp, Homo sapiens
gaggttccgaggccaagtatgtctagccccggctgcacctgggtaggtgagccatggggtcgggggaagagcgccgacaaccgccggattccgcgcaggggccgccaggcgcctgctcccag

SEQ ID NO: 278255 - DNA, 122 bp, Homo sapiens
ccagggtgcccgccaggctgcctgacacccacagatgggtggagctcagtgctgctccagcgggcgagacgggcgggagaggactgtggcccaccacgtggggcactcttggtgaggcaggc

SEQ ID NO: 278256 - DNA, 122 bp, Homo sapiens
ctctggcataggagacagagcaagacacagtctcaaaaaaaaaaaagaaaagaaaagaaacgcaactcctcatatatttatttgtgaaggaagaaacttcttgcagacatccccctgcaaac

SEQ ID NO: 278257 - DNA, 122 bp, Homo sapiens
ctctgtattagctacttgaatcaaagatcaaatattagaacaaaagctgttcctagcacccgtatcataggaaattccaaggattttaggagctgtgcatcaagaaactggggcatatatat

SEQ ID NO: 278258 - DNA, 122 bp, Homo sapiens
gggttgagcggggcccactggttgttggcgctctcctcccgcggcagccggctcctctcccgctctttcctgcgcttgcgtgtccaccacacgcacaggaccacgcacgccagccacagcac

SEQ ID NO: 278259 - DNA, 122 bp, Homo sapiens
tcagtggcctgtggtggaccccagatccacagacacaggccctctccgcacaagggctcacgtggtccccagccaaggcccctacagcactttctacggagccctcttcccaaacatgcaca

SEQ ID NO: 278260 - DNA, 122 bp, Homo sapiens
atgtcattctagaaaataaatgtttgacttagagatgacagacaaccagaactaacatcacgtgtttctcacacccactcacctatcaagtggccagaatgtataaatcaactgtattattt

SEQ ID NO: 278261 - DNA, 122 bp, Homo sapiens
gaccccggagctgagcccggcgcctcagcccacctggctgtctgccgaccgtgtgcggggcgagtttgctcaacaactctgccagcttctggccctcaggctgtgggaagcttcttcccggg

SEQ ID NO: 278262 - DNA, 122 bp, Homo sapiens
gccagtgggtcggacgggggccgaggccccgagccaggggtggagccacaggacagcagacgcaggagcccccaggaggggcccacgtggagcaggggtcggcgctcaccaagggcccccgg

SEQ ID NO: 278263 - DNA, 122 bp, Homo sapiens
ggctggattttgaggagggttaagtgtccctcttggcctggctgctgagtggggtgagagcgattgcgtgaacttgcttcctggcgtgcggctgtgaatgcttctcggctcgcctggctccc

SEQ ID NO: 278264 - DNA, 122 bp, Homo sapiens
gacgtctgagctcttgtgtggcttggtaatgctgtggccacctccagtctgcctccttttcgagacttcaggccctcagtttatgctcgccaggtaattcctggtctcgtttgggggccccc

SEQ ID NO: 278265 - DNA, 122 bp, Homo sapiens
ctcttgggcacgggagagcatacgctctggcttcgtttgtcccatggggcactccctaggcgcgctgcactctcccttcccctaggggcagcataccctgaggttcagaccaccgggaattc

SEQ ID NO: 278266 - DNA, 122 bp, Homo sapiens
cgccaaggaggtggacaaggtcaaccagatcatcaacaactgcatcgacgcgctcaagtccgagtccacctccttccagggcgtcaagtcggggcccgtgtccgtcgcggagccgccgctgg

SEQ ID NO: 278267 - DNA, 122 bp, Homo sapiens
caggcgacctcgtctggtggcagtgggggaggcagccgtttgcttcctcacagggtgtgccggaatcagaggctggaggcgtctggggagtaggcaaataaacaaagccaaccgcaccgaaa

SEQ ID NO: 278268 - DNA, 122 bp, Homo sapiens
gctttcttcgttcactccaacttcacccttgtgttcatattaatccttacttttcttggtcgtgagacaacggacttggataacacctcggacaacatgaccatcaaccctagacggtttca

SEQ ID NO: 278269 - DNA, 122 bp, Homo sapiens
aaattggagtcttcttgggacccaagttccctctctaacaggtgggggcgctctcagagccgagggggaaggtttcggggatggtgctggacccggacctgtgtcccccagcagtgaaggtt

SEQ ID NO: 278270 - DNA, 122 bp, Homo sapiens
ccacctcctcccctgccgccctcctagccggcaggaattgcgcgaccacagcgccgctcgcgtcgcccgcatcagctcagcccgctgccgctcggccctcggcaccgctccgggtccggccg

SEQ ID NO: 278271 - DNA, 122 bp, Homo sapiens
gcctctgatctgtgagctgcaaagagctccgaggttcattcacaaatctgcgcccccagccgtccctccacgcacccgagccacgtcccgggacccggagagcccggggcgttgggcgctgc

SEQ ID NO: 278272 - DNA, 122 bp, Homo sapiens
ttcatcttgatcctagaaaagagaccgctcaggatggggatatttcaattgctccgggaccgaagaatctcctcacgtgggccaggccttcacacacccaaagcggaaacgcgtcggcgaaa

SEQ ID NO: 278273 - DNA, 122 bp, Homo sapiens
cctgccctctgccaaccaggctgaggatgcccctctgttgtgtgggatgtgaaaggcccacgcaaggctgtgtggccttgggcgagtcagagccctctctgggcctgcctccctctgtgaag

SEQ ID NO: 278274 - DNA, 122 bp, Homo sapiens
agcccctcctctccggggccccaagatctgaggacagggagccaggttgcacacaggagccgtgcaggccaggacggcggccccatggacctgcccccgcagctctccttcggcctctatgt

SEQ ID NO: 278275 - DNA, 122 bp, Homo sapiens
aaccacacaggggaactggtgagaaaactcaaacatcaggccaggtgcggtggctcacgccggtaattccagcaccttgggaggccgagcggggcagatcacctgaggtccagagttcgagg

SEQ ID NO: 278276 - DNA, 122 bp, Homo sapiens
tacaggagcaactcccctacatctaaaaccaaatcatcatgtctcgaggctcttcctctgcgccattggcggccgtccattctacaaatgacctgcctgcttgcctaaatgcgtcctgacgg

SEQ ID NO: 278277 - DNA, 122 bp, Homo sapiens
ctggtgcctgcgccctgggcatactcagcccgtgtggtcctggcccccagacacctgccccgggaggacctgttcactatcaactccaagggccgcctggggaaccagatgggcgagtacgc

SEQ ID NO: 278278 - DNA, 122 bp, Homo sapiens
tcagccagaccctgcagccacactgccctctgccggtcagcaccctaccccaagccccagcggtcacctagcacctccacctgcggtcccaggcaccgggagagggaaggctgcctgcactg

SEQ ID NO: 278279 - DNA, 122 bp, Homo sapiens
gggaccagacaactgctcaaaaaacagcacagcaaagttaccctccgccgcgggtgaactcgccaaccccagcccaggcggaagctccgccccgtcctggccccgcgggcggcgcagaccgt

SEQ ID NO: 278280 - DNA, 122 bp, Homo sapiens
gtctggtgccctctgacaatttagtgcacccgaaatctctggggaagaacccacccttcacggcggggcttcacggacacgaaggccatcggtgtttttcacctactggggagaagggatat

SEQ ID NO: 278281 - DNA, 122 bp, Homo sapiens
ttttaaactcccatggaagtcaggaaatgccggcaaaagcgatttctggtttacgaagctcggtttgacgatagcaatttccgccgaacgcgactttttcctcttgtggaccaagtcgggat

SEQ ID NO: 278282 - DNA, 122 bp, Homo sapiens
gcagtgagccaagatcgggccactgcactccagcctgggtgacagagcgagactctgtctcgaaaaaaaaatctgatgaaactcagtgctggtgagggcatggagaatgagtactctcatat

SEQ ID NO: 278283 - DNA, 122 bp, Homo sapiens
attatggtgagattaaaagagacaatgtatatcaagtacagagcagggggcctagtattccgtaggcactcagtaaatgtgggttcagactcgaggctgaggagatctctagggactttgga

SEQ ID NO: 278284 - DNA, 122 bp, Homo sapiens
tgtccctagggcctcagtgttctcatctgtatgtcgagcactacatagaatcagctcatgcgctgaggctttcacgcctgtgatggaagagatagagaaggggctggcctctcctctccctg

SEQ ID NO: 278285 - DNA, 122 bp, Homo sapiens
tttgggcccccttcccctggaaggtcctcatgtgggcaggaccaagcatgttcccagtgccgtgagcaagcacccccaggtgtttcctgaggccctgggatgtggccagcactccagtgcca

SEQ ID NO: 278286 - DNA, 122 bp, Homo sapiens
tcaccatgtctgtactattttcaacacattaaaaatgacaaacctcctatctaagggctacgttagtcaccacatgccttaaagtttactaaccatttagttacaatatacatagagcaaaa

SEQ ID NO: 278287 - DNA, 122 bp, Homo sapiens
cgccaccgggagtacttgaataccggcactccatccttctcagcttccagacctgtgggacggtggataagaaactggcccctctccataacccacccacacgcagccacctctgccttccc

SEQ ID NO: 278288 - DNA, 122 bp, Homo sapiens
gacggccggcttgtgggggggtgccatctgaaaaaaaattgcaggtccccgaaaggtgaccgtcttccagaggagagcggatcgactaccgtgtggatgattaggacagtttcttccttttt

SEQ ID NO: 278289 - DNA, 122 bp, Homo sapiens
cttaatgtagaagatagtgcatttaaaaagccgagagtgtgtagaacccttagtggcaaacgtggcagcagattccaataacagtagtggtagcagcttcctcctgtgataaattccttttc

SEQ ID NO: 278290 - DNA, 122 bp, Homo sapiens
ctccacctgtgaatcctattcatggctaccacatttgccagagaaaatcacataactgagcgcactggagcaatcattacaagttacagcttccagcatcatctgggcctttgacgctacct

SEQ ID NO: 278291 - DNA, 122 bp, Homo sapiens
cccgccctctacccggctccaagctcgcgcaggcaactattacggggagcagtagagaaacggaagcttggcagctagagcggagccctagtgaacgacccggagttactggctccccctcc

SEQ ID NO: 278292 - DNA, 122 bp, Homo sapiens
cagaagaggacctcgccctagaactactgaatcaaaatccccagaaagggaagcagcctgcggggagtcagtatagtttaagagccccaagtgatttgattgcagagcagagaatggaaagc

SEQ ID NO: 278293 - DNA, 122 bp, Homo sapiens
acagccagccacccagggacgggcggagtctcccctggagcccctgccttttgtcagaaccgcctcctggcttttccagttgagaattctttggtggggaggtgcagggtgggggtagtggt

SEQ ID NO: 278294 - DNA, 122 bp, Homo sapiens
tagggcaccatgtcaaagggactcgtcatggcgatttacaaatatcacgatcgtggacagcgctattggaatgtaacttgggcttggtttcatgcagtccttaaggatttcgttgaggccct

SEQ ID NO: 278295 - DNA, 122 bp, Homo sapiens
aacactcggcaggggttttacccccttttatgtgctactaatcctggtttttgtgttttgcgttttttatttttatttttttttcggtataggctaactcttcgggtaaaacgaattgctat

SEQ ID NO: 278296 - DNA, 122 bp, Homo sapiens
gctctgtgaggtccttactcatccactgtgaagaggtaggctctccttagtgtcttacagcgcctatacttagcacaaactgtattttttcttggagttttaaggggcccagaaagtaacat

SEQ ID NO: 278297 - DNA, 122 bp, Homo sapiens
gccgccgagctgctctcagcccacccacccccttccccccgtggcctcaggctgcgctcccgacctggcagcctcttggggggccctgtagcgggcaccccaaatgcgctgcccggtcctcg

SEQ ID NO: 278298 - DNA, 122 bp, Homo sapiens
aactcgtttttcacctagaagcacaaaagtgatccttacccttggaggcaagatcaggagcgcacaatacaagggctgacttgttcatccactggagactctgctacagtataaatgcaata

SEQ ID NO: 278299 - DNA, 122 bp, Homo sapiens
gggtgttaggattcgaacacacagctgactgcacagctgagactgttttcttttattacacgtcgctgcgcccaagaccgtaccaactggaggaagagcaagacccccaccatcacccccca

SEQ ID NO: 278300 - DNA, 122 bp, Homo sapiens
tgtgattgcctcccggagagatccacatccttccctgctctagaaggcttttcctttcctcgagatttggttccaggcagcctggtctttaggccctggcttcctgagccacctggtggtca

SEQ ID NO: 278301 - DNA, 122 bp, Homo sapiens
cactcaccagcgggcagggagggcggcagggcacggcggtggcggtgggtcggcgaccggcgggccgaagactggaagcccgggccgctgaggctccgcagccccctccgcgccgccccggc

SEQ ID NO: 278302 - DNA, 122 bp, Homo sapiens
tcgctgttgctgttgcaaatcacattattgccattaagattccgcatcagcccgccgttccgggttcgctgtttgtgcacaagtccctcctcaggaaggacgatcaaggagtgatttatgcc

SEQ ID NO: 278303 - DNA, 122 bp, Homo sapiens
gccccatggaggtggcggtgcccgtgaagcaggaggccgagggcctggcgctggactccccgtggcaccgcttccgccgcttccacctgggcgacgcgccgggcccgcgggaggcgctgggg

SEQ ID NO: 278304 - DNA, 122 bp, Homo sapiens
ggaacgtcctgctttgattttaaaagctacctcttaaatctagggtagtgggaaactggacgactttttataaaaggctggtgtaaagtttcctattgccctattcaaagttaaaatgacaa

SEQ ID NO: 278305 - DNA, 122 bp, Homo sapiens
ccgagcgcagccagttctggaggaactagccctccggagcagccaaggcaggccaggccccggggatgtgcaccacggcgtggggaccaaaccaagctgaacggcctgctccaagttccccc

SEQ ID NO: 278306 - DNA, 122 bp, Homo sapiens
cataggacttagcacaaggtagtatcagcctctccatatacaacatcttaagagcagtcacggtcttttttaaattctaagactttactactatttcttagttgcagggtcttcattatctt

SEQ ID NO: 278307 - DNA, 122 bp, Homo sapiens
gttcaaggctacatcaatagataaccaagccctgttaaagagccagcctgagaaaactcacggcttccaaaagaattcagtatttgttccagcaatgtctgaagaaatgcctgtctcccagt

SEQ ID NO: 278308 - DNA, 122 bp, Homo sapiens
gaaccaagggcccttgggggcggggcctggcgccgggagcgcgggctgaggcggggctgacgtgaggggcggtgacgcgggtggccaaagcggagcggagcgggggtgaggagagtcgaggg

SEQ ID NO: 278309 - DNA, 122 bp, Homo sapiens
cgggcagactcacacctggccccgggctctggctgtattgatggggctgtggtggccacgcgaccagaaagccggggaggaagacctgcggttccgtgagaggcgtccagggctgcaggcca

SEQ ID NO: 278310 - DNA, 122 bp, Homo sapiens
cccgactagccctcggctactccaggtgacaaacggacaaaaacaaatcctaaagcctcgcgggaaaaagacctgaatcgtggccgacttctaggacaccggggaccgcgccggtgccccca

SEQ ID NO: 278311 - DNA, 122 bp, Homo sapiens
tttacttaggggacttcattttgtgagaaacccgaattcacctgaagccacccaggtgtccgaggaaaatcaggctgttaaaccccacatttgcaaatcctgctcgcatcaataccttgaca

SEQ ID NO: 278312 - DNA, 122 bp, Homo sapiens
acgtcctaccctccccaattctgcattatggatggggtgaatcatctggtaaataattaacgagtcatcgaggcactgagggtaacaggagagcaggggtggaggcatgggcagggctaaag

SEQ ID NO: 278313 - DNA, 122 bp, Homo sapiens
tctgatggggaagggacaggaggaggggaactgctgcaaaatcgatgacggtggctgtgacgctgcgacgtcacggcctggggtgtcccgagaaacctgctctgctgacaatgaggggatgt

SEQ ID NO: 278314 - DNA, 122 bp, Homo sapiens
ctgaggtgggcagtgagggaagcagccccgggcctgcttgcttcctgtccccgaaatgttcgtttcttctgaagtaaatatacatatataaataaatgtataaatactgctttgtatctgag

SEQ ID NO: 278315 - DNA, 122 bp, Homo sapiens
acagcccctcagagccacctgccccctgctcttggtgtgcagtcaagctgggctgtgaggcggcaggagttagggcagtacattctagtccttgttggctgccctctgaactgtgaacccgg

SEQ ID NO: 278316 - DNA, 122 bp, Homo sapiens
gctctcgccctacggccccagggccggaccacggcccagctgagccccgcggctccaccgcgcagaaggtgcgccggaggccctgccagtttcccgccctgcagggtactgagaaatcaacg

SEQ ID NO: 278317 - DNA, 122 bp, Homo sapiens
gctgggttcacggctccaggctccggcgacaacgactccggcggcggccccggctcccggcgcagctaggcgcccctgctgcccgccatcccgcggccgccgctcccctccgccacccgcag

SEQ ID NO: 278318 - DNA, 122 bp, Homo sapiens
cggggtggcgaagtccagatgttgtgtgtccagatgccacacagttgcaagcaaggcctccgtggaaccccgaggcagctctgggactggagggccccaccgggtggtcccaaaaggggcca

SEQ ID NO: 278319 - DNA, 122 bp, Homo sapiens
tctacccgacaggtttaactggccgctcttcctcgctgccttcaacagcccttggggtaccgaggtaccgcagtctcttccacctgctttgaaaccagcgcggagatcctgccccgctatcc

SEQ ID NO: 278320 - DNA, 122 bp, Homo sapiens
ggcggggaccgttctgcatcccatcccatcccgggcacgtcctgtcccccgtgtcctcagcgcaccctcctggggctctgtccagcgccacagaacggggccctggggtggtggacacacac

SEQ ID NO: 278321 - DNA, 122 bp, Homo sapiens
gtttagcagccaacactgttaaccatagctaacaaggaatgatttttcccactctaatttcgaggtatgtatgattgctggtaaactccatcaggctatgcggttataatcctgagagagtc

SEQ ID NO: 278322 - DNA, 122 bp, Homo sapiens
aattagaaatttaaaacttttatggggatacctcaagaccctgagcgcgggggaaagccccggaacccagaaggaagctcccacaattgcttttcaaagcgctcacatggccctggaccaag

SEQ ID NO: 278323 - DNA, 122 bp, Homo sapiens
agttcaagttccatttgacttgaactactctgtgagcaatgaccctcacccccaagtgaacgaagactccctaagggctcacattatagaaatggaagatagatagtctgccagtgtcttta

SEQ ID NO: 278324 - DNA, 122 bp, Homo sapiens
ctccttcctcccccacttcctccccatcctcaaacctgccccaactctcctggaatacctcggcctgatcagcaggatttccacccctaagcccatcaagacagcaagaaatgtccagctgg

SEQ ID NO: 278325 - DNA, 122 bp, Homo sapiens
actgcattccacagcttcccgtcgcctttcattcctggcctcagagcttcaatatcctggcgagatcccctcgcattatatttcatgaggcttaaatgcaagctctcccacagcaagcccga

SEQ ID NO: 278326 - DNA, 122 bp, Homo sapiens
ccccgtggcgcaggcgcgcagtggagggggccgcggggttctctgggagatgtagttcaacgatgacggccgtggcgcaaagcgttctggggctcgtggttcgcggggtccatggggaacgc

SEQ ID NO: 278327 - DNA, 122 bp, Homo sapiens
tcaggtgtcgtacgaacagtacctgtccatggtcttcagtatcgtatgaccctggcctctcgtgaagagcagcacaacatggaaagagccaaaatgtcacagttcctatctgtgagggaatg

SEQ ID NO: 278328 - DNA, 122 bp, Homo sapiens
acctcctgggttcaagcgattctcatgcctcagcctcccgagtagctgcaattacaggcgcgtgccttgtaataccacgtgcattgtaataccacgcctggcaaatttttgtattcttagta

SEQ ID NO: 278329 - DNA, 122 bp, Homo sapiens
gccggggccggggtcggggacgcggggcaggttcgtggcgcagcccggggagaccttgggcgaggcctccaggcggggacgggaaagggaacgggaacggggacagggcgcagggcagaggg

SEQ ID NO: 278330 - DNA, 122 bp, Homo sapiens
cttccttagctaaggaaaacgattccctttttcctcaatgagccagtcgcaccctgcctacgacagctccacacgggagcttccagcagaccagtcctttcgggtgaggcacattttacatt

SEQ ID NO: 278331 - DNA, 122 bp, Homo sapiens
tgctggcccaagcacgagtggcggggacacagcgccggacgcccaagaccctccccagtccgcctaggctggcatttcttggcccccaccagcgtccggtggaaagtgctcccccggatggt

SEQ ID NO: 278332 - DNA, 122 bp, Homo sapiens
tcgttttaacccctttggatccggaccctcttcaaactgaagtgaggcattcccacccaccgcctgtctgggctgctctgacgagaaagcaaaaaaggaaactttgcactcaacctatacgc

SEQ ID NO: 278333 - DNA, 122 bp, Homo sapiens
agagatgggtagattttcctacttgggtccttctgtggacaggtactaggtgctgctttacgcccagtgacttgtgagggaacagaactgccctttagtaaccctgctcacttcctgttttc

SEQ ID NO: 278334 - DNA, 122 bp, Homo sapiens
tgaccagtttgaaagccccaagaaaaagtttaaattcaaattccctaagaagcaactcgccgctctcactcaagccattcgcaccggaactaaaacagggaagaagactttgcaagtggtag

SEQ ID NO: 278335 - DNA, 122 bp, Homo sapiens
gcctgccggcgtctgctggcgtctcccggtgtgttcctccacccctctgcgtctcgcaaccgccagccgctggcgtgtctgcccgctaggctctcagagtgtctataggcacgggatgggag

SEQ ID NO: 278336 - DNA, 122 bp, Homo sapiens
aaaatatagaatttttactaaagattgatttacctgatttggagtatttcttgcagtcttcggtttcatctctagtgattgaacagttggttcaaattattttgcttcaacttctttcttat

SEQ ID NO: 278337 - DNA, 122 bp, Homo sapiens
cggggtgtggggtgcaggagccccaaggccgatgctgctgaggaggccaggagcggggaccgcacagacggcagttcctctggaggggggtcccgtgtgggccgggctgtgcaaaggacaca

SEQ ID NO: 278338 - DNA, 122 bp, Homo sapiens
tcttgttaaggcatctgaggtctcccgggggacagacacagtcttcatcttgagcaggaacggtgagaccactcttctccctgtaagggaccagtagcatgtgtgggaccacgccgcctgca

SEQ ID NO: 278339 - DNA, 122 bp, Homo sapiens
taaactactatcaaaattgtagatgcaactttccgtaactgaagatggctatattcattacggtgacaaagtgatgcttgtgaatcctgatgatcctgacacagaagctgatgtgtttctgc

SEQ ID NO: 278340 - DNA, 122 bp, Homo sapiens
caacctgttcttggacctggcagggcccagagaagcgaggaactccgcagctcgtcgacacgtctcgtctcctgtcccaattcagggcttggtgaggtgactcgcggtcgcgggtgactcgc

SEQ ID NO: 278341 - DNA, 122 bp, Homo sapiens
cagctcgacccagcctcttctcggagcaactttctccgccggccgccgccgagccccctccgcagccgaaggctgactgtcaaaagtcagtccaacccgacccacagggaaacagctgcagg

SEQ ID NO: 278342 - DNA, 122 bp, Homo sapiens
gttggcagcagttttgcttgaactggtagcttttgaagcatgatcattttttgtttgtctcgcagctgtggaggtggggttgtctgaatcaaaaagcatcacagaggtactttgtttcctgg

SEQ ID NO: 278343 - DNA, 122 bp, Homo sapiens
gccttccccatcattccgtgctgcccttcatcactttcccgtgtgtgactttctgtttctcggtattgattgcttcctctttctaaatgcttcaaaaagataaaacatctcttacaatcaga

SEQ ID NO: 278344 - DNA, 122 bp, Homo sapiens
caaatgcacagtgccttttccccacctttcacaggaaaaagggcttagcagatgtgattacgtagtttgtaattgcttaaggtggggaggaacaccatgggaggaaagagaagcaaggcagc

SEQ ID NO: 278345 - DNA, 122 bp, Homo sapiens
aggaccgtataccaaggcggagttatttggcacacagagagtctaagaaagacccatggccgggcgcggtggctcatgcctgtaatcccagcacttgggaggccaaggcaggtggatcacga

SEQ ID NO: 278346 - DNA, 122 bp, Homo sapiens
agacagccaccttcctccagacctcagaatggtagattgaccaacagcttgcatcgtatgcgtggaaaagctacagacactcaacaccaccttttgaaagcagccaggagagaggctgtacc

SEQ ID NO: 278347 - DNA, 122 bp, Homo sapiens
gcctcctacctgaacagaggcgggagcccgaataggacggggcggggctagcgaaggctgcgcaagcgcggccggcgggggcgtggtcttcgcctgctgcttcgcttgccggccagtggagt

SEQ ID NO: 278348 - DNA, 122 bp, Homo sapiens
gaacctaagcctcatcccatatccagctgccagaatatttggaaaagtgagtttttctttcgtggaagaagttggtgtctgcttcctacaatgactctttaagtatgaaattctttaagtat

SEQ ID NO: 278349 - DNA, 122 bp, Homo sapiens
aaacccggtcagatattcccgtagagttgggcgcttgagaacctttaagagctcctggttcgtggccattgatttcctgccctccctcaacttgcccattgtcggagctttctttttttttt

SEQ ID NO: 278350 - DNA, 122 bp, Homo sapiens
tgatttttctttagcttacacacaggtcatgtaagcatcactctattgctgcatggtctacgttctgcatggtaacagctcacacacggcagtgtgatcactcatattcacgacaatggccc

SEQ ID NO: 278351 - DNA, 122 bp, Homo sapiens
ctgttggaagactaaggacttccactcagccgggcttcggcgcctcttcctgtccgggcgcggctacggttcctggtacacattcgctgcgcctcgggcagcctaagggtgctcaagttcaa

SEQ ID NO: 278352 - DNA, 122 bp, Homo sapiens
tccccgggctgctagtaggttcagccggcgttgggggcgaccctagcctaagcagcctgccggccggggccgccctttgcctcaagtacggcgaaagcgcgagccggggctcggtggccgag

SEQ ID NO: 278353 - DNA, 122 bp, Homo sapiens
aataaagtgaaatacattttttggtttcccagtgcatataaaagttatgttggccgggcgcggtggctcacgcctgtaatcccagcactttgggaggccgaggtgggcggatcacaaggtca

SEQ ID NO: 278354 - DNA, 122 bp, Homo sapiens
agccagttgtacacaggtgttggtgagtcattaaccacctagggcagcacttggtccacccggactggcgagtgcacacctccggctgacgcctgcgccacgtgctggggtcggaggccgag

SEQ ID NO: 278355 - DNA, 122 bp, Homo sapiens
tccagtatctagagaaaatgggagctatgtttggctcacacagtaaatttatggcagagacgggtattaaagccccactcgtgactacatctgtgctttttgccatcctgggcgctagaggg

SEQ ID NO: 278356 - DNA, 122 bp, Homo sapiens
atgaagtatggccgtgtccagccataagcgggcattgggccggatgtgctggaaactcctcggagcgggagagcaaagcccttggcagcagagcctggcccacggcaggcagcggtcccggc

SEQ ID NO: 278357 - DNA, 122 bp, Homo sapiens
gcaattataaagaagtataaagcacaggctattaaatggtccaaaagaaagtaagtacaccgctcataaatctttgaaatcatgggaatgtttccagacagaacaagatggaatttatcttc

SEQ ID NO: 278358 - DNA, 122 bp, Homo sapiens
gctttctgtgctgggcctcaacagaagacgcaggggcagctggagtgagggtgctgcgcccggagagccaggggccttgggggtgcccggctccactctgcgccatcggctgccccgtgctc

SEQ ID NO: 278359 - DNA, 122 bp, Homo sapiens
aatggctcagatctccgcggagatggagctggaaaagcggagccctcgctccacggctcgcggcagttccttgaagcccacccaggtggggagcccctggcgcagcccaactctctgcagtc

SEQ ID NO: 278360 - DNA, 122 bp, Homo sapiens
ttgcatccatgaacagttttatcccttggtttcttatttgcgtggaaggcattttcataacgaagtactggtttagtaaaagcagtaaataggagtctccatgcaagagaaattggagtttc

SEQ ID NO: 278361 - DNA, 122 bp, Homo sapiens
ggagcgagcgcccaggggatgcagagaggcctggcactgagcctagtgtcgggagcaaggcggcagagtcatgcggcagccagcgcgggcagggacgcacgcgggaatcgagctggggtggc

SEQ ID NO: 278362 - DNA, 122 bp, Homo sapiens
aaaggtttgaaggctggcctggctttggccaccatcgtgtgagtcagaccagaagccaggcgttttgcatgcaatatggaacacctctgctctttcggccaccacagtattcctggaagctt

SEQ ID NO: 278363 - DNA, 122 bp, Homo sapiens
acggccgtgtttctcccgtgaggagtggccgtgcctccgctgacggccgtgtctctcctgcgaggagtggctgtgcctccgctgacagccgtgtctctcccgtgtccagtggagcggtgcat

SEQ ID NO: 278364 - DNA, 122 bp, Homo sapiens
gcgtctgtccctgtcgtgcgcccaggctggtgccgtcaggctcccggcattggtgcaccccggcattggtgtggccactgcactggtgtggccctggcattcatatggccccagcaggcccc

SEQ ID NO: 278365 - DNA, 122 bp, Homo sapiens
cacagatttggacttggacaggctgccgagggtctgaacggtcttggagatcaatgtcagcgtcctggacgtctgggggtcctggggaggcgggagcaagaaaggtctatgtcagcatcaca

SEQ ID NO: 278366 - DNA, 122 bp, Homo sapiens
tagagaagacttaaaagtaagcatgaatagataattaatttgatcaattgtctaatatgtcgtactctagattctaagttgccacatactcaaaaaagggaaagattatccagggcctgatt

SEQ ID NO: 278367 - DNA, 122 bp, Homo sapiens
atgcgaaatagtgatttaaatcagaacagaacctcttccaatgggggtttcctttgcaaccggggcttcgcggtgatttctgtgctgttttgagggcacacacctacataacacgtttgcag

SEQ ID NO: 278368 - DNA, 122 bp, Homo sapiens
gctgtcgttagggcccaggaaaggcccgttgcggggcgcacaggcgggcaggggaactcgcgccccgcgccgcgcgcccggcctcctgacgccagggccggcttctgagcacagccaccgcg

SEQ ID NO: 278369 - DNA, 122 bp, Homo sapiens
atcccactattgtcagcctgcatcaccagagacccgggcagaaccaggcgtccaggacgccgctgaccaccctcaacacggatatcagcatcctgtccttgcaggtaagacctgctccgggg

SEQ ID NO: 278370 - DNA, 122 bp, Homo sapiens
gctgccaggatcactccgggaccaccacgccaacggctcaccaaggcgcgcaaacctccgcgcccggaagtttagtgtgtagctgctccttcgctgtcgctcatgcccatcacctccagctg

SEQ ID NO: 278371 - DNA, 122 bp, Homo sapiens
gaggcagggtgcagtatagggacctgggccaggccccaggggaaagcgcttccctccagccgcggacaccccaggggccacggcggggttggcgggagtccggccaggaatccgaaatcggg

SEQ ID NO: 278372 - DNA, 122 bp, Homo sapiens
ctgaagaaaaattatggaaaacacagggatagagagtgggaggcgctattttaaatagcgcgataaaagaaacctctcagaagctgtcattaacaggtaccagaattcaggaacgataacag

SEQ ID NO: 278373 - DNA, 122 bp, Homo sapiens
tccaaaacctttattggagcacttactcaggtgccttaagtggcccattggcttgtttgccgcagtagtttgttagtttctgagggcaatggccaagtcaccttccatgttagaatcccagc

SEQ ID NO: 278374 - DNA, 122 bp, Homo sapiens
ggctgcccacaatcacctccacacctgtgcggctctgctccggaccgcgtctctgctcttcgcctcccttgactcccagggttccctgcgtctcgtcactcacagtgtttccacattggcca

SEQ ID NO: 278375 - DNA, 122 bp, Homo sapiens
gccccgagggccgcgagctcgagtcgctctcgaagtagaagagcaggttctgcagcagcgcgaaccacttggtttgccattttgtgttgtccgaactccgcttgctcaggtagcctttgcgc

SEQ ID NO: 278376 - DNA, 122 bp, Homo sapiens
acacgtggtggaagcatccgctcgctcacaccgtaggtcacacacgcaaacgtctgcatgcgcacatggttgttttaggaagctgtgacacagtacacccccaatgcacaggcgcgcacacc

SEQ ID NO: 278377 - DNA, 122 bp, Homo sapiens
actaaacattccagaaggaattttttatgaccatagattccaaactgtttggtttatagacgaagattgagaggcccagagaacatcagaaacatgctcaagattacatagctccttggtac

SEQ ID NO: 278378 - DNA, 122 bp, Homo sapiens
aggtcacccgtccaggtcggtttcaaggtgattgatgaaactccttctaggatgtcagaacgactgacggaagaaacatgtgcccacgaaaagaactggccccttattagaagagcaacagc

SEQ ID NO: 278379 - DNA, 122 bp, Homo sapiens
tgggcatgagcctgaattcgctcttgcccctttgttgggaagcagaaacgtgtggggtttcgcagttactttctttagtcccctttaatctctagctaatgctgagcttctgcagagccaga

SEQ ID NO: 278380 - DNA, 122 bp, Homo sapiens
ccacacgcggaacttctcgaggaggaagaggggaaggggtcgtgggaggccaggagaaaccgagagccagctttaccatgtgtcccttctggggataatggaatccaggcccttcggggctt

SEQ ID NO: 278381 - DNA, 122 bp, Homo sapiens
atgttccatatctgtgctgcccaggcagtagccactacccacatgtggccattgagcactcgcaatgtggccagaatgaccaaggaactgaactttggattttgtcactttgaataaattaa

SEQ ID NO: 278382 - DNA, 122 bp, Homo sapiens
gaggtcaggtgggcgccgcagcccagggcccagcccagcatacccccacccaccgcccaccgccagcccctcaccgatggccccgtctgtgttctcgtcattgagagacccgaaagcgatgg

SEQ ID NO: 278383 - DNA, 122 bp, Homo sapiens
cctatctggtggtcacatctgcccctgggctcatccttttactgggccacctcggcccatcgggacctgtcagtccttgacctccctcaggcccctaggctggccaggtcgcctcagtgcca

SEQ ID NO: 278384 - DNA, 122 bp, Homo sapiens
aacattgagtaaattggtgagttatataatgagatttctagaaagctctggacatgggtacgatgtgttttgcttctctgtataatgtctacagtgataaacttgtgtctccgtgtattgtg

SEQ ID NO: 278385 - DNA, 122 bp, Homo sapiens
aagcagccacaaacccggaatagcctgcttgacgcgactgctcgaatcgccgtaaagctacgcttttgcgcctcgccccttcacgacttgtagagctctttacggctctgcggaggccctgc

SEQ ID NO: 278386 - DNA, 122 bp, Homo sapiens
agccaatggctgcaatactggccgtgatcagcagatggtgagcgagcgcttatttcaaaacgggctgcgattctcttaagtccccacgtggggcgggtttgcgactcccctgtgcatttctc

SEQ ID NO: 278387 - DNA, 122 bp, Homo sapiens
gggtgaccagagccgccgtgtctgcggttccctcggtgggaatgtgctctgtgcgtccgccgggctggctcagaagctcacggaagccctttcaacactgtgcagagccaggtggacaataa

SEQ ID NO: 278388 - DNA, 122 bp, Homo sapiens
aggacgtgggcacgttgtcgtccagagagcaagagcgtcgctccccctcgccttctcggccgccctcccggtttaccgccccctgtgtccagagtaagaaaaggctagggttgcgcttccct

SEQ ID NO: 278389 - DNA, 122 bp, Homo sapiens
tggtctgcctgccttgacctcccaaagtgctgggattacaggcgtgagccacactacacccggcctagatatgtttctaaaacaacattgtgtaggaaatttttcttaggctggttcaaggc

SEQ ID NO: 278390 - DNA, 122 bp, Homo sapiens
gggatcaagggctcgggggctcacttccaccttgaaggtaccctgggctggaaacgggtccggtacaaacgcaatagggctgcgtagtcgtgggcaagtgggtgctgtctctgcgccccgtg

SEQ ID NO: 278391 - DNA, 122 bp, Homo sapiens
tcatgacctcaattccctcacctgaaataggaaatgagaatgtttcattgtagccccaagcggtcatgtcaacctagtgcctagtcataattaattgacttttcctgtattacttctttttt

SEQ ID NO: 278392 - DNA, 122 bp, Homo sapiens
ctggaaaatcgggtcactcccacccgaatactgcgcttctccgacgggcttaaaaaacggcgcaccacgagattatatccggcacctggctcggagggtgctacgcccacggagtctcgctg

SEQ ID NO: 278393 - DNA, 122 bp, Homo sapiens
acagctgctgaactcaggacctctgtttgtgaaatgatttcagaggcctggaatgtgcaacgctctatagaaaaccaaatgccactcttttctagttcagagctgtggttcaagaaagcgca

SEQ ID NO: 278394 - DNA, 122 bp, Homo sapiens
cctcctgcccttccgaggcgctttccatcccattctcttgcttgatgtccgccgcacttgcgatctgcccggtgggggaggaagaggacattttttgttgtttattttcctccctccctcac

SEQ ID NO: 278395 - DNA, 122 bp, Homo sapiens
gggcgaggggttggcggctgggcgaagggagcattcaaaagcggagaatgtcactttacccgagaaattcactacgatgggccattggtttctgctcggctcgcaggcgcactgcacgagtg

SEQ ID NO: 278396 - DNA, 122 bp, Homo sapiens
gggggtcaggccaggaaagccccttgggaagcccccggggagcagctggagcggggtcgccgggcggcgggaaggagtgggcgcctctatttaagcggcttccccgcggcctcgggacagag

SEQ ID NO: 278397 - DNA, 122 bp, Homo sapiens
gctccagaaaaagaggtagcccctccctagtaatcagagtcaagcaaataacatttttcccgctgggataggaaacaacagaaaagactgacagggccaaatgtataagtggggggcgggga

SEQ ID NO: 278398 - DNA, 122 bp, Homo sapiens
tattaattgagcctctactatatgcaaggcactgggctgggcagtgaacaatacaggcatcgtccctgtgcctgatgtaggagcagttcctggaaatggagacagactcagtgatttgttca

SEQ ID NO: 278399 - DNA, 122 bp, Homo sapiens
tatcaggaccggaaggaacacgcagaagccgcagaggctgttgggaggttgggcctcaggcggtggaccagaaggagcttactcgggccctgacgttgtcaggaggccctgggggatcctgc

SEQ ID NO: 278400 - DNA, 122 bp, Homo sapiens
ggcgcagtgggccaggcggcccggcgaccaatcggtgcgcgcgctcgcaccctgccgcggcggccgggctgctgtttccaccaccactcctggcccggggtcgcagattcaaattttactgc

SEQ ID NO: 278401 - DNA, 122 bp, Homo sapiens
gttggagcatctaatcttgtctaagagtcagggatagctttctggagcaagtgacctttacgctgatatctgaaaatcaagaaggagttatttattcaaaggagctaggggtagcagttggc

SEQ ID NO: 278402 - DNA, 122 bp, Homo sapiens
tcatgggcgaggggcgggccctgaacgtctccatggtaacctggggacacgactcgacatcgcctgggtaacccggagacgcggcgggcgttgaaaatgcaatggggcatgtgggatgaaga

SEQ ID NO: 278403 - DNA, 122 bp, Homo sapiens
caccaagcctaccctacctccgagtcccctgatggcagccagaagacgtctctagtgttgcgaacactctgtatatttcgagctacctcccacacctgtctgtgcacttgtatgttttgtaa

SEQ ID NO: 278404 - DNA, 122 bp, Homo sapiens
ctccaactggatattccaccagcaatccaagcacatcttgctcaaaaacaaattcaccgccgggcacggtggctcatgcctgtaatcccagcactttggaggctgaggcgggcggatcatga

SEQ ID NO: 278405 - DNA, 122 bp, Homo sapiens
ctgtgacggcatgggttggcgcatgcgcttcgttcccggagtggctggcggcggagttttcgctggctactacgaggccggagcgcccttggcctctctgcgtccctggccctcgtgcggta

SEQ ID NO: 278406 - DNA, 122 bp, Homo sapiens
tttagcaacttttgaagtgggattaacaagtttggccaatgaagcttcttccctgcccaccgccagaggtgctggagaaaagtaatcctggagggtcggcgtggaggcagtagagaggttta

SEQ ID NO: 278407 - DNA, 122 bp, Homo sapiens
gccaccagggcaatgtgctggatatcaaatggaaccccttcatcgacaacatcattgcctcgtgctcggaggacacgtcggtgagcagaggggtgctcccggaggagggtgggctcaggccc

SEQ ID NO: 278408 - DNA, 122 bp, Homo sapiens
tagacataccagtgccaggatgctgtcagcatgtttctccagggcacggggctgatagtacgtatcctgccaaaacagatggcctccttaaggaccctgcccactggcaggtcctttccctt

SEQ ID NO: 278409 - DNA, 122 bp, Homo sapiens
agccagggaccgggaatctgagcgccccgccaagcgactgggtctgaatgcaactgaaagcgccgagtccccggctcctaagggtcgcagaaagagagcccgaggaataaagaacgaggagc

SEQ ID NO: 278410 - DNA, 122 bp, Homo sapiens
gtgaacgctcggcccagcgtcgaggtgccagcctggagttctgggggtcaaattcctcatcgggaatgacctcctcgcagcgggctccacggaaaccagagcggcagacacagagctgcggg

SEQ ID NO: 278411 - DNA, 122 bp, Homo sapiens
gacaggcaggcaggagtcccagcacggtgccctcggcagccttgagcaggaggccagggccggggctgagggctgcaggcctggtggaggccggctttgatcagcccttcctttacatggtg

SEQ ID NO: 278412 - DNA, 122 bp, Homo sapiens
cctgtccttcccccggcaggtagagtgactacaagtcccgggatgcgcagcgctcggagtcgggcgggggccgggcggacctctacggtgacgtcaccgtcccggggcgggccaggggaggg

SEQ ID NO: 278413 - DNA, 122 bp, Homo sapiens
ccgtcagctgcctgtgcccaatggacagagggccggcgctcgtggcggggcggaggtgcccggcgcgtggtgcccggcgggcgcgcggcacccccccgcccgcggttggcctggcaacgggc

SEQ ID NO: 278414 - DNA, 122 bp, Homo sapiens
gttctccgggtcagccagtgccctgctcctaagggtagagatctagctggggacactggtcgtccgcctaggcagtggtgagagggtgggctacagttgtttgggtattcatgaatggagga

SEQ ID NO: 278415 - DNA, 122 bp, Homo sapiens
aggaagccggctaggacacgaggttcatttcagatgcagagtctcagcacatcaaacaatcgacacgcggcaaccaccgtacctgctcctgaaatatcttggccaagggggcacagtctgtc

SEQ ID NO: 278416 - DNA, 122 bp, Homo sapiens
atttgccagtaaatttgctgagtctcaactgctctccacacattctggtgagtgcaggaacgcatgagctctgcttcccttcagctgagtcacttcagagggcagggctcctttgttggaga

SEQ ID NO: 278417 - DNA, 122 bp, Homo sapiens
gcggtctcagcgggcagtggcctcctttgaagctgggattctcctgcccctcccgggcagcgcaggccaccggtgacccgggacggtctgtaaacgaccttcgcgtccccgtccccgtggaa

SEQ ID NO: 278418 - DNA, 122 bp, Homo sapiens
agcacataatgccaaatattatattttgaaccaagtacagctcaacactagcataatctacgtctctaatttcactcatctgttttgttaatgtctggcactgatcacaagagaaagtagaa

SEQ ID NO: 278419 - DNA, 122 bp, Homo sapiens
acgacctccagggagctctgccccaccccctccctccgcccttggaggcacccgccggatcggactcactcgagctggtaggagaagctgtagttgcccgggcccaccccagcgctcgccgc

SEQ ID NO: 278420 - DNA, 122 bp, Homo sapiens
gctgagtagtctcaggtgtccagtgaccattacgtggcacagtgttggcctgggcctcgccgtccctggcacgacccatgggatgaggccgcgcctccccccccagcggggccgccgggcag

SEQ ID NO: 278421 - DNA, 122 bp, Homo sapiens
atggagagcttagccgtgcccaggctggcactgcctctggcagagtttactcctgagctgcggggtccctgagggtgcccactgccacccgcctggacctcccagttctagcctcgtgctgg

SEQ ID NO: 278422 - DNA, 122 bp, Homo sapiens
tgagaaggaagggatggatagtagcatccacctgagtagtctgatcagtcggcatgatgacgaagccacgagaacatcgacctcagaaggactggaggaaggtgaagtggagggagagacgc

SEQ ID NO: 278423 - DNA, 122 bp, Homo sapiens
caagctgcatgtcgggggagctggcggtgtgcagagtgactgaaggtgcacgctgcatgtcgggggagccggcggtgtggagagtgactgaaggtgcaggctgcatgtcgggggagctggcg

SEQ ID NO: 278424 - DNA, 122 bp, Homo sapiens
cgggcgcggccaggggcgctgccggggaacctggctcccagggcagtagcccgagtttctcggtgcagcctccatccttggttttatgtcaagatgcgacatctgggcttagaaccgagggc

SEQ ID NO: 278425 - DNA, 122 bp, Homo sapiens
ggctggtgatgcagaattcaggctccacccaggcctgctggacgcatccttgtctgtctgcgccgagggtaccatcccggcgtccctctggttcgcgtcattcccccctttagtgtgctgct

SEQ ID NO: 278426 - DNA, 122 bp, Homo sapiens
gagagctgaacactcatcgagaccccctggctacagagaggagcttcccactgtgggtctcgtctgagctgttctgttgctcagtaaacctccgcttcattttgcttaccctccacttgtct

SEQ ID NO: 278427 - DNA, 122 bp, Homo sapiens
tgccttggggctctgctcctgccggcggattctgagcctgatgggttcgagtcccgggcacgccaggcgacgggaagagccgaggcccaggcccgctgcgccgtgaagcgcggggccgtccg

SEQ ID NO: 278428 - DNA, 122 bp, Homo sapiens
gagagggcggcggggcgagcgcctccacgcagcaactccggagtcccccgcttgcccgagcgcagtttctccgctgctgtttccaccggctttgtaacactgggaatttacatcctcacccg

SEQ ID NO: 278429 - DNA, 122 bp, Homo sapiens
tcttggacgctgaagtgtgcagaactgctagggcatctacccaatcacatgggggaattgcgggtaccttgataccgacaagttagcttcaaagttcccttacccgagcctctaaatcagct

SEQ ID NO: 278430 - DNA, 122 bp, Homo sapiens
agtcagggtggataggagatggtgcatgtgcacaattgagagtgggcttcaatttgctgccgaataaaataggagcaggagaatgatgtgtccatctgataggtagctatgaatctaggaaa

SEQ ID NO: 278431 - DNA, 122 bp, Homo sapiens
ctttgcccaaggcccagactagtggctcaaaggttttgcccaggaaagaaatgcggtctacgtgaatagagagcttcaaagccctccccaaagtgactagccttatatgaaacagtgtggga

SEQ ID NO: 278432 - DNA, 122 bp, Homo sapiens
cgtgcgcactgtggcctggtcggcctttccttccctggctgcggcggtggtggtggaggtcggggctgctctgagggttacctggtgcacctggacccttctttggttccccgcgataacca

SEQ ID NO: 278433 - DNA, 122 bp, Homo sapiens
tcgcctccccagctccttcccctaccgcctccccaccctcatctcttggaattcctgacccggctcctttcgggcattagctgggtcccaagaaccaccgcctgtactcccagtcctaaggc

SEQ ID NO: 278434 - DNA, 122 bp, Homo sapiens
tcttgcacacacccggctccttcaggttgccgggacctcgggaggagggagccgcaaggtcgtgacccctgcctctgcccgagcgcgcccttcggcccctgcaattagcgccgggaggtcag

SEQ ID NO: 278435 - DNA, 122 bp, Homo sapiens
aaggctctgggcctgcggagttgcccaagctcctccggcttctccggaaacggctttttccggtgacacccctggagccacagtgatttgtttccctaaaggaagcggtttcccgccagggt

SEQ ID NO: 278436 - DNA, 122 bp, Homo sapiens
tcgcgggcggcgcaccctgttgcattcaaaaacacacacacacacacacacacacacacacggaagttgtcacgccaagatacctgcccgagctgcacatcttttaaggcttcctggccgtt

SEQ ID NO: 278437 - DNA, 122 bp, Homo sapiens
ggtctgggctgggttgttggggtggaggcagagacgtgcatcctgtgaaaccacagccaccgtgaagtgcctccacgcctcctccaggcagcctttggggctgacgcagcccagcctcgatc

SEQ ID NO: 278438 - DNA, 122 bp, Homo sapiens
ttccgccgccccggttccaaaggcttctaaagacaacaacctatccggcccactgcggcccgtgaggctgttggttgccagacccaaccagggagatcacttaccgcgagcttagcgagcta

SEQ ID NO: 278439 - DNA, 122 bp, Homo sapiens
agaggctgcttggcaaaagaaaaaaaacggttttaccaacacccttcaccccaacccacccgaggggcccctcaggagacagaccaccagagactccaaggtcggagaccttcccggcgctc

SEQ ID NO: 278440 - DNA, 122 bp, Homo sapiens
atgatacttcatctgtgactccagtggagttaaaatgtgaataaaatattttatgcactgcgttagtcatttcagatttggattgagtcacttattggaaaatacagctcctaaagtccgtc

SEQ ID NO: 278441 - DNA, 122 bp, Homo sapiens
tggctgcggtggtggactcaatcaatctcgcctgcgttgtagtgtcgcgggattggctgtcgctggttccagcctttttctactcccctcccccagggggcagtttctccgggattaagcga

SEQ ID NO: 278442 - DNA, 122 bp, Homo sapiens
aagccggcccagctaggaaacggctgcggtagggacggactgattgggtaagagccagctcgtcgctctgttaggattggttgaatgagtcttttcgaagtttgcagcatccaatagaaagg

SEQ ID NO: 278443 - DNA, 122 bp, Homo sapiens
atcatcccatagtgtgtagattagaaatcactacttggaataaagttctctcctgtcattcgtattgcaaagtttggtttcaacatcatctgtcacctaaactacatcttgatttagttatt

SEQ ID NO: 278444 - DNA, 122 bp, Homo sapiens
actctgtccccaaccataggcacaaagtcttgggagacagatacggcccaggtcagaatgcgttcacggcaggcaccaacacctgtgaaggccaagggctagagagcaattagctgggtgag

SEQ ID NO: 278445 - DNA, 122 bp, Homo sapiens
gtggcttacacctataatccaggcactttgggaggctgaggtgggaggatcacttgaggccggaagttcaagatcagcaacatagtgagaccctattgccacaaaaactaaaatattagccg

SEQ ID NO: 278446 - DNA, 122 bp, Homo sapiens
ggattctccgtctcctgcttttggaggccagcttcctggggaagagctctgagcccgacgcgcttgtcctgctttctgagcacttgaatctggtggcttctgtgtcatcttcactctgaatg

SEQ ID NO: 278447 - DNA, 122 bp, Homo sapiens
aagggtcagagggtctgggcagcagggtggacaggaaggctccggaatattcagttgcgtcgccgcgcggaggggacaggtccgcgcctcccggagagcgggacccgagcgtaccgcgcagg

SEQ ID NO: 278448 - DNA, 122 bp, Homo sapiens
gggcatccgcagcgagtccctccccggtttccgggcccatttctgcctcccggggctcggcgcctgacctatgtgcttcttcactggccttcttgagggagggtgggcggctcgtgctccat

SEQ ID NO: 278449 - DNA, 122 bp, Homo sapiens
gagcggggtctctcagactgacgtcaggccttggtgggctgcactctcacctggaggctccggggaagcatctgcctccaggaccattcaggctgttgacaagtcaactcctcatggctgta

SEQ ID NO: 278450 - DNA, 122 bp, Homo sapiens
gagcgcctgctccagaggcggcgggccctagatcctacagaccgcctagggggccacagtcgggcagtccaaggctgccctgcggcgacccggcctatgtcacaggatttcacagctgctaa

SEQ ID NO: 278451 - DNA, 122 bp, Homo sapiens
gtatttcatgattccatggacccctggaatccgtgaacgagtcagcagcacacagggagacgtctctaggaggagggctgcagccaggccccttgtggccgcgtgtgacttccgatccgcct

SEQ ID NO: 278452 - DNA, 122 bp, Homo sapiens
cctcagggccacagctggggtttggtgaacacttcgccttgcacttcatacttcagtgcccgccagttcaggacattaggactgaagggcccgccaagatagatggtgttaatctcatctgg

SEQ ID NO: 278453 - DNA, 122 bp, Homo sapiens
gtcctggaaatttgccctgcagcctcaccaggccatctggaagctacttgttgggaaccccgtgtgtgtaaagggctgacccaggcccagacccggaggaactggagaagggcacacactga

SEQ ID NO: 278454 - DNA, 122 bp, Homo sapiens
tttgtacaggaaactgatctacagggtaacattcacacacaaaaaggaaacagtatgggacgatggcttgttagtacaagtgactctgttttggaaattacggacaagaaaccttggaggaa

SEQ ID NO: 278455 - DNA, 122 bp, Homo sapiens
tactagaaaagccgtgaagggataaaaccgggagcagcaggaagttgaaggaaggacgaccgaagctaggtgtatctgcacctgcctcttgacacgccaaaaacaaaggggggttaaggcaa

SEQ ID NO: 278456 - DNA, 122 bp, Homo sapiens
tgccgcggaggaagacaggctgcgggttcccgggactgcaggtccaggcagggtaggaaccgctgcccaggggagctaggaggaagcggggagagagagcgagcgaaaagcgggggtgggga

SEQ ID NO: 278457 - DNA, 122 bp, Homo sapiens
ttggggccccagcaaatgtttccttaacgtgggaccttcagaaggctctttcaggctgggcgcggtggctcacgcctgtaattccagcactttgggaggccgaggtgggcggatcacttgag

SEQ ID NO: 278458 - DNA, 122 bp, Homo sapiens
tcagctgggagtgggagagctgcccctccccagacctcaggtctcagcagcaaacatgtacgtgttggtcagtttcattttgatttttggctgtttcctttcactccctttcttttctcaaa

SEQ ID NO: 278459 - DNA, 122 bp, Homo sapiens
ctcctcttctgctcccttcacaacactgtcagagcaatggctatgttgaggagctgagctcgcgggtgctatatttaaccagtgttctcagcaagtcaagcctgtcaacagctgagaagttt

SEQ ID NO: 278460 - DNA, 122 bp, Homo sapiens
gcaaggcagccagtgcagtggtttagcacacaggtgctgggggcaaactgcaggctctgtcgggcaagtgatcattctgtgtgcttctgtttcctcttctgtaaaataggactaataacagt

SEQ ID NO: 278461 - DNA, 122 bp, Homo sapiens
tggccggggccgcgaggtcagggggcccctctgcagaatttctggcctccgggggcagggcgcccacccgccccgcgcggctggaggcgacaggcatgccctgtctgggggcctgccccttt

SEQ ID NO: 278462 - DNA, 122 bp, Homo sapiens
agggtgcacgagggggctgtagaatagaccagctcagtctctcacccactgtgtcttcctcgttccagtgagctgaggctgctgccaggccactgacagttcaggcacaagtgaaagagaaa

SEQ ID NO: 278463 - DNA, 122 bp, Homo sapiens
tcatcttatttcctgatttttacacattttagatttaacaaatgctatctattaggcctacggagagcctccaacaaatacaacaataaccaccacgtaaatttacatacatattcacaccc

SEQ ID NO: 278464 - DNA, 122 bp, Homo sapiens
acgtgaccccagctgggccaatgaacggcggcgggaggtgaaatccggttctaaccggtccggggctcccagcgctataaaaactttataaaccccccggagcccgagcagtgtgaagaaga

SEQ ID NO: 278465 - DNA, 122 bp, Homo sapiens
cagcctctgcggcacacacccaacagctacacaggcgcctggggctgcccgggtcgcggacgcaagtcgggccaacgtagcttctccctggcggtcctcctccggccccaggccgtctttac

SEQ ID NO: 278466 - DNA, 122 bp, Homo sapiens
cccgcgggctcccagggacccgcaagttgaagcgcgagggttccacgcgggctgcggggacgcgggcctcggtgctgcagactttctcagggcgcctgggtcgcggcaggcgcggagtcccg

SEQ ID NO: 278467 - DNA, 122 bp, Homo sapiens
gaatgagcaggaatgcacaaagcatcctttgtctcctctccactccagcttgcagacatccgcgggcatttgcgggcagtgataaatttggtttagccgtttcccctccctggaggacgggg

SEQ ID NO: 278468 - DNA, 122 bp, Homo sapiens
atctggaagaatggagttgccatccgctcagatgggagatcaccagagtgaacaggagagcgagtgatgattcattgcaaaaccatcaggctgcttgaatacttacttgaagcatatggcag

SEQ ID NO: 278469 - DNA, 122 bp, Homo sapiens
gcctgtgtgcagatggcagtggaagccagcgcaggacgcttggcagtgtgggttcttgctcggtcttcttcctatctggatgtcctggaaacttcctccatgcagggagcgtgtgtctgtgg

SEQ ID NO: 278470 - DNA, 122 bp, Homo sapiens
cgatgacaatacaacaatcatggagggtgcttatttccactggctcaacaattatcccaacgcccatatggagggggcctggggcttcaagaagaggcttctcgaggcaggatgaacaaaca

SEQ ID NO: 278471 - DNA, 122 bp, Homo sapiens
gtaacccgtctccactcccgccccctccagcgctgcaccttgtctcggggaggcgcggttcgagccggaatcagcctccctccgcggacctgacgctgggcaggtaactcccctcccctccc

SEQ ID NO: 278472 - DNA, 122 bp, Homo sapiens
gaggagctcggcttgtggcctggggtggcgtgagatacccgggtgcacatgttgagcagccgtcggggggcaggtctgcagctcagggagaggccgggctgggagctctcggcgtggaaaga

SEQ ID NO: 278473 - DNA, 122 bp, Homo sapiens
tctgcccctctgcccatcaggtgggaggtgcggcagatggggagtctggggggcctcctgcggaggagggtgtgcgccacggaaggctgctgagccctcattgtgtctggtgggaggcgggc

SEQ ID NO: 278474 - DNA, 122 bp, Homo sapiens
tcattagaactcttaaaagtctcttgtctggacgggaacagtatgataaacaagagcactcgcagtttatatctactcaacgtgcttttctatcgccatctcacagtccaggtgcttctggg

SEQ ID NO: 278475 - DNA, 122 bp, Homo sapiens
gcagcaggctcctcagaggagtatcagagccagcgctgtgtgtgcagggctgggcctttccgcagccctggagctgctgtctgtctggcctgggtccccggtccccaggcagcctgaagaca

SEQ ID NO: 278476 - DNA, 122 bp, Homo sapiens
ggcagaactagtcatcaattcaggcctgctcgggaaacctggtacccatgagttaagcttcggtagccatgcacgtcctgggctcaaactcagctctgggcagaataagacagcaatacagt

SEQ ID NO: 278477 - DNA, 122 bp, Homo sapiens
agtggttttgtacggctgatatattcaaggaatgtaacacattattatcacttacattttcgttttctgagaatagaggcgtagtttttaggaccccagagagaatcagttttgcataagtc

SEQ ID NO: 278478 - DNA, 122 bp, Homo sapiens
acgtcaaggccatacaccagccaaataaaatttgaatcacaggggatagattccaggcctcggtatttttaaaaaactcctcaggtaattacaatgtgcagccaagtttgagaacctgtgcc

SEQ ID NO: 278479 - DNA, 122 bp, Homo sapiens
gagggagctaataaacattgaatgtgcagcagctgccttggcggccggagtccgcccgagcgacaccggagcagtgcgcccgggaggcggcgaggggaggcggttcgccttgtccctcccac

SEQ ID NO: 278480 - DNA, 122 bp, Homo sapiens
ctggcttctggtatttatgtctctgtgtaaccttgtccctttgagtgtttctggacctctcgtgacttgcttccacaagtggggcaagatgctgggatgctgcttcagaggttaggttacag

SEQ ID NO: 278481 - DNA, 122 bp, Homo sapiens
gttgcgggcacttccggtcaggcaggcggatccggggaattctgggaaatgtagtccagacgctctgtggagtcgcgggagctacggctgcgggagttaccctttattctgtgatattttga

SEQ ID NO: 278482 - DNA, 122 bp, Homo sapiens
gtttaatgctctttagttgaatgtttttaaatcaactttaagcaacagccaatgtcttcacgtaaattcttcatccccttcccatgcacaaatctttaataatcctgaagtggcattggtct

SEQ ID NO: 278483 - DNA, 122 bp, Homo sapiens
cccgcggcgcgctcgggacgtatcaacgctctgtgggtcgtgtgcgtgcgaggggggcgacgtaagggcgctccgcgagcccgtctctcctcgaatgaaaggaaacaacctccggcgacaga

SEQ ID NO: 278484 - DNA, 122 bp, Homo sapiens
ttttcaggcttccggcatctcccctgccctgtccttcctccgggctgctacggcactgagcgtgctcccaagtgcagtgctgtgaaggacacctggtagcaccaggtgcctttgtggcacgt

SEQ ID NO: 278485 - DNA, 122 bp, Homo sapiens
gggttgcagctgcaagcccccggggaagtacttgtctgcagagagtgaggatgactatggcgcgctgttctcccagtacagcagcaccctatacgacgtggccatggaggccgtgacccaga

SEQ ID NO: 278486 - DNA, 122 bp, Homo sapiens
tgaactcctgacctcaagtgattcgcccacctcaccctcccaaagtgctgggattacaggcgtgagccaccgcccctagcctatctacttcttatagggtgataattggccttttcccttca

SEQ ID NO: 278487 - DNA, 122 bp, Homo sapiens
ctcaaactttgaatagcatctgaatcacctgtagtagttattaaaacagaatgatagaaccggcactcagagtttctgatacaaaagatgtagggagggactggataatttccatttctagg

SEQ ID NO: 278488 - DNA, 122 bp, Homo sapiens
tgagcacatgactcactaactggtcttcagtagttaacccatccccaacactagtgaaaccgcttcgtaaagattatgacagtgagaggaatctagcatagctgactccatcttgcttctcg

SEQ ID NO: 278489 - DNA, 122 bp, Homo sapiens
gaccgcatagcagcctggtgtgtggctaactggacctcagctgtggggatgctgccagctcgtgacagcctccactagctgcaggacagggtagagaaaggaaagggaggtctcagggactg

SEQ ID NO: 278490 - DNA, 122 bp, Homo sapiens
tctggcagtggagcctctgctgtgactggttctgtgtccagcacctgctctgggccacaccgtcaggaagaaggagttgcatgactgtcctagccttggatttgactttggcctcatccacc

SEQ ID NO: 278491 - DNA, 122 bp, Homo sapiens
aatcttgctactgctcactctttgactccacactgctttcatgagctgtaacactcactgcgaagatctgcagcttcactcctgaagctagagagcccacaagcccaccgggaggaatgaac

SEQ ID NO: 278492 - DNA, 122 bp, Homo sapiens
accacggcgcccgacgtgaacagcttcttgaagtactggctgcaggcggccagcaccgagcggtgcgtggggaactcgcggccctccaccaggatcaccacgtcgcacagcaggccctgcgt

SEQ ID NO: 278493 - DNA, 122 bp, Homo sapiens
tgagtgctcacgggggtgtgtgtgggacaggatgtggtttgagttctgtgatcctcaccccgacctcatgcgtcgggaatccttgcagccctgtgactggcctgtgggggcttgggctaagt

SEQ ID NO: 278494 - DNA, 122 bp, Homo sapiens
cttgaacctctgagccgaagggcaggctcctaaaatgcagagagatttattcctgtacctcgtggtgtcgggcagcttaagctcatctgatcgcattgtttctgtgtgatcatgagagactc

SEQ ID NO: 278495 - DNA, 122 bp, Homo sapiens
agcaaagtgttcgtgaagagctccgacctcctcaagcacctacgcacccacaccggggagcggccctacgagtgcacccagtgcggcaaggccttcagccagacgtcgcacttgacgcagca

SEQ ID NO: 278496 - DNA, 122 bp, Homo sapiens
atagccccgtgcaggcccagctgggacggagcaacgcaggcagagctgcactgacctctccggagtgccgtttgtgaactcgaatcgaggcgccaagtgctcacgtgtcctttaagccaggg

SEQ ID NO: 278497 - DNA, 122 bp, Homo sapiens
cctgtgctatggctgagagtgatgccgaggaagacacttccctccgagtcttagtctgcccgcctgtgaaactggctcgtaacaaacccctgaccccaggctcggtcgccttgagcccaaga

SEQ ID NO: 278498 - DNA, 122 bp, Homo sapiens
ggaccaaggaccaccccctcggtagctgcaggctccatgaggacctggtcttagtcttggcggaaagccctctccatagccatccgtttcaattcaagcatcctgggtgacctttgagttgg

SEQ ID NO: 278499 - DNA, 122 bp, Homo sapiens
agctgagggctctggctcaggcaggatctctgtaaatctgggaatttgaaggctgagatacgagttagaagcccagatgcttatcttttagcagcccatcttttagcaggcatcctctccta

SEQ ID NO: 278500 - DNA, 122 bp, Homo sapiens
ttgtagtagttgatttctgtggtgtaagtactcccaacatagctgattcaagttaccagtcgatgaccctggtagctgcgatgacactgaacacagctagagttgggaagagatgtgcacag

SEQ ID NO: 278501 - DNA, 122 bp, Homo sapiens
aatcacagcagcccccagtttagcggactgatttactcccggtattggtaaatatgatcacgtgggccgcgcgaccaatggtggaggctgcagcctgcgaactagtcggtggctcgggcgcc

SEQ ID NO: 278502 - DNA, 122 bp, Homo sapiens
ctgaagcgatcctccctcctcagcctcccaaggtgttgggattacaggtgtgggtcaccacgcctggcctagagttcattttctgtagcagttttttataacatggtctaaagatcttctcc

SEQ ID NO: 278503 - DNA, 122 bp, Homo sapiens
ttttttctttctagttctgcctctcttagctagaaacctatcctgatccacctgaatccccgggtgccgcagcctcgccagcccacggggcatctaatgcagccaggcactctcacttacgt

SEQ ID NO: 278504 - DNA, 122 bp, Homo sapiens
gatatggtggttcttagatggggaggagggcacttttgccatgctagtggatagatatttcgcactgtctggggacatgtttggttgtcataatggataatactattggcatctagtgggtc

SEQ ID NO: 278505 - DNA, 122 bp, Homo sapiens
ccaccagctctgagggaatcttcgcgacctgcgcaggcggtcgctctgataaccgcatcccggtttccgggacgacagcggaagtcacttctcacacgcctttcttattggataccggcttt

SEQ ID NO: 278506 - DNA, 122 bp, Homo sapiens
tggatttatagaagaaaaggttttttctttttcagctgttactacaatggtcaacaataacgacaaaaaccacttaaagttggacagacgtctactgcaaccaactctcaaaaagtttagaa

SEQ ID NO: 278507 - DNA, 122 bp, Homo sapiens
ggtaatttataaagaaaataaatttatttctcacagttctggaggcagggaagagtaagacgatggttctcacatttgttgggagccttcttgctgtgtgttggaaggcaacacatgatgag

SEQ ID NO: 278508 - DNA, 122 bp, Homo sapiens
actcaggatttcgaggctgcagtgagctataatcacattattgcactccagcttgcaagacggaccaaggccctatctctaaaatatcaaacaaacaaagaaaaatataataaataacaaga

SEQ ID NO: 278509 - DNA, 122 bp, Homo sapiens
ggagccaccccaccgtagggctccagccagggtccaggcgtgcaggcggcagaaggtggacgggacgcgccagccccaggcctctcctcccgctctccagccgtttttctggggagaaacac

SEQ ID NO: 278510 - DNA, 122 bp, Homo sapiens
ctgagcctggcaccccttggcagggctgccctccaaatcggtggtggagtcctgcctggtcgcagggtgaggagagcacgttggcccgggaagggaggctgaagctggaactcctctgcatg

SEQ ID NO: 278511 - DNA, 122 bp, Homo sapiens
acaaaccctaatctagctccagcaaagagccaggatcatgctgaacttcctgtgagccttcgtgggggatcgaggctggagaaagtgctgcttcattctgaggtatctgtgaggtggggaag

SEQ ID NO: 278512 - DNA, 122 bp, Homo sapiens
gggtttgcggtaggcgctgtcgtggcagaagaagccctgcacgttcacggtgaacgtgtccgtatactcgaagtagtacgccagcatcaccgtccctgccatgatcaccatctggaaataga

SEQ ID NO: 278513 - DNA, 122 bp, Homo sapiens
gagggtggtggctggcacctgcggctctgcgcggtggggctcgccagggaatggggtcatcgcaggcccccaggcagggtggatggagcgagctggccacgctgtgtgccagcaaaggggaa

SEQ ID NO: 278514 - DNA, 122 bp, Homo sapiens
actgtttttgacactcacatgtaccgtcgtgggcgccggtgtgtctttgttgctgagtgccgtcccgtcatatggacgtgcgtcgtgggcgccggtgtgtcttgttgctgagtgccgtcccg

SEQ ID NO: 278515 - DNA, 122 bp, Homo sapiens
tgcccccctgtggtggtctggggaagcgcacttccacccgctacagcctccagacccctccgtgcactcagggacccacagccaaggcctactgacctcgctggctggcacgtccagggccc

SEQ ID NO: 278516 - DNA, 122 bp, Homo sapiens
tttcccctaactctaagcaggtctcatggtccactcaaggtgtttcatgcttctcagttacgtccccttcccactgctgtctaccctctctccaaacacaacacaaaacaaacccacaacag

SEQ ID NO: 278517 - DNA, 122 bp, Homo sapiens
gacccgtggcctggaaggctcttttccttcccttttagagaaaggaaatatctgcgtgctcgagggcccagcaacctgcaagtccccacacatcgggtgcgagggaggttgtgatgtgctta

SEQ ID NO: 278518 - DNA, 122 bp, Homo sapiens
tgtctcagaaaggaagaaaaattatccacttgtaggttgtctctaattacttccctgacccgcactcttcatttgtccaagtgctgcagctgtgctctcaacaatttttacaacttctggga

SEQ ID NO: 278519 - DNA, 122 bp, Homo sapiens
aggaaggaagagctgatggacggaagaaccatggcgggaggagtcatccggaagctacctcgctgccctgtcagttacggaacagaggagagatgccggctggaggacacagcaaatttgaa

SEQ ID NO: 278520 - DNA, 122 bp, Homo sapiens
ggctagggcgcaggcgactgggaacccgtcatcgtccctctgctctccggacctcttattcgaaaaacatcctccaccacgtgcccctttgtcgccagagacagcgcctgcagtgcgtgagc

SEQ ID NO: 278521 - DNA, 122 bp, Homo sapiens
ctctcccggtcggctcccgagcgggacttgtgaggcgtggccgggtggaggaggcgcttgcgggggcgtggggctccccggcaggcgggaggcacggagcaagtcgcactggacaatgacct

SEQ ID NO: 278522 - DNA, 122 bp, Homo sapiens
gaaaaagataataaaaacaaccgtgtgcaatattttgggtttatagattgctgtcacatacgttatcgcccacaagcctcataacaaaccctgttgttctcattttcactttctccatcttt

SEQ ID NO: 278523 - DNA, 122 bp, Homo sapiens
gtattgatctgtcaactggcttaaaaataaggcttcattttcttctcccaaggccttgctcgtgactgggtcaggcttgcctgcaaacccaaggcggcagttcacagctcggagcccgtgtg

SEQ ID NO: 278524 - DNA, 122 bp, Homo sapiens
atttggaaaatagggggaaggaagcaaagaaaggaggcagtgaggccaggccttcctgaccgcattctccagactcaaatcagagagaatatttttgttaattaggtttaagagaaaacaca

SEQ ID NO: 278525 - DNA, 122 bp, Homo sapiens
cccctccatccctgcgtctcagtctctctctgcagccgtcggtccccctcattgtccccgcgtctctggagctcctctcggagcctctctgcgtctccgcctctctggggcttttccagctc

SEQ ID NO: 278526 - DNA, 122 bp, Homo sapiens
ctgctgggcccaggtcggctcatgaacccgctgcaggccggcggaggcccgcttcagcagcggctgcgtgccaccccacagagcggccaccagcaccagagccaacacctgccctgaatgca

SEQ ID NO: 278527 - DNA, 122 bp, Homo sapiens
ccggtggccagcactcacgcacctgcttgaggatctgggccgccatagtgtggctgcagtcgaagataatgcggaattcccggcctcgcttcatctccttgagcaaggggcgcgagtcgtca

SEQ ID NO: 278528 - DNA, 122 bp, Homo sapiens
ttctgcagaatgaactgtaacctcctgaagctgaagtgcaggccccgatggggaccaactcgcaggaagcatctgtctcctgtgtccctgtccctgcccctttcctgggagcaggcttcccc

SEQ ID NO: 278529 - DNA, 122 bp, Homo sapiens
gacaacctctactaggcgatggctctgctctgtctacatttatttgtacccacacgtgcacgcactgaggccattgttaaaggagctctttcctacctgtgtgagtcagagccctctgggtt

SEQ ID NO: 278530 - DNA, 122 bp, Homo sapiens
ttttttttgcccttattcaaagttgatgctcttggtggtgctattgtccatttataaatacgccttgaaattcagggtgtgtgccaaagatattgataagctagattctttgtctagtgacc

SEQ ID NO: 278531 - DNA, 122 bp, Homo sapiens
ccgaaatatgttagcggcagtggttctgtccaggtctgaagcaaactcaattcttgcctccgcagaagaaacgattcagctgaggggcattaagatagagtgagactgaggcaagttttaga

SEQ ID NO: 278532 - DNA, 122 bp, Homo sapiens
ttgttaatgaatagtgtactgataaaatgaaaggatgttttagaaagactttcttagatgcgagatcatgtggatctggaatggatagaaatcagggagtttagaacaatcatttacttttg

SEQ ID NO: 278533 - DNA, 122 bp, Homo sapiens
ttgcttttggtttactatctttggggaggagaaaattacagggtctttaacttggcccttcgtattcttatagtattaactctatggtgctgtgaaccaaagtggggtttcttctaattgct

SEQ ID NO: 278534 - DNA, 122 bp, Homo sapiens
agctggcgggacccttagctccaggtggacgcggcccggaccccgtggatatggagcagtcgccgcccccggcgcccgagccgacccaagggccgacccccgcaaggagccgaaggcggcgg

SEQ ID NO: 278535 - DNA, 122 bp, Homo sapiens
accaaaccggctgctgcaactgtttgttgtcctgcagaaaaacaagatattaacacggagcgtgaaggtgccgcgagatcagctgcctgctgagtaagatcagcaggctgtggctgattttg

SEQ ID NO: 278536 - DNA, 122 bp, Homo sapiens
cctgtggccctcaagttcccaagtgacctcgtccggggaggggacgtctcgctctgaccccgccctggacgcacccacccacgacgcccccgcccacttccggcgcgccccctcttcgcccc

SEQ ID NO: 278537 - DNA, 122 bp, Homo sapiens
ctcacctagaggaggacagagacatcaataacacacagctcccaagccggttttgcccatcgtcattcccttgcaggtctgttaaccagcaccaaggtgatgggtagagcaggttctctgtg

SEQ ID NO: 278538 - DNA, 122 bp, Homo sapiens
gttccggaggctgaaagtccaagatccaggcagatttggtgtctggtgaggcccccttcccgcttcctagatggcgcctgtcactgaatcctcatatccatccggaggggtgagggagctct

SEQ ID NO: 278539 - DNA, 122 bp, Homo sapiens
gccgcgcatcctgtctattgaactggcccgccgccgccgccgccgccgccgccgccgccgcgacccccagccccgccttcagcgagcgctgccctcgccgccgggtctctcagaggctggga

SEQ ID NO: 278540 - DNA, 122 bp, Homo sapiens
ctggagcaggcaacagacacctcaggaacctaagacgggactgcggtgaggatcacttcacggcagggtcgaacctcaacagctgtacagggtcgagggcaccaatcattacacataggggc

SEQ ID NO: 278541 - DNA, 122 bp, Homo sapiens
cccttcctctccagggtggagtcgaggaggcggggctgcgggcctccttatctctagagccggccctggctctctggcgcggggccccttagtccgggctttttgccatggggtctctgttc

SEQ ID NO: 278542 - DNA, 122 bp, Homo sapiens
cctgcgtgacggccgaaaaacgtcaatcgatgtcgccctgggactccgggtcttcgaatgcggcccagctttggctatgccacctccctagaggcccgcgctggcgaggccgagcccgaacg

SEQ ID NO: 278543 - DNA, 122 bp, Homo sapiens
aaccccctacccaaggcagcaagacgcccacagccgttcaacagacacgaacgacctcagcggcctcagggacctcccacaacatagacacttttgagctggattggttgaaatgtcgctat

SEQ ID NO: 278544 - DNA, 122 bp, Homo sapiens
aaatcaaaccccagacatcatatcatctcaccccaaaacacttaagatgtttttccctagcgttacttatttatttatttattttgagatagagtcttgctctgccgcccaggctggagtac

SEQ ID NO: 278545 - DNA, 122 bp, Homo sapiens
ccacattccctcgcagtatttacacattgattccggccttcttagacctactggtcaatgcgtgcgagtggggggctgcgaacggacttggacttaagagttcagggggtctgtaccctggg

SEQ ID NO: 278546 - DNA, 122 bp, Homo sapiens
gcatggcaacaacaaacacttgctcctgcggaccagatccccggaggagttgttgctgggcggagtcagagcagttcttgaggttcaaggaggcgggggagacctgagctcacgcttgctga

SEQ ID NO: 278547 - DNA, 122 bp, Homo sapiens
aaaattgcccagctaatgatcggctgggcagataatcggaggagagttaattgtaaggttcgatatggcatcttgtcagcagagataagttgtcacgttttccacttgagctgaaactaaat

SEQ ID NO: 278548 - DNA, 122 bp, Homo sapiens
ctctctttacaagatatttttgtataacgtaaatgcttttttcccctgtccatgtggaagcgctgtcgtttgttcaataaatatttgctgagtgctacaatcatacggagaacaaaacagat

SEQ ID NO: 278549 - DNA, 122 bp, Homo sapiens
aggtggacccaggaaacactgaaaaggtgggcccggcagaacttggagtctggcatcccacgcagggtgagaggcgggagaggaggagcccctagggcgccggcctgccttccagcccagtt

SEQ ID NO: 278550 - DNA, 122 bp, Homo sapiens
ccccgcggcctccttggcggccccgcgctgctgttggggctgttgctgctgcgtcgccggcggttgaggctgctgctccccgtgcccgttctcgtcgcccgcgccttcctcttcgtccccga

SEQ ID NO: 278551 - DNA, 122 bp, Homo sapiens
tctcaggccctcgggacactctaggaggccgatctgcagggtgggcacgccctaaatccacgccaagtcacccacgcattccttctgccaccctctcttggatccgaaggggcgaaagggaa

SEQ ID NO: 278552 - DNA, 122 bp, Homo sapiens
taggaggccttgaagcggttgctgccagaacacgagctcagcagcttgtccaccatggtgcgggcgtagcggagctggctggccagctccttgcagccgccttaatcctccaggagactcag

SEQ ID NO: 278553 - DNA, 122 bp, Homo sapiens
accttggtgaggaaggagcacactgtgggctccgccatggtcgctggcgcgggccctgtgcgcgcggcgcagcgagccggggcgggcaggctcctcccagtcacgtccacgatttccagcga

SEQ ID NO: 278554 - DNA, 122 bp, Homo sapiens
gctaggggcttcttgggagtccctcgcactgctctaagcatccaggcagagtcattattccgggtgccaggttgctctttttccagcagccttcaggggactcctggctgggcggagtctgt

SEQ ID NO: 278555 - DNA, 122 bp, Homo sapiens
agctggacagggccttgggagaatttggacagtgggagtaaggacgagcgtcgcctcctacgcccgcggcatctgcagcaagcgcgcatcgcgcaccccagggtagcagcgcaggtctgggg

SEQ ID NO: 278556 - DNA, 122 bp, Homo sapiens
ggagtattggcggtggataaggatggaaataggagagaggaattccaggcagaggacaagcggcgcctcctgacagaggcaagttgccacctgctgattagttaaggctgtgtggctagccc

SEQ ID NO: 278557 - DNA, 122 bp, Homo sapiens
agcagagacctgtcccccaggcaccaaaacctcccctttctaaccgtgcccgagagcctccgacccctgggccctgtccaggcggctttgcacctctcggccttcccaggggtggggtggag

SEQ ID NO: 278558 - DNA, 122 bp, Homo sapiens
gtaaaaagttcactgggttttgctatgggctgaatgtttctgcacaacccccctcccctgcgcccaaatttatttgttgaggcctaagaacctactgtgatatgttttgatgtagagccttt

SEQ ID NO: 278559 - DNA, 122 bp, Homo sapiens
ggcagcttagtgtgcactgctgagtgggcatggatttaggctcctttaaaaatgtaacagcggataattcaagcatgctttaaaaaaaaaaaaaaagttcttttcatactagtctttgtagc

SEQ ID NO: 278560 - DNA, 122 bp, Homo sapiens
ttttcatgagtttgtgctgggtaggcctaagggaaacatgctcagtaaatcgaaaaatctcggattacacataaaccaccggccccggcaggttagacttggtggacacgggagccagcagc

SEQ ID NO: 278561 - DNA, 122 bp, Homo sapiens
ccacagggcaggtcgggctgtggcctgcctttctcagggactggagcggctaagcctgcccgccgacggccacgggctccagagcgaccgtttccggcgcaaggtgccgggagatggcagcg

SEQ ID NO: 278562 - DNA, 122 bp, Homo sapiens
taagacagagcacccgaagatgagccagagcaaatatgttaatcataattctatattacacgattccttccacccagtattgtgtggagatatatgtatatatatacagtaatgttgttgaa

SEQ ID NO: 278563 - DNA, 122 bp, Homo sapiens
cttgtaaattttttttttgctgaatcatcctaaagttgcagatgagacaccacacccctgcgtacttcagtgtgcatctctaaaaataaggacttttttttcataatcataatactattacc

SEQ ID NO: 278564 - DNA, 122 bp, Homo sapiens
gggggattagggctttaatatatgtgtttgggagtgacacaaacattcagtccatagcaacgtggtattgtcagtattttaaatttcaaaggcttttatgttataggaaacttgactagaga

SEQ ID NO: 278565 - DNA, 122 bp, Homo sapiens
cacaccatctagaaaacatttccctccacctggctctctgggatgagcaattcatgctcccgggctctctgcttcggactcatagcgagatacaggtgctgtgggaaggggccctgcggccc

SEQ ID NO: 278566 - DNA, 122 bp, Homo sapiens
ccatctgctttttgtctcaatgaatgtgactcctgtgggaacctcccgtcagtggagtcacgtggcacggggcctctgcaactggtttactccctgtagagtgtccctgaggccacctaagc

SEQ ID NO: 278567 - DNA, 122 bp, Homo sapiens
agccgtgagggaactccgccaccctgaacacgtcgctctgcacccgggtgatgttgtccgcgttgtcgcataggatcctggccagcgacgtctgcttgatctgagtcagctgggccggggag

SEQ ID NO: 278568 - DNA, 122 bp, Homo sapiens
cctgttggtgcccatgtctgttgctatgcgtgtctgttgttgcgcaggcgccttgctgcccgtcttgtgtccgcacagaggtctgcaaggagagagagtgtcttcattctttccgccatctt

SEQ ID NO: 278569 - DNA, 122 bp, Homo sapiens
tcccctcccctctcctcttctcttctttgcttttctttttctttctattatagaggcgggcgtctggctatattccccaggctgtcccgggttcaagcaatcctcccaccttagcctcccag

SEQ ID NO: 278570 - DNA, 122 bp, Homo sapiens
cggaagggagggcagcaacaactgcctccatctctggaaaatggagggaaatgtcagtttcggcctggcaggtcagcctctgtcctaagcctcgctaatacccagcattccaggcaccataa

SEQ ID NO: 278571 - DNA, 122 bp, Homo sapiens
aaagcctcccctgaccagcaccaaggggctctgtttctcctatttggcacactgggttctcgtgtcatttaaagtcagataatcctgtgtggccaaagtcagatactctatccatctgatca

SEQ ID NO: 278572 - DNA, 122 bp, Homo sapiens
tgctccggctccgacaccaaagatactaatgactaccacattgccgaaataaatcaccgtcgctcaggaggggctccggcccggccggcggcctccaaacttcatttcacgaatttcccctt

SEQ ID NO: 278573 - DNA, 122 bp, Homo sapiens
tctttgcactcaaagggcttttctccagtgtgggtcctattatggcgaataaaagtagaccggtgggtgaaggcctttcgacattgactacactcatagggtttctctccagtgtggattgg

SEQ ID NO: 278574 - DNA, 122 bp, Homo sapiens
agtgtaggtcctgcagaactccaattaatcagggctgcccagtaatcctaatgccaaacccgtgccccagaacctcgatttctccccagacaccaactccaagttcctccacggggatgtgg

SEQ ID NO: 278575 - DNA, 122 bp, Homo sapiens
atagtcccattaccaagtcccatgtaacttggcaacttttcatcgaggtggcctcgggaccgaataagcaaggagaaaatacagcttcttgccttggcacttcacgtaggacctgatgctcc

SEQ ID NO: 278576 - DNA, 122 bp, Homo sapiens
gaataggaggcagggatataccaggaaagaaaaagatgctttcacaggactaatgggggccgtaatatctttgcaaagatgaggtaatctgggcatctggaaggattttttaaatgcaagaa

SEQ ID NO: 278577 - DNA, 122 bp, Homo sapiens
cgcccgcagcccagtctgctcccggcagccttgggcgcagccccacgtgaccccgccctacgccccgcctccgctccgcagcgacaagggctagtcgcgcaagatcttctcaccattggtcc

SEQ ID NO: 278578 - DNA, 122 bp, Homo sapiens
cgcggcaggctgctgttggagcgtgctgggctcagaagccgggttctagctaggaaactgcggagtggccaaggagttcctggcgcgaggcacgccacacaaccctcggatgcgaagacggt

SEQ ID NO: 278579 - DNA, 122 bp, Homo sapiens
gtgaagctggaggaaaagggatcgaaccggatgcggcgaggcctgaactggcctggcgggcgccgacccgttctcctctcactcagatcagcgcccctccaccctcccgttccccagtccag

SEQ ID NO: 278580 - DNA, 122 bp, Homo sapiens
tcaaatccagcaaggtttagagatgtgtacagtgttactaagtgggtggcacaggctttacgttgccagttcatctgcccaaaattgtttccaccagatacaatggcctttgctgcagccat

SEQ ID NO: 278581 - DNA, 122 bp, Homo sapiens
attcttagaaaactaagcaatgccctgtcacctccatttcctgaatcccttatcataaaacgtctttcttcctttgaaatcttttactttcttttccattcccactgccctattccaggatt

SEQ ID NO: 278582 - DNA, 122 bp, Homo sapiens
aacttcccaagagattaccggagaaactcgcctcctcggagccttgggcttccaccagagcgctctgggccctcgcatctgcccgaccccggccggcttctgcgaagaggggacgggcggga

SEQ ID NO: 278583 - DNA, 122 bp, Homo sapiens
agcacgtggggagaagcactcatccctccggtcttcaattctatctgctgagcctgctcccggtagtcaagaaggccgcagcccagcctgacacagcagagaagcatcgccccgattacaag

SEQ ID NO: 278584 - DNA, 122 bp, Homo sapiens
aggatggtctagatctcctgacctcgtgatccaccggcctcggcttcccaaagtgctggccgagtgccaccgcacccggccgaaaggtattttttttaacagaagaaaatcagattattcct

SEQ ID NO: 278585 - DNA, 122 bp, Homo sapiens
tcatcacttatggataggtttccacttcccagtcacttgaaggtaaacatgcttacgtggcgactttttcttttccctcccgagtgtggtttgtggtagaatttgagggaaatataaatgag

SEQ ID NO: 278586 - DNA, 122 bp, Homo sapiens
ttgtgttacatggcaagtcaggcatcggcaccgtgcgtattttgcagcgtatatgctctacgtggggagctttgtaaaagtgttttctgttctggtacttctgttaacagcatcacagccac

SEQ ID NO: 278587 - DNA, 122 bp, Homo sapiens
catccatccctggtgaaagagtaaaaccaaaggttattatttcctttccatggttatggtcgattgccaacagccttataaagaaaaagaagcttttctaggggtttgtataaatagtgttg

SEQ ID NO: 278588 - DNA, 122 bp, Homo sapiens
aagtcatcgggtagagtggttatataatttaccatgtaaacttgcataaccttcaaaggccgggtgcggtggctcacatctgtaatcctagcactttgggaggccaaggctggtggatcact

SEQ ID NO: 278589 - DNA, 122 bp, Homo sapiens
ccatccagtcattcccttcggttaattattagcagctctggtaaaagttgttagtggggccgttggaaacaacaaactgaaaatatgtttttagtttaaccataaagttcatttgtttgggg

SEQ ID NO: 278590 - DNA, 122 bp, Homo sapiens
cccggattgtgacgtccagtctggttgctgtggcaaccccatcccatcgttccggcagcgcgactagttaacagcagagaacaagttgggggactagtcctgagccgccgggtgagggtggg

SEQ ID NO: 278591 - DNA, 122 bp, Homo sapiens
cagcctcaatctccactctcagtgacttactgcttccttctcctggggacctcaggaaaacggaggattctgacccccacacctaagataataggaaagagcctccctcccccaggagaggg

SEQ ID NO: 278592 - DNA, 122 bp, Homo sapiens
accacggggccagagggggacacctggtttgttctgtgcctgccctgcctatccgaccaacgccccacacaacctgctcacgatgggacctcagaggctgaggcagcctggtcctgggccct

SEQ ID NO: 278593 - DNA, 122 bp, Homo sapiens
tcagaattcgggcagtgactattgatagagtgatgagctatctgaatgcttcctaaaaagcgaggtccctccaaaccgttgtcatttttataaaactttgaaatgaggaaactttgatagga

SEQ ID NO: 278594 - DNA, 122 bp, Homo sapiens
aagagccgcggctgcgggatccagcgggaggggcggggcgccgggcgaggcggggcctcgcgctcagccttaaagggccagggccatagtggcgcaagctgggagagcacgaaaaggggcac

SEQ ID NO: 278595 - DNA, 122 bp, Homo sapiens
ggtggccaaggctggagtctactatgtcttctttcaactagagctgcggcgcgtggtggccggcgagggctcaggctccgtttcacttgcgctgcacctgcagccactgcgctctgctgctg

SEQ ID NO: 278596 - DNA, 122 bp, Homo sapiens
agcagcacagccagagtctatgcaggcgccgggggctctggttcccggatctctgtgtcccgctccaccagcttccagggcggcttggagtccgggggcctggccgcggggatggccggggg

SEQ ID NO: 278597 - DNA, 122 bp, Homo sapiens
aaggaggggtgccacaagtaccaaagcaccgacacttgagtctgggctccgagtggtgcacgtttagccaagccacctcccagctctgagcttgggtttccttaaacagcaaatgggaggaa

SEQ ID NO: 278598 - DNA, 122 bp, Homo sapiens
ttcgaggcgagggtcgggaaatccatggaagggcggggccggctacctacccagagacgccgccatggcaacgccgctgtcttctacttccgggaacgaaggggcggagacccataatccgg

SEQ ID NO: 278599 - DNA, 122 bp, Homo sapiens
atagagatcaaggaaaacgaatgccacgcaggtcaccaggcttggaaaatagaaggcacccgaagttgttctacgtggctgtccccagccacccattccacccgctcgacaagggatcctgg

SEQ ID NO: 278600 - DNA, 122 bp, Homo sapiens
tctcccgacagagaacagcgtctgccaccggcccgggtcggcccaagcacacaatgcccccggtccagccctgagccctctctgtaggtggggcccagatccagccttccttgagcggagca

SEQ ID NO: 278601 - DNA, 122 bp, Homo sapiens
atctaacccttgaaccttccacgaaccctgttgtcaatacctctgggtttccgccggttacgcttaattttgacatatcggtcagactggtgccggataaacttcttggttctctttttgac

SEQ ID NO: 278602 - DNA, 122 bp, Homo sapiens
gccagccccagcaatgggttctttcgagcgacaagagctgtaaccagtcacggaacagcacgttaggcttgcgagccaatgaggagcagagggatggttggagccggcgggagcgcgagggc

SEQ ID NO: 278603 - DNA, 122 bp, Homo sapiens
gggcggagccgcccagcgctgaatccaaatcgtatctaagctattttctagctctgacatcgtatacatcactgcatacgtgaatagcatgccaaatactgtataaaccaatactggttttt

SEQ ID NO: 278604 - DNA, 122 bp, Homo sapiens
agtctttcttcaaagtaccgccaggcggtccgcgcctgcgcgcccctcccgcccctcctgcgcctgcgcgcctcttctgcacccaccctcttgcgcctgcgcgccacttatttcacctcctg

SEQ ID NO: 278605 - DNA, 122 bp, Homo sapiens
cattgcgactaccacttcctgggttcataggattctcagcctcccgagtagttgggattacgggtgtctgccaccatgcccactgaattgctttgtgtttttttagtagagatggggttttg

SEQ ID NO: 278606 - DNA, 122 bp, Homo sapiens
agaacgcgggggagactgaagagcaactgggaactcggatctgaagccctgctggggtcgcgcggctttggaaaaacaaatcctggccctggactcggtttcccagcgcggtcaacgcatct

SEQ ID NO: 278607 - DNA, 122 bp, Homo sapiens
ctcccacccatcgccaccgcgtccacactccgccgcattccagagaaaaagaaaaggccacggcctcgtaaagctcccagctggcccggaccccgagctcctcccggttagaagccgaagcg

SEQ ID NO: 278608 - DNA, 122 bp, Homo sapiens
gggcgccctaccctttcccaccggtgcctacggtcaccacctcttcggctaccctttccacggtcattgccaccgtggcttcctcgccagcaggctacaaaacggcctccccacctgggccc

SEQ ID NO: 278609 - DNA, 122 bp, Homo sapiens
ctcgggtattccagggtactgcgcttcctcccacatcccagtgcacgttaggtgaattggcgtgtctaaattgtcccagtgtgagtgagtgtgggtgtgtatgtgagcgcaccctgtgatgg

SEQ ID NO: 278610 - DNA, 122 bp, Homo sapiens
ttcaaatgtgcttaaaactgcaatatcacccaatttgaaattgattacagggaatgtaagcggctgtttttaggctattactaaggttttctcaaagagttaatggagattttgtttgttag

SEQ ID NO: 278611 - DNA, 122 bp, Homo sapiens
gcccagtgctagatgtgcaggtgaagggatcctggggcatcttttctgggcgggggtgggcgtggaggcaggggatggaccaggtgacggctgccgcatgggtggagactatctggctctcc

SEQ ID NO: 278612 - DNA, 122 bp, Homo sapiens
agccttcataggaatccttttctgattacagccacagcaaaccacgggctgttgacttagcgtttctgagctgctaattagagaaggaaattctatctactcacccccaaagggcaagtgaa

SEQ ID NO: 278613 - DNA, 122 bp, Homo sapiens
tcggccagccagactctgagtgaggacatatgaaaggtgaccagccactggacactcagccgcaaggagctggagcagcgggaggcggcatggaggctcgaggaggagtccttcaacgccta

SEQ ID NO: 278614 - DNA, 122 bp, Homo sapiens
caaaaggcctcaggcgcgaggtgcgtgagctggttgcccctgagcgagagcaggccgagacgtggcaggtgctggaagatgcgcggcccgaggtgctgcaggttgttggccgagaggatgag

SEQ ID NO: 278615 - DNA, 122 bp, Homo sapiens
gcgtatttatcttttaaaactccgtctgtttgctcgttccggctgataatttatactttgcgcagttcttagcgcttagacacggttcctttactaaagaccatttgtaggagattaggtgt

SEQ ID NO: 278616 - DNA, 122 bp, Homo sapiens
catgcaagccccggggctccccacgccaacccgtggccctgcgctcaggccctgcgctcacgctgcaggcagtcggcgttgagcaggtcctggcacttctcgtggcacttgacaccgcactc

SEQ ID NO: 278617 - DNA, 122 bp, Homo sapiens
ggttttgggggggcagtgggtgcaaggagtttggtttgtgtctgccggccggcaggcaaacgcaacccacgcggtgggggaggcggctagcgtggtggacccgggccgcgtggccctgtggc

SEQ ID NO: 278618 - DNA, 122 bp, Homo sapiens
ttggcaaacataggtgagaggtatgcaggtcttgaaaattagaagaaaaaactcttgtagcgttttattttttcaacgaaaatccacaagatggcagtagaggaacaccctcagaatgggtt

SEQ ID NO: 278619 - DNA, 122 bp, Homo sapiens
ccacctaccgctaccacgtcctgctggggctagtcgtgtccctgggcggcttgacggagtcgacggtgaggaggcgtcgggctggctggggcaggaggtggctccaggagtgcctggtgctt

SEQ ID NO: 278620 - DNA, 122 bp, Homo sapiens
gttgctgggtccaccgacccttaccctcagcgagagaagtaaccgtaagtctcagcttcgcggtacagatgtgtttgaggctgcctctacccatttgtggctccgagttcagagctacctac

SEQ ID NO: 278621 - DNA, 122 bp, Homo sapiens
ctccaaagagagacttaggaatgtgtttgcttaacaggtgctacagttgattcttctaaacgataaagtccattgccattctcaataattcccaagagtcttatcctgtgtgctatatttaa

SEQ ID NO: 278622 - DNA, 122 bp, Homo sapiens
tgtgggtgtggcggtgctggagctgctcaatttcccgccgccatcctccccgacgctgtccgtgtcctccaccagcctctgacccacctaccaccagaggcctgcagcctcccacatgcctt

SEQ ID NO: 278623 - DNA, 122 bp, Homo sapiens
gggcgcgcaagctctgcggccttcgttcctctcttccgtttgccttcactcttccttctgcgcatgtgctcagttcgctatccggctgcttgtacctggttcaggaggttcaggcagaggtt

SEQ ID NO: 278624 - DNA, 122 bp, Homo sapiens
tttttctttttgtctgctgaaagctgtgacctaattgttttaagcacttcttgacaatttcgccaaacccatcctgaaaatattcacataaagtcctaaaataggatgttgtgagtgtaata

SEQ ID NO: 278625 - DNA, 122 bp, Homo sapiens
gtgggcggcgagccccgcagggctgcaatcgttccggggtgggggccgggacaggcaccgcgggcgcaatctgagcccctgcccacgcgcagcggcctctcagtcccgccggcttaggtaac

SEQ ID NO: 278626 - DNA, 122 bp, Homo sapiens
ctccttcccagtgttttgggccggccctttgctttccctcctggagctgtggtggttttccgggtcgtggcagcatcctggggtttgcttcctttcggttgcccagggtcttaggtgttagc

SEQ ID NO: 278627 - DNA, 122 bp, Homo sapiens
ataagcttttgacagcaatttcgtgttacggtatatcctgctggcatcttggtggtcacacggagctccccaccctccagtgaagatggctgtccacaactaccaccattgaaaccaaaagt

SEQ ID NO: 278628 - DNA, 122 bp, Homo sapiens
aggtgggcggaccagcccgggaggactgacgttggagggtgagaagtgagtgtccggcaccgctctctgacctttatccgtgcagcaaatgtctagtgcgtagggtcgcaaagtgggagtcc

SEQ ID NO: 278629 - DNA, 122 bp, Homo sapiens
acgctaagtaaaatatgccagtcacaaaaagacaaatactgtatggttccacttacgtaccgcaccgggagtcatcacaattcatggagacagaaggtacaatggaggttgccagcggccag

SEQ ID NO: 278630 - DNA, 122 bp, Homo sapiens
cccacttgtccttgcagagagctatgacttctgcggttgccttcacatctagttagcacacgcactctacaacagctttcgttttgaaatgagagagaacgcagggagaccttctaaccttt

SEQ ID NO: 278631 - DNA, 122 bp, Homo sapiens
ctccggggtggagggcggccggtccaacagaaccgcttccttccactcagctacagtcctcgctccaagatcgtcaccattgctccctgcggttcctttatggtaggcctggactccaccgt

SEQ ID NO: 278632 - DNA, 122 bp, Homo sapiens
ccagcacttctggaggccaaggtgggaggatcacttgaattcagcagttcaggaccagcccgggcaacatggcaagagcctgtctctacaaaaaatagaaataaagttggctgggcatggac

SEQ ID NO: 278633 - DNA, 122 bp, Homo sapiens
ggttctctcccctgtgcttcaccccacctccccgtccctagccatttctagtctccaatccgggtcttacatttaccctggctccagagcacagaccttcctgcagttgggccggcgcgttg

SEQ ID NO: 278634 - DNA, 122 bp, Homo sapiens
ttgattggaatagtttcagaagtattggtaccagttcctccttgtacctctggtagaattcggctgtgaatccatctggtcctggacttttttttgttggtaagctattgagtattgcctca

SEQ ID NO: 278635 - DNA, 122 bp, Homo sapiens
cgcgctggagatgggtttgaagccctgtcctgaaaaagccggcccggagtgggctgtccccggtgtccctcgagttctcatgctgtcattcaagcagcagaggaagaaccgggtctggctcg

SEQ ID NO: 278636 - DNA, 122 bp, Homo sapiens
cagattctttttgaagtctcatctcctgtgtgttctgattactttggcttaccagcaggacgactgttttgctaaattaatgcacaagacatgtgaaggagatgaatgcccttcctgttgag

SEQ ID NO: 278637 - DNA, 122 bp, Homo sapiens
ggttgaactcattcctcgcccagctggacatagagttgactgcctcagtgggtcccacctcgggggtgggaaatgtaacctcatgagggccactgtatggttgggcagattcacagctgctc

SEQ ID NO: 278638 - DNA, 122 bp, Homo sapiens
aagtttctgtccttgccaccgcctcctcctctgcctccggtggctccaaaataccaaacacgtccttgttcgtgcccctgactgtgaaacctcagggccccagcgccgacggcgacgtcggg

SEQ ID NO: 278639 - DNA, 122 bp, Homo sapiens
atgatttggtgaaaatctaagtaagctggtccactgatgaaaaacctccttccttgcatgcgcgtccgtgtgaagagcccactaaacaggctttgtgtgagcaataaagcttttaatcacct

SEQ ID NO: 278640 - DNA, 122 bp, Homo sapiens
ctaacaaatgtgctgttctggtgcggcgatgctgacggcaggagagtgtgtgtctctgtgcgtgaatatgcatgcgtgtgtacatgtaagcacgtgtgtgtgagccctcggttctttcccct

SEQ ID NO: 278641 - DNA, 122 bp, Homo sapiens
ccgtacatgctctggagggtgtgagaccctggccccggccccgcggtcagcccagtcccccgagccccgccccgccccgaccaacccgcggggattttggcctcaactgaaaatgaaaccgg

SEQ ID NO: 278642 - DNA, 122 bp, Homo sapiens
cggccggccaggcggcagcgcccgccccgcgctccagaccccaccctccggcctagccaccgcccctccgcgcagcccccgcccccatttggccgctcgcaaacttgggggcgaacttggag

SEQ ID NO: 278643 - DNA, 122 bp, Homo sapiens
agaggaaagcgagcgtgggtgtctggggcagagcaaaggacgagggagtggctaaacctccgcccgccttagaacgaaagctggccgttccgtttcacaaactgcgaacctgaaacttcgga

SEQ ID NO: 278644 - DNA, 122 bp, Homo sapiens
gaaaactaaatcccagaatccgaggcttggcctcaggcccacctccatgcttggctgcctcgctaccccagcatcacccaggctgcggctccgtccctgggatgctcgggaagtggcgcgca

SEQ ID NO: 278645 - DNA, 122 bp, Homo sapiens
tgaggcacggtcacggtcatgagtgcccttggggaggtcagggagggggcggaggggatacgtactactccatgaccaggacaatgtcgttcttagactcgaaggcatcgtacagctggatg

SEQ ID NO: 278646 - DNA, 122 bp, Homo sapiens
gcactgggcccgcccctccgggattggtgccctgctaggggtggttgcctgtgacgtcaccggacgcgcccgcttctcgctggagtgcgcaccgagcggcagtgacttcgccgctgctgtag

SEQ ID NO: 278647 - DNA, 122 bp, Homo sapiens
tgctgatctcaaaataccaacttttggtttcacagattgtcttttttctgtttaccatgccgttgcttttcgctgtcatctttatcattttccttccttctacttgggtttgatttcctttt

SEQ ID NO: 278648 - DNA, 122 bp, Homo sapiens
ctaggtcgccactgccggcgccccagtgcaggagagggcactgagtgtgagaatcacacacggctggagtgggaaggggctctgccaccgtttaccttgcagttgaagccgaggaccgcgac

SEQ ID NO: 278649 - DNA, 122 bp, Homo sapiens
gatgatggtgagagtcggcttgagatcgacggccgccttcatggtgccaggagtgggggacgtacgggatggtagcaagtttgcagttactgttgtttttctttttaatgaggattagtaac

SEQ ID NO: 278650 - DNA, 122 bp, Homo sapiens
ccagctcctttttcacccagccataccagccgtgggtggtcacatccccgcctccgttcccgggaacaatcactgccttgctaggagaagccatgagtgcagcgaggccagagttccccagc

SEQ ID NO: 278651 - DNA, 122 bp, Homo sapiens
ttaatgaaataacactacccaggtacaacaaaatcaaatcactcttagaaacatcttttacgcctgtgcctttaagagagtgtattacacacaccacagtggttgttttttgggtttttttt

SEQ ID NO: 278652 - DNA, 122 bp, Homo sapiens
tactgaaaccaaaatttgttcaaagtttcattaagtgcccttttggagctgtgtcttaatcgactgccagaagttgaataaaccaatgaggaaacactgtaccctacttaaaagtagcagta

SEQ ID NO: 278653 - DNA, 122 bp, Homo sapiens
accaggccctacggctgtgggccaggggcacctggacgcaggcgacgggcctgggctgtgcgctgctagccgcccacgccgtggtgctctgcgcgctgccggtccacgtggccgtggagcat

SEQ ID NO: 278654 - DNA, 122 bp, Homo sapiens
caatgaccattcggataaggtgagctaaagcttcaatgccttgaggggcttggcagggctcgggctcatcccggagaagcagccccgctttccagactagcagttcccagggatgggtgtgt

SEQ ID NO: 278655 - DNA, 122 bp, Homo sapiens
tggggagctgtatcattgagtgcaatatataccaggaacattcaggtagttaaaagtttgcggcttgttcatatgacctgttttgcaaatgttaccagaagaatgtataattcaggtattgt

SEQ ID NO: 278656 - DNA, 122 bp, Homo sapiens
acaaatgtttatcagcgcaaagaaccaggaatcacgcagcagctggctgggccccatatgcggcctcggccgatttctgtaaacacgcccactgtggcgattccaagccacacgtgatgccg

SEQ ID NO: 278657 - DNA, 122 bp, Homo sapiens
cgcgcccccagcgggaccgagcgtgacccagctgcggccggccagccatggagactggagcgctgcggcgcccgcaacttctcccgttgctgctgctgctctgcggtaagggggcgacggcc

SEQ ID NO: 278658 - DNA, 122 bp, Homo sapiens
tttaagtacacaccactttcttaccatgcacgcgtgtttaggtccacagcactttatcaccgtgcacatgtgtttaggtccacagcacattatcaccgtgcacgcgtgtttaggtccacagc

SEQ ID NO: 278659 - DNA, 122 bp, Homo sapiens
cgcaaaaattcaatgggagagaggtcccgagtcatcaaagtcccagatgtggtgagcccccggaaggaaaaacggtgtcgtccttaggatgtccggaacaagagctaggcttccggagctag

SEQ ID NO: 278660 - DNA, 122 bp, Homo sapiens
tcgggtaagcatggcatctaaagctctcgtcatcgtgtgctcttctcctgatggtgttgacgacccagtgttaacagggaatggttattctgtacgggcatctgaactgaaaagtgagaaga

SEQ ID NO: 278661 - DNA, 122 bp, Homo sapiens
cctgtgccttctcagtaggattagcgtcacggtcgaatgaggtcacgagatgccatctcccgggcacttgtatggcattaaaattagggtcccagccctgtccagtcatcttgccaaacctg

SEQ ID NO: 278662 - DNA, 122 bp, Homo sapiens
gctagtggctgccttactgggcagaccaggtctggattgtaaatacgttcagacgttccacgcaaaagcaaagttccctgcagacgctccattaagttctgggtgcaaggaagcgcggatcc

SEQ ID NO: 278663 - DNA, 122 bp, Homo sapiens
ttgggaacctgggtttgttcatactcgatgaccacacattttgttgtttcagtgtgacgccggtgagcagtgtgcagtgaggaaaggggcaaggatcgggaagctgtgtgactgtccccgag

SEQ ID NO: 278664 - DNA, 122 bp, Homo sapiens
gaaggaggtgagcagtgtaggggacaggctgggttaagcttatccattgaccatatctatcgagtgccacctctgggcccagagctgagcccagacaggcgcatgggtcagacaaggcccag

SEQ ID NO: 278665 - DNA, 122 bp, Homo sapiens
gctgcgtagcaggaattgttctaaatgctgagaatatagcagcgaacaagactgatagtgcgcctgctctcacaaagaacttacattctgagggggtacgacagcaaggagataatgagcaa

SEQ ID NO: 278666 - DNA, 122 bp, Homo sapiens
aacccatcagttgtcagtgctatacagctaaactggagaaacaactggtattcaagatgacgtaagtccgatgttaagcatggactcatggagaaccaggacagcagccttgcccttcctga

SEQ ID NO: 278667 - DNA, 122 bp, Homo sapiens
tagacatcattagtaacatacccagttttatttctgtccaggaggctgggtgccaaggatcgaatataagcacaggtacatataagcagcaagattacagtcaatagactctgaaaattgaa

SEQ ID NO: 278668 - DNA, 122 bp, Homo sapiens
tcggttactcaccatggcggcaggcagcggcggcagcctaaaggaacgggagaggccaggcggtgccccgccaagcctgggatcgccgagggtagttggaccacagaaaatggggaaggagg

SEQ ID NO: 278669 - DNA, 122 bp, Homo sapiens
ataaggtaccaggcacctgaacgttcctccacacacaccctgtgccgtcgaccccagccccgggaacagggtgctcccactaggggtccgaccctaccagcacccctggacgcggagacgcg

SEQ ID NO: 278670 - DNA, 122 bp, Homo sapiens
ttcccccacccctcctttatgttttctttcttgttcctctaagaaatgaaatatagaagacgaaaatataaactggactacagcagggtgcagtggtgcatgcctgtaatcccagcactttg

SEQ ID NO: 278671 - DNA, 122 bp, Homo sapiens
atgggagaagcttggtttaagtggtcaccaaagctactcctgggaagtgctggggacacccggtgctgctgcggtgacagggagtgaccagatgccctcaagcccttgtagccaccacacag

SEQ ID NO: 278672 - DNA, 122 bp, Homo sapiens
ttgtcaccttcgaggaggccatggaaaccccaacacctttgccgcctgtacccgcctccccgacctgcaacccagccccacggacaatccagatcgagttcccacagcatagctcgtctctg

SEQ ID NO: 278673 - DNA, 122 bp, Homo sapiens
ggtgctggctgactaacagttgcctggatgagatgatttaggtggtccaggtggccacctcgatgatctaggtgggcaagtataagtttgagaatctatcttgaaaaaagttccagttgatt

SEQ ID NO: 278674 - DNA, 122 bp, Homo sapiens
acccccgccacccgggctgttcccaccagccccgcatacacattccagtgctaaatatagcgaagtcccatgtttacattttcttgatgaggaggctgacctggggcgggacacagagggat

SEQ ID NO: 278675 - DNA, 122 bp, Homo sapiens
ctctccaggacatgcagtgtctgctggagttttggaaaaatgctttctctcgagtcgctgcggggagctcccaggctggacccccccgcacaggtcctccgccatcgccctcccagcccccg

SEQ ID NO: 278676 - DNA, 122 bp, Homo sapiens
gcgcttccggaaccctccccgactcgcgagtgggcggcgccggcggcggagcgtggggcgcgctccctggagtccacagttaagtgacacaatcctgggtttacctttctctgtcgggatca

SEQ ID NO: 278677 - DNA, 122 bp, Homo sapiens
tggtccgctaaccgccccttcctctccttgtctctggggggtaacggagcctggagtggtcgcccattggatgggcatcggaccaatggcgggctgcgaaacgggaggggcgggcctcacag

SEQ ID NO: 278678 - DNA, 122 bp, Homo sapiens
acctgtgccggcaagcacgtccccagcagcagctccccggatgccatcccagccaggacccgtgcggccagccttggatttctgtgttccagtccacattatttagggatttattttccttc

SEQ ID NO: 278679 - DNA, 122 bp, Homo sapiens
cgggccagatgcgtgggagaggaatcgcgcggtcccgtcgcagcgctgcggatcacctcccggctccttctcaggtcccccgacccggacccgctgcctccgtcgcaagtcggcccgcccag

SEQ ID NO: 278680 - DNA, 122 bp, Homo sapiens
gggcacgatgtatttcacaccagagattcaagaaacggactcttgacatcgttcccagaacgtggtgcctttggatagagaagtattcattctgtgttttcttttttccgtagaatgagttc

SEQ ID NO: 278681 - DNA, 122 bp, Homo sapiens
tgggcccggccacagccagcgggcgctctggccctcgcagaagccgccgcaagcgggcatcgctgtccccagggaggggaccccagctagcaccagtagaggtgcagtcaccctttttaagg

SEQ ID NO: 278682 - DNA, 122 bp, Homo sapiens
tcccgccgtctcctcccctttcctgccccaccacccacataccaaacaccgagatgtccacgttgatgtaggccaccgtgcgctcctgcagcttgttgaagaactcctgcgggtgcgagggg

SEQ ID NO: 278683 - DNA, 122 bp, Homo sapiens
tcaattctcattttgcccagggtggcgctgtctccatctcactccacctcagcaaaatgacggatctgaaagcagctgaaccttacattctcatggtagcaggctttggaaagggtgagata

SEQ ID NO: 278684 - DNA, 122 bp, Homo sapiens
cccactttacggcagacgtacccccgttcaccccacgttactagtaggggaccgaccttccgggggcccaacaaagggatgctctgaaatactgggaagcatctaacgaggagtcaagggtc

SEQ ID NO: 278685 - DNA, 122 bp, Homo sapiens
accgatgaactgggacatgtttttcactgcagcttagtcgtctgggtgtgcctggggaggcgtcacaaagagcctataaagggtccccacctacaacgggagtaagagcgctggaaggaacc

SEQ ID NO: 278686 - DNA, 122 bp, Homo sapiens
gtttagacattgttgggtttccgtaatgctgagaaaatagcatgggagccctgcaggaaccgtgccatcactgtgtttctcttatctgagctcggttctcacactagctggagctcttgcat

SEQ ID NO: 278687 - DNA, 122 bp, Homo sapiens
ctgttttccactactacaatctgagtaggtataaaatcagagacttacatgctggaaattcgaattccttacagggctactctccttgatgggattctccaactttggggactgaagagcat

SEQ ID NO: 278688 - DNA, 122 bp, Homo sapiens
cctggagaagtggttataccatgttgattagttatacctgacagtagtaagctgggtattcggtcttgtggttacagcaggagcatggcatggcttctgcctctgagaagtaaaaatccaga

SEQ ID NO: 278689 - DNA, 122 bp, Homo sapiens
accgcgtgaatctggaaagccccgagtttcaacaggcccaaccatcggcggctttgcaggcgcagcaccaagtgctgctctgcctgtgttcccccagacagcccctggttgtgatttgtcgt

SEQ ID NO: 278690 - DNA, 122 bp, Homo sapiens
gcccggcccgcctcggctttgaggcgagagaagtgtcccagacccatttcgccttgctgacggcgtcgagccctggccagacatgtccacagggttctccttcgggtccgggactctgggct

SEQ ID NO: 278691 - DNA, 122 bp, Homo sapiens
tgagaaaggaatgtgaggtcataacagctaatgtggtaggaagagaactaggaaaatactcgtggatgttgaaggttgttctaattatctattgatgcataacaaatgatccaaaaatttag

SEQ ID NO: 278692 - DNA, 122 bp, Homo sapiens
cacggtgcgggccatgagcggggcggtgccccaggacctagcggtgagtggcggccgagtcgggcactcgaggccggggctgcggggcctgcgggcggcctccccgggggcctttgtgaggg

SEQ ID NO: 278693 - DNA, 122 bp, Homo sapiens
tagtctggaacaaaacatacttctgcctaagtcactgaggtctggtgtgtttttcccactcgtggcccttctcagtcaggatcggccacttttcaagtgtccagcgtgactggtggctacca

SEQ ID NO: 278694 - DNA, 122 bp, Homo sapiens
gagaggcggcgttgcaggtccttggaatggccgcggccgtggggagcactgggcggactgcgcgccccgaagggcgcacgtggggcgcagcccttttctgccgccagtacatcggagggcag

SEQ ID NO: 278695 - DNA, 122 bp, Homo sapiens
ctctagaaattacaaaattggcccattcatatttcatccagtttctctccctctgcccctcgccccactagtgaagcatcagtgtgtccaaaacagagacaatggtgagtgcggggggataa

SEQ ID NO: 278696 - DNA, 122 bp, Homo sapiens
gctactgtgcatctgtagcattttgtagatacctttatgacaacatttatcaactgtctgcgatgattggcttctttaacttttttaaaaaaactctcctactagaccatgaacattcaagg

SEQ ID NO: 278697 - DNA, 122 bp, Homo sapiens
ggggagccacgatgtataaatggggggccaagaggcagcagagacactggcccactctcacgttcaaagcatctccgtccagcatggccaggtacatgctgctgctgctcctggcggtatgg

SEQ ID NO: 278698 - DNA, 122 bp, Homo sapiens
ccattcatcttacagatggaaaggagcgcagaaagtttaagaaaaaggccaggtaagaaacgcagggagtcacaaaaagaccaagacttaaacacaggcaaaaagagaaatggactgtttgt

SEQ ID NO: 278699 - DNA, 122 bp, Homo sapiens
aataactggatggtgtcactaaactacaaatactttcaggtaggcctgtgcctttttcagcgggctgcagttctcctgcttggcttgagtcattcgcatttcctgagagctgggtagagggg

SEQ ID NO: 278700 - DNA, 122 bp, Homo sapiens
ggagacgccctgagacggcggctgagacaccgagctgaggccgagggcaccggctcggaccgcctgggccatccccacagggttagcaaagacgcaagagggcgtgaagccacgcggtcgca

SEQ ID NO: 278701 - DNA, 122 bp, Homo sapiens
aaattacatgcaaaatattagtgatatcatttaatatcctagagctcaatgcagtcaaaccgcaataaaagtggtttttataggtaaaagtgatttcatctcttaagatctgaatgtcgaga

SEQ ID NO: 278702 - DNA, 122 bp, Homo sapiens
gttcgaccagaagtcctccagccatgagcggcgcgccttcctgcaggccatcctggagcacgaggagcaggatgaggtgagcccagcaccggccccgacccctccccagcgtgaatggtgga

SEQ ID NO: 278703 - DNA, 122 bp, Homo sapiens
tcgcgggtccggagggtctcgggttgtaggaagtgagggctcgcgggcgccgcacgagtgcgcgtgcacgttagcccggcgcgcgcggcactcatctcacctcgcggaagcacctgccggag

SEQ ID NO: 278704 - DNA, 122 bp, Homo sapiens
gggtcgggtccgggattgcggggcggggtgggggcaaggcggcctccgcaaatctcagggcggctctggccagtttggagcctggggtgacccttggagctgacctcgctggtccctgtcgg

SEQ ID NO: 278705 - DNA, 122 bp, Homo sapiens
cctgctccacagcccctgtggtcttcttcatcttctcagcctgctgggccaggtagaggtcgagcacgggcacaccacggaagcgcacgtccctctctgtgagcgagtttaccatgagcatc

SEQ ID NO: 278706 - DNA, 122 bp, Homo sapiens
aaaaccccacggttccacggagcgcaagccagattctctgaagcagcttccccgttcgtccgaagagggtattccatctgcacagcgggattccctgccagcccaggttcactgcgactccg

SEQ ID NO: 278707 - DNA, 122 bp, Homo sapiens
tgctacccttgaccttgacatttgtcctcaggcctctggagctgcagtggcagaggaaagcgacttcacaggagagagaaaccagattgagcgacattgggagtttgaactggctccaccaa

SEQ ID NO: 278708 - DNA, 122 bp, Homo sapiens
caaacttctgggctcaagtgatcctactgcctcagcctcccaaaatgctgggattacaggcgtgaaccactgcacttagcctttttggttctattgagtatgagtacagaaagcaggtttga

SEQ ID NO: 278709 - DNA, 122 bp, Homo sapiens
aaacacctcgcccatttgcgccgcccactcttcagtctcgcgacacccacccctcagtctcgcgacactcactcctcagtctcgcgagtctgtggtggtgtctttacgtctttgttatttta

SEQ ID NO: 278710 - DNA, 122 bp, Homo sapiens
ggcggtgagtgcactttgcaggcgcaggggccaccaggcctgggaaagacagctttggaacggacctaaacaaagcgtggccagtggggcaaagaacgtctgtcaccagggtgaaatagaca

SEQ ID NO: 278711 - DNA, 122 bp, Homo sapiens
aatcatttctctctgggcccgccttttcccagtctgagccaatccaaatggaggcggaagcgctccgccttcatcgcctggaactctgggaggtgcttatttctgggcacgccccctttccc

SEQ ID NO: 278712 - DNA, 122 bp, Homo sapiens
gctgggagcccacagaactctgctgctgcggacctggccagtaatgttagctgcaaaagacgagaggtagagagaagaaatgatatggggagaactggtgcatccttttttttttttttttt

SEQ ID NO: 278713 - DNA, 122 bp, Homo sapiens
aaggtaatttgaaaaccacctgagactaaactgttggcaggaaatatcacactcatttcacgtgggctttcctaaatctgaacaactaataggaaagagccccgtttaagtgacttcctgaa

SEQ ID NO: 278714 - DNA, 122 bp, Homo sapiens
tgtatatatgtgtgttggggggaggggacttagagcaagagcccgggagagaagaagacgcgctcggggaaaacgctccatgcacatggagaaatttcttgctccgaactgcatgcaccgag

SEQ ID NO: 278715 - DNA, 122 bp, Homo sapiens
ctgttaccaggagattctcagaacaatcccgcagtttccgttacttcctgttaagacagccgctgccactcgggtgctgtgatgggcacggaacagtagtcacggtggtttactggtggtga

SEQ ID NO: 278716 - DNA, 122 bp, Homo sapiens
gaggggggtgcggtggtgccggaagtctgattagataaaagcgagaaatacagaggctgccggttacactgagaaattacatttttttgtaaagagagcatagtgcccgtgtgctcccaaga

SEQ ID NO: 278717 - DNA, 122 bp, Homo sapiens
tggccaccagaagtggaagaggcaaggaaagagtcttccctacgggtttcagaaggagcacggctgctccaaaaccttgattttagacttctaggctccagaattgtgagacaatgggtttc

SEQ ID NO: 278718 - DNA, 122 bp, Homo sapiens
cagcacacactcaaaaggcagctggtcaatttctggtacacagtctagttctgggaaacacggtaaagtggtctcttgagttgaaccccgggccctggcctccctagtgccatgctgtctgc

SEQ ID NO: 278719 - DNA, 122 bp, Homo sapiens
gatgagcttgcggaacacccggggggccagtcggccccgctcccgcatccatcgcggaggcgcggcccctttaaggctcccggaaacggtcccacaggaccggaagtgaccctctttatttc

SEQ ID NO: 278720 - DNA, 122 bp, Homo sapiens
tcctcccctcagaactgacctcacccttaatgctgcctcctaaccctgacccggccctcacgccagacccctgccccagccccattaaggcaaaaatcttccagggacggagctagggggca

SEQ ID NO: 278721 - DNA, 122 bp, Homo sapiens
cctgtcaccttgcaagggaccgtgtggggcttgccgaacttgtttccccagtagcctctgcgcacggggacagtggagacgttggccaggatcatggcccctcggatggcagtggctacctc

SEQ ID NO: 278722 - DNA, 122 bp, Homo sapiens
ttctttttgttttttcaatcttttgttgtgaagaagtaagcataaactctcaataggttacgttttacaagcctctgatgaagttcaaaggacaaccatgcttaggatttccaggacaacct

SEQ ID NO: 278723 - DNA, 122 bp, Homo sapiens
actctgtgactcgactgcttcacgtctaaacattgacgtcactgcgcatgtgcacaaatacggatggaagaaatgcacagcagcaactgtttcccaattcaaacgctggggacattaccgag

SEQ ID NO: 278724 - DNA, 122 bp, Homo sapiens
gatcaccaatttggtgatgttgggaggtggggcctaatgggaggtgttgggtcatggggacgggtgtcttatgaatgactcactgacattcttttggtaatgagtgagttcttgctcttggg

SEQ ID NO: 278725 - DNA, 122 bp, Homo sapiens
ttttcaccagcctaccaccagtcttttgacagctcttccccagagatgctcaaggaagaacgaaggcttgaaagtagtgttttcatcaacttgccccattcagctgttaatgtcaaggtttg

SEQ ID NO: 278726 - DNA, 122 bp, Homo sapiens
ctacgacatagggtgggggctgtcccgtcactgggtggatcacgtcgcatcgcaggaccacgctctccccagctcttgccgtcacaaactcgggctcctctcgcaggccgtgggcgcctgat

SEQ ID NO: 278727 - DNA, 122 bp, Homo sapiens
gctcaccggaggcagcgccggctgcgcacagagacgccacgcccgcaggagctggagcagcgggtccaggacacccacggggtccactcgcccggaccctacttggggagacagaggcacgg

SEQ ID NO: 278728 - DNA, 122 bp, Homo sapiens
tatatgtgtatcagttaggattaggttcagctgttaatgatagaaaactcaaaataacaacggaatgacagaacactcaaaataactggcttaaatgattcagaagtttatttctttcacaa

SEQ ID NO: 278729 - DNA, 122 bp, Homo sapiens
ttacaatgcagcctccaaagtctctcaaatgacaaggcagaatggagtgtgagcactaaacgtactaggcgcctgtgactggtagacttccgtgcttactctgtcatcatctttttgcacat

SEQ ID NO: 278730 - DNA, 122 bp, Homo sapiens
gcattcagggaaaaggatttgggcagtttgtccacaacctgcagagtttccacgaatctgcgcatcccgcccctgccctgggtcctccccactcccggttcccacctgccaggtctgacccc

SEQ ID NO: 278731 - DNA, 122 bp, Homo sapiens
acaaaaacacgtgtcatacgagtggttcctcgtcatgccaccagagagcgccaaagacctcggcctcatgggcgatcccgaaagccggttcccgcccaaggagacaggctttgagcatcgct

SEQ ID NO: 278732 - DNA, 122 bp, Homo sapiens
tccctaagcacaaaggccagctccagagatgctgtgcagagagctgtctgacctctccagcgtcagggccccctgaaaagtgcagcataacccttagtaggacagaaagaccattgtcttct

SEQ ID NO: 278733 - DNA, 122 bp, Homo sapiens
aacgcctctgctctgtgccccggtttccccatttgtaacacgagggagtgtggtgcagcccggccctgtcaggatccttaaggcctcagaagctgttagaaacccagtctttaaaagaagga

SEQ ID NO: 278734 - DNA, 122 bp, Homo sapiens
ggccaggctctgcaggtaggcgtccttggcgagtagagaggccatggcggagacccgggccgttcacgactcacaccttccccgctgcgcgtgcgactctcaccacctccgccggaaaccac

SEQ ID NO: 278735 - DNA, 122 bp, Homo sapiens
ccgggacctccaggggcctctgcacaagaccccacaggcctcgctggcctccctgggcatcggttctgacttccagacctcaggctctgtccgtggatgcccttggaggctgagggaccctc

SEQ ID NO: 278736 - DNA, 122 bp, Homo sapiens
tttgtgcatatgacagtgtatattcttcaacatcgtagactccattttggatgctcccttcgtgactgtgggtcctgtactggaactcgagtgaacacttggcttaaaatccattgctgttc

SEQ ID NO: 278737 - DNA, 122 bp, Homo sapiens
ttaaatccccacaaggaagcaatcgagtcacaattgctaatcctcttgtaagaataagagcgcggagtgtagctggcagattatattgcctgctgtcacgtaacttgtaatagtgaagccag

SEQ ID NO: 278738 - DNA, 122 bp, Homo sapiens
tcagaccataatttctgccagtcacgtgggtaggagacggtttcccatgattgttttccgcgatgtttcttggcgtccggagaggctgagcaccctgcgtgtgccagtggtcacgtgacctc

SEQ ID NO: 278739 - DNA, 122 bp, Homo sapiens
gaaaaaaatccctttcactgtaacttcaaagcgtctcctgcaacactggaggctggcccacgtgtgggcggcccggctcccgcacggtctctgcggcgaggttggactgctctggctgggcc

SEQ ID NO: 278740 - DNA, 122 bp, Homo sapiens
ggacccggggtagtccccgccgcgctgccacccctcccctgttccgctccctcacccccgcgggaggggaaaacaagccgccctccaccctcagccccacgccaggaagcggctgacgcgcc

SEQ ID NO: 278741 - DNA, 122 bp, Homo sapiens
gcacattggaccatgattcctattcattctgagaacggttcttgagtaaaaccccaatgtcgcagctggcaatacatagaattaaatcatcttacattattcattcaacaaatacttgagtg

SEQ ID NO: 278742 - DNA, 122 bp, Homo sapiens
ttgagctcacagttcctcagtaaattgagatggaatgctggggagaggcagcacattcggcgaggccaaaatgagataaacaaggtatcagggctttactctccatatgcaccctggcattt

SEQ ID NO: 278743 - DNA, 122 bp, Homo sapiens
atatccctggtttgccatctgaatcaagggaagagctccctgctgtttaggaagaaaacccgagactctagtaagattttagaggcctattagaagagccagcattttgagagtatagtcat

SEQ ID NO: 278744 - DNA, 122 bp, Homo sapiens
aactcctgggctcaagtgatctgcccgactaggcctcccaaagtgctaggattacaggtgcgagccactgcacctggcctgggttttgctgattttggtattatttatcatctacgtgctaa

SEQ ID NO: 278745 - DNA, 122 bp, Homo sapiens
taatgaatgtgaaaaacatttcaattccgtctcaccctttactgtccatcacagaacacacgctggagaaggcagatgtgcggtgaccccagaaacatcctcgccagggctctgctttgcct

SEQ ID NO: 278746 - DNA, 122 bp, Homo sapiens
ttgttagggaaggaagtgtgccgcgcctacctatctgccccgccttgagtctcagccagtcggcgtctccatcctggcgccagcactacggtctcgtttaaccactgccccgtttaacccct

SEQ ID NO: 278747 - DNA, 122 bp, Homo sapiens
tgtggttgcaggaagcaaggggggctccgtgtgagtttggcagcgggagccttcccaccacggcgctgcctcagccagaggggaagcatggatagcggccactggggtcatggccggctttg

SEQ ID NO: 278748 - DNA, 122 bp, Homo sapiens
cacgggggggcactgcggctacagagccccgagtgggaggccggggggaggcgggggcgccggagctgggctgcctcttacctatcaggtaagactgacccacgggagggaggtttctagtc

SEQ ID NO: 278749 - DNA, 122 bp, Homo sapiens
acgcagctggcaagcgggatggcaaggccccagcaggtggcaatggcaacaagaagaagtcgggcaagaaggagaagaagtaacatggaggccaggccaagagccacagggcggcctctccc

SEQ ID NO: 278750 - DNA, 122 bp, Homo sapiens
cctccagctgtgacctccagctgtggtggctgggaagagctggcccctttgatctaggagcgtggcaaccccctccaggcgccccattaacctccattatcccaattaggcagccctcccag

SEQ ID NO: 278751 - DNA, 122 bp, Homo sapiens
atatttgtaatttaaaagcgccatctagcatgagctcttagggccaattttcaggcagtgcgttggatagcaacaacttcggaggtccccagattgcagagggagacgtggacgtgagtgga

SEQ ID NO: 278752 - DNA, 122 bp, Homo sapiens
cctgatggcagcacctatctgggacactcggcttcctggcagagaagatggtgggtcatgcgctggctcttaaagctgttacaaacaaaaccaaagcaagtggaatggctaagctgcagggc

SEQ ID NO: 278753 - DNA, 122 bp, Homo sapiens
ataccccataaaacaatgaaaacagtgctagaaaaacatcgagagacagaaacatctctacgagttaggccacagttagagtgaaggcagggaaggtttttaaagctgggtggaggggacaa

SEQ ID NO: 278754 - DNA, 122 bp, Homo sapiens
gggggcccggatgtaagaagtttaggggcggagtcctagcctgacgggcgtggtccattccgggccgggcccggaagtagggcgctctccgagtgacagccagcggcggacgggtgcccgga

SEQ ID NO: 278755 - DNA, 122 bp, Homo sapiens
gaccatggccccccggtgccacagccggatcctgcgacgcgccaggtagccacggacgcccgcctggatagtgatcactgcgaggatgcggatctcctctgcagcctgcatggacaccattg

SEQ ID NO: 278756 - DNA, 122 bp, Homo sapiens
tcaggctctggtgagggctcttttcctggcttgcagatggcagcctccttgcagtgttctcgcatgacaaagaatgagcaagttctcaggtgtatcttgttataaagccctaatcccatcat

SEQ ID NO: 278757 - DNA, 122 bp, Homo sapiens
cgaaactgcaccctcctgctcagcaacgtcagccccgagctgggcgggaagtactacttccgtggggacctgggcggctacaaccagtacaccttctcagagcacagcgtcctggatatcgt

SEQ ID NO: 278758 - DNA, 122 bp, Homo sapiens
tggtagaacggaaatagattgtggtctccttttcccactagaaatctcaaaattttagaacgaattttttaatgcatatagctgggaaacagtatcaagctttggaggaccatataaacttt

SEQ ID NO: 278759 - DNA, 122 bp, Homo sapiens
aagtgagggacataatatgcaatgtgtcccaaccaaatttgaccctagaagacgtttcttcgtggagaatctcttacaggtttggtgctctgcaagacgcagattaaagccccaccctttag

SEQ ID NO: 278760 - DNA, 122 bp, Homo sapiens
ggctgcctggactagttcctcctgggggtacccactggagctccctgcctcacacctcaacgaaaagcctcctcaaccagaagaatctgagctgtcaagcagggacccccttttctatactg

SEQ ID NO: 278761 - DNA, 122 bp, Homo sapiens
cagcggcagcagcgcaagggccaggccagccgggaggaaggtgcctgcagctgagggctgcgctgggaagagctggggctgggacccgggtcggcagctgcagcctcctctcctggcctgtc

SEQ ID NO: 278762 - DNA, 122 bp, Homo sapiens
tcgcgaagctcccgcccaagccgaccacgtgccgcgagcccggcggggagagcccactcccgcgccccttccgggcccactaccccgccgggctgtggcccatcgccccagtgcctggtagc

SEQ ID NO: 278763 - DNA, 122 bp, Homo sapiens
gggaattcatttatataggcaacaagtatttattgaatgcctgcctggggtggggactgtcgagggcaatggagtcgtagcagcagacatgacttgcaggagtttcctgctctcttagagct

SEQ ID NO: 278764 - DNA, 122 bp, Homo sapiens
ctttccagggcatctggtggacgtgagcggcaccgggaccctttcccagagctaccagtacgaggtgtgtctgacgggaggctctgaaagtaatgatttcaagttcttgaagcctatattcc

SEQ ID NO: 278765 - DNA, 122 bp, Homo sapiens
ccgagcctgctctttgcgctggcgccactccaccaggttgaggccgttgtcgatgggcagcgtgacattcctcttgcccacggtggggttgacggtgccagccagcaagtggggctcagtct

SEQ ID NO: 278766 - DNA, 122 bp, Homo sapiens
cccggcgccgcagggtcccgcgctcctccgggacgccttcttccctcagcaccgacactccgctcaccgggaccccctgcacccctacgccgtcccctggcagtcctccatgccccagtccc

SEQ ID NO: 278767 - DNA, 122 bp, Homo sapiens
ccaacttcctggttaatgacaccccaaacctgccccttccacattttctgtgtctgttcacggcagctacatccctccagctgctctggccaagaactcctggttcacctttgattcctttc

SEQ ID NO: 278768 - DNA, 122 bp, Homo sapiens
gaacgctataaagggcgccagtgagaggggctggcctcctcttgccacgaggtcagacggcgagttcttagagaaaaaggctgcttagctgctgcttatcatgtaacctcaaaaggaaactg

SEQ ID NO: 278769 - DNA, 122 bp, Homo sapiens
tagcccattatctctatcttgaaattccacccagaacttcaccatttctcttcacttccacggctgacaccctggtccaagccaccatatctcacgtgcattaacctaacagcctccacacc

SEQ ID NO: 278770 - DNA, 122 bp, Homo sapiens
agcctcaaattcagaaaacccagccagaccttggaagttaagaaggtggaaggcagatcgcggaaccagtgttctgatagttgtggttctctgagggaagccaattctggggaccggtagtg

SEQ ID NO: 278771 - DNA, 122 bp, Homo sapiens
tgccggtgtctgctaggtgagggaaggaatgaggggaaggaagggccgggagaggcgctacgtgggaaacaagggacctctccaagggcgtggagaggtgagtgcctcaagggcagaatgga

SEQ ID NO: 278772 - DNA, 122 bp, Homo sapiens
tcatcattttgaccagcaacaaactcccactcccagggtattgtttaagtgaacagtgaccggcctctatgcttagggaataaaagcggggttgtgggagaggggcccagggagcaaacgtc

SEQ ID NO: 278773 - DNA, 122 bp, Homo sapiens
aattccagctgcattgcctcggtcttcacaatatgttttccctgtgtgtatctctgtgtccgtgtcttcacaaggctctcttaaaaggacatcagtcaatgaactcagcacattctcatctg

SEQ ID NO: 278774 - DNA, 122 bp, Homo sapiens
catgacatgccacctcaactgtagggcacggctagctggctgacttagctgctgtaacaccggatttttgcaagactccctgagtatttctcgtggacttgcgaacaaatctgagcaagaaa

SEQ ID NO: 278775 - DNA, 122 bp, Homo sapiens
ctaccgatattcctctgagaatgctggaggatttcacttttctgttattttgaggtagcacgattgtgtaatttcctttggccaatgaaatgtgaatggtgtgtcacttccaagcagaatta

SEQ ID NO: 278776 - DNA, 122 bp, Homo sapiens
tgtgcaaaatttgcatggtgttaccccatgcagagacaacttgggttgtgtgccaatggacgtttcagggcacttctcaaaggagggagctaagctgaggggcttggcagggggcagactcc

SEQ ID NO: 278777 - DNA, 122 bp, Homo sapiens
acggtgaaggtggggcctatcagagagtagggtggggcctggaagacgtgatgattcaaacggactaatgatctgggcgcatctggcagaagtctccaatgagcagtcagttaacaaccaat

SEQ ID NO: 278778 - DNA, 122 bp, Homo sapiens
attggccaaatcacacccagcagagggaagggagtggaggtcccggtgtgggggtcccggcgtggggtggctgtgcccagctggaatgttttgcatggtgatttgttagagggatattgagc

SEQ ID NO: 278779 - DNA, 122 bp, Homo sapiens
cgtccgtactatcgccctgtgcctgcggatcccggtaacattgcgcggcaggccccaggccggcctccctcagcttcgcggactgtctgggccgggggtctcaaccttgacttcagggccgg

SEQ ID NO: 278780 - DNA, 122 bp, Homo sapiens
tgtcgtcggcggctggcctgtccagggttcaccctgagcatgggcacacaacggctttgtcgtcggcggctggcctgcccggggttcaccctgagcatgggcacacacggctttgtcgtcgg

SEQ ID NO: 278781 - DNA, 122 bp, Homo sapiens
gtcggtggctgctggcgaggcggcggcggcggcctaccgggttttccccccaaaaggcttcgtaaccactaatgtgccctttgtggtctcaagcctgggccgcgtttcccctagacctcctc

SEQ ID NO: 278782 - DNA, 122 bp, Homo sapiens
ctgaaacgagcaaggctcagacgcctaaaccctgcttggcatgccgccttcgctaccccgcgagctacttggttgaggtcctgggcatctgggcccagaagggagctcccctggctgtgtag

SEQ ID NO: 278783 - DNA, 122 bp, Homo sapiens
gtttccactctatcgtggaggagactgaggggcccagaggttgttccttatccaaggggccgcagttactaaaaggcaagatttgaacccagggccgcttccagagcctggctctaaacagc

SEQ ID NO: 278784 - DNA, 122 bp, Homo sapiens
tgaggattgagcttttttcttcatctgcagagtgcccgctgcaatttgttccagggagcgcgagggaggcagtttttaagagactcagtaacaggaaatttggtctattgtttgaaacaaga

SEQ ID NO: 278785 - DNA, 122 bp, Homo sapiens
tttgagaatgaaatgtttcccatcatagtggattcttaagcacgttttccttgtatgcggcgtgctagctggatttcttttggcataatagttagccgtttggcatggatagcacacaggtt

SEQ ID NO: 278786 - DNA, 122 bp, Homo sapiens
ccaccttgtgctttggtaggggacatccctcacccctctctcccaggagaccagggccaacgtaccttgagagtctgtaaacctacgccaggactggggttaacaccccagcccaccagctg

SEQ ID NO: 278787 - DNA, 122 bp, Homo sapiens
gagtgattgcaacatacaggatcagctcaggcatcacagcgccgcctgccagggctgtggcggtatccggccggttgctccacctggcgttcgagaggagaaactacagggagcgccgactg

SEQ ID NO: 278788 - DNA, 122 bp, Homo sapiens
gggcgcgggaggccaagggtgcccccagcctccgaccgagaccccctcccgagccggcggcgaatggtaggctccatttaaagagtgcctggtggcgcgcggtgtccttcttggagcagctc

SEQ ID NO: 278789 - DNA, 122 bp, Homo sapiens
ctgcctcttcccacgaaaggtcctgccaggtccccggcaggctggtgtggggccactcaccgccttgcccggccgggcccaggtgcagatgaggccctcctggcaggcagtgatgatgcagt

SEQ ID NO: 278790 - DNA, 122 bp, Homo sapiens
gcactgccctgtgagccaggtggtggtggggggtgttggggctaaggtttggttagggcccgagtgcttgcgcacccccccatccaatttcccatggtgctgggatgctgccgcctcctgga

SEQ ID NO: 278791 - DNA, 122 bp, Homo sapiens
ccctttccttacgtacgaaaaatcagccggtagtattagcgaagtcgcctgtcattcctccgccctgaggcgttgctagcgcctacatcccaccttttcccctttgatcttagaagcttctt

SEQ ID NO: 278792 - DNA, 122 bp, Homo sapiens
ctcgtggtgcgccgttttttaagcccataggaaaagctcagtattcgggtgggagccacccgattttccaggtgccgtccgtcacccctttctttgactcggaaagggaactccctgactcc

SEQ ID NO: 278793 - DNA, 122 bp, Homo sapiens
ctagagcaccaatgtactcaagagtattttaaaactcatgagccttatttctttgctttccgttatataccaatatgaatcataatcctccctaaacatcagaatcacttgggaagcttcac

SEQ ID NO: 278794 - DNA, 122 bp, Homo sapiens
cccgcctcagctcctgcagagggcggcgaggtgtcgcgttggggctctagggccggacctcgcccagagcccgccattgcgctcaacagtggctcatatacatatatatgtttatatatatt

SEQ ID NO: 278795 - DNA, 122 bp, Homo sapiens
tctgtgagggtggagggaagagatttattaaccttagactttgttaaagtatacatgtgacgtctacatgggaaactgctaaatgaatagaagtggaaggtgtaacttccacaccattaaag

SEQ ID NO: 278796 - DNA, 122 bp, Homo sapiens
tgtcgtgaacctcctgaaaaggtctcaggtttcagggtttccagaccacattttgagaaccgttgttctagtggggtttgaaatcagagggacaaaagttgtgcacattttaaatttaaaag

SEQ ID NO: 278797 - DNA, 122 bp, Homo sapiens
tttctttgaaaagaaggtttcagctcatggaaccatgactgttaccaccggaagagacctcggttccctgctctgtggtgagtgtcattccatttcactctcattccatttcacagatgaac

SEQ ID NO: 278798 - DNA, 122 bp, Homo sapiens
gagatggtaaagtaaacttgaaatggaaacccccctccccctccctcttctcttaagcctcgttttattgcagcctgcataaaatcatagtgctggagcccagctgctccaaaggctgaagg

SEQ ID NO: 278799 - DNA, 122 bp, Homo sapiens
cgtgatccgcccgcctcggcttcccaaaatgctgggatgacaggcgtgagccaccgggcacggccgcaaatcaaattcttaggtaaactgactctggagcatgatttagtgcacactttaaa

SEQ ID NO: 278800 - DNA, 122 bp, Homo sapiens
cccaacccattggcccgaagagccatctgccctgcgtcctattggctttcgtcaagcccccgcccctgcaggtgactatatcaccgattggctggcttctgtatcagttgccttgccaaccc

SEQ ID NO: 278801 - DNA, 122 bp, Homo sapiens
cgaccacatggcctccagcattgagcgcatgggccagaccatggagcgcattggctctggcgtggagcgcatgggtgccggcatgggcttcggccttgagcgcatggccgctcccatcgacc

SEQ ID NO: 278802 - DNA, 122 bp, Homo sapiens
gggacaaaggtgttgaatggtacaggaaacaggagtcttaccagggtcatgctgagtgtacggcccatgacagcatggaacaggtcgtgtgcagctgggccagacacaacaaaaaattcaca

SEQ ID NO: 278803 - DNA, 122 bp, Homo sapiens
gtgtcttagtttgacattgcccacacaaaaggtgcctgcacggaagcggagtcctaccaccgagtctcaggcctagaagggcccgggggtgggttctgtgggctgggaacagccttattacc

SEQ ID NO: 278804 - DNA, 122 bp, Homo sapiens
cctagcaaaacagtcatgtgttttgggtaaaaatcatgcttgcagcaggatctgagcctccgttaagttgtgtcactgatcccctactcccctgaaattggcctgcttgccttccctttgca

SEQ ID NO: 278805 - DNA, 122 bp, Homo sapiens
agccttgaaatctcagcactcaacatctcttatccactaaagcacacactgttgtttacacgtggaagactgactatgcagccagtctagtaagcaagcaagcaagcaagcaagcagggtcc

SEQ ID NO: 278806 - DNA, 122 bp, Homo sapiens
tgggtggagccaggcgccggcgtcttccagttctcctccaagcacaaggaactcctggcgcgccgctggggccagcagaaggggaaccgcaagcgcatgacctaccagaagctggcgcgcgc

SEQ ID NO: 278807 - DNA, 122 bp, Homo sapiens
ctccctaggttgcccaggcttacttaacactcttgaacgtcaaaacccacgctcagtacccgcttcaagtggaagtcggtgttgagatacaagcataggaacgaactcaaggctaacagctg

SEQ ID NO: 278808 - DNA, 122 bp, Homo sapiens
aggaggttggtagtggaggttgttgtcattttcccagtagcattagggcaacttgaacaacgtcagcacagggtctggggcagcataagaagattacattaactagaagtaaagcgaccagc

SEQ ID NO: 278809 - DNA, 122 bp, Homo sapiens
gcttggggcaggaggggaggaatgagggcgcacaatgccacccttcccccggtacaggcacgctctccctggggcaccctgttccactgtctgagcttttgtcgcccactctggaaccagtc

SEQ ID NO: 278810 - DNA, 122 bp, Homo sapiens
tccatggggagtgtggggaggcccagggccctggtcctagtccggctctcctgggtcctccgcggaggctccgacaacgtcgacgcggctgcagatgctgacgccaccttcctgggacctgc

SEQ ID NO: 278811 - DNA, 122 bp, Homo sapiens
tcgtcgacaacttgggatcaattgccttgggctcggacatctccagctgccggaggacagcgacgcgctgctcgtccgtccgactgcacaccccgaccggaccggcgggccagacactcaac

SEQ ID NO: 278812 - DNA, 122 bp, Homo sapiens
ttcataatacctacggtccagatgtgacttgatcacatcttctcttgctttctgcttgttcgtttttgttttaacttttttttttcaaacttcaatacaaatttggtcttgtatgcaatttt

SEQ ID NO: 278813 - DNA, 122 bp, Homo sapiens
ctcaggccaaggatgggtgaggtcaccacctgcggcttaaacacagctgggatatgggcgcgggagtgggagcctgaggtcccagctattcaggaagcagcggcgggaggatcgccgagcct

SEQ ID NO: 278814 - DNA, 122 bp, Homo sapiens
gaagcctggacgcctggcgccccagatctgggcctgggtgaaatgcctctcaatcactggcgcgcacggagcagctgtacctgcgcccacatgggctgagagacagggacggttatagccat

SEQ ID NO: 278815 - DNA, 122 bp, Homo sapiens
tgagaatgacgatacccgtgactcagccctggacactggtccgagaagggacatgtgggacgtgagccgggctccaacagcctctgtgagagatgccccacaccaaacccaaccctcccgat

SEQ ID NO: 278816 - DNA, 122 bp, Homo sapiens
tgatggttttgatgggggcgggggttgacggggtcgtggggtcatggggccatgggtgaacgcctttgtgggtgacagggtggctctacagcccagctcaaaagcccatcctccaggccact

SEQ ID NO: 278817 - DNA, 122 bp, Homo sapiens
ttacacaaaatcagagagtcaataaaccaaatgatttctgaatgctcccaaatatttctgcgttatttgggcaatgttccctggctcattgtaaatagaaacatatgtattcacagatgtca

SEQ ID NO: 278818 - DNA, 122 bp, Homo sapiens
ggcacaacgcaccggcgacaagaggaatgatgttgcacttcaccaggagacgagagtccacgacccaggaattgaaactccactggtggaaattgcccaatgagaggcaaactgtgtcccct

SEQ ID NO: 278819 - DNA, 122 bp, Homo sapiens
aagatgataattcaacagacagtctgctagaaagacattgattttgtagtcaaaaatcttcgcacaaagaaaactccaggcccagatggcttccctggtgaagtctgtctcacatttcaagc

SEQ ID NO: 278820 - DNA, 122 bp, Homo sapiens
ggtcagggccagggtggtgggttggtaccctcctaagttcaacagactgaatcttagtatcggagctgaggaccacttgagtaaagtaagccagagtctgggagagccccagggaaggtggc

SEQ ID NO: 278821 - DNA, 122 bp, Homo sapiens
gtgccctgtaggatcagccggtgggggctgctgtgtacagtggccttagctgccaatcagcgtacaaactccgcctccagcctctgtgagagaagccccgccccaagcctctcctggtgtct

SEQ ID NO: 278822 - DNA, 122 bp, Homo sapiens
aagtcatgaatacaacgagagagtaagaacgctggagatggacagagaaaacctaagtgtcgagatcagaaaccttcacaacgtgttagacagtaagtcagtggaggtagagacccagaaac

SEQ ID NO: 278823 - DNA, 122 bp, Homo sapiens
ttacacgctgtgggctggatttgctcagaaatgactctcaattggagagaactctgctatcgggagttctcctgctcccagggagctgtgccccttgaaggaggcatgtccacctgtcattg

SEQ ID NO: 278824 - DNA, 122 bp, Homo sapiens
tgagcaagagtctgttgggcagaggggacttgcaggaagacacacagtgtctctagctgacgacggcgctaggtcctgacgttgttcagtgctcctccttgccatccctgctttcacagcct

SEQ ID NO: 278825 - DNA, 122 bp, Homo sapiens
cgcccccgaaccgcccctccccggagcgccaggccccgcccacggaccgcccccgggccgcgggctctgctcgccccagccggccgcgcagcctactaggcctttgtctgggcccccagccc

SEQ ID NO: 278826 - DNA, 122 bp, Homo sapiens
caacatcaacaacagactagcttatgctaaattagtttccttttaaggtaatgacaaattcggaagatattttatatctaacactgtaacagttacatttatttgcttaccatgtgcattaa

SEQ ID NO: 278827 - DNA, 122 bp, Homo sapiens
cgccggatttacgcctctcttttcagccggttaccatgttccaaccgggcacgaatcactcgctcttgtcattttggtggagaaggtaatgctgctggaattatggaagagcccgatccaca

SEQ ID NO: 278828 - DNA, 122 bp, Homo sapiens
tgtgggaaccgtgtgttctacgccatgatagacactccctggagctcctcacccttgaaacgttccatcagaagccggccgtcagcagtcgtgcctgctccaccgtgggcgaagcgtgctgt

SEQ ID NO: 278829 - DNA, 122 bp, Homo sapiens
cctgccgggggttctctccaaaaggttccagtccagagggcacggaacaaaactagttctcgtacggaggagcgcgcgcaggcgcttccggactcgtcacggctccctgagccgacctggca

SEQ ID NO: 278830 - DNA, 122 bp, Homo sapiens
gggttgtggtggggagacacaccccacctcatagtctgctgtgaagggtcagtgaggcagcgttacataaagggcccagcacaaatgtcccttttctcatcaagggggcagagggctgactt

SEQ ID NO: 278831 - DNA, 122 bp, Homo sapiens
ttgcatgctgctggtcctcctcagatgcttggcaatcattggtaatgatgggcttcagaacgtgctaccggcacagtgagtgttttaagctgaaggaatttgagaaaaccgcagaagccgaa

SEQ ID NO: 278832 - DNA, 122 bp, Homo sapiens
gacatggcagggattgagctcgcatcggccaaggcaggtgacaagggctggcatatgaggcgcatttggggatgaccagggacgtctcgtcaaacctgggacatttatctgcatgtggaagg

SEQ ID NO: 278833 - DNA, 122 bp, Homo sapiens
tgggcaaagctaaggaaggcggcacagaagttcatgcacacagagggattccagccgtcacggtcattctggagcaggcagaggaggaggcagaagatgggcagtgggggtggtgggaggag

SEQ ID NO: 278834 - DNA, 122 bp, Homo sapiens
cctttctgactttatttttcaatctgacgtggaagatatttacctttcctttatttactccgcaaatgtcggccccctgagggcagggatttcatccgtcttgtgcacggctgcatcctcag

SEQ ID NO: 278835 - DNA, 122 bp, Homo sapiens
gaggaagaagccctgtctggaagccatttctgcaggatggaagtgtggtgtctcgtagcccgacgtctcctggagggcagggaccccactcacagccaaacttatggaccagagttccctca

SEQ ID NO: 278836 - DNA, 122 bp, Homo sapiens
gcgcaagcgcagagaggcggatgccaggctgtatgcgcaggcgcagtttgagggacccagcgccgcttggagctcgggcgtctggctcggagatactgtagcgattggacccagggcgcagg

SEQ ID NO: 278837 - DNA, 122 bp, Homo sapiens
gggcggaactggatggcaccgacagcccttcgaccagctgtgagtatcaccagtcccccccgccacccagccggctgcctgccccccagcttacagtccacagtctcccaccgactttccct

SEQ ID NO: 278838 - DNA, 122 bp, Homo sapiens
tttcagaactagggttgaagccccaagcacctgctcagcaggtgttggaactgtattctacgcattaacagtgaaaaagccaaatgctatcactgaaggatgaccagaaaactctacccaaa

SEQ ID NO: 278839 - DNA, 122 bp, Homo sapiens
atcatatctaacagtgaagctttccagcaaaaaccttctgctctagaatgcataattatgcgagcataagatctactactctagacttttagcataattacctataggcagcaaaaccctag

SEQ ID NO: 278840 - DNA, 122 bp, Homo sapiens
gggatcccgcagcctccctgggcgctgcctcagtcctcccttttctcccggggctctggacggccacccccggtggcctccctccggccgggcaggtcctccgggaccctctccctggcgcg

SEQ ID NO: 278841 - DNA, 122 bp, Homo sapiens
ccagcctcccgggggtgccacggcagtggcgctgggcaggtgacggtggctgctgacccccggtgcccatgtaagctgctggctctgcgcagctgccgcttcaggtgggccgcactgcgcgg

SEQ ID NO: 278842 - DNA, 122 bp, Homo sapiens
attcctgttgtttttctagcctgatttcagaagcctatgattctcttctgtcacttcttacgaagacgaagaaggcagcattggtgtgtatattcagaggtggtgagaagagaattacttac

SEQ ID NO: 278843 - DNA, 122 bp, Homo sapiens
ctatttcatttgcacaaacacacgctgatatgccaactcacttgcctttatatggcgccccgcctgtgtacgtgggcctctgttggtctctgagggtcaggagaggaatcacccagggatcc

SEQ ID NO: 278844 - DNA, 122 bp, Homo sapiens
gctttgccttccaatgagttacacacagactctgctttctggttttgtacttcaaacctgcgggtagaacagtcagggctggactcagtcctggcctcctcttatacctgagctgttaccca

SEQ ID NO: 278845 - DNA, 122 bp, Homo sapiens
agcctggcgggggccagcagccgggaaaggggacgcagcaaggcggacggcgccatcttgcgtggcccagctcagtctctccgagttggcaacagaaccagcgccacctggcggccggaagt

SEQ ID NO: 278846 - DNA, 122 bp, Homo sapiens
ccagctgctcagcctcccggagccccacgccttccagacctatgcatcagcgagggctttcgctgatctctgcctaggctccagggtgactcggatcctgaccgattccctgcttccaggct

SEQ ID NO: 278847 - DNA, 122 bp, Homo sapiens
gttccaggcgtgccgagaggggctgtgaaggcctcaccgcacacaggctgctcacgtgtccgtatctggcggagacagacacttagcccagcagctctacaagtgccctgcccgataagacc

SEQ ID NO: 278848 - DNA, 122 bp, Homo sapiens
cagcttccagcagtcacacgactccagagggactggaaggtcaagggaagcatgtagaaccgcaggctgttcacgtggcttggaggaggagatgacccacccttaataaaacaccgtctgcc

SEQ ID NO: 278849 - DNA, 122 bp, Homo sapiens
aagtaaaacaaaaatagagtagaacttctgattaatcatctaaaccaatgttttctaaatcgagatttttttcttcagtgaacatcttcacaagtttattttcctttctgatcattaattgg

SEQ ID NO: 278850 - DNA, 122 bp, Homo sapiens
attctgcaatttgggcagggcttggtggggctggttcatctctgttccacatggtactgacgagagtggcttcagtggaactggaagatccaagatgagttcattcaggtgcctggtgtctc

SEQ ID NO: 278851 - DNA, 122 bp, Homo sapiens
tgggagaggctgggggcgacttgaaatggcgcctcaagaccccctccgggaacccacgcccgcctgaccttactatcacctcggccggaagtgtctccggccttttcggaagtcactttcac

SEQ ID NO: 278852 - DNA, 122 bp, Homo sapiens
cggcgccccccgctctcctccccgcaccttctgctccttcttcctgcgccaccccgcccccgcctccccgcccccagcccggctgttgcccgggccccctcaggctgctcccagggccccag

SEQ ID NO: 278853 - DNA, 122 bp, Homo sapiens
gccgctgaatagaacaggctaaggtggctttggaagcattttgcaagaccacgcccaggccgccaagcttcggtttcattgcgtgtgtatgtttacataatgtgcctgtatatcgtcagttt

SEQ ID NO: 278854 - DNA, 122 bp, Homo sapiens
agtcctaatccctttggcctctgcatggcttgaattggctcagagatccccttgccatctcgtccaaggcctgacccaggcgtccagcccatattctgaagcattcggtttccaatattatt

SEQ ID NO: 278855 - DNA, 122 bp, Homo sapiens
cgcccctccccggagcgccaggccccgcccacggaccgcccccgggccgcgggctctgctcgccccagccggccgcgcagcctactaggcctttgtctgggcccccagccccctccgcgcgg

SEQ ID NO: 278856 - DNA, 122 bp, Homo sapiens
cagacgagcgagccctcgactcggtgctcgtcctcccgacctgcgacgccaccggctctccgattctgcgcgagccctactggcagtcgacttctaacttggctcgggcatccatcgctctg

SEQ ID NO: 278857 - DNA, 122 bp, Homo sapiens
gcgtcccggctccgtgttcttcaccgggtgtagggtccttcctgatccttgacccagcctcgtctctcctttgcccttgccgcaaacgcactctcctcgtatcccggcattctgccaggacc

SEQ ID NO: 278858 - DNA, 122 bp, Homo sapiens
gggctgctggcggggcggaggccggaggcggccttgggcgggtggcttctctgggtcccacggttcctgcccaggctcttcgaaccaggaccagtgcgggtaatgtgaattgacacttgttc

SEQ ID NO: 278859 - DNA, 122 bp, Homo sapiens
caaaaccagtcccacgcagttgacagttgtagccgggatacatgagaaacacagtaagtacggtattatacagtttattatcatataagtgctttggagaaatataaagcagagaaggagaa

SEQ ID NO: 278860 - DNA, 122 bp, Homo sapiens
ggtcgcccttccccaggagtgcgctgctctcgggaaggcatcccatggcctgagcagcagcgcgtgtcccgagaggacgcgggcacttaccactgtgtggccaccaatgcgcatggcacgga

SEQ ID NO: 278861 - DNA, 122 bp, Homo sapiens
tttaccttaagcatctaaatatgtacagcccaaaataaaattcagcagtaacaacaatggcgttctggtgtttactaacaaacacttcagagtggggcataagggagacgcctctgcctggg

SEQ ID NO: 278862 - DNA, 122 bp, Homo sapiens
ctcctggatagagggtagggagagcagcaggggtcccagagtcacagaaggccaacatgccggccctgtcttcccctgggatacatcatcccctctccccaccatgtcaggcacctgtcctg

SEQ ID NO: 278863 - DNA, 122 bp, Homo sapiens
ccccggtgcagcctcggcggcgggtttcgccgccgctgccgccgcctccgagcagccctgcggcttctattcactctgggagagcgatgctaagtttctcccatagaaagagccgggacacg

SEQ ID NO: 278864 - DNA, 122 bp, Homo sapiens
gggccggagctggggcggggtcggggcgtcctcgggctcaaggtcacggaggggacgggccgctctgcggctccaccctcgcccgggaaggcccccgaggcttggcccggaggccacatcct

SEQ ID NO: 278865 - DNA, 122 bp, Homo sapiens
taagcattccccagccgctatagctttgaataagcagagcttttttcagagttctggtagcgcccagcccagcaccttttattctgaatgtgaagtgtgtgcctccgtgtcacagagtcaca

SEQ ID NO: 278866 - DNA, 122 bp, Homo sapiens
acggagtaccccagtcccaggcctgtaacaatgaggtttctccaccccgccagtagagggcgcactctcgtgaatggcttttgtggccagtttcttcccggatgcttttccacgggttggat

SEQ ID NO: 278867 - DNA, 122 bp, Homo sapiens
tagaaagatatcagctaaggcaatctgatatttttgtattcttaacaagaaaacacaccccggtctctctctatctctccatctctttctctctatctttctccctctcaattgagggataa

SEQ ID NO: 278868 - DNA, 122 bp, Homo sapiens
tgaggtctaaggggcccaatgcagggctgtagcaagcaggtggtcagggaggctctgctccgtagtctcagccctcttccttcttccagcaccgccgtgtccttcccacaacgtgccgcatt

SEQ ID NO: 278869 - DNA, 122 bp, Homo sapiens
cgaaagaaatcgaagtgctaacataccacggggagcaatgattattactcaatgtggccccgccccagcagcgggaggtggcatctgtttgaccttggagacttggacggtatttagggaga

SEQ ID NO: 278870 - DNA, 122 bp, Homo sapiens
gtccttccctgaagctcgctactcaaaacagtcaaccttaaccttgtcctctcttctactcgctcttcaaatggtccaatccagtttcctccctggatactctactgactgcaaatatcagc

SEQ ID NO: 278871 - DNA, 122 bp, Homo sapiens
agaaatgggtaagtaattaaaccatagtacaatgctacaaacgcacagttctgggacagccgataggattaagccatctgggggcaaggaagccttcctggaagtgatatctgagctaaaag

SEQ ID NO: 278872 - DNA, 122 bp, Homo sapiens
ccaccaaaatgcccgtgcttagtgttcaaaatgactacatcactgtagggcacttagctccgggatttattctcagctgtaaccacgtttaaggggccacatcacctcaaatggtcgcacaa

SEQ ID NO: 278873 - DNA, 122 bp, Homo sapiens
tttctagataaacttgagtactattactcagtactggtactgttggaagaacacataaaacgtctggcacaatcagtgaaagaaatatgggcctgggtccgggtgttaaatgggtacaggaa

SEQ ID NO: 278874 - DNA, 122 bp, Homo sapiens
tataagatgtaggttcaacacaaatcccagcctctctgaaggttgagtgcagtgctgctacgtgagattgtaattaaaactgatttcctaaggcattgccgatttggatgtaaacatcaggc

SEQ ID NO: 278875 - DNA, 122 bp, Homo sapiens
ttgtttcctctctcccttctgttctgttctgtttttggagagcatgggagctgtccataccggtaggcaatgaggagaatgtttataattgagattgagtaatgtcaaatataagcctttta

SEQ ID NO: 278876 - DNA, 122 bp, Homo sapiens
gccaaggttcccctccactccccacccacctcatcctactcctgctgggcctctgccccacgacagggctctggactctccctggcaccacccccagaaatccccctttgacactattgcag

SEQ ID NO: 278877 - DNA, 122 bp, Homo sapiens
gtggaagcgcaggagcgcacgcgggaggctatggcgggggaacctctgtgagttccgcggcggaggctagaacatcgctgtggctgcgggaccctcacccggcgctgaaaaccctccacatc

SEQ ID NO: 278878 - DNA, 122 bp, Homo sapiens
cacctgtgactctcggccgcgctcgccctcggcccgcccggcgccgcagccccatggccccgtccaggctgcagctcggcctccgcgccgcctactccggcatcagctccgtggccggcttc

SEQ ID NO: 278879 - DNA, 122 bp, Homo sapiens
gcagccaaggcccagctccgcagatcagacgctgcaaggctgtctatccgactgcaaatgcgattcacccgtggagatttctgctcaggatccaagttttcccactcgccacctgtctcctg

SEQ ID NO: 278880 - DNA, 122 bp, Homo sapiens
ttttgacaaactcctcacagctgagggtgagccgagggttcagagtcctctcctcctccacggtggacactgtgaaccctaggggccaagggaggggaaggaaagtcaaggagtctagtgcc

SEQ ID NO: 278881 - DNA, 122 bp, Homo sapiens
ttgctatccaaacaacagacaataacaggcgttggcaaggatgtggaacactgggaccctcgtatgctgtgagcagggatgtaaaaatggtacagccgctgtgaaaaacagcgtggcagttc

SEQ ID NO: 278882 - DNA, 122 bp, Homo sapiens
agaggaagaacagaagagagaatgttctgtgatggaatctcattttggagtctgaaagaacgctacattgctgcctctgtgacacagagcttgccattttctatggtgttttctatcagaat

SEQ ID NO: 278883 - DNA, 122 bp, Homo sapiens
ctgagatatgttctatgcagctcctaaaatgatagcattctgtttgcccatagtagtgaccgacttgatcaactcacgaatacacccttggatgccattctctttccctccttccctatttg

SEQ ID NO: 278884 - DNA, 122 bp, Homo sapiens
cgcgggggaaggaggctgtttcctttgtaaactggcggaggcgcgcctggcccctgggcccggcaacccgaagagacacgcccgagacctccggagggagttaaccccccgggccccggtgc

SEQ ID NO: 278885 - DNA, 122 bp, Homo sapiens
tggtggggggatgtccattcatccatccattcatccattgtctccccccaccccccatctcggactgtccccatgacagtcctagcaagaagagacaagaaacaagacaagttcacgttgtc

SEQ ID NO: 278886 - DNA, 122 bp, Homo sapiens
gaccgacagacagggtgagggccccgcctgccacctggcgccgctccagcgggacgatggcgggcagcgccgtgccaggcggtaattgcagacagactaatttaaagagatgagacggttat

SEQ ID NO: 278887 - DNA, 122 bp, Homo sapiens
agcgggcccgcagcagaggcagtagcggggcttgaaatgctgacctgcacccctggcttgcgctcccccaggcgggaaagacaagggggctgctgttgctgcttacgaaaagaatctcagcg

SEQ ID NO: 278888 - DNA, 122 bp, Homo sapiens
tattttgggtaatggattattttattggggcatattctcacacatcagattgccgggtcacgggccacctcccttatgtggcgtgaacgtgctggccagtcagcgtccatcacgatcacgtc

SEQ ID NO: 278889 - DNA, 122 bp, Homo sapiens
acgcagagggaaacagcgggatgcccagggccgggagcgcaaagcgggacatgcggaaagcgaagcggggttggaataagactccgccccctgctacgccggatccctcccggcgggaatcc

SEQ ID NO: 278890 - DNA, 122 bp, Homo sapiens
tcagggctggcagtctgggccagggtgtggtttccagcgtcaggccaggctctgctgtctcgcgagggtccggcctcaatgctccaggccccggcgttgggccgcgcctcctcgtgggcctc

SEQ ID NO: 278891 - DNA, 122 bp, Homo sapiens
ggaaacctaataagtagttagtctgacccagttttcaataagagagattttctgatgacccgacaggagtgactatctccagtcaaagaaagaggagggtgaatttaatctttcatggccct

SEQ ID NO: 278892 - DNA, 122 bp, Homo sapiens
aacgtggtccaggggagaggggactctgcgccgtgtttcactaaaccaaggtggtgtccacggcacgaaacgaccaaaacacgcgtctcagctcaacagaatggaaggggtgggacaagtgg

SEQ ID NO: 278893 - DNA, 122 bp, Homo sapiens
ctcacctgcttccaggtgtgtcgcctaagagcggctcctgttcactttcgttccgcaggccggccatagttacactccctacaaggcgtcttgcgcccaactctcgcgacacctgctttctc

SEQ ID NO: 278894 - DNA, 122 bp, Homo sapiens
ggcccggggggaaagggccaggaggttgggagccttcaatcgggcggggtggggggcgcccgccagctctggggtctggagctcaggacgccccctccctaggaggcgatccaggaccccct

SEQ ID NO: 278895 - DNA, 122 bp, Homo sapiens
aaagcctttttgtctgatgtctgaaaaggtggggttgcagagtgctggccagcttccgaccgtctctccctgaaggtgggtagttagaagtgctttgacaagccttgctgatttaacctttg

SEQ ID NO: 278896 - DNA, 122 bp, Homo sapiens
caatcagaacgtctttctccttgtctgtttttctttaaaagaggacccttcctttttgtccgataggaagtactattctgaatctaccagcaaggctggcatgtgctctcttataaaaggaa

SEQ ID NO: 278897 - DNA, 122 bp, Homo sapiens
gaggagcgctgaggccggtaacccaggaaaccagtgcgctgccggacgagagtaggccatcggctttccgcgggcacacgcgggtggctgtggttgaactgactctcgggtttccgctcctg

SEQ ID NO: 278898 - DNA, 122 bp, Homo sapiens
accctcctgggagggacgggtaggacgccgagcccaaggcgggaggcgccggaggacacacgtgccctacgcggggtgccgggggaccggccaggctgaccccggcgtggacaagtttgcct

SEQ ID NO: 278899 - DNA, 122 bp, Homo sapiens
actcacccctggtggagcagagccagagagagagaaagaggcagagattccatgagtgcccgacttggttttggcagctcttctgggtggcagcttagccttgatgataactgcttatggtc

SEQ ID NO: 278900 - DNA, 122 bp, Homo sapiens
tgaatgacttcgccctggacctgcagctctgcaaactcacaggaagaagaaagcagacctcgctcccttggacagatgcccaagtagtaatggggttagaatgccttcctgacaactcagat

SEQ ID NO: 278901 - DNA, 122 bp, Homo sapiens
aggcccgcacagggaggcaaacttgggagatcttccctccagagaggtccaggaaccgttcgtggggctgcggttctgattctaggcaggcgctgcccctggtgcccctgccacctgggaag

SEQ ID NO: 278902 - DNA, 122 bp, Homo sapiens
gcagtgatgaaggggatcaggggaagcaaagtgaccctactggaaccaaacggatatttccgtggaggtatcctaaggggatgggtgttgcagagcaaagctgtaagctgccaactctgacc

SEQ ID NO: 278903 - DNA, 122 bp, Homo sapiens
atactcatgacacagcgcttctctatctcctgcatgacctttgctgagctgctcgccctgcgttctgtcgtttgttcatcattcattcatccgaaatgctcgggactggaagcacagtggaa

SEQ ID NO: 278904 - DNA, 122 bp, Homo sapiens
ctggggcgcacccccgttccgcacgccaccccgagtgcccagcatgtcccactggctctacgatgtcctcagcttctattactgctgcctctgggcacccgactgcccccgctacatgcaac

SEQ ID NO: 278905 - DNA, 122 bp, Homo sapiens
tgtggacacccctccatgctgtgctgcattcaggctggctacagacgaggggcgcggagccgtgaggctttgggggctcagggccactgagccagaccctctaccaggccccatagaatcag

SEQ ID NO: 278906 - DNA, 122 bp, Homo sapiens
tgcgctgtggatgtgtgtggtgtgtttgcatgtgtggtagtgtgtgggggatggggagggcggcacaggcagcctcaggtgggctctgcctctggctcagggacaggtgccaggcaccagcc

SEQ ID NO: 278907 - DNA, 122 bp, Homo sapiens
ctccgtgagcggcctcgggctcgcggttgaggctgattgaggaagtgggttcaggcggcccgccgtgcctggcacacggtcagagtcccgtaagtgttggttatcttccccaagcgcaccgg

SEQ ID NO: 278908 - DNA, 122 bp, Homo sapiens
atcggctccgcccccgggctccccgggggagttgatagaagggtccttcccaccctttgccgtccccactcctgtgcctacgacccaggagcgtgtcagccaaagcatggagaatcaagaga

SEQ ID NO: 278909 - DNA, 122 bp, Homo sapiens
atgtttcatagaattcaattcgccacaatctctctctgaatcgttatttcatcaaagtgccgcgttcccaggaagaaccaggcaaaggctcgttctggaggatagacccagcctctgaaagc

SEQ ID NO: 278910 - DNA, 122 bp, Homo sapiens
gtcgcgcagagcggagggtcctgggagatcctgggttggcccagccacaccttgcgccgccgccgtttctgctggacaccaggagaaaaccacggcagctgcagccaccaacttcccctaca

SEQ ID NO: 278911 - DNA, 122 bp, Homo sapiens
tgcccaggcccaggtcggctgaggacggggccccgtaccgccggctcttctccatctcaccgttcaggacctccttggcctggatggcctgctgcagccggctgctctcagctttcttggtg

SEQ ID NO: 278912 - DNA, 122 bp, Homo sapiens
catgaatttgatggagatgagcagttctacgtggacctggagaggaaggagactgcctggcggtggcctgagttcagcaaatttggaggttttgacccgcagggtgcactgagaaacatggc

SEQ ID NO: 278913 - DNA, 122 bp, Homo sapiens
acagcagaatgcctggcctgtgttaccacattgacctacacatttggatctgaaagatctcgagctattttctgcctaagcagactttgcacctttgtgttttatagtgaagtagcaggtac

SEQ ID NO: 278914 - DNA, 122 bp, Homo sapiens
ccggttgcaatcaggctgtttctgaaaaaccagaccactcattttccttctacgcaggtgcggtcacacgaagttgctccggcatcttgtgctggagtgagctgtggtggttaacaagccac

SEQ ID NO: 278915 - DNA, 122 bp, Homo sapiens
cccctggatgtgccgcctccgagctcgggccctcttacctgagcccaggatgagtaacctcgccccaggcaaccccagccttgcccaaccgggccaactcagcgtcggctgtggggcggggc

SEQ ID NO: 278916 - DNA, 122 bp, Homo sapiens
tacagagctttttcaaactttgccttccaagtgcaggagttccttggtctttgcaagacccgcaggcgtccgcagtggtgcagagagaggtgcaaggggcgcgcccaaggtcgcaggctgcc

SEQ ID NO: 278917 - DNA, 122 bp, Homo sapiens
gtgtagccggggttacacacgcagcgcccattctcacagcgccccctctgactgcaaccgcgagggcagctcctcatgccacagtcgtcaccagtgtagcctgggtcacacacgcagcgccc

SEQ ID NO: 278918 - DNA, 122 bp, Homo sapiens
tctaagtctaggtcacgcaagcacactcggtgacagtcacacaatgatgacactgcctagcgatgcgtttctcagaatgcatccctgtaagcaacacgtccaccatctatattgtaacaaat

SEQ ID NO: 278919 - DNA, 122 bp, Homo sapiens
aatattagacatgtctccacattgcccggagactgtgtgtgactccagtagtcaatctgccgtttaggaatgagggtatgtggctgtactcccaggtcagatgctgcgctgaagatatctgc

SEQ ID NO: 278920 - DNA, 122 bp, Homo sapiens
acacttttaatagaccccagagctgtggtgacagcatgcccttcccagtttttccacagacggtgctcctgaaattttccatagacagtgtattcttgtggttaattagttatctgagcaat

SEQ ID NO: 278921 - DNA, 122 bp, Homo sapiens
caaaagaaaaaaataaataaattgcagaaggcggcagcatttccagtcttccctggctcccggacacccgacccccgacccctgccccccaccctccctcccgcatttcccactccctagac

SEQ ID NO: 278922 - DNA, 122 bp, Homo sapiens
gactgcttaagcggggagagtgggagtggggtgggttggaaagctatttattgggtactacgctcaatacctgggtgacaggatcattcatacaccaaacctcagcaacatacaatttaccc

SEQ ID NO: 278923 - DNA, 122 bp, Homo sapiens
ctcggggccttcctgccttttggatgaatggagatgctgtgtctgggtcactgccagagccggggcaggagaggacagaggcttcccggagcggcagggcccgtcgctagagggcggggccc

SEQ ID NO: 278924 - DNA, 122 bp, Homo sapiens
atcttgcaggcctcgcggcgtcgttcttcgttgtggcggcctgtggctctttgaaaaacacgacgaggcctgcaaaatgcgtttttctttttttcctttacgcatgtaaccacggtcctgca

SEQ ID NO: 278925 - DNA, 122 bp, Homo sapiens
agtccaggaagccttcctggaggcagtggccttcttacaccagaacccatttataacccacgtatataagagcagcagccacagctgcccctggtctattccaggcaggggcactatctagg

SEQ ID NO: 278926 - DNA, 122 bp, Homo sapiens
aatcaatgtggaacagctgcccactcgctcggatcatgatgttgtcgctgtgccgatcaccgatgcccagcacgtacgtggccacacagtagccagcacaggagagggtgaactcttcgttg

SEQ ID NO: 278927 - DNA, 122 bp, Homo sapiens
acagcgacctcggcagcgggcacttggtacagcccggcaggctgacgctgccgccgagggcgccccggctaccgccaaaccgtgacaacctcggtgtgcccggggcccccatctggaaccgg

SEQ ID NO: 278928 - DNA, 122 bp, Homo sapiens
gttttacttaaatgagtctcgacttcatttatcctgcaaatttccaatttgtgattcttgcgtgccctttatggaaagaggtttgaggaaggaggcctgaaatatttctgtaagagttttca

SEQ ID NO: 278929 - DNA, 122 bp, Homo sapiens
cataagttctgcccaggagacggtgagcggaaggctcacaaactggcaaaattctgcctccgccaagagacctacggcagctggatcacaccgtggagcaatttatgcccccaggaagtgaa

SEQ ID NO: 278930 - DNA, 122 bp, Homo sapiens
cacctccccagtgctgcggtcttggtccccgaacacggacaaaggcccctccatcttcaacgcaggggtatacgtcgacttccactcacacacaccgcgggcaaccagtatcatctcacctc

SEQ ID NO: 278931 - DNA, 122 bp, Homo sapiens
cccaccacccttcacagctacgtgaggcggggcatgcatggctgtcccccaggcacacagcgccccactccacgccgggacccaggcccctctccaactccacctccgtgttttccgcatat

SEQ ID NO: 278932 - DNA, 122 bp, Homo sapiens
attttgtagttttgcacacacagattaggcccttctaaaaattgtattccccttaaggcacggaatgtatacataccatcttttcatttctttgaatacattgataccagattctcaaatat

SEQ ID NO: 278933 - DNA, 122 bp, Homo sapiens
agagatgacccggctgaggccaggccggctccagcactgaccttgagctcttgggagacccgggccttctgccggtacacggagtacagggcggcggtgaccacagaggtggtgcccaggag

SEQ ID NO: 278934 - DNA, 122 bp, Homo sapiens
ttggagagagagtgggatgatgtcacttcctgagggtggggggaggagtaggcacgaccccggcaggctagcccgccagcccgccaggccacagctcgccaagtggctgcaccggggatagg

SEQ ID NO: 278935 - DNA, 122 bp, Homo sapiens
cacagagtttataacttccttgagatctgaccatctccccaactattcaagaagcatacacggaatcagagtcatcttcattatagatgggacatccttctcccgaatgagtccttccttct

SEQ ID NO: 278936 - DNA, 122 bp, Homo sapiens
gagattttaaattaaatgtgagcatgtaccactaattactctctttgtgtgattaaaatccgggctgctggtatgatttttgagagcccagagttttccccacggcagcaggctagtaagag

SEQ ID NO: 278937 - DNA, 122 bp, Homo sapiens
ttttgctgattctagtaggccttttgagtgaagtcaggaagagagagctgtgacagaaaacgttgtgtagttgccactgtcattataaaggactgggacaacttgaggtgtagaagagactc

SEQ ID NO: 278938 - DNA, 122 bp, Homo sapiens
gcgggcagggtggtaagggttgccagacaaaatgcagttcacacagttcaaccggaatttcggatgaacggataatgctttagtattctatatcccaaatattgcatgggacatacttatac

SEQ ID NO: 278939 - DNA, 122 bp, Homo sapiens
cacaggacccccgctggctgactcaggggcgcaggcctcttgcgggggagctggcctccccgcccccacggccacgggccgccctttcctggcaggacagcgggatcttgcagctgtcaggg

SEQ ID NO: 278940 - DNA, 122 bp, Homo sapiens
gccccagaggcccctcagacaggaccgcaggctcagatctgaacgtcggctttggcagcccggccctctggggtttctggagacagaaggtccactcttgcacacggaagcatccatgttcc

SEQ ID NO: 278941 - DNA, 122 bp, Homo sapiens
ggtgctgagaccggcctgggccagcaaaagcgcagagcggtgccagtgccaagaaacgcccgacttggtgaaaccaaccttgtgaccaccgattccactggcttcgcaggacgcaacgggcg

SEQ ID NO: 278942 - DNA, 122 bp, Homo sapiens
gcgcagcacgctctcgcgcgtgggccgcagctggcagcacaggaagtccaggtggaagagcggcggcgtgggcggcccggcgcggcgcggcgagtgcgggctggtatcggccgagctcgctt

SEQ ID NO: 278943 - DNA, 122 bp, Homo sapiens
cgcagcctgggcgagggtgccaaggagcgcgaggccctgcggcgttccaatgaggagcttcggtctgctgtgaagaaggcagagagcgagcgcatcaggtggggtgtcgcaggaggaccagt

SEQ ID NO: 278944 - DNA, 122 bp, Homo sapiens
gggggcgggacggggaggggatgcggaaggttctgcagctgcggcggcggcaggcgcggccgttcggtggagccgccggctcggctctgatggaggcggcgccgaattcggctgcgcgtgag

SEQ ID NO: 278945 - DNA, 122 bp, Homo sapiens
tcaccatctccctggagctccagctaggtaggaaagcagctttgatatcaggaatagatccgtaggccatgagcacagagcagaggagcaagccagcaatgtctaaataatggtgatattta

SEQ ID NO: 278946 - DNA, 122 bp, Homo sapiens
ctcagtcacgtgtcctgcctgctctgagccctcctcccacctctcttggcctctgcttggcggccgtgaggccctgtggagctgacatctattgggcacagcttcgcatgtggagccgagag

SEQ ID NO: 278947 - DNA, 122 bp, Homo sapiens
ctataacaggggtgtggggttgccagactgtcaaagggaaatccaggcagtgacatttgccgtcaaaaatgggatctctggcttaagtgagcaaatgattcccttcgtgagccaagaatgca

SEQ ID NO: 278948 - DNA, 122 bp, Homo sapiens
cgttacctttatttctcctttcctgactcttcgtttagatcttggggttctgtgaccatccgggtcccacagtctcagtagagacctcagtgagatgccatttcaggctttaggactcgtct

SEQ ID NO: 278949 - DNA, 122 bp, Homo sapiens
agctctggagttggcactgtcctgactggcatccttttcctgcctctccccttcccatctcgcttgtccctgggctcccatctctgattgcatctggggtcctggggaagactgtgagaggt

SEQ ID NO: 278950 - DNA, 122 bp, Homo sapiens
tgatatattgtctatttacaaagtattttccccctttaaaccagaaacttggcagggccccgtgattacgtagtggttccccagatgattacgatgcggtgtctggacttcttggaaagttt

SEQ ID NO: 278951 - DNA, 122 bp, Homo sapiens
tgaactagatgcatcaccttccccttctactaccaccacctctctctcttcctttgtctccgtctctcaagattgggagtagctaagtgtcaggtctaatcaaaattgtgctgtaaccatac

SEQ ID NO: 278952 - DNA, 122 bp, Homo sapiens
caccgggtcctggtagatgctcaggcagatggagcacagcagctcgtccttgaggctgcacgccatggcgccaggggcagcagagaggggggcccgaggggcaggggggcggctgagagagc

SEQ ID NO: 278953 - DNA, 122 bp, Homo sapiens
ggtagttaggaagatcttggctccaaagtttaacttgcagcgtcccggccgggttcacagcgcatgggacagggggggcggggcgatgcggaggcggagcggggcgatgcgatgcggggcgg

SEQ ID NO: 278954 - DNA, 122 bp, Homo sapiens
gtaaacttccgggtcgaagtgcgccccgttcagatcagtggggtccagggggtcggtccccgcggggagtcccaccgcctcccctttcgagaggccgttgtaaagctttagcattctgtgcg

SEQ ID NO: 278955 - DNA, 122 bp, Homo sapiens
gtgactccagtagcagctcccacgctgaaatcagaaaatgaaatctatgcaattcctctgcgatttcctttagccactcccatgtatcattgacctcattaaaatgcttctagaagaaatag

SEQ ID NO: 278956 - DNA, 122 bp, Homo sapiens
cctgcaaattcccaattggccacaaggtggaggtgtgggcctgttttcccagccgccacccgtttctagagctggacccctggaacaccaggctctttctagcttccctgcttccgccctag

SEQ ID NO: 278957 - DNA, 122 bp, Homo sapiens
tctgcttttcctgctctttgtccgctgatctcctgggaagaaagcttccgaaaaggacaccgtttcaggggcgagtgacgccggggtgcccaggccgcgccccagttccgggtttgcacccg

SEQ ID NO: 278958 - DNA, 122 bp, Homo sapiens
tgtgccaggagactgaggcatgaggagcaggtttggggaagaggactccacttcctctcccgcaggcagcgccttctgaaacatctcagcaggcctaagagatgggggcttcctgttcctac

SEQ ID NO: 278959 - DNA, 122 bp, Homo sapiens
caccgcgcccagcccacaatttggaattttaacttgtggttagattgttggggacagagacggggcctggagtaaatatcaaattctagtcctagacccacagcattctaactgtatgacct

SEQ ID NO: 278960 - DNA, 122 bp, Homo sapiens
tatctggatgtcttggattttcttcccattctgttctgttctgttctcctaataccatctcgttactagacgtaggcattggacgtgacaatcaactgcatttgaactgagaagaagaaata

SEQ ID NO: 278961 - DNA, 122 bp, Homo sapiens
tgccccgtcctctgctgagaaagataatcagctttcctctcccctgctgatggtcttggccgagatgctgacacagccatctcctgttattgtaattagacactgaactagcagatactgaa

SEQ ID NO: 278962 - DNA, 122 bp, Homo sapiens
tcaagagaatggattgtctaatttttaggagccaacaaatgctcattaatcaatgccccacggaagaacatgagaagacagtgttggcatttaaaacaataactgtggccattaccaggccc

SEQ ID NO: 278963 - DNA, 122 bp, Homo sapiens
catgtgggaaatgactccatattggcaatgtgaggcatcgaatatctgagacttgggcagcgtctcgttgccaagtcagggcactgccagccgggcccaaattcaaggcgacggccgaggct

SEQ ID NO: 278964 - DNA, 122 bp, Homo sapiens
aagaatgaattcggaaagacttcatccttgtgtttttccttctcttttaattccatgcaacgaggtcagcttttgcaacaaggtggggttttatttttttggtgcatgacatcaaatactct

SEQ ID NO: 278965 - DNA, 122 bp, Homo sapiens
ggagcttcctccgttggaagtcccttccgctggcgacgtgggcgctgtggccgcggccctcgtggagcctgagccctcctcacggcctccgcgcagccctggggccccccggcagggtccct

SEQ ID NO: 278966 - DNA, 122 bp, Homo sapiens
tagggtatgttagaagacttggctgttgctactttaggaggggaaaaaaaagattactttcgctttaataaaatatgggaattatttgtggcagaatgcactgatgtttaagggggaaaaac

SEQ ID NO: 278967 - DNA, 122 bp, Homo sapiens
cctgggtcccacctatccttcctcggggccccccacgccccgctctgctgctgctgccgccgttcccgctcctgccacagctgcaaggtgtccgggcgccgccgctcctcccctgccggctc

SEQ ID NO: 278968 - DNA, 122 bp, Homo sapiens
ctcggagcttctgcgcctcctgctgatgctgctccacctccgcgcgcagccgccgcaccgcgtcctggagctgcgcgttctcctcccagagcccgcatccctcgccggaaccctgcccagca

SEQ ID NO: 278969 - DNA, 122 bp, Homo sapiens
ctaactgagctccaaagacatttcaaggttgtttcctgaatttaaagtcctctgtttcctcgaaaggagttctcttcacagtatattcatctttgctgccacaattaaaccactcttttaaa

SEQ ID NO: 278970 - DNA, 122 bp, Homo sapiens
tggagtgctctttatcaccggctgcccgtgggaacccacgactcacggctggaggccccacgccccctgccttgtttccatctgctgcagccagcgacgtcaagccttattccatctgtcag

SEQ ID NO: 278971 - DNA, 122 bp, Homo sapiens
taagagctgtaacactcactgcgaaggtccgctgcttcactcccgaagttagcgagaccacgaacccaatggaaggaagaaactccggacacatctgaacatctgaacaaacaaactccaga

SEQ ID NO: 278972 - DNA, 122 bp, Homo sapiens
aactaggagggaagattggggggattcccagggtagaggcggaggccaggtgggtgtgaccgtgagctctggtccaggctggcttattcctagcctgtacaggagccatctctggagcctga

SEQ ID NO: 278973 - DNA, 122 bp, Homo sapiens
ccgtccctgcccctccctaggggcatggatctgacttgagaggttgtgagagcttacaggcgctgggccgtcggggaggcctcagaagcgtaggacggctgcgcactgccgggccgtgttca

SEQ ID NO: 278974 - DNA, 122 bp, Homo sapiens
tggagaaaatggtgaagaagtcgagcatggcggcagcggcagaggagctggggccggcgccgggaattcaggccgcgttcgccgccgcttcctgctgcgccaagcgcgggacacgtcacacc

SEQ ID NO: 278975 - DNA, 122 bp, Homo sapiens
actgatgggggagaggccagttcctggaagatggtgctggggtgggtgatggcctttgaacgtaagtcaacggttgggtggatctaggagggctgccacgtctagagtaagagggtggatgt

SEQ ID NO: 278976 - DNA, 122 bp, Homo sapiens
ccctggcattgccatctgcacagcacttgctcgaaccagtaagccttgatggcaggaacccgagatacggtccacagatgctcaggccaagccgagacctgggaggggaggggagagaggag

SEQ ID NO: 278977 - DNA, 122 bp, Homo sapiens
agaaaaccatgagccatgaccaggaagacgtaagatggtgcccgtaccgccaccagcagccgggagacctgcagagccagcctcgcaaatctctaagaagcaggcttggcctgtgttacatg

SEQ ID NO: 278978 - DNA, 122 bp, Homo sapiens
gattacactctgacctccagggacgaaaaggtcgtcggcccaagtcccttgttcgttctacgccacctcccgcccccgccaatctgcctcctcagttccgctgcctggctgaccggaactga

SEQ ID NO: 278979 - DNA, 122 bp, Homo sapiens
ctcacagcaaagagctcctgggaaggtgctgctggatgcagtttgcaaccacctcaacctcgtggaaggtgactattttggcctcgagtttcctgatcacaaaaagatcacggtaggtgatg

SEQ ID NO: 278980 - DNA, 122 bp, Homo sapiens
aaaaccagctcaggccctgccgcaaagggggtcggacccgctccgccctctccctctgggcgctgtgcttagagactcaggcctcaccgatggctctagcctccagatcccaaattccagcc

SEQ ID NO: 278981 - DNA, 122 bp, Homo sapiens
tagatggagatgcttcactgagtggggagtattggaggaggagcaggtttggggtggaagcgttgtccttttagagagattgtatttgccattgattgattcattcattgtttctgcaaata

SEQ ID NO: 278982 - DNA, 122 bp, Homo sapiens
ttatttgtttgcatttttatctctagctctctctctctacccacttggctgtaagagccacgtagacagaagatgtgcctatttcgtcccagtaccaagcacaatgcctgatacatagtaga

SEQ ID NO: 278983 - DNA, 122 bp, Homo sapiens
cagttcaggggggttgttttcgctcctcgacgctgaatttagaaaccagaggctacaaagcgggccgagacttgggttccccaggtccttggtggggaggtttccaggaggctcgggcgcgc

SEQ ID NO: 278984 - DNA, 122 bp, Homo sapiens
tgtcacatttttctttaatcttctgagatgggaggatctagcctcttccccagacctgctcgacagcagccaggctctcccccatgcggaaatccttagcagagggcagctgtctccctcca

SEQ ID NO: 278985 - DNA, 122 bp, Homo sapiens
acccaccaagggttagagaaaggctggggacacaataccgggacatcctgctccgggcaacggaagagctgcgtctgctcctcggccacttcatctaggccagaatacaaggtgctgtctgc

SEQ ID NO: 278986 - DNA, 122 bp, Homo sapiens
tctgtaagggactttctttatctgctgtcttacacattttgtggtatgggtttttccttccgtaggtctttactggagaggtaacctctttatagttagaaagaagtctctgaatttctggc

SEQ ID NO: 278987 - DNA, 122 bp, Homo sapiens
ccctggctggggccccttggctggcgcgcgggggacgcaccgggcttggccatgagccggcgcagctcgccctcgatgtccagctgctgctcctccagacgctgggccttggacctgccgca

SEQ ID NO: 278988 - DNA, 122 bp, Homo sapiens
gatttataaagtaaattatttctgcttttatttttaaattacaaattattttaaatgtaacgctgtattttaaagatggttaaagtgaaggctgactgggcaaattgattttaatgtctact

SEQ ID NO: 278989 - DNA, 122 bp, Homo sapiens
ttgtcttttaccctggagacagtggagtgtttgtggcctagcagggccgtgcgggcctctcggtcctggtcgcgcgtggtgtgcgttttgggagggcccagcgagtcggctgctatgggccc

SEQ ID NO: 278990 - DNA, 122 bp, Homo sapiens
gggccgtcccggtgcacgcggagccagggggtccctgcagagcgaggggctgttagaggccgcgcggccggagctgggcgggggtgcggggccagcagggcgggggcggcgctcaccacggc

SEQ ID NO: 278991 - DNA, 122 bp, Homo sapiens
gatgcggatacttcctaaaaacaggaagtgcatgagcactggtgaggggcattgtgactgcgttgaacacttgcaactttgaggtgaatgaatgtattggctcctggttgcaatatacaatc

SEQ ID NO: 278992 - DNA, 122 bp, Homo sapiens
gttctagaattgagagagtgactgtttctcagtttcctgtcatgcaaggtgtattcccctcgctctcctcgtgccaatattctgcatcaggctgcaggatctcagacaggacatgagcaggg

SEQ ID NO: 278993 - DNA, 122 bp, Homo sapiens
cataataacgctgctgtgtgccacgacaacgctgctgtgcgccacgacaacgctgctgtgcgccacgacaacgctgctgtgcgccacgacaacgctgctgtgtgacatgacaacgctgctgt

SEQ ID NO: 278994 - DNA, 122 bp, Homo sapiens
tacaattgcagtcaagaacatgcccagagctggaaaacgctgcactcacagctacattcacgcctattcggggctccggcggtcacactgcgatttttccctattgcacgtggtcccgccca

SEQ ID NO: 278995 - DNA, 122 bp, Homo sapiens
tctcctttagaactgattgtattttagtgacataaggataatcacgttaccaagaggtttcggacagcagatatctatctatagcatagctggaaaaattaagaagcagcaattttaatttt

SEQ ID NO: 278996 - DNA, 122 bp, Homo sapiens
gtggcttttcagggtagaagaaacagccttctggaagaagatgccacccaggactttcctcgtgtggaagaagcggttccctggcttccaaggagaggcccaccctcttcaccctcttgtta

SEQ ID NO: 278997 - DNA, 122 bp, Homo sapiens
gagctgcgcaccaaagttgtggaggaggtgctgacccccctgggagactgcttcatgctgcgctcagacgcggtgctcgacttcgccactgtctccgagatcctgcgcagcggctacactcg

SEQ ID NO: 278998 - DNA, 122 bp, Homo sapiens
aatccacaagacagaatagccagatctcagaggagcctggctaagcaaaaccctgcagaacggctgcctaatttacagcaaccatgaggtaaggatttctttgctcctctgccataatgtct

SEQ ID NO: 278999 - DNA, 122 bp, Homo sapiens
aatgcgtttataaaggtatacaagaatagaaaccgaggttgtgacaccaaggtttcactgcgttattttgtgtataggtccatgctgtgtatacaaatttatcattaatacacaggctgttt

SEQ ID NO: 279000 - DNA, 122 bp, Homo sapiens
gtgtacattatcatgctcttcttttgtagagcagcccgacggccatggaggctgaagagacgatggaatgccttcaggagttccctgaacatcataaaatgatcctcgaccgattgaatgaa

SEQ ID NO: 279001 - DNA, 122 bp, Homo sapiens
tcacctgaaggttggggcgcggaagctcaactccgtgctgattgggctccaagttttctgcgccctcgcctcgtcccgagtgcccgcgaatcccccggacgcccacgcagaccacccagcca

SEQ ID NO: 279002 - DNA, 122 bp, Homo sapiens
ccacttgctcctgcgtgaagccgaaggtgggcagcatggacatggtgccggctgcgtccccgcccgcccgcgcgcgccctcaccgggccgcgcggtcccgcatgggagcttcctcgccgggc

SEQ ID NO: 279003 - DNA, 122 bp, Homo sapiens
tcttcacagggcaattccagcatctgtgcaaagcggtttcgcgtcggttaatgctgccttcgatgagaaggaagacgttatcacaggagggagctagctcaaattaaagagttcgagggccc

SEQ ID NO: 279004 - DNA, 122 bp, Homo sapiens
tgacagagtgtattacaaatcatcttatagtttgcttgtcatctttcaaaatggttatttcggtgtcttgacaagcatgaaactcacaatgtctttggcttcacagattgagtgtatcagtg

SEQ ID NO: 279005 - DNA, 122 bp, Homo sapiens
gtggctgggcattttacatttccacttttcccgggtttgagactaatcacgacccccacccggaatgtttaccttgcaaaccacaagccattaagcgttcagggccacacccaggccaccaa

SEQ ID NO: 279006 - DNA, 122 bp, Homo sapiens
tatttctaggtactaccctgggctgtggagctacaaattgtaataaattgtggccttggccgggcgcagtggctcacgcctgtaatcccagcactttgggaggccaagacaggtggatcatg

SEQ ID NO: 279007 - DNA, 122 bp, Homo sapiens
agccgggctccagcaggctgagcagtagcagccagattaggcccatcgtggcatcgcgcccgccccgcggcggcggcggctgcaggcgagcgcggcgcccatggaaggggcggcagccggac

SEQ ID NO: 279008 - DNA, 122 bp, Homo sapiens
ccccacccactcatagccccttcccgggaacccccggtgtgcactgtccctcgccggccccgggcgccttgacaagggagaccagctcctccggcacaacccggaaggaagggtaaagggcc

SEQ ID NO: 279009 - DNA, 122 bp, Homo sapiens
gtgggccggacagcccaggccccgcccccggacgctgcccgggccccgccccgacgcacacgcccaggtgcggctgcacttcgcctttgttctcgccacctagcggtccggcgtgcccctgc

SEQ ID NO: 279010 - DNA, 122 bp, Homo sapiens
tttccttggcacagggtccactgcagcatgccaaacgaggaggcaggggcgtcgtccccccgccccccactgcagcactggagatggatttcctgtacttcggatccagggtttttgacaga

SEQ ID NO: 279011 - DNA, 122 bp, Homo sapiens
tgcccgcggctggggcgtttcatctgcgccggcctatggtgcgggcatcgccctgggccacgcgctgatcgtctccatctcactcagaaaaagttactcatacagtggtcttgtaaagggtc

SEQ ID NO: 279012 - DNA, 122 bp, Homo sapiens
cgtctccaccaacagaaaggcagaatttccagggccgttctcggcagccaatgagcgcggcggtgggcgggcctctcccgtccattgttctcggtgccccacgggcttgagccggggtgaat

SEQ ID NO: 279013 - DNA, 122 bp, Homo sapiens
ttagcctgtctctgtgtctgtgacaataggcctacttttgagggtttaaatgagctcttacggtgggtgcatctgctgtgggcctgcgcactacagctctcctgccttttccctgcatgccg

SEQ ID NO: 279014 - DNA, 122 bp, Homo sapiens
ctggatgtggactcactcagaaccccacacttctttccaattgcagtctgagcagagggacgctgggacagagccctggactttcctaaaaccgggaaatcccaggacaggactagaccaga

SEQ ID NO: 279015 - DNA, 122 bp, Homo sapiens
gtaaaagctgaagtccttgccaagccatccatgatcttgtccaccttacccctctgatatcgctctccttcccttgttccatttcagtctcccccgtatccttactgtcaatatttctaaaa

SEQ ID NO: 279016 - DNA, 122 bp, Homo sapiens
ccaaacatagaagtcactgagttgccatatattactatagaacaagcattttatttcaaacgatgggaacctcacataagttaggggaggaaaggcaaaaatgaattcagtggtgttaatgg

SEQ ID NO: 279017 - DNA, 122 bp, Homo sapiens
acggttgaagaggagtgggaaacagccaaagagtcctggggcaggcacaggtgcaggagccgcggggtgagcccggccagctgggaaggcctcacggacaagacgagcaggttgccgatggc

SEQ ID NO: 279018 - DNA, 122 bp, Homo sapiens
atgttaatctattacctgggagcagctctagattcttgagttggtaatgactaatttctccgttgctctcatcctgttgagtttaataggctctcttttttcttactgatgttttcatgatg

SEQ ID NO: 279019 - DNA, 122 bp, Homo sapiens
tcaacatcttccttgatagcatgaaacaaaagtgaaacaacgggattcggtactttgagtcgagccagtggtgctatgtgcacggtagtagcctgaaaaaaattgacaaaaaacctgcataa

SEQ ID NO: 279020 - DNA, 122 bp, Homo sapiens
caagccctttccgtgttccacactgtgggctgaattactcacaaactcagcatgggcatgcgtgatgtcctacagcccctacctaaatctctaaccccaatcccactgctccctctttggct

SEQ ID NO: 279021 - DNA, 122 bp, Homo sapiens
tcgctcccaccccaggtgcttaccctccacttccagtagagccagggactgggcgggccccgcctggaagcggacttcaccggcgtcctcggcgcgcagctcgctaagcaccagaatgtgtt

SEQ ID NO: 279022 - DNA, 122 bp, Homo sapiens
aactccagcttgaagatccacagaccctggccaccagttggttgtgacagacctaggatacgttaacgtggctctccaagctttcgtttgcctatttaaaaagcagtaggaaataatgtagt

SEQ ID NO: 279023 - DNA, 122 bp, Homo sapiens
tgtgtcctgctgacctgcctccccgcggacaggcctaacgatgaggcctgaagttggctacgggaaagaatgaatttcccaagggcaaccgaggtccctttgcccagcagcacagagcaggg

SEQ ID NO: 279024 - DNA, 122 bp, Homo sapiens
agggccccacgcgagggcaccacgtccccggcgtctccccgggctccaggggcagcagcgcggctcggagccctttacctgccaacgatcaccacgcagccggccgcggaggacgccatggt

SEQ ID NO: 279025 - DNA, 122 bp, Homo sapiens
cgtctgagagcaactctttttaaaaacctgccctgttgtatataactgtgtctgtttcaccgtgtgacctcccaagggggtgggaacttgatataaacgtttaaaggggccacgatttgccc

SEQ ID NO: 279026 - DNA, 122 bp, Homo sapiens
gcccacatcatacaagggacgcgtgggtgcgggcaaagtacacatgaattctccccgtggcggggccggcgggcgttgcagacagagaccccactggcaaggcccggaggtgggaaagactt

SEQ ID NO: 279027 - DNA, 122 bp, Homo sapiens
cgttacccctctggcaggtcgggaggatttcaagccccgtgtgggcagtcacgtaggcaccggctacaaatcaaatttccagcccgtggtctcatgccaagccagtctggaggccttagaca

SEQ ID NO: 279028 - DNA, 122 bp, Homo sapiens
ttccagcttcactccaggcccagcccttgccaagatgctggctctctggctgagtggcagcgacggtcccagtgggataggaccagcatgaatctgccagccttcaatgagccacgatccta

SEQ ID NO: 279029 - DNA, 122 bp, Homo sapiens
tatgttgcccaggctggtctcaaactcttggcctaaaacagttctcttgcctcggcctaccgaagtgctggggttataggcatgagccaccatacctggctgtatgctaatttcatactaaa

SEQ ID NO: 279030 - DNA, 122 bp, Homo sapiens
ttatatcagttagcctggtttcactatacagtacatcattttgcttaaagtcacagcttacgagaacctatcgatgatgttaagtgaggattttctctgctcaggtgcactttttttttttt

SEQ ID NO: 279031 - DNA, 122 bp, Homo sapiens
agcgggtctgagtgagtggagttcgcccctgccagcgcggaagtggccggccagttccagcgcctgcgcactacagttcccacctcatttgctcgcacgttccctcccacgaggacttgaga

SEQ ID NO: 279032 - DNA, 122 bp, Homo sapiens
cagtccattcggtgcctggaacctcactcttagaagattgatacccttgcgcattctttccggaggctgcacaacttgctgttcatattactaatcttatccactgctcattttgtgaaatc

SEQ ID NO: 279033 - DNA, 122 bp, Homo sapiens
gtctcctccgggtggccagcggccaagtttcctccagcccagcgagtccagactatagtccgttcgagatcctcgaaggccggggaagcgagtcttgtgaggagagaaagcgagtgggcagc

SEQ ID NO: 279034 - DNA, 122 bp, Homo sapiens
tgcaccttcagcttttgtagatgtcgccccaggccttccacgggatcctctgttctaaagcgcaggcgcccccatctcgccactctctaccacgccggtcttggccagcctttgtctgtctg

SEQ ID NO: 279035 - DNA, 122 bp, Homo sapiens
gctaggggaccttggtcgggggaggtctggtcgtcccctcccccttccgccccttcctgtcgtcccttcgagctggcgctgctctgagttaatctccttgcccgtcagggggtgacaggagg

SEQ ID NO: 279036 - DNA, 122 bp, Homo sapiens
aatgtctgtggggacttgtctgccttgtccttgttctgttcccagcagccggcacacagtcggagctccatgaatgtgtgctgagttaaatggctgaagtctgggacacagcctaagcatta

SEQ ID NO: 279037 - DNA, 122 bp, Homo sapiens
ttggctcaggctggagcacagcgaccgacgtcgaggctttaatgaagtccgtgtgagtggcggtggggcggcctcgctgcacagatggctctttgtccccatgacacctgccatctgcttgt

SEQ ID NO: 279038 - DNA, 122 bp, Homo sapiens
gccctgggcgagcactgagggaagcttggcctcagacatagccagctgccctctggacctcgcagccctgctgtgcccagctcagctgctgtgtcagtgcaaagccagggtgacatcagctg

SEQ ID NO: 279039 - DNA, 122 bp, Homo sapiens
acgcggggaggaggtgaggatgctgctttcccaacagctgggccgcctcgtccttgtcaccgctctggtttctcagcccaggctattttgggtcaggctgcgaggaccgctgcgtcagcgag

SEQ ID NO: 279040 - DNA, 122 bp, Homo sapiens
gtacttccacattgtgagggtgccaaggatttggttattcctgaacctgaatccgaaaagcgggggtggggtttgcgatgacaaatgagggtgagaagaatgtttccatgaaaccagacacc

SEQ ID NO: 279041 - DNA, 122 bp, Homo sapiens
atggaggggtgggcagggaagcttcttccaggaaggcacgctggagctgagactgagggtcgggtagcagttaagtgtgcaaagagggatgggaaatctgagccagagggaagaacaggtgt

SEQ ID NO: 279042 - DNA, 122 bp, Homo sapiens
ctcagcgcctgtttatcataaaatcatttacggctccataaaacgtgttcatttgggcggcggtgatgtatgtctttgatttaggagctgacacttctgcccagtggctgcccagcatgggc

SEQ ID NO: 279043 - DNA, 122 bp, Homo sapiens
cctccccctccccccgaggcagctgattggctgttgaaagttccgcccctcctaattggccgtggcccgtgccgtggcccgccccttgctgtgtctcctctgattggttgcctttgaggctg

SEQ ID NO: 279044 - DNA, 122 bp, Homo sapiens
tcccaaacactggggaaagagctgtggtcattaagtctggacagctaggcaggagctagacgtgcaagaaatcatattgagttagaggaactactgtaagaaaaactgtttggctctgtggt

SEQ ID NO: 279045 - DNA, 122 bp, Homo sapiens
ggtttcacggggcttggatcagtttcaaccttgatatttcgtcttggctttcctgggccacgtggggagggtaagctagacgccacaccctcctgtggtatgtaggacttattttttcctgt

SEQ ID NO: 279046 - DNA, 122 bp, Homo sapiens
aatggccaaagcacaagacagggtggtgcagttttgctcccgcgcgatcaccgttggccacgcgcctcggtctctatctgtaaaagagatccgcatctctggtatttgatgctggagagaaa

SEQ ID NO: 279047 - DNA, 122 bp, Homo sapiens
aagcgccgcgcgggggcggggcttgctgaccgttgtgacgtgtgggcggggcaggcgggacgggctctcccttgggtgcttagccccgcccccgtcccactctgccctgttgctgtcgcgcc

SEQ ID NO: 279048 - DNA, 122 bp, Homo sapiens
ttcattgggtgagacattttgaattagaaaagctcaaaaggggtaagcacaaaaagtttacgggacgaaatcaaaatgctgagatgcaagatgggaaaggtgggcttcagcttgaatgacag

SEQ ID NO: 279049 - DNA, 122 bp, Homo sapiens
gtggcggcctttcctccaaccattcccaataaaaccaaacaaaagccggatggagggaggcgtcagctggctgaggaagacccttaccagcgccagcagccccgccgtccttcccaaggcag

SEQ ID NO: 279050 - DNA, 122 bp, Homo sapiens
cagaccaatgaagaaatatttttttaaactgtgctttatttagggctaagctggagaaagcgtcatccaatagttacagaaggttacaaggagttttagggagttgagtgtgaaaagagcag

SEQ ID NO: 279051 - DNA, 122 bp, Homo sapiens
tggcgcctgccttgcccgccgcgctaccgagctggagaggcacaaagagcccgtgaggcccgggccccctggccaggagccctggaacctccacagggtcctgccctcaccccaccgcgacg

SEQ ID NO: 279052 - DNA, 122 bp, Homo sapiens
tgagatttgggtagggacacagagccaaaccatgtcaggaggattaggtgagaccaataacgttcttagaaacatgcttggcataaagtcagtactgtatgagcatttgttaattacagttt

SEQ ID NO: 279053 - DNA, 122 bp, Homo sapiens
gtctcggacatgttgagaatcaaaaactcgggtacaagtggcaaagcgccgatgaagcagcgcctgggcagggccgctgtatatatagagcgcaggcgcgctctgattggtgctctggtcgc

SEQ ID NO: 279054 - DNA, 122 bp, Homo sapiens
catttcatccacactcctgggagagccggcttcacctcagtcccgacagctgcgtgcgagcgccttgcaggtggctgggggagattcacatccacttctgcaagacacgggccccccactcc

SEQ ID NO: 279055 - DNA, 122 bp, Homo sapiens
tcacaaagtctccgagaaaacgcacgaaaaaataaacccaaactttctgaaaccaacccccgacatgccagctcctaaacccgacagacatccccgctggacactcacctccttcccggctt

SEQ ID NO: 279056 - DNA, 122 bp, Homo sapiens
ctgatcgacgtggaccctgcgcacgtaattccggcagagcggcagcaggtcgaggatcaccgcagggtctgtggtgcctgggataaagtgctttagcaggttctccaggtgccgctcgaaga

SEQ ID NO: 279057 - DNA, 122 bp, Homo sapiens
gtctgtcattagaggggcccgaaatgataatagcttccatttatgtactgctttctaggtcgctacgttttgtttacattcattatttcatataggcctcataacccagtgaggctttattg

SEQ ID NO: 279058 - DNA, 122 bp, Homo sapiens
atggtgttgcttcacacatgggatgctttctgtccccacgcgtgttgctgtgggtgtcggcgcttccttcctttccgtgtatcccttcatcagtggacgcgcgtttggaggctgccaccttt

SEQ ID NO: 279059 - DNA, 122 bp, Homo sapiens
ttggccgctcccgggagagggaggaggccgcagcgccccctggtggccggcgcccggcggcgggatgaccgagccgccctctgcgcggagatctcagcagcaagacccccggaaaggggggt

SEQ ID NO: 279060 - DNA, 122 bp, Homo sapiens
cgcgcaagcgcgctggcgtcacgcacgccgacagacgtggcggcgccggagtcctaggcgcgcaaggtccagttcccgtcttgggcctgtcctggatagcgttagggagacagttcacaggc

SEQ ID NO: 279061 - DNA, 122 bp, Homo sapiens
agcaggtggccgcagccatggaggagatctctgccgccgctgtcaaggtcgtgccgggcccggagcgcccgagccctttcagccagctagtctataccagcaacgactcctacatcgtccac

SEQ ID NO: 279062 - DNA, 122 bp, Homo sapiens
cccgtgtcaatccatccgagacacaacacagagaagttgctggattgcccatcgcggacccgcagctgccactaccctctcccggaaaaaaaccaaaccaaaccaaacaaaaaaaacagaac

SEQ ID NO: 279063 - DNA, 122 bp, Homo sapiens
ctgggtcaggaaggcagtagcgtatttagactcgccagagtggagagccaagcagcaaggcgactctggaggactacacgactttgagcaacctgtaagtcgtcactaatttatgtgctttt

SEQ ID NO: 279064 - DNA, 122 bp, Homo sapiens
aacttttgcaccgcttctatggaccagttttcttaaaaaatacacaatcctaggggtacacggtctaatatttataaaataagcacttgttgaaaattacttccgaacagttcaccataaaa

SEQ ID NO: 279065 - DNA, 122 bp, Homo sapiens
gaaacagtttattttcatcttagaagattctagctatctgtggagaccaccactgttccccgaaaagctaaagttgttaagtttgtaggagtaccacaggtccttccccctgctgcaagaca

SEQ ID NO: 279066 - DNA, 122 bp, Homo sapiens
gttgtgaggcagtgcggttgggctccatggtgccagcctcctgggcggctgctcttggcccgtgtgccttgtggccagcagggctcagtgagacatcctcagcgagcctgcaaccatccgct

SEQ ID NO: 279067 - DNA, 122 bp, Homo sapiens
cattttgggggttggaagatttgtgggaaggaggacatagattttcatcagatgtccttgcgtcctttccttgcgaggattattgatctctagtcttcatatgtaaggtgttgaatttattt

SEQ ID NO: 279068 - DNA, 122 bp, Homo sapiens
cctgggagcagtggcctgaagcacctcctggggcctctaagtcccgtatcgagtggccggcgccatgtcccatcactcagggtctcctttaagtgccgaacttcactgagtctgcagcactg

SEQ ID NO: 279069 - DNA, 122 bp, Homo sapiens
agtgtctcccgatactacccagtgtgccctgaaggggcaaaatcaccctgggttggagaccgttgccctaaagtaatgcttttcaaaggtaataggcaagataattcagggtgggctgcagt

SEQ ID NO: 279070 - DNA, 122 bp, Homo sapiens
cctgactgaaggaggccgcggacctgactgaaggaggccacggccacttctggttggcctcggggcgcgctggctcggctcttcctccgccctcgaggcccccgcagtcccatcattcagtt

SEQ ID NO: 279071 - DNA, 122 bp, Homo sapiens
cggcaccctccaggaggacgcccggccttctccccacttctgcctgggaggcccctggcccgccgggctttgtcctatttataaacgtgctcctgagtaaactccctgaagaaaggggcctc

SEQ ID NO: 279072 - DNA, 122 bp, Homo sapiens
gagaaggagactgcaaggataggcccaggtcggtgcgagggacggtggtggggcgggggtcggaacgtaaggaaagcccagtctgagaccccaaccccctccaccccatcccccactcctat

SEQ ID NO: 279073 - DNA, 122 bp, Homo sapiens
cacaaatcagctacatctacggccagggctctctataccttcctgaatagctgtgaacaccgagcatccctgtgactatagtagttacatgccagccatttgagcaggtgctgcctggcctt

SEQ ID NO: 279074 - DNA, 122 bp, Homo sapiens
gaggggaagccggccagccgcttccgagagaacagtgcacatgccttcgtgaatgcctaacgtgggctcacgcagggattaaatgcatcttggaaaggcttccgaacgcacaatgtttatga

SEQ ID NO: 279075 - DNA, 122 bp, Homo sapiens
cacacacacacacacacacacacacagatgtaagggcatggtctctcttccttgaagctacggaattacaattctccttcacaaagacagtcaaaggatgtgatctgatgtgttagattttc

SEQ ID NO: 279076 - DNA, 122 bp, Homo sapiens
gcagatgggacactaagactctcagaggtccagccctccaaaatactgaagtcctagttccgctggattgaaaatgggcaacgcagaacggggactggaaattttttaaaaattgtttttaa

SEQ ID NO: 279077 - DNA, 122 bp, Homo sapiens
tcccaactaggcggccttgcactccgtgtgcactggccacacatccttgcctcctccacccggtccgccgccggtttccttggaagttaaatcttggaggatttgtccacacccctcacgtt

SEQ ID NO: 279078 - DNA, 122 bp, Homo sapiens
cggagcctcggaccgcgatccgtcccgggatctcaggcgcctgtgggccgaggcggggcgcgcagcctgtaccacagcttgcgccacggcggaccctgtggccaggggccaagtttgcgcaa

SEQ ID NO: 279079 - DNA, 122 bp, Homo sapiens
gccccctttcctcttggttccagagatttctaactggttctggcccctgctggagccaaacggggacagcaccaggcagagggccccacccgctccctgagagcccagagaaggctgggaaa

SEQ ID NO: 279080 - DNA, 122 bp, Homo sapiens
tggcttctgccgctgtctttcacaaccgcagccagtcgagcggaggcacacccaaagccccgcccccttagagttcaaataggtggtgtctcccaggctgctgagatcagttaatgagacgg

SEQ ID NO: 279081 - DNA, 122 bp, Homo sapiens
ttgggtaagaggatgatgagtaaagaactggctaactggtcccgtacccactgcgcatctcgcagagcgggctcccgaatctcctccggcagagcgtccccgagcttttgcacgaagcggcc

SEQ ID NO: 279082 - DNA, 122 bp, Homo sapiens
gctgggatggtgaattcgacaggcatagcgtgccccatgctgctcagtggtgactgggggcggctgcaagtgcccagagaggctgacagagccatcggaatggtggcgcagggccgagagcc

SEQ ID NO: 279083 - DNA, 122 bp, Homo sapiens
tgggaaggactcttgtggagacccggacgtcaggcgtggcgcgttggggaagcagctccacggggacccaggaggcgccggccgggttgagccgggttggttccgacccaagagagctcgtc

SEQ ID NO: 279084 - DNA, 122 bp, Homo sapiens
ggagctcagacattgttagcggctctcagtgaccttccccagcaaagtgaaagctcagcccggacgcctccctcccaacctggtcccaaagcacctttgtagatttattgcccatgaattgc

SEQ ID NO: 279085 - DNA, 122 bp, Homo sapiens
tccatttgggaaaccatgtagccaaggctgttggggcgaaccaaggtggtgggagtccgacgggccagcagggggcgcacttgcaggtcacctgaagtccttatttacgggataaggtggag

SEQ ID NO: 279086 - DNA, 122 bp, Homo sapiens
tgaaaatgactcagcagcttctcttcagtgaggcaaaacagttcttaaagcataaagtggcggctactaaagcaatgcaaccgaggccaggcatggtggctcatgcctgtagtcccagctac

SEQ ID NO: 279087 - DNA, 122 bp, Homo sapiens
ccaggattccaggagaaactgagcactggagcagtggcaggagtgggtccctgtgagtcacgctgggaattcttaactgttcagggcacttttagggacaaagttaaggtagaacatacttg

SEQ ID NO: 279088 - DNA, 122 bp, Homo sapiens
cacaaagatctagattggtgatctggcagatgggtagctttgtgtgactgcccactgtggcgagcactgtattgctggtccctagaagcatttaaggagaggcattatagtcagcagtggga

SEQ ID NO: 279089 - DNA, 122 bp, Homo sapiens
gaaaggaatgtgtggtccggagaggggtaggaagaaaagggtgataagtttagcttctgacgtgtttccttcaagatgcctgttggacattcaagtggagaattctattaagcagtggaaaa

SEQ ID NO: 279090 - DNA, 122 bp, Homo sapiens
gctcgtgtaccagagaggcccgtacccttgtctcctggccgggtccagcactggagtcaccgtctcggcgccctcgagcagcagctcgggagtgcccggcccgtaggcgccccccgcccggt

SEQ ID NO: 279091 - DNA, 122 bp, Homo sapiens
tttctttattgctgtctgtgttctcatagcccactgatgatattgtcctaatggcacaaacgctggaaaagatattcctacagaaggttgcatcaatgccacaagaagaacaagagctggta

SEQ ID NO: 279092 - DNA, 122 bp, Homo sapiens
agatggtttcagattcccagtacccccacgagcacagaaacatccttacctcgcagtagacgcagcaaagaaagaacgtctgtcgtcattacgtacttgtatcgcgtaaggggcctgcgtat

SEQ ID NO: 279093 - DNA, 122 bp, Homo sapiens
accattaatttcccaaacatgttcggaaaaacccaatccatctggtcggtgccgacatcacgctaatatctactcaagcgtgtccgtgtgtggaacacagggtctgcagtcccagcgtgtgt

SEQ ID NO: 279094 - DNA, 122 bp, Homo sapiens
cggtgtgagaaagctggaagcctgttttctaggcggggaagcagcctgcgctgccggggccgcatcatggcacgtgggtttccccgggcttactctcctgccagtagcgctgtcctagggat

SEQ ID NO: 279095 - DNA, 122 bp, Homo sapiens
tagggggatcccatctctacacacaaaaaaattttttaatgaaccaggcattgtggcatgcgcctatagtcccagccactcaagaggcacaggcgggaggatcacttgagcctgggaggttg

SEQ ID NO: 279096 - DNA, 122 bp, Homo sapiens
aggcttctccgaaagccgcgagggcagctcccgtgtgtccgctgtgcaaaccggtccttccgccaaaaacctgctgtctggcttttctcaggtaagaactacccaaaagctagacgacattt

SEQ ID NO: 279097 - DNA, 122 bp, Homo sapiens
tggcagctgacaacgcagacacgctctacggaggcctgctgataaagggctcagccttgccgtgtgctgcttctcatcactgcacacaagtgccatgctttgccaccaccaccaagcacatc

SEQ ID NO: 279098 - DNA, 122 bp, Homo sapiens
cggcaggctgggagcccagaaggcgacacaggaattgcgaagctcaggaaccagccccctcgcttgcttcctcctccatcgcccggatcgagggcggccgctccgcagccgcggcctcctgc

SEQ ID NO: 279099 - DNA, 122 bp, Homo sapiens
cgaccggagccaaatagcgaggctgagacgtgggccaggacgggctgcagggccgctgggcgcttgggcgggtcttacctcgggctccgccgcggtggccaccgcagccccctcctcttcga

SEQ ID NO: 279100 - DNA, 122 bp, Homo sapiens
caacattttctttcccgccaagtcttctcttggcattgtccttaaacggatccctcccttcggtgttcaaagcaatctgcctggttgaagctatcaacccttctaaaagaggaatcttccat

SEQ ID NO: 279101 - DNA, 122 bp, Homo sapiens
ccacgctccggcccgagtcctgccgctcctgggcccgcgccgcggcctcccggagcgcgccgggccctcccccgggaagcccggcccccggcccccggccccgcccctctcctggccgccgc

SEQ ID NO: 279102 - DNA, 122 bp, Homo sapiens
caggatggccctcagagccaggcctttctgttcagggatcaggtgtgtctcagagtgtcccgagctccacattgcacatgggtcctgtccaaggtcagggggacacccacccagtatcctgg

SEQ ID NO: 279103 - DNA, 122 bp, Homo sapiens
gcagctcattcatggaagaaaagagggagtatttcttctctaagtaatcatgaattttggcgaaaggaaattcatgggcgcatcaaagagtgagtaactgtctaaaattgtaaattcattta

SEQ ID NO: 279104 - DNA, 122 bp, Homo sapiens
gaattaaaaataccccctcagagcgatctagcctcccgaattgttttttcttttaagatgcggatggacgtacgtgtgggggcatcccagcccagccacgccgaggctcggaagggctaaga

SEQ ID NO: 279105 - DNA, 122 bp, Homo sapiens
acttttactgtctatatgtgcagaaataggatagaaaaacgtgaggaggcagaagtctgtcgcttgaaaactaccagagcaaaaccatcgcttggaggtgtcggggatcgaacccgaggcct

SEQ ID NO: 279106 - DNA, 122 bp, Homo sapiens
gcgggcggtcatgcagaagcgcatttccttccggagcccggaggagcgcaaggagggtgccgagaagatggttagggaggcagagcagctgcgcttcctgttccggaagctggcgtccgtga

SEQ ID NO: 279107 - DNA, 122 bp, Homo sapiens
aggcaggacgtaggacgcgccgttagagatgggggttgctcacagctctagtacttggcacgcagctaaggttgagtcattgacaacttcctgcacagccacataagctgaggaataacatg

SEQ ID NO: 279108 - DNA, 122 bp, Homo sapiens
ggaagcagcgtccgggccctcgggtaacgtttgaagagctggcagcgtctcaggctgctgcgtggcgaaggggcggaccgggggacgggggggtgggcccttaggggctggggcgggacttc

SEQ ID NO: 279109 - DNA, 122 bp, Homo sapiens
cagatgaactgaccctgcctacgttagctgctacctggacgtgctgtccccctcaggcagcgtctgtcccacctacccctgacaccactgctctgtcaggctctagctgaccaaaggtttca

SEQ ID NO: 279110 - DNA, 122 bp, Homo sapiens
ttaaggtcctgtcccatttctctcctcaattttactgcctccttttcctcaccactcactcgttgctgtgatctgagctttgccactgccagttgaccaaaactgtgctctggaagtgactc

SEQ ID NO: 279111 - DNA, 122 bp, Homo sapiens
cctcattttaagaacctcaggccactgagctggtgattaccagtgactgaggcgaaagtacgtactcctgggaggaagggagctcaggtggaggggtggaggatggagcactgctcaggagg

SEQ ID NO: 279112 - DNA, 122 bp, Homo sapiens
accctgaaggactgcgtggtgggagccctgcaccgctcctggccccgggccccctggatccgtcggggcgcctccacccagctgttagcatgatgtcttacctcaaacaacccccatacggc

SEQ ID NO: 279113 - DNA, 122 bp, Homo sapiens
tgacttcacggcgtggggattccggagaagggggtggggcggcgccccccctcgcttccccgccccccggcaagccccgctcctcacccaagccgcgggggaggagccctcttctttcccgc

SEQ ID NO: 279114 - DNA, 122 bp, Homo sapiens
aaaggtgaaaaatgcagttggagttccaagtaggggcttctgcacagcagtagtgtcctgcggctggagccaggctgcagtagtgagagcagtcgggagggaagaggggcagctgcttaaga

SEQ ID NO: 279115 - DNA, 122 bp, Homo sapiens
agagttgaccagttcgggtgtttaccaatctgagactggcctcccctgaggttaccctcccgacccctgggggttttgagcagggaggttctgtatagggatactctgttctattggagggg

SEQ ID NO: 279116 - DNA, 122 bp, Homo sapiens
agcatagcctcttctggtcactcgttctctggcatagacttcttctctgtgggctggcagcgaacagtggggccttcagcatcattattgctcaggtcagtacaaaggaccacataagggag

SEQ ID NO: 279117 - DNA, 122 bp, Homo sapiens
tctcttttgcatcccacctcccagtctaaatctgtgcacctaacatttaatagaggttcccgcagaaataagacacattcagggaagcatttccttccaagtgacagaatcaaagaacacta

SEQ ID NO: 279118 - DNA, 122 bp, Homo sapiens
tgagcttccttcctccctgagagcaaacacttattcttccgtgaaacatccactgttcatcgcagcggtgggcatgcagagcgcagctcagtctcattgagggggttgttccaactgagttc

SEQ ID NO: 279119 - DNA, 122 bp, Homo sapiens
ggtgggtgggttctatcagtttagaaccttggcctctgcctggcgcactgtggtcagggacgacttctccattccagcctggactggaaagggacccatgatctcttctaccccggaggagg

SEQ ID NO: 279120 - DNA, 122 bp, Homo sapiens
aatgttttcttaggtcagtagcacctgagaacgattctgctctgattagacacaaaaatgcgacaggacattattgtgtcgttttacaaacgtcagttcaaatacatatgaattgctgagaa

SEQ ID NO: 279121 - DNA, 122 bp, Homo sapiens
ccgagccgaccaaagcacatcctgcaaaattctagacccccgcaaacggcgggaggcggccgtgcgcacaacatcctgcaaacgccgccctctggtggtggagctggtgaactgcgcccagg

SEQ ID NO: 279122 - DNA, 122 bp, Homo sapiens
gtgcggaagaagatccagaaccggaggcacctggacttcctggacattctcctgggtgcccgggtgagtacattgttgcccacccctacctgaggactggtcccagagaggtcttcaaccat

SEQ ID NO: 279123 - DNA, 122 bp, Homo sapiens
taattcctatattcattcaagaaggaattcaactcagttttcaattgttttgttctgttacggaatgttaggtttagtgacttagattaaccagttctaaaaacagattacctgggttgtat

SEQ ID NO: 279124 - DNA, 122 bp, Homo sapiens
gcagctgggaggagggaccagggcgcgcggctacagctgtgcggccccaacctcagcgcgcggacccaggcctcacctgcgagccctgccaccaactttatctcgctaggcctgccctttac

SEQ ID NO: 279125 - DNA, 122 bp, Homo sapiens
ttcggaagaggaagccgggagtgcaaaccccggggtcgctgggggccggaaggactccgccgaaggtgaggggcaaaaacggcccacactgtctaagacgcccccacgaagcccaccgcggc

SEQ ID NO: 279126 - DNA, 122 bp, Homo sapiens
ctggctggttttttcctggatggctgaggtcacttctcagtgacctacaagtcacgtccacgtttctattctgctcggtgcgctaacctaaagaagaaacccaacgtttacttgactaactt

SEQ ID NO: 279127 - DNA, 122 bp, Homo sapiens
atataccctgtcatcatgtcatcaatgggaaaaaccgacaagtaactgattattgccacacgatgtgacagatgctacgacagaaataagaacagggtgctccgggaacaacaggggaggca

SEQ ID NO: 279128 - DNA, 122 bp, Homo sapiens
cgtttctccatcccgaagttcttcttggtttttatcctaagtactgatgtcaggatgactcggcagctttgacgagccatctggccctttaggcaggaagccagttggccttcctcctccca

SEQ ID NO: 279129 - DNA, 122 bp, Homo sapiens
gctgctctggcgaggcgttccacccggggaatttcctacccgggagcgctctttggatcgcgtcactcaggctggccagagtccaccgcagggatgctccacagggcaggcctaagccaccc

SEQ ID NO: 279130 - DNA, 122 bp, Homo sapiens
acgtccggcgggagtcgggggcgcggtccgagggctgcacttttcgggagcccccgcccgcggatggctccgactgcaagttccccatttctgacggagctcggagactagtcagaaaaatt

SEQ ID NO: 279131 - DNA, 122 bp, Homo sapiens
tccctggccatcctcagggtcatccgcttggtaagggtttttagaatcttcaagctctcccgccactctaagggcctccagatcctgggccagaccctcaaagctagtatgagagagctagg

SEQ ID NO: 279132 - DNA, 122 bp, Homo sapiens
ttccagccttggaccgcttgcttctcctaaccccaaaactccagatgtgcgaaatggctccgctgtgcgacccagcagttagcggcaggagggacagagggatgatgtcaactcgttttgcc

SEQ ID NO: 279133 - DNA, 122 bp, Homo sapiens
aatgccctttcgacaccaacacaaattaactatgatgtttaattctgataaaaggtgcttcgaaaaaaagtgggaatggaatcacattatatgtaccgtctcccaaatcgcctgtacatact

SEQ ID NO: 279134 - DNA, 122 bp, Homo sapiens
tgcggggcgcgggctggcgtggggcgcagcccacagctgggtcggaaggcggaaatcgggcgccgggccggaaggcaagaggcgggcacctttccggaggacaggaggcggaaacgcgtctg

SEQ ID NO: 279135 - DNA, 122 bp, Homo sapiens
ttattcttattataaatctagtaattgttactacagtggtgactttccttgacccatctacgccgattccctctccgggactgcgcccaaagcttccaattcccgcccacccggaggattct

SEQ ID NO: 279136 - DNA, 122 bp, Homo sapiens
cactgatgctctatccaggctgggtgtccccagcatcgtgggacctggatttgtgtgcaccggggtggttcccaggccaggagggtccctctggcaggcccttggtgccctcgttttgcatg

SEQ ID NO: 279137 - DNA, 122 bp, Homo sapiens
ctcaagtgatcctcccgcctcagtctcccaaagtgctgggattataggcgtgagccaccgcgcccagcccctggtgccttctttaacactgggtgggaagagagtgtcctggcgaggcctct

SEQ ID NO: 279138 - DNA, 122 bp, Homo sapiens
gcaagggtgagaaggtttggttttcccaagctttgccaaggtcaaaagcattatgaagaacgttactgtaattaaacatcatgaaagcatcatggaggatgctgttgtaattaaaccaacag

SEQ ID NO: 279139 - DNA, 122 bp, Homo sapiens
tctgaattccaaggctcttggtgttttcctctttgaagtgcttatatagcctctcttctacgtggtgtcacacaggtgggatgttttcctttctcaggtttatatcaaatcctgtaggaaca

SEQ ID NO: 279140 - DNA, 122 bp, Homo sapiens
ctgcatttatctttgacacaaatcataccgaaggggagaagttgccccttctgaagaatccggtttaccaggatcacctgaaactcccaaaagaatgcagcaactaggcaaagagtgtctcc

SEQ ID NO: 279141 - DNA, 122 bp, Homo sapiens
gttcccgtgctcaggacagactggagggaagcaggaacctgggaatccctaacatgcttgcgagcagtgacctggagactggcctctgcctcaccccccacaccagtcagtgtttccactgg

SEQ ID NO: 279142 - DNA, 122 bp, Homo sapiens
gagagtgagaagagtgagccggggaggagcggcggggggaggggccagtcccccaagacccgcatcccgaggccgagagtcccgggagcctccactccagccattgttcctggtgggcggtg

SEQ ID NO: 279143 - DNA, 122 bp, Homo sapiens
accacttgaggccactggtggaaaagcagcatgccctggggttcattttcagcctggtcgcgggcggcctcctgtgtgcccctttccctgatggtctggtgccctcggctccctccccacct

SEQ ID NO: 279144 - DNA, 122 bp, Homo sapiens
ccctcacctgcctttgcaccagcaaataaagtgcatcccattttcgtgtgagcgtcggcccggtgagtcagcccttccgggccctttcctgttctcagggcagggggcgtgcgctgagccag

SEQ ID NO: 279145 - DNA, 122 bp, Homo sapiens
cctgaccccttcatgggtgggggcaggaactggagcacataggatctagaactagctggccgctttgggtctggcaggggtggactccattcactgggtcccactgcgttccacaggaacgg

SEQ ID NO: 279146 - DNA, 122 bp, Homo sapiens
aataatgcatttttaaaaaataaagcagagggcagtgcttaatagtctggaatgctgtttcgggagttggtagataggcacctcaagtttattttttaaagtccagataaaaccattgggat

SEQ ID NO: 279147 - DNA, 122 bp, Homo sapiens
gggaaggtgggatttggggggcgctggtgggcacccctggatctggcggctgcggcctcgcggggggaggctgatcggtgacaggggcagggggctattttgggggtagaaggcagtgagag

SEQ ID NO: 279148 - DNA, 122 bp, Homo sapiens
agcctgaatcctccccccacccttcgagcagctccatcacggtcgtccgtgcagcttgggcgtatgggaatacgtcagaggcgttttgctcgcctttccaaaagcaaagcaagagaaggaag

SEQ ID NO: 279149 - DNA, 122 bp, Homo sapiens
ggaattacagaataaaccagcagggagcctcctcgttcacccaacccgaccccgcccgcccgagtctcccatctggagcctaaaaactgagctgagatcacagcaactgaccccgtcccctc

SEQ ID NO: 279150 - DNA, 122 bp, Homo sapiens
ctggagcatcacagtttttcagtgggtgccactgcataatattaatagcaagagtgaacacgtatggatggctgaccttctattacaggaataaggagttctcatgtactgaatgctcacta

SEQ ID NO: 279151 - DNA, 122 bp, Homo sapiens
ctggtgctggcagagagccttctgctccgatttgaggtgtatgcattttatgctgtaaagcgtggccagtcacaggaggattcaaaggcgaggagagatatgatcaaatctgcacttgggaa

SEQ ID NO: 279152 - DNA, 122 bp, Homo sapiens
cctgcatgttctgacatgtctgagtatcttacacctctcgttttctgccctctcggtagacgggccttctcagttcttcctgcctactagagtgtttgtgtatgctgttcatggcaagaagg

SEQ ID NO: 279153 - DNA, 122 bp, Homo sapiens
agacttgttgtagaacttatggtttatgaacaagcaaatccagattgtcaggcggctattcgccccgtcaaaggcaaaattccacttggtggtgatatactcacctcctacgttaaagcctg

SEQ ID NO: 279154 - DNA, 122 bp, Homo sapiens
aaccactcatcactgtcgggtgcaggtggacgtcccctcacggtaaggtcagagtgctcccgcccagcgcgtggctccgcggcgccctgtgtgcctggggggtgagagagggtggcgggggc

SEQ ID NO: 279155 - DNA, 122 bp, Homo sapiens
cgggcgaggaccccacgcaagcccgagccggtcccgaccctggccccgacgctcgccgcccgccccagccctgagggcccctctgcgtgttcacagcggaccttgatttaatgtctatacaa

SEQ ID NO: 279156 - DNA, 122 bp, Homo sapiens
tggtgggtgcctcgcaaccctggagctgcatttaagtggactgtctcccagtgacagaggcgggcggctgcacttagctgtgccgtgggcttactcacagggggtggagacaagatgacatc

SEQ ID NO: 279157 - DNA, 122 bp, Homo sapiens
caggcgccgcgggagctgttcctacccaggtcaccggggagaggtggctgtgcctggggccggtgcccggggcctctgtgtccgcacaccctgctccttggtgctggtggcacaggggctcc

SEQ ID NO: 279158 - DNA, 122 bp, Homo sapiens
gggtggtggctgtgggtggggttggctgggtgacggcctgtctccctccgctagcctcctcgggtccttcgggaggcgccagattgtgtgggcggcatcgcctggggacagtgggatggggc

SEQ ID NO: 279159 - DNA, 122 bp, Homo sapiens
acctcctgtgtccatcagagagctggcggtcaccatggcaatgcgggagctggtggaggccgaatgcgggggtgccaacccgctcatgaagctcgccgggcacttcacccaggacaaggccc

SEQ ID NO: 279160 - DNA, 122 bp, Homo sapiens
gcagtccctgacgcaagcagcattgttttagggtaggagtttttataatggctgtgaggtcgagtgcctaaggttgataaatggcagttgttatcctttgcagaaactcagttggaatcctt

SEQ ID NO: 279161 - DNA, 122 bp, Homo sapiens
gacagcccctccgggcggaagggcggagccccagctagcgcaggcgcaatagcgcaattacgctgcccagcgtgaaactcatcttttcgcgagaacttgtttttccgggatggaaatgacag

SEQ ID NO: 279162 - DNA, 122 bp, Homo sapiens
gaagataaccaaagtctcccaagcacattcattagtttctttaaggaggagactgggtggcgtaagggaccacagagccgaatgttgcagactgactcattgcattctccatatactattgc

SEQ ID NO: 279163 - DNA, 122 bp, Homo sapiens
tgtttcttcaggggcacagtggcagatcatccagagggtcctggagcagtccagttccagcgccgtcctgccacccctgtgggtgtccccccgggccagagaggagtgacaagtgggaggaa

SEQ ID NO: 279164 - DNA, 122 bp, Homo sapiens
ttttcataaaaatgaaaaacaatttgaccaaaaattgtgtcagaaataactttcacataccgaaagcttgcctacatgttaaaagcatttgcaagagtacacatttttttttttttcctgag

SEQ ID NO: 279165 - DNA, 122 bp, Homo sapiens
gagctgggactacaggcacaggccatcacaccttgctaatgtttgtactttttgtagagacggggttttgccctgttgcccaggctggtcccaaactcctgcacccaagtaatctgcccacc

SEQ ID NO: 279166 - DNA, 122 bp, Homo sapiens
catatatcactgaacacaccagcaagtcttattataggcttgagaactctgagaaggatgcgttttcctttttatttatgccacccatgttaaccttgaggctgtgtactgacatttgcagc

SEQ ID NO: 279167 - DNA, 122 bp, Homo sapiens
tgacttctcctagcatttcgcacccgctcagttccagtgtgaagaagtgggggcccggaacgctgggcccgaaagggcaaagccagggcctacaccgcagcatggtcaccgaggcggctagc

SEQ ID NO: 279168 - DNA, 122 bp, Homo sapiens
tcttgcgcctcgagtctcctttgtcctgtaggatctggggcctgcctgggtcattcgggacgatctcctcggcgcaggcctttcactgagcacgccctcagagaccctttttccaaataagg

SEQ ID NO: 279169 - DNA, 122 bp, Homo sapiens
aggtgaggaagtcagtggaggatgctgataacgctgtttccagagttactcttcctttgccgggggtggctgcttcaggctggggaggggctcgctggcagatttcgggaaggacaattgtc

SEQ ID NO: 279170 - DNA, 122 bp, Homo sapiens
gattgggcaaatccggggaagaagccatcctcccagacagctgcttggacgaggccagggcgccacacgctacgtgaagcgctggctggaggagaaatggtctgtcgtaggtctaggtctgt

SEQ ID NO: 279171 - DNA, 122 bp, Homo sapiens
tgcggagcctcctcaccttgctctgggctcgtggccgtggctcttctctccatctggagccgcctcgcctccctgcgcactcgtggccatggctctcctctttgtgcggagccgcctcacct

SEQ ID NO: 279172 - DNA, 122 bp, Homo sapiens
gaaaaattatttgatggatttagtgatgttgcatggtggcttgaaacttccatggctggtcgatatttaacagcatgtagtcccatgcttcgaagattactgtatcctccaagtaggatgag

SEQ ID NO: 279173 - DNA, 122 bp, Homo sapiens
agcgtcccattcccccaacaaggcggcaagctacggactagaattacatcctgtgcaccccggcccctgtctacaccccagccccacctgggccaggcacttcaatgctcccggtgacagag

SEQ ID NO: 279174 - DNA, 122 bp, Homo sapiens
tgtgaattttttagattttacttttgttgtcttagtcaaaacttaggcaaagattggagacgtttgttcaagacgtgtgagacatgagcaatcaacagaggaaaaacattgatattctatcg

SEQ ID NO: 279175 - DNA, 122 bp, Homo sapiens
gagggcttgaccaaatcaaattgaggtggtgacttttgttggaaaattgggctgggatcacgtcctgttttgtaataaaagctgaaaagtctgcatgttggcctctcctctttctcgtgctc

SEQ ID NO: 279176 - DNA, 122 bp, Homo sapiens
ggggtacacattcctctttggagccaaatcatttagaaacattatgtaattcagcaaacacgtgttggagcccactgtgtggctgacgctgtgcaaatgctggagggaagatgctgggggag

SEQ ID NO: 279177 - DNA, 122 bp, Homo sapiens
catatggcgctggaactgcggtgggcagctcagtgtggtggtccacggctcactcagggacgcccagcaggttcctctccctgttaagtagttgcgaatggaaatccacttctgtggggaat

SEQ ID NO: 279178 - DNA, 122 bp, Homo sapiens
ccgcactgctcagcggagaggcgagggcggcgggctcggcgagggcctggggctggctgccgggcgctggcacatggctgacagtgttgttggcggtggggagggctgggctggggttcttg

SEQ ID NO: 279179 - DNA, 122 bp, Homo sapiens
agagctctcagctgatgaaggcacagccctgacatgaggaaatttacacacacacatgcacgcatagacacatacatatatacatttacacatgtacatatgtgcacatatatacacataca

SEQ ID NO: 279180 - DNA, 122 bp, Homo sapiens
ctaagccccgcttccttttaaaacaggattacgccgggtcgagggagcctggcgtggccgcgcagtggccgggtcccgcggattcccctccagctcccgcttggtagcgcccgctttgtcag

SEQ ID NO: 279181 - DNA, 122 bp, Homo sapiens
ccccgcgccgacttcacctgtcaaggcgcggcggatttttgaagccgttgagcgctgcggcgcgcccgccccgccccgccccgcccccagccccgccccagccccgccccgcctgcaggtcc

SEQ ID NO: 279182 - DNA, 122 bp, Homo sapiens
gctggcacaagtcacgcctgctgcaggcttcagaaggtggcttggcgaacgtgcccacctcgcactttgtgggcatggacggggtgcaggctttcctgcagacctattcccatgaggtctcc

SEQ ID NO: 279183 - DNA, 122 bp, Homo sapiens
cagggctcccgaacacgggtccaccggctgcacgagagtttccggggggccctacccttccgattcggcaggtttaggccagagcccatgaacccagtctgtatttttaaacacctgaagca

SEQ ID NO: 279184 - DNA, 122 bp, Homo sapiens
ggtgtcctggtgccagtgggacggcccctcgacagcttagttgggctctactcaggtgggcgaagcccctggggtctcttcctgaccccccacccccaactccctccgggcagggccggctc

SEQ ID NO: 279185 - DNA, 122 bp, Homo sapiens
acttagaagcaaccctgtctgcttgaagacggtgacactttgggacatacacatcacacacgcaaagccatggaccaaattgtgtccccccctctccagacttatatgtcaaagtgctaagc

SEQ ID NO: 279186 - DNA, 122 bp, Homo sapiens
ggctggggagccggggccaggggcttccttgcaattccaatgatttttattattatcactcgcaaaggacaaacgcggccaaggccgggcctcacagtggctgtgctggtcatcgcgtggag

SEQ ID NO: 279187 - DNA, 122 bp, Homo sapiens
ggaaagggaaaggttagcaactgaggggagggctgcgctgcttggcgtgttttccgcccccgaagttgttaggggcaccattgagcgctgaaaaattgttctgaaagctgcttttgcaaaat

SEQ ID NO: 279188 - DNA, 122 bp, Homo sapiens
gccagacagcagcgtgtcatgaaggacctgtgttgtcacaaggaaagctgcctatgcaaccgctgtccccgcccactccaggagaggggcggggctggctttcactttaaaaactttaaaac

SEQ ID NO: 279189 - DNA, 122 bp, Homo sapiens
ggaggccaaagcaagggagtcgcttgagtccatgagttaaagaacagcctgggccgggcgcggtggctcacgcctgcaaggctctaatatcagttggaaccccgggagcgcgccaacagaca

SEQ ID NO: 279190 - DNA, 122 bp, Homo sapiens
tgattactcattggatttgctatctgatctgttgccaaagaacagggcacaacttccactcgctctgctagacttagactggccaaacccactctcttgaaacctctggaaacctcgtgctc

SEQ ID NO: 279191 - DNA, 122 bp, Homo sapiens
ataataatgtgtcgttcgctcgtttcgcgcaagcggagtcgcgtccgccttcccgagctccggcacacagacctcaggccgctctcgcgctctccggggccccgagaacaatgcccgtcctc

SEQ ID NO: 279192 - DNA, 122 bp, Homo sapiens
aaatgaggcaatacacattcagacaggaagcacccaatgaacaccagcaatcactaccaccgctgccactgcctttgggagacatgaccatgggtccacaaatggctgggtctgttacctgc

SEQ ID NO: 279193 - DNA, 122 bp, Homo sapiens
cctcggcggccggtgtcggagcgcggcgggagagaccctgccttgggtgcgggactgggacggctcggacccagagggctcccggggcttcgcctctcggacgggtcagggctctgcggtct

SEQ ID NO: 279194 - DNA, 122 bp, Homo sapiens
gccactggatctgctgtgggatggtcccggggtgccgctcgcttctgagtccgcggggtgcggtcccacccgggtcaggagaaacgcaccccgcggccggattggctaggacgcccgagccc

SEQ ID NO: 279195 - DNA, 122 bp, Homo sapiens
gttggccagagagttatggaattacctgtggaaacatattgtgagggtcaggccaagggccgatttgtcaggcggccagtgtcggaatccacacatccacaagcagcatttgttttcttaac

SEQ ID NO: 279196 - DNA, 122 bp, Homo sapiens
ggaggagatcaggcgcttttggaagctgaggcaggagattgttgagcacgtgaaggcagacgttctgggagatcagctcttgacgagggaattacctccaaatctcaaggcggccttgaaca

SEQ ID NO: 279197 - DNA, 122 bp, Homo sapiens
tccggacactgacagccgcgtggtacaaaataaacgtgtatttgttgttcttatcagtcccgtttcagtacaacactggcagagatgattctagattaactatcccagtaaaagatatgata

SEQ ID NO: 279198 - DNA, 122 bp, Homo sapiens
tccaatctttttctttcttgggtttttagaactctgaagacgcccagcaagtgggtggtgcgtggaatgaagcggtggctcccgcgtgcttcgtgcgggtcggtttccggggctctcgcgtg

SEQ ID NO: 279199 - DNA, 122 bp, Homo sapiens
tccggtggatacaggaagtgctcagcaacgattacgccccgagggccaatcacagggctgcggccgagaaagaagccttaatagagctttctcaacctgcagccctcatctccgccggcgag

SEQ ID NO: 279200 - DNA, 122 bp, Homo sapiens
gttttctcttatttctctatgattgtctgttgggtgacctgagccagtatctttgggtgccgctcagtttagaaagtcaatatggggtagtggttataattgttgaagcccttggtttgaat

SEQ ID NO: 279201 - DNA, 122 bp, Homo sapiens
aataacatttaactccagggctgcctttcatcatgaaggatcagttttgctctttttgaccgtttaaaaatattttagtctccagtgtagtcaacactaaaatatcgttctgttattttatc

SEQ ID NO: 279202 - DNA, 122 bp, Homo sapiens
gattcagtggctcagggaccagggaaaggggctaaaaatagctggaggcagctgagccctcgctatatatggcagagaaacaggcttcgaagggcaggcagcttgcacagggaggggaccag

SEQ ID NO: 279203 - DNA, 122 bp, Homo sapiens
cttctggtctcgctcccgacttgaggaggcagatttcaacatggagcagcaggtagggttcggctgcagctttttgtttcgtctttgttctgttttgtatccgaactctgttagcttttcga

SEQ ID NO: 279204 - DNA, 122 bp, Homo sapiens
taccccagcatctccctgctccccaaatggcagaccatcaaaccttagagttatcagccacggtcctctcctctctaggcccaccaggcttggggtcctgcagcctgctgggtgattccccc

SEQ ID NO: 279205 - DNA, 122 bp, Homo sapiens
gggggaagagccggaggaggaggcgcaaggacctgacgcccccgcggccgcttccctgcccggcagccccgcgcctagccagcgctgtttcaagccctacccgctcatcaccccctgctaca

SEQ ID NO: 279206 - DNA, 122 bp, Homo sapiens
cctcaccctggctcccttgaccacacaggaaactggttccagatggtgtctgcccaggagcgcctgacacgcaccttcacacgcagcagccacacctacacccgcacggagcgcacggagat

SEQ ID NO: 279207 - DNA, 122 bp, Homo sapiens
tgctcttttagtactcgggagagcctggcttccaacacatcaagcattgttgaaagtaaccgtcgtcagaaccccgctttgagcccggcccatggtggagctggtccagccttcaacttccg

SEQ ID NO: 279208 - DNA, 122 bp, Homo sapiens
cagatcctgccaatgtctggacaggagtttgcagctctgacgaaggagctgaacttatgtcgggagcagctgctggagagggaggaagagattgcagagctgaaggcggaacggaacaacac

SEQ ID NO: 279209 - DNA, 122 bp, Homo sapiens
ctttgcgcttctctcgtcaagttggatagtcagaaataatctagtcgagccctctcagtgcgttgataggaaagggacgcactgtgactaacagacgccaccaagcttttggctgaggaccc

SEQ ID NO: 279210 - DNA, 122 bp, Homo sapiens
ttccctcccggggcggcagagccacagctcactgaaggctgcagcctcggcagccggaagcgctggccgggcgcttggccagcgaccgcctcgggtcggcctcgggtctgcgcaggcgcagg

SEQ ID NO: 279211 - DNA, 122 bp, Homo sapiens
ggggagcggggtctagaagagtcggtcacttagagctttggggccacaagacttccccaacgattgtgtgggttgtgggatgagatgcagcaaccctatttctccatccccagtgaaaaggc

SEQ ID NO: 279212 - DNA, 122 bp, Homo sapiens
tagagaaagaagcttccggtcaacgaccacatccacctgaatcatgagcaggttttaaggcgtgtgtttcttcagctcctctaaattttagaaagggggcgatatttaaactgacctcaaaa

SEQ ID NO: 279213 - DNA, 122 bp, Homo sapiens
ggacgttgcgccgtggggaggggcggacgagaggtgtccgtcaggccgtgtgtcccaggccgtcgaccccgctgtcgcgctgcgtctgctccttgcatgcctttagatggtacagccttcag

SEQ ID NO: 279214 - DNA, 122 bp, Homo sapiens
ccgcgttcatgcaacgcctggtggcctgggacccagcatgtctccccctgccgccgccgccgcctgcctttaaatccatggaagtggccaacttctactacgaggcggactgcttggctgct

SEQ ID NO: 279215 - DNA, 122 bp, Homo sapiens
ggacaccgcatatccagctcacagcagggtctggcgacctcaccccggaccggcaccatccggactccatacatccagctcaccgagggcctggcgacctcactccagacctgcaccatcca

SEQ ID NO: 279216 - DNA, 122 bp, Homo sapiens
ctaaggttaaacgcaaactgctgagagatttggggcggggggcacacatttacattcattcgtattaaatatatacctgttgaatttgtgctttttctcaaatgcttcagagactcgagctt

SEQ ID NO: 279217 - DNA, 122 bp, Homo sapiens
agaggcgggtggttgttagttcagggggttatgggagggctctggcatccgggatggaggcgcgtcgctttctgtggctggcgctggatccaccctgggtctccagccacggctgcagagag

SEQ ID NO: 279218 - DNA, 122 bp, Homo sapiens
tgaaccttttgaaggacccagcagagccatcttctcctttccctcaagtggcagagaacgcgcatcactcagccatccatcgtccgtcccctacctgcaagtcctccctccgaaaaagtgaa

SEQ ID NO: 279219 - DNA, 122 bp, Homo sapiens
tagagaccagactagaatatctgatgcccatccttactgttctccgtaagaaccaggggtcgcggatgaatggggagtgaggttgctgcggctgagcggggcgtttagggcagttttcctaa

SEQ ID NO: 279220 - DNA, 122 bp, Homo sapiens
gaagaaccccctgacgtctcccctttccccccagcttggtttatggcagctccaggacctcgcaccccgagacggacatcttacaccgccaggcctatgcggccccccacccactgcaaagc

SEQ ID NO: 279221 - DNA, 122 bp, Homo sapiens
gccgctaagcccaaagtcttttatatgaacaaacctctaactcgtcctgtgactttgatgcgtgtgcgttttaggcaccggggagcagagggtaaagcggcgcagctccgggcctcctcccg

SEQ ID NO: 279222 - DNA, 122 bp, Homo sapiens
ccctgccgcccccgcccatctcactctcccaaccctgggcaccagggcaggtcgacagcccgaggcactcctctactgcgtttccaggcccaggagacccactccagcgccgcggttccttg

SEQ ID NO: 279223 - DNA, 122 bp, Homo sapiens
aagtttcgggcaccattgtcatcaataacatcgtatcaggagacagggtttgagagcaaccggtctgaccaaaatttattaggcgagaatttcctcgccctaataagcctgggagcgctatg

SEQ ID NO: 279224 - DNA, 122 bp, Homo sapiens
ggtagacgaaacaacaaaacatctatgtacagtattaggcagaaccactaatatcttcagcgggaaggatcaaattcagacatcttctattttagatttcagttctgaaaaaccaaacgctg

SEQ ID NO: 279225 - DNA, 122 bp, Homo sapiens
tgcaaattctggtaccaataacaaatacaaaggccaaggcaaaaaataaaaagatcctaacgggagagatctagaaactcaaaattgttaagatgaaacctaagtcatggtcatgctacatg

SEQ ID NO: 279226 - DNA, 122 bp, Homo sapiens
gcctgcggctccgcttggggctgctgtgctctccacaggccgggccgccgggctggagggcgctgcaggcggcctctgttctccaagttctccgcgggagagggaggggaacgagggcccag

SEQ ID NO: 279227 - DNA, 122 bp, Homo sapiens
acttaggatggtccttggcaccaaatttgccttcaaaaaagcatttgcttcatttaatttcgatttattcacgaaggactaaaggacactgcaagggcggggagggagtgtgcgcctgcgct

SEQ ID NO: 279228 - DNA, 122 bp, Homo sapiens
ccgaacatgtttaaggtcatcggctcacccactgcccagcctatgatgtcaaacatcctgcgtctttgaatgtgcttggatcgatgatgagtcccccataaaaacattccttggaaaagctg

SEQ ID NO: 279229 - DNA, 122 bp, Homo sapiens
aggaatttgacataaataaggaaaccggcttgcctgagctgactactgcctttggtctcacgatagctgcctggtggcctctgactttcacagctagtacaaccttccagcaccttccagga

SEQ ID NO: 279230 - DNA, 122 bp, Homo sapiens
gtgccagacgatgtggcagcgccctcacagagcccggcttccagcaagagacaggcagctcggccaggccagcgccatccggacgtttgataagtatcaattgacagtcagggaatgctcag

SEQ ID NO: 279231 - DNA, 122 bp, Homo sapiens
tcacttaacctcctctggcttcagttttctcaccattaaacaggaaaaaaacaataacatcgttttgctgggctggtactgggattaaaattttaagagtcaggggccgggtgcaggggctc

SEQ ID NO: 279232 - DNA, 122 bp, Homo sapiens
tagtttgttatgtgtctggaagaagcagcgttagggactttgggctgtgagcatttagaacgagcctggaagcactacagagcatcccacaggaccacacgcaggcctccctgcctcagctg

SEQ ID NO: 279233 - DNA, 122 bp, Homo sapiens
tctttcaataatcctaagaggcaggtgttttcccacttaatagatgagaaaacaaagcctcggtgagagtcttgccaaaatcaaagagctctatggatggcctgacccagctttcctaagat

SEQ ID NO: 279234 - DNA, 122 bp, Homo sapiens
gagtaagaactgggcggctgggggagaagtcccagagtgacaacggctcagtgccaggcacgtttactctgcttgggtttccttgtctggaacacaagattaataatagaatcttcaaataa

SEQ ID NO: 279235 - DNA, 122 bp, Homo sapiens
catgagttaccctgtttcttcctcagccctatcatcttgtcatagcctgcacacaggttccgaatccaccccactccaccacaagagcacccattccccaacctactgctcagatggtggaa

SEQ ID NO: 279236 - DNA, 122 bp, Homo sapiens
cgggttttaggttattctgggcaggggcgggaggcgagcgtgtctgggagactgacggtgcggcctaggggagccgggcagcagacaaatgtcgttatgaagagcatgaaatttatacagca

SEQ ID NO: 279237 - DNA, 122 bp, Homo sapiens
agctggtgcatgatgacgaggtaggtgccgcttctcatggggcccgggggcccgggaacgcgctgccctggggcctcctccgggctttagcggaattaatccatgcacgagagacctagcct

SEQ ID NO: 279238 - DNA, 122 bp, Homo sapiens
gagaggggcggtcctgggttttggggtgggaatcggattccagctgtggttctctccctgcgctcccgcccgcactgccacggcggacggccaatgggcgcgcggctcggggccggcggcgt

SEQ ID NO: 279239 - DNA, 122 bp, Homo sapiens
cacttcctatcgtggccgaaacgagggatcacaaacccgaaacagacgtcaccgggctaacgtcaagctgtcagcagggctgcattcctgccggaggctccagggtgaacaccttccttgcc

SEQ ID NO: 279240 - DNA, 122 bp, Homo sapiens
aaccgccgcttcagccagtcgtccacgctgcgcaaccacgtgcgcctgcacacgggcgagcgcccctacaagtgccaggtgtgccagagcgcctactcgcagctggccggcctgcgcgccca

SEQ ID NO: 279241 - DNA, 122 bp, Homo sapiens
ctctttgtcagccgggctggttttcacccacctggtggcaggaatcctgtttgccttccccgggagccagggatgggaacgggaactgtgggtgggaggcttccgagagccgcctctcccgg

SEQ ID NO: 279242 - DNA, 122 bp, Homo sapiens
acctcgtgatccaccagcctcggcctcccaaagtgctgggattacaagcataagccaccgcgcctggccacttatcagttttatagtgaggaaactgaagcacagaggtatgaaaaaaatgg

SEQ ID NO: 279243 - DNA, 122 bp, Homo sapiens
tctgaacgtgtttcttctcagagcctctaaatcacatcttcccttcattgtagacgcggacggacggcacagtaatggggtctgtgggaggctgtgctcacacccgcagctgcaggataatc

SEQ ID NO: 279244 - DNA, 122 bp, Homo sapiens
agaatacattctctccaacagcttgcaggggcaggatggccctgctgtgctgttctgcctcgctcttgggtccagagttttggtgagtgatactgttttttatcagtgccccctggtggaag

SEQ ID NO: 279245 - DNA, 122 bp, Homo sapiens
gggcaccagcctgggaacccgaggcgtgctccctgagcagcaggtttggggtaacctgaacggcggcctttggtggccctgtccacccagcgaagcagctcctgccctacagtagcttttgg

SEQ ID NO: 279246 - DNA, 122 bp, Homo sapiens
gtcctcgttctctcctgcacgtctggctgcattcggaggaagacctggggcgcgagcgagcggcgacagcatgagcctgtgctgacctccgcgcggcgggccgagcccagggctttgtcgcg

SEQ ID NO: 279247 - DNA, 122 bp, Homo sapiens
agagcaccccggaagcgggagggcctctggttgctttcgcggcggcaggcttttctaagccggtttctctggagggtgcgggcggctgcgggttccaagctcgggctctgagccgggccagg

SEQ ID NO: 279248 - DNA, 122 bp, Homo sapiens
cggtatggtgcctgggcagtcccgggttgttaagggtgagagttctaaagccaggctgcccgtattcagagactggctttgctaaggaaccttgggcaagttacttaacctgtttcgtcatc

SEQ ID NO: 279249 - DNA, 122 bp, Homo sapiens
aatgtgactggcccaaagtcttttggctaataatcaactttaatatccaagtcttgctatcgttgattgatgggggcaggtgatcctctgatttttttctatcttgaaatgcctccatctac

SEQ ID NO: 279250 - DNA, 122 bp, Homo sapiens
aggaaggaaggaaggaaggaaggaaggaaggaaggaaggaaggacacacgtaaatcccagcgattttatttaattttgagacggagtctcgctctgtcttgcccaggctggagtgcggtggc

SEQ ID NO: 279251 - DNA, 122 bp, Homo sapiens
tctcattcttgccatgaagaattgaagaatctttgtgctctgagtcagaagctatgtggccgctttgctaaaatgtgactcaaacacagcctcagccctgaggcccctttcattatattccc

SEQ ID NO: 279252 - DNA, 122 bp, Homo sapiens
aggcaaccagagcctgctggtggctgccttctgggccgagctgagcaggcttccacaccacgctccacagaacccccagggtctcctaagcttgtgcaaaactccagctggtggaaagaaag

SEQ ID NO: 279253 - DNA, 122 bp, Homo sapiens
attagtgatcatattgatcatggcactccatcgtgtgactgtaccacagcacagctgaagcgattgaaggacattgtgattgtctctagacttttgctaatataaaaaatgctgttttgact

SEQ ID NO: 279254 - DNA, 122 bp, Homo sapiens
cccacccctgctgtgacatcacaggggagtggagtggagacgaacaaaaagggggtcccccgccctggtcctggcctcttggaagccagagtatcaagagcagagaatctcactaggattgc

SEQ ID NO: 279255 - DNA, 122 bp, Homo sapiens
ccaaatgcctgcgtgcaagtactttagcccttgtaccatttacagatgctgaaggtgcagcggtggggatggcctgtgtccctacagaaagcacatcttacaagtcacacgcctcaccatct

SEQ ID NO: 279256 - DNA, 122 bp, Homo sapiens
agaaacctgccaagctcacagatacaggctttgagggtgacatcccatgttcttgtgaggcgtcagtgctgaaatacctgaaacacaaaggtgggacagtcctggggaagtggagcaggtca

SEQ ID NO: 279257 - DNA, 122 bp, Homo sapiens
ccaccggccgccagggggcgcgccgagaccacactttcatggaggcggtgaaggcggaagcgtgggagggggccgcggtggcccaggacctgctggctctggggtaaaagggtgtgcggtga

SEQ ID NO: 279258 - DNA, 122 bp, Homo sapiens
cctgactcacatctgctgctgctgcctcctttaccagctggggttcctgtcgaatgggatcgtttcaggtaagttcttccgtgactttctcgcttcctttccagccatcccagcggagaccg

SEQ ID NO: 279259 - DNA, 122 bp, Homo sapiens
acgccccgtactgtgaggagcgcctgagaaggacctttgtcaatgggacacggacacagccgcccagctggctggagctgcaggttcgtgcgtgtgtatgcacgtgctcgtgtgcatgtgtg

SEQ ID NO: 279260 - DNA, 122 bp, Homo sapiens
cctctcccgccacgggctgtggcggttggtcgtccctttcccaccccctcagctaacgagcgggctctaggccctctgggattggctgtgcctgagcacatcttccctcagcgtttctgatt

SEQ ID NO: 279261 - DNA, 122 bp, Homo sapiens
gacataaagaagaaggatttgctctccagatgcagctgtgccttcctttgaaatatctttcgtatctgttctttccttcccatccttgctgctacctctctagttgcgggtcttaccaccta

SEQ ID NO: 279262 - DNA, 122 bp, Homo sapiens
tcagcaggaagggtggggatgtggtgggagggaggaagggtgggctggcgctggcgctggcggccaagctccaagggatgacacctcaaacccacagggaaggaataggaccagcccaaggg

SEQ ID NO: 279263 - DNA, 122 bp, Homo sapiens
tctccccacccatcctggcgggcgggctgcgcggaggctcgggagctggccggggaggggcggatggaggggcctgggttgccagctcccttggtcggggtcctgctcgctggggcttgtgt

SEQ ID NO: 279264 - DNA, 122 bp, Homo sapiens
tcagaacctcacaggttactttcatgaatctttcctggagcaaataaaacagtttcacaacgatgccatatttaaatgttatgtctctgcttatccaattctccacttatcctttcttttat

SEQ ID NO: 279265 - DNA, 122 bp, Homo sapiens
aaaattccatggtgtctctcgtaaaaggacagcaagaaacctttcacactagaaggaggtcggctattccccacagcaccaggaacagggtggaaaaggggcttctaatccccacacccagg

SEQ ID NO: 279266 - DNA, 122 bp, Homo sapiens
tcaccgacatcctcgactgccccacgggaacaataaagtttcccttgttgaggccgcttccgccggaagcggggcggggcggggaagaaggaggaaccgcgttccagtcctgcgcacccggc

SEQ ID NO: 279267 - DNA, 122 bp, Homo sapiens
gggacctgcgggcagctgtggtgatcaggacgctgaggagccaggaggcctgcctggaggcggtgctacgtcgactacagggacagtgtcggcaggaactggccaggctggtgggagcccgc

SEQ ID NO: 279268 - DNA, 122 bp, Homo sapiens
ggtgggtggtgggaagaacgggagaatgaagccagccttgggagaggtaggacgccagcccggcccagctgcttccagcatctggatccagcctcacctgaagccagccacctcctggactg

SEQ ID NO: 279269 - DNA, 122 bp, Homo sapiens
gaagcagccggctcagggccggcacacagtaggtcgcttgtgcgtggccaccatgctatccgccaaccccggtgccatggttatccctatgctgactcacaggcatggggctgctgactcac

SEQ ID NO: 279270 - DNA, 122 bp, Homo sapiens
ttcgcgtccccatggccgctgggactcctgcggggtgggcgggaccagaagctccgggggcggggcctaggacggctgagcgccgctcgcgtctgctccggggcgcggagacccccccccaa

SEQ ID NO: 279271 - DNA, 122 bp, Homo sapiens
aacgtggacctgtacgaagaggtccaccggaagctctcgaagaggtccacctgaagctctcggaggccaccaggaatctgaggaactcacccgacgccatccttgagagtggcgtggagccc

SEQ ID NO: 279272 - DNA, 122 bp, Homo sapiens
cgcggtcgtaggtgcgaggatttctggtccgcatgctcctgctcctgactcaccgctgttcgctctcgccgccgaggaacaagtcggtcatgaagccgcgcagcagccatggcttttaagga

SEQ ID NO: 279273 - DNA, 122 bp, Homo sapiens
cacttcagctccgccctcacccgccagaaactgccgcctcctgcctcacctctgggactacgaacttcttctcctaggctggcgtgaggaggggaattcaaccatcgcaagcgttagcgcga

SEQ ID NO: 279274 - DNA, 122 bp, Homo sapiens
ctgtgggtcctaccctatcgccgcttacgcagtcccagcctccgcggcgcccccaaatgccgcactgttgagtcatctcagcgctgcctcctccgcgctgcgctccccacccccgctcctgg

SEQ ID NO: 279275 - DNA, 122 bp, Homo sapiens
aaggaaagtcttacttatataggttgggaaaacccaaaatatgcaagagaggagcaaaaacgggaaaaagtctcaaaagaaattaccctgtttgctcagtaactgctgtacgctctagcatt

SEQ ID NO: 279276 - DNA, 122 bp, Homo sapiens
cagaggttacaaaacttgcccaaggctcacctatagcacatgtcagacctgggattcaaccggggaggcctggcttcagtacccatgcccttcctaatgccctggctgtctctcatgttggg

SEQ ID NO: 279277 - DNA, 122 bp, Homo sapiens
ccctgtcctttgcttccttcccttggcgctgtgctgaggggtcgtcgggtcctggaagggcgttcaggggtctcgggtggctagcccggctggcggggagatgtcagctagcggccggagga

SEQ ID NO: 279278 - DNA, 122 bp, Homo sapiens
agggacctcaaacttcctttccacaagattctgtgacgggaaacaatgggggagtatttccgaagttctgagtaggaaaaaagaatgactcaaatgtattattgccaaccaagtcgtcaaat

SEQ ID NO: 279279 - DNA, 122 bp, Homo sapiens
cgccccgtcaccccagaggcgctctccgacctgcagcccccagggctcctggccctttcccgtttgccactgcggcttgttgtcaagaaatggaacttcagaaaacccccagatatacactg

SEQ ID NO: 279280 - DNA, 122 bp, Homo sapiens
tcctactaaaagaatccgcagtggtttgcagggaatagccccagcaggcagtagggtacgcgctccatgcactttgcatcttttggggaggtccctccttctagagttctctttctagtgcc

SEQ ID NO: 279281 - DNA, 122 bp, Homo sapiens
aggctgactgccggcctgagatgggcgggcccgggtgggcagggactgaggtgggcgggccgggtgggcggggactgaggcctcggaggggtttaaggaacgcgggccagaggcgggcgggg

SEQ ID NO: 279282 - DNA, 122 bp, Homo sapiens
cccatcgctcaccccgcagcttcctggccaagaagctgcagctggtgcggagggtgggggcgcccccccggaggatggcatctccccctgcaccctccccggctccaccggccatctccccc

SEQ ID NO: 279283 - DNA, 122 bp, Homo sapiens
accctccagtgctgttagtagtgctttctactttatgggtgactgcactgtctgtctgtccgtcggcgtgtactcttcaggctgcccaggcctcctgactcctgctccaagagccccccagc

SEQ ID NO: 279284 - DNA, 122 bp, Homo sapiens
cagagagtggcactagcatggcaacaaaatatttcaaaatattaatgggttttacatacacgcataaaatcacatttttctgaccttataacacatttcagtcatttaggtattgagtttgt

SEQ ID NO: 279285 - DNA, 122 bp, Homo sapiens
gtgtaaagaagctgagcctgagaaccctgaaatgcatggtattctctatgtgcaaacgtacgagagctgaaagtgaccagttacctattcatggttatcatctgcatgatgaagaaacactg

SEQ ID NO: 279286 - DNA, 122 bp, Homo sapiens
ggaaaacaataatggccagttacccacaattggggcgggggcaggggaaggtgacggaaacggctagttacccagaattctctgggggaaccagaaaaatcggttatctagaattctcccac

SEQ ID NO: 279287 - DNA, 122 bp, Homo sapiens
gggggcctggagctgggggccatcctcccatggcctgggcctggggcaggggctgctgcccgccacccgccacccgtagcccgcccgggaagctggggtggaggcgccctctatcgcctgcc

SEQ ID NO: 279288 - DNA, 122 bp, Homo sapiens
tggtaagaaaagaaaacaaacaaaagtaaacaggagaggttagagtccaagattctgttccgaatttcaatcaggactagccacagggtaaattggccagcagggcttaagaggtacttgcg

SEQ ID NO: 279289 - DNA, 122 bp, Homo sapiens
gagagagagagagagagaaagagagagagagagagagagagagagagaaaccgtgagcagcgcggacttttcctgtacgcatgtagagggagatgacacaagatcccacagacaggtttccc

SEQ ID NO: 279290 - DNA, 122 bp, Homo sapiens
ctttgccggaagccggtcctgctggccaggtgttttacgtcagcagggaaatgtggcacacgccctcgaggcattttaacactgcgcttcaggaaatctcaagttccatcttgtgttagtaa

SEQ ID NO: 279291 - DNA, 122 bp, Homo sapiens
agcatcatggtcgggccctgattgctttcacaaccgcttcgaggagtgtcattcccatcacggccacaaggtggagcccacctccctgctctgggacctcaggtcgcgaccccggaagcaca

SEQ ID NO: 279292 - DNA, 122 bp, Homo sapiens
tgtgactgagtcccagtactcagggaggctcagactggaggcggcggagcaggcaggcggcggcaaggctggtcccctggcgctggggccgcgcatacttgaggaagactgcggcgcgaccc

SEQ ID NO: 279293 - DNA, 122 bp, Homo sapiens
aatctctctaagtagcctttgctgcagatgagtatcctatctggaacaggatgaacctgccgctctagatacctaataaatcagcagctggttttaccaactgaagcaggaagtctgctatt

SEQ ID NO: 279294 - DNA, 122 bp, Homo sapiens
ccactgcatggtgcttgcgaagtccggcttctctgaggccccgtagctggcgcgagttgtcgcgggctgactagaagggctgggctgaagcaagcgagagccccagcgccccctccgccgcc

SEQ ID NO: 279295 - DNA, 122 bp, Homo sapiens
accagccccagtaaaagctctgaccgccgaaacagccttgagggctacagtcgctcagtgcgcagccggagtggtgagcgttggggggcagatggagaccgtggtttgcccaagccctggga

SEQ ID NO: 279296 - DNA, 122 bp, Homo sapiens
tctgtcggggttcatcgtggtttggggttgaaggatgttgaccacctcaggcttggtcatcgcttgtgggatttctcggaccttctcggcaataaagctgtgcacagcattcaaggcctctg

SEQ ID NO: 279297 - DNA, 122 bp, Homo sapiens
aggtattttttggtctcgttcagtatttaacttgttttcaaaaggaaggttaatcctaatcgttggaagtttgttgcagtaagccataatcatgccactgcaattcagtctgagtgatagag

SEQ ID NO: 279298 - DNA, 122 bp, Homo sapiens
cgcagctgaagtctccacccaccttcacagctggagccggtctgatcaagtgagaatccccgctggcattcacaggtgaagcttccaggagtgttctggcaaatgcccttagacccgcacag

SEQ ID NO: 279299 - DNA, 122 bp, Homo sapiens
tgggctccccaaaagccccatcctcagaactgacaccatgtggcctatctggcagcaacacggaaagccccattcacaggatttgcattgatttgccctgatctagtttgccgagcaggaga

SEQ ID NO: 279300 - DNA, 122 bp, Homo sapiens
aatactgcacttttgaaacttgctcgggcttttacaaataggtggaaactaccagtgattcggaatgttgcaagaggaaactaccagctcactagacgattctgaccaattatggggctgga

SEQ ID NO: 279301 - DNA, 122 bp, Homo sapiens
tgtggggagcgcctctgccccgccgccccgtctgggatgtgaggagcgcctctgccgggccgcgaccccatctgggagatgaggagcgtctctgcccggccgccccatctgagaagtgagga

SEQ ID NO: 279302 - DNA, 122 bp, Homo sapiens
tgcctgcgctcggaccctaccttagactggggctggaaaccctgggtgcctgacctggggcgtccgattcccgcagcaggaagcagaaacttcgctctggattctgccggtgggaagggtgg

SEQ ID NO: 279303 - DNA, 122 bp, Homo sapiens
tttaggtaggtcaccgcccgcagcccgtcctctctgagcccaagccaccccgtgcacttccgtttagtatgtctactttgagatgcatggaaatgaaacccgtcaattcagatcttgggaga

SEQ ID NO: 279304 - DNA, 122 bp, Homo sapiens
cagacagacagcgttcccaaggaggaaacccctgcccctccgtcccgtcgcgcgcacgggcggaaaggacacccaaactgtcaccgtcctgtcactgtgtctccccgcctccctgatgctgg

SEQ ID NO: 279305 - DNA, 122 bp, Homo sapiens
cccctgcccgccctccaggctcccctggggctcacgtccgggctggagcctgggcctctgcgcttagccccctggggtcgcttcccgcgcacacagctccctgcagagcacgcgtccccctc

SEQ ID NO: 279306 - DNA, 122 bp, Homo sapiens
ctaccgcccctgcctcggtaggtcctgccaccctcctgcggcccctgcagcccctcaacacgcctacttctgggcatcagggatgtcactggtgccagaggtcccagagacctttaagtaca

SEQ ID NO: 279307 - DNA, 122 bp, Homo sapiens
acggaaacctctgtcaatttacacagactttcaaccaccacccctgcccatgctccctgtcgaattttggaaagcagcagctaagcagaaaaagaaatagtgaaaaagtattgggtttctgg

SEQ ID NO: 279308 - DNA, 122 bp, Homo sapiens
ctatgtgtcattaagtaaggtgataatcaatattcaatatcaaaagatgcgtctatttctcgatgaggagaagcaacttcatctgcaggcactggacagagaagcaaaagggcttttccaac

SEQ ID NO: 279309 - DNA, 122 bp, Homo sapiens
aggactaattgaaagccaaggtcgttactctgattcaatcattccttcctggaaagagagcggttttgtgcttaacctcgtggcctaaggtttccaggatattgctggctcctggatctctc

SEQ ID NO: 279310 - DNA, 122 bp, Homo sapiens
taagaaggcattggcatctgcttttaatggatgtataatacatccattctacatccgtagcggttggtgacttgtctgcctcctgctttgggaagactgaggcatccgtgaggcagggacaa

SEQ ID NO: 279311 - DNA, 122 bp, Homo sapiens
gtcactgcggaagtgaggctaacagaagcccacactgaaggccgcgttccttcgtggcgccgtcccatgccaaagctgctgttcccacgtggctacggagctctggagatgaagtgagtgac

SEQ ID NO: 279312 - DNA, 122 bp, Homo sapiens
agagaagtgtagtatagtgaagtcagtgcaaatgtgattagccggctgtgtctgctagctcgcagttgtcttagggagaattctatcctcccgcagagactgggagacaaaggccctatcct

SEQ ID NO: 279313 - DNA, 122 bp, Homo sapiens
gctcaaggaacagttgggggggaatgggcagaaggttgggcacttgagtatttgagctatcggtaataactgactttttagggagcacagatttgagtagagccatggtagtagttagtacc

SEQ ID NO: 279314 - DNA, 122 bp, Homo sapiens
gcccacgtcagaggcgcgccacccacccacaccccccgcctcatcccggaggagacgcggcgagaaccctgtcgctctgctctttaatggggcagcagcaagtagtacatggagggaacata

SEQ ID NO: 279315 - DNA, 122 bp, Homo sapiens
gatgaagtttagagtgcaaaagatttcgaatgcaaaagattttgagagttggttagagcccgaggacaagcctcttgtgaacagaagttccaagagtcaacagtagctggcagcagacaacc

SEQ ID NO: 279316 - DNA, 122 bp, Homo sapiens
ccatccgctcccaccccacgatattaggaacaagatgaccgaagggatgtacacccactgcgctattttcaataatgtcatcctctaccccccggctattaggagtaacatcatagaggggt

SEQ ID NO: 279317 - DNA, 122 bp, Homo sapiens
aggacacccactgcccttaacagaaaaaatactgctgagcaaagggtttaacaggactctcggtctaccagaagttcagtgcattttccaggattttcaaggcttcgatgctgtcatgttgt

SEQ ID NO: 279318 - DNA, 122 bp, Homo sapiens
ggataaactccagcaaccagaatcgggttggcgtcgcctagcaaccaggagccaaatgcgcggacgccaggcattggcctgcacgtgtcacgtgagccagcgccgctgcccagtgggagatt

SEQ ID NO: 279319 - DNA, 122 bp, Homo sapiens
gtattgtgtatttttagctttgaattgtttcctttaggccagcatttctcaggtttgacacgattttcattttgggccatactgtacttcatgatgaaggctgtactgtacactgtaggatg

SEQ ID NO: 279320 - DNA, 122 bp, Homo sapiens
cccatcagggtggtcaccaagtacctggggcggggtcagggggtcaggacagggccccaccgccccaccgcgaacgcgctccccgctgcctcgcccgccccgccgctcacacttcgctgaag

SEQ ID NO: 279321 - DNA, 122 bp, Homo sapiens
atgtcatcagagtccaggcatttgcaccgggaatccagaaataagctgtcaccagagggacgtgtgccctctggaaataatttccagaacatgtttcataatcccgggcccggtcggtcgga

SEQ ID NO: 279322 - DNA, 122 bp, Homo sapiens
gccggccatggttatctcagatctgttgtttatattattctatcctctacattcctaaggcgtcttggatttaatcacctctggaaaactggaaggagatttctaatttgttttcaaaatac

SEQ ID NO: 279323 - DNA, 122 bp, Homo sapiens
tagcggcaggcgcggcactgtcgcaagaccgcgcgtgtttacggcagggctgagttggggcgtcgatctccttggcaatgagggcccgggaagtggctctcgggcgggagttgagaacgcag

SEQ ID NO: 279324 - DNA, 122 bp, Homo sapiens
actagaatctctctttttcaaggtgggtcatagaaaccagaacctttttttccccaaagacggccataaaacctgaaaacattaccccactttttcctccattgttctgtgtaaaaattggc

SEQ ID NO: 279325 - DNA, 122 bp, Homo sapiens
gtgaggttttttagttttcttgcttttattccaaacaaagctccaaaggaagtctgggcgcgatcaatcttgctcaccaaaagccttgacagcttctagcccttaagaacacatttcagctt

SEQ ID NO: 279326 - DNA, 122 bp, Homo sapiens
tagtgcatttacactgaaatttctccgtacaattttggttaccgcttcacttaagaaattcgtaagggtcagttacagtgcctcacacctgtagtccctgcactttgggaggccgtgagggg

SEQ ID NO: 279327 - DNA, 122 bp, Homo sapiens
ccgagccccaccccgcggggaggcagctgaggcctggcgagaattcaaacacagtgctggcgggctggcactgctgggggacccggcgcaccctctgcagctgctggcccgggttctaagcc

SEQ ID NO: 279328 - DNA, 122 bp, Homo sapiens
cttcctgacttctgaaccacagccatggtgttgggatctctaaagcattatcactgggaccgtccctgctttggctcttcctacctttccagcgattttgtgagccactaattctctgtatt

SEQ ID NO: 279329 - DNA, 122 bp, Homo sapiens
tggatactgcagccatcttgggagcaaagaatagagcctatccaaatatggagccaacaacgaaagagcaagcatgagagacagacagggagaaatgggatcctggtgacatcatttagcac

SEQ ID NO: 279330 - DNA, 122 bp, Homo sapiens
ttccccatcgtagggctctgcagcacggtggctgtgcggggagatcagatgtcaccgcaccgctcctgcacctgcccgccgccagcccggctccacggcagcctggattcataattagcatc

SEQ ID NO: 279331 - DNA, 122 bp, Homo sapiens
ccgagcggagccggtgctccagcagcaggtccagactgctcaggtagcagctgcggagctcggcagcctgactggcgctgggctccccgtaggcgatgggccccactgtgtggatgacgtct

SEQ ID NO: 279332 - DNA, 122 bp, Homo sapiens
cctgccccggtcacataagctatgactacagattgccctgtgggttaagtggcagtgggacgggacggggggtggtccagctgagacatctgtcctggccgggtggtccagggctggcagca

SEQ ID NO: 279333 - DNA, 122 bp, Homo sapiens
gggtgggccaccactctggctcgtcttccataatcgtcgctgcaaattgtagcctgggaacgctccagccgtatttcagcttgccttcgggcatcgccgcctccgaagcgcaacaacaagca

SEQ ID NO: 279334 - DNA, 122 bp, Homo sapiens
gccgccaccctctctcgctgcagcctgctgtgcgctgcacggcctggggcccgggagccccgcccgctctgcccatgagggggccccgcgaccaccgctgcttccagcccggggcggcgcgg

SEQ ID NO: 279335 - DNA, 122 bp, Homo sapiens
ccagctgaaaccgattaaccattacttaagttgttacagcgaggcagagccaaaatctcccgggcgtgtgcaagagggaaagctttctaattgtgaacaccgcgcgccccgcagaaggctgc

SEQ ID NO: 279336 - DNA, 122 bp, Homo sapiens
ttctacaaacatagctggataaattctgctgctgagccagaactgttggctggaaggcagcgccaccatgcgatcgttccaaaggctgtcagttttgtctaaagacacaagctgggatcctc

SEQ ID NO: 279337 - DNA, 122 bp, Homo sapiens
tggcgcgggggaggctgggaattgtagtctccacctgcctccgagggcggggtccgagggcggggctctcaggccgagggggtgggtgggtcgccgagcgccccggctcgccccggcgtttc

SEQ ID NO: 279338 - DNA, 122 bp, Homo sapiens
attagtttgaacgcgtggtggcggtacaagctaagagagtgaatgaaagctctgcagactcggtggactccgtttcatccagaagccaagtaaaaatacagaccacgtttacagctaaagct

SEQ ID NO: 279339 - DNA, 122 bp, Homo sapiens
cgggtcccggattcgaggcgaagcggcccagagcctgcggctgctcagacctcctcaccgcgcccacctcccagccacctcctggctccaggtccagagcaggagcaggactaccggggtcc

SEQ ID NO: 279340 - DNA, 122 bp, Homo sapiens
gctaggctcgggctcgggcgccggcggtgattgggaggcactgcggcttcttcctctccgcgcccctttgttttgctttgtggttctgagcagctgaacttcccgggaggtggggtcagagg

SEQ ID NO: 279341 - DNA, 122 bp, Homo sapiens
ttgtgcagcttgtagtagaggccacaggcgttgcagacagggtccccgttggcgtttcggcgccataaggtggtggttgtcgtctgacaatttgcacaacaggtgccggctcttctggcggc

SEQ ID NO: 279342 - DNA, 122 bp, Homo sapiens
ccaagtgcccgaagctgctgccttgtctgcacacgctgtgctcaggatgcctggaggcgtcgggcatgcagtgccccatctgccaggcgccctggcccctaggtgcagacacacccgccctg

SEQ ID NO: 279343 - DNA, 122 bp, Homo sapiens
cccaagcaggcgcagcccggctaggctgctacaggacggcttcccctgccaacgcgcacacggcacaccgcgcaccgcacgaaggctggctggctctgcagcattccagttcccaccgcctt

SEQ ID NO: 279344 - DNA, 122 bp, Homo sapiens
actggctgcggaaacggggcacggcggttcgcaagtttaatccatactgagggacactcacgctcggcggcgtcacccgcacccaacacgatccgcttccggaactgcagaaaactgcgcgt

SEQ ID NO: 279345 - DNA, 122 bp, Homo sapiens
agaaaggtctgtgatggggtgattctgcttggaaaggttgccaggaaaccgcgagcataacgcagaaagataaaacgaaagccctaaacgccgccgtgggaatttaagtccaaggggcagag

SEQ ID NO: 279346 - DNA, 122 bp, Homo sapiens
tgttgttttaatctctttgcttccagccacttccgtttgcagcaatagttaacttaccctcgaattcccgtccttgtggaaggtcacctgcagtatctttgcgttaggctatttttgcaagg

SEQ ID NO: 279347 - DNA, 122 bp, Homo sapiens
agggccgtcttttccagtgcgcctccgagcagtagatgttgcgaaagtccgggtagaggccggagaagaaggcggtgccagggcgtcctgcggaagggccgggggcggggctcgtgacgttg

SEQ ID NO: 279348 - DNA, 122 bp, Homo sapiens
aactcgctacaagtccagaagccctcctggaaagggtctggccgcagaggggccaggtcccgggaaagtctcgcccgcccgaggagggggcctggcgcggcgcccggcctttgcccgctcgc

SEQ ID NO: 279349 - DNA, 122 bp, Homo sapiens
tccgtccggacagatacgacttccgtttcctctgggggagcgcgggcgagctcttgggggcggagcctcgttatcgggacgggcgtgttggggcggggcctaagtgcggggcagggcgggct

SEQ ID NO: 279350 - DNA, 122 bp, Homo sapiens
ggtgaacatgaaccactaagggtcagagagaaaacgctccatgaaggagactgaagaagccgtggaggatgcaggagaagagcaacaccagcagtaactgcagacagatgcggaagcagaca

SEQ ID NO: 279351 - DNA, 122 bp, Homo sapiens
ctaatgccttccaggaagcaacagacacaggtgacggggcctggccgtgccctggggattcgcgagggggctttgtgcctctggtgacaatgttcactttcagccgaggatggccaggaaac

SEQ ID NO: 279352 - DNA, 122 bp, Homo sapiens
ccaactcaggggagagttccgatatgtaatgactgcccttcctccatctgtgattttccgcgctcctgtaacttgttactctcagatcagatctcctgggcccgacccccaagcctcctgca

SEQ ID NO: 279353 - DNA, 122 bp, Homo sapiens
gggaaccgggacccggggctgggctgccggttcgcgccgaggggtcttcccgggcgcgggcgctaccctcgcgcctcactcgcgctgcttcagacgtctgctccgctctgcccagtttcggc

SEQ ID NO: 279354 - DNA, 122 bp, Homo sapiens
ccgtctgctggtcgggccggccttccccagccctctggggctgggggtgcagctgcctgccgaggctccccgcccggcacagcctgggcctgttgcgtcctcccagcctcttccctccccgg

SEQ ID NO: 279355 - DNA, 122 bp, Homo sapiens
taaaaagcctggaacattttttaatagccaaaactgacctaagaactgacccacaaaccacgtctaactctattttaatatatactatttaagtggtttatagtcctcttcttatttgttta

SEQ ID NO: 279356 - DNA, 122 bp, Homo sapiens
gcggcctccactacgtttcgaatgacgaatttcttaatggccttgtccttgggcacgcatcgggtacagttagtgcagcgaataggatgcacgtggccgcggccctttttggcatgaccgtt

SEQ ID NO: 279357 - DNA, 122 bp, Homo sapiens
ctggggacctgcaactgcaagccttgccccatgaggcatccagcgggagatggcccgggccgtgtggcatgctggtgggcctgcccggtgtggagcagtggtgcccccagggagcaggccgt

SEQ ID NO: 279358 - DNA, 122 bp, Homo sapiens
cgaatgtggttgtctacggggtggggtaataggtctggaaatagagatggaggggtcagacgtctcactgacaaagtgatccccggtccgctggtgaatgcttgctttctgtctcttgctct

SEQ ID NO: 279359 - DNA, 122 bp, Homo sapiens
ctgcaaaccccagccgttgctccccattcccgatcgcccttcgctcctggggtacccaggcgcaccctgccggcctcttcaggggcccctgtgccagccactgcagtccctgttggatctgg

SEQ ID NO: 279360 - DNA, 122 bp, Homo sapiens
tgaacggggcctgggaaaattgcttgtagtccaccaagaaaatgaaatggcagccattcacggtaccatgatacgtgccgcagaatgttcctgctgcgaccgtaaagaacaaatgcccaggc

SEQ ID NO: 279361 - DNA, 122 bp, Homo sapiens
ggaggcaccgggaggcgtgtggggggcggtcggcgagcggagatccgcctgtatttctcccggttctcgagcattttcacggtctgtacctctgatggttggaggggctgcccaggcccctc

SEQ ID NO: 279362 - DNA, 122 bp, Homo sapiens
ccatgccctgctaggagccagccatggtgcctagagggtgacaggtcaccttgcctggcccggaggagaacggcttgtccatgccatgtgtggcctgtgagcttgagcggaggaattcctgc

SEQ ID NO: 279363 - DNA, 122 bp, Homo sapiens
ctgagccgcgaccctgggaggggcgggcggtgcgggagcctgggggcgtgagtcttgagccggggtggagggggggccgcacgtgctgcgcctgcgcgtggagcggacattttgctgcggtc

SEQ ID NO: 279364 - DNA, 122 bp, Homo sapiens
gctggaggtgggtaaacagaagaggcccaccacttcttgcagtgtgtgcacggcagggggcgtctgcaggtacagagtggggtgctggggcaggcccgcactgggcttcatccccactcggg

SEQ ID NO: 279365 - DNA, 122 bp, Homo sapiens
gagtccaggatgtcatccatcacctcctccgcaaaggccaggcgcttccgcagcggctcccgcttcttcaaccccgtgagattgaccaggtggatcttgagccaatccaggccgtgcgggcc

SEQ ID NO: 279366 - DNA, 122 bp, Homo sapiens
ggccgggggccggaggcgccatttcgctgtcttctcaccagctcctcttcctgaaagacacgtcagccggaagcaagacacgggcacgctaggaaatgtagtttactttttccgagcggcgg

SEQ ID NO: 279367 - DNA, 122 bp, Homo sapiens
caaggcggatccctgagtgccacacttcctgtatctatgaaagccacacttccggctgggcgctgtggctcctaccggtagtcccagcactttggaaggccagggcaagaggatcgcttgag

SEQ ID NO: 279368 - DNA, 122 bp, Homo sapiens
ttcttaacctccatttacctctgattctctgggaactgcaacagcagaatgatactgatccgggagaggctgagcagtgcttacgtggcttatgtgggacagatgcccgaacgtgctgccac

SEQ ID NO: 279369 - DNA, 122 bp, Homo sapiens
actgtattttcttctctaaagaaaagggttgttgttaccaacttgaatggtcacaccgcccgagtcaattgcatacagtggatttgtaaacaggatggctgtaagtattaaccagattttaa

SEQ ID NO: 279370 - DNA, 122 bp, Homo sapiens
acgctcccctccccccccccacctgggtagatgaatgggatgatgcagtggttgtcatgacgatgagtgctagagaagtcaggaagagggtccctgtggccacagggaatagtctgccttgg

SEQ ID NO: 279371 - DNA, 122 bp, Homo sapiens
gagtggccggtagaaaacagacaggtgataattaccatccttgaccaggagcctgatgtccggaacaggatgtcctcaagcatggtgttcactacctcgaagtcgcacacatctccaggtgg

SEQ ID NO: 279372 - DNA, 122 bp, Homo sapiens
aggggttgctgtggaagagttcagttgtcagagtgtggtctgggggtccacacacggggtcgtcagcactgcagatacacagcacaggcacggctgcctcatcgacatcccggagcgggtcg

SEQ ID NO: 279373 - DNA, 122 bp, Homo sapiens
gtacctgggagattgagaggcagggcaggctggctagagaggaagtacatacaaggcagtcggaagcaagatgacacctcaatgtggatttgtccaataagagggggtagccaagggggggg

SEQ ID NO: 279374 - DNA, 122 bp, Homo sapiens
ctttaccaacatacctgaaaaatgtcaggaagaataaaatgatatacagtgtgggaaatacggacagtgtctgacatatctaacttgactatatttgaagcaagcaaaggagcattagaacc

SEQ ID NO: 279375 - DNA, 122 bp, Homo sapiens
agctcaagcgatcctccagtctcggcctcccaaagtgctgggattacagacatgagccaccgcgccccgcctaaaatctctttagtatctggtttggtaactgacaactggattctcctcag

SEQ ID NO: 279376 - DNA, 122 bp, Homo sapiens
cagctaccgagaagcgccaatcaaccatcgaccaatcagatcatcaccgtcaatcgtcatcgaccaatcagagcccaccgcgccccggccttaagccagttgcttgttccgcggcgggaggg

SEQ ID NO: 279377 - DNA, 122 bp, Homo sapiens
tcccccaccgcccgccaccagcccgggatcagtctccgcacgcggttccgcaggtggcagcgatggcccagtcctgaactccccgccatggccggcgcccccggcccgctgcgccttgcgct

SEQ ID NO: 279378 - DNA, 122 bp, Homo sapiens
taccacaggagtggagaacaaagtcctatgtgagtctggagagattttgcatggtgagaacgaacagcatacacaaagggctgctttgtgtatactgtactccagtagctctgagcatagtc

SEQ ID NO: 279379 - DNA, 122 bp, Homo sapiens
aagaacggcagtttgaatcggtgctgaacaggtaaccatagaaacggggctgggactccgcgtggagacccttcctgcagcgggggcccgggtgcgccctaaatgaggggtgtatacagacc

SEQ ID NO: 279380 - DNA, 122 bp, Homo sapiens
ggggcgctgtgaagctgctgttggctgagggctccccactcagcaaagcggggccagagccggggattcaggagagagcggggcgacgaccgcacagcacacagtgggcgaggcaaagcaaa

SEQ ID NO: 279381 - DNA, 122 bp, Homo sapiens
agctaggtgggaggctcaggcagcaggatcgcttgggcgcaggtctaggctgcagtgcgccgtgatccattgtgccactgcactccggaccctcggtgaccagagtgagactttgtctcaaa

SEQ ID NO: 279382 - DNA, 122 bp, Homo sapiens
ccctgcgatattgggagtaatttcatacgcttcttccgtgaatattaggagcgatatcaccgcgtggctgtaccttgattgctatgttggcagtcatgtcatactctacccgctgggtatta

SEQ ID NO: 279383 - DNA, 122 bp, Homo sapiens
gccactcaccttctgcttcggccacccggtgcggctccagcaccgcgcgctctcccggcacggttcccggagaaagtcccccaatcaccagctacggcacttgtagcctctgcacgccgctc

SEQ ID NO: 279384 - DNA, 122 bp, Homo sapiens
atgctctaaaacagttagacctggccctgtgtttctgaatgagccactattccctaaatgcgtcaaaccttggcagacatatctcgatctccctggaatgctctctcctccacaactcagcc

SEQ ID NO: 279385 - DNA, 122 bp, Homo sapiens
tgtggaaaactgaggaggcttgagatccagatggtccatgattttcccccaaagctcccacgcacagtgccaaccaaacactgcagcttcttccacacacaaccactttccaaacctgcttt

SEQ ID NO: 279386 - DNA, 122 bp, Homo sapiens
tcagtatcgcgcagcctgtgcgactcctgcctctcctctgagcttcatcctgaccatctgcgaaatggggataaacacccccatctatgcactctcaccttgggggctgctgggggcacagt

SEQ ID NO: 279387 - DNA, 122 bp, Homo sapiens
aggcgggggaggcagggagcgcgtgggggggggcatttgcacagaggatcgtcgtcctcccggcgccgcggccgccgtgactctccagcacagcctcaggccgttggcgcggggcggaaacc

SEQ ID NO: 279388 - DNA, 122 bp, Homo sapiens
gctgaggaaaaatcaaaggccgtgttcctggcctaatatgtgacgtgctacaaatgccatcgagtgccattgagcacccatgcaggctggatgcaccaactgaggtatgaagtaatttcctg

SEQ ID NO: 279389 - DNA, 122 bp, Homo sapiens
gcctctgcaccaggccaccccctctcacctcttccaaccaggtcttgcccctctaggcaccgtggttcccccctgaaataatgccaggaagccttgccgaagggtacctagatgacggttct

SEQ ID NO: 279390 - DNA, 122 bp, Homo sapiens
tcgacctactccgctaacccagtggcctgagccaatcacaaagaggattggagcctcactcgagcgctccttcccttctcctctctctgtgacagcctcttggaaagagggacactggaggg

SEQ ID NO: 279391 - DNA, 122 bp, Homo sapiens
cgaggtgtgggcggggcgccgctgccgtgaagtgaaaggtgacggaggctccgcgagtcgcggatacacctgcctgggaaggaggcagaacagcctcccgcgcagcctgaaaagcgaacgca

SEQ ID NO: 279392 - DNA, 122 bp, Homo sapiens
ggacgaggccatcactgccatctgggagacccggctaaaggcccaaccctggctcttcgacgcccccaagttccgcctgcactcagccaccctggcgcctattggctctcgggggccacagc

SEQ ID NO: 279393 - DNA, 122 bp, Homo sapiens
cccctatttcccccgggtgctgaagcaggttcaccagggcctcagcctttcccaggaggccgtgagtgtcatggattctatgatccatgacatattggaccgcatcgccaccgaggctggtc

SEQ ID NO: 279394 - DNA, 122 bp, Homo sapiens
ccggggagcgtcgccaaggtccgccgcccgcgcgcgccgcccgctgtcaccgccggggagcgtcgccaaacgcctctcgcagcgtccagggaccaccccggtccggaagtgaggcggggcct

SEQ ID NO: 279395 - DNA, 122 bp, Homo sapiens
agggcagagggcggcgcgagggagggagcgagggagggagcgagggaagggaaaggcgagcgtgagctgcctcaaatgcttggaataattccgcttccgtttggaaagccgcagcctcagtc

SEQ ID NO: 279396 - DNA, 122 bp, Homo sapiens
tttgcccctctatccaagtcctggtaattgtgacaataatcaggctgtttctgctgggatcgacccacacttttagtgaggaatttctgtctgtatttattcctttcttatcaaaggtcatc

SEQ ID NO: 279397 - DNA, 122 bp, Homo sapiens
gtattaatgcgctgctactgtaatgaaatttgttctttaaacgccaccacgtgagcaccacgctatttccacattttcattttctgtgccccctcagccctaagaggagggggtggtcagat

SEQ ID NO: 279398 - DNA, 122 bp, Homo sapiens
cagtggaagcagtagctgctgtccagtcggtagccgacttgcggatccagcaagagccagcggctgcgcttcggctgctgcaggtaacggcagcgggggaaggggctctgcccacttcctgc

SEQ ID NO: 279399 - DNA, 122 bp, Homo sapiens
ctgtacgatgcaaaaacatacaggacccgaaatagactagggccagaatctgctatatcccggcagtgattagcactttggggctttctagagggcagaaataggagagcactgttttcgaa

SEQ ID NO: 279400 - DNA, 122 bp, Homo sapiens
gaccctcgccgcagccatttcctgccctttgtgtgacagccgctgcggcgaaggggcgggcgctgggtgggggcggagccgcggcgggcggagcagcggggccggggcggggccgagcgcgg

SEQ ID NO: 279401 - DNA, 122 bp, Homo sapiens
gcagcaagcacccataacaaccataaagtgtaatgagctgctcagtgtgcctccctacatcgttagtccgaggagagggtccctcggtgcccagcacagtgcgtggcacagtcggtgctcag

SEQ ID NO: 279402 - DNA, 122 bp, Homo sapiens
ctaattctgggtgatctttcaggcctatggagaaactgtttaggacagggtcagtgtgagcgcatagggacctacttagcactgcctggtcaagaaaactctagggcagagtggtaaggagg

SEQ ID NO: 279403 - DNA, 122 bp, Homo sapiens
gcctctaatcaataagcacctccctttttctggatttccagggaacaaatctgaaagtcccgaggcctgttaggaaaggcggcaatgccacctgggcttgcttgtttctctggctaagattt

SEQ ID NO: 279404 - DNA, 122 bp, Homo sapiens
aaactttagcccagcctctccgatacaagccggcctccttgagggctttaggcccctcttcgccagtgtataccccacgacacgcctgcgtactagggaccacccggctttgtgggcggagt

SEQ ID NO: 279405 - DNA, 122 bp, Homo sapiens
tatgggcagaagaacccaagcagagggtctgagcgcctgcccgctctgggcacccggagccggctcaagttccattcctgaatatcaatgagcaggcctaggaatgtctgccccacagctgg

SEQ ID NO: 279406 - DNA, 122 bp, Homo sapiens
ctcccagcccgggggcagtggcagctcgtcggtcacgtcgtaggactgctggcggaggtgcgcgtgctgctgcgcggggctacccgcagcacccgcgccggtgcccagctgcagggacgcgg

SEQ ID NO: 279407 - DNA, 122 bp, Homo sapiens
tattggccatctgctctagctggatgggaactgcaagcagcaaaggcctttcaacctctccgagcttcaacatgttcacttatgcatcaggactgatccaacagcaacctgaaagggtcggt

SEQ ID NO: 279408 - DNA, 122 bp, Homo sapiens
ggcccctccccacgctcggtgccctttctgcccttcattcctctttcctgccacgtagcacgtgagcggcgcctcctcagtctccacagagttcatccagagtcccatagccttgactccca

SEQ ID NO: 279409 - DNA, 122 bp, Homo sapiens
tcccctcttcagaagccctccaggaaggaaatgagcactgcagggggccctcacacgccccggagattaagggctaactgatttactgcaagaaaaacaagagctgacttcctggcgtgatc

SEQ ID NO: 279410 - DNA, 122 bp, Homo sapiens
cgcgccggccccgcctcccctctgccctccctcgacgggcccagccccgccccgcccggccggttccctccgcggggccccggccactccttgtgcaagcgcaggcctccaaagggtttggg

SEQ ID NO: 279411 - DNA, 122 bp, Homo sapiens
acactgccaccttctgtacgagtttgtttgttttttttttttttttttttttttgcttggcgaaaacactacaaaggctgggaatgtatgtttttataatttgtttatttaaatatgaaaaa

SEQ ID NO: 279412 - DNA, 122 bp, Homo sapiens
ggagcccgcgcctccgcccgcccgccccggcttcccggacccgagcacgcccccccaggacgcctcctgccacccgccccccagcgggccccgggaccctccccaaaccctgcgggggcctg

SEQ ID NO: 279413 - DNA, 122 bp, Homo sapiens
ttgtttccagaaggcagggagtgtgtgaactgtggggcaacctcgaccccactgtggcggcgagatggcacgggacactacctgtgcaacgcctgcgggctctatcacaaaatgaacggaca

SEQ ID NO: 279414 - DNA, 122 bp, Homo sapiens
gggcacggtgcccgaggcattcattcattcattctttcaggtgtgatggggataaagcagcgagaagcccccaagggtttgtgagagcccttgagtaaagtcctcagttccaatccaacctc

SEQ ID NO: 279415 - DNA, 122 bp, Homo sapiens
gcagaggtcagcatctccgccggacgtccgctattccgcggctccggccagggcgcgatgcggagccctgcctgctgcttcgtcgcggtcccctgcactccggacgtctttccttttcaccc

SEQ ID NO: 279416 - DNA, 122 bp, Homo sapiens
taggacacagcagaaggaatgcagaggcttcctgagccgtcactcttccttactttctcccgggacccccttctctctgcagaccaccgccaagagcccagccctcagagccccagaactcc

SEQ ID NO: 279417 - DNA, 122 bp, Homo sapiens
cgcgcagaattagcctctctgtgccgccgggaaatcggcaattagaacgctccttgcgcgcggcacccaggcagccctcgagaatgcctgcactgtggcctgcccatcctcgcccttcccat

SEQ ID NO: 279418 - DNA, 122 bp, Homo sapiens
gcggtgtgtgccagctacccgagtgaaaggttttcgggggattaatcctgatggggtctgcggcggcccttgcccagcgccttccacatgtggagcgggccagtggtgctagttctgccgcc

SEQ ID NO: 279419 - DNA, 122 bp, Homo sapiens
aaatgttcaactcgtaaaaaaaatcacaagagcaggcaaaacttgcccggtatttctacacggcagcaatcagcaagagagccgatcagcacccacatctagatggtgtcatcatctccagt

SEQ ID NO: 279420 - DNA, 122 bp, Homo sapiens
taagggggagggtgtggaaactgccggctgctgaggtccaaactcaccgaaggtactgaccgccgcggctcctctcttcacagcgtctgccggaggcctccgtttactccggttaccgagac

SEQ ID NO: 279421 - DNA, 122 bp, Homo sapiens
atttcagtcctggtctggggacttttcggggtcttctctggccttctcagacagtgactccgttcccaggacaggaccagggatccctttttcactgcggggcgctgggaggaggcgggtag

SEQ ID NO: 279422 - DNA, 122 bp, Homo sapiens
ggctcccccacgtcatgacgctttgctcttcagtggtttaaaaagcaagaaagaggattgcggagagaagtcagggcaaagtggacccagcccagccatagattgtcagcaaactgtgtgac

SEQ ID NO: 279423 - DNA, 122 bp, Homo sapiens
gcgaggcacagagtcacccagtgcctgtctggctctcgcttgccccggcgctgtctctatcgtaacctctttaagttatgtgaaagttacaatgctgcccgccccacagtgagagctaagta

SEQ ID NO: 279424 - DNA, 122 bp, Homo sapiens
atttttcatgtaagccatgcgtcattgatggctcatatcaccccaccctgatgccaagaacgaacattcctttatgtaaattcagtaccatcgttgtacttaacaaaattaacagtgacatc

SEQ ID NO: 279425 - DNA, 122 bp, Homo sapiens
tgaggccgcgtctctcgccgtcccctgggcgcgggccaggcggggaggaggggggcgctccggtcgtgtgcccaggactgtcccccagcggccactcgggccccagccccccaggcctggcc

SEQ ID NO: 279426 - DNA, 122 bp, Homo sapiens
tttaacatttaatacctcacttagtgatgtaaaactttgttcactcactctcaaatactacgcattccataaaactagttgttttgccaatttgataagaaagaacttgtatccccatgtgt

SEQ ID NO: 279427 - DNA, 122 bp, Homo sapiens
caggaaacgggagacatggcctcatgagctccgctgtcctgatgagtcactggatgcacccgtgagaaacacctcaccctccgctctccccaggcagcaacacttgccacaccccagctgtt

SEQ ID NO: 279428 - DNA, 122 bp, Homo sapiens
ggtgggcaggcgggggacttgggcctggggcttgggtcctaatccgggattatctttgagcgtctccgctgctgaggggagccacttgggcccaaggccccctggagagcacagcctcccca

SEQ ID NO: 279429 - DNA, 122 bp, Homo sapiens
tgaaatcttttcatcaaactcctactcttccaaaaatactctctctggctctgtattctacgactaaacggagaagagggacaatgagctgatttagcaggcagctacaaatggtgattgaa

SEQ ID NO: 279430 - DNA, 122 bp, Homo sapiens
aaatcgggctggacatgcctcgagtcacgtcaacgaggggcggctggtgagtgattaagccgagaggctgaaggctctgctaggtgacctcaggcctgggccctgcctctgcacctcttttt

SEQ ID NO: 279431 - DNA, 122 bp, Homo sapiens
ggagttgctgtgtggggcccgcagagctctctggagacggactggctgtggacagcgagtcgtgatgaaattcctccttggccgtggtcgggctgatatctggcacttccccattcattact

SEQ ID NO: 279432 - DNA, 122 bp, Homo sapiens
atacgttgctttttaaaaatgcattaaggaccaatcttgaaaggaacaagatccaagaaccgatggtgaacaaaagaaggcccaaggaataatctaagaatgctgctatgcttaacgaaaag

SEQ ID NO: 279433 - DNA, 122 bp, Homo sapiens
aaaaatgatacttataaagacttagcaatagcaaagggaaagggcccacactgtaatgtacgggaaacggcagagagacccaagatcctacccgcacctgggctctgcccaggacctacctt

SEQ ID NO: 279434 - DNA, 122 bp, Homo sapiens
tccccctctgcctggccagctccttcgggtccatgatgctttaactgccggtgccccgtccgtggagcctccctgaccctcgggcacccgggagacctctcctgtgggctccccgagggccc

SEQ ID NO: 279435 - DNA, 122 bp, Homo sapiens
gctgagcacaactttccattcgagtgtattcatgcagcggctgattgagctccactgtgccgggcggggctcggcgggagcgggcaggaacagccaggctgacagaggctacacacacacac

SEQ ID NO: 279436 - DNA, 122 bp, Homo sapiens
caaggatctgggcctgggaattggggaactggcctcccggtcagcccgggtgctgtctgacgatgacaagcagcgtttgcagctggatcgtcagactggagatttgcttctgagggagaaac

SEQ ID NO: 279437 - DNA, 122 bp, Homo sapiens
ggcgtgcgcgtgcggcgtgcgcatctctggtggtgtcagtacacgtggcacagacagttgcggatgcgtgcaacctgcataagtcttggaaccacaaatgtcactgacagcctggtgttccc

SEQ ID NO: 279438 - DNA, 122 bp, Homo sapiens
agcaagactatgaagaccgaaacacaccgggagcctaaggcaccactccccgctacctaccgaggtgcatcctgcaggctccttaccgcaagcctgcaaactcgccctgccgggcgcggagt

SEQ ID NO: 279439 - DNA, 122 bp, Homo sapiens
tggcgttcgcgacggtcgccaggggcgcctcccggcgcggcggggcgggtgcagtcacgacgccgcgactccccgcaccccggctgggccccccgactcccaggatctgggatcgattccag

SEQ ID NO: 279440 - DNA, 122 bp, Homo sapiens
ctgaccctaggttgtcttgcttttggagtgtttttctctgttctccaggcaaaatcatcacgtttctatttccacacaggagggtttcccttaggcacctactctcttcccagagagagacc

SEQ ID NO: 279441 - DNA, 122 bp, Homo sapiens
aggcagagggtgacgctcctgggggtgagacccaggtcaggagggcccatccccaaccagcgaccagcgaccagcggagggttgtggtctgcagccaggaagcaccgtgaggagaagccagg

SEQ ID NO: 279442 - DNA, 122 bp, Homo sapiens
gtggaccccggctagggcccccagagtctcatcctcaggagtgcgccagctctgggcctgcgtgccggcggggtctgcagccacaggtcccgcgagtcccggacacttccaggacgtggtct

SEQ ID NO: 279443 - DNA, 122 bp, Homo sapiens
gctttcaaacaacatttagagccctttgttggagttttgtcctctcacttcaaggtctttcgagtgtatgccagcaatcaagagtttgagagcgtccggctgaatgagacactttcatcatt

SEQ ID NO: 279444 - DNA, 122 bp, Homo sapiens
agcgggcaccgccgggggaaaagtctggactgcctcggcgagaagcggccggtaggcaaccggccccagcctcgcattcgcctcaaagaccccaattggctaggagcccttccctccgcagc

SEQ ID NO: 279445 - DNA, 122 bp, Homo sapiens
aacaggaaaacaatgcagcgttgaagagagtgttctcaactatgaggtcttgtttccaatcgtggttctgatagttcagcatctcaggtcactgttctgggccttatttccttaaaacaaca

SEQ ID NO: 279446 - DNA, 122 bp, Homo sapiens
acccaggaggcggcggttgcagtgacccgagttcgcgccaatgcactccagcctgggcgacggtgagacttcgtctcaaaaaaagaaaaaaaagtaaaatgtctgctaggttttgggaggtg

SEQ ID NO: 279447 - DNA, 122 bp, Homo sapiens
gccgagacgcagcgccctgaggatgcggtgggtggggacaacgcgggagggcagtgtgggcggggccgcggtggacttgaccctctgactcaggctgggcccgggtgagctcaggacagcct

SEQ ID NO: 279448 - DNA, 122 bp, Homo sapiens
ggctgcgaggaaggtggacctgtggctggcacagaggccacagtacctgtgaagagacaacgtctgcagccacgagacagctgcggatgcgtgtggaaggtcggctgggagaggccaagttc

SEQ ID NO: 279449 - DNA, 122 bp, Homo sapiens
agggtgggggcggcaaccgtgcccggagggggcgcccagagcgcagggactcggccgggccgagtgatgttccccccaaaaaacaagagtcatcgggatgagggccagggaccccgaattca

SEQ ID NO: 279450 - DNA, 122 bp, Homo sapiens
agcctgccgcagaggcaggcgctcccgagggagagggccacagaggggggcctccccgggcgttggggtctcttggcctttgtgaaaaccaggaagccagagagaggcccggaggttcccct

SEQ ID NO: 279451 - DNA, 122 bp, Homo sapiens
gctgcggaccgcggggctgggacgatgcctcctgccggggctgctgctgctcctggtgcccgtcctctgggccggggctgaaaagctacatacccagccctcctgccccgcggtctgccagc

SEQ ID NO: 279452 - DNA, 122 bp, Homo sapiens
tcactaaaagcggaagttctttctgttctttgaatgttgaatgagagtgtgagagagacacgtaccatcaggaaatggaactagccacggtcatagcttttcatttagttttgttagtcttt

SEQ ID NO: 279453 - DNA, 122 bp, Homo sapiens
tccgctgccgcttcttggtcttcaggttctccttgtgcttgttgaaccggcagcacatggcgcgtgtcttcttaggccacaggtccaggggcttatacttcttgcccttgtagaatttcctg

SEQ ID NO: 279454 - DNA, 122 bp, Homo sapiens
agtgccagagggtggactggtccccaaatctctgtaccggactgcagaggagctggagaacgaagacctgaagctctggactgagaccatctaccagtctgcaagcgtcttcaaaggagccc

SEQ ID NO: 279455 - DNA, 122 bp, Homo sapiens
acggcttgttttgggcctcaatccgctccttttctgattttcgaaggtagggagcagcttcgccaaaaacagccatctcagcgtctgagctcgcactcatggctgcgatttatttagcaaag

SEQ ID NO: 279456 - DNA, 122 bp, Homo sapiens
ctgtgtcattcttagggacactccccaacaaactgcgccacccgagtctctccctcctctcgccagccggccctaaaacatcaaggttagtcaggactctatatttaacgtccggaagattc

SEQ ID NO: 279457 - DNA, 122 bp, Homo sapiens
tcaagaggctgagatgggacgatcgcttgagcctaggaggaggttgaggcttcagtgagccgtgatggtgccactaccctcccagctgggtgacaaaatgagaccttgcctcaaataaacaa

SEQ ID NO: 279458 - DNA, 122 bp, Homo sapiens
tgagaccctaagggagggatgagccaggcagtgtgtggttggagttctccctacacatctcgttttcctcacctccagatcacacacatgcacacacacatatgcacccacacaccccttac

SEQ ID NO: 279459 - DNA, 122 bp, Homo sapiens
gcctctttctttctccctgtctcccccactgtcagcacctcttctgtgtggtgagtggaccgcttaccccactaggtgaagatgtcagcccaggagagctgcctcagcctcatcaagtactt

SEQ ID NO: 279460 - DNA, 122 bp, Homo sapiens
cgggttctcctggcgagttttaagtcacactggatcgctgcttattttcagagatcacctcgcacccatgcacctggaaggcacccaaagagaatcattttaagaaattcacttcatctcac

SEQ ID NO: 279461 - DNA, 122 bp, Homo sapiens
aggacgtcgtatgagaaactgcggtgtctctgggctgctcggagaggcgtgtggcaaggtcggggggctggtggcctctgcagcgtgtgattcctgaagcccacatcatcttctgtcctgtg

SEQ ID NO: 279462 - DNA, 122 bp, Homo sapiens
ccgggctcagtcgccagagtcgccacagagcccacggccgctgccatcttccccatctcgcggcctataccctctgatccggaagcagattctctcgtgttccggatccggaaattttttcc

SEQ ID NO: 279463 - DNA, 122 bp, Homo sapiens
gcaaccaaaccctgaaccccactctcgattcccctctgccccccaactcttccatcccagcggatgggaaacagcgagtccagccgcctccccacctcgggacccccctcccgggccaactg

SEQ ID NO: 279464 - DNA, 122 bp, Homo sapiens
agccccggttggtgattattaataccagctagatcttcaaagccattcctgaattgagaacgatttcatgggtgtttttgtgaaacgggctagctgtcagccgggattgatcacttgactgt

SEQ ID NO: 279465 - DNA, 122 bp, Homo sapiens
ttttaaacaggctgaagtattaaatcaccatagagagcagtcttagtttactctgaaatccgtttctattcttctattaccttccacatattttgttttgctgcaaaacacagggagaacta

SEQ ID NO: 279466 - DNA, 122 bp, Homo sapiens
gagaacgtggacttccgcatccacgtggagaaccagacgcgggctcgggacgatgtgagccgtaagcagctgcggctgtaccagctctacagccggaccagtgggaaacacatccaggtcct

SEQ ID NO: 279467 - DNA, 122 bp, Homo sapiens
cctctagttagccgggtgcgcttcggcaagcgtggcgaaagtgcggcggcgaatgtcaagcgttgggtctgagcctaggggtgtggcttgagctcacgctggttctttcttgcctcggtgat

SEQ ID NO: 279468 - DNA, 122 bp, Homo sapiens
acacccgccgcaacccgagtcctaagccgaactgctgctgggggctcttggcagcgtgctcgcggcagggcctttcccggccttttccgctcccttacttgcttgcaaagctgatggcacaa

SEQ ID NO: 279469 - DNA, 122 bp, Homo sapiens
aggccgggcggcggcaccttgagggcgcggaggctgagccagggcagctgttcctccaggcggtcgggctcggggaccaggtgcgccagcaggtcggcctgggcacgcacgaaggcggccac

SEQ ID NO: 279470 - DNA, 122 bp, Homo sapiens
tcttgtgtttgcgctttaagttcttgatggacaaggggatgctctttttgcgactcgtgccgctgccgctctgggaggaagtggtggagctggcagaggaggtcaccgaactggtgtcgtcc

SEQ ID NO: 279471 - DNA, 122 bp, Homo sapiens
tggccccagctcccagagcaggaaaccgaggctcaagaggctacacgccgacccacgcggcgaggcccagcaccaaagacggtgcagaggagaaaagtcgagctattctgggtccccgtggg

SEQ ID NO: 279472 - DNA, 122 bp, Homo sapiens
aaagtaacctaatatactaggcaaattacatttgtgttatttaacctcacaacaattttgcgaggtaggtattataatgtccattttattgaagaagaaaaggaacctcaggaagctaaact

SEQ ID NO: 279473 - DNA, 122 bp, Homo sapiens
ctatcctctgctctgccactgccccagggagacatggatctgtgaggacagatttggccacggctggtttccgttcaagggcaaggatcacagctgcccttgaatctcattgcctcagagaa

SEQ ID NO: 279474 - DNA, 122 bp, Homo sapiens
tattactttcaatatcacagaaggtggacacgccccgactgatattgtttctaattgcaacgtgggagaggaggatatgacacgcgatatcccagggagtagaaacacccctgtgatacagt

SEQ ID NO: 279475 - DNA, 122 bp, Homo sapiens
ttcatcacgtgacacctctgcccccaacagtaaccccaggccctctgactggaggaggtccgagtatggacagcctcatactgggacaacatgtggttgcaggcgctcacacagattcatct

SEQ ID NO: 279476 - DNA, 122 bp, Homo sapiens
ctagaaggaggcccggcacaaagtaggttctcatgggttcaggtttgttgaatgaatatgcgtgtctgtttgtctcaagcggcagggagtgcgccgcaccgccccctggtggagagtgggaa

SEQ ID NO: 279477 - DNA, 122 bp, Homo sapiens
tggcacacagtgggccttctcaaagtgttagaacaaatgggtgacaggccagcagactgccgatcctggcacccgagggcacccagctgccctgcgcgccttcccggcccgggcgcgggagc

SEQ ID NO: 279478 - DNA, 122 bp, Homo sapiens
cgcagaaaagccgtccggccccgtgcgcgttcagcaccctggacagaggtggcggcggcccgcgccctcccagcccagcccagcccagcctcccccggcgcttgggctgggatctgtaaatg

SEQ ID NO: 279479 - DNA, 122 bp, Homo sapiens
tcgccagagcccaggttggaagccggggccagcgctcttgagaagaaagatgaaccccgccggggccggtgggctgccgagtcacacatttgcaatgaaatgcaaatgtgtaatgaaaaccc

SEQ ID NO: 279480 - DNA, 122 bp, Homo sapiens
ttacaactgcaagtgtttctgcagtatgaattcttagaagtgttactgttaagtgaaggacgtatgcgtgttttgccaaactaccctccgagatagctgaatctggtacattttaaagcagg

SEQ ID NO: 279481 - DNA, 122 bp, Homo sapiens
cggcgctgaactgtcgggagcctaggccatggggcagcctgggccttctgcagtgtgaggcgcggggcctcccgcgtcgctccgctgacaggctgcgggcgggcaggcgggaggcgtagtgt

SEQ ID NO: 279482 - DNA, 122 bp, Homo sapiens
gcgcccggctccggggaataatgagtgtctgtcaggccgtccccgggtgactgggcggggcggggcggaggcggcgcgggaggcgggggtggcgggggaagggcgcagggcggggtgcgtgt

SEQ ID NO: 279483 - DNA, 122 bp, Homo sapiens
tagttttacgctgttaaaacgtctactgcgttaccattttaagaactaagattgtaaaaccgtgagccaggctgcgtggggcaggatcatatctgctttgctgggagtctaaacacagtatc

SEQ ID NO: 279484 - DNA, 122 bp, Homo sapiens
ccggcccgggaccctcaccagattagaggctctcgcaaaggaagactctcttactcttttcgcttctccctcgccctctctcgagcctcctctcgccccacgacgagccacaccgtagaata

SEQ ID NO: 279485 - DNA, 122 bp, Homo sapiens
tcaagccgggcgccatcttgctcatcgcgggcgtggcgctgaactacatttcccagaaggcgccgcgccctcggcccctcccctcgcgactcccgcggctcgggggagagctgcacgcgacc

SEQ ID NO: 279486 - DNA, 122 bp, Homo sapiens
aggagggacgtctaatgagatgcgtatgtttagcctctaggaggtacgtctaatgagatgcgtatgtttagcctctaggagggacgtctaatgagatgcgtgtgtgtagcctctaggagtta

SEQ ID NO: 279487 - DNA, 122 bp, Homo sapiens
aaacgctggcgggacaaggacagcggtcagcaggagtgggctgcctggatgtttgggaagcggggggccggccggtcaaggggagtccctggcatggcaaggcccttgcatccccatggggc

SEQ ID NO: 279488 - DNA, 122 bp, Homo sapiens
acggcaacctggatggctggggcagggatcctctcccagaacttcgtgcccagcaatgtccgctcaagttctgggatttttacgcagctggactcccctccccctggcagccccgaggggtg

SEQ ID NO: 279489 - DNA, 122 bp, Homo sapiens
gtggagagcacacctaggtggggaggtcaccggcccaacccaccaccctccgggagaatgcgggcagggacagcagcagggggcagcatccacgtctctacgcttgcaagggttccccaagt

SEQ ID NO: 279490 - DNA, 122 bp, Homo sapiens
cgagggagggagggagatcctcgagggccaagcacccctcggggagaaaccagcgagaggcgatctgcggggtcccaagagtgggcgctctttctctttccgcttgctttccggcacgagac

SEQ ID NO: 279491 - DNA, 122 bp, Homo sapiens
ctttctcatgattaaattggggttttagatttctgggaagaccaccacagaggtgaagtacgcttctcattgcttcatatcacagcgtacatgatgttaatgtgagttattactggtgatgt

SEQ ID NO: 279492 - DNA, 122 bp, Homo sapiens
ctccggactcctgctgtggccgaggtgaggctgccgtcggccacactttgctacttctgccgctgtcgcctcggcttgggagcggcgttatttccacgaagcgctagggccttggcagcctc

SEQ ID NO: 279493 - DNA, 122 bp, Homo sapiens
tgaatgagtcgaaggggccctgggccactgtccatgagagacgcaaggagtctggggtcacgccggtcactgtcagttcccccaggaggggctgctccaggaactcagggcgggggggctcc

SEQ ID NO: 279494 - DNA, 122 bp, Homo sapiens
ctgttcctgtatactgcccatatctcttcaagaaatgatgactggtttcctgagctaccccgctttctatacacacacacacccctccacccgagaatgcagattacattttcccttctgtg

SEQ ID NO: 279495 - DNA, 122 bp, Homo sapiens
cctaggtggagggctagaccttgcccagacaggagcctcaggtctaaggaggaggagcagcgctccctgtgcccacacgcacagtgcccggccccctgtcccaggtgctacctctgcaccac

SEQ ID NO: 279496 - DNA, 122 bp, Homo sapiens
ttccgaagcagcatagttgggatttgaatcccgatcatacatactgcttgcatgcactgacgagttgattttgaggaattttaccacgcactaaccagctccaccctctggccctccgtatc

SEQ ID NO: 279497 - DNA, 122 bp, Homo sapiens
cagattttctctcaaagaagtttctgccgccatccctatcttatcagcaggaggccccggcgccatcgtctccgtctttatgattttattatggggaggtgggaaacgccaccctggattct

SEQ ID NO: 279498 - DNA, 122 bp, Homo sapiens
gggtaacgcaaacaaagccacgggagccactccacacccgccaggacggctctaacgaaacgtggaaaatttcacacccgccaggacggctctaacgaaacgtggaaaatggcggcaccact

SEQ ID NO: 279499 - DNA, 122 bp, Homo sapiens
tcgctccgcaaactccagagcgaggcacgcgcctttaaaggcaggtccgcggctctcccacgtcctggcgcccggttttccgcacccagtgtccccacagctgtgcccgggcacagaggcgc

SEQ ID NO: 279500 - DNA, 122 bp, Homo sapiens
ttagtttcaagggcaactacaaaagcaagttaaaaatgctcgggttggcataaccaacctcgttcccttctcttagtccaactgggctttagaaagctaaactgttggaggagtctgctcac

SEQ ID NO: 279501 - DNA, 122 bp, Homo sapiens
tcattgcttgttcctcatagtcagtctcatgctgccaagtgaccaggccactttaatggacgtgaggaactgacagaggccacattaattaacaaaccttttttttttttttattggagata

SEQ ID NO: 279502 - DNA, 122 bp, Homo sapiens
tggtagaaggcggccgagcgacatctccggcgaccctcagcaggagcgcgccgagtacggcgagtcaaagtcccaggagactggagtgaccagctgcaaatgctctgggctgcgaaacaccg

SEQ ID NO: 279503 - DNA, 122 bp, Homo sapiens
tgaaagcaatctgtcctctatggagcacagtcattgtgttcttaaaacacaaatggaggccgggcacagtggctcgcaggaggctgaggtggatggattacctgaggtcagggagttcgaga

SEQ ID NO: 279504 - DNA, 122 bp, Homo sapiens
cccagctaatttttgtatttttagtagagacggggtttcaccatattggtcagctgctctcgaactcctgtcctcaggccgtccacccaccctggcctcgtaaagtgctggaattataggct

SEQ ID NO: 279505 - DNA, 122 bp, Homo sapiens
gcccccacccccaccccagcagcctgctgccaccattgccctggcaacccagcagcaggacgagagcaagcaagagtacctttcgggctgtcggtgcctgtctcatcattgcagaaaaccaa

SEQ ID NO: 279506 - DNA, 122 bp, Homo sapiens
ggaggacaaaaagcaggcggcaagtattctgggtaaaatcctcccaaagtcttcccccaccgtccccccagtgggggactatgggttactgtgatcaagagacacctgaacataaaacacaa

SEQ ID NO: 279507 - DNA, 122 bp, Homo sapiens
agacatggcccttgccctcaaggagatgacagctgaggaaggggaacctgactcaatgcacgggattgcaataaaagaccgagaaaggaaagggtcatcagaggggcataaacaaagtgagt

SEQ ID NO: 279508 - DNA, 122 bp, Homo sapiens
tttaatttttgacgtgtttaatttgaggtatctatgagacactcagtcaaatgggcaagtcgttcaggcaatgtaaaagcagaaaaagaaggcagtagctaaaggagggagaatataaggtc

SEQ ID NO: 279509 - DNA, 122 bp, Homo sapiens
agctcattgtactgcaggagaggagtggacccatgtcagaaatgaggtcgtatcttttcccggctcttctatgagcaatgaagccacatcacgatagacgaatccgggaatgggacttggca

SEQ ID NO: 279510 - DNA, 122 bp, Homo sapiens
cgcacaggtggagaggccagggcccagctgtgcatggacgactccgagctgaagtgcagccgtgggtgccagtgccggtctccgtcctccttcacaggaaacacggaggccggggccgccaa

SEQ ID NO: 279511 - DNA, 122 bp, Homo sapiens
cttcggggaccacagtccccccaaagctttaggaagccagttactacatccggaaagattcgtgcttcagaacgcaagccagggagaataatcacagaaacgcaatgcgaatgtcgtgcctc

SEQ ID NO: 279512 - DNA, 122 bp, Homo sapiens
gcttctccctctctctcagggttgctgaaagattattagataattttcaaatttgtaaagcgccttaagctccttggaggaaaggtggtatatgagtgtaataacaataacaatcctatctg

SEQ ID NO: 279513 - DNA, 122 bp, Homo sapiens
gatctgtaatgggggcaggggtgggggtggatgagaaagtaggaagtggatgctgggcagcgaggtgtgaactgacggcagagcccagcccgacagcacctttgattgatgaaaggacattg

SEQ ID NO: 279514 - DNA, 122 bp, Homo sapiens
cagacccgcccttccggaggccgggcacagccggacgccatccgccccatgcccttggcccgcccccggccagcacgcgcctctgcctgagacctgggcccccaggaggcttgggaaagcta

SEQ ID NO: 279515 - DNA, 122 bp, Homo sapiens
tgacagcaggccattagtggtctgtggcccaggggttgggaacccctgggctaattgatgcgaacaagatttaagttcctgtggcttatttctggtcacaaacacatcaccaaactcctaaa

SEQ ID NO: 279516 - DNA, 122 bp, Homo sapiens
cgctcccgtggcgccgtgggaaagcgcgctggtttctgccaaatgcagttagctttgcttcgcttccctaagtgcgttcccccaggggcccggcagtgtgctaggggcaccctgcttcgtaa

SEQ ID NO: 279517 - DNA, 122 bp, Homo sapiens
atttccaaatgtcctttgacctttgaaatatataatgtcttaagttttaccatattggaacgtgtaattattgtgcagtttatcattttaaaagtgaatcaaagaactagagactgagtcac

SEQ ID NO: 279518 - DNA, 122 bp, Homo sapiens
ctccgccctcctcggcgggctaagagttaacagctgcacctgttgaggtatacctccagtcgccggcacctgtacctgtagccaatcagcgccagcgctgctgggaacctacctgtcagcaa

SEQ ID NO: 279519 - DNA, 122 bp, Homo sapiens
tgtagctgggaccgcgaggttgccccccatctaatcagccccgcagtgcctcgccaactccggaagatttcaaggagttgtgcctgatagtttgccacgaatctccaaatgctgaactacca

SEQ ID NO: 279520 - DNA, 122 bp, Homo sapiens
gattttcagattgtctagcaatattatcctcctggataaccctgataccaatcaattaaccgtcttctaactctcctccttccctcccttaccttttctacacctattacctaagcatttga

SEQ ID NO: 279521 - DNA, 122 bp, Homo sapiens
cctccgtccagagcggtcggttggccagcggagctggcttgggtcggagcccggctgcctcgccgcgtgtgacagcccagggagggagcagagggtggggcggggagggatccggaaggtgg

SEQ ID NO: 279522 - DNA, 122 bp, Homo sapiens
aaaaccttactatgtaacactgctatagaaatctataaagtgtttccttcgtaggagggccgtaggcagccatggcgcccagcaggaatggcatgatgttgaagccccacttccacaaggac

SEQ ID NO: 279523 - DNA, 122 bp, Homo sapiens
ttcgttagttcaaaagctatgactcctgccacagggtagaaactaggactctttcagagtcgcagtactgaggtctcggggaagaaccctgattgtcccagcgtgggtgagatgtcaagctc

SEQ ID NO: 279524 - DNA, 122 bp, Homo sapiens
aacaaagcaatggattactctttcatcaaggtttgttttctgttcatagccttgacactccgctgtaagaaacctttgtgcttgtccttttgtctcctctatgcacagatacctcatcagaa

SEQ ID NO: 279525 - DNA, 122 bp, Homo sapiens
ctgagtggggagggggctggggcgagcgtggtcctgggggtgggtggcggctgcggtgagcgggccacagccttgggctcccctcagtcccgggcccccactgctggggagctgccattgtc

SEQ ID NO: 279526 - DNA, 122 bp, Homo sapiens
cttggaaattgaccagtcttccttttacttaactccaaaatcattaagacagggacctgacggggaagctagttatatggaacagatacactagttgcacactgtagtcacctcttttgcag

SEQ ID NO: 279527 - DNA, 122 bp, Homo sapiens
agaggcaattatttcagttgccaaatatgaagaagcaaccctaaattctgacatccagtccgagtttctacaagccagttaaatttttattttctgacttaggatgttcctgagatttgctg

SEQ ID NO: 279528 - DNA, 122 bp, Homo sapiens
catagttcaagagactgcaaagaagaggctccttaaggggtgtggacaggattaagagaacgagcagggttgctgaggcacccagagactagcaacagtggcagtcattaccaccccaggcc

SEQ ID NO: 279529 - DNA, 122 bp, Homo sapiens
cggggtaccgaatcggaagaaccacagggcgctgtcaagggcgaagccgcggaagtggagcgctgcctggcgcgcaggagcggagacctggaagccggggacaggcagcacaggcagcgggg

SEQ ID NO: 279530 - DNA, 122 bp, Homo sapiens
agacacacccgcagctgtgcccgtaggttccggccgggcccggtgagccacgctcacttccggtccgctctaggattccaggtggtgccgtcttctcactggttgtgcaaacacctacggta

SEQ ID NO: 279531 - DNA, 122 bp, Homo sapiens
gcagacacagaactgtgcgaaatgacgctgatgtcgcagtgatgcgagccgcatgttcctcgcctcacctgctcactttctgagcctcactgcagcgacaggaggcaggaagcacccccaac

SEQ ID NO: 279532 - DNA, 122 bp, Homo sapiens
agagcggagccggagcgagccaagcagcccacaaagtgccatgccccggcggggttgaggcgcgcggcggtcggcccggcgcgctgggaggacgcccgggagctgcgcgacgcggggcggcg

SEQ ID NO: 279533 - DNA, 122 bp, Homo sapiens
atctgtctgaggtagtcggccatgaggttccgcagggaccgcttgtaggggaggcccaggcggtgggggaagagcacagacgtgtccaccacggtgctgtggatgacctgtgggcagcggca

SEQ ID NO: 279534 - DNA, 122 bp, Homo sapiens
gggcgcgcaggcaactgttccacggagaggcgctccgtttccaacgtccatcagcgacggcggtaattagggctttccaaccccaaatgtgggcgtgattgtgcaaaagaccttacgacaaa

SEQ ID NO: 279535 - DNA, 122 bp, Homo sapiens
catcccaaatacaaactacatgttccaggatgctttgggcggcagatctcgcggaagccgcgaggagagcccggccccgtctcgcgcgcctgcttccgcctccctgtggcggcggcttgttg

SEQ ID NO: 279536 - DNA, 122 bp, Homo sapiens
aagtgaatgaaaatgtcattctcagttcttcgctctggggtgagagatgtccccaaagcccgagtttgttctttcttttttttttgttgtttgagacgaagtcttgttctgtcacccaggct

SEQ ID NO: 279537 - DNA, 122 bp, Homo sapiens
gggttcacggggctgtgtacagagactctctctgctgacacgatggccatatggccttcgcgtatgactccactcctcagggttcgtggggcttggagactctgctgacatgataccacaga

SEQ ID NO: 279538 - DNA, 122 bp, Homo sapiens
catgactgtggccgagaagctgcgtgtggcagcgttggtggccagtggtgtggccctctacgccagctcctatgtgccctaccacatcatgcgggtgctcaacgtggatgctcggcggcgct

SEQ ID NO: 279539 - DNA, 122 bp, Homo sapiens
atctttaaaatgtgtaaagtaaacaatcaaaattaagaacttctgctcttcagaaaacaccgttaagagaatgaaaaggaaagccacacactgggagaaaatatctgcaaatgctgtctctg

SEQ ID NO: 279540 - DNA, 122 bp, Homo sapiens
tagccgccggaaatgggcgtgaacaggcgcatgacctccttgatgacgcagtccaggtagcgcagcccactgagcgtgtccaggcgcagtgtgccctcgcaggggcagccgccactgtgcag

SEQ ID NO: 279541 - DNA, 122 bp, Homo sapiens
cgatgttggacggctatcacacgtggcttcacactgttctttttcttctctggctgggtacggcctgaggatgactgccctccaacaactgaggatgctgcaggaggaccagcccagcacct

SEQ ID NO: 279542 - DNA, 122 bp, Homo sapiens
aagccacactgaaataaaagatgacctcagaccggatgaagtgctatgaagaaagccaaacgtgatgatacactggagagagagagagagtgggcgggcggcaggcgggggactttacatct

SEQ ID NO: 279543 - DNA, 122 bp, Homo sapiens
ctttctgatctgatggtccgtcagaaactaaggtggtgtgtgactgtggggttatgtccccgctgaagccgtcttttcctcagagttgtaattgatggggagacctgtcacttgttatgctg

SEQ ID NO: 279544 - DNA, 122 bp, Homo sapiens
tatcttccttctggtgggttcgtggtctcgccagctcaggagtgaagctggggaccttcgcggtgagtgttacagctcttaaggcagcgcgtctggagttgttcgttcctcccagtgggttc

SEQ ID NO: 279545 - DNA, 122 bp, Homo sapiens
ataaaagcaaggacaatatttccttgcaagtccacaaatcaccatcataagcaaggcaatcgtgaataaactgagctggactgcatagcctctttggcagttgctagtatttaaatatggat

SEQ ID NO: 279546 - DNA, 122 bp, Homo sapiens
gagccttccgcacgcgccctcccccgcccctcctggctgggacactccagagaagggacacggggtctcccagaccccctggcagacgggcaagagggcccggccagcactgctgcagatcc

SEQ ID NO: 279547 - DNA, 122 bp, Homo sapiens
tctccgagtgtggccgaccatgaggattcccagtcttgcaaatcgtgggagcgtgtcaaccgccccgtttctttccaaagccgggcatggcccggaagcagctgatcagatcttagttctga

SEQ ID NO: 279548 - DNA, 122 bp, Homo sapiens
catgctgctgccccagccttcccgcagacttggcctaatgaaaatacatacttcttcattcggagagacaaaacaagaactagagttttaatgataataaaagcaataataataaaagcaat

SEQ ID NO: 279549 - DNA, 122 bp, Homo sapiens
gagcgagcggccgggggaggagaaaaaggcgggcggcgggagagggggcctctattatctcggcttctcgggaggagcctcatctagtcagtcacgcagaagtttctctttcgctcttcgcg

SEQ ID NO: 279550 - DNA, 122 bp, Homo sapiens
gaggctgtggactgcgacaaatcagccagcagccagggatgaggacggtcagggctgggccgggagtggtgggcagggtctgtgctagctcctcctcgcacctggagtctcctcccctgccc

SEQ ID NO: 279551 - DNA, 122 bp, Homo sapiens
ataaaaccaatgtaaactctttgcattacagtcacttattagttagaagacttctttgctcggcagtaagctccggttggagggaaggcaatgaagactctgaaggcaattctcaaggagca

SEQ ID NO: 279552 - DNA, 122 bp, Homo sapiens
tacaagtgaaagagaaaaacaagagagtcaatgtcagagcgatttgacatgagaaagactcgggcagccattgctgtctttgaagatggaagccatccatctctgggaggggctgcagccca

SEQ ID NO: 279553 - DNA, 122 bp, Homo sapiens
gcggttccggctgggggctgggcaccccggggcgaccacggcaggcccagatggggactccggttccaactctcctggcccagaggctctagggtggtcttgtctgtctcactccgggggca

SEQ ID NO: 279554 - DNA, 122 bp, Homo sapiens
tgcctagctcagggttgactttaataggtcgcgctgacatttgtttcttctgagaaacatcggtgacttcatccagacccaaatctactcccattaaaaagtgaaggcacccacaagttttt

SEQ ID NO: 279555 - DNA, 122 bp, Homo sapiens
ctgagtggcactgtgggactagtggtatgggggagaacattttaggtggtggcatatggacgtgacattacataacattgaatcacgtagagtgaaaattatttcgttttcaatttcttctc

SEQ ID NO: 279556 - DNA, 122 bp, Homo sapiens
gaggggctctcaccttggccagggtctctgcctgtttggggctcaggtctccaactcggccgctcatggtgctggctggggcttgaggagtggtggccactataggcaagaggccaagccta

SEQ ID NO: 279557 - DNA, 122 bp, Homo sapiens
gccagcgtccctggctgggagcagagctagccgagtagggcgcccggctgtcaaactggccggcgcagtgcacgctgggccgccccggagcggtcgcagagcccgtcgggagtcgtagtccg

SEQ ID NO: 279558 - DNA, 122 bp, Homo sapiens
ccttcctggaaagctcattatctctgtttgaattaacatttcagcatggaactaactgggcggaggaaggatcgttatacgtcttcagaaagttctcattgccccagctgcctagtactata

SEQ ID NO: 279559 - DNA, 122 bp, Homo sapiens
tggaactcctttgggcattggtctttgtatctaaaatggtctcatgtttaattcaatgtgcgcatttataacaaggtctgatttgatgacttgttcagaagggtgttttttttttttgaaga

SEQ ID NO: 279560 - DNA, 122 bp, Homo sapiens
cccccgagcattcagagaaagccgcccgtccccagtcccctcggaagccggtcataaacccgacttctcatcacccgaattacttaaatgagctttgatggtgttaggtccttttccacgtg

SEQ ID NO: 279561 - DNA, 122 bp, Homo sapiens
tcgccggccacttccgccgccgccgctgcacacgctcccggcggtcgtcgccgcgccgcgcgccactaagctgaaagaaagtggcagagacgcaagccagtcagcaccgggctcgaagggcg

SEQ ID NO: 279562 - DNA, 122 bp, Homo sapiens
cctgtggcccaaaggagaatcctgttgggggaggcgggggccggtggtcgctaaccaatccgacacccgccagcaggctgaagagaggggctttcccaaaaggaaaactttcccaaacctgg

SEQ ID NO: 279563 - DNA, 122 bp, Homo sapiens
tccgcgggatgcaggacaagggtcctcggccatcgaaatcactctccgctcataaagacacggttccttgtagaggaaggattggtgtaccatttgggaccctcccaatcccccagaagtat

SEQ ID NO: 279564 - DNA, 122 bp, Homo sapiens
ggtggtgggtgccctgcaggggtttctatctagccaggagctgcctggaaatttgactcacggggaggaaggggcctgggcatcggtgcacagagggaaccatatctggggcctaggcagcc

SEQ ID NO: 279565 - DNA, 122 bp, Homo sapiens
ttcccccacactgttttcatggtagtgaataagtctcatgagatctgatggttttataaacgggagttcccctgcacgtgcactcttgcctgcaaccatgtaagacatgcctttgctcctcc

SEQ ID NO: 279566 - DNA, 122 bp, Homo sapiens
tgctgggggccgaaagcgccggagaaacctgggactaaacgaaggcgactccccgcagggcgcaggcaccgcacccggcgtttgttttattcttaatttacttttttgggcacctctgctat

SEQ ID NO: 279567 - DNA, 122 bp, Homo sapiens
tccagccgccccaggggacactgtagaaccagcctctggtgcggggagacctccgcctgccggaggaagtcccagcctcaggtttccggggctggtggtctccctgctctgctgtctggcgc

SEQ ID NO: 279568 - DNA, 122 bp, Homo sapiens
cggaatcaggatggccaggatacttacgtagcctttgtagctggtgtctagctccggccccgtgggagttttgctgcgaatgatattttcggtttgctgtatctgaaaacggctatcatcca

SEQ ID NO: 279569 - DNA, 122 bp, Homo sapiens
ctcccttgagccagtagctcctcccacttcccgtggttttcggttgaaccgaaacctggccgttggctgagcgagcgcggggtgtttgggatgcggcacggcgagggggagcaggcttggct

SEQ ID NO: 279570 - DNA, 122 bp, Homo sapiens
cctttgtcccccccaatccccacaccttctctaccacagtccaggtgtgagtgtggtctgcggtgtgtgtggtgtgtgatgcgtgtgttgcatggttgtgtattgcatggtttgggtggtgt

SEQ ID NO: 279571 - DNA, 122 bp, Homo sapiens
gaggtgggggaggggcgagcgggccgaggccccgcccccgctcctctgccccgcccgccgcgattatagccgatgactcagggcggagctccgcatccaaccccgggccgcggccaacttct

SEQ ID NO: 279572 - DNA, 122 bp, Homo sapiens
acccaatgagggagaggcttggaaagtgccttggagacttgagtgcattggcagctgcaccgtgccacctgcgtgttagctctgcttacatttgggaggagaaggctttcctgggagtgaag

SEQ ID NO: 279573 - DNA, 122 bp, Homo sapiens
atttgtttgagacagtgtcctatgctgttgtccaggctgagtgcagtgcccagctcactgcggcctcaaactaactaggaggctcaagtgatccttccaccttagccttctgagtagctggg

SEQ ID NO: 279574 - DNA, 122 bp, Homo sapiens
gaaccaccagcacaggcaacacaaacacagatgtaggcaggactcgcttttgacgttggacgaccattgctggagcacttgctgtgcaccaggctctgttctaggacctagagatacagtga

SEQ ID NO: 279575 - DNA, 122 bp, Homo sapiens
gagaaacaataaccggaacaacagcagtgggagggtgcccaccatcatctgaggaacagccgtgcccgcctgctcgccgcacctgggacgcggcagcctcgccgcattctcgctcagaagtc

SEQ ID NO: 279576 - DNA, 122 bp, Homo sapiens
ttttttgaaaagctcgttaagtttaaaactctaagtgtggaataaacaaagtcgggcaagcgcggacaggcgccggcggactggaagggaactcgagccggcgtcctcggggctgtgaacgg

SEQ ID NO: 279577 - DNA, 122 bp, Homo sapiens
agaacacagtggtgattagccagctctctaacacctgtgtgctggcagctttcccgcaggcggcagggggagaatcagcgcttctgcgggacaaaggaacgatgcagcggtgagaaggcctc

SEQ ID NO: 279578 - DNA, 122 bp, Homo sapiens
cggtactcccgggcgagatcccgcactcgccgcttatatttgagctcctgccgctcgtgccggctcagctccacgtccccaaaaaggaactcctcatcagccagctccgcctccaggtcctc

SEQ ID NO: 279579 - DNA, 122 bp, Homo sapiens
ttgggtgaactaattgtctgaccaaggtaacgtgggcagcaacctgggccgcctataaagcggcagcgccgtggggtttgaagcgctggcggcggcggcaggtggcgcgggaggtcgcggcg

SEQ ID NO: 279580 - DNA, 122 bp, Homo sapiens
caggggcgggaccccaaaacctaccaatcagaaagtggcacgccggcattggccccgccccgtccctcgcatccgccactcaggagccccgcggcaccgcccccgtcgctccctctcgctag

SEQ ID NO: 279581 - DNA, 122 bp, Homo sapiens
gactccctgagccgtaccaccacccaacactgcggtgggggtgcgggagccgtccgagcgcgtcctgcaccgcgaggagagccgggcctccctagctctcgcaagcccaggaacacagtccg

SEQ ID NO: 279582 - DNA, 122 bp, Homo sapiens
ttctttagaaacacagtggtccctgggggccactaccctttccctttgaaaacttgaattcgaattctctaagtcaaaagtgaaaggttttgtttgtattctaagaccagcacctatctagt

SEQ ID NO: 279583 - DNA, 122 bp, Homo sapiens
tgtgatctgcctgcctcagcctcccaaagtgttgggattagaggcatgagccaccgcgcccggcctctaatcgtgaactatctatgggtaatagaaaatcttacttctgagagcccagagta

SEQ ID NO: 279584 - DNA, 122 bp, Homo sapiens
gtcgcgggccctttgtctcacacgggcgagtccggggaattctgggaagtggagtccacacgctctgtggaggctcgagcacttccggtccccaactgtgacgttgctatttcatttaccac

SEQ ID NO: 279585 - DNA, 122 bp, Homo sapiens
gccctctgctccttccctgtgtatgacatactttattccttcatggctttcctttcactacgtgggtcctccttgaccttgtcaacttagtgaactgcacacctttgaagactcctcttaaa

SEQ ID NO: 279586 - DNA, 122 bp, Homo sapiens
caaaaagtgggggttgctgcccaagctctgtcaggggtgattgtcccaagctgctgcattcgaagtccacactgctttgctgagcagggctggcgtggcagtgaggcagcttatgttggctt

SEQ ID NO: 279587 - DNA, 122 bp, Homo sapiens
cggcgttcttcaagctcttgtattctgccgggagcaatcgggtaattttccagatagtggcggagaaactgctggtaattgatgcctaaaacgctaagtgggtggcggagacggagataggg

SEQ ID NO: 279588 - DNA, 122 bp, Homo sapiens
cccctcgggctagagctgcaccctgtgtgatggggccgaggtgggcatagtcggcacgctcggagtgactcctacttgctaggcgtttcccatgtgccgtgttgtcctaaacgctcattttt

SEQ ID NO: 279589 - DNA, 122 bp, Homo sapiens
gtctgcgaaagcaccacaggtgactccgggtacgcactcctcaggacacaagcacacacacggacacatcttgtgactctgagactacacagatcaacctcagattcgacccttccctcctt

SEQ ID NO: 279590 - DNA, 122 bp, Homo sapiens
caaaatatcaaagcataaaagtatcaaatgacataaggtagacccagaattctagcatagcggaatattagacatttaagtttatacagatgctatgaaatcctaaacccccaagcaactta

SEQ ID NO: 279591 - DNA, 122 bp, Homo sapiens
cctgtgtgtctcacatcctggctcccagcgcctctgtttttcgggtttgggaggcgacagcggccaggaagtatgaggcatgattcaaaagccctggaattttctggaacggggatgcaaac

SEQ ID NO: 279592 - DNA, 122 bp, Homo sapiens
caccgcccggcatgcgcacaccttccccttacacaccttcagaagcatcctgggtctccacgtgtctcacgcctactttgagcacccttctgtgggccccccgaaacactggggtcagccca

SEQ ID NO: 279593 - DNA, 122 bp, Homo sapiens
gcgacagactcgcagcctgccctgaattttcttcacacagcctgggggcatccgaatgcacgggagatgttttacactcagatgaaacaaactgtttagacctcggggaaaagagactgtgc

SEQ ID NO: 279594 - DNA, 122 bp, Homo sapiens
gaaggggcggctgggaacatgactccaaggagcagcgactaggacagcgagggatctggccgtcaggttgcagcctggcctgcgcgcggaacttaaacacctaagggaagagatggcgcgcg

SEQ ID NO: 279595 - DNA, 122 bp, Homo sapiens
tgcgcagccagccggctccgggggccccgcgcactacaagtcccagaaggcagctctccgcggggcgggcagtcgccttatctgcttctggctcatttttaccactgctctccccttccccg

SEQ ID NO: 279596 - DNA, 122 bp, Homo sapiens
cgcggaaggcagggagcctcgcagagttttaaagatgcagagctcctttttcggaggccacggaaattctcatctttctaactaattatgcaaatacagggtaaactctttgctcctattgt

SEQ ID NO: 279597 - DNA, 122 bp, Homo sapiens
aggcatcaccacggttaagttgccaggccaagatcaaatgcaaggtggagaggcccaggccgctgaggacggcagcccgcatgcggatggggaggagcgtgtaggcgatgtagacaaagaac

SEQ ID NO: 279598 - DNA, 122 bp, Homo sapiens
gctacagacaccaggaaaaagatcgttccaatcactctttggctgttccgagccttatagcgggatcctcaaccaggggccattccgccccccaggagacaaccagctgtgtctcggacagt

SEQ ID NO: 279599 - DNA, 122 bp, Homo sapiens
accgcaggcgaacgcccgttttcctcagaggccgaactgggagctaaccgccgctcgcaccgcccaccctacagtctcactaacatttcagcggcggtgtcgtcaggactggagatctcacg

SEQ ID NO: 279600 - DNA, 122 bp, Homo sapiens
cggaggctattatcacttccttccaactgccccttgtgaaatagtcaaagcatccctgatcgcggaggagacaaccgccagatcacaaggtgagttttgtattccagagtttcaacggctct

SEQ ID NO: 279601 - DNA, 122 bp, Homo sapiens
cacacagggctgctgagcactggaagcggccttgtgagctgctgccaagaggcaggtgcccgtgcaaagccttcctgtgaaggaatctcactgaggttgttaaattctggttacatgttgaa

SEQ ID NO: 279602 - DNA, 122 bp, Homo sapiens
cagtgccgaggtcagggtgacacaagtgggtaaaacccaccaggacttcaccttttggggcgtctgtatcctcatctacaaaaatggtactggcagacaccctatgcaattgttgggactca

SEQ ID NO: 279603 - DNA, 122 bp, Homo sapiens
tgaatggcagagagggtatagtgtgtggaaaaacatgggcacaaccaagtgggattcaagcgtgattcagaagtcagagtgttactgtaaaacatttgtagaaataccttaatcaattttat

SEQ ID NO: 279604 - DNA, 122 bp, Homo sapiens
ccctgcggggagagtagggcaggaggtggatttccaggccagaggcttccaggctgggcccggaccccacgccgaccccggccccggggggggctcagcgacctcggcgcctcctcaggccc

SEQ ID NO: 279605 - DNA, 122 bp, Homo sapiens
aatgatcttggacaagtcatttcctttcactgaaaaaataccagtgtttcacaatatttgcgtgatggaaagagttaacatagcaggcctgacactgctattcttagtaaggcctgtttgca

SEQ ID NO: 279606 - DNA, 122 bp, Homo sapiens
tcccatcaattctgtgagcctttcttatacccttagtaatgtatattgcaattattttctcggtttgtcttttgcctttatagtatcatttgtcctgcagaaattttaaatttttacatagt

SEQ ID NO: 279607 - DNA, 122 bp, Homo sapiens
ggctgctgcaggacacgacatggcggaggcggatctccggcatgtcaacgtcgtgggcttcgcctggccagaaggatgaggtagagtatggggtccgaggggcagggagagtgggagggggc

SEQ ID NO: 279608 - DNA, 122 bp, Homo sapiens
cccacctgtgaccatgacaagttttggagaccagaaactcggttagagtttctagaaccccgcatccctctcatactgcctgaagccctgctctggggagagtgtcatcacagtaccatgtg

SEQ ID NO: 279609 - DNA, 122 bp, Homo sapiens
ctctcccacgacagcgctccctcccgaggcggggcagaggcggagcccacggcggccacgcgggccctgaaggaagggctttcttcatgtcctttcgccactgggaaggaatggaggtgttt

SEQ ID NO: 279610 - DNA, 122 bp, Homo sapiens
aagagcgagcgagggcgagctatggaccctgtgagtcaggtgagacagaactgggcagggcggctggctgggagcagggggcgggggatgccgcggcttgggagaggcgcccccagcccctt

SEQ ID NO: 279611 - DNA, 122 bp, Homo sapiens
cttcttgtcccttactgtgaacagacctaagagtacttactttattttttagaaagaacccggagctgctgatgtctgagggagtcgtttcaacagagactagaatatcgagagagaaaatt

SEQ ID NO: 279612 - DNA, 122 bp, Homo sapiens
gctgacaggtattccaggccctgcagctatgattttctgcactgtgatttaacaaaataacgctaggtgcaatcagtcactctcttgtgaattgcttagcaaagattattaccccagacaga

SEQ ID NO: 279613 - DNA, 122 bp, Homo sapiens
cggccccatcttcacaccaaattacagtactctcccgtctcttccactgaaattgccactcgcatccctgatgcgtgacccctgctcacctcaagttcctatgagagtttctttaccggttc

SEQ ID NO: 279614 - DNA, 122 bp, Homo sapiens
ccgctgccctgtgcagcctgccatcgttggcagtgccaagggacagcgcatttggctggacggaaatggggccgacctagtttgtgaagcagaggaaacagctgctggggtcccaggaccgt

SEQ ID NO: 279615 - DNA, 122 bp, Homo sapiens
ggggagcgcgcagtgcccagtgctgagagccgacgcgcgggcaaattgaggccgagctgacgagctccggcgggtggacctgacgtcaccgcggcccgggtcacctcacccatggggctccc

SEQ ID NO: 279616 - DNA, 122 bp, Homo sapiens
cgcgtcgggtcccgcagctgtcagtgcaggaactccgcctccaccctgggccccgcgctgcggacccccaaagcctacagctccgagaggcccactctgcgccgtgcattcatttgacgcag

SEQ ID NO: 279617 - DNA, 122 bp, Homo sapiens
ctggtgttggggaaagtgattggcaagggaaagaggcagggctgaaggcctagggccccccgcagaaatgcgccctctgagctgtactgtacagaggcgctcctctgcggaatcctgcagct

SEQ ID NO: 279618 - DNA, 122 bp, Homo sapiens
gggcgactcaggtggcggtgcgactgccgctggtttcggttctggtgcgccatgacgggccgctgccgctttctgccgccgcgcttggcgccccgggcctccgcaccgcctagtctccggcg

SEQ ID NO: 279619 - DNA, 122 bp, Homo sapiens
cggaagcccgcaccgtgccccaccccatccggcaccagattaaggaaagaaggggccgtccggaaacaaggacatctcctttagatctgttaaggtgacaccagattttttttttttttttt

SEQ ID NO: 279620 - DNA, 122 bp, Homo sapiens
ggtgatgagttagcgggttgccatggcaacaggctggccacgtgaccagggtgctgctgccggcgctctgacgtcagctgccagagggcggggccgcaggagggcggggcgcgagcgagagc

SEQ ID NO: 279621 - DNA, 122 bp, Homo sapiens
gcacaagacagcgaggagtgctggctggtttgctggcgcccagcactatgacctggcttccgttcatggctcataagtttccagtctttggggtatctgtggcttttatgtcatctcactgc

SEQ ID NO: 279622 - DNA, 122 bp, Homo sapiens
tctatcttagaaatgtgtgcctttggcttaaggcttaatacctattaaaatgcaaatgcacgccaaaagaggcaggattattgtggttgctgaaaataagtatatcaatataaatgtacaca

SEQ ID NO: 279623 - DNA, 122 bp, Homo sapiens
aattgttacaaccatatttattttataacaaaatactattaatgggctgaatttatgatacgatggaaaaatagtttgaggaacagcttaagactcaaagcttatttggccttttattactg

SEQ ID NO: 279624 - DNA, 122 bp, Homo sapiens
tctgagaaggggccccaggcacggttgtcctgttttcctccaccacccagccgtccccaccgtgttgcaccatccactttcggaggccttctgtgaaataaaaaaggcttgtgcccaagttc

SEQ ID NO: 279625 - DNA, 122 bp, Homo sapiens
gggcggctgttcgttggttgatatgccagagcctgttctgttgtctgtattggctattgccgctgtcagtcagggccgtgggtcgaaccttcacctactctttgtctgtacaagctcttgtt

SEQ ID NO: 279626 - DNA, 122 bp, Homo sapiens
tggcgtcggaggggctccagcaggggtgaaggaggtcggggaccctggaggccccaagggcgagccgtctgggggcagaaagtgcagccctctgcagaccctgcccggcccccctgcacctc

SEQ ID NO: 279627 - DNA, 122 bp, Homo sapiens
gcgcagggcgagggcaccgggggcggggggctccgctccccgtctgacccctcttgcccccggccagtcagccagtaagtgcggctcctcagactttcgagacagcgaacggaccgaccggg

SEQ ID NO: 279628 - DNA, 122 bp, Homo sapiens
ctccttgttcctaaatcaatgccgcgtccccagcttacaactcctggttcctaaaatcaacgccgtgtccccagcttacagctccttgttcctaaaatcaacgccgcgtccccagcttacag

SEQ ID NO: 279629 - DNA, 122 bp, Homo sapiens
gtccaccttaagaggacgatgtagccagctcgcagcgctgaccttagaaaaacaagtttgcgcaaagtggagcggggacccggcctctgggcagccccggcggcgcttccagtgccttccag

SEQ ID NO: 279630 - DNA, 122 bp, Homo sapiens
ttgcaaaatttatgggcagaccggtatgtgtgcaggtgaagacaaagctttccttttttacgttgtttaaagatgtcctactgtaaggtagacgcctaatgtttaaatgaacgcctaatatt

SEQ ID NO: 279631 - DNA, 122 bp, Homo sapiens
ggaccaccctccccatggctgcctgggtctccatctgtgttcctctatgtctctttgtgtcgctttcattatgtctcttggtaactggcttcggttgtgtctctccgtgtgactattttgtt

SEQ ID NO: 279632 - DNA, 122 bp, Homo sapiens
ccccatagacctggaaattctcacccgtgttccttcacctagagcaaatttagacgtcctcgtcagagtccaggggtcgcttccttttgggtttaaagtcgccctgaggatggtcccttccc

SEQ ID NO: 279633 - DNA, 122 bp, Homo sapiens
gctctgggtgaggctgggccccaggctctggggcgcagctactttctcgcctgcaccctgcgtgaggcgactcgcctacctaccactgacctggggccctgggctccctaaggcgagctcgg

SEQ ID NO: 279634 - DNA, 122 bp, Homo sapiens
aaaattagccagtcgtggtagtgggcgcctataattcccgctacatgggaggctgaggcacgagaatcagttcaaccctggaggtggacattgcagtgagctgagatcgtgccattgcactc

SEQ ID NO: 279635 - DNA, 122 bp, Homo sapiens
cgcagggctttaggcagatgagggatgacgcaggcacaggcctgagcgtcgcacgctttgcgtagatgagggatggcgccggcgcaggcctgagcgtcgcacgctttgcgtagatgagggat

SEQ ID NO: 279636 - DNA, 122 bp, Homo sapiens
cagacactgcgccactttccacgcgcatggttcacccacctttctgagggtccaagcccacggcacccgctgaccctgcctgtctgcccagacactgaaccacattgtggttcacccgcctt

SEQ ID NO: 279637 - DNA, 122 bp, Homo sapiens
agcccgcggcctccacttccggcggggcaggacgtgcagaggtgcctagtcctccagccccgccccatatccatgattgacgctggcgaggacgaggagtccgccccttgccccgcctccgt

SEQ ID NO: 279638 - DNA, 122 bp, Homo sapiens
aggtgaggcaatgcctcgccctgcttcggctcgcgcagggtgcgcgcacccactggcctgcgcccactggcactccctagtgagatgaacccgaacccggtacctcagatggaaatgcagaa

SEQ ID NO: 279639 - DNA, 122 bp, Homo sapiens
cagcaggcagagcatcccatccccaaactcaggcactaggtatggaaacgtgaggtggcccgggcccgctgctgcatgtctgtcttcagcaggaggaggcagacccggatcctcgcatgggg

SEQ ID NO: 279640 - DNA, 122 bp, Homo sapiens
tccagggccttccagacaaggtctcctggcctctcaccattatctgggcctcagatgaggcgaaccctggaagggagttgggggtggaaggtgggaggcgcgcccagggatgagcgagatga

SEQ ID NO: 279641 - DNA, 122 bp, Homo sapiens
tgcatttcagtgagtgttggaaagagacatacttttagtagattctggttctgtcgactacgttaattcttagaatcctatgttaatttccatttaatgtgagcttgttgttcatggtttta

SEQ ID NO: 279642 - DNA, 122 bp, Homo sapiens
cactgtgggccagcctgtctcggaggcagaggttcttgatttctgagtgtttgggtcctgcgtgtgatcagagggcctcctttcccagttggggttccccggtttccccagggcagctgtgg

SEQ ID NO: 279643 - DNA, 122 bp, Homo sapiens
cccgtggctgacggggatcgggggaagaaagggtgggggccggccggaagccccgtgggccgaagccaccccaggccctcagcccagaccaccaggccgcgcaggctggcctcctgaggctg

SEQ ID NO: 279644 - DNA, 122 bp, Homo sapiens
ctccgggggcgtggggaaggacctcgaggtgttgatcttgccggtgaacctctggtacagcgaagccatcgggcaccgcgctcctgctggctgtctttagggctttttaatattttgctttc

SEQ ID NO: 279645 - DNA, 122 bp, Homo sapiens
ctgcagtccccatacagtgaccagcttcctgggccactctctttactcatgctcaggactcgtgcctttccacccagccgtatacacctctgggcagcgtgcctgagtcctcagggtcagaa

SEQ ID NO: 279646 - DNA, 122 bp, Homo sapiens
tttgatacccacttcctgagcaaatgtgacccctagggcctgggattcccaagaccaccccgaaatgcagcggccccaccgtctcctgaggccggtgaggccaggggcagcagtgcggctca

SEQ ID NO: 279647 - DNA, 122 bp, Homo sapiens
gaaagcgcctgctccccgacatcctttttatgtattcggacagaactatatcttatcggccgggatcagtgaaggggggcgcgctaagtagtttaaaacgaccctcgcacaatgggcgtgcc

SEQ ID NO: 279648 - DNA, 122 bp, Homo sapiens
tgcaagggggtggaagatttaacacccagggcagccaaatatacccttgtaaggtacgcacgagaaaaagccaggttttgaggctgctggtcattttctgacttacccccgaactattccag

SEQ ID NO: 279649 - DNA, 122 bp, Homo sapiens
cttcatatggggtaaacaccattatctcccaactagatcgctagatctaccaactgcaagcgattgtcccttttgaacgtactaaaaccacacactttcccatcccctgggctcctggccct

SEQ ID NO: 279650 - DNA, 122 bp, Homo sapiens
attcagggattgatccttgtgctggcaagaccagaggagaggccaaagcaggcccagatgcgcaagctcctggagcaggaggccaggctgtccaactcacttatgcagcacccacagtaggt

SEQ ID NO: 279651 - DNA, 122 bp, Homo sapiens
ctggagccggcagcttgcgagggggcctttacgtgatgaggctcaccatggggtctccagcgaggtgtctgcagagcttcgatggtgagaggaggaactcgatttctcgttttctggagttg

SEQ ID NO: 279652 - DNA, 122 bp, Homo sapiens
gaagcagttcactttgtgtttatcaggatttttctgtgaagttccccaaacccactggcacgcccctgccatagcatgggaaagcaaattgcacgagggattccagatatgaaagtcactgt

SEQ ID NO: 279653 - DNA, 122 bp, Homo sapiens
aaaagtaatttcttcaagcaggcacagccaccaggcaggttaggctgttcataggcatcccgccccggtcactcttgtacttgtcaggaaggcaagccaagttcagaagtcagagagggcct

SEQ ID NO: 279654 - DNA, 122 bp, Homo sapiens
ttagaaatggaactggtttttgagccaagaaacataaaaatttaggtgttcttagccaagcgtggtggctcatgcctgtaatcccagcactctgggaggccgaggtgggtggatcacaaggt

SEQ ID NO: 279655 - DNA, 122 bp, Homo sapiens
ctaggcgttaggaagaaaatgctgcctgaccctgacttctaaactccccttaaacgtcgtcgctgtgtccctagaacccaagatagagtatgcatgaataaacttttgcgaaatgaaccaac

SEQ ID NO: 279656 - DNA, 122 bp, Homo sapiens
ccttgagaatcccttaggtgaggccaagctgtgtggttaggagtcttggaggcaaacaggcgggcatagcctagctctacttaccctctgcgtagccttgggcaactgagcctcagtttctt

SEQ ID NO: 279657 - DNA, 122 bp, Homo sapiens
ttataaatacgaacaggtttaaagaaataatgaggccggcagcgtgtgcgaggagccccgcgcttcctgggcaccacgcggcgggacccggggaggcaggcggggacccggggaggcaggcg

SEQ ID NO: 279658 - DNA, 122 bp, Homo sapiens
ctagcaaggccacgccctgccagagaggtctccgacctgggacagcccaaggctcctgctcggaaacgtttcactccctgcccgtctcagagacacccaaagtttgagggatttttccagga

SEQ ID NO: 279659 - DNA, 122 bp, Homo sapiens
gcgcatgcgcagcctcggttccgttgcgtagcgtgtccctcagtgggacactgcagggtgcggggacaactacgaagatggcggttgcgcgcttggcagctgtggcggcctgggtaccttgt

SEQ ID NO: 279660 - DNA, 122 bp, Homo sapiens
caagggagatagggctctgaggtgtcagaagtcgtcgtgggggactttgacttgctgcctcgtccgagcatgagcggaaggcacagaggggccctcgggaatctccatgcacttttctgggg

SEQ ID NO: 279661 - DNA, 122 bp, Homo sapiens
gaaagaaccctattaataagacatgttgctgtttggagaagacagagccaatgaggccctcgttccagggaaacagaatatgctcagcatgacgcagcactccctgaactttccggttacat

SEQ ID NO: 279662 - DNA, 122 bp, Homo sapiens
ttctgcccgtcctctcgggtactctatggttttcgtggccgactactctaattctagttccggtctctatggcggccggcggaggcaggaacggttgtaggtcgactgaattagccgccaaa

SEQ ID NO: 279663 - DNA, 122 bp, Homo sapiens
ctttccggcctcttgacgtagtctacttttactcagctcctgtcatagtgcttgtaaggtcgtgtatcctaaattttctctaaatgatatatcataagcacttttctatgttgtcatttagt

SEQ ID NO: 279664 - DNA, 122 bp, Homo sapiens
tgttaagcactccccactccacccgtccaccccagccacgctccctgggacctagaaacacggatctgtgtgtaacagcctgacatagactttccgtggggcctatgtgggcctggacatag

SEQ ID NO: 279665 - DNA, 122 bp, Homo sapiens
ccagtcccgcagctgaccaatcggagctcgcccttccggggcccgccccattccaggaatcgacctccgcaccggcctcgaaaattgaccaatcggttgtgtagctccgctcttagtcccgc

SEQ ID NO: 279666 - DNA, 122 bp, Homo sapiens
ctgcacagtgggcatggtgcacgcctggcttcacgggctactgggagtgctgagtgcaggcgggatgccccacgggcccttgggcacacaggctgaggacgtgtgagggtgtttcctttctc

SEQ ID NO: 279667 - DNA, 122 bp, Homo sapiens
ccactggagggcaagggagcaaaatcccagacctgctgcatttcctgctgctgaaatctccgaaagcacagcaaggcagaagagtaaatgagcagtatacttttccagcgactacacacaat

SEQ ID NO: 279668 - DNA, 122 bp, Homo sapiens
tgtcctcgggcccggtggccccgggagatgggtgtcgggatcccgctgacgcccgatccgcgcccgcacaggcagaagtagagcagaagaagaagcggaccttccgcaagttcacctaccgc

SEQ ID NO: 279669 - DNA, 122 bp, Homo sapiens
ggattcgtactacaactcccaagagtctaagcgcgcgtgaggactgcaggctccgagcggcgcctagccctctgggaattgtgttctgggtcaggcttgactgactctgagggaggccggca

SEQ ID NO: 279670 - DNA, 122 bp, Homo sapiens
gaggcggggagtcacgttcctctggggccgcctcctcagctcccggcggcggggacggcgcggaatacaagactctgaagataagcgagttggggtcccagcttagtgacgaagcggtggag

SEQ ID NO: 279671 - DNA, 122 bp, Homo sapiens
gtgagcgtctcagggcagcttcgtggttctgtagcgggaacacaggaagcagagagacctcggttgtaggactggagaagtcataatctctgctgcttttgcatgttccacaagaaacagtg

SEQ ID NO: 279672 - DNA, 122 bp, Homo sapiens
caccttctccatgctgagtcccgccccgcttcctgtttattcatcctgcagcaaactctccggtatcctgatggagtctactaggtgtcagtcatttggccgtgcctcagccgaagagaggc

SEQ ID NO: 279673 - DNA, 122 bp, Homo sapiens
agactagtggtgtcaggatcaacctgaaaaaattcaaagcagaggccaacgtatcattttcgttctaagtaacagaacagaaggaaagccaggtgagcaatattttaacctcagaaagggtt

SEQ ID NO: 279674 - DNA, 122 bp, Homo sapiens
agtcacgcaggtggtagtagtccaggtggtcgtaaactcctcctcatagcttatgggtggcggcggctgggctgaagactgcggacaggacatcccgcccggccgcctgtggtcaccctccc

SEQ ID NO: 279675 - DNA, 122 bp, Homo sapiens
tggttttgtctaaagtgctgatagtgggcctcacagaaaagttaccatgaaccgactttccgggattcccttggcgctgcattaattggcctcgttgcaaaaggaaaccgagaggaaggcgg

SEQ ID NO: 279676 - DNA, 122 bp, Homo sapiens
gagagtgcacagacaccaccagcttgagagcccgaccttgtttcttgctaagaaatgtcccgtttttgcctgtttttggcagaagccagactgggagattgctgcaaatggctgcaacaacc

SEQ ID NO: 279677 - DNA, 122 bp, Homo sapiens
ggctgagccactgagactgaagcctcctctcctcccaacccttttataccccatcctgggcgggtgttggctccagtgctttgacctcctgccttgattatctacctgttgtggtgccatca

SEQ ID NO: 279678 - DNA, 122 bp, Homo sapiens
aattacaaaccctctgctctttgtatttctctgttgtgaagaataaactgtacctgcacccgggtggcggtggtgtttggcgtgctctgtgcgagggcagggctggggggcacctttccatt

SEQ ID NO: 279679 - DNA, 122 bp, Homo sapiens
aaagcaatacttatttttatattgtgtagattcaatcttgtttccttgcctagagtgggccgtgctttggagttcttatgagcatggcattcctgagaacttctctaactgcagcctcgggc

SEQ ID NO: 279680 - DNA, 122 bp, Homo sapiens
gccagcgttgtccgggaagcgcagggtcgtgcacacagtgtgctccagtgttatctggggcgcgctgtggggcgtgcatacagtaggcgccattgtgatccgggaacttgaaccctgagcct

SEQ ID NO: 279681 - DNA, 122 bp, Homo sapiens
acccaacattaaccaaaatggtcgctaccagagaacgctgagaatcccgccactacgttacgtgcgcacacagaaacgcctttattctgagcccttactggttctgttgcgctgtcattcaa

SEQ ID NO: 279682 - DNA, 122 bp, Homo sapiens
aagggtaaagagccatagtgaagagcaaaaatacctcttatcttgaccgggaattaaacccgggtctcccgcgtgggaggcgagaattctaccactgaaccaccagtgcctctctctagcaa

SEQ ID NO: 279683 - DNA, 122 bp, Homo sapiens
cgtggtagaggggctcaaacaggtagaagacgtccaggtgctggttgaagagctggcccacgaaggaggagccactgcgcgtggtggccaggatgaggatgtgggtcttgcgggagaggttg

SEQ ID NO: 279684 - DNA, 122 bp, Homo sapiens
atggcgacggcggcctacgagcagctgaagctgtgagtcccacgggccagaggcctgaggcgcggcgggcggggcggcaggtgcgggccctggcctcggggagggcttctgagtcccggatt

SEQ ID NO: 279685 - DNA, 122 bp, Homo sapiens
tactccatattggattctcaccgccgccaacaggaggaggaagtagggcggaagcgatgacgtcttcccagcggccagaggtggtggagtgcaaaaagcttcctacttgcgaccgaaaaaaa

SEQ ID NO: 279686 - DNA, 122 bp, Homo sapiens
tcggccatcccccgggagagcaagcccacaacccactggcggtcgctctcctggtatttgcggatgtgacaaggagccatggacagacttctgtgtctgaaatctctaagtccaggagacag

SEQ ID NO: 279687 - DNA, 122 bp, Homo sapiens
acaatgagatcagtgtaaatactctttaacacaacaatatttgagtagctttgaaacagtcgtcctcatttcgttacatacagaacgttcgtgcttcctccctctcaggcaagaagcggagt

SEQ ID NO: 279688 - DNA, 122 bp, Homo sapiens
cgcctcttctgtggttacctttaatggcaggtatggccatggaggcccatacaggtgtctcggggcaatcaaaggccccttcttaggggaacatcgtgcttcctatttccctgtctccagcc

SEQ ID NO: 279689 - DNA, 122 bp, Homo sapiens
atggtgcagtggtgactgagctacgagcctggcggcgggtgttcgccgagctccggtccccgcgtgtctcccagaaggcggtgaacacctggtcccaggaactctggagcccactccagccg

SEQ ID NO: 279690 - DNA, 122 bp, Homo sapiens
ggaaatgtctaggagagaacggaggtgcggatgcggcgcaagcagaggcgcaggcgaaggcgcggcggccagagcgcagggttccggcgcggagccctgagtccggagcggaagcgaagccg

SEQ ID NO: 279691 - DNA, 122 bp, Homo sapiens
gggcggggaaaccggttcaaaccggagtggggtttgccgaggaggtggcgggggagggagcgagagcggggtcttcccgaggttcccactccggcccccgccgttgccttagcaaccgggcg

SEQ ID NO: 279692 - DNA, 122 bp, Homo sapiens
tcctttcctcaaagctagtgagaatcctaccttctgtggttttagcctcgatcagtgtctcgcaaggatcaggcgggccaggccagaactctatattagtctattctgcgaaccatagatta

SEQ ID NO: 279693 - DNA, 122 bp, Homo sapiens
ggaccctagaggcccaatatttaggggtctggaaccccgagtattaaggtctggagactccgttgccacagatttgagccgagtcaggacacagtccctctacagaagccttggggacagga

SEQ ID NO: 279694 - DNA, 122 bp, Homo sapiens
ctgcgcactctgggggacccctagccctggccgaactttcttgaccgtccctgcatcccccgagctctccttatgggcaccccctggccctttgcgctaatggtagagtcgcgccctagtcc

SEQ ID NO: 279695 - DNA, 122 bp, Homo sapiens
ggtgccggggtgggggtgaggctcagcagagcccggggcacaggccggaggggctgcaggcgcgaggctgggttacgtgaggaagctgggggtttcgcgggcagctttagagccccagtcag

SEQ ID NO: 279696 - DNA, 122 bp, Homo sapiens
gagggttgggctgcctggagttgcgtgtggccaccaacgcgcttcgcgcctcgtggcgtccgcttatggattgttgggaagttcttgtccagaacttcctgtggcataggtgaccccaagga

SEQ ID NO: 279697 - DNA, 122 bp, Homo sapiens
cctacagagtcgagtcccacctcctaccaaaatctcatacaaaaacagcatctgctgccccgaagctggccagacattgcgaaaggtaagaaacccgccattgacagttgacgaccatccct

SEQ ID NO: 279698 - DNA, 122 bp, Homo sapiens
ggtcaggcatttgggcagggcagggctgggtctgctggattgggactgctgaactgtggtcgaggtgctggccaggactgggctcaccttggaaacctctggtaggggaggatccacttcca

SEQ ID NO: 279699 - DNA, 122 bp, Homo sapiens
agactggcccgaagtcacccagccagcttctgctcaggtcggtggcttcattcttcacaccgctttccgctgggtcccccgagggcttaggcgtggagcaggtcttatgttcaatactttca

SEQ ID NO: 279700 - DNA, 122 bp, Homo sapiens
gatgttgatgaggtaatctgggaagagcccaggtctgtgcaaagtgtagggcagctcctgcgaaaaaagactgtacctaattaaagcttagccttctgcctatcaccctgccttcaattcag

SEQ ID NO: 279701 - DNA, 122 bp, Homo sapiens
gtgagaggatggatcaggtctggtgtgtgctggttcatgctgcacaccgtgtcaggatcacgaaggaaaggactggggaagggtttgctggtgtctcagttaatagcaataacggcagccac

SEQ ID NO: 279702 - DNA, 122 bp, Homo sapiens
ctggcactcagcgcgggccagaatcggggactggaggcctctggccatggcgcctggagacggggtcgcgcagaccccggacacccgaggggggcgcagcaggccagggcaacccgccgcga

SEQ ID NO: 279703 - DNA, 122 bp, Homo sapiens
gatggtcctcatttgcagccatttgaatctctgtgatgtcttcctttttctacatagacacggtaacagtctgatctctctttccaccacaatcttacaagtgtaataaatgtggcaaattt

SEQ ID NO: 279704 - DNA, 122 bp, Homo sapiens
gtgttagctacatccctgagtgtcggctgacggccgctggtgagggcaagcctgaaaagccgggcccctgaagcatctgggcagaggggcagggggcatggctggatcgcctgggaccaccg

SEQ ID NO: 279705 - DNA, 122 bp, Homo sapiens
gctgcttccagtagcctccagggtatccatccctacttcccaccttgacccggagccgatcgagcacgcctctgacatctgcgcaggctgctgtgcctctagcttcctgctctctgactgcg

SEQ ID NO: 279706 - DNA, 122 bp, Homo sapiens
ggacgccatcggcaatggccccccattgctctgcagagaacataacggcacggatgccatcggccatggccccccatcgctctgcggagaacataacggcacggatgccatcggccacggcc

SEQ ID NO: 279707 - DNA, 122 bp, Homo sapiens
gatccgtgttattcaggatgtggctccagtcatcatgcatcccaggcagcaataacacatcgctttcatccatcagaatagcaaaaattagaaaggtcggtcttgccacctacctgcgtgcc

SEQ ID NO: 279708 - DNA, 122 bp, Homo sapiens
tggcgaagcaacacttttcttttttcactctctagccatggtcctcttctaactgggcaccgactctttcctcctctcccagctttatccttcccctacccgccctggcgcagagttgtcat

SEQ ID NO: 279709 - DNA, 122 bp, Homo sapiens
ctctccactcccatctctacgtcacagtaagtcctgagtttgtgtctccactgccaccgccgccctggcctacgcctgcacctgctcctgcctggacggtgttatagcccccggcgggggtg

SEQ ID NO: 279710 - DNA, 122 bp, Homo sapiens
aggctctctcagaacccaattattcttccctttcactcttcttcctaatcatactaccagcgttaagttgacagttatttatcaggcatatttagcagccagccttacagttttctcttgca

SEQ ID NO: 279711 - DNA, 122 bp, Homo sapiens
gcagggatggaggtgggggaccaggaggagcttcgggacctcttcaactcccctttactccgtcttccccctaaggaggaacaagagcgggatgtgttgggggtggggaatgtcttggggct

SEQ ID NO: 279712 - DNA, 122 bp, Homo sapiens
acacacacacgcacacccgtccgggtccctctcggtgtgtcttccttcaagatgacagggcgctggagaaaaggctgctggaatcagctggtaggtacagtagtaacccgagccccacccac

SEQ ID NO: 279713 - DNA, 122 bp, Homo sapiens
agtacattgtttaagacagcaatgcattcccacaggatgaatcttctccagactgaagaccgtttccttcaaccttttttttttctgtcttattcctttctcctcctcttgtttagttttct

SEQ ID NO: 279714 - DNA, 122 bp, Homo sapiens
cctcagacaccacctggacgggcagctcgagccgtgggacgcccctgcttgggccagaatcgggtcctgcacctcagacctgcagggcccagctcggcctctgggcctctggcagccgcgcc

SEQ ID NO: 279715 - DNA, 122 bp, Homo sapiens
gtacctagaataagtgagaaagtgggggaaagggagctgattacccgcgcccaagccgttcgttcttaagagccctgcaccgcgccaccagctcccagcacaaacagctccggccgtaagtg

SEQ ID NO: 279716 - DNA, 122 bp, Homo sapiens
atatttgtaatgtttccagagctctcagaatgaggatttttttgtaaataggtcagaagacgatggaactgtcctgggttagtatagtaatcttacagtaggatccttaggttgatgctgac

SEQ ID NO: 279717 - DNA, 122 bp, Homo sapiens
ctgtgtggagatttttaatcatgaggaatacaaatgaaactattgaaactattcattcttcgtgccacctgtttgtcacttgaggaggcaaatgagaagaaattgccctggctagaacctcc

SEQ ID NO: 279718 - DNA, 122 bp, Homo sapiens
cggccccaggcccacagcccccacccctccggcgtcgtccccgagtttacctccaagtcgcggcctttgttcttgaaattcttgagccgttggttgtccagtttctcgttgtccgccatggc

SEQ ID NO: 279719 - DNA, 122 bp, Homo sapiens
ctttagtggggtggctgctcaccgcacctcggagctcggactggggtccggcccctgcggcgacgattgtttgtacctaagtgaaggaggctccgagacccgcggcccacgtcctgccggag

SEQ ID NO: 279720 - DNA, 122 bp, Homo sapiens
ggctaaacttttcagagaaaggcaaaagcagcttctgatgggtttttcggctgggaggggcggaaaaattaggcagacccggagctcccgtaggctgaaaaacttgctcctcttccccctcg

SEQ ID NO: 279721 - DNA, 122 bp, Homo sapiens
agacgtgtccatagtcacagagctagctacacaggggagatccacacgtcagagacttgacgtccacccagacaccttttctactctacctgcatccatctgttccacagttggcagccctt

SEQ ID NO: 279722 - DNA, 122 bp, Homo sapiens
tttaaaaaaattattattcctttcttttctttttttgtttttctaaagctctaccacttacggtgtggttttggagaaactggtttatctgtgcttcaggtttcccacctgtaaagcaaagc

SEQ ID NO: 279723 - DNA, 122 bp, Homo sapiens
agctgatgctacagtagttgctccctatctgctggtttgatttctgtggttccagatcctcgagtttaaccgtggtctgaaaatattacacagaaagttccaaaaatgaagaatgtacaact

SEQ ID NO: 279724 - DNA, 122 bp, Homo sapiens
gaaagagaagcgcagttctccaaagggtagggactctgggcggggctagcagtcctattccgcaaccgcctcagtctcggccccctcaggccaggcgtgagcgccgcccgcctctccccctg

SEQ ID NO: 279725 - DNA, 122 bp, Homo sapiens
ggggccagcgcagctgatcttgcagatgtcgcagtagtgaagctggagctgcctgggccccgccttgggtctcggcagcttgctgggaagcggtggcttcgagtcggccctggggctgcttc

SEQ ID NO: 279726 - DNA, 122 bp, Homo sapiens
gtcctaaccggaatggcccttcatagataattactttcgttgcatctgcgcttagtgaaacgtttcaaaacccttgtgcacatcgatgtatccaagagacggagccaggggaggtgggagga

SEQ ID NO: 279727 - DNA, 122 bp, Homo sapiens
cgggcgggggcggggccgccgcactttaagaggctgtgcaggcagacagacctccaggcccgctaggggatccgcgccatggaggccgcccgggactatgcaggagccctcatcaggcgagt

SEQ ID NO: 279728 - DNA, 122 bp, Homo sapiens
aacatgtgaatggcacactcaggtggtgggtgtatatccagacgcgcaatgtaaaattcccgcatcgctgctgagagccggcaaatgtccgtcgccaggtgttgggggcgaagggaggtcta

SEQ ID NO: 279729 - DNA, 122 bp, Homo sapiens
tgccctcgtctctctccctcggcctcgacctactgtcctttgtgacccttcctgggtcggcgaccctgcagcggtcccggagccagcatccccatcctccagacagggcttgtccacgcgta

SEQ ID NO: 279730 - DNA, 122 bp, Homo sapiens
cctttcgggtacagttgcacacagtggatcacacagatccgaagtctgaggcacagggcgcggtccgcgagtgggagcggctgcttgtgggcagggtggacgcggggccacgtcttggccgg

SEQ ID NO: 279731 - DNA, 122 bp, Homo sapiens
agtggtgggtcacttgatgtggagccaaaaaagagtaagtggctcaatagtccccaagggcgtctgcatcctcaggaacagcaacattgaatcatcagggaaagtatgctcaacatcctgtg

SEQ ID NO: 279732 - DNA, 122 bp, Homo sapiens
agatgagaaatctggtcatgggaacttccattgctgaacattctgttttacttgctctaacgcatcctggattgtcagggggagacacgagtttcctcagacatcctctcactcctgccttg

SEQ ID NO: 279733 - DNA, 122 bp, Homo sapiens
cgctaacggcctacctccccctcaggtgctcttacagcctgttccaagtgtggcttaatccgtctccaccaccagatctttctccgtggattcctctgctaagaccgctggtgagtaggcag

SEQ ID NO: 279734 - DNA, 122 bp, Homo sapiens
ggagaagctgaagataacatccaagcttctaatttagaggactgggttgatagtgggcatcgtcaaagtgctaggcagcacagggggaagaacagatccaaggaggcagaggggcaggggag

SEQ ID NO: 279735 - DNA, 122 bp, Homo sapiens
cttagtgagggccacccgccgtgaagatgggccgcctcatcacagccgaggtggagagagcgctgagctgggagcccagacccctgtcagtgctagcccagctctgcctcagatggcccgag

SEQ ID NO: 279736 - DNA, 122 bp, Homo sapiens
ctgctgctgcatgactcagactcggagagcttccaacctcgcaatgagccagcggctccccggagtcagacgctggcccttgtgtctcaggctcctggaaccttccgattaagcctccactt

SEQ ID NO: 279737 - DNA, 122 bp, Homo sapiens
gcgcagccagtcaggagcacaaggcgcaggcgcaaggcaacctttgccctttaactggcgcggcgccttctcaccccacccctccagcccaggcttcacctccagccactcagttgtcttct

SEQ ID NO: 279738 - DNA, 122 bp, Homo sapiens
gaagaaaataaaccaaggcaataggctaaaaagtgtcttgggggccggcatggtggtttacgcctgtaatcccagcactttgggaggccgaggcaggagcatcggttgagcccaggagttcg

SEQ ID NO: 279739 - DNA, 122 bp, Homo sapiens
tgagaaactggggaggtggggccaggccagactcatgtcagaaggcccctcagtgagaagcgaagaagcaatctgtctttattatgaggaactaggaggtggggccaggccagactcatgtc

SEQ ID NO: 279740 - DNA, 122 bp, Homo sapiens
gccggggagtgggggcgagggcgagtcgggcgcaggagcgcctgggagcgctagtcggtgcgggaggtgcggcgaggccggtcagtcccggggccggcggccgctccgacgcgggcgggacg

SEQ ID NO: 279741 - DNA, 122 bp, Homo sapiens
gcacacatgtactgctcaaatttgtatcccatgtacataagctcccggaggagcggtggccgagcaagcctctgggcccgagcgttcggtgtctccacttcactcaggtatagtgttccctg

SEQ ID NO: 279742 - DNA, 122 bp, Homo sapiens
gcttggagaatattttccatggaagccaagggagcatccctctcccttttggaggcacgtcgaggccaattgacttgacgatgatttgctgtttggcgatggctccctcactcccgagcgtg

SEQ ID NO: 279743 - DNA, 122 bp, Homo sapiens
tcagcaaagcattttaactaatggaccattatttatgatctagaaacaattttgtgaaagcgatttcttagtgatgctgtttactgtgatcacatttgcccttagtataacaatacctaagt

SEQ ID NO: 279744 - DNA, 122 bp, Homo sapiens
ctttacttttccactctaggccacgatgccgcagtaccagacctgggaggagttcagccgcgctgccgagaagctttacctcgctgaccctatgaaggtaaatcgctggcggggccgctgct

SEQ ID NO: 279745 - DNA, 122 bp, Homo sapiens
ttacagacacactcctgcatctgcaggaaaggcgtgagaacccccaggcaccgggatgttcgaagcacacacagtcacatgtctcttcaggccagactctgccaccaggcgttttcgtgcca

SEQ ID NO: 279746 - DNA, 122 bp, Homo sapiens
aaagcatgctcagaatgtttcttctttcaatggttttcccaggattgctatctaatggaacgtggtttcctgttgtactcctgttaacacaagcaaggaagagcactttgcaggaggaaaca

SEQ ID NO: 279747 - DNA, 122 bp, Homo sapiens
gggggcgggccggaccggggcgggcgggcggagcagacactgcggtacagacgggggcagcggcggcggcgacggctgcaccggcggcggcggcaccacacaaacaaggacgctgattgggc

SEQ ID NO: 279748 - DNA, 122 bp, Homo sapiens
tatctctaaattctgtgtccattattcagtattcctttaacttgtagagcatggctattacgtgtttaagcaacatatatctctaaaaagattcgaggccgcttataagagaaagtatatta

SEQ ID NO: 279749 - DNA, 122 bp, Homo sapiens
ctgcaacctccctgcctgattctcctgcctcagcctgtcgagtgcctgggattgcaggagcgcgccaccacgcctgactggttttcctatttttttggtggagacggggtttcgctgtgttg

SEQ ID NO: 279750 - DNA, 122 bp, Homo sapiens
cccccgccctcctgcccagaggacccgggactgacagcgcagggtgacggttgggcagcccgccgggtgtcgggaccaagagagccccccggccacccgctcagctgtttcctgctcgtgtt

SEQ ID NO: 279751 - DNA, 122 bp, Homo sapiens
cagaagccgtcggaggcgcatgctctgtagcggtctccgcagccaggattggcgcccgcgcgggccttcgagccccgcccgcagagccccgcccgcaaagccccaccccggtgcgcgggtat

SEQ ID NO: 279752 - DNA, 122 bp, Homo sapiens
atctcccaaggggtttgtgaaggtacatttcagaagatttcgaagtcctgagcgcttagccgtgcaggaacaatggtgagtctttagcccgatcgggagcggcaatggacgcctcgctggat

SEQ ID NO: 279753 - DNA, 122 bp, Homo sapiens
tctcatgtgcagaaagttggggccttgaagaacccatcactaaaacccttgacggtattccgttctttctaatggtgtagtctctaagttttcaaaagatggagccaagaatatccattcta

SEQ ID NO: 279754 - DNA, 122 bp, Homo sapiens
cacacatgagctgaagagcctagtcttctccccctgcatgaattcctggtggctacaccccgttctcccagtgtgcaggcaggcccttagtctgagccactccacattatttcccttactgt

SEQ ID NO: 279755 - DNA, 122 bp, Homo sapiens
ccgggtacacggccgaactggaaggccgcaaagcattgtgggagttgcagtttcttagtgcgcaggctgtcgtggccggactttctcaggagcgtgcttcagtattcacggtccagtgcgcc

SEQ ID NO: 279756 - DNA, 122 bp, Homo sapiens
atccctctccgaggcgcgccgggatccggcgcccagctgcggggcgagggcagggtcccgcgcagcaccccacccccggccgctggccccgcccccgcccccgccccgcctcccaggggatg

SEQ ID NO: 279757 - DNA, 122 bp, Homo sapiens
gcaagttcccagagagacgaagggcagagcagcctggagacttcctctctgctgggacaccgcctgctccggctgtcggcagccttcttcaggtcccctgtctttgtaaaaagtgctgctca

SEQ ID NO: 279758 - DNA, 122 bp, Homo sapiens
ggtaatctggacactcgtgggcaggaagtgtggcacgaagaggctgccgtttctggaggccgggaccccgggccgtccaagcgattgtgattaatacccacagtaatcatacttaataataa

SEQ ID NO: 279759 - DNA, 122 bp, Homo sapiens
gaattcatgtcaagctatccctcctcggtggagactcagtttctccacttagggaacccgcgggatggaggtggggagcaaaagcgtcggcgcgccccctcccccttcgcagactgggcccc

SEQ ID NO: 279760 - DNA, 122 bp, Homo sapiens
tctagtatgcggagctcctgcctggtgtcccggctgcctgtgccctcatctaggctctaacgtgcagtcttactaatcctcgtgcctactccacgggccaggcccccatggtataggcatac

SEQ ID NO: 279761 - DNA, 122 bp, Homo sapiens
tttttgtagtgaatgaattggatgaagtcactgcacctctgctagaccgttctccctacacggtttctaccctattatcctgtcaggctaacatgctggactttgttcctgggacctctgta

SEQ ID NO: 279762 - DNA, 122 bp, Homo sapiens
tgccgggcgttcggtcacctagcggtgggagccgaggctggctttggccagtcgccattccgccgcgggcgtctgtctcgccgggttcccgggcgcgggaggaaggcccgcgccgcttccca

SEQ ID NO: 279763 - DNA, 122 bp, Homo sapiens
gactgaattttcctctctccagattccagggtagaggtctgcatggcaaacttagttctccgatagggctaaaaaaagtcattgattttcattttatccaactttttcttgttgaaggacag

SEQ ID NO: 279764 - DNA, 122 bp, Homo sapiens
gagtgacttgggtaagctgctcagctggggtaggtggccgggctcccaggaggtgttagccggccccagggtacgcacagctgcagagagccagctcaggcctgagcatcagctctctctgg

SEQ ID NO: 279765 - DNA, 122 bp, Homo sapiens
aaaaccctacacaattaaaaatgggcaaacgatctgaacagacacagcaccaaagacatacgtatggcaaatgagcacatgagaagatgcccgacaacatgagtcattaaggaaatacaaat

SEQ ID NO: 279766 - DNA, 122 bp, Homo sapiens
tgctggggtcggaggccgagctcaccggctggttgctctttagagcgggcaggagccaggcgggcggcccgcccctctagggcggagacttccggagctgcggactcactggagccgagaac

SEQ ID NO: 279767 - DNA, 122 bp, Homo sapiens
agcttctagcacagtttcagtcatgttaccatgaggattggtgtgacctgttccatattccgtggtccattatttggtgctgaaagagaccatctacctcctagaaggtaacttagtctcgg

SEQ ID NO: 279768 - DNA, 122 bp, Homo sapiens
atcctggcccagctcacaggtgtgatgacagttctcatacctcaaacaagtcagtagaagcgatactgtttcttatagctaggcttaggaaaacttataaaatacctgtgtctcctctttat

SEQ ID NO: 279769 - DNA, 122 bp, Homo sapiens
ggtaagagccaatcttcttggcgaaaacgcggagaaacgggactagttactgtctttgtccgccatgttagattcaccccacagagatagcggcagagctggcagcggacggtctttgcatt

SEQ ID NO: 279770 - DNA, 122 bp, Homo sapiens
gaccttcactgagtgaacgagctgctggaggcgacgggagttgatgaggccaccaaacaccgtagacacggagatgggaagggaaaactaggttactgggaggctgctggggtcagctgttc

SEQ ID NO: 279771 - DNA, 122 bp, Homo sapiens
agggatgtggacttgtttctatgaaagcctggaattcctgtaggggtagtgccgtaaaaccggatctttaccttccttatttaaaggacttttttgcgcatagactgcctgtcctggcctct

SEQ ID NO: 279772 - DNA, 122 bp, Homo sapiens
gggccgggggcggcggggccggggcctggattgggccgggccgaggcgaagggtcgaaatcggcggcctccgattggcggagcctcagtccttcttgatgcgcgctgggattggccgaaccg

SEQ ID NO: 279773 - DNA, 122 bp, Homo sapiens
tgtctgtgaaatgggcaggacagtgggtggtcatgtgcaacaatgtgagtcattgcctcccgggccggccacttgctgatgagcttgtatgcggttttgcagtgaccctgactgcgaagggc

SEQ ID NO: 279774 - DNA, 122 bp, Homo sapiens
gtccccgaggggagcaagggtgtgtggcactgagtggagcagtcagaccctgggtctgtgcgtgaaatgatgttctggagggcagggagggtcaaatgggtagggaacatctcatggactcc

SEQ ID NO: 279775 - DNA, 122 bp, Homo sapiens
caccgggaactctctgcgacgtggccggctggggcatagtcaaccacgcgggccgccgcccggacagcctgcagcacgtgctcttgccagtgctggaccgcgccacctgcaaccggcgcacg

SEQ ID NO: 279776 - DNA, 122 bp, Homo sapiens
taaaaccttctggaattagaatatggctatctggcaatgctgcttccaaaagagttgaaacgtgagttcttaccaggatactgagctgccaagcctcaataggcggccacattgacaaacag

SEQ ID NO: 279777 - DNA, 122 bp, Homo sapiens
gggactccccgggctctcgcccttcaggtttcgttgacactcaggaccgtacgtacgctgcgccatgttcaagaaactgaagcaaaagatcagcgaggagcagcagcagctccagcaggcgc

SEQ ID NO: 279778 - DNA, 122 bp, Homo sapiens
ccttgagaagtttgtaagctaatgagcaagggtgacacttgcggtcaaatacatgctcaccgaggggaggaactttggccttgctcactgctggatcctgagtggtccataaatgtttgttg

SEQ ID NO: 279779 - DNA, 122 bp, Homo sapiens
ttccaggtgttcgtcatccctgcagcggggtcgagcccactggggctccgtggcttcctacgagcccaaacgcggggttggtggacaccactcctccgaagtggaggccccggggcttcgat

SEQ ID NO: 279780 - DNA, 122 bp, Homo sapiens
tgccgcgcttgcgggccagccggagttccggttgggcatgggcttggcgggccccgcactcggagcagccagccccgggcaatgaggggcttagcacccaggccagcagctgcggagggtgt

SEQ ID NO: 279781 - DNA, 122 bp, Homo sapiens
ggcccacatggggacacgagggagtctcccggtatcccggtgctgaggtcccaaagactccgagagcctccgccacgctaaccggaagttgtgactgtcgcttcctctccatctctgctctt

SEQ ID NO: 279782 - DNA, 122 bp, Homo sapiens
gcgaatattaaaatagtcctaacaataaaataacactcagtcaaccgtgtagccttcttccgagtggggaggagaatagctcactctccctagagggcctaagaaagatcagtttacaggtt

SEQ ID NO: 279783 - DNA, 122 bp, Homo sapiens
tgttcctcagcaaagtgccacatcagtctcctgagaacacagctgtgtgttctttccagtcgcttctgttcccagacttcaggcaacatggcagctcccatacttgccagggtagttggaag

SEQ ID NO: 279784 - DNA, 122 bp, Homo sapiens
cagccaggctgtgcaggggggctgcggggactcccgagcggctcggagtggccccttggacgccggggaagaggagaaggcacccgcggaaccgacggctcaggtgccggacgctggcggat

SEQ ID NO: 279785 - DNA, 122 bp, Homo sapiens
gaattccagaggaagggaacaggggtgagagaaaagaggcaaccgggaaaacccagcggtcgcctggaattctcgacggtgataactgaaagttctgaggtgataactgaaagttctgagcc

SEQ ID NO: 279786 - DNA, 122 bp, Homo sapiens
cagaaaaatgagtccaaggaaactcttttttcacctgtctccattgaagaggtaccacctcgaccacctagccctccaaagaagccatctccggtgagtccttagattcaatcctgcctctg

SEQ ID NO: 279787 - DNA, 122 bp, Homo sapiens
acctatcttagtggttccccaccgaagtggactggcccctgggtcagtctggtgggaggacggtgcaacccaaggactgagggactctgaagcctctgggaaatgagaaggcagccaccagc

SEQ ID NO: 279788 - DNA, 122 bp, Homo sapiens
atgatggtaattaccttcaagtgttgttccttcaccaaagagggcgtctccagccccagacgcatacaaggctgtcacagataaggcgtattgtgtcccttccttcaatccctgcagcaccg

SEQ ID NO: 279789 - DNA, 122 bp, Homo sapiens
gagcgaggagactgcaggaacagcccgtgggaagggggaaagagataacggggagaaggtcgggaggaccggacaactttaagtgcccatccgcccgaagacttggaaagctaagtaagtag

SEQ ID NO: 279790 - DNA, 122 bp, Homo sapiens
gcgcgccggggaccaggaacctccagcgctgagatgtggccgtgaggcgttggcgggcggcgaggagaagctcggcggcgtcccggggccggagggccgtggggccggggcgcaggggcgcg

SEQ ID NO: 279791 - DNA, 122 bp, Homo sapiens
atttttataccagtaccatgctgtcttggtgactatggcagggaacgtgagctttttccccgcaatcctatactggccccttctactgcataattattttcttctcttgaattttacatgct

SEQ ID NO: 279792 - DNA, 122 bp, Homo sapiens
tcccggcccactgcaacctccgcctccagggtttaagctattctccttgcctcagtctcccgaatagctaggattacaagtgcccgccccatacccggctaatttttgcatcttttagtaga

SEQ ID NO: 279793 - DNA, 122 bp, Homo sapiens
cagtctccgtctccggctatgcgcgggagtgcggcgcatgcgaggggagtgcggcgcatgcgacagcgcctgcgcagtcatgtcttaagaatcctttgcgctctcggtgcccccctccacgc

SEQ ID NO: 279794 - DNA, 122 bp, Homo sapiens
ttttcccaggcagccctttcctgtagagccagtatgaggtagccaggttctcagctgtttcgagtgctttgccttctctggttatctcaagcatcaggaaaattatatgttgcatacattcc

SEQ ID NO: 279795 - DNA, 122 bp, Homo sapiens
ctagagctctgtaagccacccatgccctggtagtgtagtgctccaggcctatgtcagatacgacataccttaaaaacaactccaggcctttatcagataagacatgccttatgaaggcgtgt

SEQ ID NO: 279796 - DNA, 122 bp, Homo sapiens
ctgaggaccgggcctcagctctacagcattcgcctgagcatgtattgttatccgtggcagcgccttgtctcattggatggccctaggcctagtgtggccgcgactccgaactgaaagcccaa

SEQ ID NO: 279797 - DNA, 122 bp, Homo sapiens
aaatgctaatgaatagaggagccagaatcccaacccaggaatgtctgatctcggagtgggcggcttcccagctgtggctttgcataccgctagcgtagccacccggaccctgatcccctgac

SEQ ID NO: 279798 - DNA, 122 bp, Homo sapiens
catggaggaaaaagcggggtgaccgggaatgggggcttacaggagaagaagcggggtgaacgggaatggggacttacagacaccttcctcgtgaccagagattttctgattctactttttct

SEQ ID NO: 279799 - DNA, 122 bp, Homo sapiens
agtcttgctctgtcgcccaggctggagtgcagtggtgcgatctcagctcactgcaacctccgcctcccgagttcaagtgatttgcctgcgtcatcttcccaagtagctgggattacaggtgt

SEQ ID NO: 279800 - DNA, 122 bp, Homo sapiens
atccttggcaggtgccaggtaccctggacccagcctcttgctggatgaggggcaggaaaacgaatatgaggggttggcaatgtctggttatcccatgctgaaatggggtaaagggtcagaac

SEQ ID NO: 279801 - DNA, 122 bp, Homo sapiens
gcgtcagtcggagcctgtcaccgccgttgccagcgaattcctggccttttcgccttcctgcggtacctagtggaaagggcctgtgaatgttagcgaataattcttagtcacttacgttttgg

SEQ ID NO: 279802 - DNA, 122 bp, Homo sapiens
gaggggaagtcggctccagcctctgcgctgcctctctctgctgatggctccctgggggctcggtgtaggtctcctctataaggcgggtcatatttgccacacccacttcgaggccatgtgaa

SEQ ID NO: 279803 - DNA, 122 bp, Homo sapiens
aagcagtaagaaccttttcttctttcaaggtagggatatccatcagtttatactaagcttcgtgttcagagcagggcatttagtcccaagccaggctagtcccacaagcaagagaccaaagc

SEQ ID NO: 279804 - DNA, 122 bp, Homo sapiens
ggcagaacgctgagcatttcttcaaatcactctgagaagcttgagtgtctttaatttcaccggtctgtcaaacgtaacgcgtctctccctcaccccacattttaagtttccaaggagcggaa

SEQ ID NO: 279805 - DNA, 122 bp, Homo sapiens
cagccgccgcccccggcacctgcgccaggacactcgtggtctgcgcgttcgccttgcgcccgcaccctgcctggtccctgcccactgcactttgcctagggggatgcccacgactttttgaa

SEQ ID NO: 279806 - DNA, 122 bp, Homo sapiens
tccctgctagaaggggcatagttgtagagatctattgaatacataaagctctgacgcacacggtattagcatgtctatttaaagttattaggtcccatatagccttttcttagagttggtgc

SEQ ID NO: 279807 - DNA, 122 bp, Homo sapiens
gcctccgctccctcccagaagccccaaggggtggctccactccttcctgtgacttgaccacgccgcctcccggatccccggcgggccgcttctccccgcaggccgtgtagcgtcagatacgg

SEQ ID NO: 279808 - DNA, 122 bp, Homo sapiens
gattctccacataaaaggttctaacaatctgaagacagaaagaccatgtgctttcctccacggacacagaaaaagtcatttgaaaaatttaacacatatttataacttacaaaaaaacccct

SEQ ID NO: 279809 - DNA, 122 bp, Homo sapiens
tggggccgtagggcctggtcccattctgaaaaagtgggaacaccctgccttctcttcaggcgtttgcaagcggcgtccagggtagtgccttctgtaagaaggaaaaaacaaaaagttttagc

SEQ ID NO: 279810 - DNA, 122 bp, Homo sapiens
ctaaacagaggttggactttctaatctgttattttttatgggacaaaaggaatggctatgcggtataaatgttaagctggcttaccctatgtagcttttctgtgggaagttaggaataaaaa

SEQ ID NO: 279811 - DNA, 122 bp, Homo sapiens
aaatttataccattcatggctgaaatgtcagccacaatatgttttcctgaggtttttccacgtgcccttccctttcgttagcccttggaaagagaaggacattctcatacattgctgacaga

SEQ ID NO: 279812 - DNA, 122 bp, Homo sapiens
tgggccgcgctggtcttgtatcatttcagtggtccctcccgtctttgacggggccaaactcggggtgtaaattaggatcctcactgaagcggcgggaccctgagaggctttttcctggcccc

SEQ ID NO: 279813 - DNA, 122 bp, Homo sapiens
tgccagggagccgcctcctgcctgactctcacatgatgacctggaggccatctatgggtacggccctcaagccctcaacgctcaccctccttctaccccccgcccctcaccccagcacctgc

SEQ ID NO: 279814 - DNA, 122 bp, Homo sapiens
aaattgatataggaagggggagtgccacccagtcatcttttaagtacaaagaaaggtcatcggagctgtatggggtccaggttggattattgttgactctgccttgctgtggcaaaagggcc

SEQ ID NO: 279815 - DNA, 122 bp, Homo sapiens
cgcagctccggtgggccggcactgatgggggacccggtgcaccctccgcagctgctagcccgggtgctaaacccctcactgcccgctcctagtgcggggccgccaagcccacgtccacccgg

SEQ ID NO: 279816 - DNA, 122 bp, Homo sapiens
ggtgcaggatataatcccctggtgcgccgttttttaagcctgtcggaaaagcgcagtattcgggtgggagtgacccgattttccaggtgccgtctgtcactcctttcttagactaggaaagg

SEQ ID NO: 279817 - DNA, 122 bp, Homo sapiens
cgcgtcggcggtgagccaaggtatgtcaggagagagtgcgaacccagcccccgggtagcacgaacaccaccgcagacaagggccccgcttgtggggaaatcgcagggccagtgcagccgcag

SEQ ID NO: 279818 - DNA, 122 bp, Homo sapiens
catgcctttctcccatttcctactggttcttcgcttttttcttattcatgtgtaggacctcgtgtatgtattactctgaattaaatggtgtaaatagaattgataattttaacacacttcca

SEQ ID NO: 279819 - DNA, 122 bp, Homo sapiens
caaagcccccggccccgccgccgcccactgaccttgggctccggcgccgggctcccgcagcgtcttggtcaccgccttccagacgtggcagcccagcaggcacagcagcagcgtcgcggacc

SEQ ID NO: 279820 - DNA, 122 bp, Homo sapiens
aacatctgccctgccccacaggttcactgacgccctggtcaccatccggaaccggcacaacgacgtggtgcccaccatggcacaaggcgtgcttgagtacaaggacacctacggcgatgacc

SEQ ID NO: 279821 - DNA, 122 bp, Homo sapiens
gctgagaggccgcggacggagtaacagctggattctgaggacgtggaagaggccacaccacgcagcagaaggaaggaggaagtgtacccggagctgaaaccaggccctttccaaccaccaca

SEQ ID NO: 279822 - DNA, 122 bp, Homo sapiens
agaaaaaaggttaggactgacagcagaagaaaacctcagagaaataattaataccatcaacgaaaaggtatctacgaaacacagaatatttcaaaaaagggagacttgggccgggtgtagtg

SEQ ID NO: 279823 - DNA, 122 bp, Homo sapiens
cagggcaggaggcgcagaacaggctcggcggacctacctgcggagtcacggcgcgggcaccgcgctaggagagttttcaaacggaatcttgctttcgggagagaccgctctatctctctgac

SEQ ID NO: 279824 - DNA, 122 bp, Homo sapiens
agataaaagcaccattttctaataactagatgacacagacagaaagttactctattcaaccgccacagggtttgcgaagggccggtgggttctgcgcgtccctgcgccgctggtgctgtcgg

SEQ ID NO: 279825 - DNA, 122 bp, Homo sapiens
gtcaggtctgaatgtcacttcatctgctgtgatcacacctgaaccctcagttcatcaagacgttaaaggacagtgtaacataaacttgtaactgcatgcactaagtcataaacagacgctgt

SEQ ID NO: 279826 - DNA, 122 bp, Homo sapiens
ctttgaatactttcgtaaccgttcgtttctggaaggttgagctagtgatcttgaaatgaccggtagcactgatcaaagatgagttaagaggtaacttcctctttgcttcatcgactttttca

SEQ ID NO: 279827 - DNA, 122 bp, Homo sapiens
gatccgcccgcctcggcctcccaaagtgccgggatcacaggcgggagccgcccgcccggccggatttggcattttcaaagcacactatcgttttcttgctggattgatgtctggcaagcttg

SEQ ID NO: 279828 - DNA, 122 bp, Homo sapiens
gacgtgatgggtacttgtttcaagcctgtcttctgcgagcacttcctctcagaacccagccgccaggcctacggaagcccaggcaacgctgctgaaggaagcatgtggaaggccccagcgga

SEQ ID NO: 279829 - DNA, 122 bp, Homo sapiens
gccgtggctcccatgtctggccctgctctggttcccatgtccgggacccactgtggctcccgtgtcgggcctggccgtggctcccatgtctggccctgctctggttcccatgtccgggaccc

SEQ ID NO: 279830 - DNA, 122 bp, Homo sapiens
tatgctgagaggtaaagacttgagctttttgcttttctctctgtaagtgctcaagtgcagcggtctccaattttggggggaccagggaccggttttgtggaagacagtttttccatagacta

SEQ ID NO: 279831 - DNA, 122 bp, Homo sapiens
ctgggcattggccttgctcttggattcaaatctgtgccttccttaatggactggtctccccgccccggccccaccccaactccatctcttagtcctgcagggctgtttaaactggtcccacc

SEQ ID NO: 279832 - DNA, 122 bp, Homo sapiens
caaggcgaccgcacaagccaaccggccctagtcccccacccacccgtctccactcccctacgtggctcctgctacgtggctctacccacgaagcgcccgcgccaagctggctgctgctgtag

SEQ ID NO: 279833 - DNA, 122 bp, Homo sapiens
ttacattttcttggccacatccgtctcccggaactgctccttcaccatgatgaccgctgccgggacgcctccttggcactcgggaggccagattagagaaacgatgcccccagcacctcctg

SEQ ID NO: 279834 - DNA, 122 bp, Homo sapiens
ctaaatgccagggtggagctgaggactctcttcgccatcaaacctaacctgagcacttcacgcccttactggtgtctggcccagcccgggtcgccccttccccagtcgggacttggggcagg

SEQ ID NO: 279835 - DNA, 122 bp, Homo sapiens
ttacttgggaggctgaggtgggaagatcccctaagcccagaggctgaggccaagtgattgcgccactgcactccagcctgggcagtagagtgagtcgctgtctcaaaaaacccccaaaaacc

SEQ ID NO: 279836 - DNA, 122 bp, Homo sapiens
ctaattttttgccggctcaaaggactaaccgttttccccaaacacgcggccctgagcctccggtgctttgcgaaagccgtcccctccggctggaatgttctttgtctctctggtaaatgtct

SEQ ID NO: 279837 - DNA, 122 bp, Homo sapiens
ctgggttgagtatattgttggagagtgtcaaaacactccccaggtgattctgacattagccggggcccggaaccacccccgacctactgaatctgggactccaggagaggcccagccactag

SEQ ID NO: 279838 - DNA, 122 bp, Homo sapiens
ccaggacgatggagacaagggaagtagaagttgaaagaaactcccaacggcaaattaggtcgagtgccagaaagaattacatcaggagaatctgagatgtagtgaaagtgcccccaagctcc

SEQ ID NO: 279839 - DNA, 122 bp, Homo sapiens
gcttagggtcttattatttgattgtaaagtgaaattgtggtggcatccttgggtgggggtcgggggatacattagcaacactctgaaaggtcactaagcagctgcctactctgactttacta

SEQ ID NO: 279840 - DNA, 122 bp, Homo sapiens
ttcccctaccaattggagatttcactgaagttgtgtcttctggacatcccataaattatccgagcaagtcactgaaccctcccgggcacatagcatatgtgtttaaatcccccaaacagtgc

SEQ ID NO: 279841 - DNA, 122 bp, Homo sapiens
ggggggggtctggggcttatcctcaggtcctgtgggtggggcagcgagtcggggcctgagcgtcaagagcatgccctagtgagcgggctcctctgggggagcccagcgcgctccgggcgcct

SEQ ID NO: 279842 - DNA, 122 bp, Homo sapiens
ccttcgggctgggctccccgcaggaaccaggaacgggctggccaggaggacatgatggaccgggagaaggtgacagaggcaaagccagacccttcctgttccatcttgcagaggctgtccca

SEQ ID NO: 279843 - DNA, 122 bp, Homo sapiens
ccccggggctgaggcctgcaactcccatcggactcccggggctccgactacaactcccggcgactccgcagggcggggtttaagtgctcccaccgcccagtccccggaccgactgtcccacc

SEQ ID NO: 279844 - DNA, 122 bp, Homo sapiens
ccaggggtcattcctgaggccatgaatgagggagagagtttctggctgaggaaacttgcccgtaagtcttgcaccatctggcccatgctgaccatcacagtctcactttatcttctttccag

SEQ ID NO: 279845 - DNA, 122 bp, Homo sapiens
gacaccccaccctggagattgagtctccgggagtgagaactccacccctcattgaggactcgactccccccaattccccatcgagagtgacccgacttactgagggctccctaccctgggag

SEQ ID NO: 279846 - DNA, 122 bp, Homo sapiens
gggaatgagactcctggaaggactggagtcaagcggctgtgctttctctggtgatgttcacggtctgacgctggagatggaagaggcttctatctctggctactgcccccgtctctctttag

SEQ ID NO: 279847 - DNA, 122 bp, Homo sapiens
accctacttatcaagcttgcatcctttcccgggtacccgtgcctgctcccattcccacaacgaaggttatcataaatgggcccaggacaagagcgctgttcagaaactgctactcaagtgta

SEQ ID NO: 279848 - DNA, 122 bp, Homo sapiens
ctctaggggttggtttgtaccatagtccattatgtacatctagaacaattctttctttcccggaactgagcccaaggtgggctttctacagtgcacctctggctctggggcagctcaagcaa

SEQ ID NO: 279849 - DNA, 122 bp, Homo sapiens
cgtatgctgctaggggtactccccagataggattttctttgtcttttctcctagtaacaccgaagccctctcgtgcccggggactgcagaggaacgccagaccatccggaccttgcgggatg

SEQ ID NO: 279850 - DNA, 122 bp, Homo sapiens
ctgcctgtgctactctggggcttgcgtttctgaagctggcctgatacggatgcttggaaccgtccttagactctagaaaacaacaatggtttctgtagaatgtgcatgagggacctcaggtg

SEQ ID NO: 279851 - DNA, 122 bp, Homo sapiens
gctgccgaagcagcagctgaggaagctgctgtacccgctgcaggaagtagagcggttcctcgccccctacgggaggcaagaccttcacctgcgtatctttgacccaagcccggaggacatag

SEQ ID NO: 279852 - DNA, 122 bp, Homo sapiens
ctggacatcatctctgggcctgggcacaccctgggacagtcagatgcggcggcttccatgcgcctccctccctcaggcctcacccccttcattctctcactctaaaacctcccggacaaacc

SEQ ID NO: 279853 - DNA, 122 bp, Homo sapiens
agaatgattctgtctagtttttatacgaagatacttccttttctacaattggcctagaagcgcttgaaatctgcacttgcaaattccacaaaaagagtgtttcaaatctgctctgtgtaaag

SEQ ID NO: 279854 - DNA, 122 bp, Homo sapiens
tgggttcgcacatgccagccccaagaagagaggcgccgcggccctgatctcctttcagagcgttgactataaacctggcgaatggtaagaggcaaacaaaatcagctaacccgcccccacgc

SEQ ID NO: 279855 - DNA, 122 bp, Homo sapiens
gagcagggcagcgggtgggtaccccaggtcctccagctaaaggaagggccgtggccacagcggcaactgggcctgctgccgggaaggtgagcaccattcaccttctcagtttgggtttctaa

SEQ ID NO: 279856 - DNA, 122 bp, Homo sapiens
gcggagcggggcggggcggggctacggaagctggcgaggccgagcccctcctagtgcttccggaccttgctccctgaacactcggaggtggcggtggatcttactccttccagccagtgagg

SEQ ID NO: 279857 - DNA, 122 bp, Homo sapiens
agaaacctcaatcaagttacacactgcctttgttagaaatctgccttaatggccaggtgccggtggctcacgcaagtaatcccagcactttgggaggctgaggcgggaggagcgtctgagat

SEQ ID NO: 279858 - DNA, 122 bp, Homo sapiens
gtttgcaggggctggtgagtctgggaaaagcactatcgtcaaacagatgaggatcctgcacgtcaatgggtttaatcccgagtaagaatgttcagtttgcttccaaactgcatgcaaacttc

SEQ ID NO: 279859 - DNA, 122 bp, Homo sapiens
attccctctagagcgctcgacaaatgtttactgagtgcccacggggtgcctagagcctggcgggacgtcgcggggatgcggctggaggaatcggagccggccctgccctctcggcactcgcg

SEQ ID NO: 279860 - DNA, 122 bp, Homo sapiens
cttcggttctttgcagcaggtggccgccgcatctcccacccgccaggctgccaaccgaaacgactgcagactatcacatccggcatgaagccccgcccccgtactgctacctgtctccagcc

SEQ ID NO: 279861 - DNA, 122 bp, Homo sapiens
ttgaccatggtaacagattgaataaatgagttcctcaatgcctatgcctcagggagataacgaatggtgactctaatcaatatccgtataagtaaaaggagagggtaatccattggacccat

SEQ ID NO: 279862 - DNA, 122 bp, Homo sapiens
ggcctcagccgcccaacttgctgggattacaggaagttgtgtgtccggaaccactgtgtccggccccagtttcacttttcttaatcagacaattcagctggaagagtttactaaagaggcaa

SEQ ID NO: 279863 - DNA, 122 bp, Homo sapiens
ggatccctccgcctgccgggagggagggaggaagggacgaagcgaggcaaagtagggaggcgagacccagaggcctttaaagggatcggtccgctcccacggtgcccctcggagcacgccgg

SEQ ID NO: 279864 - DNA, 122 bp, Homo sapiens
tctgtctttcggagtgctggtccctggctcagtggcaaggaagacttcaggccagcagatcgaaccagtgggcatcaccgtggaccaggtaggtcccaggtgtgggggctcagaatgtggag

SEQ ID NO: 279865 - DNA, 122 bp, Homo sapiens
gggtctacacacggctgctgggcgggcagggtccccccgggtctacacacggctgctgggcgggcagggtcccccgggtctacacatgcctcactgggagtctcttcagggaagctccgccg

SEQ ID NO: 279866 - DNA, 122 bp, Homo sapiens
cacaacattccgggacagggagatcatgtttcacgtttccacaaagctgccatttaccgacggagacgcccagcaggtaacctggtttgggagggctttgggagcccagggcgggcgaggtg

SEQ ID NO: 279867 - DNA, 122 bp, Homo sapiens
agttgctctctgcagagttccagatcctctctcctatttcggaagaggtgcgtggccccacgccccgcaggagctccggcgaggctgggggagttgaacgctttgcggacgccgccacccgc

SEQ ID NO: 279868 - DNA, 122 bp, Homo sapiens
ccactcacacctgcatctttgacactctgacacacttacacagacacactcacaccacaccggaccccccaaaacacactccctggctatgggcaccacagggccccggcacacccctgcac

SEQ ID NO: 279869 - DNA, 122 bp, Homo sapiens
gcctgttaacctctgggtagcgggtgccacggtaggggatgcgctgctctatgacacggccggtcagtgaagagcagtctttcagctcacatagtcgcccaaagaggcggatcagcttacgc

SEQ ID NO: 279870 - DNA, 122 bp, Homo sapiens
ccaccagaattgcagccggaagacctccctgcacttccccggagacgtgtttgccgctcccgagcaggttggaggcagccctgcccagggccccataccctacctggatgatgacatcccct

SEQ ID NO: 279871 - DNA, 122 bp, Homo sapiens
ccccttccaaagtaggtgtctttgccctaaattctagtgaatatctggaaacagaaacctcgaacaggtttatcattaaaaaggccaggtcagctcagaaagaattggctcagagagaagga

SEQ ID NO: 279872 - DNA, 122 bp, Homo sapiens
cgagttgggtctttgtgatataaaattcgccgagcgccgcgagccgtgctttgccaatggcgcgctcggcgcggggcgcgggctccgggttggggcgagccaacgccggggtttctttgtgt

SEQ ID NO: 279873 - DNA, 122 bp, Homo sapiens
gttgggagatcttgtagaacaactgttcgagcccgcttgtccactcattactctggaatccgagtcccagcaggggcgcgggaaaccgctgctctgagaaaaggtacctcccccagaaagac

SEQ ID NO: 279874 - DNA, 122 bp, Homo sapiens
ggagctgcgttggcagaggccaggaggggcccgggattggggtctgcgggccgccctgggcgttgccattgcgctgcggtgctgtgcttgtgtgattggtttatttatttatttatttaaac

SEQ ID NO: 279875 - DNA, 122 bp, Homo sapiens
actcagagccaccacaagcccaggtcagggcagcgttggcggtggctgcggcctcagtcgcgccaggtgaccaagcacctgtgctttcccaagtaaatgctgtttccaccacaaaagcacct

SEQ ID NO: 279876 - DNA, 122 bp, Homo sapiens
tctccccttctctaagttccccatcccccgcggcatctgctgaaagagagaggtccactccgcagccgctgcctgcctgccgcctggttgtctgcgctccttccagagccaccgaccggcgg

SEQ ID NO: 279877 - DNA, 122 bp, Homo sapiens
actcaggatgtggactcagttctcacccccatttggtgtcgggtttctagcgaagccaatcggcgtcgctggggtccctgttccagaagtccccgcgaacccattgggactcagattctccc

SEQ ID NO: 279878 - DNA, 122 bp, Homo sapiens
cagtatctgtagccctggggaagctgtcccagagcaagttagctgaggacaggacagtagcggggaaggaatacacagcactctctctctctgtgtcctccatgccccaccctagcctctct

SEQ ID NO: 279879 - DNA, 122 bp, Homo sapiens
acaccttcccggagcggcagtcatcccaaatacaaactacatgttccaggatgctttgggcggcagatctcgcggaagccgcgaggagagcccggccccgtctcgcgcgcctgcttccgcct

SEQ ID NO: 279880 - DNA, 122 bp, Homo sapiens
tctgggggagatgcaggcaccgtctaactgatacgcgggctctgggggagaagcaggcgccgtctaactgatacacaggatctgggggagaagcaggcgcagtctaactgatacgtgggctc

SEQ ID NO: 279881 - DNA, 122 bp, Homo sapiens
catagccagaaccttttgaactcctaaccccgcagggatgtccgcctcccagaagagagccggcttcccaggcagcttaggaaacttaaccgagatcccagaaagaaggcgaggtgtagctc

SEQ ID NO: 279882 - DNA, 122 bp, Homo sapiens
gaggctgaggcgggcggatcacttgaggtcaggagttagagtccgagaaactctgctctacgttttgtaagtattctgtactaagccggttaaggtttgtaatcttcatctttcatactgtg

SEQ ID NO: 279883 - DNA, 122 bp, Homo sapiens
tcttaaagcaccagcagcgtaaagtgaggaaaaactgttgcataaggaaatttctgaaaccggatttccctgggtttcagcaagcacttgttcaggagaggttgggaggaccaaatgttcag

SEQ ID NO: 279884 - DNA, 122 bp, Homo sapiens
actcctgggtccctagagacgtgtggccccgcccccgcagcgtcgctccgacacgacggccgccgcgtctccatggaaacggcccaggcatccacccagccgagagcacgatggctactggg

SEQ ID NO: 279885 - DNA, 122 bp, Homo sapiens
gaacacgcacctgcaggcgccatgatgaaagcatgcgatgggctcattgaaggactagaacggtgggtgttcgaggcagggtaagcaagatgaggaccctgtaccaacttgtccccttgtgc

SEQ ID NO: 279886 - DNA, 122 bp, Homo sapiens
cgctgcagggagaaccgcgagctctcaggggtcggcgggtgacttctttccggaagaaagcgaggaacgcgctctgcggggtgagccggactccccaactccggacgatcagcccaggactg

SEQ ID NO: 279887 - DNA, 122 bp, Homo sapiens
gctggcaaatccaaaatctataaggcaggctggcggctggagcctcaggcaggatttctacgaggcagaatttctcctccttcgggaaacctgcttcccctcggaaggccttctgtgggctg

SEQ ID NO: 279888 - DNA, 122 bp, Homo sapiens
tctctattcattcatccttctgaaatttcatttccttttgctggaagctttcttggatcacgccagcacatacacacaactacacgtgttgttgttgttgttgttgtttttgttttaaacag

SEQ ID NO: 279889 - DNA, 122 bp, Homo sapiens
catcatcgactacaacatgctggtcatcttcatcctggctgtgggcacagtggctgcaggcggctactgggccggcctgaccgaagccaaccggctacagcggcgccgtgcccgaagaggag

SEQ ID NO: 279890 - DNA, 122 bp, Homo sapiens
ggcgcccgcagggaagggggccctagacggggcgatgaggcttttgggagcctccggccgcgggcgcggcggggtccggcgggtgcgcagcggccggggctcctccgcgcgctgcccgccgc

SEQ ID NO: 279891 - DNA, 122 bp, Homo sapiens
cgtgggtggataatacatagaatgagttagtaacttcggtgacaactctatctcacagaacgtttacctcttaaaagtgtattttggcctggtgtggtggttcacctttgggagactgaggc

SEQ ID NO: 279892 - DNA, 122 bp, Homo sapiens
atgtctacttcagccagctcaagggcgcgacaacctggcgccgagcatctcaggccgccgcggggaccccccctaagggactcgggaacacctgcctaccctagaagaggcggagaataacc

SEQ ID NO: 279893 - DNA, 122 bp, Homo sapiens
gaatgtcgatgtctgtagtcaatttgttttctttgcttttgtctactctcccagaattgacgggggaaggttatcaagagccatttgtcatgcagaaccctaagctaagtatgtcattttcc

SEQ ID NO: 279894 - DNA, 122 bp, Homo sapiens
ctgcaggtgtgcggattctgcctaaaattgcggctacgaactggaccttgaacactcctccgtcagctgacttgactgcctgtgtacagtctcaatttgagccgacacacggatttcacttt

SEQ ID NO: 279895 - DNA, 122 bp, Homo sapiens
ggctccaggtcgctcactgtcacactggtgcgggtcagtccgtgaggaggctccgagtagcgcacactggcctcacacggcccgcattccccagactcgggccagcactgttcgcaggtgac

SEQ ID NO: 279896 - DNA, 122 bp, Homo sapiens
tgggccacgccggtctgcgagtcgaggaagggcagtcgcaggctgcgctcggcgcacaggcgcgcgttgtaactgcggcagtgctcgatggcctcgcggtagaagtcctcgcctaggctaga

SEQ ID NO: 279897 - DNA, 122 bp, Homo sapiens
gttggtggccttccagtgagtggagaagttcgcctccgcgcgggtaacggactttctaagcgtcagagaagatgctggacatttgtttgcaaagttctctcaggcctccgattttcttattt

SEQ ID NO: 279898 - DNA, 122 bp, Homo sapiens
tggcgggaggacttctgctcccctggtccttatcctgtccttcttttgactgttacggttcgatgcaactttacttggctgatcatccaaggagtagctaagaagtcgggtttacggtggaa

SEQ ID NO: 279899 - DNA, 122 bp, Homo sapiens
tgaaccggcggccaatcacaggcctcgatttccttacctgtaaattggggttgagctacccggctttatagggtaggtgccatataaaggttttgtttgctgtgtgcctctccttgggcaaa

SEQ ID NO: 279900 - DNA, 122 bp, Homo sapiens
cgagccaggagggggtgtccgaatctcttagggggagtccgatccctcaggagggattcccggcgcgcgttcctaagccctcaggagtagccgggcgcggcggcggttgggctcgggcacgc

SEQ ID NO: 279901 - DNA, 122 bp, Homo sapiens
cggagggcatggtgggcaccagcgctggtgggatgtggcgagggtggtggtgactcatggcgcgtggcccgtagctctgaggagcatttgcgttttcctgtggattcactgtagcgcctggt

SEQ ID NO: 279902 - DNA, 122 bp, Homo sapiens
cccaaggcgctccgtgaccatgaaccaagaatgcccagggtcccctgggcaacacgcatgcgcagtggggaggcacttacgcccatggtgtgggacctctgccgcgccgtttgttttccttc

SEQ ID NO: 279903 - DNA, 122 bp, Homo sapiens
agggcggctgagagagcaactgcaggagtttcccctaaaatctctcctccagatcgttctcgaactttccccactacttccataataaaatgtatacttgttgaaatggctgaaaaggctgg

SEQ ID NO: 279904 - DNA, 122 bp, Homo sapiens
gcacacatacacaggcagatgtatttggcccatgaagacagagagcttccccatcactgccgcgcaaaccgcctcgtacatagtaggtgcgtgtttcaatgttgctgaatgaatcaagagcg

SEQ ID NO: 279905 - DNA, 122 bp, Homo sapiens
tgctaagcccctcactgcccgggcctgtggcgctggcccaccgctccaagtgcggcccaccgagcccacgccacccagaactggcgctggcctgcaaatgctgggcgcatccctggttcccg

SEQ ID NO: 279906 - DNA, 122 bp, Homo sapiens
aggacctagttttggtctgtagaaggtatttactaaatgcataagtaaatagattgattccggggttactgatcaaaatatgtgcttctgtaattctattgtcaactattgtcccaaataaa

SEQ ID NO: 279907 - DNA, 122 bp, Homo sapiens
agctgtcgtgctccagttgctggggcctcttgggatcttgggaaccccatctctgagccccgccccatggccccgcccctcccaaggagggaaaaggcggctgccagtcgctcaactcaggc

SEQ ID NO: 279908 - DNA, 122 bp, Homo sapiens
tgggagaagccgccgggacgcgccgggctggagtgggcggttataggctttgagctaggccgtttccgggaggcggagctcagaccccatttcctttctccacatccaggtcaggtggcgtt

SEQ ID NO: 279909 - DNA, 122 bp, Homo sapiens
tagtcaggtgaagggtggaagagaatgagctcctgcattgctcatgtacgttcccaatgccgagtccatgcagactgtggcagggaagccatcatttcattactgtctccacctcctccata

SEQ ID NO: 279910 - DNA, 122 bp, Homo sapiens
ctcattatgtccgtggttcaaatttctgctggttggggcttttgttcattactttcatgacggttaacctgacttccgctcatgtgcattcagcagcattttctggaaccttatccctctta

SEQ ID NO: 279911 - DNA, 122 bp, Homo sapiens
taatttttcgtttttgcaagataaatccaggccatccgcccctcgtcctccccagccacccggcacagatgtgtccggcttagtggttaaaggcgcagcctctggatttagccgggctttga

SEQ ID NO: 279912 - DNA, 122 bp, Homo sapiens
ctttacccgctgagcattgtggggcccgcttggatctccttgtccaaagggtctgggcgccggggctgcagtctctgggtgaggaggcggacgcgggaaacctgcttcggtctccatggtta

SEQ ID NO: 279913 - DNA, 122 bp, Homo sapiens
tctggaggctggtctctggccaggctatgctcacctcctcatctgcttcccacaggctcccggcatctccaaaggggacagtcagtcccagggactggcgaccagcatccggtgggggcaga

SEQ ID NO: 279914 - DNA, 122 bp, Homo sapiens
taataagatgtttgcccgtctctctctagcttccctaagaaatagtttaactgggatattcggcctccccgtccacaaacattcttctttgcatacagtacaacaaaagcctgtgtttgccc

SEQ ID NO: 279915 - DNA, 122 bp, Homo sapiens
ggcgggcggcgagaaatgcagctgtccctgcgcggctgccggcagggccacaagtggggccgcgcggggaggagcggggctgcgggcggggcggggcgggggcccggctgcggcgcccccgg

SEQ ID NO: 279916 - DNA, 122 bp, Homo sapiens
agacatctggccgttaaccacattcctacgcaggggctacactgcgcatgtccgaaggggcgtgtcaggggtggggcgaggaggaggtaccgttccgatgcagagacggtgccgagggaagg

SEQ ID NO: 279917 - DNA, 122 bp, Homo sapiens
cttcttgagcagcctcttgggcagcctggtgtcttctcccagcatcagctccctgggaaacggcattggaggcaggtgagcaaggctcagcccaggagcaggtcccggcagcctgtgcctag

SEQ ID NO: 279918 - DNA, 122 bp, Homo sapiens
atgttaatctcattaaccttccctatcagtttcaacgggacagaaatgaagacttgagaacgtagagttcctggccggaggagtcaagctttggctcggagccagtacatttgatctgactc

SEQ ID NO: 279919 - DNA, 122 bp, Homo sapiens
ccagagccaccgtggccatcgggtccccgcctggcggaagtggccaggcgtccacgagcgcggcgcgtataggttcacctcgctcgctccgcagcccccaggggctcatggctgcctatccc

SEQ ID NO: 279920 - DNA, 122 bp, Homo sapiens
aagatgtttttgatactttcggctctaaacattaatggatgtttgcgtagagtaagatagcgttcaaatttggttaatagtttatagatagacttgtggcctctgactgactaaatttctta

SEQ ID NO: 279921 - DNA, 122 bp, Homo sapiens
agggcggccgctccagcaagagccgcagaagaacggctccctcacctgggcacctcccttcggatatgttatgatagcctctgcagtctgtgcagggtacaactcaggaagcaagaagtcct

SEQ ID NO: 279922 - DNA, 122 bp, Homo sapiens
aggcttgtggctaaagtcatgccatggacagagcagagatgcaaaagaaaaactggcaatcgacttgctttcgtttgcttttaccgtgtgaagtgtaacctgctctctcgtatctaggcttc

SEQ ID NO: 279923 - DNA, 122 bp, Homo sapiens
cgcgggcccggggagggagctcgcggccaaggcgtttacgagcttggagggctcggccctcgcgcctcgcggagccgggaatgaaagcgagccaggccgcccggccgcctgcataaaacggc

SEQ ID NO: 279924 - DNA, 122 bp, Homo sapiens
ggacaatgtaggtttcatgttaataacatatttcacaaatagtcctgagctgctgtaatacgtgtgtctgttttggagacacggtgatggtaaaaaaacaaatgtttgtggcttgagttttc

SEQ ID NO: 279925 - DNA, 122 bp, Homo sapiens
aatccagacgatgctcctgctacaacgacacgatggataccaagccgtctctcaagaatacgccaaaattttttctttttttccgaggtgcccacgccaccccctatgtcacacctgaagta

SEQ ID NO: 279926 - DNA, 122 bp, Homo sapiens
tatggccagtgactgacatctttagaatatttctgaaacaatgtaatctcattaacattccgtagatgttacttcattctgttattgtgtttaatgtcccagagaagaaatctagttttggg

SEQ ID NO: 279927 - DNA, 122 bp, Homo sapiens
ggacccaggcgcccggcccttccagacctgggggtcatgaatgaaaaaatatgtgcagcccgggagatacgggaccgggaggggtcctgcgggaagggagaggggcctggccagccaaggga

SEQ ID NO: 279928 - DNA, 122 bp, Homo sapiens
agactgaggcaggagaatcgcttgaatctgggaggcggaggttgcagtgagccgagatcacgccactgcactccaacctgggagacagagcaagactacgtctctctcaaaagatttaaaaa

SEQ ID NO: 279929 - DNA, 122 bp, Homo sapiens
cacgtcgtgcctggcctagaccaggcaggtggcagatacgggcccaagcaggccctgccacgatgatgaagatgacaatgaagccacagaaccctcccggttgccgcatgggagccggctgg

SEQ ID NO: 279930 - DNA, 122 bp, Homo sapiens
tttgtagagacagggttttgcccaggctggtctcaaactcctaagctcaagcaacctgcccgcctcggcctccacaaaggcataagccaccacgctcagctggtttttatttctctagagta

SEQ ID NO: 279931 - DNA, 122 bp, Homo sapiens
gcctctctttgccgttgccgggactgggccgtgtgcctggagtttgaacttttctgatcacggggtgagagggtctttgcagttgcagagccgtggcgcggcgcctggatttccgacacact

SEQ ID NO: 279932 - DNA, 122 bp, Homo sapiens
ttcaatgcgctaacgaggcacgttattcttagccgcgtccgggaggggatcacattcctgcgcagttgcgctgctggcggaagtgacttgttttctaacgaccctcgtgacagccagagaat

SEQ ID NO: 279933 - DNA, 122 bp, Homo sapiens
ggagaaggcggagggaaggtcggcttgggaatatcccatatgtctgtccgaaggctgtggcggggctcctgctccagggatgctgggacgtggcggtgcctgctaagtgctcagctgtgtgc

SEQ ID NO: 279934 - DNA, 122 bp, Homo sapiens
atcatatgacaaaagaaaaactttcataatcttatgacatgagggaaggaatattaaagccgttctgtgggttattatctctaacgttcccaatagaataggctttgccagctgggtgtggt

SEQ ID NO: 279935 - DNA, 122 bp, Homo sapiens
tgctcgggagccgacctttgtttcctaccccctgcccgcccagccaccgtgcccgcgccccgtgcccctgcccacgggtgcaggtttacctctttgcgtccaccggcattaccccggcgccc

SEQ ID NO: 279936 - DNA, 122 bp, Homo sapiens
ctcaggacaggccgaagaggcgcgcactactcacgtgtcttccaagtgctgctccaaggtcgcctccatcccacccaccgaccactccggctcagaacccagcggcacggcacgtccttctc

SEQ ID NO: 279937 - DNA, 122 bp, Homo sapiens
cctgagcctgagctaaacaaaagcaggaggctgacggggctgctggagtttgcagagacacggaggaggagagagcctgtgctttgcctgccgccgcggctgggggagatctggcttttgca

SEQ ID NO: 279938 - DNA, 122 bp, Homo sapiens
ggaccacgggttccagaccagaattgaaaattcctcatatgggcaagtgtgggcagggctcggaaggtgggcaagcagatagggcaggatggggaaatgccaaagaggaaccaaaagcccag

SEQ ID NO: 279939 - DNA, 122 bp, Homo sapiens
ccgtcccagctgtccacagggccctcaataacatgcattgcacctgtgatctcccagcagcgctcatcaccccccaatgaccaagtccctgctggccagaccccacacaccaggtcctcccc

SEQ ID NO: 279940 - DNA, 122 bp, Homo sapiens
cggcagcggcggggactgtcccggcggcaaaggcaagagcatcaactgctcaggtaggaccggtcggagccggccctaggtcttcccacccctccgttgccgcctccctcgtggtccctgcg

SEQ ID NO: 279941 - DNA, 122 bp, Homo sapiens
cccctggacttttctgtccttcatgtatttttgtgatgacttcattgaggtctgctccttcggggggggaggttgcggggtaagctctgtgaggtcaggggccatgccattgctaaggacag

SEQ ID NO: 279942 - DNA, 122 bp, Homo sapiens
agctctatctattgtgactgcttggcattgtcaacctccgaagttgcctaaatcacccctcggagaagggaagagagtaacaacgctagcaaaaccatttttgttacagacatggttatata

SEQ ID NO: 279943 - DNA, 122 bp, Homo sapiens
ccctctatccccccaccctccgcccctggcgcggttgtcctccctccggcttgtcccagacgcctgagactgaactcaacaagcggctgactcagtccttagcgtcacccgcaagatccccc

SEQ ID NO: 279944 - DNA, 122 bp, Homo sapiens
ggagtttcaccatgtaggtcaggctggtctcaagctcctcaccttgagatccgccttcctcggcctccaaaagtgctgggattacaggcgtgagccactgcacctggcctcaaactgtcttt

SEQ ID NO: 279945 - DNA, 122 bp, Homo sapiens
aggacccatgcagggacaagcatgagtccgaggccacctaggcagaggcatgcctgaatccgggaccacaaaacaggcccaggaagcagcacacagtgaagtagggaaaccagcaaagacca

SEQ ID NO: 279946 - DNA, 122 bp, Homo sapiens
cccaccctgccgacaccttgatttctgacttccagcctccagaactgcgaggaaagaagccgctcttgtttctggcaccctgtctgtggctctttgttacaacagcactagcaaacgagtac

SEQ ID NO: 279947 - DNA, 122 bp, Homo sapiens
ccgtcttccacctttatgtcttatcctactagatgaatttcagcaggcagtaacacaacacggagctgttgtctcctacgataacaatgtcttcttctggatgcctcctgaaggaccgatct

SEQ ID NO: 279948 - DNA, 122 bp, Homo sapiens
atgatttggaatttttaaagccatatttcaaaaacagacaggctcttctgagttaggctccgccatccatcctggtttcctgtcttcattccatcctgagtgcaagaggatggcagttttca

SEQ ID NO: 279949 - DNA, 122 bp, Homo sapiens
tcagcttcgaagcccacatttttttcccttggatgccacaaggggtctttataaccaccacggatcggtttttgccacagtttctccagatgctgtggtacttcaaccctcctggcctttgc

SEQ ID NO: 279950 - DNA, 122 bp, Homo sapiens
tgtgccgtgagtgccaccactgtcctcagggtcccaagtcgcttgtgaggggcacaggcacgccggacggaccaacagggtgggctcgggcagtcagggggggacctggaggaggagggggc

SEQ ID NO: 279951 - DNA, 122 bp, Homo sapiens
ccagctttctcccagatatcaggaacctagagtttcctactcagataaccgccccccacacgcacacttttaggccaaatgtaggccccctctgggggtttaaactcctggaggcaagcaac

SEQ ID NO: 279952 - DNA, 122 bp, Homo sapiens
aaggatcaggcttgagtctgtcagggaggcctcatgtctcctattaacttttgagccatacgcatcatggaaactggtttctcctggctgggtacttctgagttgcctggcctcctgtgagc

SEQ ID NO: 279953 - DNA, 122 bp, Homo sapiens
gggaatgggacgtctggtccaaggattcacgcgatgactggaacccgaagagccggggcccggtttacggccgccatgaagcaacgcgcgccggtaggtttgggaatcagggagccctctga

SEQ ID NO: 279954 - DNA, 122 bp, Homo sapiens
ctaatcctaaaccccctgcaatgggatttttttgtatttatctctccagtgaaattcttgcggactgattatcagagattccccaggcaagagggagattagccaagagctgaacaacagaa

SEQ ID NO: 279955 - DNA, 122 bp, Homo sapiens
tactcccaggacttaggaggctgggatatttatcctccaatgtccattcaccattattagcggaaggctgctcctggggccactgaccacccggtgcttcccgtctgcttgggctgagagag

SEQ ID NO: 279956 - DNA, 122 bp, Homo sapiens
catgacgggaattgtagtcctcaaattgctagcttccgatgccatgcgctgcgactggaacgccaattcccaccatgccgcgcgctcacagctctcaggggctgtcctgtggcctttgggga

SEQ ID NO: 279957 - DNA, 122 bp, Homo sapiens
tcgtcatattatgtatgcacaaggaacttaggaaagaccagtcaggtggtactctttactcgtaagattacacatttgaaggcagggaacccattattagacttttttgtaaccctttgtca

SEQ ID NO: 279958 - DNA, 122 bp, Homo sapiens
tcacttttttgatattggatttggaggcaggatgaaagtctttcttgcacatgaagttggcgaaggatttccccatcttggaactggaactagggaaagcaggggctagatctgttagcaac

SEQ ID NO: 279959 - DNA, 122 bp, Homo sapiens
acacgccatgctttttcatagggttctccttgcttaggatgtttattctctttctagccccgctttgatctctaaagatccttcaggacccttatgaaatgtgactactctaggaaggtttt

SEQ ID NO: 279960 - DNA, 122 bp, Homo sapiens
ggccaatgagcttctgattggctctttgctgtgaatagactaggccgaggctaataggaccggagggggcgttcacctgggaattggcctcccccccttgccaaggacctccctgattgtat

SEQ ID NO: 279961 - DNA, 122 bp, Homo sapiens
tatttccttactttttgttacaacaacatgcttaggctgctcttgtgtattttctgtgcccgtcccaaattcagccattttgccaagggtgttgggtacttttgtattacaggttgagtatc

SEQ ID NO: 279962 - DNA, 122 bp, Homo sapiens
cctgccagtcggtgcccctcccgctccagccatgctctccgccctcgcccggcctgccagcgctgctctccgccgcagcttcagcacctcggcccaggtaggccagacgaggggcggcctgc

SEQ ID NO: 279963 - DNA, 122 bp, Homo sapiens
tcccaaaacccaacaaactcaagagtgtattttgctcttcaagttcttccctggacttctcgaacagactcaagtggcaagaggagaggagccagttccatgagcagcagttcctctgcagt

SEQ ID NO: 279964 - DNA, 122 bp, Homo sapiens
gcgagcgctcgggggctcaaactgcctggagacaggcggggctcctgctgaggcttggtccgcccggacgagtaaggagaggagccagggaggacctgctggcgtgagacgcctctgcccgg

SEQ ID NO: 279965 - DNA, 122 bp, Homo sapiens
gccgcacctgctgcctcggaaaggggtaccggagcggttgtcaagacacaatgaccccgacgccagactcaagcggggaaaagcgggcctagagctccagggcgggagcgacgccgacgcct

SEQ ID NO: 279966 - DNA, 122 bp, Homo sapiens
ccactgaaagcagaagccaagcgagttcccgaacatgcgcgctcccagcagcaccgctcccggcagccaccagcccagacgcccatccacagaggcgcggaaaaacagcatgcagtgcaccc

SEQ ID NO: 279967 - DNA, 122 bp, Homo sapiens
tgaaggggctggcggccaggtccttctggagacctcacagtgattccaaacagagaccaacgctgtgtccagttggctctgttcctctccagggattaaggagcagatggctgggaacactc

SEQ ID NO: 279968 - DNA, 122 bp, Homo sapiens
ggggtaagggcctgatgctggccgcgaagccccatctccatcgggactgcttggtggagccgccttcttcaccgacgtcgctgttcctcggatctgggagccaaatgctttgctagagctgg

SEQ ID NO: 279969 - DNA, 122 bp, Homo sapiens
ctggttaatttgtaagctttaggagctgaatctccccagctacacagcctgtgtagtaaacgtggctacaaatttatccacatggactggatgccccatggaactctcacctcaagttcttt

SEQ ID NO: 279970 - DNA, 122 bp, Homo sapiens
gaatatacagagaacctcactaacgcgagtaaaatgccgactacttacaaaacgatttcacgtccacatctgcagtctcataagggctttcgaataatcctgtgaagaatgtattattagtt

SEQ ID NO: 279971 - DNA, 122 bp, Homo sapiens
atgcccgatagccacgtgggccgagagctgacccgcaagaagggcatcctcttgcagtaccgcctgcgctccaccgcacacctcccgggcccgctgctctccatgcgggagccggcgcctgc

SEQ ID NO: 279972 - DNA, 122 bp, Homo sapiens
cggggaggtcagagcatgcagtgtgtgtgcaaggatgctagggccggatggtgcagccagcgccctgtgctgcgactagagggacgaggcagttcctcctctgcccctctcaagactgggtc

SEQ ID NO: 279973 - DNA, 122 bp, Homo sapiens
cattaaggggtttctaaatggggatttttctaatcttagttgttctgcattggttagtcacgattcttttatgaagacatttgccttgccatctacttggtttctctgaaattcaattcata

SEQ ID NO: 279974 - DNA, 122 bp, Homo sapiens
ttttctcagccaattgagtacacttattaagaactctctagacatcttggcactaaatgacggccctgacagtaaaagtccagtaaaatgtgtgcctgatcacagacatagcattatatcaa

SEQ ID NO: 279975 - DNA, 122 bp, Homo sapiens
gtggggccgacctgggcactgcagggcgctgagtagcgtccctggcctccatccactccacgccaggagcatcccccagttgtgacaaccacacacatccccagacagtgccaggtgtctcc

SEQ ID NO: 279976 - DNA, 122 bp, Homo sapiens
ggccgtgcctattcgtagccaagtaaacagggcaggttagaggcggggccaaggaggcgtcgcgacctggttggccggccggggcctgggggatgtcacggattggtcgcggccgcgagcgc

SEQ ID NO: 279977 - DNA, 122 bp, Homo sapiens
tgctaggtacaaacccaagacaaatgtgtgtgtgtgtccaccagcatacacatccaagagcgtcgtagccaataagtacagacaacccagacatgcactgacggaacagtgggcagtggcct

SEQ ID NO: 279978 - DNA, 122 bp, Homo sapiens
tgcagagcatgcagtaactgctcaaataggatttggaaaggaatgaataattcatttagacgttcaacttggaatagacttaagcagacactcctggtgatgaaggacttagatgccagaaa

SEQ ID NO: 279979 - DNA, 122 bp, Homo sapiens
tcggagccggcggcaagtctcctcctggcaggtaacaagcctcctttgcagccttgaaggcgccttggccagggccatcccacggcccgggcccccagagcccccccacggccccgaatccg

SEQ ID NO: 279980 - DNA, 122 bp, Homo sapiens
ttctgagtcccacggacaccaccgcacagccacaactcagcactcaggacacgccagtgccgtgtctgcacccacgagtgcacgggcacccaagatgctgccctcgctgccggggccgggga

SEQ ID NO: 279981 - DNA, 122 bp, Homo sapiens
cacggccgcgataccagcggatcactgggcgggaggccgtgtctctagtcctcagtctcgcgtgtgcagagacggaggtcgggtttcttttccgggctggaaaacaggagaggaggggctcc

SEQ ID NO: 279982 - DNA, 122 bp, Homo sapiens
tggcctatgatgccctcattcagctctcagggtccagaggtgactggtgtggatcctgctcgctgtgccaagatggccctccagatgcggcataccatccctcccctgggggtaatggactc

SEQ ID NO: 279983 - DNA, 122 bp, Homo sapiens
actctgaaacactgacgcacaagcgaaaacacacgcacatgtttgggtcttctcccgctgcgcaagttctttgaaactgagcggagaaaaatcgtcttcacatggtgtctcacactttcgac

SEQ ID NO: 279984 - DNA, 122 bp, Homo sapiens
tcctcctcccgcccaagcgtggccaagtgaggactgctccggccgcaggtagctgaggcgcgggaggcggcgcgcgcgggacccgagcggagcgccggggaggggccgacggacgcgagggc

SEQ ID NO: 279985 - DNA, 122 bp, Homo sapiens
cgagactctgtgggcgtaggaccctcggatccaggtgcgggatataatctcatggtgcgccgttttttaagccagtctgaaaagcgcaatattcgggtgggagtgacccgattttccaggtg

SEQ ID NO: 279986 - DNA, 122 bp, Homo sapiens
gaagttcctcggctcttacttcatcacctgggacgaagacatgtttgacgaggagactggcgaggggcctctggtgaacacgtcggacctcaatgaagagctgggacaggttggtgtctcct

SEQ ID NO: 279987 - DNA, 122 bp, Homo sapiens
gggaggcccctggggaggaagctccggggactgcagagggaacgttccgctgagcgggcccgagacttggaattgcactcctgagcctcggcggaaaagtgctggctgctcaccatcaggac

SEQ ID NO: 279988 - DNA, 122 bp, Homo sapiens
ggctatgggattggttggggacttcctgcttccttgcgctagggctgttggtgatgaccccgccacaaaatctagctcaactcactaggagtttgcagttcagagaggtcccacaagtaaat

SEQ ID NO: 279989 - DNA, 122 bp, Homo sapiens
acttatcgggaggaacaaataactccagacacgccattttgagagctgtaacgctcactgcgaaggtctgtggcttcaccctgaagtcaagcgaaaccaggaacccactggaaggaagaaac

SEQ ID NO: 279990 - DNA, 122 bp, Homo sapiens
tcagaaaatgttgcacctctagacctgaaattattaagcaggaggaaaaaaaaaaacaagcgattactgagaagttttgaaaaacctgattatttcagcatatattgattttatataaaagt

SEQ ID NO: 279991 - DNA, 122 bp, Homo sapiens
cgggagccgtccctctcctctgggcgccagcttcatacagagtggtttaagtagactggccgagtgctctgaagtgagggccggctaccctgtttcctgttgttgttgttgttgttaaatat

SEQ ID NO: 279992 - DNA, 122 bp, Homo sapiens
aatgcaagcaaaacagctactgactttgtgtagcagggagattggggactctggttccctcgccaagtgtggcagcctgtgcagtgttgggggcttacttggtatctgttggagaatgaggt

SEQ ID NO: 279993 - DNA, 122 bp, Homo sapiens
cacttcctggtcttttggggggagccgggatatataagggcggtgctcacgcagcgctctcgcttacacagtatggccggcgacattagctagcgctcgctctactctctctaacgggaaag

SEQ ID NO: 279994 - DNA, 122 bp, Homo sapiens
gccagctcctgcttcacttcggcacagtcatttattttctcttccaactgtctgttgagccgggagatctccttcctcatcagctcgggctcgtgggggatctgcagccccctgagctgcgc

SEQ ID NO: 279995 - DNA, 122 bp, Homo sapiens
gcccctttctccagcacaggctcttagtcaaagaatacttgaaagcccaacttcgttgcacggaggtgaacaactctgagattaagttatgctcttgaggtcccctgcaggaatagacaaga

SEQ ID NO: 279996 - DNA, 122 bp, Homo sapiens
ctagagtttggtttcaaaagcctcgaccacacacaggggcggttacagctcttgaggtcccgggggtcacaggacgccttccgagttggggggaggagaaaacaaaaccacaggaagaaacg

SEQ ID NO: 279997 - DNA, 122 bp, Homo sapiens
ggctgtggaaggaaatttggggggcaggggcatcactctgaccctctcccagcctaccagcgttgggcggctggcagagtggctttaaaagcacaatttttacctatggcttctcaaaataa

SEQ ID NO: 279998 - DNA, 122 bp, Homo sapiens
ggtggtggagtcctgaccccaatccccaacctcccaggactgtgttctttctggagttttcgctgagaacaaaacagtgttgtctggaccctggagtgtctgtccttcttgactccgtagct

SEQ ID NO: 279999 - DNA, 122 bp, Homo sapiens
ccctttccaggctgtatgctccatgaggacaaggcttctactttcccagcacttagttcacgtaagaatgtttactgagtacataaatgatcgcatcaatgaccctgtgacttacaggactc

SEQ ID NO: 280000 - DNA, 122 bp, Homo sapiens
cccacccaggctcagccagcctggctcaggggctccagagtgacaggcattgcccgtcctcggcctggcctttctcggtttcagcacctcagcctctcctctccctctcccctcccgcattg

SEQ ID NO: 280001 - DNA, 122 bp, Homo sapiens
ccgtgcctgggtgactcgtgactcgacattggctccggacgtgtcagtacagaggaacgtcggtaccggatcccagacatagggctgagcccagctggttctcattctcttctggggccagg

SEQ ID NO: 280002 - DNA, 122 bp, Homo sapiens
aaatgttgaggtatcttatttccatgcgcgagccaagtagaaacagccccctcctgtggccggctggagtgatagcggtaattaaaatggggtgcccaaagaagggcaaatgtctggaagaa

SEQ ID NO: 280003 - DNA, 122 bp, Homo sapiens
cccaaatgcgacagcccttcctcgcttccctagggtggggcatggaccacctcagtagtccgggttctggaatggcctagtcctttctcgcccacccctgaggaatggactgctccaacgtt

SEQ ID NO: 280004 - DNA, 122 bp, Homo sapiens
cactgggcccgcgattccttggagcgggttgatgacgtcagcgttcgaattccatggcggcgcggcggcgacggagcaccggcggcggcagggcgagaggttcggagctcaatatcgcggga

SEQ ID NO: 280005 - DNA, 122 bp, Homo sapiens
cgaggtcgtggcggccaagcgcccgcaacgtgttagatgatagatcgagcagcctcaggccgctggcgttgacgaagacgccgcgacccagcgcatctagttcgttgtggtctaggtgcagg

SEQ ID NO: 280006 - DNA, 122 bp, Homo sapiens
tagtaagaactcataaggcaagcaggcagctgaggcctcctgagacaggaatgcacatagcgcttgggccctgcaggcggagcgggctcggggacctggcgcagcgctctgtcactctggga

SEQ ID NO: 280007 - DNA, 122 bp, Homo sapiens
ccttcctgacctgcgagctcttccagagcatgaacagaggagtataatggtttggcaccccgcctttggtgccagagaaacctaggttcacactctgattagacccttcaggggctgtgtga

SEQ ID NO: 280008 - DNA, 122 bp, Homo sapiens
tttattttggggtagcagacccttgcaaaaattgtaattttgcattttccttttgcaatacgtcaaaatcaggaaatacaaattgcagtagtagtattcaggggactctgaccaccgtaaat

SEQ ID NO: 280009 - DNA, 122 bp, Homo sapiens
agccccttcactttgcagatggagagactgaggatatacagctcaccctacggtgcacagcgtcggggcagaatggggctctctagacacccctacccgcattcactcacctcacccggctg

SEQ ID NO: 280010 - DNA, 122 bp, Homo sapiens
ccaggagatgaaagcaggacccacatgggctgcctttgattttctcctccctgggccccacgcagctgcagccgggccgggcccagccctacactgccccagggggagcagaagaggcccta

SEQ ID NO: 280011 - DNA, 122 bp, Homo sapiens
acattaagtaacaagatctagcagcgggtctgatagtagtgatgggtataaacactttttcgaagtgtaatataaaaatacttgatttccattggtggcagagtcacaacttcagtaacatt

SEQ ID NO: 280012 - DNA, 122 bp, Homo sapiens
tgctgggcacctgggacaccacttctctgggacacattgccttctgttttctccagcatgcgcttgctccagctcctgttcagggccagccctgccaccctgctcctggttctctgcctgca

SEQ ID NO: 280013 - DNA, 122 bp, Homo sapiens
gtaagatttacactctgtgcattttaccccaacaaaaaaagagaaaaatccatcccatcccgtcattctcctgggagaggccttcaccaggccctgtgtggggcgcaggtctgcgctggcct

SEQ ID NO: 280014 - DNA, 122 bp, Homo sapiens
aatacacagggccactgctaatctataaagggcctctgtcacaattagaaagagaatgtccgtctaggtagacacagcccttcaggcatacagcttcaccccctcagtggagcatccctccg

SEQ ID NO: 280015 - DNA, 122 bp, Homo sapiens
ctgtgagcgcgagcctctttcggctttccagtttgtctcggtcctttggaacgtggcaaacgtggaagccgagagggctctcgcgagcgttggcagaccccgctccatagggatgggacagg

SEQ ID NO: 280016 - DNA, 122 bp, Homo sapiens
acatggccaattagtgacagctcaaaccagactgcctccggactcccagtcccatgtcctcgcacatcccggggccttctctgcgcgcagatgacccaattgtcagcagggactgcatcttc

SEQ ID NO: 280017 - DNA, 122 bp, Homo sapiens
gtgccgcggcggagtccaagatggcggcgtgcggttccgctgtgtgaaacgagcgcggggcggcgggttactcagctccgcggagacgacctccgacgacccgcaacaatgaagggaaaaga

SEQ ID NO: 280018 - DNA, 122 bp, Homo sapiens
tccctgggggcagaagctgagtctcctccatctttgtattctcggcatccatcctgggctcggcccagaaaatatttggtgaaaggaataataggaaaaagccaataaaggaaataaacaag

SEQ ID NO: 280019 - DNA, 122 bp, Homo sapiens
gggagccaccatgcccaccctatggccatgatcagtagaagcaggttaggggcagagggccggccctgccctgagctcttcacacactttatctcgtttggtcctcacaatagccctgtgag

SEQ ID NO: 280020 - DNA, 122 bp, Homo sapiens
ggaacacaagctcgaacccggacccctccccgctcccgcgggtagctactgcttgtcccccgccgagacgcctcctcccattggccgcctgaaacgcacacgcccattggcagctgctctgt

SEQ ID NO: 280021 - DNA, 122 bp, Homo sapiens
agaggccctacgcatgacagggattagggtaacacttttacatgtattaactccctattacggagaacatcctacaaagtagaaattcctgataatcctcgttgtcctagggaaaatgaggg

SEQ ID NO: 280022 - DNA, 122 bp, Homo sapiens
acgctcaccatttcttgcctttcaggtgactcccacgaccagtgcgggtcacagcacaggcgacagaagctatggcagaggcacctgaaccctctcggaggggaaagccaggctcccaacct

SEQ ID NO: 280023 - DNA, 122 bp, Homo sapiens
tccttcccagtgtgaaaccgcaatccttcctgcttggggttcccctaagggaacggcttccgccacaggagacccagccaggacaatcgtgtgcttgtcgtttctccaccctgcaagcccat

SEQ ID NO: 280024 - DNA, 122 bp, Homo sapiens
accgagtggggctgcatgtagacgcatgcgagggtgagagctgcggcggaggacgctgatcgcggagtgcaggcgagggccccagaaaggtcccgcaggtcgcctcgctcgtggcacgggct

SEQ ID NO: 280025 - DNA, 122 bp, Homo sapiens
accagaattagaaccaggtcaagtgcactccgagcaggacagtaggcagatcctatctggcgcatgcgaacgcttctgtgccagttccttgaagagcaggcgcagactcaaggctgttgctt

SEQ ID NO: 280026 - DNA, 122 bp, Homo sapiens
ggcggtccagcgcatcgagccgcgccaggcgcaccgagatgcccccgaatctgtccagctcgccctgcagatcgcacgctccaactggcggattccgcacgtaaccctgtgcgcccgaggcc

SEQ ID NO: 280027 - DNA, 122 bp, Homo sapiens
gcacgccgtgtccgagggcactaaggccgtcaccaagtacaccagctccaaataaatggacgcatgttcaaacccaaaggctcttttcagagccacttaatgatttcaattaagagttttaa

SEQ ID NO: 280028 - DNA, 122 bp, Homo sapiens
ccacctttcccaaatcaaccactgatatgagagtgttatgcatttacaacgtgctttctacgtgaagggttgattttttaaatcatctcaaagatgactttgaaaacaagtgtacttctcaa

SEQ ID NO: 280029 - DNA, 122 bp, Homo sapiens
aacaagagcacttactttataagattgatgtgagtattaagtgaattaatatttgtaaaacgcttagctcttaataaatgtttctgttgttattattatggttttggttaatttatttaaag

SEQ ID NO: 280030 - DNA, 122 bp, Homo sapiens
gtggaggctgtggctggtgtaacatgattctcatccatgcacagatccagaacaggagcccgaaggaggtcagaggtagcagggagcccagtcagctacgtgccttccttccacactgcctc

SEQ ID NO: 280031 - DNA, 122 bp, Homo sapiens
ttccacagtctccttgaattcctccagggcgaggccacgccagcgcacaactgcagggggcgccgttcccacagcagccctgcaaagtgagtgtgcctgagaaacttccgcctcccctgcac

SEQ ID NO: 280032 - DNA, 122 bp, Homo sapiens
cagtggaggggacaagattctagaacacaggctgattccagccaacacaggagtgcctcacgggtggtaggggtgctttgaattgtgagatcagtgggggcccatggcaatggcgaaggggc

SEQ ID NO: 280033 - DNA, 122 bp, Homo sapiens
gcaagtctgccctcatgtggggccacgctcgaatcgcagccgagccgagctgagatatcacgcaaaacacccttttctaccccacctcacaggaatactttaagaaaccaaactcaccatag

SEQ ID NO: 280034 - DNA, 122 bp, Homo sapiens
gatgcttccccgtatctttctttaaccttagcaggagctgttgaaactgcctcagtcttacgacccttattgggatagtaggttgaagagctggaaggaggactgagaaagtgtgaacataa

SEQ ID NO: 280035 - DNA, 122 bp, Homo sapiens
taaatgaagtatccgaagctggtcagtggcagaatctcaatcaacacacaggctcctatgcgaacccacacactgagggcatgtttcacaggggagagctccgttcttagctacagactcag

SEQ ID NO: 280036 - DNA, 122 bp, Homo sapiens
tggaggctgaggtgagtcctggaggtgcgtggttggggcggagagcattatctgcggctccgattttgcagattctggctgaggcgttcgtgatgtcagcagcagccgagacgggcgtgtta

SEQ ID NO: 280037 - DNA, 122 bp, Homo sapiens
agggggcgactaaccagctgaggtgtgtcaccccaaaacaccagtgggcacaccccaaggcgggcacgtggaagggacgcggaaccgagggcaactattttccagtcggtgaatctgatgga

SEQ ID NO: 280038 - DNA, 122 bp, Homo sapiens
cccggactcagtgcttttaactttgctgaaaccccttcctgccacctcccagcaattacacgagggaagtcaaagcagctagggattcacccactgggctttgggctggcaaataatttgca

SEQ ID NO: 280039 - DNA, 122 bp, Homo sapiens
tctgtgttcatgggtatgctgggctgagctgatccaggctggacgctaagctgtgggtcccgctgggcttggcttcttgcagcagggtgaattcactctgcgccagggtgttcattctgctg

SEQ ID NO: 280040 - DNA, 122 bp, Homo sapiens
accaaggagctggggggattcccaataggagctccgagcttcactttctcgtcttctccccgcgcccctcccgtcctgccgaccccaggtgtcctgtataaccagttcctgtcgcaagtgga

SEQ ID NO: 280041 - DNA, 122 bp, Homo sapiens
tcaccacctggcaggggccacccctctcacagtcttaagccagagtggacgattcacactcgctctaagaaggaggctccatcccaggggcgtggggacagcttgtatggtcctgggattct

SEQ ID NO: 280042 - DNA, 122 bp, Homo sapiens
tgccttgcagagtgaggattactgacagaataactgtaaagtcctgacacataggacatacgcaataagttagaactatggtgaagattataaaatgataccgtgtcccaggctctgttatc

SEQ ID NO: 280043 - DNA, 122 bp, Homo sapiens
gctttcgctccgtttctctcctgctctgaagcagaaagctcgagcccgagaggcagtggccgaggacgaaataagcagtccaggaggagggcgaccgcggagccgggggagaggggaaaccg

SEQ ID NO: 280044 - DNA, 122 bp, Homo sapiens
ctgactcctcactcaccgggtgtcctggagggccctgcacacccttctctcccttgggtccgcctgggccctgacaaggaataaatcaggtcatggaggggtcaagaggtcaagcatggatc

SEQ ID NO: 280045 - DNA, 122 bp, Homo sapiens
gtcagctttccccgcggtgcaagtgctccggtggtcccgggtccgcgcccctagcagcaccgccccagggtctacatgtgctagatattaaaaccccactctccgctgccccggggccgcgc

SEQ ID NO: 280046 - DNA, 122 bp, Homo sapiens
aagttgggggtggaggttcagtgggcatccttaaagccctcttccctcctctaccttttccggtcttgaaagcttgggatggtgaggtgtgggcttgggaggcttgagactgcccacctctc

SEQ ID NO: 280047 - DNA, 122 bp, Homo sapiens
tgctccaggcactgggccagtccatgagggctccaggatccaggggccccactcccttctcgccgggctccgggccaaggaagcgcggccggagtcccgggaagcccctcggcagccagcca

SEQ ID NO: 280048 - DNA, 122 bp, Homo sapiens
agggctggatgctcacctggctttctcagcagggcaccacacacccagctctgtactgcacgtggccttgtatccggaggaaaatgccaggaggttagggaagtgctcatattgtgattgtg

SEQ ID NO: 280049 - DNA, 122 bp, Homo sapiens
aatttctgtgctcactcatataacaccaacaaatgggatatttgtgaagaacttcgcctgcgggagcttgaagaagtcaaggccagagctgctcagatggaaaagaccatgcggtggtggtc

SEQ ID NO: 280050 - DNA, 122 bp, Homo sapiens
gcgcggcgcctgggccctgcgggcggggcacgggattccctgggtccgggctaggaagagcgcaatctcctttcctggggagaccctaactcctggaacccggcttgagggggatccctgct

SEQ ID NO: 280051 - DNA, 122 bp, Homo sapiens
cctggtctgcttgcttcaacagagaaaactctgaagagcggtcctagcttcagtgctcctcggagtatcagccaaggcctttgttatgactgctcaaatcctccctccacctggtcctgtct

SEQ ID NO: 280052 - DNA, 122 bp, Homo sapiens
ctttgatcatgtctcatacagagccctgctcctctcttgctctctgtctgaggggcagagcgaggctgaggagcactggaatatgagttatggttagagttgtcagataaaagacaggacac

SEQ ID NO: 280053 - DNA, 122 bp, Homo sapiens
caggaagaggtgaagagaaatcaacgcggcgtcgtcaagctcagtcagcaggaggacccccggggagggtccggcactcaggagcccccccggggcaggaggggcctcttcctcccagactg

SEQ ID NO: 280054 - DNA, 122 bp, Homo sapiens
tagaatcaagataggagtaaaccatgtcagatttctcttactgtcaaaattttgcaaaggcggtttcaacagaaattaacatgtctaggatagttgctttttctattattttttctatcact

SEQ ID NO: 280055 - DNA, 122 bp, Homo sapiens
ccgcccctcgtttagcaggtgggcaggctggcgcaggccactgatctgccacgggtctgccggcggccgatcatgctgacacaggcccaattgtgcacagcgcctgctaagtggggtgggcc

SEQ ID NO: 280056 - DNA, 122 bp, Homo sapiens
atctacagccagattactgaatatttaatatttaggaagttgagttgattatagacaagacgactgacttgcaaaaatgtactttgctcttgttatttgacaaatataattggcttctcctg

SEQ ID NO: 280057 - DNA, 122 bp, Homo sapiens
gtctgcccccagctctgctactttctggacatagaaccttgggcaagtcattgcagctctcggggtcctcctcacataagaggacagtggccaactgtaggacatgtcattttagagctgtg

SEQ ID NO: 280058 - DNA, 122 bp, Homo sapiens
ccaggtgagtctgggtgaaccgtgcgctgacgcccttttccggcgcgggagaggtggtggcggtggcggtggcggcggcggcggcggtggtgggccggggggaggagaagctgccattagcc

SEQ ID NO: 280059 - DNA, 122 bp, Homo sapiens
aaaggccaggcggttggggaggacaagcaggaacatgcttgtggacgaaagttgctcagacgccacctcccccaggaagcgcagccttggatgtaccccgatgtgcccctggaaggcctcac

SEQ ID NO: 280060 - DNA, 122 bp, Homo sapiens
tcccggactcccgtgtgcaattatcgacgctaggccttggggatacggcccactatggaccgagcacggtggccgagctcagtttgatgggttaccccagaggggcggatacgggaagatta

SEQ ID NO: 280061 - DNA, 122 bp, Homo sapiens
ggaatataaaaccagaagtacataatacttgaaagcagctggtaaaatacaacaggtgtccgcagattcaaaagctattcttggtaaaaagactcctaaacagtcttcctaaaattgcatta

SEQ ID NO: 280062 - DNA, 122 bp, Homo sapiens
cccaagtccagggcgggggttggggcggcggccggagcggggatcgggtctggggggatccgcgcggccgcccctccccgcgctccgccgccgccgccgtcgccgccgcgcctttgatccat

SEQ ID NO: 280063 - DNA, 122 bp, Homo sapiens
tgaaatcaaaatattttaccctaaaatacatttctttgacatcttttgaaatggctgccacgtggccagcagactgaagagtgctgcaaagctatcttttgtgggagaaatttgcatcagta

SEQ ID NO: 280064 - DNA, 122 bp, Homo sapiens
cgccaagaaaccacccaataggaggccggaagcatcggaagtcacatgctgcccaggctgcgcgggtgattggcttggctggacctgaatgatgcggctgtgattgctgaattgtctgggca

SEQ ID NO: 280065 - DNA, 122 bp, Homo sapiens
gcagctcctggcacgacaagaattaggatttgtaaaaagttagtgattctctctccctgccggtttacatcacaacgtaggtgttgatctagggagggagtcaatgagatagagcattgcag

SEQ ID NO: 280066 - DNA, 122 bp, Homo sapiens
atggcatcagccaccacacggcctgctctcatggagatggttcagcacccagggacctgacgggaacagtggacagcatacaatacaatactcaaaacaaatgggctgtccctgccaagtga

SEQ ID NO: 280067 - DNA, 122 bp, Homo sapiens
ttgcagaggcttccggacactgtcgttttcctgggaagtccacaggaactttagcttggacgagaaaggactagggaaaaatttttggtccttcggagccgccgtccaggctcgggccgcgc

SEQ ID NO: 280068 - DNA, 122 bp, Homo sapiens
ttacttgttgcataatatatgttttgtaattgcctttcagcccccatcagaatctaagttcgtcgattacagggaataaatacatttgttcactgatatattccaagtacttgaaacaatgt

SEQ ID NO: 280069 - DNA, 122 bp, Homo sapiens
tccatatgacagaaaataactcccactttaataaactgctcactgagcaaacctatggaccgtccatctctttgagctgtgtgatgactttccttcaagggttttaggggcagccatcttga

SEQ ID NO: 280070 - DNA, 122 bp, Homo sapiens
gatgtccgggtatccagtaggtgtctgaccagggcctccagagtgccagctcggagccgtcgggaggaacgtgggggaggcatagggacctggagaacacagagagatgatcgctaaccctt

SEQ ID NO: 280071 - DNA, 122 bp, Homo sapiens
tctttttttttagacggagtcttgctctgttgctcagtccggagtcctgtggcgcgatctcggctcactgtaagctccgcctccctgggttcacgccattctcctgcctcaggctcccgagt

SEQ ID NO: 280072 - DNA, 122 bp, Homo sapiens
gaatacgtcacagatgcacttgaaagcctggtttataaacggagctcagtgacccccaggcgcccagatcaccgcggatgcctcgctgtcacaggcggtgccctcgctggcatctgacgctg

SEQ ID NO: 280073 - DNA, 122 bp, Homo sapiens
acggtattaaccaaaacagagaaatcatccattattatgatgatgggtcagaaagaaagacggtatcaatcttggagcagttaaatgggaggtgtcaaaggacacacagcaaggcagcccag

SEQ ID NO: 280074 - DNA, 122 bp, Homo sapiens
ctccggcaggtggatcccagggaattctgggaagtgtagtccagacgctcggggtcgtcgcggtcagtttgtctcaggaattctgggaagtggagtccagacactcagtggagtagcgggcc

SEQ ID NO: 280075 - DNA, 122 bp, Homo sapiens
acttcaggcgctacaggattggatgcttttactgaaacctgtcccactcaacaaattttacgattaacagccagacatgattcaaaagtcagacaattcttaacagtgtagcagcaaagcgg

SEQ ID NO: 280076 - DNA, 122 bp, Homo sapiens
agttaccgcgctgtggaggcggcggccatcttggcggcggagcgatgagcgggtctaacccgaaggctgcggccgcggcgtcggcggctgggcccggggggctggtggctggcaaggaggag

SEQ ID NO: 280077 - DNA, 122 bp, Homo sapiens
acgcgccccatggtggagttagtgtccctatgagaagagacaccacagctctctgccatgcgaggacacagcaaaaaggtgccgactgcaccaggaagaggccttgccggaaggtgggcttc

SEQ ID NO: 280078 - DNA, 122 bp, Homo sapiens
tgagcagatccatgtctagagagagggaagtgagtcacctgaggtgaccggtgaaggtgacggagagggagttaaccgagacagagaagattccgtagatggtagaacattgttagaatcag

SEQ ID NO: 280079 - DNA, 122 bp, Homo sapiens
cgtgaccttgggcaagtgcgtgtctctctctgagcctaggtttccatagtgaaagaggaccgttggcggggaggagtctgggcccagcgcccaaatggggagctcaccggcggtgggagagc

SEQ ID NO: 280080 - DNA, 122 bp, Homo sapiens
tttccaaaccagttccatgtaagaaatgtggcagagctgctcctggggcgagttacatgccggcctctgggctcagaatccagcacagaaaggaggtgcgggctgactgctttctagacaaa

SEQ ID NO: 280081 - DNA, 122 bp, Homo sapiens
taaaactacattcaaaataagaatgtaaaaacctggtgtacactacctttaagaacatcacgaaatcatagtttggtgaagaaggcaaagtctttggcatgggaactttccattttgaaaat

SEQ ID NO: 280082 - DNA, 122 bp, Homo sapiens
cgaagagtaaggcaaggacccagcggatggaggggcagtacggcactgttccccagggcccgcgaacaaacgttaacaggctgaatggtaagccaaacgtggtattccctgctatggaatgc

SEQ ID NO: 280083 - DNA, 122 bp, Homo sapiens
ctttgtgcaaagtatatataggaagtgcagccagaggtgacaaggctcagtgtctagagccgtgctgcttgggcttgcttgctggcctgcgaccaggtgaactctgggtgtgaggccgtgcc

SEQ ID NO: 280084 - DNA, 122 bp, Homo sapiens
gcaaagacccttggcctcctgtcctccctcccagtgtgcatccatggaccctcctggatccgaaagaggatgggagggtgcagaagacttgccaggctgcaaagccagaccacccaccacct

SEQ ID NO: 280085 - DNA, 122 bp, Homo sapiens
gggacccccagcctgcccgctctgcttccccgaccgccggggcaggggccccacgggggacgccagggaacgtgaggaatccggagtcaacactgggccactgtgtgctgccagccgggcgg

SEQ ID NO: 280086 - DNA, 122 bp, Homo sapiens
gtccctgcttgtagatgcatcctttctttagatttggggtcctgcttgctgatgcatcctcggttgagaagtgggagcctgcttgctgggaaggacccctagcgggggggagggtggaaggg

SEQ ID NO: 280087 - DNA, 122 bp, Homo sapiens
acacacacacacagacacacacacccctgaaataaccagtggggaagatgctgggacacgcgggaaaacgcctcctgaacaaatagacgtttatttataacttctgggagagtatataggtc

SEQ ID NO: 280088 - DNA, 122 bp, Homo sapiens
tcgcgcccggcccagcccacggcggcccgcgagggacaaaacgcgccgcgcctggttccccgcccacggacgcggtgactttccagaacgtcttaaaggcaacgcactctgactcaaggccc

SEQ ID NO: 280089 - DNA, 122 bp, Homo sapiens
tggaagcatctctgtccacacctcagcctctgaaccccatcgggggagtcctcaaacacgcggagacaccattactgccacaaagacgcacttcgcaaccagttccgggagtcgctctgacc

SEQ ID NO: 280090 - DNA, 122 bp, Homo sapiens
cggctaccgccccttccgcatgcgcgtgagaacgcgccccgcccacttccgccatgctgacggcagccgccaggccccaatcccggtcccgcccccgcgaggcgcccaatcagcgcgcgcga

SEQ ID NO: 280091 - DNA, 122 bp, Homo sapiens
cgcctcctgtgtggtgccggaagagcgccaggttcagtgttaccctgagggctgatttcgcgcagcctgttgttttccttagacaggtccacgtccctctcctgaggctgtggaagatttca

SEQ ID NO: 280092 - DNA, 122 bp, Homo sapiens
cactcttctcaaccacgatcttcctgttattactgatgtttgaaaccctgtcattagccccggcctggttaaagcccctcagagtcacctctcattcatagcaatagaattcaaccccaagt

SEQ ID NO: 280093 - DNA, 122 bp, Homo sapiens
tcagcgcctggtggaggcctcagctcttcaggtgcctgtccccgcggctaccagggagtgcggcaccagaagcagcccaaccctcgctgtctttgctgccattactggtttcgcaggcttgt

SEQ ID NO: 280094 - DNA, 122 bp, Homo sapiens
aaaaaaaaaaaaaatcacacaaagaaactaggaatcaacataaaccagtttagattgagtcggtccctgacaaagcctcaggaacctgcaggcatggtttgaagagagtgaggtggatcatg

SEQ ID NO: 280095 - DNA, 122 bp, Homo sapiens
gtgatgggcctggagctcccgggcagtgatgggcctggagctcccagtggaggaggtgcccggttcccttccctcaggccatcagggctgtagaaggagaaccccatggttcctttccctga

SEQ ID NO: 280096 - DNA, 122 bp, Homo sapiens
tacccctttgccccatggactcttctgggcagaagctgtaggcctgggaccctcctggaacgtcgcccatccagcaccagcccttgcagaggtgggggttcctctggcctgggtgtctggag

SEQ ID NO: 280097 - DNA, 122 bp, Homo sapiens
ataaataagagacaatacacaaagctactagagccctcatttctgtaattggtcacagggcgttagttgttatctatgatttcctttttccactgccctcagacaacaccagctggtcagga

SEQ ID NO: 280098 - DNA, 122 bp, Homo sapiens
ctctggccccgccccacgctaggcgcgcgtgagaggttttccggaagtgtagccaaagagcgagtacccggctttccccaagatcgttgattggccagggcagccttgagtaaatcaccgtt

SEQ ID NO: 280099 - DNA, 122 bp, Homo sapiens
ctccctggaggggctggggaactggaagctgggccgagagagttcccgctgcagctatcgcgcagtccctcctgcgcccgggcgcccccagcgggttccgggaggcgcccggtgagcccacg

SEQ ID NO: 280100 - DNA, 122 bp, Homo sapiens
gccagcgcgaccaggaccaaggacctccgcggctgagcggcgagtccgggaggggctctgcgcgtccccgccccgcgccgcgtcaccgacgtcccgctaggctgagaccggtgcgccgcgcg

SEQ ID NO: 280101 - DNA, 122 bp, Homo sapiens
gccgaaaatgtaatgttatttctaattctcgtgagatactggtataaaaccatagaatagcgattaaaagtcccagcaagactgacaaaacaccatgtgttccaccagaaaaatccacacat

SEQ ID NO: 280102 - DNA, 122 bp, Homo sapiens
cgaggaataaagaaggggccaggtatgacaacttcctctcactgtggttcaagagctattcgagaaaacattttgcccagaaccattaaccaactcatatgctagatatgctatgaaatttg

SEQ ID NO: 280103 - DNA, 122 bp, Homo sapiens
cgggctcctgagggagcgaccgcccggccgggtcctggcgcccggagttcgcagccgctccggccaacccagcgcagtgcccgcggcctttgtccccgagccttccccgcccccagcctgct

SEQ ID NO: 280104 - DNA, 122 bp, Homo sapiens
gggggccgctcctcggggccgtctgcctgcaggaaggagtccacggacttgctgctgaggcggaagggcatcaggcggcagaaggtgccgggagagtagggaatctgcgtgcgggccctctg

SEQ ID NO: 280105 - DNA, 122 bp, Homo sapiens
tcctagccctccctgtagaaaataccatgttgcacagttacatgtgtcccctgacacaaacgacactcattttacgtaggtcactggacctcaaactgttgttgcttgctgtcccagccaat

SEQ ID NO: 280106 - DNA, 122 bp, Homo sapiens
gatttgcagaaattgagattgctgttcccagatattggcacttgcctggtgatgaatgaccgagtctgtgcaaagggactctgtatgctttccttcagccttttattctcagccctctattg

SEQ ID NO: 280107 - DNA, 122 bp, Homo sapiens
actgcaatggggaaaagaacccagcgtgaactgaattcaatttcgatttgtagaggcaaccgggcgttttaaagagaatgaaggaattaggatgggactgatgacgccgagggggactgagc

SEQ ID NO: 280108 - DNA, 122 bp, Homo sapiens
aaaagaagttacgtgctaggcactgggcaaacagcaatgaacaaaataaacaatggagctcgctgttccagtgggaaagggggaagggagaagggaaggtgagagaaaacaagcaaactata

SEQ ID NO: 280109 - DNA, 122 bp, Homo sapiens
ggggggtgcttctctgaattcaaaggacacaagcagcagcagctgcggcggcggcgcgggcggctctggcagctacttctcccccttcttcacacccctgggctaagggcatctttccacag

SEQ ID NO: 280110 - DNA, 122 bp, Homo sapiens
gccgcagtggtggcggtggcggagagcgcggcggagtgagtgcggctgtggacccgggaccgggcgccgctgggcgggcgcggcagggtcccggatccgtcctccgtgacgcgccggcttcc

SEQ ID NO: 280111 - DNA, 122 bp, Homo sapiens
cccgtcgaaacctcagttgctccatccacaaaatgggaaatatgaacagccaccctaaaacggtgtggggaggattaaacgaaacaacgttcccaaaactctaaacttacaaatgttgtctc

SEQ ID NO: 280112 - DNA, 122 bp, Homo sapiens
cccagctgaggcaggagcgaggctgggacaagaggagctgctcagcggaacagtgcctctcgacatttagtgtgcagcatccacagatttgtgttaaaaatgcggagattctcttttggcag

SEQ ID NO: 280113 - DNA, 122 bp, Homo sapiens
gcccctcctccgttttcccctgtggaccattccgcttcgcagcgttttcaaaaactggagcgaaagtgatgtgggcggggcaaaggcggcgggaagaggagagcactgaagctggcgcggga

SEQ ID NO: 280114 - DNA, 122 bp, Homo sapiens
cccacattcaaggccagcactgggcagggcgggtctcacaaatgcatgctcccagcacagcgcacggccctcacagtgccaggctcccagcacagcgcacggccctcacagtgataggctcc

SEQ ID NO: 280115 - DNA, 122 bp, Homo sapiens
acaaactgtccattgtatgcctgtcctagagggcctttgctttctggaacttttaaaagtcgattcaaggactgatgcaaggacaaggcttacctattcctaacagacctaactgtgaaaga

SEQ ID NO: 280116 - DNA, 122 bp, Homo sapiens
tccaggttatgcctgtgctgctgcccattctacgcccacctggaaagcctgaaaccttctcgtgccttctactgcagctggggagcttcttccacgtctcatagccagcttctccagaggga

SEQ ID NO: 280117 - DNA, 122 bp, Homo sapiens
taagggttgaaaatacactattatggaaaatgtccaactgtggctttgtaccttccattccgtaatgtgctttcatttattcggcatatttattaggtattgactgtgtgcctagtactgtg

SEQ ID NO: 280118 - DNA, 122 bp, Homo sapiens
ccgcccccaaagccaccagccccactcacctgcccctgaagctaaacctagcagtctgaacggccagtcttggagccctggtgccgcagcagctttgtgactcaaagccaagttctggccaa

SEQ ID NO: 280119 - DNA, 122 bp, Homo sapiens
cggcctcactctcccggcacccaaatgtgtctgtggtggccgcggcaacaggagagcgtccgtcacattccccacggtccacattctaacccgtgcgccgtctccaatgctggtcacctggg

SEQ ID NO: 280120 - DNA, 122 bp, Homo sapiens
ccggctggtcagagctttcctgcgccttccaaggcttggagctgccccggggaagcagaccgaaccaaaccgaacgttcctgcagcctccccgccagccctgcgggagcccatccgcccaac

SEQ ID NO: 280121 - DNA, 122 bp, Homo sapiens
acggaggcatcttatgttaacctacctaccattgcgctgtgtaacacagattctcctctgcgctatgtggacattgccatcccatgcaacaacaaggtaatgattttaggatctagagtttg

SEQ ID NO: 280122 - DNA, 122 bp, Homo sapiens
ctccgcccagtgcaacgagtacagtgaggaggaggagctggtgaagggcgtgctgatggccggcctctaccccaacctcatccaggtgctgcctctgggagggaatggagttcaccaggtcc

SEQ ID NO: 280123 - DNA, 122 bp, Homo sapiens
aaataaaagtgatctcaaaagcatatctgctcctggcaatgaaccatgaataagccttaccgatttgtcgtcttctaaaagtaagcctgccagatattcttccatgtttatttccaaacagg

SEQ ID NO: 280124 - DNA, 122 bp, Homo sapiens
accccctcttgggaacacctgtttctgtccgttcgtgtctttaatccacgtcccacctggcgagtgttgtgggcttcattttgcatacttggaggtcagagggagtgagaaatttggctggg

SEQ ID NO: 280125 - DNA, 122 bp, Homo sapiens
tgggcgggagagacagcctgtgccctccgaccggcagtccctccatgatcacggccatcacgatcatggccctctactccatcgtgtgcgtggtggggctcttcggaaacttcctggtcatg

SEQ ID NO: 280126 - DNA, 122 bp, Homo sapiens
ctgcggagcccaacaaccacacggagtatgccagcattcagaccagcccgcagcccgcgtcggaggacaccctcacctatgctgacctggacatggtccacctcaaccggacccccaagcag

SEQ ID NO: 280127 - DNA, 122 bp, Homo sapiens
ttcagtttatccttgttttttaagaaaattactgcgatggatgttttacatccaagaagacggaaccatgcagaattgaagcttagacataaacccaaaaggaatagttatcatatggggtg

SEQ ID NO: 280128 - DNA, 122 bp, Homo sapiens
ccgagacgcgcagaggacggctagagcgttgctcgccgagagacttcctcttcgttaagtcggccttcccaacatggcgcagtctattaacatcacggagctgaatctgccgcagctagaaa

SEQ ID NO: 280129 - DNA, 122 bp, Homo sapiens
gacgcggggacagcggggagggccggccgcagcctgccgggctgcccccacggcgcggaacgcgcgcagcaacctccaccaggcctccgcgtctggactcccgccctgcctctgggcctcct

SEQ ID NO: 280130 - DNA, 122 bp, Homo sapiens
acactggacaaaggtacagctgctaaaagaagtgctcgttcattggcttcgacagctgtacgactggtttctaattgctgttccagcctctccccagttccatataccacaaacgaatgaaa

SEQ ID NO: 280131 - DNA, 122 bp, Homo sapiens
acgaagtggggcttttagtccctgctttcgaacggcgaattccacaacctccacctcctacgtccggatgcgcactgagggactacgttagcagacgcgtcaaaagtaccagaagctggccc

SEQ ID NO: 280132 - DNA, 122 bp, Homo sapiens
acaaagtagaaaacacaaatatacaacattaggtgtcagaagaatacatagctataaaaacggaggagattaaaaaaatgagaaacctgtaaagtaaaactaatactaataaatttaaacat

SEQ ID NO: 280133 - DNA, 122 bp, Homo sapiens
acatggtggggttgatcatgggtgataatacggggctcccagtggtgacaactgcaaagccggtgttatttcttctttaaaagtttgttagaatttagcagtaaatctggttctgggctttt

SEQ ID NO: 280134 - DNA, 122 bp, Homo sapiens
cctgcctcgccctcaagcgcctcaaagcttcctaagcgcttacattggtcttgggacagccgactttggcttctttgtttgtttgagggaccgcggaagtggcggggaatgtgcccccgctt

SEQ ID NO: 280135 - DNA, 122 bp, Homo sapiens
ggtgccttggttttcctggccttcatgtcctcctatgtaaacgcggggtgatgacggcgccgacctcttggcgctgttgtgagagtgaagtgggcgcgtggttagacgccagccacagttgt

SEQ ID NO: 280136 - DNA, 122 bp, Homo sapiens
gaaactcaactctgtctgattggactgcaacaaagggaggtcccgcccatcgctccatgacgtcacagaggctgcagcctttttggactagaattttcccagcatctagggaagaggaagcc

SEQ ID NO: 280137 - DNA, 122 bp, Homo sapiens
cttaatggagtaattacttatatcagtcattgtcataactagtaaaaccgtgctataatgcgagcaggataatcttcctctatggcagatgcaagaaagatgtgaagtttgggggatgaaaa

SEQ ID NO: 280138 - DNA, 122 bp, Homo sapiens
ctgtggccagtctctgcaaagacggtcggggtcagggagcctggcagtgtccgcccggcacgccagcccctcccacagtcccgagccgcaggtcttcccggggtgacgccccgccgagatcc

SEQ ID NO: 280139 - DNA, 122 bp, Homo sapiens
cccaccttttttttttttacttcagtttccccacctgcaaactgggaaaactaactaaggcgaggccactgtactgtggatacaagtccgtgcaaccctaaatcccagacacgaacgtgata

SEQ ID NO: 280140 - DNA, 122 bp, Homo sapiens
attctccatgatatgattttattatgcattgcatgcttatatcaaaacatctcatgaggccgggcatggtggctcacacctgtaatcccagcactttggcaggcggatcacaaagtcaggag

SEQ ID NO: 280141 - DNA, 122 bp, Homo sapiens
gcccgtttcctctgccctaggacctgctagaagtggccgaagatgaatccccagcaacaacgcatggccgctatagggaccgacaaggagctgagcgacctactggacttcagtgcggtatg

SEQ ID NO: 280142 - DNA, 122 bp, Homo sapiens
gcaaaccaatttctatttgctgactattctccagggcttttaaaagcaaataaaatgtaccggaaactgttttccaaatgacaacaaagaatacatctcctactctctcttctcccccaaca

SEQ ID NO: 280143 - DNA, 122 bp, Homo sapiens
cccgggcaggccaaggcccaccggcgacaagtgcggggccgcctgaccccacggctgggccgtgaacgagacgtcgggcctccagcgatccgttctcgcctctgccactctgggcctataaa

SEQ ID NO: 280144 - DNA, 122 bp, Homo sapiens
tccagcacttctaaagggccaaccccagaatcgctcactccccagcacgtctgggctgtgcgcggcaccccaggtaaatgcagcggcctctgcattagcccgcgctgcttagagacgctgcc

SEQ ID NO: 280145 - DNA, 122 bp, Homo sapiens
agcccgcacgcggccaacgtcaggcgcgcgcagaggcacccacgggcccgccttcaggggcgaggcggatgctgcatcctgaagccctccctgttacaagcccagcccctccaaaggcctct

SEQ ID NO: 280146 - DNA, 122 bp, Homo sapiens
gccgcagagcatcctgccgacggtaggtggccctgggttcagagtctgtgtacagatccacgtcatcctgagtggagaagtaggtaccgcgcagcagggccgggccgttgctgggggaggcg

SEQ ID NO: 280147 - DNA, 122 bp, Homo sapiens
agagaaattggccacgatgaatacactagaggtaatactttagagttttgctgcgaaaggcggcaaggaaaaaggatagtacctgttagggaaagcagagttcagattcttttagtttcgaa

SEQ ID NO: 280148 - DNA, 122 bp, Homo sapiens
gatgcttcctgggagtctccaggtcggctgcacagccccgcagcatgcctgatgctggtgcgcctgggtggcctttgaccaaagcccacgaagacccacccacggagacccaccctgacccc

SEQ ID NO: 280149 - DNA, 122 bp, Homo sapiens
cttggacctcactgcagctctggaggtggacctcgtcctgggaccctagaagcccatttccgcactcgggctaggccttcggagccgcggcagcatagtgggaggagtcgggctcagctccc

SEQ ID NO: 280150 - DNA, 122 bp, Homo sapiens
gggtctcactctgtggcccaggctggggtgcagtggtgcaatcatagctcattgcagcctcgaactcctgggcttaagggtacctcagcctcccatagtactgggattacaggtgtgagcca

SEQ ID NO: 280151 - DNA, 122 bp, Homo sapiens
atttttagactattcacttcctgggtacgatgcttttgtattggagctgggtgcagtaggcgcttgctcgtagagactgtggcactgagttcagcatagaactctattgaaattctagctcc

SEQ ID NO: 280152 - DNA, 122 bp, Homo sapiens
gacagaaacaaacaaccgggctttgaaggtctgggtcaaaggtggcacaattccttgcttcgttgcagtaaggcaagtgccgacggccacagagcattgcaaaagagcacattctccctttg

SEQ ID NO: 280153 - DNA, 122 bp, Homo sapiens
ctgcctccgccctgctgcacagggcagcctggcaagagctgtatggcggtgcgcacggtccgcactccgtcaggttgggaagtgaaggaagagcagagaatctaggcaggaagcataacgtg

SEQ ID NO: 280154 - DNA, 122 bp, Homo sapiens
cttgattccatacatcacatgtttctgtgagctcaaggttggggcaaagttacagattaacggcatcttagggcaaagcaattgttcagggtacaggtcaaaatggagtttcttgtgtcttt

SEQ ID NO: 280155 - DNA, 122 bp, Homo sapiens
ggtggggtgggaggtgggggcgcctgtgcctcaagctgagcccgtgtcctgcagcgcgggcgtgggccgcaccggctgcttcatcgtgattgatgccatgttggagcggatgaagcacgaga

SEQ ID NO: 280156 - DNA, 122 bp, Homo sapiens
caccgggccgagctgtgtctacttggtgcccgcgtatttgctttagtggaggcgtccattcgtcctatcttgcgtgcgttccgcagaccccaggcatggccgacccccatgtaaatttagcc

SEQ ID NO: 280157 - DNA, 122 bp, Homo sapiens
tgctaaggagctggatgaacgggcagagcaggcttcccacagcctcaagtctagtttccccggctctctgactgcattttgttatgagaatgaacttgctctgagctgctgccaggaggaag

SEQ ID NO: 280158 - DNA, 122 bp, Homo sapiens
gcggccgccacccggccccggcagaagtcctggctggtgaggcatttctctctgctgctgcggcgggaccggcaggcccagaaggctggacaactcttctcggggctcctggccctgaatgt

SEQ ID NO: 280159 - DNA, 122 bp, Homo sapiens
gctctgctctgtgggtgtgttctggtccctactagattcctttcctctctctgaaacacgcgcattggggcctgtgggccctcatcccacactagctggagctgaggtgagaaactacagcc

SEQ ID NO: 280160 - DNA, 122 bp, Homo sapiens
ggctgagagggcccaggcgaaggtcctgggacacgcgcttcgggcaatcggaaacgggaacgcccagacacagaaccccagaaacttcctcctgcccagcctccgcacgccaggcctggcct

SEQ ID NO: 280161 - DNA, 122 bp, Homo sapiens
accggcagcccctgcgggggcatcaagctgcaggccgagcgggcccgcgaggagggcatccggctcttcgccgtggcccccaaccagaacctgaaggagcagggcctgcgggacatcgccag

SEQ ID NO: 280162 - DNA, 122 bp, Homo sapiens
gccacgcagactgctctctcatccttttgtccttcagtcagaacgtgaatgtactgctgacgcatactgttctgggagaagattagcgtgatgcagtgctcttatgtattagcgccgctccc

SEQ ID NO: 280163 - DNA, 122 bp, Homo sapiens
catttctaccgaggagcagcgacaccatgtccacgtgcccttcctgagctgcgagatggacggaagcaattccttgccgggtaactgcgttggcatcagcaccatattccagcagagttgtc

SEQ ID NO: 280164 - DNA, 122 bp, Homo sapiens
taagaattatcagatttgataactggaaaagggagggacctttcgaaagagacccagagtcggcatcagcacaggccagaaggaaaggaagcaatcactgggaggggaaacctcgcgcgtct

SEQ ID NO: 280165 - DNA, 122 bp, Homo sapiens
caatcagagaagcgggtttccctgtggtccccgccccactttccctgctgccccaataaccgccctaaaaggccgggcttctgctgtcaagtagccagggtgggctccgccgaggcgaggag

SEQ ID NO: 280166 - DNA, 122 bp, Homo sapiens
acctccttggtttctggattccggaactttttaaaatatgccccccaccccacccctccccgccatggttgtaggcgtggtcctccaagccatggaaccggatgaactaagtgatggggcta

SEQ ID NO: 280167 - DNA, 122 bp, Homo sapiens
ttccaaaagaatctgcatgaacaaataatttaaaattaaaatataaccttattatttttacggcggactctgggaaaatatctgagttctcaacagaaactgccagtttgttgttgagtgag

SEQ ID NO: 280168 - DNA, 122 bp, Homo sapiens
gcgggacgggggcccagcacaaagtcccagcccgggcgtcgggacctgaggggcggtacgcgggggaaggggctgggctcagctctcaccagcaccagggcgaacctttcctccagctcaca

SEQ ID NO: 280169 - DNA, 122 bp, Homo sapiens
agtcacgcggagaagccagacccagacgccgaccgggcactggtggcgctgccggggtcccgggggttcctggaccccctaccccaggcccctccaaagcaactggggtaaaccagacgcac

SEQ ID NO: 280170 - DNA, 122 bp, Homo sapiens
cccaccctataattctctactcaactccaagaaagataagtcaaaatgccacattctgagcggggaggagctatcttctcttttggctctcaccccaccccttggcacagtacaattaatta

SEQ ID NO: 280171 - DNA, 122 bp, Homo sapiens
ttgattactgcatctttgcacaatgttttgaagtcaggaagtgggttctctattctactccgttggtctatatgtctgttcttatgccagtaccactctgttttgattactgcatctttgta

SEQ ID NO: 280172 - DNA, 122 bp, Homo sapiens
ccttcccataccttacatggacaaatgcgtgcaggcaaagtcaggaattcaggcccctgacgtcagcctccagcgctcagggcaccgcacgggagaccaaggggagggggtggggacggtgg

SEQ ID NO: 280173 - DNA, 122 bp, Homo sapiens
ggggtcttggagcccacccttccctcgatctctgtctgcagcagctcacattcctgattccgggaggcctgggctctcttaagagaagccgatcacgccaaagccaccggctcccgggtgcc

SEQ ID NO: 280174 - DNA, 122 bp, Homo sapiens
atgcatcccctgcagataagggcgaattactgtacgtaaattactcttgtgtctcccttccgaatggattgtaggaatgctccatggaaaattacaatcaaacatcaactgatttcatctta

SEQ ID NO: 280175 - DNA, 122 bp, Homo sapiens
aggacagccggctttccgcacactgctgccgcgaggcgccactgtgtgtgcaccatggggcgagggtcttgggtggctcccaggggccagttctgccagagtcgaaatttggtggtcactta

SEQ ID NO: 280176 - DNA, 122 bp, Homo sapiens
ctgtcctccagtggtttgcaacacctaggcacaatagggtgagagaacgcggcattccagcgcttcccagctttccggaccccggagagagggggtgggggtgtgggctcacatcgccggct

SEQ ID NO: 280177 - DNA, 122 bp, Homo sapiens
aggccagggaggcacctccgtgccacactgcaggcaggcagggccgcgcttgggatctgccgccttcttgtcagtgctgctttgactaattgcctgaggcacggccggagtgacttgctatt

SEQ ID NO: 280178 - DNA, 122 bp, Homo sapiens
gcgctgagcatcagcaccggggacagcgcgccgcgctgcattgtgggaaactcctgccgccgccgctgcagctaccgcatcgccccccgcggggctggtccccaccctttctccgccccctc

SEQ ID NO: 280179 - DNA, 122 bp, Homo sapiens
ggggaagtataatttggagtgtgaagggtgctaatgcagacacaaatcagttcccttcagcggtcagaaagatactgctgctgacaattagggttacaaatatccaggctttcgttgaagac

SEQ ID NO: 280180 - DNA, 122 bp, Homo sapiens
cttgtgcctgtagtcccagctactcaggaggttaacgtgggaggactgcttgagcctgggcggtagacgtgacagtaagcagagattgcaccactgtactccagcctgggtaacacaaggag

SEQ ID NO: 280181 - DNA, 122 bp, Homo sapiens
ccccatttcagcttctcttgagatctctgcccactgcccagggcacaccttgcctgtaagcgaagggtccccacagccagcccaggctcaccagccaccaacacctgcaggagagagaccac

SEQ ID NO: 280182 - DNA, 122 bp, Homo sapiens
cggaccgagaagaagatggatgaggcacctactaggtgtcctcggttcacccctcacgatcgtgtgaggtgggggtgttcctgctcccatttgatggaagagcaaactgaggctcagagggg

SEQ ID NO: 280183 - DNA, 122 bp, Homo sapiens
cagcctaggagcccagccctgaagactcgagctgagctggtaacttcggggagtaggtgacgaggggctgcctgggcaggtggggtggtactgtggcctgggcctcctccactccatccagt

SEQ ID NO: 280184 - DNA, 122 bp, Homo sapiens
tataaagggaaaataaagtatccactaaggaccatgtactaaattgcttttaaacactggcgtcccttcaacccacattctttaaatatgtgatgacaacatagtgagaaaagaggctgggc

SEQ ID NO: 280185 - DNA, 122 bp, Homo sapiens
agaaaagcgaggaaaaatcctgagacctcctcccctcgcccttcatccacttcaggggaccgagtgtctccacggaacttcacaagggaggaaaagagtgaactcattattatttgtcttgt

SEQ ID NO: 280186 - DNA, 122 bp, Homo sapiens
acacctgtaaacgcacagcccatgccccattgtaaaggtgactgaagagaatggtcaactcggtggtgatgggcctgttttggagctaaaagcataaaatgaatcctccctgtagctccatt

SEQ ID NO: 280187 - DNA, 122 bp, Homo sapiens
gccctccaggcagaggagaagccccgcggccaccctgctgcggtgcggactccgcctgtccggttccctgtcacacctgctgcctgcccccaccctgcacacaggtgcacacacacggcgcg

SEQ ID NO: 280188 - DNA, 122 bp, Homo sapiens
gctgcaccctccgcccagaggacgccgcgtgtggaaggaaaagcggcaagagaattggcacggggatgagacgtgcacacccagtttcctagggaaaagtacctgccgacctctagtaacag

SEQ ID NO: 280189 - DNA, 122 bp, Homo sapiens
caggctcgcaggtgtccgccgtgcgcctgcccggcgggcgagcccggcgcggagcctgtgcgcctgcgcagagccgcgagttcggttgccctggccccggccacaaccttggctcgcggaat

SEQ ID NO: 280190 - DNA, 122 bp, Homo sapiens
gccgccgcgccccgcctcattagcatgccgggctgcgcgcgcctcatgaatatacaacgacgacgcctcgctcccgcccgcctgccccacttccgcccggacccgcagcccctaccaatggg

SEQ ID NO: 280191 - DNA, 122 bp, Homo sapiens
tggcatttaagattttgtctccaagggaccagggaggccccagtttgagagaggaggctccgatcaatccagggtgctacttgttaggaggtcaagtaaagggcttgatggggagcaacgtt

SEQ ID NO: 280192 - DNA, 122 bp, Homo sapiens
tctgcgcacgcgcggctcccggcacaaaattctcttgaatcgaacttatttgcatacgggcgcgcgcacgttgcgggctgggagggggagaagtcccggcgaccgcgcgcgctcccgaggcc

SEQ ID NO: 280193 - DNA, 122 bp, Homo sapiens
gcgttacccaaaacttctcactctctcgaatgcccaaacctttatcccaggcctccgtgtcgacgcattcccagcgcacatacctggtcttttgctgcctgtcgtcaccgccaccccaacag

SEQ ID NO: 280194 - DNA, 122 bp, Homo sapiens
ctccgctcccaggtcagcctaaggcagggagtccatccggacctggtcccatcagctgggcggggcctgggcggggtcccagggagcctccggcctgggcacctgagccctagaatgagaca

SEQ ID NO: 280195 - DNA, 122 bp, Homo sapiens
acctctcccttctgcaagctccggggcagcaggctagggacctgggggtcccgagagacccgggccagggcaatggagcctgcccataccctgccccaagcgcctcctagaggcggcaattc

SEQ ID NO: 280196 - DNA, 122 bp, Homo sapiens
tgaccacttaggtcaggagatttttcccctccaggctgctgttcccgggagatgtcccaacgtctctagtccagcccctaactcagcactctacacatccgacgcttaacgaaagctattcc

SEQ ID NO: 280197 - DNA, 122 bp, Homo sapiens
acgcgcacgctgttaacttcgtggacgttaacagccccggctttggcctcgaccccaagacgcccatggagatgctctaccaccacgtgcaccggctcaacatgtcaggaccgttcggcggc

SEQ ID NO: 280198 - DNA, 122 bp, Homo sapiens
ttactgcaccaggagaaggcacccctgtacctgcagcacttctgggccagggctttgggacgggacgcgagctgaccacctgttccttctttccgcagggtcgcggagcctcgccggccgcc

SEQ ID NO: 280199 - DNA, 122 bp, Homo sapiens
caaacgctgtagcactaacacctaaaaaaaaaaaaaaaaccaccaaaaaaacaaaaaacacgaggaggttctgggattaggagaacactctttaatgataaagcctgtccaagtactaagga

SEQ ID NO: 280200 - DNA, 122 bp, Homo sapiens
cgtcatcgaacttcagcacctcatagccttcgtgggggctcttgagacccacatagaaggcgatcttggggccgctgaaggtggcgctcagcgcactggtcacttcaccctcggaatcgcca

SEQ ID NO: 280201 - DNA, 122 bp, Homo sapiens
aggaggacatggcatgcgagaggcctgcagctggggaggtcagagctgggcccaggcctgcgtgttcatctacgcgttgccccccgtcccctgggccacccctggaggcccttctcctcctc

SEQ ID NO: 280202 - DNA, 122 bp, Homo sapiens
ctgcctagcccatcacaaataacccagtgtcaatagcacgtatgttttggacagtgatgtcgctactccttgggttggcatgtggtctgtgtcatcagggttgcagttgctcaccatgtagg

SEQ ID NO: 280203 - DNA, 122 bp, Homo sapiens
ctttataattaaaagataattcgagaagatatatcaaggcctatttcttggaggccagagcgctcctaacccctgagcctgcctcagcctctggctcccacccccgcagccgccccgtcgcc

SEQ ID NO: 280204 - DNA, 122 bp, Homo sapiens
acagtggctgggaggttctgaacacgctgcggctgctcctggccagtcaggtggggagggcggcaggggtgggagggacgtggtgtcacagagcggcagtgaaagacactcaacggccgcta

SEQ ID NO: 280205 - DNA, 122 bp, Homo sapiens
cggtctggctccgcttcttgtgtcgctggccttaagagtgggactgtgaaggtggctgggcgctggaatttgtggttttaaaagttcttgacacctgctagaaagtgctagaggactcttca

SEQ ID NO: 280206 - DNA, 122 bp, Homo sapiens
ttcctaaagcacctgctctgcacggagacctgagccatggtgggaggcctatgagagccccgccccctgggtcccacaggctgccatcaagagttgggccctacgggcaccagacctggcta

SEQ ID NO: 280207 - DNA, 122 bp, Homo sapiens
ctggaaggcagatctaacagagaacctggactgtctcctatcatgattcccgggaaatatcgctctgtttctggccgggctgcgaacaacgtaagttgggccttctactttctctttcttcc

SEQ ID NO: 280208 - DNA, 122 bp, Homo sapiens
gttatccagcgtctctttgaactttaaatagagagaaatctgaagattgcggcagctgcccgtctcctggctgccaattgtctgcagagtgatgtaagtcatgggaaagcagaactcctctg

SEQ ID NO: 280209 - DNA, 122 bp, Homo sapiens
agacgtgccagaaagaaagaggagagaagaagggtgtcgcggcgacggagctgcttgccacggctggggaccgtagcaagagcaagagggctcctcagcagtccctgtggctggcacacgct

SEQ ID NO: 280210 - DNA, 122 bp, Homo sapiens
tccataataattgtaatgtgttatgaaaatatctgtgatttctgaccaagttgcaggtaccgctaatgctcctgtaatttgttgcttacatccataaaggaaggaaatgcttaatgtcagtt

SEQ ID NO: 280211 - DNA, 122 bp, Homo sapiens
atcaaaaccaaagctgggttaaaatcctaaagctgggggacagctgaagcacccacttcacgacttaacgtttcaggaatatgaattctatgttcagaaaatttccccacactcttcttcgc

SEQ ID NO: 280212 - DNA, 122 bp, Homo sapiens
atagcttcagccactgccacttcctgtctctctttttgcagaaaagagcggggagtgagccgtccatggcggccctggggccaccaatctccctgtagcactttggttccatgctggagtaa

SEQ ID NO: 280213 - DNA, 122 bp, Homo sapiens
tacagcaaaacccagtgttaccatcttacgggaccacccccccatgcgattggccagtgacggaagcatcgttatgcaatgcgtgacaacagtctgcgttcacccgagacggacaacagcat

SEQ ID NO: 280214 - DNA, 122 bp, Homo sapiens
ccatgaccgctgggacactggacttcaggatcagctccagccgcataagggccagggccacgaggcagtgctgctctaggctgtgccacagacagcacacagggctgtgggatggaggcaag

SEQ ID NO: 280215 - DNA, 122 bp, Homo sapiens
tcaatcaatccttcaataggcaggtactattttactcattgcattttgcgataagaaaaccgagggtccaagcaggcgagtgagggtcatgcacttattagcggcattggcatttggacaca

SEQ ID NO: 280216 - DNA, 122 bp, Homo sapiens
aaaacaaaaaaaagaataacaggatgaagttgtgaatctcttcgggatggtgtgccctctcggtatttatagtctttgcctgtttaaaatactagcaaacctacctggggggccaggcagcc

SEQ ID NO: 280217 - DNA, 122 bp, Homo sapiens
ctagaccaacgagccatctgctgagcaaggtctcctcgaatttactagaggcgatgacagcggcaagcgtgtgggccagcgcttgcgggaaagagttgggtgggggcgtggcttctgtgcat

SEQ ID NO: 280218 - DNA, 122 bp, Homo sapiens
cggtgaagggcaggcaaacaaccggtcggtctgggcggagccgggcgggcggggcgagggcggagggcggagggcgcattgcctcatcctgtacattttactggaaatcggacgcatccgga

SEQ ID NO: 280219 - DNA, 122 bp, Homo sapiens
atatctcatgggaacttgttacaaatgagaatctcagaccccatcccagacatactgaaccggaaactgtgggcggacagcccaacaatcggtgttttaataagcccccgggtaatcttata

SEQ ID NO: 280220 - DNA, 122 bp, Homo sapiens
gatggatactcaccacccaggactcctgttttggccaggcagctcagcaataggagcagccgcatgcttctggaagccatcttcctcctaccctgaggatgtagctagtgcaaggatctcag

SEQ ID NO: 280221 - DNA, 122 bp, Homo sapiens
ccgaccgccgcctcccacgagggctgggtgcccgcggcgttcttgctcccgggggccccgcgctgtgcttcccgccctcatcgcggtgccaacggtgcgcggactctcaactcactgcaacc

SEQ ID NO: 280222 - DNA, 122 bp, Homo sapiens
gcaacgctcgctcacaaaccgtctgatccggtcaactgggagctgggggcaccaggctgccgggcgagtggacctggaggcgttgtccagcattgttttctaagctgggtgagagcttttct

SEQ ID NO: 280223 - DNA, 122 bp, Homo sapiens
aacgtctgtaaaaaggagttctctgatgtgtgagaggagacggaaccgagaagaaaaggccgtactctgccccccgcgggacccaggtccccgcctgctgcagagcgcactctgcgcacgtc

SEQ ID NO: 280224 - DNA, 122 bp, Homo sapiens
cctggctgagcttcggaaccccgaggagatgactcgctgtggcttctcgttggccttgggcgcccttccaggcttccttctgaaaggccggctccagcaggtgaggctggccacgcgcagtg

SEQ ID NO: 280225 - DNA, 122 bp, Homo sapiens
ctccattgtaagttggcagctgaatgattccatttcgggagtcagtgcccatccctatctcgcttacccaccccggagctgagcctctgaattgggatcctattgaaatgtttccatggttc

SEQ ID NO: 280226 - DNA, 122 bp, Homo sapiens
tagatcttatattacataccaactcggctattcatttaagggggtgatagccccttttcccgcccctctgcacaaagcttgcaggggagcttataatgaaggaatgaagcaaagtgtcccat

SEQ ID NO: 280227 - DNA, 122 bp, Homo sapiens
cccacgactataaatctcatatgtaaacatgatttactattactgctactaaacttgttccgtctttacttgccccctcccacccaccaccccccttaaatataaaattggaaacatttcct

SEQ ID NO: 280228 - DNA, 122 bp, Homo sapiens
tcggaatgggcgtggtcttgccgaatgggagggtctaacgcgagtggttggcgtcccgcgcggggcccaaagtgtgacacgggtgggcttggaaccgggaccttagctactggtggggctga

SEQ ID NO: 280229 - DNA, 122 bp, Homo sapiens
tccaggtggacacatccatgcagcaacacccctgcctctgggctctagatgcttggtgggcgggcagtcactgtggccacactgcagagacagcagtgcagtttccaaacggagttctttgg

SEQ ID NO: 280230 - DNA, 122 bp, Homo sapiens
ccagctgccagcaccctggctagttagggtttccctgaatccgcaactcctgtttgatggcgggtctcaaacgctgggaggcagcagagtcaccggtcagcggcaaggcctggagtctccat

SEQ ID NO: 280231 - DNA, 122 bp, Homo sapiens
agagaccacttagccttccctttggtctgttctgtgactctctccccaaacacaaagaagcgtgtatgtagtcaccattccagaacctctcttttctaagatgcacaacacttatcaaagat

SEQ ID NO: 280232 - DNA, 122 bp, Homo sapiens
ttgtggtggagcccaggggcaatgcgaggggcagaggtcaccgtgggctcccagccagctcggtctctgtcccagcccggggcagcagcagggtttcttcacctcccttacctgtattatgc

SEQ ID NO: 280233 - DNA, 122 bp, Homo sapiens
caaaggggagaggggccagccaggcgacacccacctccgacatacccgcctaaagaactccggtgcacatggtgcgatgaaatatgtttggaaggatgcaccaataaaaagaatcatcaccc

SEQ ID NO: 280234 - DNA, 122 bp, Homo sapiens
tacaaataacagggaggcgcctggcatctggccacctgaacacaaagtcacttaatcatacgggagtctcttcattgctatgatctcaagcatttcaggaagaatgccaaatggagaacaaa

SEQ ID NO: 280235 - DNA, 122 bp, Homo sapiens
cctgtatggtaatgaggctgctcaggcccacgaccaatgggaacctgagcctgggaagggcgcccatctccaggaggctccgccagtcccagcggccccatttggcccaggctgcttctcac

SEQ ID NO: 280236 - DNA, 122 bp, Homo sapiens
aataaattacacaataaataatcaaaatcaagtccgagacggcagagcccaagcccaggacggttctcccgggcggagaggcgcccgcacaggagcgggaagggcgagaaccgggagagaag

SEQ ID NO: 280237 - DNA, 122 bp, Homo sapiens
gccggactcgcagaggggcgtgcgcggagctgggcgcggggcagcggccaagagcctcagcgccctttcatctgacactggggacagacacaatccagactcctcagcagctcgggaactcc

SEQ ID NO: 280238 - DNA, 122 bp, Homo sapiens
atagctgcttcacaggatgaaatgaagtttgaggtgagaagcattcaccatggtgcccatcgtgttactccattgtcagaggaggaaacggggtcaggcaggaaagcaacttaaaggagggc

SEQ ID NO: 280239 - DNA, 122 bp, Homo sapiens
cggcagcgcccgggtctggctttgcgtattacagttcatctttcacagctttctgatcatcgtcttcctccatgtctggctcctctgcttcttccaggtcctcgagatcctgggatacagga

SEQ ID NO: 280240 - DNA, 122 bp, Homo sapiens
ctgtactccaaaattttaatttgatagtaaatactaggatggattaattcaacaggcattcgttgtgtaaccactacacacacagcctggggaggagatgaagatgaatgacatgtttgtca

SEQ ID NO: 280241 - DNA, 122 bp, Homo sapiens
gagcccgcaacccctgacaacgggaggaagacgcgccacagggactgggacagcggccaccgcggtgacacctacagccacgcaagcacctgcgtaaacacgtgctacagtcacatgttacg

SEQ ID NO: 280242 - DNA, 122 bp, Homo sapiens
ccagacagtgctggccagcaagtgtggccttcctcgcaattcccgggaaagaccaggccgcgctgagccacacctcccaaggctcaggagaccagctcctcagcgggagggcccttcccttc

SEQ ID NO: 280243 - DNA, 122 bp, Homo sapiens
gggaagaagccatacctgtacaagaccgggctcttgaaaagaaacacctcgaacccagcccgtgtaagaacagaaggctcacctgcagtggctgaccaccctacccaactcggttagtgtct

SEQ ID NO: 280244 - DNA, 122 bp, Homo sapiens
ggtcactcaccactccgccgagcaggaccgcgggagcccgccccccactcatgcggcctacgctggtacaggagagttgatctcaaaggccacacgtcacacggagaaacaaccccaggaag

SEQ ID NO: 280245 - DNA, 122 bp, Homo sapiens
acaagaaagggaaggagaaagacaggacggggaaaggagagaaagagccggccaaggtaccgggccttggtgctggggagggcagcctggccacacccttgcttcaacttgtcccaccctcc

SEQ ID NO: 280246 - DNA, 122 bp, Homo sapiens
gcggggcgggcggcggcggcggcggcggcggcggcgggcggacgacggctcggttcacatcgggagagccgggttagaaagaaggagactccagagaaaatatcttcatcagtgccttttga

SEQ ID NO: 280247 - DNA, 122 bp, Homo sapiens
gcctccttggcaccctcttccacgatgctgggccctccagggccgggcctccctcggacacgtgccctcgttagccttggaatatgcacactctgttttgacggagactctcttgcgagcct

SEQ ID NO: 280248 - DNA, 122 bp, Homo sapiens
acgctaatgcttgaatggtttagaactgcggacagctcacgccagacagattcagcaccacggacagcccccaaggcagctcgtgatgtgaatggttcagcaccgcagacagctcaagcctc

SEQ ID NO: 280249 - DNA, 122 bp, Homo sapiens
acagccaccctgcgcgacacccccctcacaggcccacagcaggctgcatcctgagctccccgccctagacagagacagattactcccggagcagtcccccaaacctcccacccgcccaggcc

SEQ ID NO: 280250 - DNA, 122 bp, Homo sapiens
ggagcccgggcttccggggggctaaggcgggcggcccgcggcctcaaccctctccgcctccgctccccctgggcactgccagcacccgagttcagttttgttttaatggacctggggtctcg

SEQ ID NO: 280251 - DNA, 122 bp, Homo sapiens
aggagcctgctgactgcgatgaggacgagctgggcgaaatcctggtaagaaccttgctcccgtccctcccatggaggccggccacgtgtgaggctgggaggaagagttctgcattctccggg

SEQ ID NO: 280252 - DNA, 122 bp, Homo sapiens
ccacattggacgcttcactccgcgaaccctctatctctccccgctataggatagctctcacgccaatcttggcttcagtgagccaatgagaatgggacgcccctcgtgaggttgccgcccat

SEQ ID NO: 280253 - DNA, 122 bp, Homo sapiens
cttgtctgtggagtgttggacgagcgttcccgctgtgcccagggttgccaccggcgaatgcgtcgtggggcaggaggagaggactcagccggtctacagggccagacgctaacaggcggccc

SEQ ID NO: 280254 - DNA, 122 bp, Homo sapiens
caaaaagcaaacagcgtgagccagtgattaactgtatgatcctgaggagtcacaggcatccgggacctttatttcagggcatggctgaggggtttcagttgttgactatcacaagcaggaaa

SEQ ID NO: 280255 - DNA, 122 bp, Homo sapiens
cggcggcggagaggtggctggaacgtctgtctgtcgctgtccattttactttgccgctcccgaactggctgccggagctggagtctccccactagcaaacagtctccaatcccagaaatatc

SEQ ID NO: 280256 - DNA, 122 bp, Homo sapiens
cccttccacccaatccagtcccctgtcaaagccaccaagcgccgccactgtggcaggctccgaggacacaacagagaaccagacagacaaggccttgcccgcatgaggcttccaagctcact

SEQ ID NO: 280257 - DNA, 122 bp, Homo sapiens
ggggcaggcggctggagcgggggtctccaaggtgggcctggagcccggcgggctctggggcgctgagctcatctcgccacgccctgcgcgcatccgcgcagaaatttgggaggtggggttga

SEQ ID NO: 280258 - DNA, 122 bp, Homo sapiens
cggagggaccggggcagaaactgaggggccactgagagctgtggggacacagcccacagccggactggtcctggtgcgccttggccccaccacttccccagcagagctgtcccctccacacc

SEQ ID NO: 280259 - DNA, 122 bp, Homo sapiens
ggtagatgaggagcttcggaaggctcacggaccctggcttctgtcctggcctgtgaccatcgggccctgtgacctcctgatcactttccactctctgagttcctcagatgagacacaaatgt

SEQ ID NO: 280260 - DNA, 122 bp, Homo sapiens
tcggataattacccctaaatggccacggcagccccttgtgtttcctggagattagaaccccgcagtcatcaatggcagggccgagtgagccgccaatcacctccgctcactccctgagagcc

SEQ ID NO: 280261 - DNA, 122 bp, Homo sapiens
gaccgcctggcttggtcgcagtcatggtgacatctagccccggttctgcgaggctgggcgcgccagccagcttgggagtcgcccggcgcctgtagctgggcgcccaggtggtggagcatgcc

SEQ ID NO: 280262 - DNA, 122 bp, Homo sapiens
gcgcccagatcccccggctgggtggggaggggcggccggacggggcgggccggaggctggcgtccccgccccgaaagcactgggcccgccgcgtcgcaccgtcctctttcctttccttctcc

SEQ ID NO: 280263 - DNA, 122 bp, Homo sapiens
agtggtttttgaactgtaaaatttcatgtctcctgtcagagtgagcatttgtaattcccacgtgtgtatatagacacacaaatacacacctgtgcacatacacacacacgcaaacacacaca

SEQ ID NO: 280264 - DNA, 122 bp, Homo sapiens
tcctctcgcaggtgctgtctggatgcggagtctacgatgggaccgagatccacgaggcctcggcgtaagtcctcaggggcagctggtcctccaccccgggggcctcgagaaggcctctccac

SEQ ID NO: 280265 - DNA, 122 bp, Homo sapiens
cgcggcggagtgggctgggggcgtgtcgtcgcggaggggagcggcgaaccaggcaggaggcggaagagaccgccccgtgggcggaagtgacgcaaggcctactgtcggctgggaggggaggt

SEQ ID NO: 280266 - DNA, 122 bp, Homo sapiens
gatgacatagtgtctcagctcccggaaacctgcatcgtgagctgtgagtatgatgctctccgggacaattcactgttgtacaagaaaaggctggaagacctgggagtgcccgtgacctggca

SEQ ID NO: 280267 - DNA, 122 bp, Homo sapiens
acgcggaggttgggctgagggctgcgggccgccggggagccctgggctggggaccctccccgcgccctggtcgcccctgcgccctcccgctctgcgctcggcagcccctacctggctccggc

SEQ ID NO: 280268 - DNA, 122 bp, Homo sapiens
ttttccctcatgtacaggataagacctgggatgaagtcttggaaacacatcacaaactcccgaccgatcaattagacctgaaaaagcagcaagaggccgtgtgggaacttttcacaagtgaa

SEQ ID NO: 280269 - DNA, 122 bp, Homo sapiens
ccatcttgaccgagggcagctttccactatttccgttccttctccataaggggccgccgtcgtcagtgagggtgaggcggagagacagagcgggaagggaaacaggatggggagagtcaaga

SEQ ID NO: 280270 - DNA, 122 bp, Homo sapiens
gctgcagcgcctcccctgcttttggctccgcaagtgcccacttgagtcgggagaggtcctcgggccgccccaactgcccgccccacctggcagtccgtccccgcccccgtcctcgcggtgag

SEQ ID NO: 280271 - DNA, 122 bp, Homo sapiens
caacccccagttattgttacagctccaaatgagcccacacaatgggctctaaagtcctcccggaaggatggtatctcctgggctctagcacctgttttctcaacattccagatggaaccctg

SEQ ID NO: 280272 - DNA, 122 bp, Homo sapiens
caatgcatcagagaacaaatgcttcctgctaaaaagcatcgttcagctccctgttgtagacggagccatcgcagcctgcgcctggatcacctcttgggccacggtcaagaagctcggcgccc

SEQ ID NO: 280273 - DNA, 122 bp, Homo sapiens
gctgcagggacttcctttttccactaggcggcaccacagccaaagtgataagaagtcaagcgtggggcgggtggctggagattgtctcttcccctccttttgctcaagaattcgtccattcc

SEQ ID NO: 280274 - DNA, 122 bp, Homo sapiens
tggggggcagcccctgcatccaacacttgccccctctctctccacccttcctaggtgtcacgtgggaacagagacctccaccttggtgcgcctccagcaacccaacctcagtgccttagtca

SEQ ID NO: 280275 - DNA, 122 bp, Homo sapiens
ggtgcagggaccgtggagtagcagctgggctctgcgaatgggtggaaagggcagagtcaccgcagggccagagttcaaccccaactatagcatgagaaagccaggcagtgagggaggggcgg

SEQ ID NO: 280276 - DNA, 122 bp, Homo sapiens
gcgcgtggggaggaggggacgggaagaggagaccctcccgtgccgaacctcccgccccgccggcccctcaggaggctctggagttggggactagagctctgccgctttaaggggggagtggg

SEQ ID NO: 280277 - DNA, 122 bp, Homo sapiens
aatccccgcgcggcttccccgcccatcgcctaatctcaccaatcgctgccctcctcgccccgtccgtcaccaggcgcctcatcccgccgaccactgtgcgcccagtccctgggacgcccaga

SEQ ID NO: 280278 - DNA, 122 bp, Homo sapiens
ttaaccaaagggacaaaacagagagccccagaaatagactatacacacatggaaaggaaacgtgacagggatggtattacacatcaataaaggaaaggcgggttatccaataaatcatgctg

SEQ ID NO: 280279 - DNA, 122 bp, Homo sapiens
gcacttttacttaaaagagcgactgacaaatcagtttttcagacttgggcatttgtcagacgttttctttaaaatgaataaagttaaggtgtcacttcaagggaaataaccctgagtatttg

SEQ ID NO: 280280 - DNA, 122 bp, Homo sapiens
cgcggaggcacagtaaggaaggcgacccgggaaggttaagtgccgtcactgcagatgtaacgtgcaaatgctcatcgcttgggaggcagtcaatttacctttccctgcggtgagcatttgta

SEQ ID NO: 280281 - DNA, 122 bp, Homo sapiens
gtgggtctctccccagcgacgatttgggtggtgagcgactgcgccttggcgtggggaaaccggcttacctgggggagttctgttcctttccctcccggcaccttggatgcgctgggactggt

SEQ ID NO: 280282 - DNA, 122 bp, Homo sapiens
acagtgccctatgggcttttctgtttgaaccccatgtgggatgaatctcaaagccaccagcgttcttgcctagtgtccagagcagcagagatttgcagccctcgcccctccctgagaagaag

SEQ ID NO: 280283 - DNA, 122 bp, Homo sapiens
tgttcctttcccgtgaattttgcccaatatgtttgcagagtcctccttccaaccaggcatcgctttgcatgtcagggaggtatgcttgtttggagagaggctgtttctaaagcagcgatacg

SEQ ID NO: 280284 - DNA, 122 bp, Homo sapiens
cctgagtcccgaggggtgaccaatctttcaggcagtgttaggggttaacccaacacacctcgaccccgcgaccccggaggcggattcccccgaggggatcctcggcccagccttcctggggg

SEQ ID NO: 280285 - DNA, 122 bp, Homo sapiens
gcctagctgcccttgccctctgtctgctggaggtgctgccattgatgctgaaactgcatccgggcaactgagcaggaaagttaggagtttatcttcctgctgctgcggctgaatgcatgact

SEQ ID NO: 280286 - DNA, 122 bp, Homo sapiens
actagagtttcctcggggaccccagatctgagtgcagcaccagggtttccttggggaccccgggtccgagtgcagcaccagggttttctcggggaccccgggtccgagtgccacactagagt

SEQ ID NO: 280287 - DNA, 122 bp, Homo sapiens
gagaggacgggctataagcatgtggagggtgcacggggtggcgaggccaccaccagggggcgatttcagggccgcagcgcctagaggtggggggtcgcccgatggccgaaggctgtgtgtga

SEQ ID NO: 280288 - DNA, 122 bp, Homo sapiens
acccacaccgtcgctgctttgctcagagggaccagggctggaggccgagctgagacaggccgggccggcttcctttccgctgcccgcctttctcctctctgcaccgcccagacccgtgcgtg

SEQ ID NO: 280289 - DNA, 122 bp, Homo sapiens
aagcgaggtagccgtgccttccagggctctgcttatacatctcgtgtgtgataagctgggcgctggcaagtgtttgcaggacttgtcttcccggtgttttacggctgtctgctgtggtttcc

SEQ ID NO: 280290 - DNA, 122 bp, Homo sapiens
tcatagaccctccatggctcctcattgcttctcacaggaaacataagacattctttctggcgtgcccattctattcttgtaccctagcagggtcccataactccaccatcacctcctttctc

SEQ ID NO: 280291 - DNA, 122 bp, Homo sapiens
caatgtgaggttccacctgctttccagcacattcttggtttcctcacttctgctagacaacgtttgatcagaaggaacagggaacgagaaggagctgctggatgacgataagcctgggaaag

SEQ ID NO: 280292 - DNA, 122 bp, Homo sapiens
tggcatgagaggaccatggagtagctcagtaacaatggaaggggctcggagggtggaaggcgggcgagggatgagagatcacctaatgagaacaatttacgctatcacagcgatgcctgcgc

SEQ ID NO: 280293 - DNA, 122 bp, Homo sapiens
gggtggccgtggaagctggacccgagccgcaggccccccaggctgggcctgggaggaaagcggtttgaaaaagatcggaactgaggaactctcttagagcgggggactccctgctcctacag

SEQ ID NO: 280294 - DNA, 122 bp, Homo sapiens
gggtgacagattctgagctcaggagaagctggtggctccatgcagagagttgtgcagactcggagctttgtcctaggtctgcctctgccctgctgtgtggcctcaggaccatcaaacctctc

SEQ ID NO: 280295 - DNA, 122 bp, Homo sapiens
actagaacttgaacatctcaaagtatgaacctaatctggagagctgtgtgtgcgtgtgtgcgtgtgtgtctggggagatacaccaaagggtttaagcaagaggtgttgtagacaggcttttg

SEQ ID NO: 280296 - DNA, 122 bp, Homo sapiens
acctcctgatccacccacctcagcgtcccgaagtgctgggattacaggtgtgagccaccgcgcctggcctgggctgggaatctttgttgacttctttgggaacattatctctagagtctgct

SEQ ID NO: 280297 - DNA, 122 bp, Homo sapiens
cgtgatccgcccgcctcggcctcccaaagtgctgggattacaggcgtgagccaccgcgcccggcctcacatgctggtttaatgtttgttcaagacccaaactgcagtggagttttgagggtt

SEQ ID NO: 280298 - DNA, 122 bp, Homo sapiens
gcctgggagcgttgcgcggggagtgctgaggcggagcagctgctccaggccttcctgggccgcgatgctgccgaggggccgcggccgctgctggtggtgcggcccgggcccaggggcctggc

SEQ ID NO: 280299 - DNA, 122 bp, Homo sapiens
caggccttgtgaagagccaaacagatgctcaggaggtcagagagagttctgattacaccacggaagaaactcgaggccaggcagccactttcctgagctccaacttcattcctgaaccgttc

SEQ ID NO: 280300 - DNA, 122 bp, Homo sapiens
ggaggcagaagccggaggccaggacactgcccccagcagcaggaagacgaagctgagtgtcgccatggccccgggcggccacgcacttccggcggccgcgccccgccccggaaccacgcccc

SEQ ID NO: 280301 - DNA, 122 bp, Homo sapiens
gccatttctccagggaaccctggttcctttcatgggagaatgatgtttacagaccatgggcgcccatatgcccattgctagtaggtgccggtgcttctatgccctctagtggtcagagctgg

SEQ ID NO: 280302 - DNA, 122 bp, Homo sapiens
gctggctggttgggatcaaggaggagctttcgggcagggcggggccagggcaggctggggcgagggctcctgctggtactgtgttcgctgctgcacagcaaggccctgccacccaccttcag

SEQ ID NO: 280303 - DNA, 122 bp, Homo sapiens
ttctacatctcgcatttgtcagctcttgccaaaacggtgacgcagtggtgtgttacctgccgacagcataaagcgaggcaaggtccagccgttccgcccggcatacaagcttatggagcagc

SEQ ID NO: 280304 - DNA, 122 bp, Homo sapiens
aagagttttttcaccaagcaggattgaggactcccggcattgtctctgaaaacattttcacgccattttatgtaaaaacaaaacaaaaataccttatgccacttgactttgcagtgcctgac

SEQ ID NO: 280305 - DNA, 122 bp, Homo sapiens
aaagcccaggagggaggatggcttgaggccaggagttcaaggccagcctgagcaacatagcgagatcttatttctacaaaagcaaaattaatcaggtgtggtggtgcacacctgtagtccca

SEQ ID NO: 280306 - DNA, 122 bp, Homo sapiens
cacatgcattcttaaggttcatctttacataacagcatctgtttcagatttcctttcttacgtgggttaaatatacctcctgcaaggatgtttataatgtcttacctctttttagcactttg

SEQ ID NO: 280307 - DNA, 122 bp, Homo sapiens
tcttaacagatacttagtgattgttttcaggaaagtttgaaagtcactgctctgagttcccgtgttctttgcaatgctgttttctttccttagaacactttgcaggccccagccctcagcag

SEQ ID NO: 280308 - DNA, 122 bp, Homo sapiens
gcgtgcggccactgcctggcgcagaggggctgccaggacctttgagaactgaggcacacccgggagatgatctggggactcgtcgctggagggaaggagccccagcaaacacagcccagtcc

SEQ ID NO: 280309 - DNA, 122 bp, Homo sapiens
gtaagccaagcatagaaaagcaaaaacataattgcatcttctggcactttctaggtttcccgagtctttcagccaaattgccctttataggtctgaagccccttgtaacatgctccatatct

SEQ ID NO: 280310 - DNA, 122 bp, Homo sapiens
agagcattaccgtgtgagctccgccccccgccagagcattaccgtgtgagctccgccccccgacagagcattaccgtgtgagctccgccctcccgtcagagcattaccgtgtgagctccgcc

SEQ ID NO: 280311 - DNA, 122 bp, Homo sapiens
cacccctccttccagggcccaggcttgaatgtgtcccctggccgagctctggtctagtcacgcagggttaatgattgttggactccagctttgagccagggcccggccagcagtctcgcaga

SEQ ID NO: 280312 - DNA, 122 bp, Homo sapiens
cccgggggcccaggagcgggtccttgctgggtgggaggcccgggtgtgtgggaatgcgcgcggctctgtaaacatctggtgactcaccgcatagctatgtcgtggccggcctgtgcactgac

SEQ ID NO: 280313 - DNA, 122 bp, Homo sapiens
gggaggggcctgtacctcagctgttcccatagctacttgccacaactgccaagcaagtttcgctgagtttgacacatggatccctgtggatcaactgccctaggactccgtttgcacccatg

SEQ ID NO: 280314 - DNA, 122 bp, Homo sapiens
cattcgccttcctttttgtgtgtgtccgggtgagttgcagacgtggctgcgtccactccgcgctccctgcaggccccaacgcttcatcgcagcgcccactttttccacctgacccggcgaac

SEQ ID NO: 280315 - DNA, 122 bp, Homo sapiens
acttcaaaatccggtgtgtactttacagtctccgcacacctccattcagggtttcaagggcgtaggagcctctggggcccgggctctgccccacggggttccggctctgcacccagccccgc

SEQ ID NO: 280316 - DNA, 122 bp, Homo sapiens
ccgccacagcacggccactgtcccttctggggcagggcatgagtctgtgcaaaagcagcgcggcaagtagctggagtttatagttacgcgggtggggtggggccggaggtcggcgtgaggcg

SEQ ID NO: 280317 - DNA, 122 bp, Homo sapiens
attaacaaacactgtgcccccaagcacggacagacacacacacgcatactcagatacctgcgacaccaaggatgaggtaccccaggaaccagccccagggatttcctgctgtggccatcacg

SEQ ID NO: 280318 - DNA, 122 bp, Homo sapiens
gcatccaaaaattttcatcttggggaggaggaaaaattgagacttactcccactgtttgccggaatgtgaccccaggctggcttcgagttgtcaaatgttgtatttctcattttatgtcagt

SEQ ID NO: 280319 - DNA, 122 bp, Homo sapiens
ctcctgcctcagcctctcaagtagctggaactagatacacacagcactgcacccggctaacgacagaagcattcttatgatacgatctcctctcggctcacttcatcttagtcctggaggtc

SEQ ID NO: 280320 - DNA, 122 bp, Homo sapiens
ctcagctggttgggggctggcccgagagcaccagcccttcctggtcgtcagcaccagaagcgcccccggttaggcactggggatgcggagtgggagcgcgcccctggagccgtccctgggac

SEQ ID NO: 280321 - DNA, 122 bp, Homo sapiens
tgccgcctgcctggaacggggctgctcatgcatcccccacgccctctgaagcccccccggcgcactccacgccctctcgcctgacccctgtttccgctgccggcgtctccacaccccctgac

SEQ ID NO: 280322 - DNA, 122 bp, Homo sapiens
cgtttttccggcgccaggcaccgcaggatatgttcgtgtcttgtgatttttgattctgcgcggtaggtggaattggaacggtgagtggagcgagtattgctggaatccgtttccacaccggg

SEQ ID NO: 280323 - DNA, 122 bp, Homo sapiens
gacgtagtgcataaaacatcactgtgttactgatgaggtaccagatgctccgcgtgcggccgtctggggtggacagcttcatttatggcagagccaaacaggagcccggatcttctgatccc

SEQ ID NO: 280324 - DNA, 122 bp, Homo sapiens
cctcctgtaccgcaggggggcagctaacagactgattcgagaagcgaccctgaaaaggatcgatgaagactgaagaatgagaccgaaaaaggctcaggaggaaggggcaaaacccctcgcag

SEQ ID NO: 280325 - DNA, 122 bp, Homo sapiens
ggcccagactgcagcctccggatgctggaagcccagactccctggggtcaccggctctcccgccaccccagctgcaaagagtcccattgcttcaccgtccggagcttagtctccttgttcct

SEQ ID NO: 280326 - DNA, 122 bp, Homo sapiens
ccaggtcagccacttggtgggattccagcctcagggtggctgagctgcaggtgcagcacccggcctccaggtggcaccaatccgcttactttgaggtgggctctgacaaccagctgagctgc

SEQ ID NO: 280327 - DNA, 122 bp, Homo sapiens
ggggcaggagtgggaccaagagcggggcatgtcccggggcctcaccatacaggctctgcacggccagcacgtcgtcccagctgagcagcgcgtcgcggcccagcctcttgtagtagggcgcc

SEQ ID NO: 280328 - DNA, 122 bp, Homo sapiens
tgaatgcatgagtgtagggatggagcgcgcggcgggcctggcaaggctgtcgggaccggacgctgtgattcagagattggggacagagtgcacagcgagcccgagatggctgtcggggacca

SEQ ID NO: 280329 - DNA, 122 bp, Homo sapiens
gaaaaattactttaaaaatcgccaaaaattacttggagcaaagggcagtaggcggagcttcgccaaggctggcgcagtcggttttgacctgtagcagagaaccaattctggagaacagcctc

SEQ ID NO: 280330 - DNA, 122 bp, Homo sapiens
cagtgctgagcgaggcattcttcagcctgtccttttctgcctctctctcctgttcctccccgtcagtcacagccaccgaggaacacttctaagcatctgaggagggaagctactgggaccaa

SEQ ID NO: 280331 - DNA, 122 bp, Homo sapiens
gagagtgtgaatcaggcatttgatacttctctcctctgagttgggttctagagagacagacgcaatactccatggtccttctgtgctttaaatacagccttatgatctgaggcttccctttc

SEQ ID NO: 280332 - DNA, 122 bp, Homo sapiens
atgatgtcaccccaaggccttcccattggctcgcgtcgctctcaggggggcgggcccgcccgtcaccatggagactccaccctagaagattcttctctgggcccgcggaggctcacgggatg

SEQ ID NO: 280333 - DNA, 122 bp, Homo sapiens
ggaggctgggagggagggcaggcgagtgatgccagacgcctgactggaggcggatccagccggccagctgcctctctggagcccagctcttgggccccctgcactcacctgctcttcctggg

SEQ ID NO: 280334 - DNA, 122 bp, Homo sapiens
tggaatagggccatggatatctaaagccatatgtggttctgtgtggctatggagtcattccgggagacattcacaggatgatttgggattaccactgctattgtaaaccatggaaattctgt

SEQ ID NO: 280335 - DNA, 122 bp, Homo sapiens
ctttcggcgaagctgaggcctggaacaacccggtgggaagccatggagggggtcccctagcggaggctgggcgcgggccagtgcgcgtgcgcggctggaggctcagcgcgcaagcgtgcgcg

SEQ ID NO: 280336 - DNA, 122 bp, Homo sapiens
aggccgagaaggtgcgggtctgggggaatagcggaaaaccacagaacgcggccgccactgcgccgctctggctacttttctctggcaccacaaacgccttcccgcgaatggcggagccagtc

SEQ ID NO: 280337 - DNA, 122 bp, Homo sapiens
gtggtcctccaggaaagcggggccgcctctccgctgtgctctcataggcccaggttcttgcgttcgtgtgtccttctctcactctgattggcctatattccccctgagggtgtggccaaatc

SEQ ID NO: 280338 - DNA, 122 bp, Homo sapiens
taatactctagcacagagcttatgaaattcatctttgcatccctggttgttgacagtgcccgctctcaacaactctcaaaagcttgttgaataaatagcactggacaacagtatgataagtt

SEQ ID NO: 280339 - DNA, 122 bp, Homo sapiens
gagccgcccccagcgctgcggaggagcagggcgcccctgagcctgacgcagcacccacctcgtggtgctgcttcccccaggaggagtctggatcctcagcactgtctgctcaccatcatggc

SEQ ID NO: 280340 - DNA, 122 bp, Homo sapiens
agattgaagatggacatttatttctcagttgtggaggctggaagtctaagccctagatttcgttcctggtgagagttttcttcccggcatgcacgtggctgccttcttgctgtgtcctcaca

SEQ ID NO: 280341 - DNA, 122 bp, Homo sapiens
ccctcaaaccagacatctggttgccttctcttaatctcccaaagatgggcttctcatacacgagagtgacacccccaggaggcatctgatgacacaaccccagcttggcactggatctgctg

SEQ ID NO: 280342 - DNA, 122 bp, Homo sapiens
gcggcgcaggacctgagcccagagaaacgacctggaaaggaagcttctcacagaatgcggcgcggacagcggctgccgagcaggggatctggaaagcactggcccctgagccccagcgcagc

SEQ ID NO: 280343 - DNA, 122 bp, Homo sapiens
gaatacttcacttaaaaatcttgaaaagtcatgagcccagactctagatgctgatcactgcggttcaaatcctggcttcatcacttattaggtgagtgatcgtgagaagatcgttctgtgcc

SEQ ID NO: 280344 - DNA, 122 bp, Homo sapiens
gctcggcattcgaggccctccacaattagggctcgatgtgcattccctctgtcatccacacgttcaaccgacaggtttctgggcaaggaattcatgaaggtgaatctcccagaagagcacag

SEQ ID NO: 280345 - DNA, 122 bp, Homo sapiens
ccacccagttcgagcttccccatccactttgtttacctactcaagcccagcaatggcagacgcctgagggaggcatcttaaccccatttcacagattaggaaaccagggctaagttttcatg

SEQ ID NO: 280346 - DNA, 122 bp, Homo sapiens
ctggggatccacctcccgccagggtgagggcgccgtcctccagcgtatgctaggcaggcgcgccccgccctcctggtcacgtgaccacgcctacagccgaagaggatgggaaaatgcggccc

SEQ ID NO: 280347 - DNA, 122 bp, Homo sapiens
gtcacctgcttccccagacaggctctgcttgcggtcttaaaggtgagcatttttctgatccgtcgtaacaaagttgagccatattactgacacccctagtggctactagtaaggtactcgct

SEQ ID NO: 280348 - DNA, 122 bp, Homo sapiens
ggctctgcagtgcctgaggccagaatctggctggggagcggcctcgggcttaggccatggcgagggagcgcccgcggccaccggggccggcgccaccccggaacccggcgggccgctcagcc

SEQ ID NO: 280349 - DNA, 122 bp, Homo sapiens
ctcggaaccagaaagtctccctcagcagaggtactgtgtcagtgcccaattgaatgaagccgcttcagtgagggtaggggcctgttgatcagcaaacagctaacttagcccttctccctgca

SEQ ID NO: 280350 - DNA, 122 bp, Homo sapiens
gaagaagaaagctttcatggttggggacaggaccgtgggggtgggcagagcagcttaccccgctcctccatggtgttctcggtaggggatacctgcctgcttggagggctctggcatgggaa

SEQ ID NO: 280351 - DNA, 122 bp, Homo sapiens
ggaggagggcagcagtagtagtagtggtctccttccttaagatgatcctgcccccacttccgcccccggctcacctatacctctctcctcccctcctcacaatctggatctaagaatctaca

SEQ ID NO: 280352 - DNA, 122 bp, Homo sapiens
aactggggatgccaatgccagcccccactcccggatgaggtacctggtgtacagatggctcggccactctgctgaccgtgcccccgacatcattgttccccggggttttccctctaagctcc

SEQ ID NO: 280353 - DNA, 122 bp, Homo sapiens
cccttccttttctgcagatcctctgcttaggaatggggcattggcccccgcaggagtgggcggggaaggggcggagcgaacagaggtgggcggctcccgtcctatgacgtcagccgtaaggc

SEQ ID NO: 280354 - DNA, 122 bp, Homo sapiens
ggacaaccgctttgctgtggccttggactcagagcagaacaacatccatgtgaaagacatcgttaaggtcattgatggcccccactcagtgagtacaagttcctgcttttgagctgcatctg

SEQ ID NO: 280355 - DNA, 122 bp, Homo sapiens
aatctcaagtgaatcagtggttgaaccaggaccagatcccagtgccccatcttctggggacgtcctgggtctgaatcttcaatgcatgtcccttctgcagtgccttcctctgtggccctcaa

SEQ ID NO: 280356 - DNA, 122 bp, Homo sapiens
ggggccgaaagcaagctgggtgcgaggagccagccgaccctgccacactcaagatggcggcgcggccgcggcgaggtccctcagaggcggtaccagcgcatgcgcagcgcggagtcccggcc

SEQ ID NO: 280357 - DNA, 122 bp, Homo sapiens
ctctacctgacagcaggaaaatctgatgagacccgatcgcatccaggcaggccgtgttctcgcagcccgcgggttaacacagactccgagtgactccgacgcaggagaacgcggcgaatctg

SEQ ID NO: 280358 - DNA, 122 bp, Homo sapiens
gggagaaagcggagagtcaccctggagcccaggagctgcctcaacctcagcccagtgcagcgtccgggacagcagagcgaggagctgcctcagcctcagcccagtgcggcgtcctcggagca

SEQ ID NO: 280359 - DNA, 122 bp, Homo sapiens
ttcctcaaagttcattgcgaggggtttcagttccgcccggcagcatccctcagggttctgcgcgctcccgtggcaccgtctgcgcccgagctccggtcccgtcccgattgcctgatgccccg

SEQ ID NO: 280360 - DNA, 122 bp, Homo sapiens
tggcaaccggtctcggaactacatctcccgtcatgttccgctcgggggcggagaaagaggcgaggccccgccccaaggactaccaataaatgggcgaagttggaatcgcccggatgggttcc

SEQ ID NO: 280361 - DNA, 122 bp, Homo sapiens
gacatatagggtgcaggggccaggagtcagggactagccccggcagagagaaggggaaagcgccaagaccccaggcacaggcttcagaaacacccctactggaccatctatccacatcagtg

SEQ ID NO: 280362 - DNA, 122 bp, Homo sapiens
gccgtctggtgttgccagggatctgactaaaccgtcttgcaaaagtttgcagcattcacccgaggcggactacaactcccagaattccgggcgctccccggtgctgattggcggagcccgtg

SEQ ID NO: 280363 - DNA, 122 bp, Homo sapiens
cagtcccataactattccccttatttttattcagccctgggctatttttcttttctttgccggttcctcatgctcacacatttgtaattattcattccactttccccttccttttaatccag

SEQ ID NO: 280364 - DNA, 122 bp, Homo sapiens
agactctcaggtggaggcaacagggccatgtgctgccctgttgccgagcccagctgtgggcggctcctggtgctaacaacaaagttccacttccaggtctgcctggttccctccccaaggcc

SEQ ID NO: 280365 - DNA, 122 bp, Homo sapiens
ggacgtgaagctggaaccgcgaaatgagttagttgtgggccgctggcctcaaggagcgaacgtcagcgcgaagaggagaagcttgtgcatacgctctgataagggttttaatagaggtatta

SEQ ID NO: 280366 - DNA, 122 bp, Homo sapiens
tcaacaaccagccagcacctcacgactgccagagccagagcctccatccacgagccacaacgccccactcagacccccccagtctcgtattgggacttacctggcgatgccacttggcagac

SEQ ID NO: 280367 - DNA, 122 bp, Homo sapiens
aacgtccagagactcaatcctctggcattctcaggttcaaggttggaaaacgcattaagacgagagccacacagtcagcagaatctgcgccattagctttctcgtacttaaacgtctgtcta

SEQ ID NO: 280368 - DNA, 122 bp, Homo sapiens
ccaggggtgagcgtctcctgtcccatggcctgaggagcggcagttctcacctgggtccggcggaccgggatcaagttctaccacctcgataatctcttcatcaccatggaagcttagggtct

SEQ ID NO: 280369 - DNA, 122 bp, Homo sapiens
ggtcaataggcccccacagcacccaacacagtgcctggggcctgactggcttggaagacacggctgctgaattaaatcaactacgttctgtgaggctccaagaggtgtcttggaaggagggg

SEQ ID NO: 280370 - DNA, 122 bp, Homo sapiens
cagtccacccagggtgcagtgcagaggctgatacccgccaggacttccttgccaagggcccggccacgtcacaaggccactgcacgcttttcgacatgcacctggaaatcgggaagggccat

SEQ ID NO: 280371 - DNA, 122 bp, Homo sapiens
aatccaatcaggttctccttctttactacttgatgacttctttaaagataaataagcccgcggaccaagaagtgggtacactggctcggttaactctctctccccagaaatttcactactga

SEQ ID NO: 280372 - DNA, 122 bp, Homo sapiens
gggcggggcgcaccggcgtcccggctgggcgtgacgggcgagaccccagcccggtcgcggcgtctgaggttgcaatctcgtctggggcactctcgcgcctcgcccctacccgacttcttttc

SEQ ID NO: 280373 - DNA, 122 bp, Homo sapiens
tgccaactccatcccccagggattgtgaagggggttccttctggctgtgacagtgctgaacgaggccagagagtgcagctgcctggaggcacaagcctcctcctgatccagggggctccagg

SEQ ID NO: 280374 - DNA, 122 bp, Homo sapiens
tggcgtcagggaggctgggggcctgagaaggcccggactgagggccctgcctgcacgttgcgctctgctgtctcggagagcaggccagccagaggcagccgggctgcccggaatgtggtgtc

SEQ ID NO: 280375 - DNA, 122 bp, Homo sapiens
cggcgccggcgccggcgggcgcgggtgcctgtcagggaggcgggtcggataggagtgacacggggccgggtgggtggggagcacctggtcctggccgctggcccgcgcctccccgatctctg

SEQ ID NO: 280376 - DNA, 122 bp, Homo sapiens
ctttcaatctgcagccgctccttctctagctgaagccgctcatgttccatgtctaaatgccgcagcctctctttctcgatttgtaggcgttccttttctacctgcagcctttcggcctcgat

SEQ ID NO: 280377 - DNA, 122 bp, Homo sapiens
atcttggtttcgagtgaagtgacggctgagccaagagcttgctttcagctttagtatttccgcaatgaaaagacaagagaaagctctgtgctctcccagggcgtccgctgggtgggagcctg

SEQ ID NO: 280378 - DNA, 122 bp, Homo sapiens
ttcgcaatttatcacgcgcatatgtatgtgtatgcataaacagatataattttgtttgctcgcttatttggttcgtcgcctcactagattccggactgtgggctccaggaatgcagacagtg

SEQ ID NO: 280379 - DNA, 122 bp, Homo sapiens
tgcagcacacatgtgttatccacactgaaattaggaattcaacagaagtccatgtagagccgaaaatgtgaatatttggggacctcggagatgatctagctcactttattttgtagaaaaga

SEQ ID NO: 280380 - DNA, 122 bp, Homo sapiens
cagctgaggaacactgctttagaactgttttagatttcccatttggtgtgtccagtatcacgggtcctcttggccatagggagttaacatgtggataatggaattatgctttggaagccatg

SEQ ID NO: 280381 - DNA, 122 bp, Homo sapiens
ttcaagaatgaagccgtggaccctcgcggtgagcgttacagttcttaaaggcagcatgtccggagtttgttccttctgatgttcggatgcgttcagagtttcttccttctggtgggttggtg

SEQ ID NO: 280382 - DNA, 122 bp, Homo sapiens
actctcgccacagacccggttaacttgagcaccgccaattgcccgagtctcttaatttcccgcgttaacccctccccgctcccatctccgccgaagctctgcgcgtccccagggagcccgaa

SEQ ID NO: 280383 - DNA, 122 bp, Homo sapiens
cggggcctactacctaggggagagggggcgtggacacgctgaggctatactacaaagccccgggcttgaccttagtggaaagccgagactgcgtccaggttgctggactacaccgggggcac

SEQ ID NO: 280384 - DNA, 122 bp, Homo sapiens
tggccggggccctttcagagtccctctcccggtagattttgtagagccgggggcctaggacgcagctcagcagcttcgccatggccccggctcgggccgctgctcttccagcagcaggtccc

SEQ ID NO: 280385 - DNA, 122 bp, Homo sapiens
gcccctccgcctggcaaccgccccgtctgagaagtgaggagcccctccgcccagcagccgcgccatctgagaagtgagaagcccctccgcccagcagccaccccgtctgggaagtgaggagc

SEQ ID NO: 280386 - DNA, 122 bp, Homo sapiens
cgtccgcgggccgtctccgggttgggtaccggtataatccgcttctagcttgtttggaggcgtgggctcttgggagcgggacttctgctcaaatcctgtccaggggcttgaaaaggaggaga

SEQ ID NO: 280387 - DNA, 122 bp, Homo sapiens
gcagcggtgcccatcccagggcgagtgcagaggctgcgcgcggccaccacacagtgcttccgcccactcttttgctagtgaaattctctgggagtaggtgcggcccctccctgccagcagga

SEQ ID NO: 280388 - DNA, 122 bp, Homo sapiens
taaataaatagaagtacaatgtatggaatgcaccatgagccagcactatgctcagtacttcgggtgcacaatctcatctcaccttctcgacagcccctgcttagacaggcagcaggaggaag

SEQ ID NO: 280389 - DNA, 122 bp, Homo sapiens
tctgactctttacagaaaaagtttgtggacccttgaaatggacactcatatttccattttcggggtcaggaaactgtggcacacagaggttatgaaatatgcctatacttgcaaggcccatc

SEQ ID NO: 280390 - DNA, 122 bp, Homo sapiens
caggctgaagctggaatactgccctgtccctgacacctgctggggtgttctggcggggcccggaaacggaagccctctcctggctttgttgggtttcctggggaaggcggagctggtccacg

SEQ ID NO: 280391 - DNA, 122 bp, Homo sapiens
tgcccaagggctgaggagtgccggcgcaagcaccacgggactggcaggcagctccgcctgcggcccgggtccaggaccactgagtgaagccagctgggctcctgggtctagtggggatttgt

SEQ ID NO: 280392 - DNA, 122 bp, Homo sapiens
tgccaggagcagtaccaccccgtcctcagcccagtccccaagagtcaaaattcatgatgacgaactttgaatgtgaagatgtaaataaatcctggctcggcaaccctgcctgtgacgcgact

SEQ ID NO: 280393 - DNA, 122 bp, Homo sapiens
cagatcaaaatgtttaggggcatctgggggtgtcatgagaagagccccagatgggacacccgttcttccttgtgacattagggaatttggtacagctttctggatcagtttttgcctttaag

SEQ ID NO: 280394 - DNA, 122 bp, Homo sapiens
ctgatcagcctctgtgaatgtgtacaggacagacccgaagacagctgggtataccatagccgacgtgtagaagcccagccaggcgaagtacatggcaattttcacaccaaagtaatcacaga

SEQ ID NO: 280395 - DNA, 122 bp, Homo sapiens
ttccttagtgacacaggtgtaaacccggcatttcaggagatagccggctaagaatctggtcggggaggtgggcggcccttgacatggatctgtcataaattagtggcttgagactttgggaa

SEQ ID NO: 280396 - DNA, 122 bp, Homo sapiens
ttggggggcggggtggggaggggaggtggcctttgttctcctgatggagggggtcgggcgcgggatctactggaggatcctggattcgtttacccaagagggaacagttttgagaccccccg

SEQ ID NO: 280397 - DNA, 122 bp, Homo sapiens
ccgcccccgctcccactctcaccccagtccccccgcgttccccgcaaccccttggggctccgtggttgctggtgtctcctggtttccaggcaccacagcgctccccttgtccagacaccggc

SEQ ID NO: 280398 - DNA, 122 bp, Homo sapiens
ccgaagctgagcaggctgaccagggagaagccagtgagggtgtgcatcgccaagccggcccgcgcgtcccggcgcgccgggctcctggggcctcaccacctcgcgcgcccagggcgcaccac

SEQ ID NO: 280399 - DNA, 122 bp, Homo sapiens
gaacctcagccctgaggtcctgtaatgaggggcagtgaggacccccttcagaaagcagagcgggcattcctggggctggcctgcattcttgctgaggtccagctgccccctaattcttatag

SEQ ID NO: 280400 - DNA, 122 bp, Homo sapiens
tcgtaaacattgtgttttatgtggaaactaatttggggaacccccagtcaatggccctcacgtgccaacttggctgcatacccctgttccaagaccacgtgcacagcttggcattgctggag

SEQ ID NO: 280401 - DNA, 122 bp, Homo sapiens
aggtacttcacaggatggggacggaggaacgggtgcaggaagcacagacatcaggctccccggcccttgggggtatgctgcaagcattcacttcccagcctgcacctgcccttcctgctgct

SEQ ID NO: 280402 - DNA, 122 bp, Homo sapiens
tgcacacccaaaaaactggggcaagtaaaactgaagagcctacaaacctgcccggactttcggtgcttctcactttcctctcctatctcccagagcaagggtctacaccctttccaccctcc

SEQ ID NO: 280403 - DNA, 122 bp, Homo sapiens
tgtggctggccaggcagggcggggatggaggaccggccccgcctctgctctcttggtgggcggggaggggagggccccaagggagagcggagcagtgtccggtcggtgctcttccaaggttc

SEQ ID NO: 280404 - DNA, 122 bp, Homo sapiens
gagatccaacaactctctcctggggtctggatcaggacccctttcctgtagcaaccctatcgctcttctccacggcacgttcacctcacattcctagagctttaggatttactctgagggtt

SEQ ID NO: 280405 - DNA, 122 bp, Homo sapiens
ttttgcattctggattcctgcagacttaacaatacatggaagccagcaagtcccatgcctcgtgctctgcagggcagctgtccaagcggtatctgaggccattgggaccatggctggatctg

SEQ ID NO: 280406 - DNA, 122 bp, Homo sapiens
tgtggctttttgtcattcatttcctcctctcgtgcaggaatctcagaccattgctggaatcgatgttgcattctgggacttaggctctctgcctgtacaagctgtgaagccccatccacctc

SEQ ID NO: 280407 - DNA, 122 bp, Homo sapiens
ctgggacatctttagtctgcaagggaagctccggcagtgagaaggaccccaggtccaggtcgtcctcggagccggcgaaggcgtctgcccagggcatcggctccacctggcggagggtagac

SEQ ID NO: 280408 - DNA, 122 bp, Homo sapiens
actctaagcccaggctccctttgacaagtctggccgggtgagagcttctgcctgcagcatcgggcacaaagtagaagcagggtagcagtgaggagaggcgtcccccgatggaagcacagctc

SEQ ID NO: 280409 - DNA, 122 bp, Homo sapiens
tcgatttcggatccagttttccagttatagccacgttggcacctcttgaacctctgtggccgttagcacggttttctgcccgcgtgcccgagaaaccaacggattagaaggacttttaaaga

SEQ ID NO: 280410 - DNA, 122 bp, Homo sapiens
cgcaagagcacaggaagtagggaacgtgctttgggcgaaagaccggaagttggtttatcacgtgaccatttttagcccctgtaaaccaggtcgccgccatttttgtgcgtgtgttccgtaat

SEQ ID NO: 280411 - DNA, 122 bp, Homo sapiens
ctcggggcttgtaggatgcccagggagcccaaagcccctctggcagtaaccacagctggccggagcaagcggtgacggcaggcctgccccaggtgcacacggggacactgtctgatgtacgt

SEQ ID NO: 280412 - DNA, 122 bp, Homo sapiens
ttttatacattctagggagatatgagacatcaatcaacatatgtaaaatgaacattggttcggtccagaaaggcaggacaactcaaagtgaaagtgggacaactcaaagcggggagggggct

SEQ ID NO: 280413 - DNA, 122 bp, Homo sapiens
caaggttgtgtactgggcaggcactctgccagctcgccagcctgttctgtccaatcctggcgtcttggagctggggtggaagaatttttcctgaaggaaagcagccaacaccctgtcccacc

SEQ ID NO: 280414 - DNA, 122 bp, Homo sapiens
aacccaccccccccgcccaaaataagtttctttaagaaaaaaaggaaaagggaaaaaatgcgaaatagaaaaaaatgatcttctgtgctttgcttcaatgaaaatgaaatttgagctctgag

SEQ ID NO: 280415 - DNA, 122 bp, Homo sapiens
cagcacccggcctggcacacagcgggcacccggtcggggggcggtgtcgcgcagtcccagcgaaaaggctgcaggagcaatgacaacaggggcggaagccccctccccacgcagcccgaggg

SEQ ID NO: 280416 - DNA, 122 bp, Homo sapiens
taggctggggggcggggggtggtggaagagggcagatgctgtttaatgggggcgggggtccgttttgcaaggtgaaaggttctagagatctgctgcataactgggtacggccatgaacacaa

SEQ ID NO: 280417 - DNA, 122 bp, Homo sapiens
atatcgaaagtcccgtgctgggcctgggatctcccgctgcaggtcaccctctcggacggccgctcgacaaccacctatcggggtttataagggagccgtcctgcctggccgccccccagaga

SEQ ID NO: 280418 - DNA, 122 bp, Homo sapiens
catcagtttctgactgaagtggagactacaacaactttagtgtttcccttagaaggattacggccatggtgaacttgactgagtaaacaatgctataaataaaaagctcttccaaaacatta

SEQ ID NO: 280419 - DNA, 122 bp, Homo sapiens
cagcctctttcccagctacaactttcttggcaggacaattttccatgatcacagccaagccgtcttccccaggggagcacagtgctgggaatggaggctgcctgggtcccctggggctgaac

SEQ ID NO: 280420 - DNA, 122 bp, Homo sapiens
ctagagccttgctgtgcaaacctttggtccaaggaagcaacagcatcaatcttctgggtgcgctttggaaatgcagatgctcaggcctaccccagacctcctgagtcagaatctgcatctta

SEQ ID NO: 280421 - DNA, 122 bp, Homo sapiens
agcaaggaaatgggaaaggcgaaaagtcctagaacaaagccatcttttgcgtctcaacaccgagaacagaagcgtggggggccgacagcgaagggcctaacgtccaagcactcacctgcgcg

SEQ ID NO: 280422 - DNA, 122 bp, Homo sapiens
tgacgaccgggctcctagaagctgcagtcaaggacctggttgccatggtttccgcttctccgcctccagccccgcccgcgctccccgcggcgtcggcgcctgcgcagtgcgtggcgcgccgg

SEQ ID NO: 280423 - DNA, 122 bp, Homo sapiens
acctgctggttttgtggctcaggcaggcatcacggtcctaccgatatgtgatgtcacccccggcggcccagctgtaacattcctctctttgtactctttctctatttctcagaccagccgac

SEQ ID NO: 280424 - DNA, 122 bp, Homo sapiens
cgggatccgaggctggcgggttttggcagtagctgtggctgcggctgccgggcctggggacgcgggcggccgaggccgccgtcgcagcctcctcgtctcgccggctatggctgcgctcggcc

SEQ ID NO: 280425 - DNA, 122 bp, Homo sapiens
gcagtgagaccgtggctgctgagatctcagggggcagtcccacctcccacccactaagggcggagaaccggaggtggaccccaggtcctgcatcctggactggggatctggttcacgtcctg

SEQ ID NO: 280426 - DNA, 122 bp, Homo sapiens
ccaggctctggaggagcctgtgtagttcctggagcttcccctgacactcagagagctctgcggggaaaaagaacaagaacaagaacaccattcattttttttttgagacggagttttgctct

SEQ ID NO: 280427 - DNA, 122 bp, Homo sapiens
caagcaatcagccgggggtcattgttaggggctaatctacgtgtgtatttcccaagaactcgattagggaagatgaatggactgggccatgtccctaattcttctagcatgaagctgcattt

SEQ ID NO: 280428 - DNA, 122 bp, Homo sapiens
tggggggtccctgtttcatgcccacagagcaccttaggcccacggtggccagcccaaggccgcaggaaggcttgaaagaggaagttgaggcacatgtgttgtggaaggaaaacacaaacggc

SEQ ID NO: 280429 - DNA, 122 bp, Homo sapiens
gccgcggccccccggatgagggtatatattcggagcgagcgcgggacgccgatgagtggccgcgcggaaggagctggagacggtcgtagctgcggtcgcgccgagaaaggtgaggggctccc

SEQ ID NO: 280430 - DNA, 122 bp, Homo sapiens
gagagcggttctcagttcccgttgtctttcccgccgcgcagcgcttccgcctacagcctccgcccccgcagcaggagggggaagcaggtggcttcaacaatgaaggaccagagaaaggcaaa

SEQ ID NO: 280431 - DNA, 122 bp, Homo sapiens
tctgagatttcgttttcccatcgaatttggggggctctgagataatggcagcatctctcacggtgacggcggcctcaggtcacggctgtggtggagtctaacagtgggggctctcttctcat

SEQ ID NO: 280432 - DNA, 122 bp, Homo sapiens
gccagaaactttccccgctttgtcgccagtgccacagagagtcgtgtggctctgggccggcgctgctggtccaagaggcagcctggcgtcttctgcccctaccgtccccttctcaggccagt

SEQ ID NO: 280433 - DNA, 122 bp, Homo sapiens
aaatgcaaggcccacttgagctgcttggcagctaacaccaactccaaactggtcgggccacgtgtttctctctccctccctcagagccccatgccttccctaacccagctgcagagcaacag

SEQ ID NO: 280434 - DNA, 122 bp, Homo sapiens
agcgcgcgactacccggccaggatctctgcgctggcggcagagactgcaacctgcagctgcggaagcttcaagtctcgcaacaggttattccagtttggatttaagcaaaggcctcaggata

SEQ ID NO: 280435 - DNA, 122 bp, Homo sapiens
gccacgcggaggtgcagctgcacctcggggatggggcggccaaggagccgagaggctcggcgtccaccagccggggctccctactcacgctgcactgcgaggaggcggcggcggcagcgaag

SEQ ID NO: 280436 - DNA, 122 bp, Homo sapiens
cgaggacacgcagggcatccagggacggccacctgtgtctgagtactgcgcgcctgtccacggatgggtaattttgtaatgaatggggatatcttagggctaacgcttggtcagggatgttc

SEQ ID NO: 280437 - DNA, 122 bp, Homo sapiens
ttcggctgagaacagggctgctcaaagtgcattccctgggccagggccagcctgtgaggacgcaagcacagaaactaagagaaagtgtttagaaaatcttagggaaatttggcagagtcatg

SEQ ID NO: 280438 - DNA, 122 bp, Homo sapiens
agtgacagatcatcccactttgctctctggatgcacagcagatttgcatgggcgctggcacgcatgcgcagggcgtcccccctccccttttcaccgcctcccgctcccccgcccccttcgcc

SEQ ID NO: 280439 - DNA, 122 bp, Homo sapiens
ctggccagtccgctgcaaatcctacccgaagggtcccgcgcccacccaaactgtccactgcgctgcaaatcctacccaaagggtcctgtgcccactcaaactggccagtccactgcaaatcc

SEQ ID NO: 280440 - DNA, 122 bp, Homo sapiens
cagcggttttgtggattaggtagtgtaaccccgcaggagggaccctttagtattcccttccgggaaaaggcacactttaggtcttctcggatgtgacactgtctgttacactctacaccgaa

SEQ ID NO: 280441 - DNA, 122 bp, Homo sapiens
agcagtgtggctgaggaattaggagggcttcacagaagaggtgacattctagctgggcgccgacattttctatttcaaaagatggggtatcttcgggagagaaaaccaatagcaaaggcatg

SEQ ID NO: 280442 - DNA, 122 bp, Homo sapiens
cgcagaagctctgaattaaaagcgtgcatgtagctgcacatccattgctggcacttcttccgttagcctccgctggaactggttagtgaggacccctccatttcacaagacagcttcggttt

SEQ ID NO: 280443 - DNA, 122 bp, Homo sapiens
agggcccagcagcaccagcgcccaggcgggcagacgggggtccatggtggtgggtggcgccggggccaagcggggaccccctttataggcgcctgggccgtcccagctgggggccttggaga

SEQ ID NO: 280444 - DNA, 122 bp, Homo sapiens
ccactgacgggcactccatgttatatgcccagagtcctcgccctgaggagctgccggggccgcgctgaccacactccacgttatgggcccagagtccgcgctctgaggagctgccggggccg

SEQ ID NO: 280445 - DNA, 122 bp, Homo sapiens
tctgcttgcatgagagagatcaaagagggtcctgcaaatcatgagctccaaaggagatttcggaacaggctacagcatcacatgcattccagcccgcatcctgtccaattagcagatgaaag

SEQ ID NO: 280446 - DNA, 122 bp, Homo sapiens
cagcggggaagaacagccgagcagaccaaacagccggggccgcgggtgggaggctgttcccgcagctcgtggctggcgttggagaatgtggagattttcccattcataaaaggaacgtctcc

SEQ ID NO: 280447 - DNA, 122 bp, Homo sapiens
aggcgggtgcgcggcgccagccagcggaggttgccatggtttccgggggtcacgtgggcgcgctctcctgcgccccctcccgcgcaccgcggcggggcgggggcggggcgcccgggcggggg

SEQ ID NO: 280448 - DNA, 122 bp, Homo sapiens
ccgccgcctcagccgccgccgcccccaataatggccagaataaaagtttggcggcggcggcgcccaatggcaacagcagcagcaactcctgggaggaaggcagctcgggctcgtccagcgac

SEQ ID NO: 280449 - DNA, 122 bp, Homo sapiens
tggcactcaccaccctccgtgcactggggggtttattcttccaccaggtcattcattcgacgtgaatgcctcataattgcagttgccaggaggggatttttccccttttgactgtttcgggg

SEQ ID NO: 280450 - DNA, 122 bp, Homo sapiens
gtgcacttgttctcttcctgtcattcttccccacttaatcattatgagaggtcactctgacgtgacagttcccagcgcaagccaagttttttactgttccctaaaccactgtcttttgttac

SEQ ID NO: 280451 - DNA, 122 bp, Homo sapiens
gtaacagattataaccccttgaataaaattagaatctatgagttgatgtagatataagcacgtgaatgcaaagtttggtgaagaatgtgaactatcaaagtacctgcccatataatactcat

SEQ ID NO: 280452 - DNA, 122 bp, Homo sapiens
ctggtgctaactggctacatatgcagggccttggtttccccaaaggtcaccaagggagagcgcggcccctgtaggaaacagccccaggcacgcgtgcacaggcgccgagaccgagggagagc

SEQ ID NO: 280453 - DNA, 122 bp, Homo sapiens
tcagtgtaaaggaaggtgaagaatgccagggcctcatgaaggagggtgcgtgcagtgcagcgtgaacatttcaaggaaacttggtccagcctgagggtcaggaaatgaccttccaagaaata

SEQ ID NO: 280454 - DNA, 122 bp, Homo sapiens
ctgcagggcgtattcccggagggcagttggggagcgcagatcccgaagcagcgctgggagcgtaagtgcgggcagagcactgcgccgtttgggaacgcaactttgaggagacagtgcggtgg

SEQ ID NO: 280455 - DNA, 122 bp, Homo sapiens
ccgggaggtggaggcggagggagggcgcgagcggcccggccgggaggtgcggaagttcgccgcagcagctcattggcgggcagcgccgctttcatcatttctcggaaaagtcaatttcattt

SEQ ID NO: 280456 - DNA, 122 bp, Homo sapiens
ttccccgcaccctcagggcgagggaagacttccctggctcaccaacttgctgccgcccagcgcctttctcagggcatggccccagtcaggtaatgcttgtatgtgaaactgggtattggggg

SEQ ID NO: 280457 - DNA, 122 bp, Homo sapiens
gtcccgggccacgcagaggggccagcaattccatgggtggtggggccctccatccctggacgcagcggggagcagcgggcggccctctctcctgcccacttctcctgggggtgggggagccc

SEQ ID NO: 280458 - DNA, 122 bp, Homo sapiens
gccatttttaagagctataacgctcactgtgcaggtctgcagcttcacttctgaaaccagcgagaccacgaacccaccaggaggaatgagcaactttggttgcgctacctttaagagccgga

SEQ ID NO: 280459 - DNA, 122 bp, Homo sapiens
ccgtgcaccttcatgtgcttacgcagcgagctggggtgcgtgtagcacttgtcgcagccccgcaccttgcacgtgtatggcttgtcgctagtgtgcacgtgcgaatgcttcttacggtcgct

SEQ ID NO: 280460 - DNA, 122 bp, Homo sapiens
cctccacggccactcctgcccgtcagaagtcagacgccgggaacaaaagccaggcgcgagcgcacggtcccgcacggcgtccctccatctgacacgaattagccctccctcccccgcccgcc

SEQ ID NO: 280461 - DNA, 122 bp, Homo sapiens
ttatttcttacgcaactccaggtcgcagtcacagctttccgaagattacacacttccagccgctcagccctgctggagcaggagggcctggctctgccagagttgtgtatgcctctcatagc

SEQ ID NO: 280462 - DNA, 122 bp, Homo sapiens
ggttcagaagaggcgaggagggagcacagtacccaaagatgggccagtgagacctcagaacgctgaagaagaaaaaagaggcttaggtaagggccagagttggtgataaatttgggcaaggg

SEQ ID NO: 280463 - DNA, 122 bp, Homo sapiens
cgatgttgtcgccggcataggagtaaatcctccactggggcagggcagtgctgacgatggcgccgatccatcccaggaaggcgagaatgaagcccaacagctgcagccccgcgttggccatg

SEQ ID NO: 280464 - DNA, 122 bp, Homo sapiens
acgcctggcctggtctgtgggtggcaggtgatcgatggccttggacttggagcccagacccgacggtgtcgagaggatctgaggagagtctcccctccccataccctctccgcctcccaccc

SEQ ID NO: 280465 - DNA, 122 bp, Homo sapiens
gctcgctcagcaacttgggctttgctgtgctgctttttcgcccctccgagcttttcattccgcgctcctcccgcctccctccctctcttcctcctccctcctcctcgcgtctcctcgttcgg

SEQ ID NO: 280466 - DNA, 122 bp, Homo sapiens
gtgccttgtcggtccacatctcagccagtcctcccagccagagctgaggtatttctatgtcgagttgttaaaacctgacctgcttccctatttttcagaggaaaccaggtcaaacccatctt

SEQ ID NO: 280467 - DNA, 122 bp, Homo sapiens
agccctttgtgaggctggcttgttgaggatgtgccgccagcatcactggcccatgaaatgcgtccgtttcactcaaatcttcgtgcctccccttccgtgaataccattccatcatccgctgt

SEQ ID NO: 280468 - DNA, 122 bp, Homo sapiens
aaccggagtccctagcacaacagagacacaagccgctggacgtagagaggagcacattggcggaagaaggcgcaagcggctgattgtggagagggcctccagaggagagcgcgggcagaaga

SEQ ID NO: 280469 - DNA, 122 bp, Homo sapiens
gcccggagcagtcgcgcgccccgcccaggccggcccagcccgcccagcccggccccgccccggcccgaagccccgcccccgcccgctaccgtgctgacagatcccaggctgtcccaaccctg

SEQ ID NO: 280470 - DNA, 122 bp, Homo sapiens
ggaattgtctgggatgtgccgggccgagcactgtagctctcgccggtgtctgcgtcagcacgctagtgacatggcaggtgaggaccacggcaccgcccctgcgatctggcagtcagagccca

SEQ ID NO: 280471 - DNA, 122 bp, Homo sapiens
tgctgaagaccttcccctgagctggaagtgggtcagtccactaagaaatcatggttactgcgtaattaccaggtggtcactacagttatttccttaaaggaaaataggggtccgtttggaga

SEQ ID NO: 280472 - DNA, 122 bp, Homo sapiens
aggagcctccatgtcactcaaagccatgcctaattgattaacccggccttttatgtctcccgcaccgcccactccctcttctcctgaccaggtcttcggcctgcaaatgtctgctcaccttc

SEQ ID NO: 280473 - DNA, 122 bp, Homo sapiens
cccccatctcatcctcctctaacccgggccttgctgggctcccccttccccagtcccggccgccttctcccagtgtgcgctgcctgcacctgtgcctggagagcatcgaccccgcctcccag

SEQ ID NO: 280474 - DNA, 122 bp, Homo sapiens
cgggcactctggtgctctcagctgcagggactcagggcactcgggctgcacgaggcaccacggtgcgtgaggagtccctgcagcaatgctgacagaaggttctcacgagtggggaatcgttc

SEQ ID NO: 280475 - DNA, 122 bp, Homo sapiens
taccactcgcccaaggtcacccagctgggctggggcagagcaggtttctggtcagatccacgaatcccgggacccagctggggaggtcagctttgggatcctctgcccccgccgccgtttaa

SEQ ID NO: 280476 - DNA, 122 bp, Homo sapiens
agagggaggaacctggacgccggaagccgggaaatggtgagtgtgtgaggtctggtgtcccgacgcgtgagaggagagactggttggaaccggccggaaccggctgtggtggcaccaggtct

SEQ ID NO: 280477 - DNA, 122 bp, Homo sapiens
acttgcagtgtctgggaggaggaggaggaatctattcctcagccccaactgagtcaagctcggccatgtgatgtgctttcaacaatggaatgtgataaaaaaatactgtatgtcatacatta

SEQ ID NO: 280478 - DNA, 122 bp, Homo sapiens
cagaggggacctggggtgaacagcagcctctgtctccccttattaccttctttcctgagacgagggtggtcaggccagaaagggtccaagcaggaagtgacgttctttacattttggccagg

SEQ ID NO: 280479 - DNA, 122 bp, Homo sapiens
gaagagaggctttaaaaatatatatctccgcagctcatttcggctgccgaagctcagcggcgggtcggaggtaggccggcccgggggcggggctccgtccggaaggcggggccctcctgggg

SEQ ID NO: 280480 - DNA, 122 bp, Homo sapiens
cccatagaaactgaggcccaggattaagttacttccccaagatcacatggccaataagtgcggaaactagtattggaagccagatagcctgaacaggagccaatgcttagccattaagctga

SEQ ID NO: 280481 - DNA, 122 bp, Homo sapiens
gcaggcatgtcccccccacaggcctggttgacaatgatctctgtgtctgagggccaggcacgcttgggtgccagagttggggtgggccggggagcaggcgggaagcagggggcagccggtag

SEQ ID NO: 280482 - DNA, 122 bp, Homo sapiens
atacagcacaagaagccggcaccgagggctctctggagaccactacaggaagggtgttcacgcttgcgtctgcactgagggtctgaaacagggtcaagagtgttcatcagagtcctgccggc

SEQ ID NO: 280483 - DNA, 122 bp, Homo sapiens
atctggcgtgtgaggtcacaggaaagctgacgagccagtcacccgacgtgaccccgaggccgcaggcaggggactttacctgcacggcaatcacagacaagacttccactgagatgcgatta

SEQ ID NO: 280484 - DNA, 122 bp, Homo sapiens
gacctaatgtttccattctcttctcaaggacatttctcttgggcatgaatgggatggcctcgcagaatctcagagaaatctcaggaaaaccgaaatgcccgtgaatgagccaggtagagcgc

SEQ ID NO: 280485 - DNA, 122 bp, Homo sapiens
aaagagcaagaggtggccctcccacagctcccaccctggggctcccatcattcactcacccgtcaccccaatggcagacacagggcctacgcgctggccaccgtggaagccgtacaggttca

SEQ ID NO: 280486 - DNA, 122 bp, Homo sapiens
gataggacaaatgttggggaccagataccggaagcccatccttccactgaagctccagaacgagtggttccaatccaagatcacagctttccatcagaaaccctcagtgggacggtggcaga

SEQ ID NO: 280487 - DNA, 122 bp, Homo sapiens
tgcgaggggtctgtgggagccgggggcacggcagcgtcgctccagccccactggccggcccgggactccaagaagaggcagcggatctcccagtccctgaccagcctggccgggccccggtc

SEQ ID NO: 280488 - DNA, 122 bp, Homo sapiens
taacaaatagttgattctgaacatattaggtgctaatttaccagttaatttattcatgcacgctgattgtttcccctttcttccttctttaaagagatcagtaagaataaccgagttagcta

SEQ ID NO: 280489 - DNA, 122 bp, Homo sapiens
gctgggcatttcacctgctgtcactgactttgtgcaggccaaggacctggcagggccagacgctgtaccatcacccaggccagggatgggggtgggggtccctgagctcatgtggtgccccc

SEQ ID NO: 280490 - DNA, 122 bp, Homo sapiens
gggatcttggaaatcaattttagtccaatttcctttctttataaatgcaaaaagtgagaccgagagaacttacttgtctggggtcatacattgaatctgtgactcaaaaacttccacccggt

SEQ ID NO: 280491 - DNA, 122 bp, Homo sapiens
tgggggccggtccatcatcaatgggaactgggctgtggatccccctgggtcctacagggccggcgggaccgtctttcgatataaccgtcctcccagggaggagggcaaaggggagagtctgt

SEQ ID NO: 280492 - DNA, 122 bp, Homo sapiens
gcaagcgcgcgaggctcgggcctttcaaaccccggcgcgccggcgccggcgtcgacactgcgcaagcccagtcgcgcctctccagagcgggaagagcgctgcgttccttagcaacgagcgtt

SEQ ID NO: 280493 - DNA, 122 bp, Homo sapiens
tctggtcggcggtaaaagctcggttcccggccctcccggaagttgttgcacagttgtttccgggaagcgggactccaaatgggtcgcagtcgcagccgctctccacggaggggtgagtcctg

SEQ ID NO: 280494 - DNA, 122 bp, Homo sapiens
atggcgcaatcatagctcactgcagcctcgaccacccaggctcaggtgatcctcccacttcggtctcccaagtagctaggacaacaggtgcacaccaccaaacctggataataatttttttt

SEQ ID NO: 280495 - DNA, 122 bp, Homo sapiens
agaaaggggagggaggaaccgcgcgcccaggccccgcccggttgcctaggtgacggggagcgagaggaagaagtgggggctgagctgatccgagcatttcagatcttaatactgaacagctc

SEQ ID NO: 280496 - DNA, 122 bp, Homo sapiens
tacttatcagctggtgcccactgcgctgtcaggcagtgagatttctggctgacttggaggcgctctgggcccgctgaacaatggcagaacacttctcacgtcgcagcagcttgttgttctca

SEQ ID NO: 280497 - DNA, 122 bp, Homo sapiens
ttttctccagagtcgcgaaggtcgcccatagaggaagccagtctaccttcccttttctgtcgaggagacaaaggccattatgcgcctcgttttggagaagaatcctatttgtgggccaccca

SEQ ID NO: 280498 - DNA, 122 bp, Homo sapiens
cagacccggacgccccgcggctcctccggccctggagacgttcagcgctggcctcggcggcgcctaacttggcccagatgccgcccgggtcccggactccctgctgctctggctgctgtagg

SEQ ID NO: 280499 - DNA, 122 bp, Homo sapiens
caagtacaaggtgacggtgggggaggtgcagcggcgactctcgcctcccgagtgcctcaacgcctccctcctggggggtgtcctccgcaggtaggaaggccagcccacaattccccgcctga

SEQ ID NO: 280500 - DNA, 122 bp, Homo sapiens
gactggttatgtgaaaggaggaggcgtcattcctgcggaagccctatcccacatgacgaacgacaaggccaggggcaagcaaaaagaggaaggactctcttgctctgctccgacttggccag

SEQ ID NO: 280501 - DNA, 122 bp, Homo sapiens
acaaagataacccaatttatctgctggtccatcagaacagcagccacgaaaacctgagctcgtttgtgtccagaacagtagggaggaaactgctaaggccacttcagtcactgaggccattt

SEQ ID NO: 280502 - DNA, 122 bp, Homo sapiens
gagctcggaaaggtgatggcactgcccggaggggcagctctctggattttgagaaaggcacgtcttccccagtctagtttcagacccagaggaaagcccggttcttggctggcatttaagct

SEQ ID NO: 280503 - DNA, 122 bp, Homo sapiens
gccgcctgtctctgttcttgaacgtgcggacacaggtggcggccgactggaccgcgctggcggaggagatggactttgagtacttggagatccggcaactggagacacaagcggaccccact

SEQ ID NO: 280504 - DNA, 122 bp, Homo sapiens
taagaacacagtggggctgggcatgcgggatcatgtctgtaataacagtacttcaggaggcgtaagcaggaggatcgcttgaagccagaagcttcaaggctgcagtgagctatgagtgtgta

SEQ ID NO: 280505 - DNA, 122 bp, Homo sapiens
tctcagacctggaacagaagcctgctaacagcaatccctcctcataggagctgcagcccccgttcacaagcaaccattgtttgaaatcaggtatttttaaatcagagtttgccttcaatcta

SEQ ID NO: 280506 - DNA, 122 bp, Homo sapiens
gacgctggccccggatcctgggaagactctgtgtgcacacgccagggaagacgctggccccggatcctaggaagactctgtgtgcacacgccagggaagacgctggtcccggatcctgggaa

SEQ ID NO: 280507 - DNA, 122 bp, Homo sapiens
tatttttgtgtttgtgagtgttactatgctatggcaaaaagggcctagactttgaattagcggatcttacttaatattcacagaagcctggaagtgtaaacactgctatccctattttatag

SEQ ID NO: 280508 - DNA, 122 bp, Homo sapiens
cagaagcaccgtatagctcttgtagctggggggctggcaggtagaattgaccatcatctacgattccttaaagcctgtaattcaccttggatttttgttcgttgtttctgtcttaatgtatg

SEQ ID NO: 280509 - DNA, 122 bp, Homo sapiens
ttggacgacgccaggctggcattttttgcctccagcatgttctgcaggtcagtcatggctcgctccaggtcccagcacgactgcttcagggtgtccacctccgagctcagcgaatcctgccg

SEQ ID NO: 280510 - DNA, 122 bp, Homo sapiens
attacaggcacacgccaccatgcccagctagtttttgtactttcagtagaaacggggtttcgccatgttggtctctggctggtctggtactcctgacctcgggtcatctgcccccctcgtct

SEQ ID NO: 280511 - DNA, 122 bp, Homo sapiens
ctatagggagacgtcagagcgctctggtccgcgatagaagagccccccagcccccccgcccgggcttccatataaagtaggggccctagtggaggccgcagcagtagcaccagcggctgcgg

SEQ ID NO: 280512 - DNA, 122 bp, Homo sapiens
ctgcggggagagcaggtagaggtgagggaggcaggctgagccagccgagcacgtgcggcccggcaccaagccaaccttggtgcgtgctcccaccgcctccagagctcccacttaccctctgg

SEQ ID NO: 280513 - DNA, 122 bp, Homo sapiens
atgacaaaggatatggggacacagggagggatgcaaaattaggaaaatatatagcaggtgcgcaaatgtcttgaattgaatggtaatgctaatatgttaaaaataatacaatcaaccacatt

SEQ ID NO: 280514 - DNA, 122 bp, Homo sapiens
tgctgattcgaggtagagccttgcgatgtgtcagaagtcctttgctttcgttgagaagaacgtactgagtggaaattgtataacctcatcaacagctaagcacctgaagggataaaaaagac

SEQ ID NO: 280515 - DNA, 122 bp, Homo sapiens
gagcagggtctgaatctcagctctgctatttattattccagtgactttgggcaggttcttcgagtttctccaaaatggtgatattaaatgaaataaggtttgagaaaactcctagagccagt

SEQ ID NO: 280516 - DNA, 122 bp, Homo sapiens
tcacactgcttttgtaaggtggcgagttggcaatgattaatcaatgtggatggtacaatccggtaatttaagtttcgactggtttaagattgagacaaccagaaaggaaggcttatcagaag

SEQ ID NO: 280517 - DNA, 122 bp, Homo sapiens
ggactgccgggaacgcagatcgcaagccgtcggggctctgtagaactcagaggcgctcggcggaaagctcgccaggcgacccagacccgaacccgcgggctccccaagacaacagcgccggg

SEQ ID NO: 280518 - DNA, 122 bp, Homo sapiens
gaggtgaggcctggtgagaggtgtttaggtcatgggagcagatccttcagggcttggtgccgtcttcatgataagtgagtgagttcttgctacatctggttaagagtgtgtagcagcctccc

SEQ ID NO: 280519 - DNA, 122 bp, Homo sapiens
atcggacaacctgcaggtgcctgaggaggagctggggatggtggacttggagaggaaagccgacaagctgcaggcccagaagagcgtggacgatggaggcagttttccaaaaagcttctcca

SEQ ID NO: 280520 - DNA, 122 bp, Homo sapiens
ccaaatatctgactctgtgatgtgccaggcatatccacttacgttctggaatctcaagctcggggtggacagacccagggccctgtttggggctggttgggcttggcactgtggttgcaaga

SEQ ID NO: 280521 - DNA, 122 bp, Homo sapiens
ggaacacagctcagccaggcaaggctgggagagggctgggccccccaggtgacctgcagacgcctcccccacctacatgccccacgcaaggggagccctggagcccggcctgccttgacagg

SEQ ID NO: 280522 - DNA, 122 bp, Homo sapiens
agcatggaagcatatggccagtgcatcacctggccgaggccattcccctgagttctgtggcgagagctgtcaactgacggttccagagtggaagcgtttctgccgggaaggcccaggccgag

SEQ ID NO: 280523 - DNA, 122 bp, Homo sapiens
agggagggagcgggaggagctggtggctgtcgggtcggggtctgggcgccaccgagcgcccgccccacctctggagtgcgcagaaggcggtgcgtcccgggccccggcagcccagcccaggc

SEQ ID NO: 280524 - DNA, 122 bp, Homo sapiens
cgttctgaagggtcgggatgaactgtgcgggttcccctcactggaagacacggctaagaccggctggcagtttgggaatctgggggaggagacccaggagtcctgcgggctccccggctccc

SEQ ID NO: 280525 - DNA, 122 bp, Homo sapiens
atcttcatctcatacgtgaggcaataggaggagtttctattcattgagacaaacagtgagcgggcaccaacaggccagcagcttggcccttttcacagaggtggccttggagtctggagtct

SEQ ID NO: 280526 - DNA, 122 bp, Homo sapiens
tgggcagggtaaaggtgagcgggcgcaggcgtagtgaaattctcagagccctttaggccccgcccattccctccgagtcggtgaggaggggaaaagaaggcgcaggcgcaactgccctccca

SEQ ID NO: 280527 - DNA, 122 bp, Homo sapiens
aggtgtggtctcggttaccaaatacggttacctgcagctttttagtcctttgtgctcccacgggtctgcagagtcccatctgcccaaaggtcttgaagcttgacaggatgttttcattactc

SEQ ID NO: 280528 - DNA, 122 bp, Homo sapiens
gtagtatgacctaaaaaccgaaacagctcctcttgttgttgtggtttctaccacgggcaccggagacccacccgacacagcccgcaagtttgttaaggaaatacagaaccaaacactgccgg

SEQ ID NO: 280529 - DNA, 122 bp, Homo sapiens
tcctacccccagggctggcagggcagagagagctgatgaaattggcttgggtggagttcccgcggttacagataagaccttggggacaggtagtcctcagtccccaaatgcttacgcagcgt

SEQ ID NO: 280530 - DNA, 122 bp, Homo sapiens
acaatgaccaaggtgaatctcaatcattttaggaggtttatttggccaaagttaaggatgcgtgcccagaggtaggtctacgtctttctccaaagatgattttgagggcttcaatatttgaa

SEQ ID NO: 280531 - DNA, 122 bp, Homo sapiens
aaaatccagggagagcgaacaacctgttgtggtcatgctggatcattccactagatggcacgcttaggttagctttgcttccagtttccataaatgcaggatttttacagtgaagcaaaagc

SEQ ID NO: 280532 - DNA, 122 bp, Homo sapiens
ctttgtctttggagatccaccttgtcagcacttggctgctggatttgtactttgtgatttcgtatttgttgatacgttgctttgtaattgccccaaagacatttgctgcatgtcacaggagt

SEQ ID NO: 280533 - DNA, 122 bp, Homo sapiens
aaggcctgggggactgggacagggttaaggggtgtcctttctccatccgtcttccaaccccgtggagactcagcatgcctaggaaggtggaagggcttcctgcgggcacaccatctcccgcc

SEQ ID NO: 280534 - DNA, 122 bp, Homo sapiens
attgaaacatcgcctaggaattgtggtttgtatataaccctctaagcccctatcccttgtcgatgacagtcatcctaatgataataaaacctgcatccagataatcacggagctctgtggtt

SEQ ID NO: 280535 - DNA, 122 bp, Homo sapiens
ggatgaaaaggcgttaagtgcaacccacagggcgacatggaaatataacacgaagctggccgcttgcccttcattgtcagctctcttaaatttatgcccggtaggtgagagctgacacttcc

SEQ ID NO: 280536 - DNA, 122 bp, Homo sapiens
aggtgtcgagagtgactgtgctggggctgctccatcgttgtctgagcctcccggtgctgccgctgtggccgtttctttgatgaggctctcagaggccgagtcattcactgccagcctgaagc

SEQ ID NO: 280537 - DNA, 122 bp, Homo sapiens
tggcccacatctgcgcactcctagttccgcccctcagcctcaatgtttgttattgttgttcgggttcaggttgcttctgccccgccccatcgacgcaatctccaccaatcaatggcgtggtc

SEQ ID NO: 280538 - DNA, 122 bp, Homo sapiens
gagttatgtggtcatgtgaccgagttccagtcagtgcaatcgggcatctgtggggagcaccgcttccaagagtggctcctagaaacctcccatactaccctcctgcctactcttcctgaagc

SEQ ID NO: 280539 - DNA, 122 bp, Homo sapiens
cattttgtagtcgggggactacaacttccagaagatcaaggggaccattctaaggtgccccgggaataggcggctctccccggggccgggcgtcctggggcactcctacccagcagcccggc

SEQ ID NO: 280540 - DNA, 122 bp, Homo sapiens
tctaatatgcattccagtggttaaagaacaggaaataatcctgaaatcaaagcttggagacgggttatttgcccttgagttccaggactcctgtgtgtttggaattgttttacataaatcca

SEQ ID NO: 280541 - DNA, 122 bp, Homo sapiens
aagatttgaacatggctttggttgatgctaccacacagaaactgcaaacatccaactcaccgctcttagttgctgttcatgatagtctatgcacagtgactgatgaatttagcctgtcttga

SEQ ID NO: 280542 - DNA, 122 bp, Homo sapiens
tggcccgactgcccccccggccttcgcttcgctctttcccccgggactgcacgccatctacggagagtgccgccgcctttaccctgaccagccgaacccgctccaggttaccgctatcgtca

SEQ ID NO: 280543 - DNA, 122 bp, Homo sapiens
ttgaggcagcccacctggataagcatacttcggatccccgcggtacagatcgatctctcacgctcacaaacctacctcccagacgggtccagctaagaccggaagcgtccggagccggatgc

SEQ ID NO: 280544 - DNA, 122 bp, Homo sapiens
agggagggcaagcagtgaaaggtccatctagaggaggtaaaagacagggctgagggaaaacgccttgtacagtcaggatggcagatgtactctgtcagggaagacagccccacagaaaaggc

SEQ ID NO: 280545 - DNA, 122 bp, Homo sapiens
caggccccgccccctcagtccctgagtgacggaggatgtgatcggacgctgggctgagggcgacaaagtgacaggttcttggctgcagccttttcatgcagggcttcctgcttgcgctgggc

SEQ ID NO: 280546 - DNA, 122 bp, Homo sapiens
ctcctgggggcgcggggcaggacggcggcagcgagctgtaagcggaggtgggagctccgccgatcgccagcctcggaggaaatgcgacctcccctcgccgccccttaagacctctccttccc

SEQ ID NO: 280547 - DNA, 122 bp, Homo sapiens
gtggacaccagctggaggcgctcaatgttctccaccacgttagccagctgccagttgggccggaagctcccaggacggaagggttctttgcagagtgggcaagtaggggactcctccaggtc

SEQ ID NO: 280548 - DNA, 122 bp, Homo sapiens
ggcaaagacttctcgtttcctccccctcggtgggtcctgggccttttgaactcccgtagacgttcaggggagcctgcattccccgtgagaaacgctgagagaggaccacgggtgtgtcgagc

SEQ ID NO: 280549 - DNA, 122 bp, Homo sapiens
aagaagaagcaaaatactgcttaaaatgctgtgtttaggaaggcaggattgtgtgtaatacgtttttagaatgttattaaaattgctttgacagtgtgatacattaaattgtcagttatctg

SEQ ID NO: 280550 - DNA, 122 bp, Homo sapiens
agaatgaactgatagagaaatagagtaggattgctgagcatactgaagccacatacatttcgaaggaaatcagtcagcatagttgcttgttaccttccagaactaggtacagagtaggtggg

SEQ ID NO: 280551 - DNA, 122 bp, Homo sapiens
aagcaacaccatccttttcagataagggcactgaggctgagagaggagctgaaacctacccggggtcaccacacacaggtggcaaggctgggaccagaaaccaggactgttgactgcagccc

SEQ ID NO: 280552 - DNA, 122 bp, Homo sapiens
gtcttaaactcctgagctcaagcaatcttcccaccttggcctttcaaagtgctgggaatacgagtgtgagccaccgcgctgggactcatttaattttataaagaacatatattctaccaccc

SEQ ID NO: 280553 - DNA, 122 bp, Homo sapiens
aaaacgaatgccacgcaggtcaccaggcttggaaaatagaaggcacccgaagttgttctacgtggctgtccccagccacccattccacccgctcgacaagggatcctgggccgagcccggcc

SEQ ID NO: 280554 - DNA, 122 bp, Homo sapiens
cgcagaaagcccttctccttcaagtggtggaacatggtgccctgagcccatcttccctggcgtcctctccctcctggccagatgtcgctgggtcctctgcagtgtggcaagcaagagctctt

SEQ ID NO: 280555 - DNA, 122 bp, Homo sapiens
tcattgttttgacaatccttggaacagtacttcaaggcagacatttcacagataaggaaacgaagcctcagaacaggcaaggaacactgacctgtcacaggtgggcttccctttgagagaaa

SEQ ID NO: 280556 - DNA, 122 bp, Homo sapiens
tgctaaactcccagctcttcagaattcaaaatgagctttgcatccaagctgttgtgggttcgaatcctgggtctatctagcgtttctttctccatctgtaaaacagggttaaaaatacctat

SEQ ID NO: 280557 - DNA, 122 bp, Homo sapiens
cgtgagcggggccaacgggccgtgttctccctgaaggggcggggtctgatcgctgcgggtcggattcccttgggcctgaaagtgaggatgagcgacaaccgtgggcggggcctgcgctgggg

SEQ ID NO: 280558 - DNA, 122 bp, Homo sapiens
gtgccggggtgtggaggcagaattggttaatgttgccagaaattcacaccagctcccagacgcttgggcttacagttccaggtgcccacattgaaattcagcctggccttgatgcctttagc

SEQ ID NO: 280559 - DNA, 122 bp, Homo sapiens
cagggcagtagaggagctgctgcgctgcggcgcggaccctaatttggtgctagaggacggcgcagcggctgtgcacttggcggccggagcccggcacccgcgcggcctgcgttgcctcgggg

SEQ ID NO: 280560 - DNA, 122 bp, Homo sapiens
tgagtagccgttgcagaagataaacccctccctgagccaggctgtggccagaggctaacccggcccctggcttcgtttggagggcagataactgaaaccacataaggctttggaatcctgag

SEQ ID NO: 280561 - DNA, 122 bp, Homo sapiens
ttttatccaagctttagggaataaccctggagattctcttcgttactctactgttaagtacgtgcttacggagtaaacttcgcatgactaaggtttacaggcctgaatgtgcaactgagttc

SEQ ID NO: 280562 - DNA, 122 bp, Homo sapiens
atacgaccatttttcagtggaggaatcagaattcaaacccatctctttgactccaaagtccgttctctttcttctatgacatattttataatccttaattttaaaaggtctgtttcctcgga

SEQ ID NO: 280563 - DNA, 122 bp, Homo sapiens
atccgcccgcctcggcatcccaaagtgctgggattacaggcgttagccactgtgcccagccgaggtgacaccagatctaaaggagcctgccaagagggatgagcattctaaggactgcctgg

SEQ ID NO: 280564 - DNA, 122 bp, Homo sapiens
cctattaaatcaacaatgccccccccccaccacaattccacgcccaaagtaatgattggccgaaagaatgcagccctgcgcaagcattggtcgcgccctccccgtccatccgaccccgccct

SEQ ID NO: 280565 - DNA, 122 bp, Homo sapiens
ttctgggattgcatggaatgagacattggttttgtttgtttcgttttatcttgtcattggcgattagatttaggacataagtgccaaaataggccattttaatcaacattgggacttccctg

SEQ ID NO: 280566 - DNA, 122 bp, Homo sapiens
cctgagccacatacacctcatctgaagatttccaagcagacagataaagaaggttggttacggagctagctaagcactgttgaagcgcaaatccacaactgagcacatttctttattatgta

SEQ ID NO: 280567 - DNA, 122 bp, Homo sapiens
tagccttagtctctgatgcgcagttgcttctagtctctgatgcgcagttgcttctcctctcgatgttcagccgcttgtctctctgccagctgagctctgaggtttataggagcacgagatac

SEQ ID NO: 280568 - DNA, 122 bp, Homo sapiens
cgcagcctcccaaccccgccctccagcgctggccgcggcttctcttccccaagccaaggacgggttcattgctggccccacgcctaggcaaagagggctcggagaagtcttggagacccgga

SEQ ID NO: 280569 - DNA, 122 bp, Homo sapiens
ctctcctggcagctttctccacactaggacctcctagtcacaagttggttctcaccctgacgcacactccctgcctgcaacagcctggcttttagcagctgagaggacacggtccctgcctg

SEQ ID NO: 280570 - DNA, 122 bp, Homo sapiens
aggagggctcgggcggccgctgattctcatgactctgtgggtctcaatgctccatgagaacgtagcccagctcataaaagtgaccgtaagatccgtctcctcacagcgaagactgaagcagt

SEQ ID NO: 280571 - DNA, 122 bp, Homo sapiens
ccgtccctgtctttgtactggatcacgaaggagtcaaactcgccctcggggaccgtccagcgcaggagcaaggagtcggaggtcctgtctgtcaccgtcagctcacccaggcgtggtgggcc

SEQ ID NO: 280572 - DNA, 122 bp, Homo sapiens
agagcctgggttcttcaaatttttattgggttttctgaaggatcccatatctctccaatgcgctcccctgtaggaacttaattagaattatcttcaaccaaagaatctgatatcgaaatgtg

SEQ ID NO: 280573 - DNA, 122 bp, Homo sapiens
ttccctttaaccattcaggtgtggaggtctctgctcaagccccacccatgccacaagccccgcctctttctcggagccccgccttccctttacctgctcagatatggtctctgcacaagccc

SEQ ID NO: 280574 - DNA, 122 bp, Homo sapiens
gtcagaaaagaatataggtgggggataaattatgctgactggaaagagatacataatggacgagttattcatataccactcagggtttgggcagtgctagaaactttgcaacaaaaaatggt

SEQ ID NO: 280575 - DNA, 122 bp, Homo sapiens
caccaatcctgcacggtttcccggcgggcagccccgtaatcgcggtgcggcagctggtgccgcggctgagcccagccagcgtgcccgggcccctctgcagactgtaccatcctgcccgagcg

SEQ ID NO: 280576 - DNA, 122 bp, Homo sapiens
accagaagcttcctgggcccagcgaaagttctcatcccctgctctgtagcccttgagacgcgcgggagggttggaaaagccgagccgattgtgggtggcaggcctccacagagatcgatttg

SEQ ID NO: 280577 - DNA, 122 bp, Homo sapiens
tgccagtcattgttatagatgtttactaatgtgatctgtttttccttcagcatccctatgcgagttgattttgttgtcctgtgccaaactgttccttttaaagttcggggtaagggtttctt

SEQ ID NO: 280578 - DNA, 122 bp, Homo sapiens
tggatgatgagtccaagcctgaaaaccatgtcttcaacctggagagccccctgcctgaggcgtgggtggaggaggacaacccaccctatgcctactacctgtactacacctttgccaacatg

SEQ ID NO: 280579 - DNA, 122 bp, Homo sapiens
tccaccctgagcctgacctttctgagtgacatgggtgtgccaggctagactaggaggttccggtgtctggaaaagcactttacagatgagattccctctcctcccccaccttcaagcaccct

SEQ ID NO: 280580 - DNA, 122 bp, Homo sapiens
catgcagaaagggtgcacaaatactagttagttccagcaccagggaggttgggagtctggcgtcgaagagagtatttaacagaaaagattcgaagggcggcgggaccgaccaccgccgcgta

SEQ ID NO: 280581 - DNA, 122 bp, Homo sapiens
ccctagaagtgagtgcagggctcatggggccatcgccaatggtcagactccccagggggccggtgatacacggttcctggagcgggctggaaactcattccttgcaggctctgggagacgat

SEQ ID NO: 280582 - DNA, 122 bp, Homo sapiens
tgcttcccagcgtcagcgccagagtccctctgggtcctccccctcccatggccgagccgtcgagagacaccgtgggcccgtacctgctggccctgagctccctgagcctgcgtgctcgttgc

SEQ ID NO: 280583 - DNA, 122 bp, Homo sapiens
cgcgtccgtctctttaaatcacagagcaatcggggttctggtgggcaagactgaccctgccgaccagatgcaggccgctagcgggaggcaagaaggaaaagaaggagacattatcaagatct

SEQ ID NO: 280584 - DNA, 122 bp, Homo sapiens
atgaatgtgagctaggtgaatatataaaaatactcaactggagcctggcacatagtaatacgtggtaatggtaagaatgttgaatgttcttcttttgaggccctgactttggcccaggtctt

SEQ ID NO: 280585 - DNA, 122 bp, Homo sapiens
cgcccagacacatgcacctgcgaactactcttccgcagactttctagaatctgcagcctgcgaggagaccctctgaggagctttcctggggaaactgcttactgtctaaataatcactttcg

SEQ ID NO: 280586 - DNA, 122 bp, Homo sapiens
atggggttaagaaagaaaacaccgcgtggggtggtgaccgcaggtgctgggcaggccacgcgagatggcgagagctgggccccgctgagggtgctctggagcgtgggggttccgggcacagt

SEQ ID NO: 280587 - DNA, 122 bp, Homo sapiens
cctgtcacagcgcacatgtaaaagagcaaactccagacacacacgtcttatctgtgctgacggcccaccttggtgactggaaatgacaccatccaattttttctggccgcaatgttgcaccc

SEQ ID NO: 280588 - DNA, 122 bp, Homo sapiens
aaggcggctggggagacgctactccaactgttgaattgaattttcacctttcctttcatccgctgctttgcttgcggagatggatttatttgctttgaaatccgcatatctttctcagactg

SEQ ID NO: 280589 - DNA, 122 bp, Homo sapiens
agaaagctaaaaagcaacccagtttcactacagaatccaggatgtctccggaataggcagcgccagatacctctgaaagtagggacaaaactagggccattgaaggattggattggttagct

SEQ ID NO: 280590 - DNA, 122 bp, Homo sapiens
ccgatggcgcgcaaggggcaccgtccgtggtgccgcgccccagcccgggtctgggccgtccgtggccctcacttctggttggccagctggttctccagatcctccaggcgcgccgtcagctg

SEQ ID NO: 280591 - DNA, 122 bp, Homo sapiens
agggcgagactccgtctcaaaaaaaaaaaaaaaaaaaaaaaaaagaaagaaaaagagtagcggcttcaagtcccacagggaggaatggtcctagcgggtccgagtatcactaagagcccaca

SEQ ID NO: 280592 - DNA, 122 bp, Homo sapiens
taatcggcgctcacgggcagagaatataaccgcgcccttatggtgtttatttgtgtgggtcgccatctttgatgcgtatcgattccgtacagtggaggagtccgcctcctggagtgttgact

SEQ ID NO: 280593 - DNA, 122 bp, Homo sapiens
taaggagcaggagttacagaagggagcgtagcagggagtgcaccgagcaggagcgaacctcgtcagtgcagcttcactgctcagacactgcttctggagggaccctactccatcccacacag

SEQ ID NO: 280594 - DNA, 122 bp, Homo sapiens
ttcttgtagttgaaatgcaatgatgttttttcatatcattggtcacggttgtagtccgtgcgagaataatgacatatgctttatttttatggagtgtgggtttagtaatggggtttgtgggg

SEQ ID NO: 280595 - DNA, 122 bp, Homo sapiens
gccgccgccattttcccagagcgagaggcagtgacactgagcgggcgcagggggccgagtcggagaccgtgccggagttcgggagcggcaacagagtgggcatagacactccgagcagcctc

SEQ ID NO: 280596 - DNA, 122 bp, Homo sapiens
cgagagagaatcaaggggctcacgaggtcccctccatgatctagtacccaccagccctcccggggccttttcctggggctcacgaggtcccgtcatctagtactcaccagcccctcccgggg

SEQ ID NO: 280597 - DNA, 122 bp, Homo sapiens
gtggggcggtggtaactgcgcgctgtgcgaatagagacgtcgaggcaagcgcgacggcctcgagtggctagggaaagaatccaggggcgtgcacccagtgatttccaatctctgaaaccagt

SEQ ID NO: 280598 - DNA, 122 bp, Homo sapiens
gtgaaccgtgtgaggaatgtgtgtgggagagttcgcgtgaagtctgcgtgcacaaggcagcggcggcctgctctcggaatctggtaatgagcccgacttggcaccacatctgctgagactgc

SEQ ID NO: 280599 - DNA, 122 bp, Homo sapiens
atcctgggcccgaggcctgcttatttgcataatcctagcgcgggacaatgaaaggcctcccgcactggaaggagtgatttgcatattccccggaggggccttactccagagcgcagtgatta

SEQ ID NO: 280600 - DNA, 122 bp, Homo sapiens
tcagatgaaacttgctccacaggggactcaggaagggggtgggagacttaggccccagggcgtgtggtaccaaggaaagggcaccaaaaatgatgctacttaatttggagaccaaagtgtca

SEQ ID NO: 280601 - DNA, 122 bp, Homo sapiens
cgcccccggaagcacatgagaggcacttgctttcactgactgagggcagggcttggggcccgcagcacggcagcagcttgaggaatcgctgcttcagcgcttttttagtgggccctggaggg

SEQ ID NO: 280602 - DNA, 122 bp, Homo sapiens
tgaaccccacgcaggccttcttcctgctggtgaaccagcacagcatggtgagtgtgtccacgcccatcgcggacatctacgagcaggagaaagacgaggacggcttcctctatatggtctac

SEQ ID NO: 280603 - DNA, 122 bp, Homo sapiens
ggggaggcattccagacctgctgggttttctgataatctctggggaaaatcagaaatggacgctctatgtagtggactatgagcctttaggaaagaaagaccagagttggaagcccttcaca

SEQ ID NO: 280604 - DNA, 122 bp, Homo sapiens
ttctaagagtatcatcagtgggtgttaactccaccaggaatgaggcgctttctaagttttcggctctgtgctaagtgttttatgaggatgatcctgtttaattctcacaccaatcactggaa

SEQ ID NO: 280605 - DNA, 122 bp, Homo sapiens
ggaaatttctattaactatgtttggaggctgggaaagcaaaatggtaaagaaaaaaagcacgtggtatttcttagacggctctcttcaagtcctgatttttcacaagctgattcttcttttg

SEQ ID NO: 280606 - DNA, 122 bp, Homo sapiens
tgctctgggtttattcacctcttgtgtcagtctgttctcatactgctatgaagcaatacccgagactgggtaatttataaaggaaagaggttgaattgactcatagttctgcaggactgggg

SEQ ID NO: 280607 - DNA, 122 bp, Homo sapiens
ctgccataagagcccccaaacctcccctagcttccaggacaaaactctgacttattcagacgttcgccacaccttaattgcatgctgggtgccaggcacagggctgtggcctgaacaagtcc

SEQ ID NO: 280608 - DNA, 122 bp, Homo sapiens
ggcagcgggcggcgggggccgcgcggggccggggaagtgagcggagtgaggctgcgagcgcgctccccgcctcaaaagttatcgggagccgcgggagggctgccgggggccgggctggctgg

SEQ ID NO: 280609 - DNA, 122 bp, Homo sapiens
atgaagcgtcgcagggagctgacggcatgggagcccaccagtgtgtagcgaccgaaggcccggcagtccaccacacggatgttcaagggcgggtgcagcagctcgttctctgggaggtcctg

SEQ ID NO: 280610 - DNA, 122 bp, Homo sapiens
ctcttagaacgcatgcagggccctgagctggaaggatcccacagctggtttaatgctctgcgattgtcatcttgcaattcttaataactttagaatgaggccctccctacatgttcattgtg

SEQ ID NO: 280611 - DNA, 122 bp, Homo sapiens
aatgacaggcctcctccaaacctactgaatcagtatctgcacttaagcaaaatccccaggcgatttctgtgcacactaaggtttatgaagccctgctccagacagtggttctagtacctcag

SEQ ID NO: 280612 - DNA, 122 bp, Homo sapiens
ctttctggggcttgcgcgcaaaatctacaagcggagaaagtgacctagagattgcaagggcggggagaggaggctctcaataaataatcgtgtaaccttcttgtggttctgttcttgctcgg

SEQ ID NO: 280613 - DNA, 122 bp, Homo sapiens
ggggactggatgactccagaggtaacttgtgggggaacgaacaggtaaggggctgtgtgacgagatgagagactgggagaataaaccagaaagtctctagctgtccagaggacatagcacag

SEQ ID NO: 280614 - DNA, 122 bp, Homo sapiens
ccaacaggaccctcggtttattgctgtgctatcaccacgatgaaataattaatttttaaacgcgaggcctccgtgctccattttgcactgagccctacaaacaagccgatcatgattagtaa

SEQ ID NO: 280615 - DNA, 122 bp, Homo sapiens
ttcatcagtgaacattcattggtgcttatttctatgaggcacaattagaatgttccagaacgtaaacatgaactgatattttggctatatatggggaatgtaagtgtggtattattgcccca

SEQ ID NO: 280616 - DNA, 122 bp, Homo sapiens
gaaagctccgtctattttagggtgactgagagcgtctcttccttctgtgttgcctggaaacggactgttcgcctagtaacatctgatcacgtttcccattggtcaccgtttccggaagcccg

SEQ ID NO: 280617 - DNA, 122 bp, Homo sapiens
tagcagaggaagagaattgctattttggggcatattttaactccaataggtaggcattatcgtccccatattgcagatgaggaaactgaggatcagagagtttaagtagcttgtctggtgtc

SEQ ID NO: 280618 - DNA, 122 bp, Homo sapiens
gcggcttaagcctgccctgtggagcatccctgtgggggactccggccagcctgagtgacgcgatccaaagagcgctcccgggtaggaaattgccctggtggaatgcctcgccagagcagcgt

SEQ ID NO: 280619 - DNA, 122 bp, Homo sapiens
ccagggcgcagtgggcgccattcatcaatgtccaacaggaaaccatctcttcctggatgacggaggtttcagatacaatggaggcgaagaaggcagtggccacagcattcccaccccagggc

SEQ ID NO: 280620 - DNA, 122 bp, Homo sapiens
gctcggggggaaggaggctgcaagtgcaggcggcccgggggctgtcacaggactcagcgccgggggcggggcgcgggaggccccgccccggccccaccaggcccctcccctcgtctgtcaga

SEQ ID NO: 280621 - DNA, 122 bp, Homo sapiens
gccgagacgccctgtgccgcattcaactgtgggccctgagaacgggggagctctggagggcggacgggctggcaacgcagcggagcccgggtcccggagggcggggcgctcctcaggagctg

SEQ ID NO: 280622 - DNA, 122 bp, Homo sapiens
cagctgccagccacggctccgccggccccgcacccgggcgcggccaggccgtgaggggtgcgctctgcctctctgagcccagcctgccggccggcccgctcaccttgtggctctggtaagtc

SEQ ID NO: 280623 - DNA, 122 bp, Homo sapiens
gggcgggtgccgcgcgggcctggggacaggccggggttcccaaggcctggaagagccgcccgctccggctctcttgggtctggggaaataaacagaactctgccatttcacatttgaaatca

SEQ ID NO: 280624 - DNA, 122 bp, Homo sapiens
aaagaaaagggaatgagtatcgatccggagtctggatttgactcaccaaagtgtcaatgccgaaacaatggtccggagtggctgctttcgttcacccctggttagtcatctacatcctctgg

SEQ ID NO: 280625 - DNA, 122 bp, Homo sapiens
gcatcccactggcgcctgtcctgggactgctgactaggtctggcagggaactggggctgccgagtcagcagccattgctcccagcagggagttgagggagtgtgagtgtgtatatgtgtgtg

SEQ ID NO: 280626 - DNA, 122 bp, Homo sapiens
tgggaggtccgcatgcgctccggaaccgtaatgcgcgctttttctaagccttacggtaaacgcggacgcagggcaaccacgtggcggtggaaccgaggcccggcgggaatgcgcggaatgcg

SEQ ID NO: 280627 - DNA, 122 bp, Homo sapiens
caatttatcgtagtgactttgtctattcttatgtttcctctcctagacagtgagcttattcgttcatacatttgtttaatgtttattgagtgtttactatgtccctggcaatgagctgggag

SEQ ID NO: 280628 - DNA, 122 bp, Homo sapiens
aaatcatggttagctccagagctcagctggatgcagcttcctcgctttctcgttttggcacgttggcgtctccggcactgctgtgtgcttcccactgtgttgcgtgggcccggcggagcccg

SEQ ID NO: 280629 - DNA, 122 bp, Homo sapiens
ctacaaaggcaactgagaaatactgaatgactaacactcccacagaagactctgtggaggcgctccattctgtaatctttcctctgctccaggagacctccaaagtaaatggaaaccaaaaa

SEQ ID NO: 280630 - DNA, 122 bp, Homo sapiens
ccacataggtgtgtatgtgagtgtgtattgtgtgctcttgagcctgtgtttagatgttggcgtggctggtggcatcactgaatggctgtgctacaggggtcttagtacacagtgagcgtgtg

SEQ ID NO: 280631 - DNA, 122 bp, Homo sapiens
caagggatttgcctgggggaatttcctgtccagccttttattaccagggtcttttgaagccgggctccccattgggcagttccctgggagtgcagtggggaattcttacactttccctctag

SEQ ID NO: 280632 - DNA, 122 bp, Homo sapiens
ggtcccatccgtccattcagaaaacaccaactgattgcccgtggcgtccagtctcttctacgtgtggaagatccacaacaccaggccccacacatgcccctgaagcacttgtgggccactgt

SEQ ID NO: 280633 - DNA, 122 bp, Homo sapiens
gcaagcgaccgctcagaccgtgtaagtcatcaccaccttcacgggggggtggtgggcagccgagctcccgacgctggtgacagccgggccgggcagggtcgtcctggtttcacaaaggggct

SEQ ID NO: 280634 - DNA, 122 bp, Homo sapiens
gtccagacggagaccccaccctgcaaacaaatgcgccacttagagctgttggtataggtgcgatgtgtggattgctgccgtaactgtgcgcaccgcggtgctgttttcaggatgaattcagt

SEQ ID NO: 280635 - DNA, 122 bp, Homo sapiens
gctcgacagggtttagaggagctcctggaacatagtaagtgcttagcaaggccgtcttgccgtctctcccacccagggagggtcaagtgggaagagagcggccccaccgagtgtgttccagg

SEQ ID NO: 280636 - DNA, 122 bp, Homo sapiens
aagtgatcccccacagagaggaatgaagtcaagtcagaagctaggccagcaaatcattttcgtcttacggcttcccagaaaagctttggcaggggacatgaccagaccatgaactatgataa

SEQ ID NO: 280637 - DNA, 122 bp, Homo sapiens
tgtgccctgaccactcagctacaggtctgacaccaacctgtgcctccatcatggtaactacggtagcgcctctctccagcacttgtgaggagccagaacaacattcttaacacacctggcat

SEQ ID NO: 280638 - DNA, 122 bp, Homo sapiens
ttatggataacttaagaaaacagtgccaccttccattttgaggggagtggagtaggtgggcgattctgtgctgtgcaaccatagaacaaaagacatagcacatttaaataaaaataaaataa

SEQ ID NO: 280639 - DNA, 122 bp, Homo sapiens
gtcaaagaaaggggtgacggacggcacctggaaaatcgggtcactcccacccgaatactgcgcttttccgacaggcttaaaaaacagcgcaccacgatattatatcccgcacctggcttgga

SEQ ID NO: 280640 - DNA, 122 bp, Homo sapiens
actttggttaacaccctgaggtggagtctgaaaaaccccggtgtacacgggctcaagaaccgctcccctttctgataccggagcgcatttcccagtggaaccccagagcagcaactcaggtt

SEQ ID NO: 280641 - DNA, 122 bp, Homo sapiens
caagctccgcacgcggcgactgtaccttggactccctaaaaaggtttccgtttccacttccgtccagggagacttccgggagagcccggcgctccccgccacgcatccagcccctctacctc

SEQ ID NO: 280642 - DNA, 122 bp, Homo sapiens
ctggagctcagaaaggccaagcaacacattcatgtttccactgctaaaaagcagagccaccgggattcagacctgggtctgcatgacgccaaagactatgtgctttccactgcacttggagc

SEQ ID NO: 280643 - DNA, 122 bp, Homo sapiens
aaggagcgggccccacgccggagagaaggaagagggagtgcggcccagacgctgtgcccgcgcttgtgtggggcgccatgttgaaacctggcaaaggggacgacattctgggttgcgttgcg

SEQ ID NO: 280644 - DNA, 122 bp, Homo sapiens
gatccggagccacagctggagctgagatcagaaaccgtagatctagccccattgttttaccggtgaggaaaggccatgagagccacacacagagaatagggacaagctgaggccagaatcat

SEQ ID NO: 280645 - DNA, 122 bp, Homo sapiens
ctcgtccaggaatccttccagggcttggggatgggttggcagctcctggtcttcgaccttcgctcgctttctgggccggggcctggtgagagtcagggggccggggcccctgaggcagagaa

SEQ ID NO: 280646 - DNA, 122 bp, Homo sapiens
acttcttacctcttccgacaccacaggccgctctgctgccttcccacggaccccgtgctccgactgccctcgctgcagtgcgggaaccatggaggactgctggcttgtcctgggcagtcctg

SEQ ID NO: 280647 - DNA, 122 bp, Homo sapiens
acttaggaatagagacagccagagagaaatgtgatcaatgaaggagacatctggagtgtgcgtgcttcttcagagggacgggtgatgggcagattggaaaaagcaccgcagatgggaacctt

SEQ ID NO: 280648 - DNA, 122 bp, Homo sapiens
cagaaatgccatcatcgtatgtgacacagaatttagaaaaatgactttgtgaagaatggccggaagagggaagctaatggtagagaaacctctctggtgatgggatcatcttaagtctatga

SEQ ID NO: 280649 - DNA, 122 bp, Homo sapiens
gcccaggtggaagacactttgtaaccagcacaaggacataaagcgtgtgagaagcagagccgagctctgaaccgaggcccgggtggttccagggccagcgccctccatccgcgtcctagctt

SEQ ID NO: 280650 - DNA, 122 bp, Homo sapiens
ggtgatccgcccgcctcagcctcccaaagtgctgggattacaggcatgagccaccgtgcccggccccgacttgatagtgttatttgttgttgttgttgttgtttttagatggagtctagctc

SEQ ID NO: 280651 - DNA, 122 bp, Homo sapiens
gcgtgctctgctcgcctcattctcatgtacccctagtatttctgcgtttggagatggaggcgttgggggagagagggcgaacagcctgaggaagggcacgtagctgacatgaggtggaaagt

SEQ ID NO: 280652 - DNA, 122 bp, Homo sapiens
tcgctgtctggccgggcagatgtgtgtcccgggaccttatttctgagccacctgtgctgtcgtggctgggagacgccgagtgccgagggagcgcgggcctggccggggtctcggctacttct

SEQ ID NO: 280653 - DNA, 122 bp, Homo sapiens
acccgggctcaccaagaaaccagccgccctcctctctatggttttggagccggcggagagcgcgcaagggttggcgggactgcgagtttccggtctgggctttggcgggtctggtttgaagc

SEQ ID NO: 280654 - DNA, 122 bp, Homo sapiens
caaaccggagctgcaaggtacagttgagctgctgatcaccgtcctcgacgttaatgataacgccccactgtttgaccaggccgtatacagagtccacttgttagagactacagcaaatggaa

SEQ ID NO: 280655 - DNA, 122 bp, Homo sapiens
tcctctccgacgcactgggtctgcggcatggctgaccaggtgccctaatgcaggaggcatcggaaactgtgggctcaaagctaagctacgagcggggtattgaagatacagagtaagagttc

SEQ ID NO: 280656 - DNA, 122 bp, Homo sapiens
caaataagcaaatttgaagaacaattgtccagaatcaaatagcgaaatgttagccaccctcgtttaatttcccaaagcacaaaaatttacctttatttgcctaattttatagactctatctt

SEQ ID NO: 280657 - DNA, 122 bp, Homo sapiens
gaggtggtgaaacattacaagatccgtaatctggacaacggtggcttctacatctcccctcgaatcacttttcccggcctgcatgaactggtccgccattacaccagtgagcccgacgggac

SEQ ID NO: 280658 - DNA, 122 bp, Homo sapiens
gagaccagaaggaccggtgctcagagacacacatgggcgtggcggccctcgcgggcccggcggcctcaggctccagctggagtggccatgtgcactttgttacctttcccacggccaggccc

SEQ ID NO: 280659 - DNA, 122 bp, Homo sapiens
acttccgggaccggggaactgtgggatcacggcggactgagactggcggcgttcctgtcacgtcaggtgtctcccgggcaacgcagtatcccggcggccccgcgtggcctcagcgcgtcctt

SEQ ID NO: 280660 - DNA, 122 bp, Homo sapiens
gcctcccccgggtgggggcaacgcgtgggtagcaccgcggggcgcacctgggggttcaggcgtgcgggctggactaggcgcagcaacatgatgtcgttgcggtggctgcgcgcttcgtagcg

SEQ ID NO: 280661 - DNA, 122 bp, Homo sapiens
gcggcgggcggaggctgggccggaggggtggggacggcgaggaggtggaggccggcgctccgctccgctccagctcggtttcatgtcccgccaggcgaaggatgacttcctgcggcactaca

SEQ ID NO: 280662 - DNA, 122 bp, Homo sapiens
cctgccggaaggtcgctgtgaagaagattgccctgagcgatgcccgcagcatgaagcacgcgctccgagagatcaagatcattcggcgcctggaccacgacaacatcgtcaaagtgtacgag

SEQ ID NO: 280663 - DNA, 122 bp, Homo sapiens
tgacttttgtatttatagacttcttccaaaggtcacctcttttatttctgaaaaacaagtcgcttgaggcccatctttacagagtgacaggagctcaggatgcagaggcaccaaggccaggg

SEQ ID NO: 280664 - DNA, 122 bp, Homo sapiens
aaacctcccgcccaccttttctttagacccgcgtctcaccccgggccggaagggctcctgcgcaggcgtttgtagccacttttaagttttatcagctagttcatgcttgcgttgaaagagtg

SEQ ID NO: 280665 - DNA, 122 bp, Homo sapiens
ctgaggtggggtcctccccagggagagagaaagttgtttgagatcctttcttactctgtgcgtggttaaaggcctccgtactcagttccagggaaagggagatgagtgatggtggggccgag

SEQ ID NO: 280666 - DNA, 122 bp, Homo sapiens
gactgagtgcccacggcgtgcctggctctgcggcatacctgggtacctgccggtgacggacgcagcccccgccctgggacctgcagcccccggcgcccaggcgtctcccagcagcggctcac

SEQ ID NO: 280667 - DNA, 122 bp, Homo sapiens
ttaaagctctagaagtaaacaaacctggttcccttttacagagtctgaaaaaggggagcgcggagaggaggctggaagaggaagatgcctagcacagaccttctgatgttggtgagcctttt

SEQ ID NO: 280668 - DNA, 122 bp, Homo sapiens
gccgggttacctttccccagagccaccctgggagcatgactcactgctagtgagagttaccgggaggtgcccggggatgcgcactgcccacgccgccctgccagcccaggggaaggcatgtc

SEQ ID NO: 280669 - DNA, 122 bp, Homo sapiens
gaggccctggaaaaggagtctgattctctgcaattctctctctgcttttcttcccagccccgttacaaccgagttcacgtggggggccgcagtgcagccccagcggtggcagctcttggagt

SEQ ID NO: 280670 - DNA, 122 bp, Homo sapiens
ggaagcagagagtaagcttccatctgatgcttaggtgccattttgcccctttcctttgcacgcgggactgtttcccagaagcgcgcgcacgcaccagccacgcagatctgcatccaggccca

SEQ ID NO: 280671 - DNA, 122 bp, Homo sapiens
agccgcggcggggatgggggctcgaggcgccctactgggaggcgtcagggccacactccccgcccccacctcattggaatgccttgtccaggacttggccttcaggagggctggtccgaatc

SEQ ID NO: 280672 - DNA, 122 bp, Homo sapiens
gagatgacttgtgatgtgagcacatagcatatccgattataactctaggaaaacgtattccggaggcatcttctattacctctagatcagcagaaggcagaaactcctccccagaaagcaat

SEQ ID NO: 280673 - DNA, 122 bp, Homo sapiens
caaacccacaaccaatatcatactgaatgggcaaacgctggaagcatttcctttgaagatcggcacaagacaaggatcccctctctcaccactgctattcaaaatagtattggaagttctgg

SEQ ID NO: 280674 - DNA, 122 bp, Homo sapiens
aggagacgggggacggggatggggttctaaccaggcagcaggacatagcaaggccagccacggcacagcctcctcctccaccatctcaccaggctccctgccagggccggcgcagtgcagcg

SEQ ID NO: 280675 - DNA, 122 bp, Homo sapiens
atacaaaataaagaaaaccttatatatcacaaacatacactatgtacagcaataaatacccggggggccaggcccagtgctgcccctcctggacaataatttagcaataaatactgcgcagg

SEQ ID NO: 280676 - DNA, 122 bp, Homo sapiens
tcctaggactggcacactcaattccatctaaggcatggcactggactgaagtgtgttccacgtcgctgtaggcctgaccgccgaactgtggaataacaaccaagaccaaaaccaactcacca

SEQ ID NO: 280677 - DNA, 122 bp, Homo sapiens
cctggaccccaggctaagggtctgactcaggttgggaggggcctacatttccatgtttaccggctcacagctgatgccaaggtcacgctatgaccaacagtgcccgggcggcagggggcaga

SEQ ID NO: 280678 - DNA, 122 bp, Homo sapiens
gcgggagccggggctgccctggggtctgtgcggggccgcggggccagggggtcagggggccgccccccctcagctgctggacgcagggctcggccttcgcctctcggctcgggagagtcctt

SEQ ID NO: 280679 - DNA, 122 bp, Homo sapiens
tagcggtactagttcagcggccgctagtccaagtacctctagcggtactagtccaagtgccgggcactagcagtactaaccagtccagttgccgggtgttagtggtactaaccagtccagtt

SEQ ID NO: 280680 - DNA, 122 bp, Homo sapiens
ctgcagcccagtagactagcagatcagaagctagtgccactggctgagcgcagtggctcacgcctgtaatcccaggactttgggaggccgaggcgggcagatcacttgaggtcaggagttca

SEQ ID NO: 280681 - DNA, 122 bp, Homo sapiens
aaaggctcgctcctcactcccctcctatcactgttgatttaatctgctttcttcctgctgcgctgtaagctctgtgaaggcaggggctgcgtctggtttgctcaccattgtattcctagggc

SEQ ID NO: 280682 - DNA, 122 bp, Homo sapiens
gcggaccagctcgaggctgccccagtcctcctgccaggccctgggcgcccacgcccgccacgggctttcagccgcgggctgctcctgctcctcgccccgggtgagcctttgatagcgcgcgg

SEQ ID NO: 280683 - DNA, 122 bp, Homo sapiens
ctcctgagtagctgagactacagccgcatgccaccttgcctggctaatttttgtatttttcgtagagatgggatttcactgtgttggccaggctggtcttgaactcctaacctcaggtgatc

SEQ ID NO: 280684 - DNA, 122 bp, Homo sapiens
cctgggatcccccagttcccctttcctaccctatagggagccgctgcatcctccaggaagcgcatggtgtgggtagcgtgctccccagcctcccggcacaccacgcacaactgcatctcatc

SEQ ID NO: 280685 - DNA, 122 bp, Homo sapiens
ggacaccgcacagattttccgagtgaatctgcggacgctgcgcggctactacaatcagagcgaggccggtgagtgaccccggccaggggagcaggtcacgacccctccccatcccccacgga

SEQ ID NO: 280686 - DNA, 122 bp, Homo sapiens
aactaatgcaaacccttgtccatttttcatgtataaatccctcattgctgtaaattgctccgttcctgcagtatccaagatttcaagcatacactgttgtgcatctacttcaacttgctctc

SEQ ID NO: 280687 - DNA, 122 bp, Homo sapiens
agagatgctggactgcgaatgcaggcgcgctgcaggcgaggctgggagggccgccaggagcgctgcgggtatcgggagacacgcagagggaggggcaggcggcgggctccgcttcttcgcgt

SEQ ID NO: 280688 - DNA, 122 bp, Homo sapiens
catcaatccccctgcacaatggggccgccgccgatgactgatgtccgtgaaaacaacttgcggggaagtcgagctgacaaacgcccattaaaggcggcgcataatgaaggggaccgcggagg

SEQ ID NO: 280689 - DNA, 122 bp, Homo sapiens
ctgtcactcagcggctggggaggcggggccttaggcattatccaatgagggacgctgggccggaaaccgtccaatcaggcacgcagctggagcgaaccacatggtttctgggggcctttgtt

SEQ ID NO: 280690 - DNA, 122 bp, Homo sapiens
gtccagggacaaccccaaagctggcctgggctcccgcgcggacagcttttataccctgtacggaaccgcccctgcccaggattgaagtggccccgcctcccgctccgcccccccccacctgg

SEQ ID NO: 280691 - DNA, 122 bp, Homo sapiens
aaagtactgcagacgttaactccctgctggctccaactgttccctggatcccactccatccgctatccgccatctgccacccaccctgctagacctgtgggccccctggcgcccccaggcag

SEQ ID NO: 280692 - DNA, 122 bp, Homo sapiens
gctcctgataatgaagttcttactctcacacgctctcaggttcttactcctgggaactgccgatggctcctcggatctccgagtaaagttaattctgtagcaaccagtgtcaatggaacagc

SEQ ID NO: 280693 - DNA, 122 bp, Homo sapiens
gcagcctcctttgccctgtgacctgcaggtactggacggtccctagagaggataccgggacgctcctgaagccgcgagatggtgagtctgcggggctgagcttcccgagacgcggcaggggt

SEQ ID NO: 280694 - DNA, 122 bp, Homo sapiens
actcacttggggcgtggggggctcgaaaccactgagtagagcccgctcccgttgcttagccgcccgtcgccacgggaaaggggcggggcacgctgtattaggcgagccgagattacttgggc

SEQ ID NO: 280695 - DNA, 122 bp, Homo sapiens
tacccctctgtgagccctcacacaaaagctcgggaaatggaggctgtggttttcaggcaacggggcacgcgcttgggtgcggcaccccgaatcgttcccgctgcttgatcgtcacgctctgt

SEQ ID NO: 280696 - DNA, 122 bp, Homo sapiens
aattttttcctcccggagcccgagacgctgggaatgttctgagcccctttggtcggtctccgccctcaaggaacttctagagcagcttctgcttcccagatggggagagggggtgggggccg

SEQ ID NO: 280697 - DNA, 122 bp, Homo sapiens
ccaaccaaaaaaaaaaaaaaattcttgagtcccatcccagatctactgcattggaagctgcggtagtagggcccagcatctgtattttaacaaatcctccaatttattatagtgcatgtaga

SEQ ID NO: 280698 - DNA, 122 bp, Homo sapiens
ccaccagagcccctcagctccacagggatgcccactgtgaagtccttcccagtgtgaaaccgcaatccttcctgcttggggttcccctaagggaacggcttccgccacaggagacccagcca

SEQ ID NO: 280699 - DNA, 122 bp, Homo sapiens
cccggccctgcccgccggggacgctggcaccgaggatgtcctgcccgtggcccaggtccccgccgctcaccaggtacttgccgtccggggagaacttgcagagtaagctggagagcttgaat

SEQ ID NO: 280700 - DNA, 122 bp, Homo sapiens
actgctccgcgcgcgccgcgggaggaggaaccgcccggtcctttagggtccgggcccggccgggccatggattcaatgcctgagcccgcgtcccgctgtcttctgcttcttcccttgctgct

SEQ ID NO: 280701 - DNA, 122 bp, Homo sapiens
tgccccgcactgaccctcaggcctgccgtgggctgagcacagggtaagcaggtggatccacgctctctctgcccctctcgctccctctccctgctccatcacacttcccattgaagaggagg

SEQ ID NO: 280702 - DNA, 122 bp, Homo sapiens
gcccagtccaggatgcgccaggcttccgggccacctcaccctgctcctctcctgctgacccgccaggatgcaccaggctccccggccaccccgccctgctcctgtccacccttcttctgtcc

SEQ ID NO: 280703 - DNA, 122 bp, Homo sapiens
caggtagcgtgggattgaccctgttagccctggacatcaagcctggagtgagagatggcccgaaaacccctgggacctgatacaagcaagggctttgggatcaaccaggctctcactaacag

SEQ ID NO: 280704 - DNA, 122 bp, Homo sapiens
cgcggtgcgcgacttctcggaagttgggggactaaaaggggtctgattttgggggtcggtcggtattgaagacccagaaagccaggggaagtagaggacctggaggaactgggtatgagact

SEQ ID NO: 280705 - DNA, 122 bp, Homo sapiens
tcccttgcctataagctctcaattgcctatcacactaggcctagcacactgtgcctagcacgtatgttgctaagggtttctgaattgaatgaacatgggaaacataaaagcagaggaaagga

SEQ ID NO: 280706 - DNA, 122 bp, Homo sapiens
agtgcaaatgtagatttcagctgaaccggtcaggacttgagagatagctgtttcactctccggactgcaaccacttccgcgagaatctgatacatttaatgaaagctttgccaaatgtacgg

SEQ ID NO: 280707 - DNA, 122 bp, Homo sapiens
ccagtccccgctccctcacgtgcacatgcactagtgcacacactagtccctgctcccccacgtgcacacacactcttgcacacagccggccccgctcccccacgtgcacacaccagctcccg

SEQ ID NO: 280708 - DNA, 122 bp, Homo sapiens
aggtgtgcagggattggttgggaagcgctcaagccccgcccacagagtgacgtcaggtggcggtattgctacttaaggcgtcgtggcctcccctgccccgccttagctcccgcgctagagag

SEQ ID NO: 280709 - DNA, 122 bp, Homo sapiens
ttgtccgctacaaccacaaaaccgacgctgccctctggcaccggagcaaccacagtaacgcggacaatgaattttactttcgctacccaagtgagtgcggggtgagggcgcgcgggaagcaa

SEQ ID NO: 280710 - DNA, 122 bp, Homo sapiens
ccacccgccttgccccgcccttgccccgcccctagcttggccgcaccgcccgccccgccccgcccctcgccaggaagcaccgcccgccctgcccctcgcagggctgcaccgcccgccccgcc

SEQ ID NO: 280711 - DNA, 122 bp, Homo sapiens
aggcactagccaggaatgacacagttaagattagcaccctggagcctgcggggtggctcacgcctgtaatcccagagacgcaggagtctgaggcaggaggatgacttgagcccaggagttca

SEQ ID NO: 280712 - DNA, 122 bp, Homo sapiens
tcctttattaatagtcttccttcacatgtatatcactctgctatttacaaaatgctcttacgtttagtatttcacttgatcagcataaacacccatgggataagctaggcaggattgttgtc

SEQ ID NO: 280713 - DNA, 122 bp, Homo sapiens
attatggtaataactgactcaggcaagggtcatcaattgatattaagctcttggaaacggcgtgtgttgaggaacaggctatttaattactttcgaagtatctccccagaaagcacttatta

SEQ ID NO: 280714 - DNA, 122 bp, Homo sapiens
agttgtcatcggtagctatgtgctgaagctctgccctggaggcggcctgggctccaaggccgaatgagaacacgctagcctgcttcagtgctaccaccccgtagcgaatctcgtcactagaa

SEQ ID NO: 280715 - DNA, 122 bp, Homo sapiens
tggagtcttctgaggggacaccatgtggccagagcagggcttccttggggtgcctgatttcggccgatctcggacctgcaggagcctgtagctttccctcacacaggagtgcccacagcctt

SEQ ID NO: 280716 - DNA, 122 bp, Homo sapiens
gtattaggggaaagctagagagtgactctgggtgatggtgctcggctcacagtcacatggcgtcgccgccagctgcacagagctcccagctagcttctgctgcccagaggcttggggggaag

SEQ ID NO: 280717 - DNA, 122 bp, Homo sapiens
ggaatgcacacggcggtacagtaagaccgcttgactcagggctaggcggaccctttccttcgaaaagtcctcagcccccggctcgggaacttggggtgaggcgaggttttcttttcgttctc

SEQ ID NO: 280718 - DNA, 122 bp, Homo sapiens
caaagcattttgagaataactggccttgtgtgaggccctgaggatgaagaggtagattaacggggtccctgacctcctactctactaggaagacaaagaatgaagctctaagtagacgctgc

SEQ ID NO: 280719 - DNA, 122 bp, Homo sapiens
gcccaggtccgggaccaccacaattcgcattgtcgtcttggataataatgacaacgcccccgaatttttacaatcattctatgaggtacaggtgcccgagaacagcccccttaactccttag

SEQ ID NO: 280720 - DNA, 122 bp, Homo sapiens
agaggaggtggacatcgagactgaggctgtggcccctgaggagcggccctccatgctggacgagccccccttgcctgtgggtgttgaagagccagcggactccagggagccgcctgaggaac

SEQ ID NO: 280721 - DNA, 122 bp, Homo sapiens
ggcgtggccgctggctcctggtgagttggcattgggcttaaaagacatggtctgtgcccccgcctgtccctcatccaacatattcacacctctccgcccccacccctccttgcctaccatgc

SEQ ID NO: 280722 - DNA, 122 bp, Homo sapiens
ctagggagacgcggcgtccaggcttccagccgcagctcccagcgttcgcattcccttctgcgaaatgggtgcacggacacgattagaaggtcttcagagagcaatacctggaccttgtcggg

SEQ ID NO: 280723 - DNA, 122 bp, Homo sapiens
cccagagaacgacgctctcctcccaagaggaacctcggctcttccgcggcagaagctgcacggaaccaagaagccgcgggcgctggttctccaacgagcttttctcccgttcgtaccagcgt

SEQ ID NO: 280724 - DNA, 122 bp, Homo sapiens
ctcctcttaactcgcggtcccgccccttccggccagtgttggccaaagcatttcctctttcggcctcagtcagctagcggctgctaggtgcgggcaccatgctactgatccttcttgctgtc

SEQ ID NO: 280725 - DNA, 122 bp, Homo sapiens
ggtctcgaagggtcacctggcatcgggcagccccgccgggacagatgggcaagggggccacgctctggcacaggagcaggtttgacaccagcagcagcaggagggaccctgcttaaataaga

SEQ ID NO: 280726 - DNA, 122 bp, Homo sapiens
tgcacgggctgccatggctgaaggggggacccggaggctgcacgggctgccttctgggaacggtggcatcacggagactcgagtgatcagaacaggaaccgctgtgttcagggaccacgtct

SEQ ID NO: 280727 - DNA, 122 bp, Homo sapiens
acttcaccaagagcctcggcagctccagagcgacgggaaacgaaaggtcagggggtcgatcggcaaaccctttctggtttggggtgcgtgtaactatagggacttttgtctcagtgaagagg

SEQ ID NO: 280728 - DNA, 122 bp, Homo sapiens
caaagagcctggggtgggggtggaggtgcgtgagcgctgcctctgtgtggggatggtgtgcgcaaggcagtgctgaggaccttcaagccagtcaggaatgaacctgggctctgagacagtgg

SEQ ID NO: 280729 - DNA, 122 bp, Homo sapiens
cccacccaagaaccgaaatccaggctgccgctgcgcaaaggcagctagaaacggagcatgcgctctgtgaccgagtgagaatttacccaaccccgcaaaattgaccaagggtgcgtgctccc

SEQ ID NO: 280730 - DNA, 122 bp, Homo sapiens
cacttgggaattcttcccagcggcccatcggctctgctgcaaatcctacccgaagggtcccgcgcccacccacactggccagtccgctgcaaatcctacccacagggtcccacgcccaccca

SEQ ID NO: 280731 - DNA, 122 bp, Homo sapiens
ctctgctcctgcctgctcttctggctccagccagcacgttggctttccagcttcagggctcgagtccatgtccctttctggctctgcttcctgcttcctctggatggacggtgtcttgccag

SEQ ID NO: 280732 - DNA, 122 bp, Homo sapiens
agaactaggtgatgctcttccctttaggtccttttcagctgcttcctccctttttctttgcggaactccactgttatccatggtttttggaaaaattgaacaaagagggccataataagcaa

SEQ ID NO: 280733 - DNA, 122 bp, Homo sapiens
gggctgcagttgagaaacagcccatcatgccgaagtgggcccgacattctagtggaaggacgctctatccatacacacacatgcgcaaataccacacataccacacaacgtgcggcatatat

SEQ ID NO: 280734 - DNA, 122 bp, Homo sapiens
cccagcctgcacttcccagctggccagccccgcgcgatgctccggggtctcggcgaggcacgccaggcactgagtcctcagacccgctgtccggggacctctggtgtcgtccattttacaga

SEQ ID NO: 280735 - DNA, 122 bp, Homo sapiens
cctcatctccttttgtttccgccatagcccctctttcctgccaatccaaagcatgagcatcgttctgtctccctcacagctgccactgtgccctcagttttaatctctctgctgggtaccaa

SEQ ID NO: 280736 - DNA, 122 bp, Homo sapiens
caggaacccaaacactggggcacagtgagtgaagctcacaggtcctgcacctgccgctggcgtctgttacagctcatttctttcgtgtgtcaggtagaaagggcactctatataactctgca

SEQ ID NO: 280737 - DNA, 122 bp, Homo sapiens
attttgcatatgacgatataaaagtattacagaaagacatctagcctggagataagggagcggggccttatcaggaaagacgtttatagtggtacgtccaccaagaactcagggagaaagaa

SEQ ID NO: 280738 - DNA, 122 bp, Homo sapiens
tgacttttgggaggagcaacacctttcaggtcagcattgctaaccctaaactttccccgccggatgcccgcgaggctgctgcggcggcggctgctgctgatgggagagtctcgagtccggct

SEQ ID NO: 280739 - DNA, 122 bp, Homo sapiens
atgtaaagcatgattattctaagtatactatgtgctcttaaaatcccttgccaaatgacacgtgtcgagtagtctgctactttctgaattatagcaaaacgcacagatccctggttataaat

SEQ ID NO: 280740 - DNA, 122 bp, Homo sapiens
tcacactggccaagcccccatcagtggtcaacaggacggccaggccttttgggatccaggcgccagggggcaccagccagatggagaggagccccatgctagagagacgacattttggggag

SEQ ID NO: 280741 - DNA, 122 bp, Homo sapiens
agcccctcctcgccccgtgaggaccccgaacgcagcctcgtgctgtgatgaccctgagcccgtcccagcaccagccccgcccccggcggactccaggcatacctgggcggagactctcaggg

SEQ ID NO: 280742 - DNA, 122 bp, Homo sapiens
tccggagccgcttcctttctcgccgcgaggctcggggttggggggggaccagattggagccgcgggctaactgggatccgtcccatttccctgggcttgacgttctctgaatttttagctaa

SEQ ID NO: 280743 - DNA, 122 bp, Homo sapiens
agaaaattcagaatagatgcccaaactagatcttccaaatcaaaatgtaaacaccaccagcggaattctcctccaatttaacgcaaatcctccaccccttccatgatctcagattattaaac

SEQ ID NO: 280744 - DNA, 122 bp, Homo sapiens
caggcctcggagagctagcgcccaagccctgaccttcacccaagatcccccttctagggccgctgtcagccgaagacaggaatcttgaggccctgtctctggacaccatcgagttaactgtc

SEQ ID NO: 280745 - DNA, 122 bp, Homo sapiens
cactttctccttagtcctcaggcctctctcactggttcgttgagctacacagctattctccgagattgctctaagtcggtgtgagaatcttttaagtgtccttcaaaggctactttgcaatg

SEQ ID NO: 280746 - DNA, 122 bp, Homo sapiens
ctgagccctcagtttagggagctgaggatcgagcatctgatgtccttgcaggaggcagggcgttccccagatccgaggggttcagatgcaggacggcccagcagagcaagaggatgtgtgcc

SEQ ID NO: 280747 - DNA, 122 bp, Homo sapiens
tggactatatttgttttcccttttctacaaatcagcatgtaaaataaatttctgaccaggcgtggtgggtcacgcctataatcccagcgctttggaaggccaaggcaggcagagcacttgag

SEQ ID NO: 280748 - DNA, 122 bp, Homo sapiens
gaaaagaaggatagagagttgggagggaacagtccagagtctgacagaactaagctgttgcgtaagggtctgacctggctgcttgccatgaacccctgacttgcttctcctcgaagcctcct

SEQ ID NO: 280749 - DNA, 122 bp, Homo sapiens
tcttaggagctcgggtcctgactctgccacttaccaactcttgtgtgtcccatgtgcctccgcttcccctcgggacacagagatattgtgaaagttaaacaacataatccccgtaaaacact

SEQ ID NO: 280750 - DNA, 122 bp, Homo sapiens
accagtgaagccggaactcactacaccgtcccctaagtgacgccaaaatgcactttctaacgtctccggagggaagtgcgcttgcgcaaatgctaggttacacttgagtaactccgggaatg

SEQ ID NO: 280751 - DNA, 122 bp, Homo sapiens
ggttggggtgtcccatccaacggaagcccctctgcggaccgcgtgtccagactctgcaggcgccctgtgacgactctcttgcacacacgcacacacacacgctcatgcaaaagcatcgcatg

SEQ ID NO: 280752 - DNA, 122 bp, Homo sapiens
cagcgttgctcgtatacaggggactaaatgcatggttggcgaaggaataaaagcctgtatcgttggcacctcagcttacggaagttgtggggagttttctgtgctagaaagtcgtgcctttc

SEQ ID NO: 280753 - DNA, 122 bp, Homo sapiens
ccccgttgcccacagagaattcctaaaggcctatccatatgtccctgtccataaagacgtcgagtgtggaggacaccctggaggaggagatggaaccctcctgtttgctggggctcggcccc

SEQ ID NO: 280754 - DNA, 122 bp, Homo sapiens
cgactccggctggcagcgcaggaggcgcagttagcgagttggtaccgcggtcggtgggtgcgggccacgtggtggcgaaagtgcgcgcggtggacgctgactccggctataacgcttggctg

SEQ ID NO: 280755 - DNA, 122 bp, Homo sapiens
ttagtttaatttttacattcctatctctgatccgttggtaattcagcctggtggttggtgcgaggagtgaatctgatgttaccttttcttatacagttatcttgttcttacaccatcactta

SEQ ID NO: 280756 - DNA, 122 bp, Homo sapiens
gcgtgtttggagatacgcaatcaattaagagtttttttattaatggaaaggtgtggagggcggggttttggttttcttgggaaatgaatgagtcatttggcaaactttcctaccattaattt

SEQ ID NO: 280757 - DNA, 122 bp, Homo sapiens
ccgccagccccgtgttaaagcggcagccagggaggtgtatcctccccggggtctgcaagacgccggctcagggcatccctcccattccggccctcaaagcctcgctcctgggggcgctgctg

SEQ ID NO: 280758 - DNA, 122 bp, Homo sapiens
gcacaaccaaacactgatccacactcttctaactctatattcttccgtcattcattcatacgatacatctttgttgagggccaactaggcttcaggcagagggggttatatggcagtgtttg

SEQ ID NO: 280759 - DNA, 122 bp, Homo sapiens
gcagacaacaccacagcagtctacaaatactatcaaggactcgcgggatgcggtggatcccggaagaggctgctggcgcaccgaccccgtgagccaccaggccctgggccgtcctggcagtg

SEQ ID NO: 280760 - DNA, 122 bp, Homo sapiens
cctggaggaaaatgtggaaaatgatccctgtaaatttgctctgacatcgaggacgggtgacgtggtagagaccttcattttgcattcatctagtccaagtgtccggcaaacttggatccatg

SEQ ID NO: 280761 - DNA, 122 bp, Homo sapiens
tggaggaggtgtttctggagttgccccgtttttcttgtgatgtgtgtggtggttattgctcgtggcagaatccacatctgctcccagaggaagtatggaagtttttttgcacagccaggatg

SEQ ID NO: 280762 - DNA, 122 bp, Homo sapiens
ccgtggcgggggtgggtatgcgccaaccctatttcaggcagcgctcaaagtaggtggagccgatgtagccaccccgcatggagcgctgcacgttctgctcaaacagccgccggttgttctgc

SEQ ID NO: 280763 - DNA, 122 bp, Homo sapiens
gtggggagaggccagcccgaccctcggacggcgggactcgcgggctactttaggtgggcgcggacctggggctctagcactgactaagtcactgcacctgcgcaagagtctccgccactctt

SEQ ID NO: 280764 - DNA, 122 bp, Homo sapiens
cgctggttgaggcgctcttaaagtcctttgtaacccagattggagcctgaggggacctctcgtggacgcccacagaaatgcactcgagaggaacataaaagcatcacacttaagcgctcgaa

SEQ ID NO: 280765 - DNA, 122 bp, Homo sapiens
cgggagggcgcctgccatagacgactgtaaaggggcggggtcagctcggggaggaccctgcgggcgtggcggcagttatgggtgaagcctgagggggcggggcctgatcggggcggggtctt

SEQ ID NO: 280766 - DNA, 122 bp, Homo sapiens
aaatgttggcttaaaagccgaattgtcatgagcattccttgaatgtcttttactacacctcggtgtttgttgctatagactattgcatgtgcattacatgcctactgtaggcttctgatatg

SEQ ID NO: 280767 - DNA, 122 bp, Homo sapiens
caggggacaagaaaatgagtacatggtgcaaggcaaaggtctgaaatagcacagcaccttcgagtcaagtgggacaaactgactcaaaatacagcttctaaaaaaaccacagcaagctgttc

SEQ ID NO: 280768 - DNA, 122 bp, Homo sapiens
acgtcccgtggtagaacaaatctctttcgaacttgggttggctggagaacttttcccaaacgactttagccttggagggcacctcagatggaaaagtgaaggctctgactttggaggggagg

SEQ ID NO: 280769 - DNA, 122 bp, Homo sapiens
gcatgtcgcgggcgccgcggcagggaaatgtgggggcgggccggcgcgccccctcccccccgcctacgctggcccattcataaaacctgcaggcgctgcccggcctggcagccttggtctcc

SEQ ID NO: 280770 - DNA, 122 bp, Homo sapiens
acgtcaaataactggcccttacctgcatctgccctgctttattttcctgagtaacacgcacgtaacacgcgtcaccacctggcctgctcactgatgtgactgctcattgaccctcccagact

SEQ ID NO: 280771 - DNA, 122 bp, Homo sapiens
ccggctccaccaggtaaccgtcttgcaaagaccagtttccttatttacaactccccccaccgcgcaagtggaggaggagccagccgcgcccaggtcacagtttatttggcccgcgctaccag

SEQ ID NO: 280772 - DNA, 122 bp, Homo sapiens
ccaaggagctgggggaaggggcatcgctgtcatccagagagaccacagagacagcaaccccgctgtggggacactggccacttctctgcgctgttgatgttgctgccaataaaatattagct

SEQ ID NO: 280773 - DNA, 122 bp, Homo sapiens
acagttgaaaacgactgtagagaccctccggattactggacaatacatgggactatggcccgataaaagtgaaggatgtaatggatcgtggcactttaatttagaagagattaaggatcttt

SEQ ID NO: 280774 - DNA, 122 bp, Homo sapiens
gcaagaaaaacggtgcgcgctgcagctctttaactggaacagcctctgctcggtctacctcgcccccaacagctgcgcaacccaccaccgcgcaggcgcgctgcgtgccgccagcgccatgc

SEQ ID NO: 280775 - DNA, 122 bp, Homo sapiens
tccgccgtcacgtgtgccggggaggggaccaccgggaggttcccgggcccgcggaggtggcgcgtctgcgagcgcctatttgcatatgcgtaccctggatatttataacttctcttcagcca

SEQ ID NO: 280776 - DNA, 122 bp, Homo sapiens
cagggagtctgggccaaagcgccaaaatccgccgctgtcgctcagctgcagcacgtttcgcgctggggagcctctcctggtgggcgaccgtcatggacaatcgacaagaccagaaattagat

SEQ ID NO: 280777 - DNA, 122 bp, Homo sapiens
cgccactgtggcccctggagagctgggccaaagaaaccaggcggcgaggaggcagcggcgcgaagacacgtgggggctaccgggcaggagcgccccactatgcgcaagcccgtggcctggag

SEQ ID NO: 280778 - DNA, 122 bp, Homo sapiens
cctgaaaacccaaacccacagttccccagcagtgaacacagctatttaaaggccgagacacggaggaattacaaggactaagttccctttggaagccttcaccaatgcgttgagtaaaaggg

SEQ ID NO: 280779 - DNA, 122 bp, Homo sapiens
agtctgtcccggagccggccgcgggggcaggagctgggctttggacgtgttcgttctggacgcctctgggccttggctgctgatgtccaagcctgcaccctcaggggcctgggttgcagatg

SEQ ID NO: 280780 - DNA, 122 bp, Homo sapiens
gcgtgtgctctttttctgcggcatgacgacaccgcagatgaggagagccacaaagggcagcgagtgtctcggaactctgtggttccattgtctccgcggcgctgggctgcagtcaagccagg

SEQ ID NO: 280781 - DNA, 122 bp, Homo sapiens
gctgggggtggagggcagccggcgatgatggtgatggaggatggcgtcccgcggggtctgcgcagttctgtctgctggcactgggaacgtcactggagtcccctcaggccatggtcttaggc

SEQ ID NO: 280782 - DNA, 122 bp, Homo sapiens
gacggggcggggtggagctcggagggcggacgcgctcggggccgtctggtcggcagggggcgctgcgcacccatgccgcgctctgcctgcccccgggtgctgtccgcggcggttcgattgga

SEQ ID NO: 280783 - DNA, 122 bp, Homo sapiens
aactgtggtttgctccacagatttctgagcattggccgtagtatacccctggtcgtgtagcggtgaatgtggtttggttcaggcgtccgggaattgcatctgtttttaggcccagtgtgggg

SEQ ID NO: 280784 - DNA, 122 bp, Homo sapiens
gggccaggggagccggcacggaagcggctgtgcgcatgagcagatgaggcctagccgaggcggcgggacccccaagtttggaaagctcttttaacggtgagaacgcgttaacacttgccaag

SEQ ID NO: 280785 - DNA, 122 bp, Homo sapiens
ggcggggcttccccgccctcggacgctcattggctgggcgagacgcttctgggcgggccgcgcacgcctgcatctaggtcttggccccgcccctcccactggaaccccgccccttgggactc

SEQ ID NO: 280786 - DNA, 122 bp, Homo sapiens
ccacaggcattacctgcctcatcgatattataggggtccatcacaacccaactgtgtggccggatcctgaggtgctgccttccccattcaccaccaccacccccatcctctacttttgtgtg

SEQ ID NO: 280787 - DNA, 122 bp, Homo sapiens
ctcccgtctccgcagcaaaaaagtttgagtcgccgctgccgggttgccagcggagtcgcgcgtcgggagctacgtagggcagagaagtcatggcttctccgtccaaaggcaatgacttgttt

SEQ ID NO: 280788 - DNA, 122 bp, Homo sapiens
ggagtgggggcagggcagattcaaaaactgccggtaggctttctagaggaagggatgaaacgtgggcccttccaatgctagtagccgatctagttacaaaatgtcagatctggaaggaaaca

SEQ ID NO: 280789 - DNA, 122 bp, Homo sapiens
atcacctaatatggggagggctgagtcgtccagccgaatgagttgggttaacaccagcgccgcagatcgatgttcccactatccaaacgtcgggctaatcccagttctgctcccttaactaa

SEQ ID NO: 280790 - DNA, 122 bp, Homo sapiens
ctgtccctcccctgtcctgcgtgggcgcccctcctcggccccagcatcgaaacctcctctcgccccagtccaaagctgctctggaaacctgccgcggcgcctgctgctctgatcttgcttct

SEQ ID NO: 280791 - DNA, 122 bp, Homo sapiens
tccctttctcacccgcaccctccgcgcccgagtgagcctacctcgcttacagctggttgccggccattgcctccgccaccaatgacgtccccaggggcgggtacgcctccgcttccacctcc

SEQ ID NO: 280792 - DNA, 122 bp, Homo sapiens
catggatgaactttgaaaacatcgtcctgaggaagagaaaggagccagacacagagcccacgaccgcatgatcccattcctgtgaactgcctagaagaggcgcctccgtggaggtggaaagt

SEQ ID NO: 280793 - DNA, 122 bp, Homo sapiens
gctcctgcgctgaggaaggcttttgccccccagtggggcagcatgggccctccctgttgccggcatcgttattttctcccagctcctgatgggtcccttgggttgtgcttcggggcggggca

SEQ ID NO: 280794 - DNA, 122 bp, Homo sapiens
agcaggctgtgggcaggcgggccctgacacgccatcagcatttcttggcatcacgacttgcgtctgaggaccaggtagacatggaactttgcaaatgaggcggccccgctgatccaggggca

SEQ ID NO: 280795 - DNA, 122 bp, Homo sapiens
cctgcattcctgggaaagcaacttgctgtttactttttaaattcatggttatctcgtggacgtcttttcagtttagtgtatacaggtcttccttatttttttaaatggctgcattattttcc

SEQ ID NO: 280796 - DNA, 122 bp, Homo sapiens
gggcggggactgtgggggaggagggagacccgggtcccgctagtgccccggctgcggggtcgcggagaattggggcactcctttgcagccccggcctccctgctggcgcttgtctgggagag

SEQ ID NO: 280797 - DNA, 122 bp, Homo sapiens
ccaggacggagccagagggccggtctcagtctttaatcgtggcagggcctcacgcacgcgcgcacgtacacacactcaggcttcagatcttgttgaaagctgcgatatcgacactctgcacc

SEQ ID NO: 280798 - DNA, 122 bp, Homo sapiens
ccatcagccaggtgcctggccccgggtctgtctcttagggttacatgctcccggggctcccgcacataccccggcagatgagggtgcgcaggggtgagggcgcagggctgggcgtcccccgc

SEQ ID NO: 280799 - DNA, 122 bp, Homo sapiens
agcctcagccccgccccgcctccctcagtccctcctctccctgcccccacccacgcgccccggttgtctcaccactgaaggtcggagcaccctgggccgttacattgtctatttttagcgcc

SEQ ID NO: 280800 - DNA, 122 bp, Homo sapiens
actttgtgatccgcccacctccacctcccacagtgctgggattacaggcatgagtcagcgcgcctggccttgccaggtgctttttctaagtgctagaataacagaaaattcttgccctcaag

SEQ ID NO: 280801 - DNA, 122 bp, Homo sapiens
gagccggatcccctaggactggtcgggagcagaaccactgggaccacctcccatgacccccgttgtgggggaggcggagtgccaggagcagctgtcttcccccccggctgctgttgtgagcc

SEQ ID NO: 280802 - DNA, 122 bp, Homo sapiens
ccgggcgggggagggggcggcggggcggcgggacggtgggtgggggccaccaggcggcgccggagaccaccaaactttacagcgagcgagcctgcttcctggagggagtgcagacaaggacc

SEQ ID NO: 280803 - DNA, 122 bp, Homo sapiens
ctcagtgaaaactaaagcaaaagcagcaagagtctgcgcggggcaaacgtccttgcgatgcgactagcagacaagaggcaggagatgcgaggcgtcctacccgaatttagtacctccagcaa

SEQ ID NO: 280804 - DNA, 122 bp, Homo sapiens
ccccagctcccacttctctactccctgcttctgcagggcatttggacagtttttctcgcccggtgagtgcatgtggataacactgctgtaccctttccccacatgctatgccaacctgggtc

SEQ ID NO: 280805 - DNA, 122 bp, Homo sapiens
agagcccggcgctagctcattcttcgtgcagttattggctgggactctgtgtgccgctgtcggccaatgaagacgctggagatcgggcccctgcccgtcccctttctgcgccccgggatgag

SEQ ID NO: 280806 - DNA, 122 bp, Homo sapiens
aaggagacaggaggaaggggcagggccagatcaagagctcttccacctagatgtgttctccgggcttgatcccgacaatgtggagtcattaagggacattatccgaagtgcattttggcaag

SEQ ID NO: 280807 - DNA, 122 bp, Homo sapiens
tgttaggaaactgaaaaacctaacagtgtgtcctcctttcctggccaaggaagaaaccaccgtttagcttcttcatgccccagccaaagagcaggcgatggaggcccagaaaaccaacccca

SEQ ID NO: 280808 - DNA, 122 bp, Homo sapiens
aacaacttaaagtctcagaattggacagaatttggaggacagctggtttagtccctcccccgtggcaggcaggagtccctcccagagcaccccctgctaggcagccatttagctttccctag

SEQ ID NO: 280809 - DNA, 122 bp, Homo sapiens
ttcccccgtgtctaggctgtccttgccaggcagtggactttcgctcttgccctgctcagccgcttccctcctccttcccataaaacatggggctcagcccggcaggaactccctaagtagct

SEQ ID NO: 280810 - DNA, 122 bp, Homo sapiens
ctccgcgacctcttaccattggtttagacgacgcagcgtgcgtctgacgtcattgcgcggcgcgaccaggttcaggggcgggccgcgcggagcctcatttccccaaacgcaggcgctcggtg

SEQ ID NO: 280811 - DNA, 122 bp, Homo sapiens
actgtgccattcatttttgcttgaaacaggtcttggggctgccaggcgggagtcgggagccggaccaacctgggggggtaaagggagaggcgaagccgttgcagcggggaagcaggtgggga

SEQ ID NO: 280812 - DNA, 122 bp, Homo sapiens
cccacactataaaaggctctttctaaaaaacgaaacatgattaagggcacacggctccagcgttaacaaagctctttgttagctgggaaatgcccccctccccgactcatctgcttatcatc

SEQ ID NO: 280813 - DNA, 122 bp, Homo sapiens
ctgcaaatcctgcccgcctgcccacgctgctgctcatctccctccctcctatgtccggcccggttgcctcccaggaaaggtaaacatgcagaggcaagggctagctgccggccttctggagg

SEQ ID NO: 280814 - DNA, 122 bp, Homo sapiens
acccggccattaggagagccttatttagaaacccaaacaatgacttggccatttattaagcgcctgctggatgcctggcaaatgctgtcaagaaggtgacatgaagattccccaatttccag

SEQ ID NO: 280815 - DNA, 122 bp, Homo sapiens
tccccctgccgagatagtgaaaatagtaatcaatacatactgagggaactcggagaccggcgccggtgcaggtcctcacatgctgagtgtgccggtcccctgggcccaccgttctttctcta

SEQ ID NO: 280816 - DNA, 122 bp, Homo sapiens
ttctaaggagctgagcctcaaaccagctgcagaccgagttctaacgggctgagcctcaaacgagctgcaggccgagttctaacgggctgagcctcaaacgagctgcaggccgagttctaacg

SEQ ID NO: 280817 - DNA, 122 bp, Homo sapiens
gatggggtgaccactggcaggcttacgtcagggtgtctgcgggcttctggcagcaagtcccggaagtggctggaaaggcaggttttacagaaaatggaccagaggggttgtttttgccaact

SEQ ID NO: 280818 - DNA, 122 bp, Homo sapiens
gccggaaatggcgcagcggcagggaggggctcttcacccagtccggcagttgaagctcggcgctcgggttacccctgcagcgacgccccctggtcccacagataccactgctgctcccgccc

SEQ ID NO: 280819 - DNA, 122 bp, Homo sapiens
cctcagtcctaaagagggaatctgggaagcataccataacatctgctacacagatgaaaacgacgtactttctgagtatcacccctatttttggtatctctgacattgtctctcttgcaaaa

SEQ ID NO: 280820 - DNA, 122 bp, Homo sapiens
ccgaggaaacgctgtcaggtcgcctttggttggcaaggcgtggttgtcctcgctgtcccgcgccttggcggaatgggcacctcactagccctggcactagctagcatcgctctaaactcaag

SEQ ID NO: 280821 - DNA, 122 bp, Homo sapiens
cctgtccctggtataacagcttccgggagaagccggaagagaccggaccctgaacagaatcgcagattgccagcccttttcccgacccctacggaaagacgagtccaggggccgtcctggcg

SEQ ID NO: 280822 - DNA, 122 bp, Homo sapiens
cgtccgcgtcaggagacttaggtccaggcgactgcccagacaatgactggtcccgcataccgagcagagcatgatcagcagcagtctgagtggaagagtgcctgtgatcttagggaacctga

SEQ ID NO: 280823 - DNA, 122 bp, Homo sapiens
tgcaggggagacgggcacgtgaggaactgccaaggagcaaggggccccatgggccatgggcggggaccccgccacaggcaggggaggagagagctgcctgctaggtggggagacagctggga

SEQ ID NO: 280824 - DNA, 122 bp, Homo sapiens
agcctcgtctaaagcagctctgggatttcgacagagctgggctcagaagccagttgttggcgctgtccgtggtgctgaggaattcccggctgccggcagaatgagctccaaatcagcaatct

SEQ ID NO: 280825 - DNA, 122 bp, Homo sapiens
gtctagagtgttgggcagaagaatctgggaccaaaccacaccagttctctccttaatccacgtcatttgccttctatcccagctatgtttccagtgtcctctgggtgtttccaagagcaaca

SEQ ID NO: 280826 - DNA, 122 bp, Homo sapiens
ccatttctctctctctgtggtcctgcaggctcttggagtgtttacactaaactccaggcccgggaagggaatttacagccttatcactggaattgaaagcgatgtcggctgggggatgtgcg

SEQ ID NO: 280827 - DNA, 122 bp, Homo sapiens
gctgatttgatagaatctatacccagattacccagggtcaagtcccagctctggtacctgcggcctttaaaaccacgaaaaaattactttaatctctgtgtctccatttcctcatttgtgaa

SEQ ID NO: 280828 - DNA, 122 bp, Homo sapiens
tattaaagtccttccctgagatttctgagtttaaaaacaagagaagcagtggtgttttctcggggtcatggtaccataaggatatgaagttagaagactgtgactatctttgtaaccaaaca

SEQ ID NO: 280829 - DNA, 122 bp, Homo sapiens
gggctgggtatcagctgcttggggcactgaccaaataggactacatcctatctgcctcatcgtatgggatcacatctgagcagttgttatccaaaaggacaaccaataattctctcattatg

SEQ ID NO: 280830 - DNA, 122 bp, Homo sapiens
agattccatgaagtctggctgctggctgcagtcagctcagtcaacccgaggtgatgatgacggccttcagtggaggtgggaatacttgggaactcatattctgtttgcagccaaggtatttt

SEQ ID NO: 280831 - DNA, 122 bp, Homo sapiens
gggagagcgcggggtgtggtgctgagtggtctctcagtgggctaagagctcagggctgcccgaggtgcagggacccccggggcaggaggagtcatagccgctgtgtgtgtgatgtatgcagt

SEQ ID NO: 280832 - DNA, 122 bp, Homo sapiens
atacaatgatgatgggaaattgagttgtcctaaatcactagttaattatgatatgcccagcggtcacttggaggttcttgctctagatctcagtttatattcatccctattgttttagaaat

SEQ ID NO: 280833 - DNA, 122 bp, Homo sapiens
gagagcgcgcctgatagctgctgcccacctgggcactgacatcctccttccgaccgggtgcggagaaagttagtatttgactccgcagccactactcgccccaccttctcacctccgagggg

SEQ ID NO: 280834 - DNA, 122 bp, Homo sapiens
catgggatgggccatttcaggaagagggagctcctgttctcatcctaagtctgaacggtccggaattcaaagaggatcaataaatggcctttcaccaggatcacaatggattttgtagagtg

SEQ ID NO: 280835 - DNA, 122 bp, Homo sapiens
caggcgggcacatcagacatcactcccagtgaacagaaggcacagacgctgcctcatccacggactcctcagcagtggaaatctccacaaaggccacgctgcccacagccacgcatgagctc

SEQ ID NO: 280836 - DNA, 122 bp, Homo sapiens
gcgggatgagactgtccgcggaagcgagggtgtcgctcgcccccgggcccgggtccgccccgctccgaggcctgctcggaagaaagacctcggtgcacagttctcctcgcgctcccacacct

SEQ ID NO: 280837 - DNA, 122 bp, Homo sapiens
ctcctgccttgtgacaggatgatttgattttacaaaagtccctttgaaaacaagagtaaacgcagacagcttctagagaaaagtctggtgaagcagcagttgataatagattttcttttagt

SEQ ID NO: 280838 - DNA, 122 bp, Homo sapiens
ccagtggagcgaacgccgggtgccctgcctgggcgcagaagcgggaggaaagcgcccccgcgcggcaaccccgccttcctagccctgcgcgcaagcagctcccacccggtgccgtgcactct

SEQ ID NO: 280839 - DNA, 122 bp, Homo sapiens
gcagttgctgccacaagagtgtccagtgggcgcccaggccacctgcggacagtttgccagcgatgtccagtttgtcctgaggcgcacagggcccagcctagctgggaggccctcctcagaca

SEQ ID NO: 280840 - DNA, 122 bp, Homo sapiens
acacgatttttattataccagaataagcacttttaccattcatttaatgcttaatttgtacgtgaagaatatttggatattggcatctggcttgtgttgtcttggagtaaagaaaacatgaa

SEQ ID NO: 280841 - DNA, 122 bp, Homo sapiens
tgaaagcagccaagcacagatgcacagaaagcactgagtgttggctgaatgatggcaaaacgcacaaattgaaactagacttgaaagcctcagtgtgcgagccccctaactggatgtgggat

SEQ ID NO: 280842 - DNA, 122 bp, Homo sapiens
caggaaagccggccctcggcgggggccacgtggctctcaggcgcctgggctgctgagtcacgcttggccagcacctgtctgtaggccacagcctctgccagcacgcccctctgtgtcccctg

SEQ ID NO: 280843 - DNA, 122 bp, Homo sapiens
tcccttgagccttcgagcccggcttggtcccctcccaggaccctgagtcccgcccggatccggccccgcccccagcgctctcacccgcgttgtagaaggcatccagagccgcggtgtcgcct

SEQ ID NO: 280844 - DNA, 122 bp, Homo sapiens
cgaaaaggcctgagaattgcttctggggggtggcttgggccaacgggggcgagggagccgcgcagagggcaggccccgacccttccccgccgcaccttgtgggtcgggtgttgggcggcctc

SEQ ID NO: 280845 - DNA, 122 bp, Homo sapiens
ctaatctggagtctatctgccagatggggctgggtggaggggttttctccaggatctagccgcgtcccgggcacaggggactccgtgagcccctcaagtcggctgcaagcaggcgatgcctg

SEQ ID NO: 280846 - DNA, 122 bp, Homo sapiens
actcgggttgggcccggcgacttgtgttttaaaagccctccgggtgattttgtgcatgctcgaccttgagaaccctgaacaattagtggcagggctggaatgagaatcctggtaaacccgcc

SEQ ID NO: 280847 - DNA, 122 bp, Homo sapiens
acaatttttacagcatctccacgtacaccacaggcacgtgagagcttgcgaagcactgttcgagacggaaccccggctgcacactggagttgcttgggcgtttgtgaagcagagctgcctgg

SEQ ID NO: 280848 - DNA, 122 bp, Homo sapiens
ccgggacggagatgcccaggaccttgtgttggctcctcctggccagtgggtttgtctgtgcgcactcatggggggttgaatgtcaaatgggcggaacctcgccacgactgattattagtatt

SEQ ID NO: 280849 - DNA, 122 bp, Homo sapiens
agtcgtttaaataaacttgtaaatacattgaagtttacatttccatgtgctgttgatcaacggcgccacctgtgtttgctgagactggtctctgagagagttttatgtcgatcgaggcctgt

SEQ ID NO: 280850 - DNA, 122 bp, Homo sapiens
gtgagtgagtgagtgagcgagcgagtgagtgactgtgcgagcgagcggcagaaggaactccgacccgccccaggtgcggagcggcgcgcccggcaggggtcactgcgggccccgcgggcggg

SEQ ID NO: 280851 - DNA, 122 bp, Homo sapiens
ctaaccctaaccctaagcctaacccaaactgggcattggcattggccagattagtagggtcgcagatcacaatcagatatggcacctggagggttctttggttgattccagggcttcctggc

SEQ ID NO: 280852 - DNA, 122 bp, Homo sapiens
tacaggtgtgagccaccacacccagccaggactagctttcttgaccaaataaaagtcacccggtcaactgtaaacaagtagaatacaaacaaatctcgggaactgagtttccatgtttctta

SEQ ID NO: 280853 - DNA, 122 bp, Homo sapiens
agagacctttaatgagcttctactaagtaccgggagttccgcggggcgctttgcagatcccggggaagttcagagaatgaagttttcttttgcaaggacaaagtaacagtttacttttttac

SEQ ID NO: 280854 - DNA, 122 bp, Homo sapiens
cctttcccctccccgctggcctgcagctattaatcaagagattaataatcccctgcctcccgctctgaaacctccactctcgtttcctgttgagtctccagcctgactcggaacctcccagt

SEQ ID NO: 280855 - DNA, 122 bp, Homo sapiens
ggagggggtcgatcctctgaagcttgagatctatctcaccgacgaagacttcgaggtaagcggttcttccgctggcattggagatgggagtaaaacaacacacaccgcccggctcctttcac

SEQ ID NO: 280856 - DNA, 122 bp, Homo sapiens
cccaccaaaaacctccagactttgtctggtggggacagatctgcaagcccctctctgcagcgtggctgcgggctcgggaaggcacttggggcagcgaccttggtctcccacctgggcttcgg

SEQ ID NO: 280857 - DNA, 122 bp, Homo sapiens
tgctgcagacggcgggcagcaaagcgcaggcgggagaggaggcgcggcaaggcccacactcgcctccgccgggcctcccgcttaccagcagcagcagcgccccctggcgcctgccgagggca

SEQ ID NO: 280858 - DNA, 122 bp, Homo sapiens
cgaggacttcctcgaaactgggcagtcccacagtgttggtcggcagttgtagaggtctcccgcctgtcgttcccggcagggcgaggttgcctgcatccccagcctttgtccttcctgcagaa

SEQ ID NO: 280859 - DNA, 122 bp, Homo sapiens
gcccagtttcctcctgaagagtggcccctgcgagacgaggacacgccagctacgatccctcgggaagtagagatggaaatcattaggcgcattaacccagacctgaccgtggaaaatgtcat

SEQ ID NO: 280860 - DNA, 122 bp, Homo sapiens
gttcgacgggcgagacgccaaggcccccgtcctcggccgcttctgtgggagcaagaagcccgagcccgtcctggccacaggcagccgcatgttcctgcgcttctactcagataactcggtcc

SEQ ID NO: 280861 - DNA, 122 bp, Homo sapiens
ttggtatttctcagcttccctcacctataaaatgagcagcacactcctgccttttctatacggtagctgcataaatgattaggtaacatcactgatgggcatttatgcacccagtccacttt

SEQ ID NO: 280862 - DNA, 122 bp, Homo sapiens
taggatgatattgaatttcagtaacaaaccatgtctaattcatattcttagcttttctcacggtgagctctacctgccagaatcaagtgttcagtaagtcctgggcaaattttgatatagac

SEQ ID NO: 280863 - DNA, 122 bp, Homo sapiens
cctgcccttcgctggaaggggccggaacgaaggaagctctgcaggggcgggacagagcctcgtcctccatcgtctgcccacccgtcttcagaagcgcctggcacactggcctctgggacgac

SEQ ID NO: 280864 - DNA, 122 bp, Homo sapiens
tcttttttctttttcttttttttttaagttgcaagtttcatcatttttttttttaccctccgttgatgttcaagtttataataagacacttatcagattacaccgggccaattgcagcttta

SEQ ID NO: 280865 - DNA, 122 bp, Homo sapiens
cggcggcagaagtgggaggtacacgaggagttactggaaacggcgcttctgtggaggagccgggggggatggggagtagagggagggggccctgttgcctcagcgccccgaggtcgtggagc

SEQ ID NO: 280866 - DNA, 122 bp, Homo sapiens
cggcggtgtcctcgccgcaggtcaccagagcctcacgcacggccgccagcccattgagcacgaccaccggcatccaggccagctgcaggctgaacacgtccccaaagcggtgccgcagctgt

SEQ ID NO: 280867 - DNA, 122 bp, Homo sapiens
gctggttgcgcagcaaaagccccgcagtgtggagaaagcctaaacgtggtttgggtggtgcgggggttgggcgggggtgacttttgggggataaggggcggtggagcccagggaatgccaaa

SEQ ID NO: 280868 - DNA, 122 bp, Homo sapiens
atggatgattcatgccttagatattgattctctacaacatgggttgcaactactgcctgtcggcctgctcctgcttaacacctgcttttgtaaacagtatttttttggggtagggaacacaa

SEQ ID NO: 280869 - DNA, 122 bp, Homo sapiens
acagagtaggcattctggtatgggaataggcaaagaactgcagaatctgtcactatcaaacgctctgcaaactgaggaagcacatacctgcaatccagtttctgagttacagctcctttccc

SEQ ID NO: 280870 - DNA, 122 bp, Homo sapiens
cttgaatccatcactgattaatcatgagcaaaccctcctacttctcacgagagtttctctcggtatgtccgacacccacagcagagccttcttagctacagcaaaagaatacagtaactgaa

SEQ ID NO: 280871 - DNA, 122 bp, Homo sapiens
ctacaagaaagtcaatgtctccacccccgattgtcattctgaccagaggctctttggggacgcttgagcccggtctccctcagtccaataacccttctgccaggttgagcagggccccttcc

SEQ ID NO: 280872 - DNA, 122 bp, Homo sapiens
gctggatccgggtgtcccctgccccggggtctcccctcctggtgcccatcccccacaccacgctgaagccgtgtgctcacatgtagaaaagaggctttattaagaaggctttgaagtcaaaa

SEQ ID NO: 280873 - DNA, 122 bp, Homo sapiens
cgggaataggccaaaaagcccacaacaggattcgcatctggcgccgccaggctcatatggcgcttgccgagctgggggacaaacaggacaaggttccgagagtgggagccgcgccgcagcct

SEQ ID NO: 280874 - DNA, 122 bp, Homo sapiens
cacagccgcaggcttcagggagccccatcgcggtgaccctggagagtggcctgaatcggacgtgaccttgaagcaaggtggttttggggtcgccggctgcacaaggcgcgaagtggtttagg

SEQ ID NO: 280875 - DNA, 122 bp, Homo sapiens
tctcttctacaatgagcagcaggaggctcgcggggtgcacacccagcggatgcagtagaccgcagccagccggtgcctggcgcccctgccccccgcccctctccaaacaccggcagaaaacg

SEQ ID NO: 280876 - DNA, 122 bp, Homo sapiens
tggcggatggggcctcgggggcggggcagcggctcctgtcagcgggtgaaatggcagcggcggagccggcggcggccgcggtcccggggggcggctgagggggccgggccggggctgcgggg

SEQ ID NO: 280877 - DNA, 122 bp, Homo sapiens
tgttagcccagtgaaaatgatttcaggcttctgacctccagagctgtaagaaaataaatccgtgttgctttatgtcactaaatctgcggtcatctgttacagccatagcagaaaacacggtt

SEQ ID NO: 280878 - DNA, 122 bp, Homo sapiens
ttgcagattcattcagcaggcatctgccagcatccactctgggtccagccctgggtatgacgtgtcttcagcattggggaagacgctcaggcggaatggttccagcatcagtgactctaaca

SEQ ID NO: 280879 - DNA, 122 bp, Homo sapiens
tgaggtggggcctcgagcccaacagcaggctcaccaggtgaggcaggctcaggtaacacacgatggacatgaggatgcccacacagggcgtgataaagtaccccagggcagaggtctcggcg

SEQ ID NO: 280880 - DNA, 122 bp, Homo sapiens
cgaaccaagcagcaggcagggagaatgttgcagtagaaggctactgcttcctgatgctaacgtggacgccaaaggcacagcccacagttccagaacccacaccacagcacctgaaacaattt

SEQ ID NO: 280881 - DNA, 122 bp, Homo sapiens
accacttaaaccctccggatctgagcctcccgcagaggaatgcagaatgacgccacggcacgcaggatgtgatgtcaccgagatgcagaggatactcagtcaaccaacatttactgagcatc

SEQ ID NO: 280882 - DNA, 122 bp, Homo sapiens
cgcaaggaaacagaatgtaaccaccagtaaccctaccacctgtcacttcagcccaagtttcgctctcctctacctccccccaaaccactcccaccatctactgtcagtcctcacccccaaaa

SEQ ID NO: 280883 - DNA, 122 bp, Homo sapiens
cgcctagttccagcctggatacgcttccatagcaaagggttgcccttggctacaggaggacgcgggctggcaggcttggttcctggcgagtttctaagcccccgcctgcggtctgaggcacc

SEQ ID NO: 280884 - DNA, 122 bp, Homo sapiens
aagaggagagcagcagactctggtggcactctgtacagtgtcccaccttgcacctggccacggttttggcactgagtagtttgcctccatctccacatcatccctatccttccaactgcccc

SEQ ID NO: 280885 - DNA, 122 bp, Homo sapiens
tgccgccaccgcctgtgcccgggcccgacccgtcgggcgccccacagctgcgctggtgcgcgctcaggctgacttgcagctggaagctcttcccacacgtggcgcaggtgaagggccggccc

SEQ ID NO: 280886 - DNA, 122 bp, Homo sapiens
ggaaacagggtaggattccaagaacaaataaaggccctccttcaacaaccccatggcatccgccagccgcccaatagtgccggactctgaccaagcggtgagacctcgggcaagtcattttg

SEQ ID NO: 280887 - DNA, 122 bp, Homo sapiens
cttgacaaacccactaacgcagacccggcccagtgtcccagcgctcttcctctgacttgccgtttcccactgtctgcaattgtaactcgagtgctttgggctgccttgcggaactcagcttc

SEQ ID NO: 280888 - DNA, 122 bp, Homo sapiens
agacctaggtccagacaccttcccagagtgcttatacagtagtgctcagtacagggctagcgtggaaggggaattggagacacctggatctccaatctccccctccttctgacagctggact

SEQ ID NO: 280889 - DNA, 122 bp, Homo sapiens
acctatctcaggaagcagggtgcatctgtccaccaccaagtctcagggtggctgggtgagcgctcatcagtcccagacagcaggttggcacaaaacgacactgcccacaaaaccacaggaag

SEQ ID NO: 280890 - DNA, 122 bp, Homo sapiens
agagcattgaactaaaaataaaataaatgggttctagtcctagttctattgcaaatatgccgggccactgtgggcaaatttcttgacctgtctgagaccattttcttgtttgtaaaatgaaa

SEQ ID NO: 280891 - DNA, 122 bp, Homo sapiens
agggaggaggggcggggcggggcgtcaagggaggcgggaccggttactactaattgtgttcggcagcactggtagccaggggaaggcggggctagatacgatagagagagaccttactgaac

SEQ ID NO: 280892 - DNA, 122 bp, Homo sapiens
gctgcagcccccgagaatagctacaggctggggggcattgcggtctgagccttccctcggcgcttcttcccgccgcctcagtacatacaactggaggcaagaatcttgcacggtaattggga

SEQ ID NO: 280893 - DNA, 122 bp, Homo sapiens
ggatcgtgcccggagaacttgtgtgtgcccactcacaagtgcagagaattaatctcggcccggactgcggcaggagggcaaactggggaaagaaggctgggaggcggcccggtggtgcagag

SEQ ID NO: 280894 - DNA, 122 bp, Homo sapiens
tcgggaaggcgcggggcgggggcggctgattctaatccgaggcccaagatggagattgggcgccgggaggcggctggcttcactgggtcctggccctgagccggtttgctgggctgggccta

SEQ ID NO: 280895 - DNA, 122 bp, Homo sapiens
ggcttgggggcggggcctgaggtgctacccgcagctttcccctccaggctgcgagatgaacgtgcaccggcgctgtgtgcgtagcgtgccctccctgtgcggtgtggaccacaccgagcgcc

SEQ ID NO: 280896 - DNA, 122 bp, Homo sapiens
tgttcacagtgtcaaatgaagggatgtctttgattgcttccaggtgttcctcagcaccaccggagggggatgggtgatcagccgaatctttgactcgggctacccatgggacatggtgttca

SEQ ID NO: 280897 - DNA, 122 bp, Homo sapiens
tacctgttcctggcgggcagaggcttgattggagtaagctgtagaaaattggagaaagcccgggagtgtataaatagcaaaggcctcccagttggcgacaaagttatgcaacctcgtttttt

SEQ ID NO: 280898 - DNA, 122 bp, Homo sapiens
gactatttcagtgctccgagaagtatcaccagtaaccaatcagcaaaaagctctagctcacgtggtgtatattcagcctatcaagctcctgatattcatgaatgctgtcatttccgcttccg

SEQ ID NO: 280899 - DNA, 122 bp, Homo sapiens
tccaatgcaaattcccttccctaaagatgcagcttattttctttttattgtatttaattccgaaagaatggtcacacttctttgctaggtaggcaagatgttccggaggacacactagagaa

SEQ ID NO: 280900 - DNA, 122 bp, Homo sapiens
agcaggccgcggggtgagggtgggattaggcggccaattttacaaaactccagggagcgtcgccagcctcgatttcctggggttattcctgggagagaggcgttctcacggacagccaccct

SEQ ID NO: 280901 - DNA, 122 bp, Homo sapiens
caacctctggggcccaagtgatcctcccacctcagcctcccacagtgctgggattacaagcgtgagccacagcgcccagtctataaattttaaaggagtagctgggattacaggcatacacc

SEQ ID NO: 280902 - DNA, 122 bp, Homo sapiens
accttggcgtggcagagtctggaatgacggacagaggtgttggtgtgggtctctccctttcgggagcggctgcctttttccacaagagtagccgttctctctctctctgtgtctctgctccc

SEQ ID NO: 280903 - DNA, 122 bp, Homo sapiens
tggcaagagccatgccagcacttacaaacagtgtctggcacatggtaggtgctctgcaaacgtttgtgaatataatgaatgtgctattataattatcatagttgtcttggagtatatggggt

SEQ ID NO: 280904 - DNA, 122 bp, Homo sapiens
ccccatgaagaggaacaatatagagattcggtttctcgggcagcccggctgttccaaacccgtgggtgcatctgtgactgtggtggggaaggaacacagatggtgctgcgaggccgtctcca

SEQ ID NO: 280905 - DNA, 122 bp, Homo sapiens
gtatagaacattgttttaaaatctgtacattaaaaataatctgctgcatcgacaacgttgcgagttaaatcacttcaaaacagtctattcgtgttctaggaaggaaattatgatttgattgg

SEQ ID NO: 280906 - DNA, 122 bp, Homo sapiens
aaacccatggccaccggtcacgaaagtgcaggccttggtggggacaggcccacagctctgcgttcccagcttccccagccggtgtgaggtgcagctctgggctgggcccccgtgtgaggaag

SEQ ID NO: 280907 - DNA, 122 bp, Homo sapiens
accgccccgccccgtcgcgtgccattggttcggcccgcgaccagcgcgacgccgcctagccgcaattggctacataacctgcccgtcagcaacgcgcctaacgccgacgccggaacctggcg

SEQ ID NO: 280908 - DNA, 122 bp, Homo sapiens
gaaatgtgagtcggagggttggactaggccggatccggcgttagggcgggggcccgcaggcggcccgcgcgggcgggaaccggggcggcagtcagcgggcgcgagctcagggcgcctccggg

SEQ ID NO: 280909 - DNA, 122 bp, Homo sapiens
ccgcggctgcagtcacaaccgtcaagcctttgagaaactctttcaaaaactgcaaccgctcgggagccgccgagggacggcgcccaggcacccaggctccgcgtttccttcgggagagacct

SEQ ID NO: 280910 - DNA, 122 bp, Homo sapiens
gcttccaacatctcatccccagtaaccatcagggtactgttatctttttacaagtaaacacgagggtttcattcaagcccactggaccaattatgatcgaacatacaaactgtacctgaatc

SEQ ID NO: 280911 - DNA, 122 bp, Homo sapiens
agctcctcctgctcaggccgcatggccccccgggggctccgcaggcccgccagcaccgcccggcactctagcacctgctgtcccagctgaaccgccagcaccaggaccagggcgcagccggc

SEQ ID NO: 280912 - DNA, 122 bp, Homo sapiens
ctgtctttttagcatagtttctgtctgtatagtttagccttttcctagaaatttcagatacgtggaatcatacactatttaatctttagtatctggcttcttttgcttagcataatgcactt

SEQ ID NO: 280913 - DNA, 122 bp, Homo sapiens
aagcgcgcgggggctgaccaacactttccaggtcaggtcgagttgattgctcccagctcacgctccgaaatgcggtgctgaaccacgggaaggagggggtggggaggaaggcaggcagttgc

SEQ ID NO: 280914 - DNA, 122 bp, Homo sapiens
cccagcgttaagaatgtaaaatagggcgcttagaagtctaagcgataaagatcttcttaccgagagccaagggacaaaactcattacagataagcctagtcctcccatttcccccggacgcc

SEQ ID NO: 280915 - DNA, 122 bp, Homo sapiens
cggtgggggtcttttcccttctctccctttctatcttggaaacaggggtccgactggcagcggagtgggggcagtccaagctccggggtacctgcaggaggagactcgaccagcgagagggg

SEQ ID NO: 280916 - DNA, 122 bp, Homo sapiens
cggtgtccgggaaggtccatgattgttccacataaagtcagaagggaggaaaggcgcacgcgcattggggacttgactctggaaagcgtccagaccaaggtcagcggagagtaggcatgtag

SEQ ID NO: 280917 - DNA, 122 bp, Homo sapiens
gcaaattcggatcagccaggcgggctttgcatgtgtatcggaatcgttgctcatagtggccgccgttgtcagagatgttgacaggtgtccagggtgtccagggcgtggtcttcttcagctca

SEQ ID NO: 280918 - DNA, 122 bp, Homo sapiens
tcacaaggggaaataaaaagattcccgaggggtctcttgatctgctgaaggccatgcacacgctggcatgtgacttcttcccagccatccttccccgcctcagcagtgagtccccaggctaa

SEQ ID NO: 280919 - DNA, 122 bp, Homo sapiens
acaacccatctttacctgatgggtgggttccagagggcgttcactgggagaagcaaatcacgaccacaaatacttgtagtaaggtaaggaaatcttggtgactcccagccctggatgtaggc

SEQ ID NO: 280920 - DNA, 122 bp, Homo sapiens
aaagcgtgtgcacctcagctactgagacagcccacccacttcctgggcaccgtcggcccccgccctcgtggtcccaaggtacggccactcacgttcatgtctgagcccgccgggaagcaccg

SEQ ID NO: 280921 - DNA, 122 bp, Homo sapiens
accgcaggcttagtgacgccgagcagctgccagggacatggctctgcccgggagccaggccgggcccagagcagacccctgcctgcagcccggctgctctgcaggtgtcctcagcactcccc

SEQ ID NO: 280922 - DNA, 122 bp, Homo sapiens
tctctctgctcctcttactgtgaactattgatgtctcactttcggccttggtagctgcctcggtagctgcctcgttcttttctccctgcctgtgactccaacgacctttggtgtctggcacg

SEQ ID NO: 280923 - DNA, 122 bp, Homo sapiens
ctggcctcctcccagggttccacatgttgctctcccaatgtgagcaagccctggtggcagcgccagggtccagtgcagcccctccccacagcatgctgggggctaattctgatgtcatcttt

SEQ ID NO: 280924 - DNA, 122 bp, Homo sapiens
cttgcttggtttctgtaatgaggaagttctccgcagctcagtttcctttccctcactgagcgcctgaaacaggaagtcagtcagttaagctggtggcagcagccgaggccaccaagaggcaa

SEQ ID NO: 280925 - DNA, 122 bp, Homo sapiens
gtgtgccccaaggaagactccggcggcctctgttgctatgacgatgagcaggatgtctggcgcccgctggctcgcatgccccccgaggccgtgtcccggggctgtgccatctgcagtctctt

SEQ ID NO: 280926 - DNA, 122 bp, Homo sapiens
ttccaacctcctttccgcatcgtgaggcttcatacctcgcaggcctgaagggggagcagtcgagcccaagttctggggcactggtagtgttggatgtagcgaggtttctagtagttactgtg

SEQ ID NO: 280927 - DNA, 122 bp, Homo sapiens
cgcctggggtggagcgggtgtgttccgccgggctccgggatgcacttgcgcagtttcacccgaggctggagtgacgccaacctgttaatgttcgttttcggattctggacttcgggttccgc

SEQ ID NO: 280928 - DNA, 122 bp, Homo sapiens
aacacgtcaaactgaccatcacaggttagttaacacgtcacacagccaagtaagttaacacgtcaaactgaccgtcacaggttagttaacacgtcacacagccaagttaacacatcacacag

SEQ ID NO: 280929 - DNA, 122 bp, Homo sapiens
caggaccttcccccaaggacagattcctgggaaggtttccagtgagtttttgaacctaaccgctaggttaaatacatccctttagtctcagctcatcttcctaattaagtacaaattcgaaa

SEQ ID NO: 280930 - DNA, 122 bp, Homo sapiens
taggaggcgagggaaaaggtggggcgcaagtgggccccggttgcttccacacacaccctccgttcagccgtcctttccatcccggcgagggcgcaccttcagagggtcctgtcctccaaaga

SEQ ID NO: 280931 - DNA, 122 bp, Homo sapiens
tgcggcggtggcacctccgggtgtggaaggctccagtgagatggagtcgcgagtcgcggacgctgggaccggcgagaccgcgcgagcagcgggcgggagtccggcagttggctgcaccactc

SEQ ID NO: 280932 - DNA, 122 bp, Homo sapiens
acgcgcgcacacacacaccatcttcacaacccttccaagagaaaacctagagtgtgtgtccgtttgggtctgggagggcaggatacagttatttcgggggccccaatcttgcctttaggctc

SEQ ID NO: 280933 - DNA, 122 bp, Homo sapiens
aaggaggggtgtggcctagaccactaagggccgtgacgtggtgccgctgagcttggaccccgaccagaagatagagattgaaacgatgaggaaaacgaagtgcctaatccccgctggacgct

SEQ ID NO: 280934 - DNA, 122 bp, Homo sapiens
ggttggccggcaggagcagctgttgatttatttctgggaagggcccggcgtcccctggaacggtgacctctattaatgttgacatgttcaaagcctcatattgggatgcagcacgcctctcc

SEQ ID NO: 280935 - DNA, 122 bp, Homo sapiens
ggcccgtcagtgcccgtcggggtcgcgcgtcctcccttccgccctcggggacagcccggccggccacgccgccgaactcgccatgggcctctctccgcatccgcatgtgcatccgcaaccgc

SEQ ID NO: 280936 - DNA, 122 bp, Homo sapiens
gtgactttaccctgctgttgagccagtctgggttaattgggaatggggcaagagttagatcggatttgatttcagaactatgctgaagatgctggatgatggggattttgtacacgggtaga

SEQ ID NO: 280937 - DNA, 122 bp, Homo sapiens
cagccagattctgagagaaggtcttttggaagcattctccaatgctgaaaatatgggccccgtgccctaagggtactaagtgaaaacccacctctcaggtatctcagaacacagcacctggc

SEQ ID NO: 280938 - DNA, 122 bp, Homo sapiens
ttcttcatgctctgtacatcgattctttttctccagcagttctgagcaatgcttcaaaaacgaaacatcagattccttgtaaagttaaaaggaacagatttttttcccacataccatgaatt

SEQ ID NO: 280939 - DNA, 122 bp, Homo sapiens
tgcaggatgaactgatgcacagtaagagctccttgtggtcgacccttctgacttccatcccgtttccctgtgctggaagacgcacgccaggtggggtcgcaggttgtttctggtgccggctt

SEQ ID NO: 280940 - DNA, 122 bp, Homo sapiens
gggcgtggacccacagtgcccagaccctacttgtcctagaaggagtggcctgggaggccccgcctccgccctcactggccgccgttggctcctcccactcgtgtcttgacagcttattctcg

SEQ ID NO: 280941 - DNA, 122 bp, Homo sapiens
aggagagctgggcttcaataacaaatacaatggagtaaatagaagccgggacaggccagacgtggtggctcacgcctgtaatcccagcactttgggaggctgaggcggacagatcacgaggt

SEQ ID NO: 280942 - DNA, 122 bp, Homo sapiens
agttctttgcctctgatctcggttaagaaccgctgacctgctgcccagagtaaaaggtggcgtgcgagagctctcgtacttaggaaggaaaggatggtgccaggcgcttggtgcttgcctta

SEQ ID NO: 280943 - DNA, 122 bp, Homo sapiens
ggacatgcactcaccagcagggtgtgtccctccggtcttcacaatgaatgctggcccagtcgccagcagccttcacgccaatgttctcccgtcagtgaggccaggcccccaggtgccactgg

SEQ ID NO: 280944 - DNA, 122 bp, Homo sapiens
cgccccggggcccccttcccggccagacggcgggcaagacagctgggtgtacagcgtcctcgaaaccacgagcaagtgagcagatcctccgaggcaccagggactccagcccatgccatggc

SEQ ID NO: 280945 - DNA, 122 bp, Homo sapiens
gaggtgctaggaagttactgaaggcaaattccacttgctcaacaattctcctgtggaccacggtggtagccatcagagtgggactggaaagacatggcacaccatataaatgttagcagggc

SEQ ID NO: 280946 - DNA, 122 bp, Homo sapiens
ggatcgccaaggcattagggatcgccacacacagtcatttctgaagtgcgtgggaaccaccgggctgtgctcaccttgaattcctggttgatgtcgtcaaagcgctgggagtcccccgggag

SEQ ID NO: 280947 - DNA, 122 bp, Homo sapiens
ggctgggccgagccgggctgcgcgcggaggtaggggatgcaggctgggggtgagcagcagcgacggtgccatcggctgtcgcatcggcgtcctcagccccgccccgcgcctaagcggcgctc

SEQ ID NO: 280948 - DNA, 122 bp, Homo sapiens
gaagaagaggacgtgagaatccgcaggttcttgacacggggttcgagggcagggtgaggccgcggggctgagcaccatggccgctaccgggaccaccaggccgtgcgcgtttccacgctgtc

SEQ ID NO: 280949 - DNA, 122 bp, Homo sapiens
cgagcagcccccgcatcgtagcaaacgcgctccgcgcctcagggcacgcgccccaaagcccggccagctgacccttttcggggcccaaaaaaggcagcagaaagccgttcccgcctcacaat

SEQ ID NO: 280950 - DNA, 122 bp, Homo sapiens
ctcgcctgcacggcctgacggggcgcgccccgcgctcctggctcgcccatccagggtccacggctcactcgtccctcgcctgccccgcggcccacacctctcgcagctcatacctcacccgc

SEQ ID NO: 280951 - DNA, 122 bp, Homo sapiens
gccaggtcgctgtcggtccacgccgcccgtcgcgctgcccgcccgctcggcgtcggccgccgccatgggagtgcacgtggaaaccatctccccaggagactggcgcaccttcccgaagcgca

SEQ ID NO: 280952 - DNA, 122 bp, Homo sapiens
gccgatgcggctgggcgggtgccgggccttagcagcagtagcagccgcagctgcggctaccgcagctcctacaggagtgggaggtttcgcggcggcgcctggggccgcgccggtgccctccg

SEQ ID NO: 280953 - DNA, 122 bp, Homo sapiens
gcggcgggcggaggttcagttcctcctccggtccagcagggggcacggggagtggcttcccgccgcccttcccctccttgcgggcgccgggcagactgctgcagtcgcaagcggcgagcgca

SEQ ID NO: 280954 - DNA, 122 bp, Homo sapiens
ccgccgcggcggcccagccgggaagtgcacagagccggagcgcagcgtggtggcaccagacgcctccctttccccaccgcttgctttctttctttcagttgtgtgggtttgtgaagcctccc

SEQ ID NO: 280955 - DNA, 122 bp, Homo sapiens
tggccactcccaggatgctgggtctcgcttgctggctgggaccccggagccgtcagtccacgcactcccggatgcactcaacaacctaaggacgcaggagggttccggggatggtccgaggt

SEQ ID NO: 280956 - DNA, 122 bp, Homo sapiens
aaaactctccccgctccccctgccaggtgagctttatatgcactaaagtttaaacatcatcgtagccgatgccctcccaggtgaactcactaactagatcagctcaccacctggactcacgg

SEQ ID NO: 280957 - DNA, 122 bp, Homo sapiens
agcacttgatcccgtgatggatcaggggctcccggacagctgccctgggctgacggttcccggggtggacagcatcagccggggctgggcacacaagggggaattcagtccaggaggttgga

SEQ ID NO: 280958 - DNA, 122 bp, Homo sapiens
gctcactggctgcctccgcccctctcccctaacagggtggctgaggctcttgaaacaggacgtccgctcggggggtgagtgggagcaagcgctgggcggagggccgcccccggggagccagg

SEQ ID NO: 280959 - DNA, 122 bp, Homo sapiens
aaagtgcctgactccgcccttctctcggcgcggtccaattcgcggcgtccttcccctccccgccttcgctatctgagagccccgcccaggccccgcccaacctggttcgcaagagcagaaga

SEQ ID NO: 280960 - DNA, 122 bp, Homo sapiens
ccacatctgtgcccctgcacacaggggccaacggaagccccttcctccaggtgtggggatcgtattgggtgtcttctcaattggtagtgtctgctcagggtggattttgctgtgatctgctt

SEQ ID NO: 280961 - DNA, 122 bp, Homo sapiens
aaagcttccagcatcaagttggacctgctcctgtgattggttctgatgctgctcccctgccgggcgccacccacctcctcatcccggtcaatttcccgagttggaagggagctcgcctttca

SEQ ID NO: 280962 - DNA, 122 bp, Homo sapiens
agggtctgaggtggccccaaagaccaaggctgaagaggtgacagtctgggcaggaagcaccgaggccactaccgcccccgtaatcgagaggccccgtgtgcgtgagcaaggctctttgccca

SEQ ID NO: 280963 - DNA, 122 bp, Homo sapiens
gagtttggggcatagcaaagatcatgacaacaagaaagaattggcagagtatgtgtttagcgggaagtttcataagaggtgtttcagttgactgcagggttcccatgggagaagcaggatta

SEQ ID NO: 280964 - DNA, 122 bp, Homo sapiens
caaactcaggcaaacagcaggcccaagtgtgatggttctaatccatccaacatccacccccgccctcagctatctaccctgagcaggcgccgctcacactcgcgggccgtctccaaccccgc

SEQ ID NO: 280965 - DNA, 122 bp, Homo sapiens
tccctcatattgtcatggccttaagatacccctccctggagagggagcgtccagaagttacggcctcccctgcctggtggcaactataaatgccacagctatggtcaagtgagaaaagaaat

SEQ ID NO: 280966 - DNA, 122 bp, Homo sapiens
cccagtaggggcggctgggcagaggcgaccctcacctcctggatggggcagctggctgggcggggggctgacccccccacctccctcccggatggggcggctggccgggcggggggctgacc

SEQ ID NO: 280967 - DNA, 122 bp, Homo sapiens
cgcggccagcgggcgcgcccgcgctccccgcaccccgcctggccctgccggccacccccgcgcgcagcctagtcccccagcgccctgctccgccagcgccccgtcccgcccgcacacctccg

SEQ ID NO: 280968 - DNA, 122 bp, Homo sapiens
cgtaaattccagaatccgatgcggtggagagcctaggccggggttggcccctcggttccacgtgtctctgggaaatttttttcccctttcttcctaataagcctgcgtggaacgcagagcct

SEQ ID NO: 280969 - DNA, 122 bp, Homo sapiens
ccgcggcgggcgacaccgccgccctcgccaacctgcaggagggaggggggatgcaaatggcgtctcgcgtcgtcctagactccgcgcagcacccgctaccgcgactccaagcagacgttgca

SEQ ID NO: 280970 - DNA, 122 bp, Homo sapiens
aaaatgacccatacatccttccgatcccgagatgtcattcatcaaaaagtagcgcccgctcgtcattaaggtacgaatgacgctgttcgaataatcatttattgtaacaggtttataagcaa

SEQ ID NO: 280971 - DNA, 122 bp, Homo sapiens
tggggtccccattcagccgtcagccctgttttgtcctaaggtggtcctaactaggatccacgtggcccatcccacgcccacaggtgctgagttaggcatccctgccatgccctcccagagca

SEQ ID NO: 280972 - DNA, 122 bp, Homo sapiens
aattcttgcaaaatgcaatgactgttgcgaggttaattaacgagtagtttaggagcgagacggaactttgggggtgcagggtggccaaacactttgtattgaatcatgattcctcgccaggt

SEQ ID NO: 280973 - DNA, 122 bp, Homo sapiens
cgcggtatcctgggttgcggccgggtcccaaacctcagttcctcccctccccccacgtaacgtgtggtcttccatcacttaggacccggaagcgacctaaatctttaggacatttcttcact

SEQ ID NO: 280974 - DNA, 122 bp, Homo sapiens
tgagacaggtgctggctgatttgcaggtgactgaagaaggctacataaggcccagaaagacgcttatctgtttgtaaacaaataggcttagcacatagctttaatacagttggtcactgcag

SEQ ID NO: 280975 - DNA, 122 bp, Homo sapiens
aaattacttctcagtgatgagagcctgacaaagcaattgtgccctgagaattggctgtgccgcagagagacaggctggcctcctaatctcaagaagcttgggtctttgtccctggatcctgg

SEQ ID NO: 280976 - DNA, 122 bp, Homo sapiens
tagttcttttacccaaagcttggtcaggagccctgagctgcgattggccgacgggtagaccgtcccgggtggcggagacacgcgctgattgggcaacagcgaccactttctcttcccatctc

SEQ ID NO: 280977 - DNA, 122 bp, Homo sapiens
gcctggggcagcgtcatggtaaatgaattgactcagcactgttccagctgaaaccaaaatcgagtaaaaggattcatggtctccgctattctgcaagaagaccccactgttttaaactcaaa

SEQ ID NO: 280978 - DNA, 122 bp, Homo sapiens
aggttgtgtgtctgtgtggcggtttagcaccgtttcaaattctgcattgcatggtgggggcgacggtggtgggtgagctctgcgtcgtaatcttttcggagctcttccagcacagtccagtc

SEQ ID NO: 280979 - DNA, 122 bp, Homo sapiens
tcagcgtgtgaatgaatagaccaaccgcagcacctcgtacagtggagtgctactaaggagcgaatatggattcacacagcaacacgggtgcatcccaaaagcatgctgctacacggatgcaa

SEQ ID NO: 280980 - DNA, 122 bp, Homo sapiens
gctcagcctcggcgggaggggcggacgcagggcccgccccgcgtccctgatctggccgctcggcgtccgcggctgtcgccctagtcccgccttctcgccaaagctgaccaatcaaacgccta

SEQ ID NO: 280981 - DNA, 122 bp, Homo sapiens
aaatttatctcaagcataaggcttcatgttctctgaagaatcagttgctataaaccttaacgttgaagagagctcatttgtactacctacattctccagaatccacttgtatttcggggaca

SEQ ID NO: 280982 - DNA, 122 bp, Homo sapiens
gcggcagcggcagtggtggctacgcggcgctggagctgcggcgggggccttggggcagtccgagggcatggtgaagaggtgacggagggctggctatgggcggccggccggggtgcaggacg

SEQ ID NO: 280983 - DNA, 122 bp, Homo sapiens
tggcttcctgctctaggagccaggcatggaactcagcagcaggataggctgctgggatcacggactccattccgagtccccgacgccatccacatccctcgatccatctctaactctatcca

SEQ ID NO: 280984 - DNA, 122 bp, Homo sapiens
caggcaatcaactgcatggaaagctcccagtccctcagggtgagctgggctgggaaccaacgcctggcccggcccactcaccagacaggtcgccggtgccggcggaggccccgaagtagtag

SEQ ID NO: 280985 - DNA, 122 bp, Homo sapiens
gggagaagagaaggcggcagcggccgtggccgtggccgacgagctcgagcccgctttagacggctctgccgccttcccggcagctggtgctgtctgtggcttcttaccttctctcaatacac

SEQ ID NO: 280986 - DNA, 122 bp, Homo sapiens
aagatgacacctaaagccaaataacattaactattaaatgtctctatcttcagacaaatacgtgtccctctgaggcatgtattcctctacatgccaagcaaacaaaaagtgactgctgctcc

SEQ ID NO: 280987 - DNA, 122 bp, Homo sapiens
ttacttcccccacgccacaccttggctcatgcagttccttctagtgggagtctcctttgacgctatctctcccacccataccctatcactctctcaaagcctggctccagttctcccctgtg

SEQ ID NO: 280988 - DNA, 122 bp, Homo sapiens
gagcccacgcccacccggaactcgcgccgacccgcaagcaccgcgcgcaaccccggttcccgctcgcgcctctccgtccacgcctcccagcaagctgagggagccggctccggccttggcca

SEQ ID NO: 280989 - DNA, 122 bp, Homo sapiens
ctaagtctctgctagcagcactgaatgactcgtacataacaacgacattgtagttacatacgagaatgttcttttgaggagattcagaactctaaattatatagtgatgaagtgtcttgatg

SEQ ID NO: 280990 - DNA, 122 bp, Homo sapiens
acgacttgtcccactggagcagcatcttcatgtggaggcagcatcattaccagggtaaaccgacctggtccggcatgcattcatcatgtaattttccagacgccccacggttctggtttcgt

SEQ ID NO: 280991 - DNA, 122 bp, Homo sapiens
ttggacattgtgaataaagcactttttaaaaggtgttttccatgaatatgcttatgaaaacgtgcttaaaggtgggaaggccatgttagcagtctaagatctgttctgagtaaagatgttcc

SEQ ID NO: 280992 - DNA, 122 bp, Homo sapiens
agctccgccgcgttcaccacgtgggcaaaggggccgacgggaagacgcccagggcacatgcgcagtgaggtcggtgcctgctctgtgggctgtggcgcccctcctcgaccctcctcgctcta

SEQ ID NO: 280993 - DNA, 122 bp, Homo sapiens
ccaccaaaaaaaggaagaagtccagaagagtgcgggacaccaggaaccaagcaaagaaagcgtgtgagggaggaagatgcaaaagtgtacaatcagatttggcaagatggaggctgctgact

SEQ ID NO: 280994 - DNA, 122 bp, Homo sapiens
gactcacgttctcgtggcgcatgtgcttgagcaggcgcagctcgcggtaggcgcgcttggcgaacagctcggactggaaaggccgatacagcttcttgatggccaccttagcgccggtgcgg

SEQ ID NO: 280995 - DNA, 122 bp, Homo sapiens
gatcccgggacggcagcaggtgggctgcacacggactctgggacaagtcgagctgaaaaccgcggagctaggggtggggtggagacgcccgcgacgccaaggctggggtcccggaacacgct

SEQ ID NO: 280996 - DNA, 122 bp, Homo sapiens
ggtgctgtttactgacgtgttggccagggagcctgccccctgtaccatagacaggccctgcgcgagtgtccaaggcgggaggagagaagggacagctctgggaggcccagccacgtccagcc

SEQ ID NO: 280997 - DNA, 122 bp, Homo sapiens
aggttatcagggaacgcatatatccatttctggcagcgaacggacggtttcagacactcacgagggagcttcccgcgtaggatgccaagaagtcggagaacagtcagacacctggcgattag

SEQ ID NO: 280998 - DNA, 122 bp, Homo sapiens
ccaatttctgatcagtagtacgaagagaaactacaaagaaagggaatgaataagcgggtgcgtggtaagaacgcagaggcagccaccaggtatcgatgaccctttcggagcacgtaagcaat

SEQ ID NO: 280999 - DNA, 122 bp, Homo sapiens
cagactttcatactgggatcacttgagagatagttatctgtgggatgtggagtaaattagcgttcttcacttggacaattcagacctagaagtgcaagatctgtgagctcttctttcttcta

SEQ ID NO: 281000 - DNA, 122 bp, Homo sapiens
tgccgacggggccagagaggtaagaaaggtgagcagggctgggggctgggactctgcggccgtctaacgggcagcccctgctcggcccccctcatcgctgacttatggggatctgggcccag

SEQ ID NO: 281001 - DNA, 122 bp, Homo sapiens
caaataaagtggcttcatgattaggatgataatggggaagatgatgatactagtagtggtcgtaatatttgcctttgctgcagagtttacaaatcatggagacactggaagatgtaaaggga

SEQ ID NO: 281002 - DNA, 122 bp, Homo sapiens
gaaccaccgagtgtggcttaagacagggtccctccactccagggatccagatcaggtgcccggcacccctgggcatcctgcccgacaggtagcgaatggaggtcgctgggggcagagggtcc

SEQ ID NO: 281003 - DNA, 122 bp, Homo sapiens
ccagttaaagtggcatttatagtattcgggggttgcttctgtcctgcctttttctgatcacgacatcccatgcacggctttgggaaacgcaggtcacagtagcagggcattgaaaaccctcc

SEQ ID NO: 281004 - DNA, 122 bp, Homo sapiens
atgctggggtgggcatcctgcccctgtgctcattatggggaaggtggagttgggtcagggcgtggtataaagtgatattttacagctgtagcaccacacttgggcttgactctcagctctga

SEQ ID NO: 281005 - DNA, 122 bp, Homo sapiens
tccagcctgagaggaggtgttgctgacgctgcctccatctggcagccggtggcccattctcggccatgcctaaagactggggccgggggctgggtgcagtggctcacgcctgtaatcccagc

SEQ ID NO: 281006 - DNA, 122 bp, Homo sapiens
ccaagcccctcactgcccagggccagccggctgctcggagtgtggggcctgccaagtccacgcccacctggaactctagctggcccgcaagcaccgtgcgcggccccggttcccacccatgc

SEQ ID NO: 281007 - DNA, 122 bp, Homo sapiens
tgttgcctaaattcttatggagaaatagtgccctggagttgtgaaaaagaaatgggctcccgcagctgcgtcacagcatttgatcacttcagccgagagtgccaggagatttgagacagatg

SEQ ID NO: 281008 - DNA, 122 bp, Homo sapiens
caaacatcctgcaatgcacaggacaaccccgacagcaaagacttatccagcctccaatgtcgttagtgtcaaggtcgagaaactataagctatagatagatatagatattcccaatagtcaa

SEQ ID NO: 281009 - DNA, 122 bp, Homo sapiens
tatgaaaaaaagaaaaaaagacaggatatagttctgtgccgtcgtaggctgcactgtcaccgttctagaccggctgactgtaggtcagatgggagtgtccttccagaaattagtgacttacc

SEQ ID NO: 281010 - DNA, 122 bp, Homo sapiens
tcgccatgaaggatttcccgtgctgtaggagcaagtccgggaccgctggctggacgtgagcgtcctagctgtgcgttagggctaggagggctcagggtgattggggattggctggggtggtg

SEQ ID NO: 281011 - DNA, 122 bp, Homo sapiens
agggcaggctggaggggcggcctctcggaacgggggcgggaccaccgccggcagggcccgcgcccctgccgggactcagagccgctgcagccacagtcacgaactggcggccggcaggtgcc

SEQ ID NO: 281012 - DNA, 122 bp, Homo sapiens
ggcggggtggtggtggtgacaagcccctattacggccttagtgcgggattccccttggggcgggagacgtcgtccttccgggtgcgggtgcggactgcaagtcctatcggggaccgcgacac

SEQ ID NO: 281013 - DNA, 122 bp, Homo sapiens
caggattactatagagatcctcgagagcggactttacaacatgggctctattacgcttctcggagtcgaagtccaaatcgctttgatgctcatgacccccgatatgaacctagggctcgcga

SEQ ID NO: 281014 - DNA, 122 bp, Homo sapiens
ttctgcccctctcctagtcccccgctgcctcagggccgtcgcagaagtctggtagcccgacgcctttttgcgcccatctacctcgcccacctttctgggcatgggtggggtggggaatgttc

SEQ ID NO: 281015 - DNA, 122 bp, Homo sapiens
tagctatcctcctgacgagcaacccgtctgcgtacctaagtgtggctccccgtgggtcagcgtcctggtagcatggatccagtctgaaaggtgaggacaacgtggaaactcatgagctgagc

SEQ ID NO: 281016 - DNA, 122 bp, Homo sapiens
gccctcactgagctagctatactagtggtggacgtcagggtgtgacagggaagactcaaccgagaaagaggcagatggtctgagtccagcaagagtgaggagagttcatgaggcaccgggaa

SEQ ID NO: 281017 - DNA, 122 bp, Homo sapiens
acctcagctcagactgcccctgagtcctcagaagatgcctaaatatggactgttctgtagcgcttaaggatatcaaatgacagtataccatgacaatcacaactaatcgaagtcccctgcag

SEQ ID NO: 281018 - DNA, 122 bp, Homo sapiens
cgccgcgcggaggacgaagaggctgcacgcacagccgctgccgggggtcggggccaagtgcgcgcctcgccgaggacgaagaggctggcgtgcccggtggctcggctagctcccgggtcccg

SEQ ID NO: 281019 - DNA, 122 bp, Homo sapiens
gactctcacctctggctggcacctgtgtgaaggacacaacctgcacagtttatgccaagacggtcctgagaaagattctgaggccaggtctgggctcgttgataaagagtgccaaaattgac

SEQ ID NO: 281020 - DNA, 122 bp, Homo sapiens
agtgaccagaaagcgatcagcagggactcttcctccagctgcaggaagcaaactctcgatcggggtgagtggtaaaccagggccggcagacgcctctctcccccacggaccggcttcccgca

SEQ ID NO: 281021 - DNA, 122 bp, Homo sapiens
tgtgatttttgctacccatccggaaccccatgccttgtaaaaaaaaaaaaaaaatcaaatcgttgaatttggtttgctaagtcaggactctccactgttgtcatttcctagcagaatatgag

SEQ ID NO: 281022 - DNA, 122 bp, Homo sapiens
tccggttcttgaagatagcgtcccttaggcaggaggggtgggtcactcagtctccaggctcgggaggcccccagcaaatcggacgctgtgggctaggccgccaccgcgagcccactcgcccg

SEQ ID NO: 281023 - DNA, 122 bp, Homo sapiens
atatcaagaataaacaggcgagtgtggaatctgcggagggaggggattgtctctggttcccgaaatcacggcaaagtactttctgtgcagggagggcacagtttaagaatatctgttgcaaa

SEQ ID NO: 281024 - DNA, 122 bp, Homo sapiens
ctccccgggctgtgactgagacctcattggaaaggctgcagctgcaaatggatgatggggcggtgggggttggttggggttccatgggtgggagctggttcacaagaagccacctactaggg

SEQ ID NO: 281025 - DNA, 122 bp, Homo sapiens
gaatgtgcctggatagaaagggcccgacctaacgccgatgggctgagggggcggcaggggcggcaggggcggcagggcctaacgtggacgggccgagggggcggcagggcgtaacgcgggtg

SEQ ID NO: 281026 - DNA, 122 bp, Homo sapiens
gtagaaaggtggggatgcagagaggagagagacgagcactcactcatgtcaaacaggtcccggggtgcactgccattgatagcaggattggggggcccagcaccacccactgcttgccgggc

SEQ ID NO: 281027 - DNA, 122 bp, Homo sapiens
gctgagcggcgcgctaggcgtcgggagtggcatggcggactgcaggggccagctgcttggcggtcagggcgtccctgatagacttgcattggtcgtgctcgcttaggtggcagcacccagcc

SEQ ID NO: 281028 - DNA, 122 bp, Homo sapiens
tctgggggtgtcggtgggtggcgccgggagcggagctgctgccgagactggagttgatggcgcagttcagagacacgctcctctttctggaggaagaagcacaattgggatagtaggagaag

SEQ ID NO: 281029 - DNA, 122 bp, Homo sapiens
tgttttatatatgtattacacgcacacacactcacacagcttgcttttttcacatagcttcgtgtttgagcaattagtccgtgttggtgcatgtgctgtagtttatcctttttgctactgta

SEQ ID NO: 281030 - DNA, 122 bp, Homo sapiens
ggccggggcggggcctgcagggtgcgcccgcaggggccgagggcggggaattcggggagccgcggggctaccggactaccgaacgaggggcgggaggagaggcggagccgcagcgtggtcgg

SEQ ID NO: 281031 - DNA, 122 bp, Homo sapiens
aaaaagctccactgaagatggaatgggcccacaaagtatctgtcccacctttcttctctgcgccctcgaaaacgtgggtcctcgggatcccgggggaaacgttcatctccgggcctgcggcc

SEQ ID NO: 281032 - DNA, 122 bp, Homo sapiens
gcgcccccgcctgggagcggtgccctgcagtcccaggggcccagagtccaccgaagcagacgcgtgcgcccgccacgtcctggcatgcagagggtctcaggccgcgatccccccagcccccg

SEQ ID NO: 281033 - DNA, 122 bp, Homo sapiens
aattgccaggtggaacgacttgcttccgaccacatctaatttggtaaaattgctttggcccggttgccagaagccttggcaggaaccaggctgaggcagctgggccagccacggagggcagc

SEQ ID NO: 281034 - DNA, 122 bp, Homo sapiens
caaaactggtggacctgatattctgaaggctataaaaatgtttatatcagacttgctggccgtttgttttgggggtgtgcattatcttatttggagaactgaacttttaaaatgagagtttt

SEQ ID NO: 281035 - DNA, 122 bp, Homo sapiens
tagaggctgtgaggcaaaggcagaaccatttctgggtgacacatcagaaaattactgttccgttcatctaaatgatgtttaaaatgcccactgcagcatgaaagtgcctctgctgagaaact

SEQ ID NO: 281036 - DNA, 122 bp, Homo sapiens
cttctgccgaggatgcagaaagcagaaagagtgctgctcttacactaacaaggaggaaaacggaaactgaaaaccacaacttttcttgaacctagcagagagctaaaggtaaccaagcatcc

SEQ ID NO: 281037 - DNA, 122 bp, Homo sapiens
ggcgaataaaggccccaaagaccaggaattgaaaaaaaatacccgatttgtgagcttggccgtggtccagatcttctgtcctgataagcagatggcaagaggaaaggatcgcagttactcag

SEQ ID NO: 281038 - DNA, 122 bp, Homo sapiens
ggggaggcttggtgggtggcacagttgggtcccgctctgggatggcctcatccaggtgcccgagggcatttccgggacaggagccggcctcagaggctgggtggcaggggagctgagaggga

SEQ ID NO: 281039 - DNA, 122 bp, Homo sapiens
gaagctgacaacttgggagttccttcctctatccggtacccccaagtctccacttgctgtcggcgcggagcttcgagtgggggtgggctcaagttagtgcggccaacctggcagctggtcgg

SEQ ID NO: 281040 - DNA, 122 bp, Homo sapiens
acagagactgggctgcgtcgtttcccatcctggatcccaaagagcaggaacttgtacttgcgggagggttccaggtcagggatagtgacctcccgctgatctgcagccacgggcaccacctg

SEQ ID NO: 281041 - DNA, 122 bp, Homo sapiens
ggcctggcatcccaggctcctgcttgtggtttacctgtgtgacacacacagacacatatacgcactctagtgccaaacatgacagaccaggaggttggttttcttagcctgagaatctgcat

SEQ ID NO: 281042 - DNA, 122 bp, Homo sapiens
ggggcggaaatacactttgatcccactcaagcggagcggaggtctgggaggccctgggcccgggagaccagtcttagactcttgccccactgggtatcccatctaggcctcttctggggagg

SEQ ID NO: 281043 - DNA, 122 bp, Homo sapiens
gaaagacaggagacgtgagctgggaccacctttacaactcacactaaccattaggaaaaccgccttgctgctcatcctctatcttcctttccttgaaaaacctggagactcagaataggaag

SEQ ID NO: 281044 - DNA, 122 bp, Homo sapiens
ttgttccccctcccccccgcggcacccgggcgcctgccgagagaggctcccccggggcagcgtgccagcttcccagccgccccaccctcccgtgggcccggccccggagcctggcaggcggg

SEQ ID NO: 281045 - DNA, 122 bp, Homo sapiens
ccatgagagactaacacgggggccggtgctgccgggaggacgtcgggaatttcatattcacgttttagacacaggactccctgctagattttagtaaagtgacaaaatggctgtgcaaatag

SEQ ID NO: 281046 - DNA, 122 bp, Homo sapiens
atgcttaggacaacccagggagagacataggtatatattgcattgccagcctttggaatgcgggatgcggtccagataaggccatcgcagctcagagaggctgttcagccgctgttcgattc

SEQ ID NO: 281047 - DNA, 122 bp, Homo sapiens
agtttattttccagttaatgaaatgggagactgagtccctgccgctgcccctggagacgccggagttctgaaggcatctcctccgcgagactccagcctgcttccctgtccccttccgccgc

SEQ ID NO: 281048 - DNA, 122 bp, Homo sapiens
ctgtaacctctgcaagagcaatggctggaccctgcccactgtgtaccagggcatgtacaacgccaccacccagcaggtgaaaacggagctcttcccctgcctcaggcactctggactgaggt

SEQ ID NO: 281049 - DNA, 122 bp, Homo sapiens
cgggtgacaagggagaggcgtctgagggaccgggattattcagctgacccggtgcggggccgcgttctcagcgcgggcactagggggcggcagaggcggaggcgccagcgccgaggagaggc

SEQ ID NO: 281050 - DNA, 122 bp, Homo sapiens
catctgtgagaccttcatgggacctgaagacgcagcacagaggaggaacttgaaaaaggacgggatttctactactcaagcatgtaggagctcaggatattctgtaaatatgaagattttga

SEQ ID NO: 281051 - DNA, 122 bp, Homo sapiens
caggccagcttcccccgtggccgggtctccaaagcagccggtgcgtggctactaccgtggcgctgtcggtggcacgtttgaccgcctgcacaacgcccacaaggtgttgctcagtgtcgcgt

SEQ ID NO: 281052 - DNA, 122 bp, Homo sapiens
caccgcagcgtgaggacagcaggacctgagccacgagccacactgctgtgggacccgtgtcgggactcgcagggcctggcaggtgtttccatttgacctgtgggctcacactcggcagttct

SEQ ID NO: 281053 - DNA, 122 bp, Homo sapiens
tccaccttaagggatggtgtagttatgcagatgtagttttatgatatagacagccccatccgctcccctcatcacagatcacagaacttggccatggggatgttaggctctaagcatggtag

SEQ ID NO: 281054 - DNA, 122 bp, Homo sapiens
ctctttcataagtatttgattgcaggttggtatcctgtatccaagcacagcgcttggcatcgagtaggcgctcaattttatttggtgaatatgagttggaggaatatttgatgaatgaatgg

SEQ ID NO: 281055 - DNA, 122 bp, Homo sapiens
ttgttacaagagatactggctgcttaaggcaggaggcttcttctgagccagggcagctcccgtacctccctgatgtggagcttaggctttgtacctggaactacgtcgtgtggggagacaac

SEQ ID NO: 281056 - DNA, 122 bp, Homo sapiens
aggggcttgtaggagttagagctgtgtgggcctctgaggagctcccagcctcccaggagccgctgcagctgtggctctgcggccctgccgggggggcttagggaccagcgggaggcgggggc

SEQ ID NO: 281057 - DNA, 122 bp, Homo sapiens
ggacacatatccccattacacactcaagaaacccaaccttaagagagattagaaaccttccgaggttcacaacactggtcagcagtggacctggacactgaaccttgtccttctgactccaa

SEQ ID NO: 281058 - DNA, 122 bp, Homo sapiens
cctgtctctgcacagaatgtggacctggtgctggctgtctgggaccgcagcctgccgctccgaactgagcccgtaggcaaggtgcacctgggtgcccgggcctcggggcagcccctgcagca

SEQ ID NO: 281059 - DNA, 122 bp, Homo sapiens
tgttccgctccctgtgttcatgtgttttcattgttcagctctcattcatgagtgagaacacgtggacaccattcctttttaaaaaatcacctgtcttggtatcaatcttactgggagcttaa

SEQ ID NO: 281060 - DNA, 122 bp, Homo sapiens
ctgctaaagtatcttgaaactgaagcctagaaaggccttttctctattgagtgatattagcgcattacaactggcttcattgttcaaaggtaggaccagaagagaaagtgctcctgcctcct

SEQ ID NO: 281061 - DNA, 122 bp, Homo sapiens
gagtccctgcaactacatttcccaggggcccctggggtaaccctaatgtgactctgggggcggggccagttggacatccaatgagagcacttcccctgcagactttggaagtgagagcactt

SEQ ID NO: 281062 - DNA, 122 bp, Homo sapiens
gtgggcttgacaaaagggccccgggccaaggcttaaggggggtgctgtggtccccaggcgcgaggctgggggcccgggccacccggctcctcctcccggagcctggtccaggcgcgctgcgc

SEQ ID NO: 281063 - DNA, 122 bp, Homo sapiens
gccgcgggacggaggcggtggtgactcagccgtgccgcagtggcggggcgggggacggggcggcgccgagaccccggccctccgcgccacggagcgggacccacggctgcgggctccacctt

SEQ ID NO: 281064 - DNA, 122 bp, Homo sapiens
aaaagaaccccaggagggtcagtggtgtgcttgaggcaagtcccccaacccaaaaattgtcgcactcctaggaacagagaggccattctgggcgggtctgtcgtgcattaggagagcctttc

SEQ ID NO: 281065 - DNA, 122 bp, Homo sapiens
cgggcctttccttttttgtgcctgcctctgaacccatacaatatatgaacatctgtacatcgtaaggatatgggcatggatctcacaaccagatgctctgtagttagggtacagtcggggct

SEQ ID NO: 281066 - DNA, 122 bp, Homo sapiens
ccatatagacagcgtgggcatgtgatctgtgagccgtggtccccacggaagcggtgagaacgcacctggccggctcagccacacggcacggtggcctaggccctgctgcgggctctggatcc

SEQ ID NO: 281067 - DNA, 122 bp, Homo sapiens
aaggattattttggttgttggccatctcttcatttgcccttttcaaagactgaagaataacgcagccatatatgggaaaagctgtgtgtgtgtgtgtgtgtgtgtgtgtgtgtgtgtgtgtg

SEQ ID NO: 281068 - DNA, 122 bp, Homo sapiens
tgaagaaacaaacccaggctgcaggccgagggagctgtcagcatcgttcatcctcatgttcgctgggctggggggaggaactggcagctgttcgccagtgattcagttttcttcgttgtgtg

SEQ ID NO: 281069 - DNA, 122 bp, Homo sapiens
ggcaatcttggagtcattttagtgaagacgcatttctgaagcttttaatctgcagctgcacgaggcgagatgctgagccaccgcaatccaaacccttcagaagatgaagctgtgtgtgcaca

SEQ ID NO: 281070 - DNA, 122 bp, Homo sapiens
gagactggtactgtctgcaggtgtggggacacggctcagatgcttcccagcgctcactaccggtgagctcgagaaagatagccttgagtccaggctcagtccagggctgagatggccctccg

SEQ ID NO: 281071 - DNA, 122 bp, Homo sapiens
agtttattctatactttcttcatttaccagctgcaatgttcctagagagaagccagcactcgccagatctttggccaccccgaggtgtcgtgtgcataagggaagatgagaggctggttgac

SEQ ID NO: 281072 - DNA, 122 bp, Homo sapiens
gattaggttgggaagcctgcgattagggtggcactttcgagcgctctggtgtgaatttcacgttcttttacctcatattgtatcatcccaacaaccctgtgatctagggtgcggcctggagg

SEQ ID NO: 281073 - DNA, 122 bp, Homo sapiens
tttttctaagttcatgccagccttgggcagggccaagtgccaggtctcaaggtggtacctcgagatggcagtggcagtgcaggatttgaatcttgccctacagcagctgcccccattgccct

SEQ ID NO: 281074 - DNA, 122 bp, Homo sapiens
ccagggggagtcacgggatagctagtgtgtctctggctctgttctcaaagcccaggatcccggcagcagcaggaatgcagcacacttatgcgtgaagacgagatctttcggtaagtcctaca

SEQ ID NO: 281075 - DNA, 122 bp, Homo sapiens
atgctggcgaaggcaggcacagcacagcactgcgggaggatgtgggtcagaggacagcagcgggaggcgagcctttggctcagtggaagaaagaactgtcaggcattctgaacaatcgacaa

SEQ ID NO: 281076 - DNA, 122 bp, Homo sapiens
gtcgcgcaccgcgcagaaaccggaaggctcctggcggtggactgcgccctcacagccctacgctgagagagaatcggcgtgagtctccgccctcagagcctacgacaactctccagactccg

SEQ ID NO: 281077 - DNA, 122 bp, Homo sapiens
gcctcaaagtcgcaattgagtctgcgcaccggccattcaggatgggacgaccttataccgcggtgaggcggcgtggcaggacgaccaatttcagattcagggcgcggatgcagcataaatgg

SEQ ID NO: 281078 - DNA, 122 bp, Homo sapiens
tggccgtgccaagttcctcagctgaagttgtggccaggacccagtcttgtttccccttttcgtcacatgtgtgggtggagggaaatgccaaaccacagcaaaagcaagttgatgccgaagtg

SEQ ID NO: 281079 - DNA, 122 bp, Homo sapiens
gccgagagcccagggatttgggggggcgcgcgggctcccgagctcaggcggggcggcgggcgccctgccgtcctctccccgcgcgccgcgccgccgcccggcctcccgaagtcgccccctgt

SEQ ID NO: 281080 - DNA, 122 bp, Homo sapiens
agaaaagttaatcgcaacaattcattgcactggcaataaataaattgtatattccttcaacgcctgcaaagtcccctatattttctcgaattactcagctcatcaagctgcatgggtattgc

SEQ ID NO: 281081 - DNA, 122 bp, Homo sapiens
tggacaaaaagtttcattattggacccctttggggaaggcgcctcccatccccaaaggagcgggttaaccgctcggctggcgcggccccgcccgggtcgccgtctgagagggacggtcgcgc

SEQ ID NO: 281082 - DNA, 122 bp, Homo sapiens
cggtcgtgggcggggttgcaggcgaggctcaacgaacgctggttcgggacccgcctccggcgctccctgttgccgggccctgagcaagtggcttcatgaaccccgtgacgttggccatggag

SEQ ID NO: 281083 - DNA, 122 bp, Homo sapiens
gctccttgagccctctttggcattcttcgaggccggggccatagcggcctcggcgggctccgttcccccggccaactccatcaattccccgcggtcctcccgcgggggccaattccagccgc

SEQ ID NO: 281084 - DNA, 122 bp, Homo sapiens
gccccgccccacggtgttgctgctggatcctcctccaccaatcagcaggagccctcggctcgcgctggggcggggggtcccccactcgccctccccgcggaactctggcacagtcagctgac

SEQ ID NO: 281085 - DNA, 122 bp, Homo sapiens
agaggtaagggtgggagggtggagggaggcggattaatcccttaattacgccgtgatcggcgtggcacctgctttccgcctgcccagctcccaggggactccggcactagggggtggagaga

SEQ ID NO: 281086 - DNA, 122 bp, Homo sapiens
cgcgctacgcgagtgatccagggctgcggggagcgcttgccatgactcagcagacagcgacgaggctgcgactcggcggctgggatcctctcccctccctccccaggcgcccccgcccccgt

SEQ ID NO: 281087 - DNA, 122 bp, Homo sapiens
ggctgggactccccaaaaagagagtctcccttcttcctgctggactagcctgagacgatgcgaggctatcgctgccgcagtaccgggcggagggcctgtctgagagggagccaacctcgagg

SEQ ID NO: 281088 - DNA, 122 bp, Homo sapiens
gagtggcactcacccttcctctgccttttgttctcttcaggccctcagcagattgcaggacgccccgacacaaggaagggcgatcttgactcagtcagtccacggatgcacgctaacccctt

SEQ ID NO: 281089 - DNA, 122 bp, Homo sapiens
agcagcatttgctgtttgagggtttaaatggccctggacagggatgacatacatatgtgccgagaggcagttttgttagagaagatgtcttcatggtggagtgttttgccagttccaccttg

SEQ ID NO: 281090 - DNA, 122 bp, Homo sapiens
agggcagggcatgcgggaacggagggagagatgggcagagaggtgatgactcctcaaacccgttgccatcctgaccctgctggcaatggggtgacagcacttccccagggtgaataacctcg

SEQ ID NO: 281091 - DNA, 122 bp, Homo sapiens
ggcgcacagaggggcctgggccggcgcgccggggcccccgcccccagcccctctcccctgcgggacgctgtccctttaataggctcccgctgcctggcgctctgcggctggggagtaaattt

SEQ ID NO: 281092 - DNA, 122 bp, Homo sapiens
ccctaaaggtgactgtccaagcctggaaggggtcatttattccatgcagaaggaactgggcgccgctttgctgtgcctcctcgtagcgggacagggtgagcgccgcaggactgcgaagttcg

SEQ ID NO: 281093 - DNA, 122 bp, Homo sapiens
ggaggcagacgtcaccagcaggagcagcaaaggcagcgaggccagcacatgcagcatggccgtcgctagtgccagggccggaacccgggcacctggcaacgggcaaacgcccctcccccggg

SEQ ID NO: 281094 - DNA, 122 bp, Homo sapiens
gtcccatcccatccaatagttcccatctcttctcagctctctctgtagtttctcttcctccgcctgccttttaagttagtgtttcccaggacagaggtgactcagttgtatccagaccgctc

SEQ ID NO: 281095 - DNA, 122 bp, Homo sapiens
cgatagctactggccctgggcgagccgttgggattgcgcttgcgcacagcgtgtcttgtacgttcccgcgcttttctggaatctttcgcccccggaagggcagcggcgggcgcctgtgtgga

SEQ ID NO: 281096 - DNA, 122 bp, Homo sapiens
tgggtaacggctctcggcaaagttcgagaagtgcctatggccatgagtgagctgggcactcggaagcccagcgatggcactgtttctcatctgctcaatgtggtggagagtgagcttcaggc

SEQ ID NO: 281097 - DNA, 122 bp, Homo sapiens
gccctgcctgtcccagggcccaacagtgactgcagtgaatgtcctcaagcatcagctgctcgatggcagccggggtttctgactgaccctgtggggttttctccatcaaattcctttgaaca

SEQ ID NO: 281098 - DNA, 122 bp, Homo sapiens
attttttaaaatgcatgagttcgttacctgattcattccctggttcctttcacagtcctccgtgacccaagtgttagggttttggtctctctactatttgtaggctgatatatagtatacac

SEQ ID NO: 281099 - DNA, 122 bp, Homo sapiens
aggggaagggggtagaagagccgggccgccacacaaaggccgggaacccctcggctcccacgcccccggcccgccgccagtccggaggccccttccaggctctggagtgaaacctggatagt

SEQ ID NO: 281100 - DNA, 122 bp, Homo sapiens
tctgccacgcccgtccaaaagagggatggctgtttctgctgctgcggggtgaagaggcagcgcagtccactccgtttttataggctaaggaagacgccctaactttgtttcctaagtagctt

SEQ ID NO: 281101 - DNA, 122 bp, Homo sapiens
cgccctgccccttgaatgcctgcacttttccataacctggtctctcccggcactacagggcgccagccaaaaaagcacaggtcccccacccaaggtcaatgaaagccctggctcttccatgg

SEQ ID NO: 281102 - DNA, 122 bp, Homo sapiens
ccccaccataaacacatgccctgcagggcaggacttggcactcaagggctcctggggtcccgatttatctgctaaaacatcctctagccaccaacgaataaagcaaccccttgccacccaac

SEQ ID NO: 281103 - DNA, 122 bp, Homo sapiens
ttgctctgtgtttgtgcgagcatcaaaacaaaacataatgattccaaagcaattctatgacgtgcagttggtgtgtttgagctacttctaaagctgggctttctctaccagctgtctagcaa

SEQ ID NO: 281104 - DNA, 122 bp, Homo sapiens
agggagaggaaataaagcagaaggaacgtgtgaagctctgtgtctcagacggggccctcccgtcgagaagctggtagtcagtgagtgagaacaagagaacaagaacaccctgaacagtcctg

SEQ ID NO: 281105 - DNA, 122 bp, Homo sapiens
agtccttttgtagcactaccgtgctgagcactacgactcccaggatgcaacgagcatttgcgcctgcgtacaaggctcaatttattcgtttccccgcccctttcatgaccttcaccgggagg

SEQ ID NO: 281106 - DNA, 122 bp, Homo sapiens
gcgggccccactcctgcatgttcccagcaccccaagggccagtgccatgctgcatggtctcgctgcggccaccctggctggggacgctctgcgggacacgcgcacagcccagacgccctggc

SEQ ID NO: 281107 - DNA, 122 bp, Homo sapiens
tcatgcccataaataatccctattaacagtttggtgcattcaacctttccttactgtttccgtgactatagaaagtagctgcaccaaagactggtttggggaaatttgacttcccataattt

SEQ ID NO: 281108 - DNA, 122 bp, Homo sapiens
cccctcgctctgcgcgtccggcagcggcggcggcggcgggagactgcctgcgcccagccccgcccgccgctccgccctcctcgtcagtggaaaactccggggctcactgcgctgacgcacgc

SEQ ID NO: 281109 - DNA, 122 bp, Homo sapiens
ggtgcattttaaacctgaaagctggggttctagatataaatagcatacacagttggacaacggcattaccatcagggtgagatcacttccaggaaaacactgaaatatagcaatgggaataa

SEQ ID NO: 281110 - DNA, 122 bp, Homo sapiens
gggcctccgtaggtccattaaactcagaaggtcgtgtgtactggtagtgagtggatttttcgggggaagggtgcccatgattaaaatgtttctacagaaagtctggctgtatttggagaggg

SEQ ID NO: 281111 - DNA, 122 bp, Homo sapiens
ggtgttccaatagtataaaatactgccaccatcttgtccatggggaaagtggtcggggggcgtgtatatatgaatatacatgggccaaagaataagatgactacaattatgtgagacgtgca

SEQ ID NO: 281112 - DNA, 122 bp, Homo sapiens
agaagacgctgccgcctcagacgagggcgggctgtgtggggcgggagtaccagaaagggtcggcgtgtgtccccgggatgctcgcagcttccctctgcccagactggggtggctttcggcgc

SEQ ID NO: 281113 - DNA, 122 bp, Homo sapiens
ccccccgccccagccgggtgccaccagcctgtcattctgagagcagttctataacctgaacgcgcctgggagggcgcagcggacgtcccggacgtgcaggtttgtggggcaagcaaaacaag

SEQ ID NO: 281114 - DNA, 122 bp, Homo sapiens
gttaggggccagagagcagggttgtcagacacttggcagagagctgttggagcaggccagcggtgagatcattcgcgtgtcttaggtccggatgggctggagcgccaggatagaccagaagt

SEQ ID NO: 281115 - DNA, 122 bp, Homo sapiens
aaggccttaaaagttgaagcttccctgaaaaagaaaagaaattccacccacaggcagtggcgtctgctgtacttgtgcctgtggagttccattctgctcattcacttccctcctgactgccc

SEQ ID NO: 281116 - DNA, 122 bp, Homo sapiens
gaatgggagctgaggagcggccatgatgaatagctagtatcatttcttcaggaaaagactcgtctttccacttttaatttggaggaagaagtttgcaattttgtcgaggggcaatgtaggcg

SEQ ID NO: 281117 - DNA, 122 bp, Homo sapiens
gcagatattcttcggggcaggcaatagtggggttctctttcacagcatcctcatcactttcgtgattctgaatcgcccctgtcaccctttgaaagaagaagagacccagctccgtgctcagc

SEQ ID NO: 281118 - DNA, 122 bp, Homo sapiens
gcttaaatagtccaagtatattctctgagaggaagtactgaaagatgaattgacatacaacgtatgtttccagtgaagtcaattgagtaaggacacctccagccatacagaaaccaacactg

SEQ ID NO: 281119 - DNA, 122 bp, Homo sapiens
agactagatgatctgtgtgttcaagggctatgcctccccatcagattggaagcttccaagcgcaggggctgttcctccccgatcagcgaggaggcccctgaaggacaggcattttgtctcca

SEQ ID NO: 281120 - DNA, 122 bp, Homo sapiens
gtaatgacatgctgtgggtgaggggcagcaggaatcgtggggcgcgggggttcccgaatgcgccaaggggagcttggagaccagtagcgaggccaaataaattagcatggacgaagccctcc

SEQ ID NO: 281121 - DNA, 122 bp, Homo sapiens
ggcgggcgcggcgatccctttgaagtgtggctgccgatcgcggctatttgacgtgcggctcgaggaaggcgaaggtttttgtgttgctagccggggccagcggcggtggcggcggcggcgga

SEQ ID NO: 281122 - DNA, 122 bp, Homo sapiens
cattcattattttcatgcatctgtgggctgactgagagtagattgatcaagactagccttcgctggacttgcctctgagctacaaaagtcgggtccaggctggttccctgcattagcaagct

SEQ ID NO: 281123 - DNA, 122 bp, Homo sapiens
aaagaatccagttgtttctactattttttaatcactgttgttgccatagcaattaagtgccggcgctacttgatctcttaatgccttgcccatcacctgcattccctcccatgctcccacca

SEQ ID NO: 281124 - DNA, 122 bp, Homo sapiens
agggcttctcagcctcttggatgtggacgtttgggcccgtaattcttggtcgtggagggccgccctgcgcattgtaggatgtttagagccagggcagggcttctcagcctcttggatgtgga

SEQ ID NO: 281125 - DNA, 122 bp, Homo sapiens
acgagaggtctttaaaacaatgtaacttttaaggccctgtttaatcagcctcctacctaccgcctcttcccactacccctcgtttcatccgcactgcacttccaggtcttccttccactccc

SEQ ID NO: 281126 - DNA, 122 bp, Homo sapiens
taccaagtcggggtggggggtggggtcgcagggccagcgctttagtgcgccccaggggcccgattgggcaagaaaaggaaagcccagccctattttatccagcccagctgtccccagccccg

SEQ ID NO: 281127 - DNA, 122 bp, Homo sapiens
ttgagttacaggtcggcccgtagatccccggaagcgcctttggttgccagcaggtgtcggcgagggtcttcagtggccaccctcctggtggtgatgtttccgtttctttccaacaggagtat

SEQ ID NO: 281128 - DNA, 122 bp, Homo sapiens
gaggcagcggtggcgcgaggctcaactcgaagcgctattggtgggactgatagtcttgtgcgccaagaagctggcagaagggaaggggcgggacatcagttcaggatctcaaaccgcattgg

SEQ ID NO: 281129 - DNA, 122 bp, Homo sapiens
cagctcctcggagctgaaccagggccctgcagcgcccgccccggccccacgtggagctagcgccgagaaactcacattgagcacggtgccccctacgtctgtgtcgttctggatgttgaaga

SEQ ID NO: 281130 - DNA, 122 bp, Homo sapiens
tgactgcgggaaaccaaactttcttgtattttctctggctgggttgtgatgtgggcatggcgttggtgggaggtagtgcatttgctgagggtgatgtgttctgagtgtcccctcactccgtg

SEQ ID NO: 281131 - DNA, 122 bp, Homo sapiens
taattaatgatggagctaagggttgaatcgagcagtctgatgacagagtagtgctctaaacgcaatgttaatgcttcatcttattcctaatattaaagatgctgtgtgcactaattaccacc

SEQ ID NO: 281132 - DNA, 122 bp, Homo sapiens
ctccacgtccatcagcgactcgggctccatccagtggtggatgctgctgtgcctggcctgcgcatggagcgtcctgtacatgtgcaccatccgcggcatcgagaccaccgggaaggtactgc

SEQ ID NO: 281133 - DNA, 122 bp, Homo sapiens
accaggtggcggggacagggtgagcgtacagcccaggtttccgctgtaaggaccaggtggcggggacagggtgagcacacagtccgggtccccgctgtaaggaccaggtggcggggacaggg

SEQ ID NO: 281134 - DNA, 122 bp, Homo sapiens
cgcccggccagccgcggggaggagggctcggccgccgggaagaaggacgtcgattggtgccgctgagtgtcacttgaggaagaccccgcggatattggcatttctctcgggcctgtcattct

SEQ ID NO: 281135 - DNA, 122 bp, Homo sapiens
acccagtttgaagtgactccttcctcactccatgcactttatgcctcttttatggcaatgcgcatattctgccttgcacagagtccttgccctctctgtgttgacaagtttggcattccttg

SEQ ID NO: 281136 - DNA, 122 bp, Homo sapiens
tgtctgacctcaggcatgagtccctgccttctacgattccggtgaaggaatgtgggcatgcggggcaggggacgggtcatgggcttccaagttaaggggaggaagttggaggagatgcctgg

SEQ ID NO: 281137 - DNA, 122 bp, Homo sapiens
aaagtccatcccatctttgcactgacagcagtgcacagcagctggcagagaattctggcacggctattgtgcttgcgcaggcgcagacgggaagcgggccggaccggcctagtacactctgg

SEQ ID NO: 281138 - DNA, 122 bp, Homo sapiens
aatagaaactcaaggaatgcaggaaacctgggtgtggttagggcaaggtctggaaagggccgttccgtatcctaagcaacgctaacaccttgttaaggcttccagcatagagaacaagcagg

SEQ ID NO: 281139 - DNA, 122 bp, Homo sapiens
acagcccaggccggtgtagacagcacggatgcagccgggctccagctgctcggccatgtccgtggcctgcagaattctaagaaaaacaatgacaggtagtgtgtgtgttcatccattctcgc

SEQ ID NO: 281140 - DNA, 122 bp, Homo sapiens
gttgcacaagtccaaaactggttgttaaaggagggcactgaatctattaaggaccaggagcggctgatgaggcataggtaagattaaagttgaggcatattttatgggtatgttgtggaccc

SEQ ID NO: 281141 - DNA, 122 bp, Homo sapiens
tctgacttacgtctgtgagatttacccgttatgtgagttgcggatcattcactcctgttccgtttgtcgtgctcctaagcccgaatactccacgatattcatctgccttgatgacgctaggc

SEQ ID NO: 281142 - DNA, 122 bp, Homo sapiens
caggagccgagacggggcggagctaatgccctaaggttgtagagattatcgctgaaagaacgtgggagcacatctgagggtcttcatttctaaagtttccaggtgaggctgagaaactgaga

SEQ ID NO: 281143 - DNA, 122 bp, Homo sapiens
tgaacactatgttcctgagtcagaagagtgcttcagtaaatctgccttcctggggcacaacgaatcacacacagtcacactttcagaaaggcgaatcctgccaaacgttggctggacaaaag

SEQ ID NO: 281144 - DNA, 122 bp, Homo sapiens
ctaaagaggggactggttttgatgacagtgatttatcgcctcagcacagcacgcacgggacgctgtctctccaagcgatttgaccagagcatcccgtcctcgcctcctgtccaaaccttcct

SEQ ID NO: 281145 - DNA, 122 bp, Homo sapiens
taattcatttgtcgcggacctggcgcagtcgctctcccccgcagccccgcctcctccccgcgggctcagggcacaaaaagcgcacacgcacacatcaaacgccatgcgcacgcgcacaacaa

SEQ ID NO: 281146 - DNA, 122 bp, Homo sapiens
gtgtactcgtctggaaatcagaggagaaggtcattttaggtgaaggtcggtgcctgaagtcggctcggtattggtgtattatttatcagctttagccgtgtcctgcagtagattctcaagac

SEQ ID NO: 281147 - DNA, 122 bp, Homo sapiens
caaagcccatgggagagaggcacgaaaggtgatttaaagtatcttctagctctaaagttacgtgataactaaataggaaaatctgcatgtgaatagtaatagctgctccttcatagttctca

SEQ ID NO: 281148 - DNA, 122 bp, Homo sapiens
gtctgctactcagccctgctcaccaagaccaaccgcattgcacgcatcttcggtggggcccgggagggtgcccagcggccacgcttcatcagtcctgcctcacaggtggccatctgcctggc

SEQ ID NO: 281149 - DNA, 122 bp, Homo sapiens
tgtgctggtcaccttgtaggtcgtgggcccagactctttggcctcagcctgcacctggtccgtggtgacgccagaccccacctgcttcccctcgcgcagccaggacacctgaatctgccggg

SEQ ID NO: 281150 - DNA, 122 bp, Homo sapiens
aggtccctccgggcacctggctgggcttggctcaaggcggtgcctccaccgagactccatcgcggcgggaccggacctccaggagtgcgcccgcgccgccctggaaaaggctcctggccttc

SEQ ID NO: 281151 - DNA, 122 bp, Homo sapiens
ataattaaaatagtgctgatgacaatacctgtttagaaaactaaacaaaatttagaatgtcgaaaggaaaaacttcacaacacaaattagcatatagagggtattcaaggctaatttgttgt

SEQ ID NO: 281152 - DNA, 122 bp, Homo sapiens
aaaggggaaggggaggaaggggcgggagcctcggcggggcgatccccctccgaccccagccggcccgcggtagccgccttgggaacttctgcgctatgattatccgcccccgcgttggggac

SEQ ID NO: 281153 - DNA, 122 bp, Homo sapiens
cgtccccagctccaggtgctcttagatcagcgaggccaccttgaccctatcgggagcattcggactcctggtaaacctctctcagtggacagcagagctgtgcttgtgaacggccttcaggc

SEQ ID NO: 281154 - DNA, 122 bp, Homo sapiens
acctctccatgcctctcgtcagcctctcccgtctgcgtggtgggggctggggagtgggtccgccgggacctcgcgagggaggggcacaggaggagccggcgggggacgccacccaccctcct

SEQ ID NO: 281155 - DNA, 122 bp, Homo sapiens
tcagacaccggattaaagaaggaagaggtttttttattcggccgggagcgtcggtagactcgtgtcttaagagccgagctccctgaaaaagaaattcctagcacttttaagggcttacaact

SEQ ID NO: 281156 - DNA, 122 bp, Homo sapiens
ttcttgcgccacgaaggcccatggtgggaagagtagcccctccggcttggacgagggtagcgggcactaaaggctctgccactgtggtaagtgggtggctgccacccagaagctgctggggt

SEQ ID NO: 281157 - DNA, 122 bp, Homo sapiens
gccctcatcctgacacttgaggggaggaggagagcccctgctaatgccgtcggaaggacccgatgggagaaagcagacctgggcagccgccatcccaagctgaactgctgcctggcctccca

SEQ ID NO: 281158 - DNA, 122 bp, Homo sapiens
acccccaggaaatggccctaagaagcaatcactgggatttctcttaactgtcttcaatgccgtgtccttttctcgcctggggctttgtgcaaagaatcccttcagccctcacgacaccgcct

SEQ ID NO: 281159 - DNA, 122 bp, Homo sapiens
gcgactccttctcgaagcggtccatcaggaactcaaacatgctctgcgacacggcggggacgcagtcgcccttgcgcttctcattgacgatctccagccaggcatagtcctcctcgtccatg

SEQ ID NO: 281160 - DNA, 122 bp, Homo sapiens
cgggagggcgtggaggggtcggggcgcccccctcgagcggcgctggggaggagggaaggacgcgcggtctccggttaaacttgttggtgacaatgcatatttcaacttcttcggagatccct

SEQ ID NO: 281161 - DNA, 122 bp, Homo sapiens
gggccagctggagttccgggtgggcatgggcttggcgggcctgcactcggagcagacggccggccctgccagccccgggcagtgagcgacttggcacccgggccagcggctgcagagggtgt

SEQ ID NO: 281162 - DNA, 122 bp, Homo sapiens
gggggcccgggccgggacgggctgtgggcggagccatgggggagagcccaggcgcttgcgcgagctccgcccacaaagacttgtggtcactagtgcgctggtgcgtcacagggcgcggaagg

SEQ ID NO: 281163 - DNA, 122 bp, Homo sapiens
gccggccctccccagacagcagccctccctttcagcctgccctggcagctgcctttcctacggcttccacgaattaaagaacacactctggtcatcatctgtcctcaaggcaggtaggaatc

SEQ ID NO: 281164 - DNA, 122 bp, Homo sapiens
ggccacaagctcaaacagccaccctggagctgtccctgccagatgcctgtggcccccacccgtgctctgccaactcaccatcggctcctcccggttgtaggctatttcttcctgctctgtta

SEQ ID NO: 281165 - DNA, 122 bp, Homo sapiens
aggaactgcagggacgtgaacatgcgcttgcggtttgaggtagccgtgtctgttccttcgcggtttgctattttcatttcctgttcgtcaaagcagcagaggagatcaaaccccgttcgtgt

SEQ ID NO: 281166 - DNA, 122 bp, Homo sapiens
acacctaatcttaccttcgtaacacagccgcttggtctctagatgtgtttctgtttaaatcgtcgtagccctctagagcgccggctttcgggtcaggccggggttcaagtcccagccttcgc

SEQ ID NO: 281167 - DNA, 122 bp, Homo sapiens
tccccaaactgacaagggacccggaacagcgacccccaaaccgacacgggactcgggaaccgctatctccaaagggcagctttctttgagggaggctgttagacgtgactccttgtttctaa

SEQ ID NO: 281168 - DNA, 122 bp, Homo sapiens
cacctttccggaggacaggaggcggaaacgcgtctgacgggagcggttgcaggaccaatgcgagggaacggggcagaggaaacctctcggcatcagccccgcccctggcgcctctgcctccg

SEQ ID NO: 281169 - DNA, 122 bp, Homo sapiens
acactcatcctcttgagcgaaccttgggaatggcggaggttccgtgcactgatgcattgccgaaggctgcggcctctctgggcgagccccataccgaaacacagaggtgcggcggtcctacc

SEQ ID NO: 281170 - DNA, 122 bp, Homo sapiens
gcatatttgcgaagtgcacccaccgtcgttgccttattctggtagtcacagggtgacagccgagggagcggtaacctgtaatcagccggcggtgcgcagcccacacagcacgtggtccgcat

SEQ ID NO: 281171 - DNA, 122 bp, Homo sapiens
agggtgacgtggtgaggcgggcttgccagtgcagggtgaccctgagggtgtgcccagtggcgtgggtgtgtctgtgattgtggccaggcggggcaccctcggaggggagggttcggaagtgg

SEQ ID NO: 281172 - DNA, 122 bp, Homo sapiens
ggcggaggcgctgctgtggattggtcacagggagaaacctctgatctgttcctattggcccgtccgtcaagggacgatgatgattggtagggcagagcaatctgagtcctagttggtggagt

SEQ ID NO: 281173 - DNA, 122 bp, Homo sapiens
cacctcactccctcatgatggattctattgagtacaaaagtgacttgtgtcagatcccagcggatttgctaactcacctgaacacagcacagagaaatggccattttctactacagcacttc

SEQ ID NO: 281174 - DNA, 122 bp, Homo sapiens
ggggccaggggtaggagacagatcacagcctgtccatcctctatagacaggccctccacacgcacaacacggcacaggggaccaacaggggagccctgtactggtctgaggggacagtcttg

SEQ ID NO: 281175 - DNA, 122 bp, Homo sapiens
gccgtttgcgggacgagtcccgccctcttttttcctgtccccatcggtagtctgcgtgcacgtgttttccacagtaaaaccgtgttgtgtaactctttccagcaaagtaacaatccgccatt

SEQ ID NO: 281176 - DNA, 122 bp, Homo sapiens
cagcatcatagatggaacaaaacacatttacagggtctctcttgtttgtacaaaggtcttcggggatccagtgaacacggaagcccttttcctaagtgccttggaatcttttccgaaactct

SEQ ID NO: 281177 - DNA, 122 bp, Homo sapiens
atccaagattcccgcggacccgttgcaccgtatgcccgcgccagagacgctctgcgcccgcgctgggttccacccgccccggccacctgctgctttccgctcggcccctcccgggaaacact

SEQ ID NO: 281178 - DNA, 122 bp, Homo sapiens
agtatggtcttgagctcctgagctcaagtggtcatcccacctcagcctcccaaagtgctgcgattctgggtgtaagccaccacatctgacctgtaatatttttggtatttatacagtatcat

SEQ ID NO: 281179 - DNA, 122 bp, Homo sapiens
actagtaatatacaagatccacttgaaccactgaatttagcaaaatcaggccaaaccagacgtctttgcattaatattgtcattttgttttatattacttaaaaagtcaaactttttttttt

SEQ ID NO: 281180 - DNA, 122 bp, Homo sapiens
gggcacctggttctgcagacagttttctgaactaagaagtgaagctagcctgcccacacacggggtatccactagccccttaggagcagagagggcaccgtagcaagcagctggcggcactg

SEQ ID NO: 281181 - DNA, 122 bp, Homo sapiens
tggccccgtccccagcgtcgcggagcagcgggtttgcagggtgtcaactctggggacgtgcgtgcgtgtgtgtgattgttggggaggagaaatgtgatccgcggctccgcgtccccagcggc

SEQ ID NO: 281182 - DNA, 122 bp, Homo sapiens
gaacgatggatagaatgaatgagcgcgtggaggactcggccttgtccagttcaggaagaacgcaatcttgtcaagtgtttgtcatccatgtgttcatgcactcattagacagacatttactg

SEQ ID NO: 281183 - DNA, 122 bp, Homo sapiens
gcatggcggaggccaccaggctctgcgtgcaggacacgggggcaccacacacacgccacgcggttggcaaatcccttgtaccaaatgcagaggggacgtgggggctgcctgccctccgctcc

SEQ ID NO: 281184 - DNA, 122 bp, Homo sapiens
gtgcgtattgcctcagtggaggcgctccgctggtcctcctagagtttggtgccctgccgccgctgccccgccacgactgcggctgcggctgctccgggcagtgctgcggccgccgcgggccc

SEQ ID NO: 281185 - DNA, 122 bp, Homo sapiens
agaatgccagcagttcctcccgttcctcatcccctcggtactcctacccccaccaaagcacgcacctgcttctcagagtccttgaggagggccacctgtcccagcaacaaagggtccatgtt

SEQ ID NO: 281186 - DNA, 122 bp, Homo sapiens
caaaatgccctggggcctctttctctgtagctgactgacgctgccaacctcatagctttccgggaaatgtagttcagtgataatccgctccctcctccgcctcttctgcccacgcggaggtc

SEQ ID NO: 281187 - DNA, 122 bp, Homo sapiens
gtcacagggcagaggccaaaccacaactcccagcaggtcacgcggagtagggcgggtaagcgcgccttcttattggatggcgatggacagcgtgctcttacgacccaccccagaaggcaagt

SEQ ID NO: 281188 - DNA, 122 bp, Homo sapiens
gaatgggctcctccacagtgtggagactgagaccctgaaggaggcagtggctgagaattacgggaagtcccaacggctggaggtcagcagtatttgtttcttaagaggatgagagaaagaag

SEQ ID NO: 281189 - DNA, 122 bp, Homo sapiens
cgggcacagtgcgggagcgggtgggtgcccagggcagccaggggcgcacgggttgggaggcgccaggcggcccgccctccttgcacgggccggcccagcttccccgcccctggcgtccgctc

SEQ ID NO: 281190 - DNA, 122 bp, Homo sapiens
gcatttgtcattaatggggtcttttgagaccgcgggtgacagacaacaggagccaggccacgcgcggcgcctctgcgcgaacgctagggaggactcagcgcgcggcggccggtgacgtcagg

SEQ ID NO: 281191 - DNA, 122 bp, Homo sapiens
ttggggccctctggactcgcgggctccccgcaggccttccaaagtttgagcgtctcaaagcgccagcgcccctacggattagcccccagggatctctgagcctggtatcctcggtggaaacg

SEQ ID NO: 281192 - DNA, 122 bp, Homo sapiens
cgctacccagccaacagaggagacggtggggctaggaaaacctcctgggggagcctgcggcgcggtcctttcctgtgtccccttcgctgcgggtcctgcccggggccgcgccaggtggaggc

SEQ ID NO: 281193 - DNA, 122 bp, Homo sapiens
cgcactccgcagaggcgagcgcgctccggttccagccgggaggtgggcggcgacccatcccgctagaatccgtccagtctctgctcgcgcaccgtgacttctaaggggcgcggatttcagcc

SEQ ID NO: 281194 - DNA, 122 bp, Homo sapiens
ggctggacggaggcggggctagagcgaggatcccgagggagcgccggggtggggctggttcgtagaaatgaaaaatgactttttttttacgtgttatttaccaagaacactaaactcttaag

SEQ ID NO: 281195 - DNA, 122 bp, Homo sapiens
gactgacgaatttttaccgggactaacagagaattacctcagcctgacaacattttatctcgtgcgccacttcgggatccgagtggagccgaaagtcgagatagagcgcagttgggccttgg

SEQ ID NO: 281196 - DNA, 122 bp, Homo sapiens
tatggcagagcccgtaggcggtccccagcaaccgccgagcagcattgaccaacagacggccggtttatcaaacagactgtcgatttcaccaatagtagtggaaaggcgggcatgaacatgat

SEQ ID NO: 281197 - DNA, 122 bp, Homo sapiens
agccgtccttctcggcgtcctccggggtcggtcctgtgtccctcctaagccccaccgtcccggccatttcttcccgcatcgatgcagtctccgcggagaacaaagcggctctagagcgcggc

SEQ ID NO: 281198 - DNA, 122 bp, Homo sapiens
ataaacagacatcattcaactcaacacaaagctggctgcaaacagactgtcctgtgggagcgaagttagaactttatgccatcccactagcaagctcataattgacttcctaatagtgaatg

SEQ ID NO: 281199 - DNA, 122 bp, Homo sapiens
ctgcggagcgaggacctgctggagcaggggtacgccacggccctctcagggcacccactgcgcttcagcgagagggaggtgagccctggccctggcctgccccgctccatcccgccccgccc

SEQ ID NO: 281200 - DNA, 122 bp, Homo sapiens
aggggcgccctctgtaccctccaagatccggagggcgcaggttctgacgcatccgttagacgttctgtcctataacgtgggtcgggccaaacaatagcacccatttacgattacctactgtg

SEQ ID NO: 281201 - DNA, 122 bp, Homo sapiens
gccagtgtggtgttgagggtgggagttggggggggaaactcacgcggcccgtacttccaccgcatctcagattgaccgccgtaacagcaggatgagagggaatgcccctctgctgcacctat

SEQ ID NO: 281202 - DNA, 122 bp, Homo sapiens
ggagcggaggcgctgcggactctaggtctggactgcgggctcctgaggccacacccgggacgttgcaggcacggtgcttcccctgaggctctgcgtactagactgaaatagggggtgatatc

SEQ ID NO: 281203 - DNA, 122 bp, Homo sapiens
ctaaaggatgttgtctcacaattaaattttaatgatgtctgaagagcaccataaacaatacgtgctatagaaattcaaagaagaaatttggattacttgggtaacctataaataagctacat

SEQ ID NO: 281204 - DNA, 122 bp, Homo sapiens
ccgcgcgttcctggtgtagcctgctgggcccgtgttctttaagttcctcttcctcggagccgcgcgttcgaccctcgctcccgtttgtccactgatgtcccgtttcgagcccgggagatcct

SEQ ID NO: 281205 - DNA, 122 bp, Homo sapiens
tggacagcaaaggctttgatgaatacatgaaggagctaggtgaggcacccggcctggcagcgcctgcaacgtggcgtgttgtgcggtcgtctgtccctaggtccccgtcagcgtgccagatt

SEQ ID NO: 281206 - DNA, 122 bp, Homo sapiens
gttccaggcacacaattctcctgacagcttctctagaccatctaaaaggcagcctagactcgaaacgttcacgggatctcaagttttcctcaaaatcacttttcctatgtttcctgtctcca

SEQ ID NO: 281207 - DNA, 122 bp, Homo sapiens
agagaaagagcacagacaggaggtgctgctgctctgctgagctaggaagtcccagaaggacgaattccctgacaactgttagatttcttttttccatattcccaacaaatctagaaaaataa

SEQ ID NO: 281208 - DNA, 122 bp, Homo sapiens
caagcgaccctcctgccaaagcctcccaaagtgctgggactgcaggtgtgagccacggagcgcggccctgaggctaactcttaattccatcaataattcatacttcgctgggcgcggtggct

SEQ ID NO: 281209 - DNA, 122 bp, Homo sapiens
ccattagcagtgcctcacggggaagggctttcttccttggtttcaactccctccctccagcgcgcagtcccttgccgggcttgcctggtgacagactcgtgttgatgaagacctttagggaa

SEQ ID NO: 281210 - DNA, 122 bp, Homo sapiens
gctttataatatgtttccttataagactaataaaacctaaggatacaattatctaacatgcggttaagttgtttggaaagcagatggataagaacctattagctttctttttcctttccttc

SEQ ID NO: 281211 - DNA, 122 bp, Homo sapiens
gggtcggcgtccacaggtttggtgtgggcgaggccctgcctccccgtgataaggcacaggcggtccccgggcgggggatgcctgagacctgggagcggggcccgcccctggcaccacctgat

SEQ ID NO: 281212 - DNA, 122 bp, Homo sapiens
ttccagttaccaatgtaatatgtctcacctgtgaaaatgtaagactccaatgtcactatacgtagaatgttctaagcacacgcattaaaactgactccaattctgttgctaagaaactgcac

SEQ ID NO: 281213 - DNA, 122 bp, Homo sapiens
ctccttgcctgcgtccttttgagacaaggatctcccaggtttgggggctggcagcatgcacgtggccagccagacatgcggcccctggccccactgagctgtgacgtctgctgagctcctct

SEQ ID NO: 281214 - DNA, 122 bp, Homo sapiens
tcattctcactggcagtcagaagaaggcaaggggaaggaatgagatgtcacattgccccacgagctgatacaactcagcaagccagatgatgtgaagtgctggcgtggatggatgagagagg

SEQ ID NO: 281215 - DNA, 122 bp, Homo sapiens
tcaaagatttctacaactgctggaaggagacggaagcagaagcccaggaggtcagtctgccgtggctggtgatggaacacctggataaaaacgagtgtgtgtgtaagttgtccagctccgtc

SEQ ID NO: 281216 - DNA, 122 bp, Homo sapiens
gcatctgaataaatgtatacatgtatatagtgtctagtttgttcaatagtctctacaggacgcagtgtagtgtaatggttaagtacaacagggctggcactcggcagcttgggctcgaatcc

SEQ ID NO: 281217 - DNA, 122 bp, Homo sapiens
tgcagtcgttgagggagtcaggagcccgggtctgggcggggaccccaaggctgctggagccggagctggcgcgggggagacgtgtgtgtgcgcgcgtgtgtctctctgtgcgcgcgtcagtg

SEQ ID NO: 281218 - DNA, 122 bp, Homo sapiens
ctctttcctcgctcaagatggcgctgctcgcgaagcgttcttggcgttgggcggccgcagcggctgctttcgaaaagcgccagcacaatgagataccatctcacaccagctagaatgccgat

SEQ ID NO: 281219 - DNA, 122 bp, Homo sapiens
cgcaaattgttatgcagatcatcccgggaaggcacttggctttggaggtggagatgtgtccgaatctcccttgaaccagtctctgttagggggaaaggccttgcagccaagtgatttgtttt

SEQ ID NO: 281220 - DNA, 122 bp, Homo sapiens
gaagccgacctcgcccgcctccctcgccgggtctggccaggcgccgtgaggagcctaggccgcaagccctgagctcgagttcaggtccccccgcgcacccttgccttctgaaggcgagtcgt

SEQ ID NO: 281221 - DNA, 122 bp, Homo sapiens
ctggccctccacccacaaaatgcccccaggtgaggctcttcagtacccttcggtgggcctcggagaagatcagtagagcggatccatgatgtttgtgatggaatctccaaggatagtcttct

SEQ ID NO: 281222 - DNA, 122 bp, Homo sapiens
gtagcgagcgtctctcgccgtctcccgcactcggccggggcccctctcctcccccagctgcgcagcgggagccgccactgcccactgcacctcccagcaaccagcccagcacgcaaagaagc

SEQ ID NO: 281223 - DNA, 122 bp, Homo sapiens
ggcgattgaaggtaagtggaggctgacagcggggagcgaggaccgggaccacccagctggcggggggctcggaggtgcgccggcaggccgaggcgctgacggggccgcctcctgtggtctgg

SEQ ID NO: 281224 - DNA, 122 bp, Homo sapiens
gcccgtgagggcaagtttctgtctgccccttccccagcggtggcctagtgcttggaacagcgcctggcagacaggagatgctcagtaaatatttctcaaatgaataaaggaatgaatgagtg

SEQ ID NO: 281225 - DNA, 122 bp, Homo sapiens
atacaacagatgttcatgaagtcatccaaaagcattcacaaacacacacgggtgcacagacggttaactctctcatttaacaatcagacaaatccacaatgtggaaaaatctacaacaatct

SEQ ID NO: 281226 - DNA, 122 bp, Homo sapiens
ctcaagtgatctgcccacttcagcctcccaaagtgttgggcttacaggcatgagtcaccgcgtccagcctgccaaggaattcttccaaccaccgtgggtgacatgaaagaaatcactaagtt

SEQ ID NO: 281227 - DNA, 122 bp, Homo sapiens
taaagcagtgggtgtacatcacccgtgtgttattgtctctaatatccggggccgggggagcgggggagaggataacattccctcaaatttaggaggtggtttgacgccccttgtggtgttgt

SEQ ID NO: 281228 - DNA, 122 bp, Homo sapiens
agcttgcaatgggtcagcactttaccttttttctttaaggctcccaacaatgctatacagcgcagttgtttccattcctatttttaataaatctcaggggaagcctcagagattacacagtt

SEQ ID NO: 281229 - DNA, 122 bp, Homo sapiens
aaatggaacgggggcagagggggcctgcaggacacgactcagaccacagagggtggggaccgggtgactcgggatgcactggatgctctgcctggtccccatctgcatttgcatttgccacc

SEQ ID NO: 281230 - DNA, 122 bp, Homo sapiens
gtgggtgagaggccgctcgatgagggggtttcgggagcggcggggcctaggtctgggaagcgggagcctggaaacaccacgaacgatgctggaaattgtctctgaggcgactgggaagaaaa

SEQ ID NO: 281231 - DNA, 122 bp, Homo sapiens
ggaacctcctccctggcggaatcccgggcaccattcagccttttcgaaggctccagacttcgcgctgctcctcctcccgaggaggggcggggcgccagagggcaaaggagaagcaagggtct

SEQ ID NO: 281232 - DNA, 122 bp, Homo sapiens
gccaaggagaagagagtatgtttccagcagagatgtgtcttggaatcatgcaaatcatttcgcaaaggttgggggtctattactgttagcaggaccaactatgcttctctatgtgtgtgagg

SEQ ID NO: 281233 - DNA, 122 bp, Homo sapiens
aaaacactcgttgggatcatggcctcacctgatcgagggcttcacctgggcctgggatgacggccacacagctaaccccggcaccccaattctcgctgagatgcaggacgtgaggaaggagg

SEQ ID NO: 281234 - DNA, 122 bp, Homo sapiens
gggtcacagagacctagaacagctggaatccttcgcccccggcgcgcagccttcgcccgccggaatcgctgccttatccaccagcgggatgcttacctcgcccgccctctcgggtcaggcgg

SEQ ID NO: 281235 - DNA, 122 bp, Homo sapiens
gcccgcaggtatatgatgagcaatgggtacaagccggctccgctggacctgagccacgtgcggctgacgccggcgcagacgacactggtggaccgtctggcagaaaatgggcacaacgtgtg

SEQ ID NO: 281236 - DNA, 122 bp, Homo sapiens
gccgccgctgctgctggggctgccgcggagccgggggtcatggagtgcggctgcagagagcggccgccggcaacagcagcagcagcaggaagcgtcgcggcgacagcggagcgcagcccgcc

SEQ ID NO: 281237 - DNA, 122 bp, Homo sapiens
acataccaatgcctgtgtccagcagaattcatcctttgtagacagaccctataaatgttccgaatgttggaaaagcttcagtaatagttctcatttgcgtactcaccagaggacccactcag

SEQ ID NO: 281238 - DNA, 122 bp, Homo sapiens
ggaagacgcagcacaaaaaactgatgaggccggccaggctccctccagagccctcagggacgcaggaggccaccaagaccagaggaacataaatctcatggccttggacactgcccagttgt

SEQ ID NO: 281239 - DNA, 122 bp, Homo sapiens
atcatttccccgggggagcaggaggggagagggaatggtgatggctgtaggtctactgggcgctggaacctccaccaaatctccagggaatttctagagtcacgaaatgttctgtgtgaggc

SEQ ID NO: 281240 - DNA, 122 bp, Homo sapiens
tttcatccaaacactaacccacctttgagcttttcttctctggagcctcatcttactcctcgaccccgagccagttcctctcctgtccctagctctggctcccactccccaccccaaccttc

SEQ ID NO: 281241 - DNA, 122 bp, Homo sapiens
ctgggggcatcagaagacctgggttccagtcctggctctgctgcctatcacccagggtcacgagctgataagacactcactccacctccccagccttagttttcataactgttgaatggaaa

SEQ ID NO: 281242 - DNA, 122 bp, Homo sapiens
tgggagcggcgtattcggcacctggaacgagttgtgtttgcccaggagcatgcagccagccgcgccgtgtgcatctgccgcacagcattgaacacagctactctcattccatcttcagcttt

SEQ ID NO: 281243 - DNA, 122 bp, Homo sapiens
ctcactgacttcaagaatgaagcggcgaacccccgcggtgagtattacagttcttaaaggcggcgtatccggagtttgttccttctgatgttcggatgtgttccgagtttcttccttctggt

SEQ ID NO: 281244 - DNA, 122 bp, Homo sapiens
ctgagagtcctggactgcagaaggaacttggggcaggtctcagagctgaaccttgtgcagcgtgcctaggcttttccatcgcttgctgatgtcgtcttaaagcgatggggcagttttaagag

SEQ ID NO: 281245 - DNA, 122 bp, Homo sapiens
caggcggggaggcgccgggaccccgcgctccttctccgggctccagcagaggctccggcccggcacccgcctcccgcctggtggatcaggcttcaatctcaggcagtggctctgcctttgcg

SEQ ID NO: 281246 - DNA, 122 bp, Homo sapiens
aatagcatcctgcactgtggcccccaagcaagcggcacagcccctgttcagaggagtccacgctgacaagcagcaggtgcaagaccgcagtgcagaagcagggatcgtgggaggctgcgagc

SEQ ID NO: 281247 - DNA, 122 bp, Homo sapiens
ggaggtcctgcgtggggggtggacgggcacaggtgactgcctgcctgctgcttctgggcacgccccaccccctcgggggctgtaggcagcggctcccgcgaaccctctgttgtacaccttcc

SEQ ID NO: 281248 - DNA, 122 bp, Homo sapiens
gttgagtatgtgatgcctgtgttcgccatgtgaacagcagaaagcagcaaatataaggatcgagagcacggggtagagagagggctggcgatggacaccatctttagggtaattgcgaaatt

SEQ ID NO: 281249 - DNA, 122 bp, Homo sapiens
ttggctgggctgtggcctccatgaaaatctccctttggtggtctgtactgcagcccctcccggctcccgacccgggctgggcgcataaatcaccctggttggctcggctctccctatccctc

SEQ ID NO: 281250 - DNA, 122 bp, Homo sapiens
acctgatcagagcctttatatctgcaaccagcagcaatttttccactaatgagccacacacggtgcaactttgaggttctgcgaacccaatcgtgatttttttgttcactcataaggtaagt

SEQ ID NO: 281251 - DNA, 122 bp, Homo sapiens
gcgggacatgggctggggcgtgcggtccctgcaggacatcccaccaggcacctttgtctgcgagtgagtgagtccctgggtcaccccaagcctggtgtcatttctgggacggaggcccatct

SEQ ID NO: 281252 - DNA, 122 bp, Homo sapiens
tttttgattcaccaaacagtctttgtcttaatctgtttgggcttctgtgacaaaatacctcggactgggtaatttataaacaacaaaaatttaattcttatagttccagaggctgagaagtt

SEQ ID NO: 281253 - DNA, 122 bp, Homo sapiens
agccccgcctccccgccccggactcaggtggtgtgcgcgtgagcctgggacactagggggcgggcctacgccttctctggccacatgtggcaacatcttctgctcttactgccgtcccttcc

SEQ ID NO: 281254 - DNA, 122 bp, Homo sapiens
aagaatcccatgaaataatagatatcccttgttcacatcttaactgagcctattcagatccgaatgtgtaaaaacctgaaaacatccaaatggatttctttaaatgctaacttttagttcag

SEQ ID NO: 281255 - DNA, 122 bp, Homo sapiens
aagtcaaataaagcagagtccccccaactggagaggcttctaggctagtgagggaagtttcgtttgtagcacagcaagcggcagtcagctcacagatcacctggcctgtcttaaaggaataa

SEQ ID NO: 281256 - DNA, 122 bp, Homo sapiens
ctgggggcctggggatgaccgcccgggtccacactgcccagcaggccgtgctgtggtgggcgctgccccctgccggccgcagtagagacagaggccggtgccctcgagtggatgcgatgccc

SEQ ID NO: 281257 - DNA, 122 bp, Homo sapiens
gaccccgctatgggggagggtgcctcccttgctgggatcctcagctgcgtcagctaccctcgcagaggagcccacaccacgccgctgctcctcgcccaccacgccttctcaagcttcaggca

SEQ ID NO: 281258 - DNA, 122 bp, Homo sapiens
ctgtctgtaaaatcctccctgacaagggaggtcagggtcgggatgtccccttggacgtggcgatgcggaggcctgagtgacctcaggagaggggctaggtggagatgacgctcacggagggt

SEQ ID NO: 281259 - DNA, 122 bp, Homo sapiens
tccatctgcttaatctcacattgagctcagctggatgccaacagcattaggtgtccctcccgggttccatcttctggggatcgggttggtttgtttctgtagctcttcttccaggtaggcca

SEQ ID NO: 281260 - DNA, 122 bp, Homo sapiens
ttgaatgcagaggacgtcttctttagaggacagccttcttcccaacccttcttgaactgtcgtttcctcaggaactgggtcttcctgattgttgaaccctgacccgaagtctctgggctagc

SEQ ID NO: 281261 - DNA, 122 bp, Homo sapiens
gtgaaggtgggctgccggcaggctgggtctgagaagtggtggtaatacccttcccaggagcggctgtgcccgtggaaagtgaagagccgggtgaggaacaggactgctgggcgcacctcgca

SEQ ID NO: 281262 - DNA, 122 bp, Homo sapiens
gcttacttgaatttgcagtaggtccctccctgtgactagctcttctgattcagagggtatcgttagtaaatacagttaatttagagttcagctcgaatgaatatttttgctttttggaaatt

SEQ ID NO: 281263 - DNA, 122 bp, Homo sapiens
caaagaggggttctctgcctcaggttccagcagtttaggtttccatggacagccccagggcggcgaatcccgagcggacacaaagagagcaccggtggctttgatcttgggcgagcaggctc

SEQ ID NO: 281264 - DNA, 122 bp, Homo sapiens
gctaggagatttttgggacgaagaacagaaaggtaaagtgccattttcatcacataatatcgagggtgcattctttcaaagtgacttatcactgttgatgtgaaccttgatcactcaactga

SEQ ID NO: 281265 - DNA, 122 bp, Homo sapiens
cctgaccgaccatccgcccaggccgcggtcaccggggcgggggccagggggcgaggaaagcgtgaaggtgatttcagttaattttggattttctttcaaacaacgtggttaccctcccgact

SEQ ID NO: 281266 - DNA, 122 bp, Homo sapiens
tatgcctagagcatgctgattagccaactattttggcccgggcctgcggattggctttgtcgccttcttgttttaaaaatatgaatatttgctcatagcattaggtaaaaaataacctacag

SEQ ID NO: 281267 - DNA, 122 bp, Homo sapiens
atgctggtctgttcaggtccctgagctgccatgctctctcctgcctcagaggcttcatgtcgctgttccctaccttgctttctcttcttctaggtctgagaggaaatgtcagaaggggcttc

SEQ ID NO: 281268 - DNA, 122 bp, Homo sapiens
ccggattctccagggtctccagcaccacccgcagtgtgcgtggcctgactgaggaggggtcgggcccgatggagcacgagagttgcgtgagggtgaagtaaaagctgagagagtgggcgggc

SEQ ID NO: 281269 - DNA, 122 bp, Homo sapiens
ggaggggccgcgggcgcggctaaatagtctccatcggccattttgtgcgagaagccgcagcgccgcctcttctctcgcgccctcgcctcttcctccgcctcctccttcgcctcttcctgcct

SEQ ID NO: 281270 - DNA, 122 bp, Homo sapiens
ttggaactcacgcccccacaccacctgcttgtggaccaccctgctccgcagccgctccaccgtgcgctccaggatgtccttgtccatctttgtcccgcccacgggctttcggtccacgtcct

SEQ ID NO: 281271 - DNA, 122 bp, Homo sapiens
catccaccgggttgagtggctgcgcacgaccgcggcgggcgggcgggcgcgctgccggaacgctctaggcctcctgcggaacccaggcctgcgtgaaggtaaatgcaaatcagctccgccca

SEQ ID NO: 281272 - DNA, 122 bp, Homo sapiens
agctgggtgcgaggtcaggaaggaggcaccgagggccgctgctcttatagcaggcggaagcgtcacccgggccagcagccgcgggcggggcggcggcccttcccggtgactgcgtaggagtc

SEQ ID NO: 281273 - DNA, 122 bp, Homo sapiens
cgccccagggccagcaggctggggtccgagaacctccttgccggaagcggaagtgcgtcacggcgacggccggcaagcacgcaccgcgcagactcgctgtggtggcgtgacccggaagcgct

SEQ ID NO: 281274 - DNA, 122 bp, Homo sapiens
gagaaaacaaagcccagccctggcgcctgcctcccagccctcacccgcctgcgtctgccccgcctgtccctggcccatgtctgcttgccagtcgcctgggttcttggccatctgtgcgtcat

SEQ ID NO: 281275 - DNA, 122 bp, Homo sapiens
gaaaagtgaaaccagtaggaacatacaaaaatgaacgacacagtatctgcctttaacaaacgtgttactcatgagaggcatcaaagaagggcacaaataatcatgctaagatgaaatcaaaa

SEQ ID NO: 281276 - DNA, 122 bp, Homo sapiens
gacgcggcggtcccgcggggagtagggcgcagaccccagcccagacgccgacctcccggccgccccgccccacttagccaggccgggaaggtgtagggcaggctccccctccctcgctcccg

SEQ ID NO: 281277 - DNA, 122 bp, Homo sapiens
cagtaccttgcccccaggggatatcctaatcagatgcaggtcattagatacacagcatagcggaggggaaaaaacacacagtgatttacatgaacttctgaatgttgacttaaatattcatt

SEQ ID NO: 281278 - DNA, 122 bp, Homo sapiens
gcaagctcagaagcagaaatgtcatgcaaatgtcatggtatgccctaattttaatgattccgcagtcctatgaggtgactttaatctcactgtaatttatatcagcagcaaaggatttgagt

SEQ ID NO: 281279 - DNA, 122 bp, Homo sapiens
cgctgtccccgtttccggcccaggcgaggctcccggcctcagggccacccgcctgggccgcgctcgcacaacttcggcctgaggccccgggagccgccagtcctcagtgcctccggcaggac

SEQ ID NO: 281280 - DNA, 122 bp, Homo sapiens
acctcccaggctcaggcgatcctcccgtttcatcctcctgagtagctgggaccataggcacgtgccaccatgcctggttaattttttgtatttttgatagagacggggtttcgccatcttgg

SEQ ID NO: 281281 - DNA, 122 bp, Homo sapiens
agatggctgagttaaagtggtaaaatgcaggtgttcccattttttccccaactgaaaaatcgcttcaaatcattgagaaaacaagatacagatgcaaagagttccatgtttgatgaaacaag

SEQ ID NO: 281282 - DNA, 122 bp, Homo sapiens
agacgagacctcaaaacccacggagcagcccccacacccctcacccccagggcagccacacgcagtgacatgcaactcccagtgtctttgggtttatttagcaagaggtaatgactgggcgg

SEQ ID NO: 281283 - DNA, 122 bp, Homo sapiens
cagactgcgaagtccttaaggaagaatctaaacaagtccgccgtttgctgtttgggagtgcgatacaaaatgaatatgtacgcaggtggaacgtagactgcagattttgagccagcggcgtt

SEQ ID NO: 281284 - DNA, 122 bp, Homo sapiens
tagaccgcttcaatcctgcgcatctgggtggtttaggggagtctctggtctttccccctgcgctcctgggggcccaggtcctcggcggggacttcctcgaggctggcgcgggcgcaggggca

SEQ ID NO: 281285 - DNA, 122 bp, Homo sapiens
ccccgccccgccggcccccgctgacaggtgcaggcgggtccccggccgccgaggcagggccggccccaccctcccgggccgcgggctcccgacccctcccagcgcctcgaagcccccatctc

SEQ ID NO: 281286 - DNA, 122 bp, Homo sapiens
acgcctccgaccctccggccgggagatgcggatagacggacgaggcagccaattagagcccggccagacaccgcgacccctccccccacccgccccactctcgcccactggcgattgggttg

SEQ ID NO: 281287 - DNA, 122 bp, Homo sapiens
ctttcctgaatatgttctttcctgcgtgccttctctcctgcaggcgttctttcctgcatacgttctttcctgtgtgccttctttcctgcaggcgttctttcctgcgtgccttctttcctgcg

SEQ ID NO: 281288 - DNA, 122 bp, Homo sapiens
tcagagcacaggggagccgaccctgcggagctccatcctgcacgtccagccctcagtcggcgagagggcaggctctgtttaaaagccactcggtcggcggagctttgtcatggcagctccag

SEQ ID NO: 281289 - DNA, 122 bp, Homo sapiens
agcccccatgtgaaatccagagccttgatgcttgcagcttcagctcaccatccaggccagcgtccttgcccagtaaaggacccaggtcttgctgaaatgacacattcctggccagcccatgc

SEQ ID NO: 281290 - DNA, 122 bp, Homo sapiens
aactaacttttgtgtgtctttgatgatgaaggtgtgaactgtgactaggcaaaccagtgacgaaggcttagggaacagaaaccacatcatacctcattaagtcattgttgtcatagagacaa

SEQ ID NO: 281291 - DNA, 122 bp, Homo sapiens
ccctggtttctggggtccccgcctcgtggccccccacagtcccagacctagagtggcccgcgcctagttttccccgggatctggcttagtgttctgtcctgcaacccaagtgtgctgcagca

SEQ ID NO: 281292 - DNA, 122 bp, Homo sapiens
gagccaccacacccagcccacccatttatgtttagcttattttctctctaccatctatcccgctcaacacccccactctcactgcctttgctggagccctaaatcaccgccctagccttcca

SEQ ID NO: 281293 - DNA, 122 bp, Homo sapiens
cttcacttagattgtacacctaaagttacaactggcatgtatctgtttgtgggagaccagcgaagcatttgcttttcagtgatctgtaggggaagtctttcatagatgcctgaggtctttta

SEQ ID NO: 281294 - DNA, 122 bp, Homo sapiens
aacaacgactcgcaggaaatctatgtgaattgcagacacgtggtcttctccgccccactgcggctgctgcactttaggcagccagcatcccggaacagagctgcagctcattatcctggcct

SEQ ID NO: 281295 - DNA, 122 bp, Homo sapiens
gtatctgagtacctctgcacctcaccttccagaatccaggggcggggtcacctactgattcggacccagtggaggaggccccagtacttcagttctctgcctggtacacgattctggagcct

SEQ ID NO: 281296 - DNA, 122 bp, Homo sapiens
ccctggggtgtgtccgcatgtggccgagtgagtgtgagtgtgagcgtgcgggtgggaagccgagcaggtgtgtgcgcgcccggcgcggcccgcgcgctgttaaccccttaccttccagcagc

SEQ ID NO: 281297 - DNA, 122 bp, Homo sapiens
atgggatgaaggtctttcccgcattatgaaaatgattaaaaaatgtccaaatgggcagggcgcggtggctcatgcccgtaatcccagcactttgggaggctgaggcgggcggaacacctggg

SEQ ID NO: 281298 - DNA, 122 bp, Homo sapiens
tattcttgaatgatgcctttaccccataccccaggcgcaggctttctctctcctggggcccgcagatcttaccgtctgcactgagcgaagcctccctgctactgcttcccagccatgcggcg

SEQ ID NO: 281299 - DNA, 122 bp, Homo sapiens
actggcctgcgctacctcatggccggcatcagcgacgaggacagcctggctcgccgccagcgcaccagggaccaatatccttgggcacctatcgggcaatgcagacccagggaccggcccct

SEQ ID NO: 281300 - DNA, 122 bp, Homo sapiens
agtgggggagatgacagagccgcgggttcctagggtgaaaatggtgttcctgctgcggagcgatggctttgagaagaatcgtaagatgggtcagagtcagggaaaacaatgagaccataact

SEQ ID NO: 281301 - DNA, 122 bp, Homo sapiens
tcggggccgggtctggggcccctcccggcggccttcgagccctgccgcccggctccgcgccgcccggagcccctcggcagtcccgtcacgtctcctccagattaggcattaactcgggtgca

SEQ ID NO: 281302 - DNA, 122 bp, Homo sapiens
cctcccctctggcctttgacctttcactttagaagacctgtccctgtcgtggactctaagcggccaccagtgctgcactgggccgggtgggggtgaagcctgtggggcggagttcgtcgccc

SEQ ID NO: 281303 - DNA, 122 bp, Homo sapiens
gtccagagatttgctcgcattcttcctcttcttcaccggagatttacattccagagtaaacgtttctctctctctctctctctctctctctctcttccagagaggaagatataccagattct

SEQ ID NO: 281304 - DNA, 122 bp, Homo sapiens
tggccgaagtgagggaggtgggcccggagagccccagcggagcgggctctagggcccctccgctgctgccgccgccaccgcctttgtgtcgggctccgactctgagtcgcctcagcccgggg

SEQ ID NO: 281305 - DNA, 122 bp, Homo sapiens
catgcagcagctaaaagggaatcgcactgccgcccccgactccacacaaccatcagtgcacgagggcagcccccagaggcttcacattaactggaaaagattacacaaaaagagcaggaaac

SEQ ID NO: 281306 - DNA, 122 bp, Homo sapiens
ctgggacttcaactgctccagggatggggcgaagaggggctactggccgaggtgcctttacggtgctcagaggactggtttcagggcttatgaaagcagaaatggagggccgggtgtggtgg

SEQ ID NO: 281307 - DNA, 122 bp, Homo sapiens
cgtggttcttcctgttgcattggtgtagtccccgttggctccttgcctgtcactgctttgcgctccatcctggtcgctccttcttcccgggctcattggtccccctttccaactccatcctc

SEQ ID NO: 281308 - DNA, 122 bp, Homo sapiens
ctgccccaggcagatggactccgatgcggtcacagccagctcacggcctgctggaagcagcgagaggggcagatgccgggcaggtgcctgctgggaatccccacccagacccgcagagggag

SEQ ID NO: 281309 - DNA, 122 bp, Homo sapiens
caggggccgcggcggaacgctggcgcccacgggcacggcggggagcagcagcagcaccaacgccaggaccaccgcgcgccccgctgccctcgcctcttcaaggaacgacatcgtgcgcgccg

SEQ ID NO: 281310 - DNA, 122 bp, Homo sapiens
aggagacgcctggaatgaggccccagcaggagtggctgcttggagtcctggctccttctccgctacccagtgggcaaacagaaccgcagctttagggtgtgggcaggcagagtcctggctgg

SEQ ID NO: 281311 - DNA, 122 bp, Homo sapiens
atcaccaattttagaacaggatttcaccagggggaagatggtctcccctgctccccctaacgccaggctcacctcttcagtgcccgcaactccaaccatcgcaggatcttttcactcctaga

SEQ ID NO: 281312 - DNA, 122 bp, Homo sapiens
gattgtaggaattattcttaaaatgctgattgtatagtgtggagccatggaagactgagccgttagtgcgatggcattgaagaatgagaaggacagagacaggatttggactagtagaggtt

SEQ ID NO: 281313 - DNA, 122 bp, Homo sapiens
tcctcccgctctggcagtcctggcactggtaggacgcccgcagccttccaccctagagggcgccgggcgggcacgcgctgggggcgacgggggtggggcgggggaggcggggcgacgcagcg

SEQ ID NO: 281314 - DNA, 122 bp, Homo sapiens
cactctactctgacttcagagtgagccactaatgagttcatgaactcttcctacgcaccccgaagtggactgggagtcaccaagagaaggtgcagggtctgtttcacagctgacgaggctgg

SEQ ID NO: 281315 - DNA, 122 bp, Homo sapiens
accggctaagtcacacctttgtttcatttttctacatgaaggggcttattgctttcctttcgctaagtgtgagaggactcagcagctgtggtgagggaagcgtggaaggaaggaacctacct

SEQ ID NO: 281316 - DNA, 122 bp, Homo sapiens
gttttattctcatcctgtccaggaacatgatcagtatctcagagaggcagacaaggaaaacgtcagaagagaaacttaccggacatgtgagttgtagatgttaaaggacagacagacaacag

SEQ ID NO: 281317 - DNA, 122 bp, Homo sapiens
tcccaaaggtttagtttatattttaccctaccaaatatttttgcaagtttccctccttgacgttaatactatcaatatggtaggatgaatatggcctccatcagtcaactttgcagatgtca

SEQ ID NO: 281318 - DNA, 122 bp, Homo sapiens
gatcaaggagaaaaggtatatccttttggaagacacatttacttatccaaatttagaggacgtcatttagtgaactaaagcagacattaagtgctaaaaggggaaatgttatcttcaaaatc

SEQ ID NO: 281319 - DNA, 122 bp, Homo sapiens
tatgtagccatatgcaaacccttactttatccagccattatgaccaatggactgtgcatccggctattaatcttgtcatatgtaggtggtcttcttcatgctttaatccatgaaggattttt

SEQ ID NO: 281320 - DNA, 122 bp, Homo sapiens
ccaccgcgcggcttcccgcggtccccggtgctgaggagagagcgatccgagggactgcgccgcccggacggcctgcagagcgctgccatcatgaggtaagggttttcctttgcctctcctcc

SEQ ID NO: 281321 - DNA, 122 bp, Homo sapiens
taagggaatgcttaaactggaaggccttcccacagcagttacatttgtaaggcttctccccggtgtggataagctgatgcatacagagacggttcctggtcttgaaggccttcccacagtcc

SEQ ID NO: 281322 - DNA, 122 bp, Homo sapiens
ctggaggagatccgggccaagctgcggctgcaggctcagtccctgagcacagtggggccccggctggcctccgaatacctcacgcctgaggagatggtgagccctcccgtgccttatactcg

SEQ ID NO: 281323 - DNA, 122 bp, Homo sapiens
ccttctcacccttagcaacaacctccttcgtggggtggctgtaggcctcccaggggtgggcgtgattcccagaacaatagcagagcctgggccaggccagagaagccaagacaaacacagtc

SEQ ID NO: 281324 - DNA, 122 bp, Homo sapiens
atttgccactttttgcccatgaagccttgggaatcaggtttatgagagatttgcggacctcggcaggaaagcaaggctctgtaggcaaggactggaggcctcctccgttctgtccttgcagt

SEQ ID NO: 281325 - DNA, 122 bp, Homo sapiens
tacccggccatgccctggtcaggcacgttgaggaattctgtgttgtgctctgagggcggacgtgcccggggtcgtctgctggctcccagggatgtggacggagggccccggggaggcctgtg

SEQ ID NO: 281326 - DNA, 122 bp, Homo sapiens
atgtaggaggtgagtgaaaaggggaatccatagatggaagaacaagtgtaagaattactacgtggtgagaacatggatacatttcagttctcaggtttttactatcctccatggaccaagag

SEQ ID NO: 281327 - DNA, 122 bp, Homo sapiens
gccgcgggcagggcggatctgggtaggggccggagggggagggtccgcccagcgggtgtccggtgtcctccctgcagcctctcccaggcattggtcacttctccgcggaggagcagcgaagg

SEQ ID NO: 281328 - DNA, 122 bp, Homo sapiens
ctgaaggtcatgttaagaattctgacctgtatcatcaaatgtatccattaacctacaagacgtgctcctgagaggtaaatagcgaaaaagaccttaaaaaggagattcagctctgtaagcca

SEQ ID NO: 281329 - DNA, 122 bp, Homo sapiens
ctcaagcaatcctctggcctcggcctcccaaagtgccaggattataggtacgagccactgcgcctgtcttcatcttctctcttgaacttgctctcctgtcatattttctactttggtcaatg

SEQ ID NO: 281330 - DNA, 122 bp, Homo sapiens
ctctatttccggtgtattgtatcctcacgtttccggagattgacgttgctcttgtgttctcgcgagaggcgggaaagggcgcagggtttgaaacatggcggacgacgtagaccaggtaagtg

SEQ ID NO: 281331 - DNA, 122 bp, Homo sapiens
catcttgaaccaccgcaaaggattgtggagaacaccgccgttatcaagcctccttcatgacgtcacgtgagaggagaggcgcgaggcattgtggggattgtagttccaagacttggaccgcc

SEQ ID NO: 281332 - DNA, 122 bp, Homo sapiens
tctccctagaaacaggcacccgtgtctccatagcaaccgctccatctgattgcccctccccgctcccagaggccacctagtgcgcaggcccgcctgatgtcgtcccacgccgtgccggctct

SEQ ID NO: 281333 - DNA, 122 bp, Homo sapiens
acgtgtaatgctgtcaccgtgggcacatgtgtgatgctgtcaccgtggggacatgtgtgacgctgtcaccgtgggcacgtgtgtgatgctgtcaccgtgggcacgtgtgtgatgctgtcacc

SEQ ID NO: 281334 - DNA, 122 bp, Homo sapiens
aagtgtttacggtttgttttgttttggtaagtttaccatgattttgcttgaattgctctccgttgatcttctcagctaagatggaggtagagttgcacagtagaagagggctgcatgtaaga

SEQ ID NO: 281335 - DNA, 122 bp, Homo sapiens
ccacccacggcggctccgaggcctgtccccggagcatcacagcgagcctcgcaaagggttcggggtaattgcagtcatgagccggagttgattgaagaaaattataccccagttttttactg

SEQ ID NO: 281336 - DNA, 122 bp, Homo sapiens
ttaagaaagctcctcctccaattaatcaaatccggtaaacaagaggtctttatatactcccgttaaagacaatgttcagcactaaagaaatgctttagttagctatttaaaaacctatgtgt

SEQ ID NO: 281337 - DNA, 122 bp, Homo sapiens
ggagccaagttgtttgattatactccagtacttcaagggagtgttatctccccacgcacccgtggcatgccccgagctgttatgctctcggggcatcaagacatgaaggcaataaggatgtg

SEQ ID NO: 281338 - DNA, 122 bp, Homo sapiens
tcggatgttaaaaagcaaatcagatcaattttcgtttaacccaatgaaaccccgaaggctcgccatcccgggagtttgcgtctttgcgccccaccgcggcgcactgtagacctggggttaag

SEQ ID NO: 281339 - DNA, 122 bp, Homo sapiens
aggatggaagagacgcccccgttcagccaacggcgtccctaattctgcgcccagcccccgcgctgctcctccgtaaaaactttttgaaactgacatcctaaatttgtggatttttttttcct

SEQ ID NO: 281340 - DNA, 122 bp, Homo sapiens
ttccagcccttcgacgaactctcaggtgtgtggccttctggccaggcttctgccgcgtcacgttgttgaagcattcgttgtatccctggggttgcagctctctgtaagtttgctgtggctga

SEQ ID NO: 281341 - DNA, 122 bp, Homo sapiens
caggaaggaccaggaatcccccaaaatgccgcggaaggaacccccgccctgcccggaacccggcatcttgtcgcccagcatcgtgctcaccaaagcccaggaggctgatcgcggcgaggggc

SEQ ID NO: 281342 - DNA, 122 bp, Homo sapiens
gaagggagttagggcagggcattctggagacctggggtggaggtatggtggaggagggatcgagtactggggaatttgaagctatgtttgcaaaataaatacagtttttactcagattgcat

SEQ ID NO: 281343 - DNA, 122 bp, Homo sapiens
gtcctgcaaaaactcactgtggatctcccaaagaaacacggtaaaggtcagtcagccttgcgttttgcctgtttaagaatggaaaagtgacctaacaatgttcagaaagtagcagagactgc

SEQ ID NO: 281344 - DNA, 122 bp, Homo sapiens
gctgcacgggcatctgctggggcaggtggtgcggcggctgctgctgctgctggggttgcgcgggaaaggccaggccggccgcgccgtaggagggcgccccgccgccgctgctcagcgcgcct

SEQ ID NO: 281345 - DNA, 122 bp, Homo sapiens
tttcagtgaggcagtttacattttaaagactgttgaatttggtctgagccccgtggctcacgcctttaattccagcactttgggaggctgaggcgggcagatcacttgaggtcagaagttca

SEQ ID NO: 281346 - DNA, 122 bp, Homo sapiens
ccttctttgtcccagtccccagtctggaatcgctctctgggctgggccaggcaagtgggccgcagaggcctggcttagctttgggaacggaagcacgggaaggggcgcggagaggcaggaag

SEQ ID NO: 281347 - DNA, 122 bp, Homo sapiens
ctgggctcagcaggtagggcttgcggtcggagtggtgcgacagcgagtcacaggccgagtcgcaggtgaccccgtggtgatggctgcggctgcctgatagccctttcatggcggaccggaag

SEQ ID NO: 281348 - DNA, 122 bp, Homo sapiens
acaaataaatacaaatggaaggtgtacagtttcttcccatatcccctaccaaggtcccagcgggtgggtcccccgcagggcagcagccggctcgcccgcgcagggggtccctgctgagtcac

SEQ ID NO: 281349 - DNA, 122 bp, Homo sapiens
agtagaagagattgaaactattctggaaattctttgggattgtatttcattcatctgcatcgtttcagagatgttcctaatggtcgtcaattcagaattcagaagccgatcattatccagct

SEQ ID NO: 281350 - DNA, 122 bp, Homo sapiens
attttacagttaaaatcaatagccaggagaatgggggcaggaacttggtggctgggcagacgctccaggggcaaacgcctgggatcgtggctttgtcacttacaggatgggacctttccaag

SEQ ID NO: 281351 - DNA, 122 bp, Homo sapiens
ctttcatcactctgcttaatttacttagagtgatttgtgaatcctgtccttgtacacaggcgtacctcagataattcgagttctaatccagaccaccgcagtaaaataagtattgcagtaaa

SEQ ID NO: 281352 - DNA, 122 bp, Homo sapiens
ctgaagcagaagctagaagatgccatcagagacccagtagccagatgtagctgctgattacgaaagacaggatctacactggctactgagccattgagggtacctacaccttccagcagctg

SEQ ID NO: 281353 - DNA, 122 bp, Homo sapiens
agcggcagtaattcaggagtccactaagcaagctaaagctcttagctcactccagtaaaacgttctaaacagagtctttatgcagctgaaaatgcatataaaggaccctctgcctcctggta

SEQ ID NO: 281354 - DNA, 122 bp, Homo sapiens
cctcactgggtcagaagtgcagcagacaccctgccggatctagaggggtgaagtcagccgcgggtctgcgacagcggcaaacagcagtggtggacagcgagcaaaagctcagctcgagcagt

SEQ ID NO: 281355 - DNA, 122 bp, Homo sapiens
gggccatgcatttaaagaaacggaattaaaaacgcactcgggcagttgaaagttaacggacgaggctgatagacaacccaggccagggtcttttcataacattccgctgcccagacatcttg

SEQ ID NO: 281356 - DNA, 122 bp, Homo sapiens
cttgatctcctgacctcttgatcctcctgcctcggcctcccaaaatgctgggattacaggcgtgagccaccacgcctggcctgcatgtggcacttctaacatgttcctcctaagcgttgtgg

SEQ ID NO: 281357 - DNA, 122 bp, Homo sapiens
tccgcttcttccgagccccaaagggcttgatgagggggctgggcttccagtcgtccataccggattggcgggtcaccaatgtcctggccagcccatgacttcaggaatctgaagggaccaga

SEQ ID NO: 281358 - DNA, 122 bp, Homo sapiens
agccccaccaggtaggcctctctggcctcctgcagcgccatcacggccgagctctggaagcgcaggtccgtcttaaactcctgcgcgatctcgcgtaccagccgctggaagggcagcttgcg

SEQ ID NO: 281359 - DNA, 122 bp, Homo sapiens
attccgcgttccccgggagcaaatgatgctaggaaaacagggtgcgggctcttatttggccggagtggagtgaccaggtcagcgccgcagctgctaaccaccaccaaccacagttttgaaag

SEQ ID NO: 281360 - DNA, 122 bp, Homo sapiens
tccccgcccctgcctttgtttacatatgagaaaacaagcctagggtaacagggagaggagcgcccccagttctccgcactcctggtccaggactcttgcaccgcaggagtttgtctttccag

SEQ ID NO: 281361 - DNA, 122 bp, Homo sapiens
cctggaccatgggaaaggggtcatgatgctgcagaggaaacggcagcacacagcctgcaccggagccccttactaaacccatcagcctccacttaccgggacagatcattcgtaaaccctgc

SEQ ID NO: 281362 - DNA, 122 bp, Homo sapiens
gaggctgcggcgagtgcggcgctgacagagacgcgcgcgcgcgcgatcgcgctcggaccccggccgctgccgccatcactgtcgcccgcccagtcgcccctcagccgcttcccctcgccatg

SEQ ID NO: 281363 - DNA, 122 bp, Homo sapiens
ccaagttcctggcacccctcttcagtttcccctcaacttgagaggggactcccccgcaggcggggcagagtggaccctgggaccccagcccaagacttttccggagaagaacactcgctcca

SEQ ID NO: 281364 - DNA, 122 bp, Homo sapiens
gagggggcagcaggcgatggcggcggcggtagctgcggcgggtcggttaggctggttgttcgccgcgctctgcctgggcaacgccgcgggggaggccgcgccgggcccgcgagtgctgggct

SEQ ID NO: 281365 - DNA, 122 bp, Homo sapiens
actgtgagacggcgagaggaagggagggggccgggagggggagggccctggcagcccggccggccgggtaggatgacaatggaaggaaatgctttatctgagtctgagagcgggccaagggg

SEQ ID NO: 281366 - DNA, 122 bp, Homo sapiens
ttgtgaggacctgcccacaacgtcgttgttcccgcagggtccccggggaaccgggctgcccgggacccagccctgccagggttccctgcggcccaggccggaacccccagggctttggtcgt

SEQ ID NO: 281367 - DNA, 122 bp, Homo sapiens
cggggccaggctgcctgggaagaggaagctagggccagcctcccagctcgccttcctgcccgcctgctcctgaccctgatcctggaacccccaatccagggaggagtaggctatgcaacttt

SEQ ID NO: 281368 - DNA, 122 bp, Homo sapiens
tgagaggcagatggatgacttagagggagctgctcctcctattccccccaggctccactccgaggataaaaggaagacccctttgaaggtattggaagaatggaagactcacctcatcccct

SEQ ID NO: 281369 - DNA, 122 bp, Homo sapiens
tcagagagatgaattgtgagaacagcaaagaaatccatcagaaaaacagaaagaggcagacgtttcccagggcgttcaggcagccctgatggaccgaaggctctggtgtctggtttggcccc

SEQ ID NO: 281370 - DNA, 122 bp, Homo sapiens
gagtgataaagaactggtggggcctcgcgcaagactcaagcaagccacagaggcccttctcggcgaaatggaaaattcatcaaggcacaatgaggagggagcaggaaacgaggctctgatca

SEQ ID NO: 281371 - DNA, 122 bp, Homo sapiens
aactggcaaaggagagctggttgtcagacactggcagcatgcctccaggagcagggaacacgatgaggccgcccagagcttggcacggcgccggcttacggcaggaggctggggtggcgcag

SEQ ID NO: 281372 - DNA, 122 bp, Homo sapiens
tattgggtcttgcactgtttgttcttcataggacagggtttctagtgtcttggcagtatacgaccaagaggacacaggattctggggcagtgcctttaaaagttttagaactaaaaaatatt

SEQ ID NO: 281373 - DNA, 122 bp, Homo sapiens
tgcagtgagacaatcctaaagaaaacacctaaaagcctcaacccagcaaccaataggcgacgtctgggaagatcgtgaccccatcgtacttagcctacgaggaaccaggggagagacttgtg

SEQ ID NO: 281374 - DNA, 122 bp, Homo sapiens
ggagcgcggcagcgccgcgaggcggggcaccgtcagggcatagagggcgctcattggccgcgcggccgcaccccgtgaacttggccccatgggagctgcagtcccagctccgggctcccggg

SEQ ID NO: 281375 - DNA, 122 bp, Homo sapiens
ataaataactaaagactactcaacttctcccttgcctcacaagtgcagtataaactcagtcgaacagcaacaagctgccagcgtcctctgggttcagcacctgctttcctaaaggatctcct

SEQ ID NO: 281376 - DNA, 122 bp, Homo sapiens
cgaaggcgaccacaagtggcaggagcagcaaccccaggaacagcagcccggggcgtgaggcgcagaacccggctgcggagctcatgctgcggcagagcttccagcaggatctcagtgctcag

SEQ ID NO: 281377 - DNA, 122 bp, Homo sapiens
cacgctgcttactcaggaacccttcacaatctggaactggaaagagatttctagcccccacgaggaacaaagcttgacgatgaggaaatgacaacctcccttgtttgctaactattctcagg

SEQ ID NO: 281378 - DNA, 122 bp, Homo sapiens
aacaaatgcagttttgggggttgcttgttaagatcaagggagaggaacccggtgtcaccccgacctgagtcactcagctccaggccgttggggcagcagacttcgctcccaacagcagcggg

SEQ ID NO: 281379 - DNA, 122 bp, Homo sapiens
tgcctaagcaaaaggacaggctgtccaaggtagaaactgtacatagccggtgaccgaatgcgacctttgccagccagagctgctgccagagctgcgttccctgcagtggaggtggactggac

SEQ ID NO: 281380 - DNA, 122 bp, Homo sapiens
aatattattacattgggagttagggcttcaacatattaatattggggagacacaaacatacgatccataatgggggctagaattaggaaggagatgtgaaaagctgaatgctacctgagaaa

SEQ ID NO: 281381 - DNA, 122 bp, Homo sapiens
agtatatatttattgagtttctacttaccaggtagaggttgagagctgagtttcagatgacgttaagatacaaactgagtatttggaaatgatgatttaccattcagaagaaaggtcaatgt

SEQ ID NO: 281382 - DNA, 122 bp, Homo sapiens
ggacagcgacgcgtttcctgcccgggaagggcccgagcgcagggccggctatagcggtcccgcagctgcctgcttcgattttagcactgctgctccctagagggagcaacgcggccctctgt

SEQ ID NO: 281383 - DNA, 122 bp, Homo sapiens
gatcttgcacttccggcctcgagaatggtgagaaactcctcgtgttgtttataagccacccggtcagtggccctctgaccagggccagcagctctgaggccctccccccgccccggccccct

SEQ ID NO: 281384 - DNA, 122 bp, Homo sapiens
agtacaaacaactcaagctcaacatgtgcatactgaactccatttccttttcccaaacttcgacatttacagccatcccctttcagctgatagcaagtttatccttccagctactcaaacca

SEQ ID NO: 281385 - DNA, 122 bp, Homo sapiens
agttttaacatgtttcatctaacttcccaacgcgtgaacaactaccagcggacacagacacgttcagtctgtattaccccgtccttgggcagtgaggaagaagaaaacctagaaggaagaag

SEQ ID NO: 281386 - DNA, 122 bp, Homo sapiens
cactcccaccctaagtgctgcagactcttccctgaagctgccggctgaggccggagctgccgcctccatgagaggcttcctcctacaccccagggtaagaaccgaaccaaagggcttggcat

SEQ ID NO: 281387 - DNA, 122 bp, Homo sapiens
attgatatttgtatagtctttatgcactttcccttgctcccggtgtagactcctagaagccggtggaaaggaaatcatgctagatgaatgaattggatctgaaattaagcctgcacaaccag

SEQ ID NO: 281388 - DNA, 122 bp, Homo sapiens
cgtctctccgtagccagaggaaatctgggcgcgcagagagatttggagtttcatcctccccgctcagccagtcccaggcctcggctccgaggaaattcgctgaaccctttcaataggcttga

SEQ ID NO: 281389 - DNA, 122 bp, Homo sapiens
ctgaagccacaagcaaaactcctctcccaggtgggagggcaggacccacgagcacacattcggcatcacgagcgatctgttgtgcagcccgatcatcccccaattcaccaacagccttctcc

SEQ ID NO: 281390 - DNA, 122 bp, Homo sapiens
gctgcagtgaccagaaaggcctgaacttccccagcccatcctggggcccttagccaccatcgtcacttcctgccaccagggttaacacccaactaggaacttgaacttttcatctgcctggg

SEQ ID NO: 281391 - DNA, 122 bp, Homo sapiens
tgcagggaggtcaggcaggttgtgaacaggggtttaagaaaagcgttaaattactggctgcgccaagatgctctgcaaggtgggaacctgttgaagaaataaaactgcatcatgtgactcag

SEQ ID NO: 281392 - DNA, 122 bp, Homo sapiens
cagagagaagggaggtccttgttggcgcagccggtgagcggcagggtgtgtcccggagcccgggtttccagcgccctctctgtcttgctgccgagcgtccacgtctgttcggttgtctttgc

SEQ ID NO: 281393 - DNA, 122 bp, Homo sapiens
tctatgctcttggttggtgctggctgggatggcggttctgcccagtggtgtctctgagcgcgggatgacaggagcaaccgaagcaccctgaaggccttcactccttgttgggtaactcagcc

SEQ ID NO: 281394 - DNA, 122 bp, Homo sapiens
tgtgcgcacacaccccgccacatggaacaggagttgctgccttcgatgctagtgagcaggcggcttggaatgaatccagacccccatcccctcccctcacactaccctccagcgctcggaat

SEQ ID NO: 281395 - DNA, 122 bp, Homo sapiens
gcccagacaggaatgtatgagatatattttaaggcaagatgtataccagtttatgtaaagcgaacgtttcacagtggcaaagtgggagagaagattggagccattatgtagacagccttaca

SEQ ID NO: 281396 - DNA, 122 bp, Homo sapiens
taccaggcacaggcagagggctctctgactggacgggttgttatgcaagatgtcttgggccgccagcccgatgcccttggtggaaggcacggtgaaactgcccagcaaggagcagatgctga

SEQ ID NO: 281397 - DNA, 122 bp, Homo sapiens
agggcacgcctccttccgggtcacgccctctgccccgcctccgaggcgggatcgcgcatgcgctgctctcctcgcgcggcttcccgcttccggctcccagctgctagctactgtggatctgg

SEQ ID NO: 281398 - DNA, 122 bp, Homo sapiens
gatgttaaccacaggcacaagctgggtgtgtgggtatgaatggtccccaggaccaaactgcggtcccacaactgcatgtggttgtaggattatctcaaggtgcaggtgtttgacatccataa

SEQ ID NO: 281399 - DNA, 122 bp, Homo sapiens
aagaaagaagaatgcctctttccacgaacacacacacacacacacacacacacgcgcgcgcgcgcggctgagaactagtcaagaaggcagaaaggtcacctaccatgttaaactgttgttgc

SEQ ID NO: 281400 - DNA, 122 bp, Homo sapiens
cgcgcgccaaggccgagcgggagaatgcagacatcatccgcgagcagatccgcctgaaggcggccgagcaccgtcagaccgtcttggagtccatcaggtgagcactgccgaggcccgggccg

SEQ ID NO: 281401 - DNA, 122 bp, Homo sapiens
ggctgaatgacaaaagttcgtggactgccccctccccgcctatcctccacccacgcgtaccgccccgttcccccaccgtttccgacccggcagcttctggaaaacagcgcccttgatcctcc

SEQ ID NO: 281402 - DNA, 122 bp, Homo sapiens
ctggtcgtcccggacacgcctcttctggagaagcgcgtttgtcccttacttgggaggtcccgggtatctgaagcggatcccgggtctggggacatgaaggggcgccgtggccttagggaagg

SEQ ID NO: 281403 - DNA, 122 bp, Homo sapiens
ccatctatgaaagctggagctattagcgatgtgcagtgattgtccccatcacgaccagcccgttttcacctgaatttgagaggggcaatgtgactacatcattctcatcattcccagacaag

SEQ ID NO: 281404 - DNA, 122 bp, Homo sapiens
gcaggggaacggaaggggtacccggggagcatcctaagggaacctcttcgcttaaaagggcggccgctgaagtggctctgagaacaaaggagttaacactcggactccacaggtggcccggg

SEQ ID NO: 281405 - DNA, 122 bp, Homo sapiens
aggtggtgtgggcatttacctttggctagctctgagctcaccgcagcatggtagcgggagcgcagctgcgcgggcaaccgccgggtttgtggccggttggcgggctcagtgccgcctcagtg

SEQ ID NO: 281406 - DNA, 122 bp, Homo sapiens
ctcccggccccaattgcgcttcttcctcttcagtcctacagcggcttctcacccacactccgtacgccgtcctcaggaaaggcccccgctaatggcaaagccagccacccgcactggccgcg

SEQ ID NO: 281407 - DNA, 122 bp, Homo sapiens
ataaagactccgtgtaactgtgtgaacacttgggatttttctcctctgtcccgaggtcgtcgtctgctttcttttttgggtttctttctagaagattgagaagtgcatatgacaggctgaga

SEQ ID NO: 281408 - DNA, 122 bp, Homo sapiens
gagcggcggtcgagcccggcaggatgagcgacgagggcggctccaacttcaggcgggtggcgatccggcggaagtccaacccctcctacctgccgcccggggtgccccggccctggagcagg

SEQ ID NO: 281409 - DNA, 122 bp, Homo sapiens
caggctcatgccttgcccacagtcacataattagaaccttggcagagtcaagatttgaaccgaagtccttcatctccaagcccatgatttcctgctggccatcgccaggagatctctctcgg

SEQ ID NO: 281410 - DNA, 122 bp, Homo sapiens
agcggaagaagcgccttcacctttcagtgcccggcgctgggcccacgcaggaagccgacccgccttggcctctggagttgtctctgggatgtctttcagtctggaaatgaaccctgtgtgct

SEQ ID NO: 281411 - DNA, 122 bp, Homo sapiens
ggtgtgtgtggagggcccacgcctcgccttgcccatgagcccagccctgggaacagcaatcgaggtggcccgcctgtctctgagtcacccacctgagtttcacaggatgtgataggctaatt

SEQ ID NO: 281412 - DNA, 122 bp, Homo sapiens
cacccagtcatcccgactggccagttttcaacccaatccccctgacaaaccgcacgtagccgcctcttcagcttcagctgcggcagccttcccgcagctgtccggagaccacacagggccct

SEQ ID NO: 281413 - DNA, 122 bp, Homo sapiens
aatctcttcaaaggtgaacaggagccaacacaccctttccttgtgtgttaaaggcaacctcgttaaaatatgaatgaggctaacatttctcaagaaaatagcccagctgaattatttagaga

SEQ ID NO: 281414 - DNA, 122 bp, Homo sapiens
cggccacagccccacgccacctttgaactaacccagcttttgtcaggcctctgcaccctgcgaaaaccaggttatccaggtttgagctgccagaactgtagagtggtaagagagtgtttaat

SEQ ID NO: 281415 - DNA, 122 bp, Homo sapiens
attcccaatggacacatgagaaaacaggttagagaaatgaaacaattttcttgaggtcaccgattaagaggaagagctgggggcttgaatctagatctcaagactaaaactgtcagcaatct

SEQ ID NO: 281416 - DNA, 122 bp, Homo sapiens
ccgagcaaggcggggggacgggccggagcggaggctttgctgtggcagctgctggagcggcggccgcctcgggagccggaggagaggcagccgcggagcgccgagctggcctcgccccgagg

SEQ ID NO: 281417 - DNA, 122 bp, Homo sapiens
gtgtggctcctcggctttggtaagtgagctgccagcttccccaggcagaagcctgcctgccgattccttctttccttccctgacccaacttccttccaaatcctcctcctagaagccctcct

SEQ ID NO: 281418 - DNA, 122 bp, Homo sapiens
ggccgcacgcgtgaacgtggacgtgggcggggggatggggctccgcccgggcgtgttgcgcgggacgcgggacgggcgggcggcgcgagcgcgggtgtgagctccggacgaagcagggggag

SEQ ID NO: 281419 - DNA, 122 bp, Homo sapiens
tgggtcctcgggatcccgggggaaacgttcatctccgggcctgcggccttcccatgcccccggagggcctcgggctgcaccccggccatccccctcgctgaattccctgtgatcagggggaa

SEQ ID NO: 281420 - DNA, 122 bp, Homo sapiens
gcagcagtatttagcagtcatacaattgcctgaaatgaagaatgagtaatctggatgagtcggccctgaaatcgacctgcaacttacccggaacgtgagctgtctctctctgacctctgctg

SEQ ID NO: 281421 - DNA, 122 bp, Homo sapiens
cggatccacgagccctgaatgcctgcattcatcaggggagcagctggcgcgttctggaggcgaaacgagcttgcttccgtgtcgaagcttttctagttctgtttgatgcgtaagcttcaagg

SEQ ID NO: 281422 - DNA, 122 bp, Homo sapiens
cggaaacaagcctcaatttcaaaaaaacacctataaatctgaaccccgaggtatggtgtacgtacaacagctttgaaaccggctgccaggattctgggtctcttgggggaaaaaggcagacg

SEQ ID NO: 281423 - DNA, 122 bp, Homo sapiens
ttccaagcacttttcctataaactttctaccaacaatgagactcaacagttgggaactggcgggggtggggaggacagaaacctccacagctaatcattcctttgggttaattaggacgtcc

SEQ ID NO: 281424 - DNA, 122 bp, Homo sapiens
ttgggaggaagtaaagagctgaagtacagggaggaatggtcttctgggataggggatgtccgttgtattataggtataaatttaaagctttcaaagtatgcaagaggctcataaaaggaaga

SEQ ID NO: 281425 - DNA, 122 bp, Homo sapiens
gaggaggttgggcactgtctggactctcatagccgacagaaagggcaccacagaagccgacgccagcagcctgaaacccaacgctccctgcggtcagccctcccaagaggacctgtcatgtt

SEQ ID NO: 281426 - DNA, 122 bp, Homo sapiens
gggctcactttttttttgctttttagaaatggtgtctcattcttcaccctcaaaactgaacggaggctgggcatggtggctcctgcctgtaatcccagcaattttggagactgaggcaggct

SEQ ID NO: 281427 - DNA, 122 bp, Homo sapiens
ctgggttgtacgccatcagggtaaagaactcgtccagactgtcaactgtgatcctggactcgctgtaggtgagtagcgagttcttagatcctaagagactgatgcatacatggggaaaaaca

SEQ ID NO: 281428 - DNA, 122 bp, Homo sapiens
gcggcccacctcgcacccactgctcagatacatctcacaattgctgcctttgctgacgcccgccctgtgttctcaacaccggagccagagggagcgctttgcagccccgggcgtctctgctc

SEQ ID NO: 281429 - DNA, 122 bp, Homo sapiens
gcagcccggtcagcgaagcgctccaccctttccctcctcctgagtgcgccggaacggcgccgtcgcctcactcttcggcttgcttcaggaagcaactggagatgtggtttccccaggattgt

SEQ ID NO: 281430 - DNA, 122 bp, Homo sapiens
ggtctttattgacatcaaacaagggacatcagggggcctggagtgctgtatcttaactggcgttctcactgtcaaaattccttttcggagattttcttctccctggcctcccccggtctagg

SEQ ID NO: 281431 - DNA, 122 bp, Homo sapiens
ccctgcgtgtcagctgtggtcactgtcactaccaaggcccagctgggcaggcagggcatgcgtgcgtgctcacccttatgtaccgcgagcaggggtgcgagggtgctctggtgccagacagt

SEQ ID NO: 281432 - DNA, 122 bp, Homo sapiens
gagtacttgcccccttggaggttgtgtaggttggctatacagattctacaacttcccagacgagtggccctgagacttggggctgaacgcgcgagcacggaaagaaatcccaccgtaggacg

SEQ ID NO: 281433 - DNA, 122 bp, Homo sapiens
gggctgtgcgcggcgtttgggggtcggcgtcgcccgcacgctctgcgaggcttgggctcgcgtaccttccagtagagcaccccgagccgccgcagctgctccaggcccactgggcggccggg

SEQ ID NO: 281434 - DNA, 122 bp, Homo sapiens
actctaagaaagtacaataggcccccaggtcctcagggcaggtggtcagtttgtgtgtaccggacgtgctgtgcaagcaggagggggatgtgcgcaagactctccaacaagccccctcccac

SEQ ID NO: 281435 - DNA, 122 bp, Homo sapiens
aatttacctaacaaattgcctaatctgctatgttaatgtatttatgaattaaaataaatacgactgcatgtttgtggttcatttttgtggaggtggctgtggtgacatcagccaagaatctg

SEQ ID NO: 281436 - DNA, 122 bp, Homo sapiens
gggagagtgaagtgtttgctgaggacattgctcctctgactcccatctcactttgtccatcgcagccttttgttgggagatgacactgtcagtcagcccatgatgtctgttcacacgagatg

SEQ ID NO: 281437 - DNA, 122 bp, Homo sapiens
tggctcagccacatgtgggacgccaaagtcctggaggtgccccatgcgtgtgatggctcccggaggttatcacggacaggacacgactggattggcagggaacctccgacagaagcagaacg

SEQ ID NO: 281438 - DNA, 122 bp, Homo sapiens
tgtcacagagagaaagcactcccacacccaaaagacactcatgagatttccaagtaaaatcgacagccagaaaccttcataaattattagcagaaggaaagcattatgttgaaatcaatgga

SEQ ID NO: 281439 - DNA, 122 bp, Homo sapiens
aagtcactcgacgcagcggcgaaggctgggactcgaacccgggcctgaccccaaagccggcgctctagactagggctacgacgatttaaacagaaacatctagagaccgagcggccgtgtta

SEQ ID NO: 281440 - DNA, 122 bp, Homo sapiens
gtgcttggtgtcagtctgcaccagttatgtccttaagggagggggacaaggtgctgcaagcgaagaaaccaaaatggagtctgtcccgctctctcagctaagagcgagtcaatcaggttaaa

SEQ ID NO: 281441 - DNA, 122 bp, Homo sapiens
atcaaagaaaggggggacggacggtacctggaaaaatgggtcactcccacccgaatactgcgcttttccgacgggcttaaaaaacggcgcaccacgagattatatcccgtacctggctcgga

SEQ ID NO: 281442 - DNA, 122 bp, Homo sapiens
actccccactccgttcagcattgtggttcccaagaagctgctagagtaacaagagctccacgtacagatttaaacctgctgagcttcctgcagaaaccaccctcacttaatgctgctctcct

SEQ ID NO: 281443 - DNA, 122 bp, Homo sapiens
cgacaccaaagcacccaggcctcgagcagatctttccgctactcgggagtaaaatcttcccgccagccagctgagagcatccacccttccgggtcggtccgttcagccaatcacagataact

SEQ ID NO: 281444 - DNA, 122 bp, Homo sapiens
cccagggccgcccagccccggggtttgcgaaggtccggggtaggagggctgcagcctgcgcgacgcggcgggaggctacccgggggcgatgggaaggcgggcgcagtcgacccaagggtgga

SEQ ID NO: 281445 - DNA, 122 bp, Homo sapiens
aaacatttgggaattgatggcagccttgtttctccaccaggctgaagaaactaggacctgcgggggctgagactggagtgaaacagatgtgaagagaaaagtcctgggtccaggtggtcctg

SEQ ID NO: 281446 - DNA, 122 bp, Homo sapiens
ccctacctctgccgtgaccgagcccagcaccgagctgccgcaggcagacccgctggtcagcgtgaagctctgtggcccagaaggctgcttcttaaataagtccagaggaactgtcgccgtcg

SEQ ID NO: 281447 - DNA, 122 bp, Homo sapiens
ctcgaattggagccactcggaaatccagcggtagagtttcgaaaacttccgaacggttcccggaatacgctctcggccctctaaccgaagagttccgaatattcccgagcgttgagcgaatt

SEQ ID NO: 281448 - DNA, 122 bp, Homo sapiens
atgtgaccccaggcaaccattttaatttttttacagccaagcgtagtggagaactggctgcgcgccggttgccagggacgcggcagccagcttggcggggctggggtgaaagaggacgctgc

SEQ ID NO: 281449 - DNA, 122 bp, Homo sapiens
ccatgggatggatgatgcatgctgtcttcccaccccgctagatcggagggccctagtctgcggcttggcagtccaccccgtacccacatggtgccaggcatccgacaagcactcagcccaca

SEQ ID NO: 281450 - DNA, 122 bp, Homo sapiens
cccatacactattggcagattccaaaataatctggcccccacttctcaaactctgcctttcgtctaggaatgatgggccgacccccatctttgccctgcttctattcttgcttctcctgtag

SEQ ID NO: 281451 - DNA, 122 bp, Homo sapiens
gccctcgcgcctgtccccagatgcctcctgccttttttccttcttcccactttttggccccgctgcccccgggcagttcttggagtcccgccctggccactccccgccctatcgcggcggct

SEQ ID NO: 281452 - DNA, 122 bp, Homo sapiens
acagacccgagggggcgtcacacttggctcttctgggcagccaggactcaacacagatgccggctcaggaggcatctgcatctatagggggttcgctagtcgcaaacaatcatatctacatc

SEQ ID NO: 281453 - DNA, 122 bp, Homo sapiens
cccagctactgcagaagcaattctctacctggcaaagctgaggacgttttgatagaggggcggtatttttgtgggtttcttaagaaaacaaggattttgaaggaaggcaactggaagttcgt

SEQ ID NO: 281454 - DNA, 122 bp, Homo sapiens
cacggatcctgaaaggtacacacagaccgaacctgcagtgggaggggtcgccaacaggaccgactggccggggcggagggcagggcgcggctggcgcgcggcaggtggtcggagcagtcggg

SEQ ID NO: 281455 - DNA, 122 bp, Homo sapiens
gggcagcgccagtgaggcggcggggggccctgagtaccagctgcaggagagtgtggtggccgaccagatcagcctgctgagccgagaatgggggtgggtgccgccagggctggggtggggcg

SEQ ID NO: 281456 - DNA, 122 bp, Homo sapiens
ggcagtacagagggcagggtgttactgctgtcactcacagatcttggcttcagccaccagcggaccatgcctcttcttgccaacaaacccatacaggacaaatttgtacttgcggccaggat

SEQ ID NO: 281457 - DNA, 122 bp, Homo sapiens
tgtgccgagtcaggaggccagggtgggagggtcccgagacccaggcaaatgaggattcaccggcatgtgtcaccatgcccagcaagagaggctttggaactgaaaatgctggcagaggctgc

SEQ ID NO: 281458 - DNA, 122 bp, Homo sapiens
gtaattctaaacaggtagatcttagattttctgatgtaatcaatctccctttgtctttcccggattgaagacctgccagaggggaggttgatctcctttatgtttgaggtcactgaaaattt

SEQ ID NO: 281459 - DNA, 122 bp, Homo sapiens
ccggggtcctatgggggaagggcagggaagcggatgcttattgttttgcaactccagtgtcgggggagagggctttccgcaggatcccccactaacccccgatggactccctcaagccccgg

SEQ ID NO: 281460 - DNA, 122 bp, Homo sapiens
aggttttaagccccgcgtgcattaggtatttgtcttaatgctctccctcccctcaccccccgccccgcaacaggccccggtgtgtgatgcgcccctccctgtgtccatgtgatctcattgca

SEQ ID NO: 281461 - DNA, 122 bp, Homo sapiens
ctggttcagggagggggacagctgaagaaggtgtgaggtgaggagagcagtcgaggaaaacggaagcacctgctcctggttgactcattctggctggaggcataatctaatgtgggaaggta

SEQ ID NO: 281462 - DNA, 122 bp, Homo sapiens
cgaactggcttactcatggttgcttgttaacccagctcttagcatctcaaaactatgccacggcaggctgacatggccctatccaaacaatacagatcacctgaaaagagaaatggccacag

SEQ ID NO: 281463 - DNA, 122 bp, Homo sapiens
acttctgctttctccaggaaatgagcagagacccagctccagtgattcagagtgaaacggcgctgaggactgacgatgtggggccgggtcctcttcccccgagcctgaggggctgcagctgg

SEQ ID NO: 281464 - DNA, 122 bp, Homo sapiens
ctgcaggctcccgccggcctggcctccgggggcttcacgggctgagaaccgttcaagctgcgggaggagggccggctcctcctgcagagctaggccaggcccaacccagacccaagggagaa

SEQ ID NO: 281465 - DNA, 122 bp, Homo sapiens
aggggctgtggtcgtattaagggtgtgagtggcaaggcccgcagcgggatgggcagtccccgccatgccagtgcagctctgtgtaaatccttagtcccgagtatcctcgtgtaactcagagc

SEQ ID NO: 281466 - DNA, 122 bp, Homo sapiens
ggtaaatagagaacattcacaaaagcattcatctctaagtctcctatcttctctccatctcggaagtggggacatgtgccctggcaggaagctcaggctggggttctagaagaggtaggaag

SEQ ID NO: 281467 - DNA, 122 bp, Homo sapiens
tgtgtggccccatctgactcagaggcaacacgcacagctctggcgccataatcagggtcgcgggttgggatcagctgtgcctccccatccccaccccctacagaccacctccccttaccctg

SEQ ID NO: 281468 - DNA, 122 bp, Homo sapiens
acttctgtgggggcgaggggagggccgctaagacggggagcggggctgagggcttctccgcgtcccttcagggaccacagtgtagttctgcagaaaccaaaggatcccgaccgcactgaaac

SEQ ID NO: 281469 - DNA, 122 bp, Homo sapiens
ctgttcattctgtgctatactagagccatgcaaggctgtggggaagcaaaatccagcaggcgaggcagacaggctttaggttcagccatgtggtaagtgccctgtagagggaggatcaccat

SEQ ID NO: 281470 - DNA, 122 bp, Homo sapiens
gccccgtcctcccacccctcctcactcggcaaattcatactcatgccaggcatggcccggcgcccactccaggcatctctctgaccccgcatgcctgccctgggacccctccctaccgccca

SEQ ID NO: 281471 - DNA, 122 bp, Homo sapiens
aaaattagtaggaataagtaaagcagtaaattctaaccagggcccttatataaatattcacgttaaaactgaacaaagtttatttagataaagagccagagaaatggcagaaggcagaccta

SEQ ID NO: 281472 - DNA, 122 bp, Homo sapiens
cccagccctgcagagatcagggggcagaacacctcaggcagaaggtcctggacccaactgcgaccatccagccctgaccccaccacccccatgttgaagcatcgcccatcacctggttgtca

SEQ ID NO: 281473 - DNA, 122 bp, Homo sapiens
agcaatatttatgcatcatctaataaccattttcatgctttaccagcacagtggagtggtcgtgaccaaacccatatggtatgcaaagctttaaatattcaacagccttttgtacagaagac

SEQ ID NO: 281474 - DNA, 122 bp, Homo sapiens
cctcacagccgccgccttaagcccagctcggctcacctcctccatcttctgcaccatctccgtcagctggccctcgtcctccagcagctcgttgagctgcaccagcgacagcccggcgaacc

SEQ ID NO: 281475 - DNA, 122 bp, Homo sapiens
acatgcacccccgcttgcatgcacctcgcctcccacccccgctcacacgcacccccggctcgcatcctgggctcccatgcacccccggctcccatgcacccctgggtcacacgcatccccgc

SEQ ID NO: 281476 - DNA, 122 bp, Homo sapiens
cagactggtccgaagtaaaggactggtgcgccttagcaaccgcctctgctgaagccctaacgctggagctctttcgccctcgcagaataaccgggactttcttgcagccggaaccagccacg

SEQ ID NO: 281477 - DNA, 122 bp, Homo sapiens
gctggagcgatatggctcctgcatgagctgcttgtactgaaagctgttcagcaagaaattcgtgtgaaatcgtagcatgtgatgctcctggttggagcagttaataactgggtaagcggcat

SEQ ID NO: 281478 - DNA, 122 bp, Homo sapiens
aagccgggacgagccggggcagagccaggcgcgcggaagtctgaaggtgccctccagacacggccccgatgactgaactacagcaagatgtggaagacacaaagcctgcgaaagtgctcggg

SEQ ID NO: 281479 - DNA, 122 bp, Homo sapiens
tcgtcgccgccgccgctaggttgatggggcctcggcgcgaacaggcttgggccagggccccgtgatgccgtgctggcctcctcgcgccgccgcccgggcccgccatcttgggggccccgggg

SEQ ID NO: 281480 - DNA, 122 bp, Homo sapiens
cccctgcccgacctcgcagaccacctcagtgcgcaggcgactgccctcgccaggccgcgccgccctgcctcgctcaccccgccccgcgctgaccccagccccagcaaggagtccgaccagac

SEQ ID NO: 281481 - DNA, 122 bp, Homo sapiens
cagacacagtcacttgcagcacacgtagttccacacgactcagcacacccagccgacacgcgtggtacagactcggtcacatgcaccatgcacacacagctcccatgtggtgctccagaagc

SEQ ID NO: 281482 - DNA, 122 bp, Homo sapiens
tgcggatgagcgctgggaacgtgtgtttccctctgagatgccccttcaggccctgcgtaccgaggaagctcctgacgccagctggcccgtaggaccctggaggacctgagctaccgaagaat

SEQ ID NO: 281483 - DNA, 122 bp, Homo sapiens
tcacaaagtttttgaccttgagtgagtttcccgagactcagttttttcatctatgaaatgcgggtgatgacgcgcggctgcgagttaggactgcccagtacacgaagaaccctggacaaatg

SEQ ID NO: 281484 - DNA, 122 bp, Homo sapiens
gtctcgttgggctcccccttttctcccttaacacagtacaagagagggagagggggttgccgtatgcactttgtcctgcagcaaaggttggctcctggcaaaccctcccaaaagccaacaca

SEQ ID NO: 281485 - DNA, 122 bp, Homo sapiens
cgctactcgagccttgccaactggggagactatgcccatgatatccgcggcctcggaccccggaccctccaggccctcgcgccccacccccgaccagcctcgggccaggctagggcgtagac

SEQ ID NO: 281486 - DNA, 122 bp, Homo sapiens
gcagcactgagggtttgggcttgcaggcgctgcaggagacgcccaggcggagtcttgtctcgcagccagctctgagcgggaggcctgagcgggaagcattggcgtccgagcgacttctagga

SEQ ID NO: 281487 - DNA, 122 bp, Homo sapiens
agccccttcgcctcctcttgtccccctagtggcactccccgctgagaaagctgagggccgcgagcacccgggacaactcctcagcgcagatgacggagagagggcagcaaaccgcgagggcc

SEQ ID NO: 281488 - DNA, 122 bp, Homo sapiens
caacctctgctcaaattggtttcttcactgttcctgcattctaatctctatgattttgtgcgtgtagtttcacatgcctgattctgtgtgtttttaacttatatttattattttaactttaa

SEQ ID NO: 281489 - DNA, 122 bp, Homo sapiens
cccgcagttgggaatcgctgccctgcaaatgaaaaaggagactaaacaagagcagggaggcggtgcaggcccccgacagcgcagaagccgctggacctgcagctgactgaagcccacaaaat

SEQ ID NO: 281490 - DNA, 122 bp, Homo sapiens
ccttcccactgtgtgtgaagacgtcccagatgctaggccctttcccgtcctggtcccaggcgccctccgtctggtaggcagaactgcccacgccccaggagaagcctgcagggggagacccg

SEQ ID NO: 281491 - DNA, 122 bp, Homo sapiens
ttgttcactttctctggttcactccttcatctgctttgaaggaaacaagctgccatcttgcgagctgtcctatggagaggcccacatgtcaaggaatgggtgtttctggcaactaccaggta

SEQ ID NO: 281492 - DNA, 122 bp, Homo sapiens
gttcgggggtctggggcggggcttggactaaagcaggtggggtccaggactggtggctggcgtggttactatgtgcctccaagggcagcttcttgaaaattctggaaagtaccgactgcttt

SEQ ID NO: 281493 - DNA, 122 bp, Homo sapiens
ggtggtcgatgggactgggcgccgtggagcacggggcagtgctcatcggggaggctcgggcggcacaggagcccatggagggggtgggaggctcaggcatggcgggctgcaggtcccaagtc

SEQ ID NO: 281494 - DNA, 122 bp, Homo sapiens
tagcatctttttgagaggcaggagagagaaaggagctgaaccactctgcaaatattaacccggctattttggagcaatggctattgcctttgaaatctttcatcatgggtctatacttagaa

SEQ ID NO: 281495 - DNA, 122 bp, Homo sapiens
gcggggcagctccggtccagtgcgcccggcttctacggccgccgagaccaaacgaccgcgcgagctccctgttgggcctctctggaggtggagccggctggaagaaaaaaagaataaaggaa

SEQ ID NO: 281496 - DNA, 122 bp, Homo sapiens
cctggctgaaaaaggggttgtggcagggcagcgcgcagttagcgatctggcctgtcttgacgcggttgtagagcgggtggcgctcgctggacacgctcaccataggcgcgcggcactggcac

SEQ ID NO: 281497 - DNA, 122 bp, Homo sapiens
tgccttttagcaggcactgtgctgggcacattacattcatggcgacctttaacccatggccgcctgctgggttcatcccatctcaatcctcacctcctgtcttggctggtaagtgggagagc

SEQ ID NO: 281498 - DNA, 122 bp, Homo sapiens
gaatataaagaaacatacttgccaaggggtggctgcatgcagatgatttggagctgtgcacgggctaaggagacattccagcatttcaggacacattattacatggaattctatcaatcacc

SEQ ID NO: 281499 - DNA, 122 bp, Homo sapiens
ggtttggcgaagagcaagcgtccccaggattggccagcttggcgccactagataggcttccgggcgtgattgggcgagcgggccagacttccggattcctgacaagccacgtgacccaccca

SEQ ID NO: 281500 - DNA, 122 bp, Homo sapiens
cggcgcgccccggaggaacccggccgccgcttccctggggacggccgagcctgcccccgtcggcgcctccccaaaaagaggcccccccgcagtggctcccgaatgtcgggctcgccagcctc

SEQ ID NO: 281501 - DNA, 122 bp, Homo sapiens
gtgatcccgccccgatcagcctcccaaagtgctgggaacacaggcgtgagtgactgtgcccggcctcaataatatgcactgatctcaaagataaatgtaattaagagggaatccttggatat

SEQ ID NO: 281502 - DNA, 122 bp, Homo sapiens
tgtccagcctgcggcagagtgcctgagaggggagtgcttggctctgcctgtctgtggggccgcccagccagcccaccatgcagttggaagactttgcagctgatgcttttggcagctgaggg

SEQ ID NO: 281503 - DNA, 122 bp, Homo sapiens
gaattaaacactatacacacaaagtatattaagaaagtataggcctggcgtggtggctcacgcctgtaatcccagcaatttgggaggctgaggtgggtggatcacctgaggtcaggagttca

SEQ ID NO: 281504 - DNA, 122 bp, Homo sapiens
cagggcacagaaatagcaagtcacaacaactatcacttcgcagaagagaattacagtgcacggccaccaccaatgacaaacagatgctcatagtgggaccccaactgaaaaggatactgtct

SEQ ID NO: 281505 - DNA, 122 bp, Homo sapiens
tcacttagcctcgtctatatggcagatgttccattatccccactttacacatgaagacaccgaggctgggagagattaagtagtttctccaaagtcacctgccagagaggaaggagctgcga

SEQ ID NO: 281506 - DNA, 122 bp, Homo sapiens
ggcggggagtcgggcgggtcccggcgccggctggggcggggaccagggactcggagaacgcggggacgccgggacccagccctgaattggggacagtggcccagcaatctcctggcgcccca

SEQ ID NO: 281507 - DNA, 122 bp, Homo sapiens
tgggacgtcagtcattggctgcaggttactggtctgggctgggcccgcagagatcccaagcgctcctctgtcggtgcttcctcagcgtctgcgtttccgcagatgcccgaggtcagacagtt

SEQ ID NO: 281508 - DNA, 122 bp, Homo sapiens
cgcagtctcatttttcccggtttagaaacgctggagtgttcactatgtccccgggagcaccgttccaatttgaagcagttttaaggtgaaagaatagacttacgtggaccacttatgataga

SEQ ID NO: 281509 - DNA, 122 bp, Homo sapiens
ggtgatccacccgcctcggcctgccaaagtgctaggattacaggcatgagccaccacccccggactgcacagtgtttcttgttgcacaatctcctccaagggctcctatccccagtttgcat

SEQ ID NO: 281510 - DNA, 122 bp, Homo sapiens
agcactggggagcctgtgctgtgtgccgggggaccccgcctgctatgtgccggtggaccccgcctgctgccgcctgagtaacttcacctctactgggagacttgcaacacccgtggtgttca

SEQ ID NO: 281511 - DNA, 122 bp, Homo sapiens
ctagcaacagaagcgacctccgggattggtgtctggaagaaattcgcctttctcattgcacgatggagttaccgcccacactgaagccgagaaagcaaatctttttgctgtattattattta

SEQ ID NO: 281512 - DNA, 122 bp, Homo sapiens
cttttccagcttccagaggccatacacattccttggttcatagccccttcccccatctaccgagccaggtaggataggttgaatccttctcacactgagtcactatgacctcctcttctgcc

SEQ ID NO: 281513 - DNA, 122 bp, Homo sapiens
gaactgtataataaatgattttatggacttactaattttcttaggtttgatcatgtattgcggttacacaggaaaatgttcttattcttagaacatgcatgctaacatatttgggggtgaaa

SEQ ID NO: 281514 - DNA, 122 bp, Homo sapiens
gagagcggcgccgctggagccgaggggggcgccgagcgcagatctggagcagcagagccacggcgcagctggggcccttcgaggcgctcggggcgcacatctgggacctcgagcgggggccg

SEQ ID NO: 281515 - DNA, 122 bp, Homo sapiens
tcagactgtgtcccgatatggcactgtgtctctccctaaggtgtgtactctcctgagagacgcttccttggaactgatgctaaggcacatcagaaggatctcagggtggaaaggctcctata

SEQ ID NO: 281516 - DNA, 122 bp, Homo sapiens
tagatactgaggtgaggacccctagtggagacgaagggaccagcaacgctagaacagtgacgtccggtagcgtccagccgtcagccctcagacgccacgggctgccggatgtgagtcatcct

SEQ ID NO: 281517 - DNA, 122 bp, Homo sapiens
ttttgtatcctgagactttgctgaagttgcttatcagcttaaggagattttgggctgagacgatggggttttctaaatattcaatcatgtcatctacaaacagggacaatttgacttcctct

SEQ ID NO: 281518 - DNA, 122 bp, Homo sapiens
aaataaaataaaataaaattctaggaagcagacattaatatgtagtgaaaaacaaacaaacgatcagtggttcctggtatcagggtgaaaggaaaaacggactgtaaagaagtatgagagcc

SEQ ID NO: 281519 - DNA, 122 bp, Homo sapiens
cgctgggccgtgcaggtctcggccgccccacgcccgtgtccgtctccaccgtgaccccctcgcccccggcacgcccagggtcaacccccgggcttattgcattttttcacaaactcatctca

SEQ ID NO: 281520 - DNA, 122 bp, Homo sapiens
ttcggtccctggcccagctaatccagactccctggggaccccttgacttggaaagtctcgcgcgcgcccgcggcccctggctgcgggctgcctcgagaaaagttggcgacgctcccgtcgag

SEQ ID NO: 281521 - DNA, 122 bp, Homo sapiens
ccctcagcaccttagagcacaagacattaagggccacccagaagccagtacggcacgaggcggtgaaccccaaccgccccccggtcgcacctcccgcgcctgcccgcagaggcacgtggtga

SEQ ID NO: 281522 - DNA, 122 bp, Homo sapiens
gaatgctgcggagcgcccctctgggctccacccaagcctcggaggcgggacggtgggctccgtcccgaccccttaggcagctggaccgatacctcctggatcagaccccacaggaagactcg

SEQ ID NO: 281523 - DNA, 122 bp, Homo sapiens
ttcacctttgcaactgcatttggattctatattgtctgcatcaggcatggagacgcccaccggctgctgtgagaggaataaaaggagtactgacaaacgtcatcatacaaaaaaggtttcaa

SEQ ID NO: 281524 - DNA, 122 bp, Homo sapiens
tgcttttgcagcagaacatgaagcagatccagcataatctgcacttgggcctcgccccggcggaagcagagctttatcagtactacctagcccagaacataggcctgaccggaatgaagctg

SEQ ID NO: 281525 - DNA, 122 bp, Homo sapiens
ctcaggggtcctcgccccatcccggtccaggccgtttgtgtatctttgtaaactggcaagcgcggtaacttccttccctgaattaaatgcagggcccaataaacatttcgtggcggaggtac

SEQ ID NO: 281526 - DNA, 122 bp, Homo sapiens
tcttcacaccatctgagcaacttcactaacactccataaaacaaaacgaaacgtcagcagcgcttatcaggacttctctctgccgtccccatccccaccctccagttctgctgtgaacaggg

SEQ ID NO: 281527 - DNA, 122 bp, Homo sapiens
gaaagtaaactgcatagggctgacaatatttaaactgttaggaaatctaactaaggtgcccggatggctgtttaattctgctttgtgtaaagatggggcaatggattatttcggacaggaca

SEQ ID NO: 281528 - DNA, 122 bp, Homo sapiens
cagtcatgacacagccagattaggaaggtgggccagagcgtgcacgggcgcagggcgaggcgggcgcagggcgaggcagggccagagcgtgcatgggcgcagggcgaggagggcgcagggcg

SEQ ID NO: 281529 - DNA, 122 bp, Homo sapiens
gcagatcccagctgcctctggacgctgaaaaatccaattttcttcctaattgccaccgcccgcgcgcgctctctctccactcacagcctacttctgcttggcggcgcctcgtttcccccaca

SEQ ID NO: 281530 - DNA, 122 bp, Homo sapiens
tggtcagcgtctgcctgagccgttgactgaggctgtgtttccgttttaggacatcgtctccgcgctggaggaccgtctcaggcccctggtgcaggcagagttatctgtgctcgtggatgttc

SEQ ID NO: 281531 - DNA, 122 bp, Homo sapiens
ggttccacttaattgaagctgctcctgctgaagctcctcggccccgcccctccccagccacgcccctcaggatacaggtctcgcttgtaggagctgctgatgtagcggccgctctctgtctt

SEQ ID NO: 281532 - DNA, 122 bp, Homo sapiens
actgctcttcattaagtgtcaatcgaagtgtctcaatcgaagaggctggttctacttttacgtacagacaagggaactgtctggtacagacaagggaactgttgccgtaagttcaggtttac

SEQ ID NO: 281533 - DNA, 122 bp, Homo sapiens
gcagatacgtcagagggaacattcaggaggggcgggctcccaggctcccaggagaccgcccggagcctccggagcgcgacgaggcgcggggcctcggagatctggcctgccagattgagggg

SEQ ID NO: 281534 - DNA, 122 bp, Homo sapiens
cctagggctctttgccgaactgaaacagagcatattaagcttccttcctagagatttaagcgtgcaaattcagctgccgaagagcagggagccccagagtaggacaatagctattgtcgttg

SEQ ID NO: 281535 - DNA, 122 bp, Homo sapiens
gccgccccagggctgtgagacccagcgtcgcggctgctgggacagaccggggaggctgcccgtgccctcggctattcgggggctgttcttcagcttcttccggctcggcctcctcttctctc

SEQ ID NO: 281536 - DNA, 122 bp, Homo sapiens
tgtttggcttctttctgacgccagggaggggtaccaatccctgcatacctgtggtgcctacgttaccatctctgcctaggatgtgcaatgggcccctgctctcactgcggggttgacgttac

SEQ ID NO: 281537 - DNA, 122 bp, Homo sapiens
gaccaatttgtgaggaggggtagttaaagaaaattctccatatgaaattgggaattttgccgtagagccatattacgtaaaattggcagatgaaagcaaggaacacattttggggatccaaa

SEQ ID NO: 281538 - DNA, 122 bp, Homo sapiens
aactggcgttcccgtgttgcaggtggatggaagtgatccgcagtgccaccagctctgcctcgcgaccccacgtgttgagtcacaaagagtctcttgtgtattgatggccggacacactcgtt

SEQ ID NO: 281539 - DNA, 122 bp, Homo sapiens
tctaggggaaggcctccccaggtgcctggttgcttctgcccccaccatgctccaggcccacgttccccagatttttgagccagtgacacacacaggggcctgtcccaacacatcagggaaga

SEQ ID NO: 281540 - DNA, 122 bp, Homo sapiens
gcaacgtgccttttccaggggaccagctgtgctggagtcagtgatgctgagagattattgcgtgttaccccaatggtgggtgtactctaacagtcactgttttttgtttaaaagcgacttgt

SEQ ID NO: 281541 - DNA, 122 bp, Homo sapiens
atcatgacaaacaggaccatgtacagggaggtcagcaggggcctttcctgtcatttgaaacgtgcccttggttttgcttcccctaaccccagtgccttggaatgctgtttgaatctggggat

SEQ ID NO: 281542 - DNA, 122 bp, Homo sapiens
agtagtggtggcaggggtctcggaatcacagcttgagcaggggatagtcctggtcctgggcgttgtttcttcagcgcccttcccagccaagaaggggcagcctgaacgctgcagattaaaag

SEQ ID NO: 281543 - DNA, 122 bp, Homo sapiens
ctgtcacaggggtttacaaccaggatgacctttattacctgggtgacacaggtggatagacggcaaatgctggcccatttgcacaccttctttctagtgtttattagattagtttcattaag

SEQ ID NO: 281544 - DNA, 122 bp, Homo sapiens
gcgggcgaaccgaggcagggccctggaagccgaggtccagcgggtggcggagagggtaaccgaggctgcgtgggaggagccgaggtcgggtgggagaagtcgaagccccggtcgaaggagct

SEQ ID NO: 281545 - DNA, 122 bp, Homo sapiens
agaatagaccccctttgttcgtggccccctctgacgggcagggagggacaatgagcgcgccggcttggaaggggctctcatgagctccccctaaagtccccagggaaaagccattgtgagga

SEQ ID NO: 281546 - DNA, 122 bp, Homo sapiens
acgacttctcatttggctgaagaagagcttgaggaagcatttcataacgtcagccaaagtcgtttttagtaagacctgggtgggattcttgctgttgatatccaaattaaaaaaagccttga

SEQ ID NO: 281547 - DNA, 122 bp, Homo sapiens
ttatgtcatagaaaccaatggaaaaaggaaatcagattccccagattccacccccgccctcgccccaggtagtgaaaagttagtgagacttcttgaaaaacaatagggtgtttccaggttaa

SEQ ID NO: 281548 - DNA, 122 bp, Homo sapiens
tttgatgagctcctctgctctgcctaagtggttctggaacagagagctgttgtgatccgacgaactttagaaagtcacactaactaagactacacaccccaagccagcaagaaaaaggaaag

SEQ ID NO: 281549 - DNA, 122 bp, Homo sapiens
tgagtttggttgtgatggaaatctggggttccaggtcccgctcctggtagccttttttggcgaggagcgcccacctgggaaggagaagatgggcagtgtggtgtccccccagcgtgtagtga

SEQ ID NO: 281550 - DNA, 122 bp, Homo sapiens
ccggggcgctggggatttggggagacgatggagcgacgggtagagcagcttgggccgagccgcgggggtggaatccagacgccgggcgggggagggggcggcggggcggcgggacggtgggt

SEQ ID NO: 281551 - DNA, 122 bp, Homo sapiens
tctgcccctctggggctgtgccaacagcacagcgtgcttaccctggttgggggggaagggcggaaactggtccctcggcaggaggttgcagtaggcaatctggtgaccaaaggcagggcctg

SEQ ID NO: 281552 - DNA, 122 bp, Homo sapiens
tctgggctaccccattctgtttggcccactctgggccatagtggtgcccccatttcaacccggcttgaatgactacgttgttcacctcctcttcagtgccccaccccaacggtttaggacaa

SEQ ID NO: 281553 - DNA, 122 bp, Homo sapiens
tcggccgcctcccacacctccgggcctcactcgcgcctccccgccaggccgtgcgccccgcgtgcccagggcgggtgggaagtacctgccgccatcttgctcaccagcctccaaaatgcggc

SEQ ID NO: 281554 - DNA, 122 bp, Homo sapiens
cgcccgggaggaggatgcagacgccgcggccggcgatgaggatggaggccggggaggcagcgccgccggcgggggcgggcggccgcgccgcaggcggctggggcaagtgggtgcggctcaac

SEQ ID NO: 281555 - DNA, 122 bp, Homo sapiens
aagctgccttgacaggagacggacctgagaggcagaatgctggattaaaccacctgcaaccgtgctcaaatccttcccccatctttcttctccactgccctcactacccaatgaatttgcca

SEQ ID NO: 281556 - DNA, 122 bp, Homo sapiens
tgtgaagtgagtccttggttaaaatatatacacacacacacacacacacacacacacacacgagttctctcaagacctggcacagaataaatgtgagataaacattagccagtactattgtt

SEQ ID NO: 281557 - DNA, 122 bp, Homo sapiens
cgcagcctgatacggtgtgccagcgtcctccccacgaggcaaataaacacagaaaactcacgcatggaatctggtgtttattacactcgggggagagaggaggtcactcggtccagcggtgg

SEQ ID NO: 281558 - DNA, 122 bp, Homo sapiens
agtttgggggttatttctggtaaaccaatatctttagtatcatctttatctagcaaatagcgaagtagtgcattctctttcttcttggggctcaccggctcttgtttaatagtcacttctga

SEQ ID NO: 281559 - DNA, 122 bp, Homo sapiens
tgtcacttgtttgacctgactataactgagtaaagcatcatcattacaaaatgcagcatgcgggatagtaatcacctaaagatatggttcaagcacttcaccaacctctgaacctgaatatg

SEQ ID NO: 281560 - DNA, 122 bp, Homo sapiens
aggatacttcgcagcagtaaataccgactctctcattcatctgattcctagcggtggactcgcctgcgccgtggcggccctgttcatggacacgttcacaggcatgttcaacatccctagag

SEQ ID NO: 281561 - DNA, 122 bp, Homo sapiens
tccttgcaaagtagagggatctacgctggccttacctctggggctgctttcttgcaagtacggtggggcggtgggagtgacatttccggagtgggatgctgacagcagaggcgagcgttcgt

SEQ ID NO: 281562 - DNA, 122 bp, Homo sapiens
cgtatggtcgcaaatttgcagcccgccgagctgcgtggggtttatcgtcactcaaacgcgcggagagctgtaaaatgtttacagaaagggtcgtttgcagccataaaatcctcttttctctc

SEQ ID NO: 281563 - DNA, 122 bp, Homo sapiens
gaccagcctggccaacatggcgaaatcccatctctacaaaaatacaaaaaattagccagacgtggtagtgcacgcctggaataccagtgctttgggagactactgtgggagaatcacttgag

SEQ ID NO: 281564 - DNA, 122 bp, Homo sapiens
catagttataaaatgcccaaaacagcaccactaataggtggatacaacccatgttaatctcgaaggtagactctgacagtaggattacatatttatttagcagatacacaaatggcaagaaa

SEQ ID NO: 281565 - DNA, 122 bp, Homo sapiens
gccgcgccggccgcccgagggccgcggtgctgcagtgcccccgcccgcagcgccccccaccgccccgcagcggcctcgccccgcagcacccccactaccgccccgcagcgcccccctcctcc

SEQ ID NO: 281566 - DNA, 122 bp, Homo sapiens
ggctcgcgaagccaggaggggtcgggacccgggcggtaccggagggcgacggaatgagaacgacaggccttagagaaccagagagaagcccgcccagggcctccccctcccccgctcagccc

SEQ ID NO: 281567 - DNA, 122 bp, Homo sapiens
ctttcaatatgagtgaggtaagcatctgctgccctttgcaccagacaggggctaaaaacccgtaagaactatacatatgtttgaattactatatacaattatcacttcataaacttcctaaa

SEQ ID NO: 281568 - DNA, 122 bp, Homo sapiens
ggaggagccgctcaccatcttcagcggggccctgctctatggggacccagagcttgaacacgcgtagactggggtcccgcccgacgtgtctacgtcggctgaagagacagcgggggcggcgg

SEQ ID NO: 281569 - DNA, 122 bp, Homo sapiens
tcccactgctcctgcacaccccacgcctgcgaccctacccaccacggacaggcgctcctgcgagctggaagccagttctctgcgtcctgagcctggcagctgcatctgaacactcggagcct

SEQ ID NO: 281570 - DNA, 122 bp, Homo sapiens
gcgggagcagcgcacttttgagacgctccctagagtggaacccgggctcggctcaggctccgcgggcggggcgcgcgccgagagaggctggcactttggcgacactccctgagccgccccgc

SEQ ID NO: 281571 - DNA, 122 bp, Homo sapiens
taggcgcgtccctggctcccctgaaaggactgaaagaagaaggtcccgtgagattggctgcgagtgctttctggaacgaagcggtgctgcccagaaccaggggagtccagccccgcggctgt

SEQ ID NO: 281572 - DNA, 122 bp, Homo sapiens
caggcatacctgcaaatgtaacgcccaactgtgtacaaagcagaaatctaaatgccagggcggactgggagaggttcccgtgacctctgacccggcctctaaattctcccattccctcccca

SEQ ID NO: 281573 - DNA, 122 bp, Homo sapiens
ataaccgtgagaacacgtccaatttgcggacgactcaaatcttagagagcttggaggccgcgccgcctgtcactttggcgacgtgcagctgggacagctccaccttcaggtcatccaactgt

SEQ ID NO: 281574 - DNA, 122 bp, Homo sapiens
gcctgcaagcacactgacttccacatccctagcatttaggcctttgaatagaagctgacacgtagcagccagctgaacaagtatttaatgaggagcaacacaactccaagaagggctcctta

SEQ ID NO: 281575 - DNA, 122 bp, Homo sapiens
attcttgaggcagcaaatatgaacgagatcctttcacatttcccaagctggcaatatgtccgtcagcaagagaaaatattctttagagcaggttgtcagagtgattttcattttcaaattct

SEQ ID NO: 281576 - DNA, 122 bp, Homo sapiens
tgaggggggcgacggcggcaccggactcctctcctctcagctgcaaattccgacccacgacggcccaaggcacagaccttcccgccggtactctccccaagaaatgagaaacagaaatatac

SEQ ID NO: 281577 - DNA, 122 bp, Homo sapiens
ataattgcctgggtggagttgagtgttgtacagaaatggcaagaaatgcctgtcctggaccgtgtcgcctttggtttaggattcctgtttttttacataggtgttgctttgtgagtgacatc

SEQ ID NO: 281578 - DNA, 122 bp, Homo sapiens
ttcttgacattcagaagtcagattcagggaccccatggcagagcctgtttctaacacttgcgcctattcgactatagggactatattctgcacagaaatatacttagttttatatatggtta

SEQ ID NO: 281579 - DNA, 122 bp, Homo sapiens
aaacgccccctcctccccaatcgtgagagctcaaaagccagccgactctgaggattcagtcgtgccactgtgagcccgggacacaagggctgactccagctgttggctttgagtatccccgc

SEQ ID NO: 281580 - DNA, 122 bp, Homo sapiens
tgcagaaggtcccctccaggctgcagagctctggtccctgaggctaaagatctggtttgacgccatctgtttgaacacttaacagctttgtggccttcggcaagtcaatgaacctctctgag

SEQ ID NO: 281581 - DNA, 122 bp, Homo sapiens
catgacttctgttagaagatccagccgagggtgtgtattgtgtgtaagatcttttgcaaccgatactcatgagagttctgttggccactgttgagacagcctctattgggaagattctgtaa

SEQ ID NO: 281582 - DNA, 122 bp, Homo sapiens
atacatttttgacttatgatattttcaatgtatgatgggtttatcaggatgtaactgcatcgtgagttaaggtgcagttgtattctaagacctctacaaaaaacattgacagcctattgctg

SEQ ID NO: 281583 - DNA, 122 bp, Homo sapiens
atcccagatagatatcaagtttcacaggcattacttttagtcagtctcaagtttcagccacgggaccaaaatttagtgttctgtaccatgttggtttcacatcacggcttaagaaaatactg

SEQ ID NO: 281584 - DNA, 122 bp, Homo sapiens
tgcgtgttatgtgtgagccagagctcagcgtttctgggggaggcgagggaaggaagagaacgtgggaatgtggcttcttaccctgtgtggcactctccttgaatgaatttcccgacacagag

SEQ ID NO: 281585 - DNA, 122 bp, Homo sapiens
tattccccacaaacggagaaaggagggtctgtgttctgcacatacacagacagactcacacggtctggatgatgctttcacaagttaaggggcctcacgcttactcagcagaggaaatcttt

SEQ ID NO: 281586 - DNA, 122 bp, Homo sapiens
ccggaccgcagagcttatttcgtgggtggtgtgttgccaccttcctgactctcagtatcccgtccgtcctcaggcctgctgctgggacgcgctggaagcgagcacccaagtcaggtactcga

SEQ ID NO: 281587 - DNA, 122 bp, Homo sapiens
cggcgcccccgcgaggccggacggggaactgcggccgacgggccctcggcatggcctcgccgccgccgctctggccctggccctggcccggaccgcccactacgcctgatgccgggatggga

SEQ ID NO: 281588 - DNA, 122 bp, Homo sapiens
agccataggagtgatgaggcatgaagagtagagtctgaagcccctagacactgttgtgcacgtgaagggcttagaaatgggtaccaaagggtttgggggcacgtgctcaggacaggtacctg

SEQ ID NO: 281589 - DNA, 122 bp, Homo sapiens
ccctttccgagtcaaagaaaggggtgacggatgcacctggaaaatcgggtcactcccacccgaatattgcgcttttcagaccggcttaaaaaacggagcaccacgagactatatcccacacc

SEQ ID NO: 281590 - DNA, 122 bp, Homo sapiens
gagcccttctcatctctagaatgaggaactgcaagggtgactggaaaggccaccaacacccggcccgccaggccctccccggccgcccgactactggaaggaagaggagaaatctggccgcg

SEQ ID NO: 281591 - DNA, 122 bp, Homo sapiens
tgtccccactgtggtcaggcctaggagtggggccgaagcccaagtagccccatccacaaccgcggagcggctgggagggccgggtgggaggactaccgtgtgcaggggtgggcccatggccc

SEQ ID NO: 281592 - DNA, 122 bp, Homo sapiens
caccaacatccttaccgccatcgctttccccctttgccattacactgtggccacatcctccgccctcagggtcttcaaactttctgcctgaggcgcgcttttctcacaattttgcctggctt

SEQ ID NO: 281593 - DNA, 122 bp, Homo sapiens
tctttgcacaggggaattctaaaaagaacaagagtcgatagttttgaaatagctggttggcgactgttctttccagacctgctcctgctgcacagagccgcagggctgagaccacgtccatg

SEQ ID NO: 281594 - DNA, 122 bp, Homo sapiens
gaagccccctgaccccttgttccaaatatactcttttgtctttctctttattcccacgttcgccctttgttcagtccaatacagggttgtggggcccttaacagtgccatattaattggtat

SEQ ID NO: 281595 - DNA, 122 bp, Homo sapiens
aagccctcttccctttaaaaaaaaaaaaaaaaaggctgcttctcgcagagtggaaagccccggtccccatcccaccaaaaccatttgacaagcaggacaacgaagaggcagaaggatctggg

SEQ ID NO: 281596 - DNA, 122 bp, Homo sapiens
actccgtccccctcaaataaaactaggggcgcaactgttatgcatgtgccgagagaggcccggatcttccttccttccacccactcctactcctcccaccccgcgttctcttttcttttcca

SEQ ID NO: 281597 - DNA, 122 bp, Homo sapiens
gtagcttcctgctccgctgactagaaacagtaggacgacactctcccgactggaggagagcgcttgcgctcgcactcagttggcgcccgccctcctgctttttctctagccgccctttcctc

SEQ ID NO: 281598 - DNA, 122 bp, Homo sapiens
tgaagcagccacacttgccggccagggccagatgacagagctacaggctggcaggtgccccgggcagaacatacctcccccgagcccgcggtgaagtccacggcagaagacctccgtttctt

SEQ ID NO: 281599 - DNA, 122 bp, Homo sapiens
atccgcgggggaaacgcaggcatcacggctgcagcaggaccgcggcccgccgcgcacgcgcgtgcactaccgaggggcccagtgcccgccccctccggccccgccttcctcttccggacccg

SEQ ID NO: 281600 - DNA, 122 bp, Homo sapiens
gtccggatccggaggaactcctctttgtccctggtaggagagacacccccagtctatcctcgatgccgtcagccttggccatcttcacttgccgcccgaactcgcacccgtttcaggagcgt

SEQ ID NO: 281601 - DNA, 122 bp, Homo sapiens
cacaaacacaggcctaaaaaggcactttttcctaccctatatactgagtgcattgaataccgtgaaattactcacctttgagccaagcaggttattggttagtagtacctagagaaaaacaa

SEQ ID NO: 281602 - DNA, 122 bp, Homo sapiens
aatgataaaaaaatatttggcctacaagcattggctgaactttggggacgacattcccagcgctcttcgaatcgcgaagcagcgctgaaacagcatcgaggaagggcgcatccaccaggaga

SEQ ID NO: 281603 - DNA, 122 bp, Homo sapiens
cttgcttaaatgctttcaatggctcacgtcacagtttaaaatagaaattcctttgcatgtcgtggaaaacctttcacaatctgcctttaattagctctatctctcttctttcctttaatata

SEQ ID NO: 281604 - DNA, 122 bp, Homo sapiens
caccagcgctgcgctcgatttctcgcccgggttgcagggcagggctcgggacctgcaacccgccatgcctgagtctccccactgtgtcctgggctcccgcgtggcctgagcctccccgacga

SEQ ID NO: 281605 - DNA, 122 bp, Homo sapiens
tcctcgaaggggagtctcagcgaccatgggggacaccatccactgtaagacagagaacaacggcagggggcgtcagtataggatggaaggggcggggggtgtgcagggggcgtgggctgcgc

SEQ ID NO: 281606 - DNA, 122 bp, Homo sapiens
acatgaaggggctgctgaacaatgcagcaggaatgtaaatacattctctttcgggtcagacgtttggccagacggctgattacaaaacataggatgacttcaagctgaaggtatgaaaacaa

SEQ ID NO: 281607 - DNA, 122 bp, Homo sapiens
cctccctgggctcccatctgtggccacggcccccaattttacccaatgttaatgctgatacgtgaggccatggtggctctgggtgtccctccctaccctcttccaaagcataacgactcaga

SEQ ID NO: 281608 - DNA, 122 bp, Homo sapiens
accatagtttacaagtagaaagaccatgcttgaggacaacagaagttcactaaggatgcacgattgatctgagaagtttttaagcctcgtcctcgccctcctcctcctcgaactccccttgt

SEQ ID NO: 281609 - DNA, 122 bp, Homo sapiens
gacgtcagagccggacggggtaaactgagcggcggcggcggggcgctggggcggagactgcgacccggagccgcccggactgacggagcccactgcggtgcgggcgttggcgcgggcacgga

SEQ ID NO: 281610 - DNA, 122 bp, Homo sapiens
agcgcctcctccgcgacgcgccacatggctggcaccggcgcgcccccgcgcggccgcctgcgagaagctcactctccgcggaggcgaaatctggttttgattcaattagattaagttcaggg

SEQ ID NO: 281611 - DNA, 122 bp, Homo sapiens
ataggacctgcctcacagctcctgccgagaactattgagaatgcacaggaaggtgcccagcgctggcctggccacatggtgagtgcacaaacactgggagatcaagccttgaccgccagacc

SEQ ID NO: 281612 - DNA, 122 bp, Homo sapiens
tgagagcgcgcgctgggcgcagccattcagcttcctacaccctgcggctgaaccctgagacgtcatccggcagtccaaattcggttacaaagtcggctctgccagaccaaggaaggagctgg

SEQ ID NO: 281613 - DNA, 122 bp, Homo sapiens
ccagaccaggagagaagggactgtgggatgagaggggaaaactggggattctgtgccactcggggttcattgtgctggcggcagcatcttcagctgcacctggtccccctgggagggcggag

SEQ ID NO: 281614 - DNA, 122 bp, Homo sapiens
cgttgcaggtccgtcatatagccattaggcaggttggccatgaagctgctgtcagagagacgtcgccggaggaaattcatggctgtggatggatggagatgactggctcctacccagacgtg

SEQ ID NO: 281615 - DNA, 122 bp, Homo sapiens
cttctccccagaggggcctggcaaaccctgtgcaagtatacaaaacatgggcccaggtgacgaccccacccaaagcacagccctaggcagataggccccacagtcccctcccctcagactcc

SEQ ID NO: 281616 - DNA, 122 bp, Homo sapiens
taaccccttataatgttaagacagatgaaagtaagataagcacatacattctggttctaccgtgggttctggcttagcctgtgataaactaagctaaatgcaggaagaaagctcacccttga

SEQ ID NO: 281617 - DNA, 122 bp, Homo sapiens
gtgagtctttgagaaaacaagccaaagtccccttccaaatgacagtgacagccccctagccgggtggcccaccccgcagcctgtaataacacacctacaaaacgcagtttagcagactcaaa

SEQ ID NO: 281618 - DNA, 122 bp, Homo sapiens
ctctcactgtacacagtcttccttggtgatctcacctacttcacagcatctgtctcccatcggtgtctctttcactcttaactttcactcttactctctttctgcaactttataattattag

SEQ ID NO: 281619 - DNA, 122 bp, Homo sapiens
atttatatttgccattaaacatcagtttgcatatgccacagggcaagacaccaaaggtcacgttccagctgcttcaggagccccctgggggaggtttcctgctgtcaaattcactgtcataa

SEQ ID NO: 281620 - DNA, 122 bp, Homo sapiens
gccccatgggactcagtctgctaggggaagcagacacataaacagttagctggagaacaacgcagtgcgtgccagcatggagacctggagcaagcacgatgcagggagtgctgagttctttc

SEQ ID NO: 281621 - DNA, 122 bp, Homo sapiens
acaagtgatcttttctcttcccacctcccccacctccaactgtggggcccttgtagcagacgggatgggattaagtggggcaaaaaggcagttgccatggtaacagccagtgggtgccgcat

SEQ ID NO: 281622 - DNA, 122 bp, Homo sapiens
aagcggtgggaagtggctgtggtgggacttaggcctccccgcagtcaactctacaatctgcgcccggagttctccttgctcagctcggcctcagtccccttcagccataagatggcggctgc

SEQ ID NO: 281623 - DNA, 122 bp, Homo sapiens
tcaccctcaacgttgcgggggctgggagcagagtgcggctgcctcccctgccgctagcttcggaagagtggcctcactgaagtgcctctcatcattactgaacgaaagtggtccctcccctc

SEQ ID NO: 281624 - DNA, 122 bp, Homo sapiens
ctcactcggtacctgtcggaaagggttagggcaggggccgcgcgggtggggttaggcccccggcctagctagctcggttctcggaggacttgaggaagtgttgccatggagacggcacgcac

SEQ ID NO: 281625 - DNA, 122 bp, Homo sapiens
cttctctgcacttgcagggacaaagaattgatggtaaaaattggtttcattctagcaatacgtgacagtcattcacggatacatgaattaattgggggtggagaggaagtcccactcatctc

SEQ ID NO: 281626 - DNA, 122 bp, Homo sapiens
cgagggggtggggccaggttctcacaccctccagtggatgattggctgcgacctggggtccgacggacgcctcctccgcgggtatgaacagtatgcctacgatggcaaggattacctcgccc

SEQ ID NO: 281627 - DNA, 122 bp, Homo sapiens
aggccgcgctcggtggggcgggggccaccagctgaggcccctcctgccgcccagacagctcggccccctgcggccccagccctgcaggctgagatcccgcaacgactcccacccctgggctg

SEQ ID NO: 281628 - DNA, 122 bp, Homo sapiens
ttagtcttcaccgctctggagagagttgctagccacgggatcctgacccggacacgaactcgtttctccacgtcggtgcgcgcttgcatccctggccccgaaagcgtgggaatgtccggaaa

SEQ ID NO: 281629 - DNA, 122 bp, Homo sapiens
ttatttacgaccggcgggttggagtctggcaccagatggtgggggtctgtcaggcccggccgccccgcccagcgccccgcaaacagcgcccggttggcagcgtcgcctgagcagcccccatc

SEQ ID NO: 281630 - DNA, 122 bp, Homo sapiens
gcggggcacggcgacgctcagcaacgggaagctgtgcggggcaggggagcccgaccagctcgcgcagagactggcgcaggaggccgccctggtggcccgcggctgcacgcacatccgcgtct

SEQ ID NO: 281631 - DNA, 122 bp, Homo sapiens
tactcctcggccacgcggcggctggcaactgacgcgcgcgatgttgcgccggccaatcagcgtatggctcagtcccgcgggccccgcttccaggtggagctgctcctgctctcggggtagcc

SEQ ID NO: 281632 - DNA, 122 bp, Homo sapiens
gcctcaagtgacgagggtgagtggggggtccccaggtcggctctcatcggccctgctccgcgctctgctgctgctggagggggggcctggctcccctgcggcttccttcccccacttcctgg

SEQ ID NO: 281633 - DNA, 122 bp, Homo sapiens
aaagagttaccaagccacccacacccctaacactgttctggatgagagatgagagcagaccggcttctccccatcagtgcattgtgcctgttgtacacccctggaggagccctggagccagc

SEQ ID NO: 281634 - DNA, 122 bp, Homo sapiens
ccttcgaggccttcaggtccccaaatctctctggcctaacgtgtcaccgtctttgacagacgctttctatccagccacttagaattcccagtccatgcggctcggtcccttctgcttggaac

SEQ ID NO: 281635 - DNA, 122 bp, Homo sapiens
tgcaatacttaatttctgcaacagctaaggactgcaaaaccccactctgcatcaactgaacgcaaatcagccactttaattaagctaagcccttactagaccaatgggacttaaacccacaa

SEQ ID NO: 281636 - DNA, 122 bp, Homo sapiens
gggttccctccccaatcccagagtcagaggagctggttactgtggaaacaaacccctccccgccaaacaaaaacaaggagggagacagggaccaagacacgactgctcagagaggtaggcac

SEQ ID NO: 281637 - DNA, 122 bp, Homo sapiens
gctgcgacagtccactacctttttcgagagtgactcccgttgtcccaaggcttcccagagcgaacctgtgcggctgcaggcaccggcgcgtcgagtttccggcgtccggaaggaccgagctc

SEQ ID NO: 281638 - DNA, 122 bp, Homo sapiens
ggcgtggccccgacccgggagttcatgggcctgggactcagacgcgaaaggatgctggggcgccatgggtgggggcgcggataaggaagaagcagaacggagggagggggctggatcagact

SEQ ID NO: 281639 - DNA, 122 bp, Homo sapiens
gtccagtgcaagaaagtaggtcgttgagaaagaaaggagagactcccggagaaaatcatacgtgctcttcaccctgacacagggattcctgggagtcgagtgaaatgccttgttgttgttgt

SEQ ID NO: 281640 - DNA, 122 bp, Homo sapiens
ggggctggggggagcggaccttgaggtttggctggcattcctccgagatactggggcccccgggcacccaccccaaccacgcgcagcagggaggcgtgctgcccccacacacctgggcaggg

SEQ ID NO: 281641 - DNA, 122 bp, Homo sapiens
ccgctcctcctccggctcccgccgccagccagcctcgcgcagcccgcccgcccgacggggcggggcgttgttaccggcaacggttaccaggctccgcgccccaccttcctaacggcccgccc

SEQ ID NO: 281642 - DNA, 122 bp, Homo sapiens
ccacagcaggaaagccacgaagaaaacagttcaactcagaccaaaagataaagctgatctcgaggtaaccgcgctcactaatgaagatctcgtggacccgcttgcgaggtataaagagaaac

SEQ ID NO: 281643 - DNA, 122 bp, Homo sapiens
cgcagaccggaatgagagcctgggaatcacgagctccaggtccggaggtaggagctgggacggcctgtggtcaaattatttttccctctaaggaaaatccctatatcctggagaaattatca

SEQ ID NO: 281644 - DNA, 122 bp, Homo sapiens
agcaggtgatgtggctcccaccctgtaactgcagtgaggtggggtcttccttgtagccaccgtgaggcggggtcttccctgtaaccgccgtgaggcggggtcttggaataggccatgcgtct

SEQ ID NO: 281645 - DNA, 122 bp, Homo sapiens
agcctcgctgccgccttgcagtttgatctgaaactgctgtgctagcaatcagtgagtctccgtgggcgtaggaccctccgagccacgtgcgggatataatcttgtggtgtgccgttttttaa

SEQ ID NO: 281646 - DNA, 122 bp, Homo sapiens
gcctcactctcccacaactttttatcccctcaccaccaacgctctcaacaacccctgacacgtcttcccacaggtccctggctcgctgtccggtctcttcgtgttggtttgtccgtttccca

SEQ ID NO: 281647 - DNA, 122 bp, Homo sapiens
ggtgcctcctcccacccccgcccagcagaaggccggtccgagaggctccactgtgccaagcgccctgccaactgactggctctcgctttggctggggagattggggatgaggggaagaaaag

SEQ ID NO: 281648 - DNA, 122 bp, Homo sapiens
ggtgcgaggggcggggcagagaccgcgagagagagttctcgtgaaattcgggagactcaacgtgggggaaaaacagtatctggggatccaggtgcggaaatgcacctcaagtgcaggaacgc

SEQ ID NO: 281649 - DNA, 122 bp, Homo sapiens
tctttgagaaggaccttccctgaggcgccaggagcattttccaagttcgagcccgaacctcggccaaagctgcagcaaccgcccttctgcccgggctgcctccgggtcacgctgggaattgt

SEQ ID NO: 281650 - DNA, 122 bp, Homo sapiens
ctgtctgtttctgaagacctcctttttgtcagtattcccagattcatccaacctgctctacgcatgccatatttgggtgggtgatggttgtggtggaggcttctgcctaggatagagttctc

SEQ ID NO: 281651 - DNA, 122 bp, Homo sapiens
acaaattgaaatggcttggggagactttacaaacaaaacaatttcgtgacctgtctatcacgtgaagggaggcacggaaaaatgtaatatttacacactgtatgctgtgtcactataacaag

SEQ ID NO: 281652 - DNA, 122 bp, Homo sapiens
tgggctcccttgtttgtagccccgaggcctccgggtggggcaggcgcaggtgcagcgctccgtgtggggcaggcgctgaggcctccgtgtggggcaggtgcagcgctcgtggtctgcagggc

SEQ ID NO: 281653 - DNA, 122 bp, Homo sapiens
ccagctttcaaccgttgggagggcagcggcgtcctttttctcaagtgccttctcctgggtcgggctttatgcctgcagcagggcgtttcaaacggctgaggccatcccttgttagggagaga

SEQ ID NO: 281654 - DNA, 122 bp, Homo sapiens
acatcccggagcccgagccgagcccgaggcgcgagcggcggagcgcaggcggcgcatgcgcgctgacaggaaacgcgaaaggaaccagctaccaggcctcgcaggaaaattaatccggcgat

SEQ ID NO: 281655 - DNA, 122 bp, Homo sapiens
ggagcgtcaaaaccttcctcctgcgacctcagcgggtctgggagctgcactgtcccggaacgcaacctgaggtctgaccctgttaaatcccatgcactaaaacgtctcaagtggtcaccacg

SEQ ID NO: 281656 - DNA, 122 bp, Homo sapiens
cagctcatcattatagctgcgactcatggtggcgaaaactgtagcaaaaactcccggctccgctttgaagagccgctgccgcgtagtccggcttctcagagcaccgccttccaagaaccaaa

SEQ ID NO: 281657 - DNA, 122 bp, Homo sapiens
caggctgtcagccgcacagcaaacacacttggtctctttcgggtcacagtgccctccttccggtttgtgcgatgatgtgttccagggcaactgtgaaaaatctgtggagtctatgcccagaa

SEQ ID NO: 281658 - DNA, 122 bp, Homo sapiens
gaacgcttcagctccttccctccaccaagaggtgccctaggatccatccagaaagatctgcggagcccacagagtcccaacgggaactgtgctcctggatggacgccccttaacccataact

SEQ ID NO: 281659 - DNA, 122 bp, Homo sapiens
ggatggatgaatggtggtcaaccttttggaacttagtaaactagtaatttggcagtgttacggggtggtgaaaatgccagggtcatcacaggctgcatacatagaatcataatatcaacaga

SEQ ID NO: 281660 - DNA, 122 bp, Homo sapiens
ggcacagctggagatgcagagccagcagctgcgcgagtccaaccagcagctggacctgagcgcctgccggctgaccacgcagtgtgaggtgtggctggagggccggtgggggtatgggcgtg

SEQ ID NO: 281661 - DNA, 122 bp, Homo sapiens
ggttctcctggtagcgaaatgggccattgaaagcctgggagatagcactgaggttgaaggcgcagacagcagaagccgcgatgctgtttctgaaaggcaagaagtggtggcacagggccctc

SEQ ID NO: 281662 - DNA, 122 bp, Homo sapiens
tgggcgccgtcaagaggccgggggcggggccgagcgcggctgggcggggccttgagaggccggccgggggcggggaggctggcgggtcggcgcgggcccagccgtgcgtgctcacgtgacgg

SEQ ID NO: 281663 - DNA, 122 bp, Homo sapiens
acccgcaccctgggccgcagcgcgcatccgtttcggtctcggaatttcgcttggtcccaccggagcccaaagcggtaccagggaatacatttttgcagatttttggagatttccgccggggg

SEQ ID NO: 281664 - DNA, 122 bp, Homo sapiens
aggtgatccacccactttggcctcccaaagtgctgggattattataggcatgagccactgcgcctgggctaatctgccttcaattttaaaaggcaagaatagaagcaaggtgtcagtcagga

SEQ ID NO: 281665 - DNA, 122 bp, Homo sapiens
gctttaagggtgcagcccctcgcccgtctgggggatggaggggggtggcattggttcccccgaagagacactgcagtcagggactgagttcttcctgagggcagttgtttgtgattgccttc

SEQ ID NO: 281666 - DNA, 122 bp, Homo sapiens
ccagtgccccggtcattatgtttccattccagaggggagagaggagggagggatggtgggcggtgatcctctgggtagctctctgcccacctcttctgagactcccacgagggctgtgccgt

SEQ ID NO: 281667 - DNA, 122 bp, Homo sapiens
ccaaactctggacgcgccatctttcagcactgtaacactcaccgtgagggtccgcagcttcgttcctgaaaacagcgagaccaagaacccaccaattccggacgcactacctactgcatatg

SEQ ID NO: 281668 - DNA, 122 bp, Homo sapiens
gttacacgtgacatactcggcttttaaaatccctattggtccactccagactttcctcgtcgcacaacctggaagagccggcccagctgtttctctattggcggttcctccattcatgtgac

SEQ ID NO: 281669 - DNA, 122 bp, Homo sapiens
ggcgtacccaggccccataatacttcccagagcaccccaaccgcttcccgtgcccctttccgcgatcgccgactcactcaaagtctccagtaggcatcgcaaaaagtattctccacgcagcc

SEQ ID NO: 281670 - DNA, 122 bp, Homo sapiens
gtgtggggacagggaggagctcttgcacacacacaggtggatctgcccactttccaccagcggtttcattactgcgagttcaggcagagtcccggtgccgagcaaagcgtggggcccctccg

SEQ ID NO: 281671 - DNA, 122 bp, Homo sapiens
gctccatttggtctgccacttggggaaattgggtccgatcagaggtctaattttatcagacgtacaaagctcttatttagctttttctttgttacctttgcttatttatttagcacactcaa

SEQ ID NO: 281672 - DNA, 122 bp, Homo sapiens
cacctcatgggttcaagcgattctcctgccttaggctcccaagtagctgggatacaagtgcgcaacaccatgcccggatgatttttgtatttttaatacagacagggtttcaccatgttggc

SEQ ID NO: 281673 - DNA, 122 bp, Homo sapiens
catcaagagctttacttgtcccacaaaggagtctggacctcgtttaagtgcacaggagaccgctggaaggtcctcagtggcgtgccatggcccgacttctatttgagaagtttttctctggc

SEQ ID NO: 281674 - DNA, 122 bp, Homo sapiens
gggggtgtctttcagagactggaggacaccatcctgagtcccacagccagcagggaagaccgggcgctgaccgtgcgtggggaaggccggcaggcctcgcccacccccgtgcccacccgcat

SEQ ID NO: 281675 - DNA, 122 bp, Homo sapiens
ccgaggtgtcgtctgggagtggctgagcgacgatggctcctggaccgcctatgaagccggcgtctgtgacgatctggagcagcaggtggccaggggcaaccagctcgtggacttggcccccc

SEQ ID NO: 281676 - DNA, 122 bp, Homo sapiens
cgaaaaaggatgagtcccggatatcattcgctcaggtgaggtgggttcgggtcccggctgcgtctgggaccgtggcccgggcctcagtttcccagtctacagcccgtgggaggacacctcgg

SEQ ID NO: 281677 - DNA, 122 bp, Homo sapiens
cacacaggtggcatgactttattgtaggagttccacatttacataagagaggcctgaaaacgcaacgatctcatgggaaacttgttcaccacctaaagctcaaaatttctcacctctctctg

SEQ ID NO: 281678 - DNA, 122 bp, Homo sapiens
cttttcctgtccgcaacagtgtccctgcgcccgggaagtttggcttccatgctcgggtggcgtcactgatcttcgccatgccccaatccccgggtgagcttcctgcctcttattgcgggagg

SEQ ID NO: 281679 - DNA, 122 bp, Homo sapiens
ctcctgtccccccagtcacgcttgcacagatctgactcagcagctgccttcctcctttcacgtcattgcatcgggcacatgctggtcatgtgtttctaaattaagtcctgttgtgtggggaa

SEQ ID NO: 281680 - DNA, 122 bp, Homo sapiens
gtacgccctcggctgccgccgccatagcggaccccgcgctgtttccgggccggggtgctgcgcatgcgcactgggtgtgccccgcccacccggccggccctgcagtcctgcgcctagcggtc

SEQ ID NO: 281681 - DNA, 122 bp, Homo sapiens
tacagaggccctgggaaggggacaacgctctcagcagggggcgggggggcccagaacaggcgggcagcatcctgccccatccatgtgctgtgcccaggctgggctgaaccctgagagaagct

SEQ ID NO: 281682 - DNA, 122 bp, Homo sapiens
tttttttttttttttttggcgatagggtcttactctgtcacccaggctagagtgtagtggcgtgattttggctcaatgcagcctcaacctaccagactcaggtgatcctcctacctcagtct

SEQ ID NO: 281683 - DNA, 122 bp, Homo sapiens
gctgccgtcgcagacctgccgctgacttacacccctctggatccagcagggtgtccactgcgtttctgatccagtgaggtgcacattgccgcacctgatcaggctaaaggctcgcctttgtt

SEQ ID NO: 281684 - DNA, 122 bp, Homo sapiens
acgagggtctcggcctcgcggtgcaggtgagcgcggcgtccgccggcgcccttgccgcggcgaggccaatcccagggaggtggctgggaggtcacagtatgaccccagatgcatgtgctcct

SEQ ID NO: 281685 - DNA, 122 bp, Homo sapiens
gagtccccgccgatctcgttttcgaggctccgcccctaggtcccgcccacctcagctcttcgatgccggtgaacagcttctgcaattcctgctcgctcacgtaggggccctcgccagcccga

SEQ ID NO: 281686 - DNA, 122 bp, Homo sapiens
ctccctgccgagacgaacggaaacgtcgtctaggagggagaatgctaggagggagaatgccggccttggaagctgagcaccccggtggaaccccagcttccccaaaccagcgccacgcccct

SEQ ID NO: 281687 - DNA, 122 bp, Homo sapiens
tgctcggaggcggcagcggcgggctaagcttccctttcccactttgttctgggaggcagtcgaggggctccccgtgatcggcgtggcccagggggccccgggaccggcggtctgggcggtcg

SEQ ID NO: 281688 - DNA, 122 bp, Homo sapiens
gggccaagagattaaaagcaggttcagaaggctcagatgccactcaccagacagcagggtcgactgctagtgaccttgagcccagtccggacagacagacaggcagacagacgcacggacaa

SEQ ID NO: 281689 - DNA, 122 bp, Homo sapiens
acccctgccctcggccctccagcgcagctgcccagcctggagccgcgcctgaagtgggcccgcagtccaggaaaggcgttcaccaaaccctaggccaagggctgggagccagtccccccacc

SEQ ID NO: 281690 - DNA, 122 bp, Homo sapiens
ggtgtcctgtattttatctgacaaatccgggaaccctatctgcatatgctttcctctttgcgtcactcaaattgcccataatataacaaatctgaaagcatccatcacctggattcatcaat

SEQ ID NO: 281691 - DNA, 122 bp, Homo sapiens
ggtgctgcgctacgtggccgtgtgggtgggcgccgaggtgcgcacggccaagcgcggctacgccatgatcctgtggttcctttacatcttcgtgctggagatcaagctctacttcatcttcc

SEQ ID NO: 281692 - DNA, 122 bp, Homo sapiens
gaggaaaccgtacctgctgccgagcatccgagagggcgcccggctgggcattcaggagtgcgggagccagttcagacacgagagatggaactgcatgatcaccgccgccgccactaccgccc

SEQ ID NO: 281693 - DNA, 122 bp, Homo sapiens
cgtcacctactgggtcacctactactaaccagccctcatatggcacccgctcatgggtcacgcctttggcttttacaagggtatacagttggtacagcagacatgattgcactcatttcaca

SEQ ID NO: 281694 - DNA, 122 bp, Homo sapiens
tcgtgatccacccgcctcggcctcccaaagtgctgggattacaggcctgagccactgcaccgggccatgtgtcgccttttaagaactcacctgactaggtcaggcccaccaaagccattctc

SEQ ID NO: 281695 - DNA, 122 bp, Homo sapiens
cggacaaagttccgggacatccgttggggctcctggctggccatcaggagcagggcgatgcggaaggcttcagggcggtcgatcttgctgatgatttggaacagtgtgtatttcaaggcctc

SEQ ID NO: 281696 - DNA, 122 bp, Homo sapiens
ttcttgttgggaacccgtccttgaccaaggccagcccagagtaaacaaaagcacgtgcaccgctacccacctgcagataagctgagtgctaaacatgcagttaacgccagtgcaccccaccc

SEQ ID NO: 281697 - DNA, 122 bp, Homo sapiens
agtgtggtgtggacagggcgtggttggcaagcatgcgcaatgtgggccgggcggggctggcgagcatgcgcagtatggggcggggcggggcagggctggtgagcaagcccgcggggagcgag

SEQ ID NO: 281698 - DNA, 122 bp, Homo sapiens
agattgtagacttggcgagcgggccggggggatattcagccgtctgagcggtggtggggtcggccgggaggacaaacctggacacagatacccccagctcatttgggcagcgcaaatgcaga

SEQ ID NO: 281699 - DNA, 122 bp, Homo sapiens
tcagtctcttcctctgtaaagtacgttaataacgcctgtctcacagcatttttgtaggggcgtaacatggcatctaaacattgctgagccagaggccagacactgttagggcaggtgatggc

SEQ ID NO: 281700 - DNA, 122 bp, Homo sapiens
aggctaaggcaagcccccatggcagggccgcaggtctgggactcgatttttctcatcctgcggtgggcatgggcacatgtgggtcgagtgccttccagctctccaggctgtgctccaaccct

SEQ ID NO: 281701 - DNA, 122 bp, Homo sapiens
agaaaatcagactgctgttgatgtttttcgaaggatgattttggaggcagaaaaaatggacgggggcagcttcacaaggcaagtcttcatgctcggtgatgtgattctgctgcaaagcccga

SEQ ID NO: 281702 - DNA, 122 bp, Homo sapiens
atctactgcattatgagcacttaaagtactgctagctgtagaactccagcttcggcctgtcgcccaatcaaactgtcctgttactgaacactgttctatggttagttttgcaggtttgcatc

SEQ ID NO: 281703 - DNA, 122 bp, Homo sapiens
gaggaaggcgctgggcgcggtggccggtgagccagcgcgggggatggcttgatttgccctcgtctgctttacgggttcaaatagaatatatttttttaatcaccatcaaaagaataaagccc

SEQ ID NO: 281704 - DNA, 122 bp, Homo sapiens
cgccgcgccccctccgcactcgcacggccccacccgcaggcgccccccgtgcggaggaagcggatctgccaggatcatttttgttgtgtcggaggatgaggttttggctgaggactgaagag

SEQ ID NO: 281705 - DNA, 122 bp, Homo sapiens
tcctcacttcccagacggggtggctgccgggcggagggtctcctcccttctcagatggggcggctgggcagagacgctcctcacctcccagacggcgtcgcggccgggaagaggcgctcctc

SEQ ID NO: 281706 - DNA, 122 bp, Homo sapiens
ggatgttcttctttgctgtaaagtcactcactggatgagtattaaagaaagccttgtggccgggcgtggtggcttatgcctataatcccagcactttggaaggccaaggcgggtggatcact

SEQ ID NO: 281707 - DNA, 122 bp, Homo sapiens
cctatgcgcgcctctgccggtcctcctagaaatcccgccctgcctacccgcggcgcgagacgcaacgacgctttcaggggtcaaagacctggcagaaatgacttcccaaccccagatgcccc

SEQ ID NO: 281708 - DNA, 122 bp, Homo sapiens
cccagaacccacactagagagggcacatcgggaagaaggcagcactcccgtccagggccccggccaatggaagccccagaccccagatgtgacccaccgggctgctgagactcaagccaccc

SEQ ID NO: 281709 - DNA, 122 bp, Homo sapiens
caccaactccgaggagatgctgggcgagatcgtgcgcacaatctaccagaaggctgtgtccgaccgcagcttcgccttcaccgctgccaagctctgcgacaagatggcgctctttatggtgg

SEQ ID NO: 281710 - DNA, 122 bp, Homo sapiens
gggaactgccttcccaggcctattggcttccctgaatgggttgttatggtaacaaatgaccgaacagtcccttatgaatcggccaatgagaagggccgtcttttccagtgcgcctccgagca

SEQ ID NO: 281711 - DNA, 122 bp, Homo sapiens
gctctacacacaataatttttaacattttaaatgtgtcatcataaatgatacagtggctacgcaggaaaatgctattcaaggatgaagcaccatgatatctgtggcttactttgaagtgatt

SEQ ID NO: 281712 - DNA, 122 bp, Homo sapiens
aagggtgtttacttttgattaaagggcaccatttttagatcttttatcttttatggtacccgtggggttttttatgacaaaaacactaataaagaataaaatagtatgtgacatatggttct

SEQ ID NO: 281713 - DNA, 122 bp, Homo sapiens
gggagccgccatcagcaagtcccccgcagctgacaggcgcgaggggaccagaggcacttccggcccagccccctcagctacagggccatgccttcaggacgccccacaccccacgctgaggc

SEQ ID NO: 281714 - DNA, 122 bp, Homo sapiens
gcctgcctcactggtttcggagggctggagagcagctcagctcgctagctgcgcgcttcccggcacaggcagtgccactgcgcaggttgatcagcgaaacagcatccattttaatctgcggg

SEQ ID NO: 281715 - DNA, 122 bp, Homo sapiens
cattggaggaggaagcagggatttgctccacctatttgcttcaggcatccgagcaagcgtcgccccagaacaacgctccctctgacagcagcagttgcttccaggttttttgtttgtttgtt

SEQ ID NO: 281716 - DNA, 122 bp, Homo sapiens
gccgggggcggagggctccgcccggccaatggggaggcgtccgcccggccaatggggaggcgtccgccgcgccctggccaatggcgacgctcccaccgcctccgtcccccaggttgaaagcg

SEQ ID NO: 281717 - DNA, 122 bp, Homo sapiens
gtcgtgggcgaaggggtcatccagcaggcagtcataggagctgtgggggacacacggtgccgcgagcagccttcagcgcggctgaccatccacagccctggaggcagctgaggcccctgctg

SEQ ID NO: 281718 - DNA, 122 bp, Homo sapiens
tgagagcaataaagccacggtggaatttgtgaggcttaattaggtggaaatgcacacttacgtcgggagaataacacgttcaccaaaggacacagtggtattttttaaccaatcgcaactct

SEQ ID NO: 281719 - DNA, 122 bp, Homo sapiens
cgatattgggtgtcatatcctcctctcccaagtggcaattagagacaatatcagtggggtcgtgtccaccttctgtgatatttaaagtaagatcatcctcttccctccaggatcatgggaac

SEQ ID NO: 281720 - DNA, 122 bp, Homo sapiens
gacgctgtcaccccgactcaggagctcctgggcccgcgggctcccggaagctgccgaccacgtgattcgctggctcagctcacgtgacaaagctcccggaggtgggagccctgggccaaaat

SEQ ID NO: 281721 - DNA, 122 bp, Homo sapiens
agggacggttcctgagtgcgtggacacagcgttggcagtgcagtgggtggcagtggtgcacggtgacaggcttcagtgaagcgactcttatagtatagtggctgttgtgtaggaaggagaac

SEQ ID NO: 281722 - DNA, 122 bp, Homo sapiens
ccacaaaattagagtccccaaagaatcacagcaactcatctgtgtatcaagcagcagaaccgattattgcctgctttgggtctgactctgtagcaacatggctcaatcagcagaataatgca

SEQ ID NO: 281723 - DNA, 122 bp, Homo sapiens
aatgggaagaaaccatttgctgtacagagtgaaatgtgcggaagggaccacctactgttgcgggggggggggtgacccattcacgtggtggggggaggggagcgagtggacgagtccattct

SEQ ID NO: 281724 - DNA, 122 bp, Homo sapiens
aatcataaagaatcatcctgttgagcatttatatctgcttagtctctgattatatgtcctcgacacagcttaaataatggcagacagagcatctcgtgagcaggaaatgagaaagtaacaca

SEQ ID NO: 281725 - DNA, 122 bp, Homo sapiens
cttaatttatcaaagtctcaaatctgtacttagaaaatatctataaagggcatttgtccccgcgacagaaccgctgccgccatcgctgtcatttaagatcgcccgggtccctccgccgccac

SEQ ID NO: 281726 - DNA, 122 bp, Homo sapiens
ggcagaatgcctgaccatgaagcttgagctcccatcatgaactggatgtcatctgacctacgtagccataaaattggatgtatacagcagccacctatcatcaaatggaaatggtgtattag

SEQ ID NO: 281727 - DNA, 122 bp, Homo sapiens
cgcgccagctcacgcacgcgcgagtgcgcgctgcttccctccccttcccctcgcgggagccgagtgaccaatcccgaggctgcatacaaatgaccacgcagcacgggggcggggcctgttgg

SEQ ID NO: 281728 - DNA, 122 bp, Homo sapiens
tgctggcggaactggtgctggcattctgctgtccactcggccacgccctggctaatggcacgcatcacatctggatgtcggtgacacagctgccgctggctgctcaccaggcctggcacatt

SEQ ID NO: 281729 - DNA, 122 bp, Homo sapiens
tgttttccaaaatgggtgtcccagcacacaccgcatgaaaatagccagttccgggggctccgcacccgcgtagggggcgcgtcggtcctttccattttagctgcgtgggggagggtgttggc

SEQ ID NO: 281730 - DNA, 122 bp, Homo sapiens
taaggcaccaaaatctctacaaattaacaatttatcgtgacctacatggctaatgtgatccgaattacccttaagctcttgatttaaggtccatatataccatttccaaaacactctagaat

SEQ ID NO: 281731 - DNA, 122 bp, Homo sapiens
gggaggagggaataagggtcaaggtcaggataggctttctcttgttggactcctggtagccgaggatctgactgcactctattcacattgcatttggaagaaatttctttaacactgtgaca

SEQ ID NO: 281732 - DNA, 122 bp, Homo sapiens
ccaggatgggattttatgtgattgtttcgaataggtggaaatctctgctcatttaggagtcgttcaatgtaacaaggatcttggtcttcacagagaccctaaacgcgtgtggcccagggcca

SEQ ID NO: 281733 - DNA, 122 bp, Homo sapiens
acacacctggaagagacgtaaaatctggcctggattccctaatcccagggccctgcccctcggcttcagggccccgcccctcggcttcagggccccgcccctcggcgttgcgcaaactctgt

SEQ ID NO: 281734 - DNA, 122 bp, Homo sapiens
atggatgtaacagagagaggaagtcggcgccacagagcaatcacaggcgcggtcccaaaacgcctgctttgccaacagttcctcctggagcctcggatccagcagtgttggcacagagaaag

SEQ ID NO: 281735 - DNA, 122 bp, Homo sapiens
attgcagcccgcctcccctattaatctccctcgaagataatccgcctgacaggtcaggcccggcgagctggaaagcctggcccagagcacccaaacagtcccggactggcgcgcgcccccgg

SEQ ID NO: 281736 - DNA, 122 bp, Homo sapiens
aggacgcccaccgagtcctggcagcgttgcaaggtggggagggggcgggcgcggtcctgtcgctagtgactgcagatttcctctgcggggcacttcctacggcctttgatctttccccagga

SEQ ID NO: 281737 - DNA, 122 bp, Homo sapiens
cgactctaggcggtcattcactttgtccccacccaaactctgatgagctatttgggagtgcgcggggactgggaagtgagggacttttataacattcttctttcgactccggcttccgagcc

SEQ ID NO: 281738 - DNA, 122 bp, Homo sapiens
gtatctaactaatctgatggggacgtggagaacctttgcatctagctcagggattgtaaacgcaccaatcagtgccctgacaaaaacaggccactgggctctgccaatcagcaggatgtggg

SEQ ID NO: 281739 - DNA, 122 bp, Homo sapiens
gtgaagtatgtgtatgcctacatataatttcacctaaagtacaaaactgaacaaaaccagcgttataagtcaggggactggtgaccctttgtagggtggaggtagtgacaggcaggagcacc

SEQ ID NO: 281740 - DNA, 122 bp, Homo sapiens
cactcgggtttggcaggtggaggctccaaatatccacggaacaagttctgttgcctggcccgaggggtgcacagagtcctcgcggctggagcctgggggtgggggttggggctgccccagag

SEQ ID NO: 281741 - DNA, 122 bp, Homo sapiens
gacgaggtgcagaacgcccagcagcgcggggtgtttggccgagtcctcaccgccttctcccgggaacctgacaaccccaaggtgtgagaccctgagggcgcaatggtaacctgaagataggg

SEQ ID NO: 281742 - DNA, 122 bp, Homo sapiens
gccggccgcgagcctgctggggggcacttcggggctcaggctccccgccctgcgggaccgcgggtggctgcgaccccagcccggttccccgccagcctgtcccctagcaatgcctccccgta

SEQ ID NO: 281743 - DNA, 122 bp, Homo sapiens
atctatgaatattacatgtgtgattatgaaaggtgaagttgagtgagaggagttgaggaacgtggaagacagtgagctctcaccctaacactataagaagcatgatctcaatagaccaataa

SEQ ID NO: 281744 - DNA, 122 bp, Homo sapiens
ttacctgtccatccaggcatgcaggagcactgtgggcggcccgaggcctggatgtggcagcggccccttttggaacagaaggagggaggacaagggtcttcaagcttggcctggcatctctc

SEQ ID NO: 281745 - DNA, 122 bp, Homo sapiens
tttgtaaatttcagggaccatgtggatttcaaagcactttataaattataggctttaggccgggctcacgcctgtaatcccagcactttgggaggctgaggtgggtggattacctgaggtca

SEQ ID NO: 281746 - DNA, 122 bp, Homo sapiens
cgacccttgcccgcctcagctctgcactgacactggggtcaggtcttcgttttggaatcccgggccgggtacttgctttggtcaagactgcctttggtgcccgctgctttcccatgttgaac

SEQ ID NO: 281747 - DNA, 122 bp, Homo sapiens
aagaaaacaatttggaatgaagttgtgagcgtgcatacattttaacattgacttttttcccgcaggatattgaagtaacatcatctcctgatgatagcattggttgtctgtcttttagccca

SEQ ID NO: 281748 - DNA, 122 bp, Homo sapiens
aacggaagggcggtgcgtggagggaactcaaggcctgattggttcctcctaagcaggatgcgatctggttggcagggcaaccggccttcagttagtgccttcagtgggtgctttcagttggt

SEQ ID NO: 281749 - DNA, 122 bp, Homo sapiens
aaacttagatgatttccgaagatcttaataatcaggacaaccgtgaacttctcatgcaaccgtcaatgcctgagacaatggagtgaaagctaccagatccttaagagaaaagtgtcccccag

SEQ ID NO: 281750 - DNA, 122 bp, Homo sapiens
gattgataggtgcttagcttccacatcaccttgccctgaagaaacaactggtgatcaagtcgtggtgcggcgccacagaacatccacaattatccaatgctgctgcattcaaagagggagtt

SEQ ID NO: 281751 - DNA, 122 bp, Homo sapiens
gcaggtgtgcaggtagggtgagtggcgcggagggttgggggttgctccgtcatctctgcccgtgtgcaacttgcagttttgcagttttctgcagcagctgaggcgctggcgcgggaaggcgg

SEQ ID NO: 281752 - DNA, 122 bp, Homo sapiens
gacaaggtgctcggcggctgggctgtcaggagcggcccgacaggcagcgggacggggggccgtacctttgtacttctcgcgcacctcctcgtaggcctggatgaagtcctgctcgtcgggca

SEQ ID NO: 281753 - DNA, 122 bp, Homo sapiens
aatatggccaagaatttgtattttccattactctcttgtctcatgtccatgactcttgaacgccagtctgtgggcgctgagattttcgtggtacatcgacggtttgtagacatcttttccca

SEQ ID NO: 281754 - DNA, 122 bp, Homo sapiens
catcatgtagcccaggccgaagtcaaagcggcattgctcgttcatggagtagtgcagtcccgggagctggggcagcgccggccagtcgtgggcgaaggggtcatccagcaggcagtcatagg

SEQ ID NO: 281755 - DNA, 122 bp, Homo sapiens
catagcaactcacagtggtcccctcttcttggagcccatagtctagtaggcgccctctcccgcacatcgcagcctctcctttcacctggcatcatacgccctgtactcccaatctcctacgc

SEQ ID NO: 281756 - DNA, 122 bp, Homo sapiens
gccgatgctgagatgatactggaagtgcccatcatcccacatctccagggcctggcgcggcgtcccagctgcgctccctgaagggctgggcaggaaggcgacggcctcccgttgttcctttc

SEQ ID NO: 281757 - DNA, 122 bp, Homo sapiens
ttcaaaatcaagccacagaacgctgcctggcgagttgctaagtgtgacttgtggggaaatcgtgtctgcggcagaaacactggaccttgtgagtaattcccgatgcccggtaggcagctggc

SEQ ID NO: 281758 - DNA, 122 bp, Homo sapiens
agtgcgacactgtgttggggtcttcgaggtctcttggtggtcatatgactatgatgcactcgaggaactcatgcaaaaccctcaaatgtcctaaatgtaactggcactacaaatatcagcag

SEQ ID NO: 281759 - DNA, 122 bp, Homo sapiens
tggcaggggtgggccgggggcggggccgcgggcgtcggggaggtggcagtgggcgcagggcggggcgagctcagcggagggcgggtttgaatgtgccccggcgggagagggaagctgcagcg

SEQ ID NO: 281760 - DNA, 122 bp, Homo sapiens
gaggctgaggtgggagaatcacttgagtcctggagttggagaacagcctggaaagcctggcgataccccatctctatttagaaacaaacaaacaaacaaataaaaaacctggcacctcggtt

SEQ ID NO: 281761 - DNA, 122 bp, Homo sapiens
cccgccctatctcaacaggtgaatcgctccaagtgggtctcggttgcatggatctcggtgcgcttggtttggccggagcagatgggggccggaagggacctgtggtccgcaggcgccctccc

SEQ ID NO: 281762 - DNA, 122 bp, Homo sapiens
ctggggcccccggaatctcacgttccctttactcgccaggcatttcggggcaaaacgaagcggagccccccaaacccccagacctaaccaagttcagagattcgcagaagcacgccccccac

SEQ ID NO: 281763 - DNA, 122 bp, Homo sapiens
ctggctgcgttcgccttgggaaaacacacttttaagaatggccaagtacctcagcagtcgcggtgaactgcacaagatcaaaaccaccacgccaacccagcgctggccaccgtccccgctga

SEQ ID NO: 281764 - DNA, 122 bp, Homo sapiens
catgttgccgccgctcctattaagatatgaaattgtcccaccactgccccaaagttcccccgctcctgtgcattccattctgtcctgttccactcctttcccaggcaactgctttgcatcgc

SEQ ID NO: 281765 - DNA, 122 bp, Homo sapiens
ccccctcgcccggcccggcgcccactagccacagggcccgcttccccctggagatcagcgcgcacttcccgagccctcgtagcactcagaggtcgcatccacacctgggatgcctagggggc

SEQ ID NO: 281766 - DNA, 122 bp, Homo sapiens
ttcgtgcgggaggagccgtggcctgtggggtccccagttcctcctcccttaggcggtccccgtttccttcggagtcttccaaaggtgtgggaagctgggtttcaaacccacgaccccgtccc

SEQ ID NO: 281767 - DNA, 122 bp, Homo sapiens
attggctagatccgccgcccgtcagacgagcccccggggcccgcccccagccctgagctgcgcctcttagctctggggccacagcgccagcgccactctgccaggctcccggccatcgcccg

SEQ ID NO: 281768 - DNA, 122 bp, Homo sapiens
gcaccagccccctgcccacaactgcgcaggcccagcaagcccccacaattaaaagcccagcgccgacccttcctgtcaattaggcgctgaagcgcaggcggtcagcatcgccatggagacca

SEQ ID NO: 281769 - DNA, 122 bp, Homo sapiens
ctaaatgccaagggggactgtaagtcactgaggtgacacaaagcagccatgggttttcctcgccttttttatggggaaaatgcacctttcaatcctagaagataattggacttggcaaagtc

SEQ ID NO: 281770 - DNA, 122 bp, Homo sapiens
tgagacgctggtggctgcctcggggttggcctgctcctcgcgcacatgttcagggtcatccgcgctgcgcctctgcttcaggtgcttggctagagaaagggcggcaagacggggcagtgcgt

SEQ ID NO: 281771 - DNA, 122 bp, Homo sapiens
accctctggggccgggagcagggagcgagacgctgagcttctgcgcctgcgccctagcgccggctgcagcctcctcacttcgagagcctgctgtttccgcggatgctttaccttgccaagag

SEQ ID NO: 281772 - DNA, 122 bp, Homo sapiens
tgaccgcgagtgatgtgcccgcctgggcctcctgaggtgccgggattgcagacggagtgtcgctcacccaggtctcaatcttgcccaggctggagtgcagtggcgtgatctcggctcgctac

SEQ ID NO: 281773 - DNA, 122 bp, Homo sapiens
cgggcctgtccgtcaagcgtggtcccgcccctaactcgtcccgccccgctgaggtcgtggcgaagtcatcagggaccagttttgtgctttccatggttggattgtcattctttcattcgaca

SEQ ID NO: 281774 - DNA, 122 bp, Homo sapiens
gataatatgagttcatcctttcatgcgttttaggccctacaactactttcaatgcctctgcgaatgcctttattgaaagcatatttgccaaatccagcgtccacgcaaaaagttaagagtat

SEQ ID NO: 281775 - DNA, 122 bp, Homo sapiens
ctccttgggcctcttcctttttaaaaataacatgtctactattagaaattaatttctggccgggcgcggtggctcatgcctgtaatcccagcgctttgggaggccgaggtgggtggatcact

SEQ ID NO: 281776 - DNA, 122 bp, Homo sapiens
gggattttcacggggactcagtccagaggaagttgagaaaaccaacttaaattacggtctcgatcgccatctggcggtggaagtccacattacatccgcggagcaatggctgggaacgttgc

SEQ ID NO: 281777 - DNA, 122 bp, Homo sapiens
ttattatttcacctaggtgttaaatgaatagcacagtaagaaaaaatatttttacctaaacggtttcagccacaggctaaatctggacaagggccaccactatgtttttcttaaagatacac

SEQ ID NO: 281778 - DNA, 122 bp, Homo sapiens
ggaagtctcgggctccggaggtccctctgccgcccctaacccctgcggcgcccagtgccgcgcagagccgcattcgccctcctgcaggggtgggcatttcctaagtcctctccagccccgtg

SEQ ID NO: 281779 - DNA, 122 bp, Homo sapiens
gactgggacgtgggactcggaccacggcctgggcgtgggcctaacgacgcgggaccggcccgccctcgccgctccattggccacatctgtgcagaaaaggccccgcggcccaggggcgcccg

SEQ ID NO: 281780 - DNA, 122 bp, Homo sapiens
tattctggattccagaaaacttgcaaacagggccaatacatgcatctttatatttgtgtccgttttgaactggttaaggaaaatttcaacaagaaacccagagtgccggagcaagaagatct

SEQ ID NO: 281781 - DNA, 122 bp, Homo sapiens
gtactgataggggtcctggtcttacgggagaacaggaacatggtgtggtcttggagatgccgtggtgggctctacctgtcaagggctcctgctggacatcagtgaccacccttcccctagac

SEQ ID NO: 281782 - DNA, 122 bp, Homo sapiens
gatccagctgtgtctgcactgcctctgcagcctggtagaaaccaaggcagcctggagagtcggcacctggtttcctgggcagagcccactgggaggagagctacgggatgatgctcagtcca

SEQ ID NO: 281783 - DNA, 122 bp, Homo sapiens
ggagctcgcgttcaggttcctgttattcggactatgctgggccgggaagggcgcacggaacgggacctatggcctacagactcaccgcgccctccgtccccgcccacgcctagggtaccatc

SEQ ID NO: 281784 - DNA, 122 bp, Homo sapiens
agtaggggcgaggaggcctcggcggcccttgggctctgcgggctggggactcggggtgcccgcgacacgcgcggaggcgcgggctgggttggccacgggcagggagcgcagccgcgctcctt

SEQ ID NO: 281785 - DNA, 122 bp, Homo sapiens
tgccgcccgtgccctgcggccctgcacgccccacccgcggtcgcgcgccgcgctccccgccgcctcaccttttcgcctggcatccgggcccgctactcgcccactgggagcgccgtggcgcc

SEQ ID NO: 281786 - DNA, 122 bp, Homo sapiens
gcacttccccctgtaccagagggtcgaataattccgttaccatgtccttcatctgggccacgccagacaacaggccctggaaagggtcgccgtcacccggcgcctcacaggacacccgcagc

SEQ ID NO: 281787 - DNA, 122 bp, Homo sapiens
agtggggagagctggcctgcccacggggcatcgctgcacgtggtagggggtgacctgggccgaaggaggataccgggcctctgctagggcagggaggccaagggagtttgggccggagggga

SEQ ID NO: 281788 - DNA, 122 bp, Homo sapiens
aatttctaaacgaagaagcaaatatgaccacgggttcccggcctcgtgtgggatgagactcgtgctgtctaggagagaaaatctgtaggtttcactggttttagcacatccctaaaatgtat

SEQ ID NO: 281789 - DNA, 122 bp, Homo sapiens
agattgatcagttgttctctcccatcacggggctctcattttgctcaagtcctatgtcatcgtccctcttttcctggagagcaggagctgacttcagacgccagatcttcttttcctgccac

SEQ ID NO: 281790 - DNA, 122 bp, Homo sapiens
ccctcggacggctcccatcccacagcccgagccccctttcattcacggcgaggaggccctcggggaacccagccctctcccggcagcgacatctaagaccttagtaggatgtacgcaccccc

SEQ ID NO: 281791 - DNA, 122 bp, Homo sapiens
agacactattgtcaacattgagacttctgtacccaaaggttattttagagaaagattcatcgttatgtttgaagctggaagatagaatgcactcagctacatgtgctttctgtgaaatgtag

SEQ ID NO: 281792 - DNA, 122 bp, Homo sapiens
cgaagccacctgcgaccccagctcacgccaggcagaatggagccgcctgaacccagctcacgccgggcagaatggctgggatcaaataaaacacggaaaaatgacagacgctgcagagctgt

SEQ ID NO: 281793 - DNA, 122 bp, Homo sapiens
gaaattaagtgtactggccaagatcatgtggccaacaggtgttcaaatcttggactaacacgtcccaggcctaagctctttaatactttaaaatgaaagcttaggctgggcgcggtgactca

SEQ ID NO: 281794 - DNA, 122 bp, Homo sapiens
gtccggaggacagggacgtgacatgctgggatttcactttcttagttctcactctgtaatcggtagatctcagtgagttctaataaacaggtccctgacaactgcggttaagaacccggctt

SEQ ID NO: 281795 - DNA, 122 bp, Homo sapiens
tcgtccacccgacccgaatgaattggcaggagccgcggccacatttaaagggccagagcgcgcgttccctcccgtccgcccccaagccccgcgggcctcgcccaccctgcccgccgcccctc

SEQ ID NO: 281796 - DNA, 122 bp, Homo sapiens
ttgccccaccccccaccccagaagtatgggaagctgagatgctgactccctagaaaggagcgggccaactggaacaaagtctcatcagagatggaaggtccccaggagccagcacctgagct

SEQ ID NO: 281797 - DNA, 122 bp, Homo sapiens
aaacccacctgaattgcttcaacgtctgcacagccctttctgggaccctggctggcgcagcgcatgcagagttaacgccaaccttgagcagctctctctgccctgagtaaggttattaaaca

SEQ ID NO: 281798 - DNA, 122 bp, Homo sapiens
aggggggcaagcgcctggaggacccggcgcccgctccaggccctgcccctccaagtcccccgccccgcgccaggccccgcctctccagggccccagccccgcgccaggccccaccgttccgg

SEQ ID NO: 281799 - DNA, 122 bp, Homo sapiens
aggctggaatttgctttggaaattaattgcctgttgaattcttcccaccacggccgtaaccgtgcaggatccagggcatgtgaggagggctgtgaatgggcttcctctggcccatttcatca

SEQ ID NO: 281800 - DNA, 122 bp, Homo sapiens
gggggtacctgttgggcgccggggtctgggttgcccccgcccagcctggccagcccctggcgcaactcgtgcacgtccacgcggccatccttgttactgtccagctcctcgaacaggcgacc

SEQ ID NO: 281801 - DNA, 122 bp, Homo sapiens
aaaacagtctgagagtcagagttatggggtatctgaagcttgatccccagccacacaggtcgggttaaatggctctggctcagtggcaacgcctgtgcagtaaccgttactgcttgatgacc

SEQ ID NO: 281802 - DNA, 122 bp, Homo sapiens
ggcccccaaacaacacgtagcaactccaaatgtaattgcttactggccctggcgagaaaccgacagcagcccagcagcctgtgtgattttgataatgccccaaatattttgtcataataaca

SEQ ID NO: 281803 - DNA, 122 bp, Homo sapiens
cccccccgtgacccccacgggtgactccgagaccgcccccgtgccgcccacgggtgactccggggccccccctgtgccccccacgggtgactctgaggctgcccctgtgccccccacagatg

SEQ ID NO: 281804 - DNA, 122 bp, Homo sapiens
tccagtggaactgtgtttgttgggaaccaggtcgttcctccctcagatatgtagtgagcacggtgcacggcgttctaggcactgcagaggcagagaagaaatgaaacatacatggagcttac

SEQ ID NO: 281805 - DNA, 122 bp, Homo sapiens
tctcccacgacgccgggaggtctgcatgcactgggcgctcaggtctgcgcgaagctgtcgcgggagcaggcaccttgtggtcagctctgggacccgcatttgcagtgagtgcgtggagcccc

SEQ ID NO: 281806 - DNA, 122 bp, Homo sapiens
cttccttgctgaaactgccggcgaaaagatctctttcccaagcctcagagtacctggaggcggggcgcagagtcgcctgctctggatccggcgcaggcaattcaggaggagccgcaggagcc

SEQ ID NO: 281807 - DNA, 122 bp, Homo sapiens
gataaatgaggcctcagttttgtggtcaagtctgcactaatttttgccttgtgtgatgtgcgaatttgacaaaaagaggcgctggattgaggagtgggatgggaagggggaggcacctctac

SEQ ID NO: 281808 - DNA, 122 bp, Homo sapiens
ggaattgctggccagcccagatacctttactgggaggcaggaggtcttggttccgcttctcgctctgcatagacaagccctgcaccagttctgatccttcagccacctcactgtccctgctg

SEQ ID NO: 281809 - DNA, 122 bp, Homo sapiens
aagcggcttaaaaatctccctgcgaggtcggcttgtcgctgtgaaacatggcttcccacccgtccccgccgcacacctgggcccctcaaaggctagctgacccgcctcgcctcccgccacct

SEQ ID NO: 281810 - DNA, 122 bp, Homo sapiens
cgtacaacgctggtgccaacaagactgacacaggagcccattgtcccgcgaacaatgtggcgatggggaaggacgcctgagaaaacagaccccggccccgtgagcgcgtttgtttgatcctt

SEQ ID NO: 281811 - DNA, 122 bp, Homo sapiens
tgatggctgttctgcagatcaggccaccaataaagttattgaaattgaagccgcacccctcgctggcgaccagcgattcctcctaaaatggctacaaggccggcggcgcggagtccgcccag

SEQ ID NO: 281812 - DNA, 122 bp, Homo sapiens
caatgggcggccggcagaggtgggggagtgaggagcacaggctccgtgtgtccaaagtcccgggtcacctcggcctggaatccatctaactcagctgcaaaccagaagacgcggcctgggag

SEQ ID NO: 281813 - DNA, 122 bp, Homo sapiens
tagtttaatctttggtgtccgtttcaaggaggctaaattcctgtctggggtatttttagccgtcctcaggaaggggaagctccgctgggcgctggggggagggggacgccttgcccggagcc

SEQ ID NO: 281814 - DNA, 122 bp, Homo sapiens
atttgcaaaattcacagaatggtatggtaaacgctcatatccctagcacctagcttttcccgtaagcatttcactagctttaatgttatcccgtgtcttttgtctctcaacccgtctaatct

SEQ ID NO: 281815 - DNA, 122 bp, Homo sapiens
ctgctcaagcaccagaagacccactcccggcccgccacccactcgtgccccgagtgcgagcgctgcttccgtcaccaggtgggcctccgcatccaccagcgcgcgcacgcccgggaccgcca

SEQ ID NO: 281816 - DNA, 122 bp, Homo sapiens
gaaagagctgccgtccgcgggcattaaccctccatcttcctgcacatcactggagggaaccgccgcgcagcccagacagccacgcaggtggcgacttcttgagcccttccccctgcggtgtc

SEQ ID NO: 281817 - DNA, 122 bp, Homo sapiens
catacatttctttcatgacactatttttatacaagattactttaaatctgtagctaactacggtctgcttgtggtgaagtaaagtggttttagtccacagagatcttttttggaaggttatt

SEQ ID NO: 281818 - DNA, 122 bp, Homo sapiens
ttcctttctcacagaaaacaaacttccggatgggtattttttttcttgggtgttttaaaacgataaattatttagaagagggaaacagggtaagcacacttgctgcttgtgggtggaagttc

SEQ ID NO: 281819 - DNA, 122 bp, Homo sapiens
gtggccaatccttgctctagccttggtagaattcgggatcagggctctgattaggaggagcggttagccctcgggatgcggtacggggagacattgaagctggctccttcctccgcgtctca

SEQ ID NO: 281820 - DNA, 122 bp, Homo sapiens
ctcagcctccgggaccggaccccgaaagaacgacctcgctcccgcccaccaccccctccgcgcccacacgcaccctccggacctccgggcggccgctccaccagccttatccacccgccggc

SEQ ID NO: 281821 - DNA, 122 bp, Homo sapiens
ccgctggagccccgctgggcgaggaagtggctgtaagggccagagagggttcccggccgccgggccccgcaggcctggcctccgaggagacgcggatcctggggccccgcggcgggggctgc

SEQ ID NO: 281822 - DNA, 122 bp, Homo sapiens
cattccccatcggcctccagtgctcctgtgtgcactgtcagtgaccaggaggacctcaaacggtaatcccagctcctctctctcagtttctatgaggccgccaagccaagcagacaggggag

SEQ ID NO: 281823 - DNA, 122 bp, Homo sapiens
tctttttttttttttttagacggagtttttgctcttaccgcccagggtggagtgcaatggcgcaatcttgactcactgcaacctctgcttcccggttcaagcgattctcctgcctcagccta

SEQ ID NO: 281824 - DNA, 122 bp, Homo sapiens
gcaagggcagtgagggggccagcaacccaggaggggcctcctatactcaggccatggcgtcggtcttttcaggaatgacccctcagggactgcaaggaccctttgagaggcaacactgggca

SEQ ID NO: 281825 - DNA, 122 bp, Homo sapiens
acttgggcagagaggagctctgggaaaatctagttgtcaacacgtatcaccctgatagggcgttatttaaagtatccatttattagcaagttcacttttgtttgcttgttttgtttttaaaa

SEQ ID NO: 281826 - DNA, 122 bp, Homo sapiens
ggagcccagaccccatataatacattacatgtacaaagtggctttcagccagctcctgggcgtctccctggggctctcctaccacctgttccatgccaaattcctgggtccttggacctctg

SEQ ID NO: 281827 - DNA, 122 bp, Homo sapiens
cagaattagcaagtgtggatcaacagatacaggatttaagaggcatcataagtttgcaggcggtagctgaaactaacaaatgaggtaaccagaggaaaaaggtgtaactgtgtgtgtgtgta

SEQ ID NO: 281828 - DNA, 122 bp, Homo sapiens
taggatttatgttaaatactcattcaaattattgcttcaagcaaattacatacacactagcgacattttctttcaagccgggaggaaatcactcaacattcagatgaggaagtgtgattttt

SEQ ID NO: 281829 - DNA, 122 bp, Homo sapiens
ttcaagcgattcccctgcctcagcctcctgagtagctgggactacaggcacacaccgccacgcccggctaattttttggattttagtagagacagcgtttcaccatgttgtccaggatggtc

SEQ ID NO: 281830 - DNA, 122 bp, Homo sapiens
ctcgatctcctgaccttgtgatccacccgtctcggcttcccaaagtgctgggattacaggcgtgagccaccgcgccaggcctctcatggcatttttgcagctctaaagagcggcaagagaac

SEQ ID NO: 281831 - DNA, 122 bp, Homo sapiens
cgagggcttcctggggaagaggatgagtttggagcggtactccttcagccgctgcacgttcgcctgcagggactccgtggacttgttccgcctcctcggatccacagaaatgccgatggtcc

SEQ ID NO: 281832 - DNA, 122 bp, Homo sapiens
caaagtaaaaaaaacggaaaagaaatctcccaggagaaagggatgtggaagctgaaaacacggacaatttccacagtaagacttccaaaagaatgtgcaagatccgagcaaaactttcaagg

SEQ ID NO: 281833 - DNA, 122 bp, Homo sapiens
caccctcgcccctcgcaccccagcccagggcggcggggactccgagagccccggagagaacgtggcccagccctggagggcaggcggccactcccccagccagaagtctttttttcttttct

SEQ ID NO: 281834 - DNA, 122 bp, Homo sapiens
ctcaagccattctcctgcctcgccttcccaaagtgctggaattacaggcaggagccactgcgcccggccagtgctggagaatgtaatggagatgatcctgcctatccctgagttccagtcta

SEQ ID NO: 281835 - DNA, 122 bp, Homo sapiens
tgaaataaacactattttgacggctgtcttttatatttctgagcacacacagagccctggcgtccaccggggcaggcgcaaagtggacagagcatgcagggcggcggacccccccacgaccc

SEQ ID NO: 281836 - DNA, 122 bp, Homo sapiens
cttttttccccctttatttaattttgtccttgcctttgcttcgcgctgcctttttctctccgtctctctctcccccacaatcccaaaccgttgactctttcctcgcgagctggagaaatcat

SEQ ID NO: 281837 - DNA, 122 bp, Homo sapiens
cagcacctggcatccatcctggttcctgcaactctgtcatcacctgactgttaaggagcacgattcacctggaaaggaaagggttagagataatctgctccatcatcctcacaaatcctggg

SEQ ID NO: 281838 - DNA, 122 bp, Homo sapiens
ctgggttgcaaagccaggcggagccttgcgtcctttctgtgggatccattccgacacaggcgtaggtgtgctggggcgctcagtgccaggctgggaagagcgctggggccagcccaccaaga

SEQ ID NO: 281839 - DNA, 122 bp, Homo sapiens
tttgaggtgtaacaaacacaactcgggatccgagaggacactctgcggctgccagcgaggcgggctggacagcgcaccaatcacggcgcagctccgccctatataaacgggcgggcgcagcg

SEQ ID NO: 281840 - DNA, 122 bp, Homo sapiens
tctctttttccagagctgctgagcgggccgggccggtcccactgcgcgggatgcagctcccggctcccactcactggccgaggcgggcagagaaactttcggcctccccgcccggccgctgc

SEQ ID NO: 281841 - DNA, 122 bp, Homo sapiens
gaggacgctgtaggggctgcgctgcttgtagattttggggacgctgggcccctcctctgccggctgcatctcttcctccatccggcgcctcggggccggtccctcggagcacgtcccctccc

SEQ ID NO: 281842 - DNA, 122 bp, Homo sapiens
gggaatcccacctgcacctgttccagtccccaaggcaaggcctggtggtgcgcacgtgttcgcgtagcaatcagatgcactgtgagactcgggttatttagctccagtggcgcgatcttggt

SEQ ID NO: 281843 - DNA, 122 bp, Homo sapiens
aggccctcagccagccttgtacccacaggcccaacaggccacttggctatgaggccagagcgtcgccataggggcccgaacgctagcgtttagggaatccgcaggctagaagtggaggcggg

SEQ ID NO: 281844 - DNA, 122 bp, Homo sapiens
taggcattgtggtctctttggcttcagaaattaccaagaaagcctggaccccgggtgaaacggagaaatggacacaagtcccctgtgtttctccattctgttggttttatgcatctttatcc

SEQ ID NO: 281845 - DNA, 122 bp, Homo sapiens
agatctggaagcctgagtcccctcccaagcggttaagaggcgggcttgggcgccctctagcggtgatctgtggtaaccgttccctactcagcggcagcgccttgagttgaaaatgcatttat

SEQ ID NO: 281846 - DNA, 122 bp, Homo sapiens
cttaaaacaatgaccatcttctgaggatgctctgcttaaagcatactggggaaggaatagcgggcttctcagggccatcagattgattacaagaattcagagttactaaaatgaaaatggcc

SEQ ID NO: 281847 - DNA, 122 bp, Homo sapiens
tacccggccaggaggcacgtgcggcagcagaactgaatgaagagcttccgttcgcacagccggttggacttcaccatctcgcagaatgtctcgtcagctggggccccgcatcaggaaaggca

SEQ ID NO: 281848 - DNA, 122 bp, Homo sapiens
gcaagggcccatcttctcatatataccagccggtgtttatttctttgtttgtttttgagacggagtgtcgttctgccacccaggctggagtgcaatggcgcgatctcggctcactgcaacct

SEQ ID NO: 281849 - DNA, 122 bp, Homo sapiens
agctttcctttttttatgaaaattgataatcgatggtaggtagatggtacttgttttggtcgatagtttggcaggaaaaaaaagttgacaagcctatcttagtgccacagaaaccttttaaa

SEQ ID NO: 281850 - DNA, 122 bp, Homo sapiens
cgcagccgcctccaaaaggacaggctccctcctccccgccctccgcaagggccgccccggcgcttggctctggaccagaaagagctggcctctggggtctgcgctgccccttggggtccgct

SEQ ID NO: 281851 - DNA, 122 bp, Homo sapiens
cgccccgcgccgtccccgccggccgccccgctgatgccgctgccccgcgcggggcccgagcgccgctagcagcatgtctcggcgcaagcaggccaagccccagcacctcaagtcggacgagg

SEQ ID NO: 281852 - DNA, 122 bp, Homo sapiens
caagtgtgtgctgggaattcgagactcactgcccagtggagccatcccctggcctcagagcggtaggggaggcccaggccacacaaaccacactgaagcaggagggaaggcctggtgtcctc

SEQ ID NO: 281853 - DNA, 122 bp, Homo sapiens
ttctagacccaaggccacctcagggcagaatcagcacctggaagcttccctgacgagactcgactctcaggaagctcaaggtagcaatgagtgtatgactcagggtgtcctggaacaggaga

SEQ ID NO: 281854 - DNA, 122 bp, Homo sapiens
ccagacctagaggaagcttccctcctcccggccctcggctcagccacccacttgtcctcacggggctgccccaccagccagcaggcctcctccacggtgaagcctggaaacccctgctccac

SEQ ID NO: 281855 - DNA, 122 bp, Homo sapiens
cttcccagacttggtggtgttgccgcagtgggcggccacacaacgggccggcatggcggccgtcttcggtgcgcgggagccgggttccctggaccttcgcccttgggcacgctcctcgcagc

SEQ ID NO: 281856 - DNA, 122 bp, Homo sapiens
aaggcttggcccgatgctttccggcagatgtagtcagcaggcccttcgtgtgtacgtgcgcgcgcggcgcgatgacgttcctctgtgatcatgggcgaggggcgggccctgaacgtctccat

SEQ ID NO: 281857 - DNA, 122 bp, Homo sapiens
gtgcacaggtgtgtccatgtgaccggcttccccacacatgtgccaggcgcccagcacccccgccaggtggcctcactctgccctctgcccaggaaagcaggaaggccccgtggtgtccgctg

SEQ ID NO: 281858 - DNA, 122 bp, Homo sapiens
ttctgcctctcttcctttgcctgtcagttttaaaaataagtatcgtagttttataaaaatcgagtaccagaatctttacagttccacatggcatagctgccacccaagtcgaacgtgaagct

SEQ ID NO: 281859 - DNA, 122 bp, Homo sapiens
tcactaagccctaatggagtgcttcattaagatcgcttcaaaggcccccgtttacagactcggagattgactaatttacacattgtgggaaaattgctaccagctctgcccacaccccagca

SEQ ID NO: 281860 - DNA, 122 bp, Homo sapiens
gtgaacttgtccaggagcgagatgtggccggtgcccatccatcccatatgatggtaaactcgtccaggaagtatgcgacgtggccggcgcccatccatcctgtatgacggtgaatttgtcca

SEQ ID NO: 281861 - DNA, 122 bp, Homo sapiens
gccggggctctgcggagtgaggcggaggctgcagccgccagacagaggcggcgggggcggcgggcgcggggtcaccggcgggggggcgcccggcggccggaggggggcgggcgggcgctgtc

SEQ ID NO: 281862 - DNA, 122 bp, Homo sapiens
ttatttcaggttcccaggttggtcattcattttatttcagcaaatgagtagtaagtaggtcgaggtagtaaaaagaaatacctcattttagtgaaagagtgtcttaagcaattgcaatataa

SEQ ID NO: 281863 - DNA, 122 bp, Homo sapiens
gccccctgcccctactgtttgaccggagcctctggcccctaccttgctgcaggcgagtgtcgctggaccacttggtttcagccacgggtccttcgtcattcatcaccaggaacttcaccctg

SEQ ID NO: 281864 - DNA, 122 bp, Homo sapiens
tcccgcggcctgcgctggacaagcgagagctggacggaaacggtgggaggccgtaggcggcggctgggggcgcgggacccgcgcgcgggcgcggaggcgggcggggaggccccgcagcccgc

SEQ ID NO: 281865 - DNA, 122 bp, Homo sapiens
cgtgacattttatcacacaagaccgtgttcggggatggggtgttctgagcacgcccttaccgagccaggctcacccagttccccatctagagctccctgctggcatctctcacctgggaccc

SEQ ID NO: 281866 - DNA, 122 bp, Homo sapiens
tgggtgacccgggcgcgcgctgcccgaggccggggggcggtggggacagcacaggcggggcggccgagccgagaccttcccaccccgccccacgcctggttggggacctgacgcgccgtcgt

SEQ ID NO: 281867 - DNA, 122 bp, Homo sapiens
atacaggaaatacggtaagagcgaaacaggaggaagccagctctgtgcctggaggggactcgccgccatctcaggtctcttggctttgccagggcccaccggagaaaactgacgacccgttt

SEQ ID NO: 281868 - DNA, 122 bp, Homo sapiens
taaagctggcgatgatgttggtgctcttgaattcctggtagtagccaaagcagccggtgacgacaaccacagcaatgagagcgattgccaggtacagctggggacagggaaggggtggggtt

SEQ ID NO: 281869 - DNA, 122 bp, Homo sapiens
tgccaagcggccaacaggagcctgggctgcctgtggtgtgctgacggccagcctgcctgtcgctatgggcccttgtgcccgccgggggctgtggagctgctgtgtcctgcgcccagcattga

SEQ ID NO: 281870 - DNA, 122 bp, Homo sapiens
ttggaactagcatcatggtatacactgtcaccttcttgaaaaactcaagagatttatcagcggatattattttatgccatctcattgttcaaaaaataagttttaatgtaaccccattgtct

SEQ ID NO: 281871 - DNA, 122 bp, Homo sapiens
cttcctcctggcctcggccgggcctgcaccgggaggctgagcggcgccccaccagggatccgagatgccctcgggagccaatctgtgttcttggcggaccacaccccgctgtctgtagccaa

SEQ ID NO: 281872 - DNA, 122 bp, Homo sapiens
gtcccgctccgcccccaacttttctccccggaggatttatgttagaggttgcgtggcgggcgagtggactctggcacccagaagcacttcaggaaaaactgagccgggcaaaagcgcaaacc

SEQ ID NO: 281873 - DNA, 122 bp, Homo sapiens
gcccacttccaggatgtgggtcagagaagagaaagtgttatgtgtgctttcacatgagatcgtcagagaggtgaatagaatctgacctatagattgttaacaaacccaacggaaaggagggc

SEQ ID NO: 281874 - DNA, 122 bp, Homo sapiens
ggcactggtgagagcacagtgggtgagtcagagccggccctgccgccgggccctcggccgcgcccctcccagccccattacctgccattacctgttggggccaaaggcgccgtggctgctga

SEQ ID NO: 281875 - DNA, 122 bp, Homo sapiens
atgcctcagtggcagtttggagctcaccggatctggcagccactaatgacattgtgagggcgactgttgcaccatccagctacactgtacacgtaatgcaagttacaaacaaacaggacaga

SEQ ID NO: 281876 - DNA, 122 bp, Homo sapiens
aaagtccctaaaacataagctatgtgcaacaagggaagtgggttagggtgggaagctgagcgtgcaagtcagacaaagcctgatgtaggcagctcctatcagaggcatgtggcctttgtggc

SEQ ID NO: 281877 - DNA, 122 bp, Homo sapiens
cccagggtctctggccccacagcctaggctcaccctgcacctggctcagcggtcagccggcgccccagcacctgccccgcggagcccgtgagccctggctcagggcgaccccgagccgcgcc

SEQ ID NO: 281878 - DNA, 122 bp, Homo sapiens
gtggttagtcaaggtctggggtgggccggacatctacattttatttatgagacagagtctcgttctgtcgcccaggctggagtacagtggtgatctcagctcactgcaacctccgcctccca

SEQ ID NO: 281879 - DNA, 122 bp, Homo sapiens
aggatgaacgaatctgatcaggcgcctcgggaccaccctgaaaatggggggaggggccttcgggcagatcacgtggtcaggctgttagcgcagttgctaggcaaccacagctgcgggcgtgg

SEQ ID NO: 281880 - DNA, 122 bp, Homo sapiens
ccgggggctatgcgcctctggtttcgccctcccgcgcatattcgacccttacgaggtcaccggaatgcccctgctcctcagttgccttctatacaggatatcgatcagggtattttgttata

SEQ ID NO: 281881 - DNA, 122 bp, Homo sapiens
gttttccaggaagtcgaggtcattcagattcaatgctcagacggatagttaacggttgtacgtcaattacttgctgaattgctgagaggagcctaacctcaagcttacttgttaacagagta

SEQ ID NO: 281882 - DNA, 122 bp, Homo sapiens
tctgcctctgtccacaaagatgagggaaaatgatgactgtgctgtgctctctacttcctgcggttactgcgtgattctaaagctgccactcggaacagcgagtcctctgccgtcgagagcag

SEQ ID NO: 281883 - DNA, 122 bp, Homo sapiens
ggctacgggtggggcgcacccaggagcgggaacctgggaggccaggctcttgaggggttgcggggaggagagagcccgcctgtttcctaacaatgaaaacaccaccaagccctcagcgccgc

SEQ ID NO: 281884 - DNA, 122 bp, Homo sapiens
agtgagatgtttaatatgcacatgttgggcacgccacagggtaagcagccagatgtgtcccgggccatgtgggaatgagtgggaggctgggatggcgtcaagggccaggagtgcgtgcgttc

SEQ ID NO: 281885 - DNA, 122 bp, Homo sapiens
aacgaggcacaacaagggactgggggttcgtctgctgggtttgcggagcagctagctactcggcgggatctcccggcaggtaaaggtaaccccgtggggtggggaggcccaaggcagaggcc

SEQ ID NO: 281886 - DNA, 122 bp, Homo sapiens
caccccgccccgcccggcccctcccaggcgcgccccagtccctgggggccgtacctgccgcgggcaacagaggcgcagctaccaggctaaaggccgccacgtgttgcatctgggccgccact

SEQ ID NO: 281887 - DNA, 122 bp, Homo sapiens
tttccctggcacttcaaaggctggcctgtttcttctggggccgagccagttgcttcctcccgtgggatgcaagcagcttgattggagcttcaatgcttcatgcgctgcccagccgggaggca

SEQ ID NO: 281888 - DNA, 122 bp, Homo sapiens
gagtgcgggacctgctacaagccgagcacctctcggccagcgccctcgccaggactctcccgctcaggccccctgcgcagtctctgttactgtcacttccggaggttcgccgcctcaaacct

SEQ ID NO: 281889 - DNA, 122 bp, Homo sapiens
ccgggtagaccggcacgtaagcagtgcaaggctgcagctgcagggggtatccgggcgctacgtagccccccagcggcagcgtgcccacagtccccgcgtgcgtgggcaccacgaagccaggg

SEQ ID NO: 281890 - DNA, 122 bp, Homo sapiens
gactggagcagggccacggagcaggccccgttcttcggttccccccgcgccttctgaccccgcagccaacctgctacaagcccttcggatccagccaaggccccattcttacctgaacggcg

SEQ ID NO: 281891 - DNA, 122 bp, Homo sapiens
agaaaaccccaagttcagatctataaattcacaatccaagatccagtgtgagagtcctaacgaggtcatgggtgtgggcttttgtcttactctgtttgtgttgctataaaggaatacctgag

SEQ ID NO: 281892 - DNA, 122 bp, Homo sapiens
ccctggagctgaaggtggaggagctggaggagaaggggttaatccgtattctgcgggggccgggggatgctgtctccatcgagatcctccccgtcgctgtggcaactccgagcggcggtgat

SEQ ID NO: 281893 - DNA, 122 bp, Homo sapiens
ggtgagctggctgcaggccgcccccaggctagcggagagccgtcctcgctccaagaggatcgcccacgtccccaaacccgcttggctgcagcccctacagaaaaccctcgtggccagctgca

SEQ ID NO: 281894 - DNA, 122 bp, Homo sapiens
cccgcacgtgccctgccaaggaccccgaggaccctccccaccccacgctgtctgtttgtgcgggctgcccaatgagatgcctgtacaagtccagggaaagatggggatttcctcctcaagat

SEQ ID NO: 281895 - DNA, 122 bp, Homo sapiens
gaggcaggatcctcttctgcccatcagaggcgcggtggtctcccatcgatcgttgtgggccggagcagggcatttgatcagtggctgggccggcgctaagccccacttcaccttctgtgccc

SEQ ID NO: 281896 - DNA, 122 bp, Homo sapiens
ggagggaaaatcttaccaaagcgaccggctcactcgactgctgattctttcgcttggcatcgcgtcaggggagttagctttccttcagccgggtctggctagttattgggcgccgggtagat

SEQ ID NO: 281897 - DNA, 122 bp, Homo sapiens
taggcggggcgggcgctttggttccgagggtgcttctgctccgactgcttttcccacgggcgtcatctatagtccggaggacagccccagggcagaggcctctggtgagtgccccgccgcct

SEQ ID NO: 281898 - DNA, 122 bp, Homo sapiens
ctgatatccttgttcctgcccccttcctttccatcctcaagaatgcaagaaatggccaggcgcggtgactcacacctgtaatctcagcactttaggaggccgaggtaggcgaatcatttgag

SEQ ID NO: 281899 - DNA, 122 bp, Homo sapiens
aggcggctggacagaaacttagttaaaagtcctcagcccggtggtgggggacaaccgagtcgtcagtgggaagcgagaggtgcggagccccaggggcgcagggacccctcggaggtgcaagt

SEQ ID NO: 281900 - DNA, 122 bp, Homo sapiens
gggggcgcgctgggatggccaggagctcggctctccccgctctgtccctgctctgcggcccgcctcgcccctgcaagtttaaattcctcttagcaagcccagcatcgcagccaataacgcat

SEQ ID NO: 281901 - DNA, 122 bp, Homo sapiens
aagatggccatgtacaagccaaagagagcggagtggaacagattcccccctcagggttcccggaaggagccacccctgccaacacattgatctcagacttcaagttttcagagctgctagaa

SEQ ID NO: 281902 - DNA, 122 bp, Homo sapiens
ctcagtggctattgagttacccaccaagttaccccggttagagctgtttggggtggctcacgttattgcggcaaactttggagatgacggctgagtcctccgggcgaacatgtcaagccgat

SEQ ID NO: 281903 - DNA, 122 bp, Homo sapiens
aggcattcagaaggagcggcagtagtcccaggacctgcaccctaggctgtggggtggtgccgctggccaacctgggcagtagaggctgggtctgagcccaggaggtgcctctcagggattcc

SEQ ID NO: 281904 - DNA, 122 bp, Homo sapiens
ccacccccttcgcagggggcttaggtcagaacgccctgggcaccaccggccagagcacaccgtttgccttcaacgtgagcagcacaactgagagcaaacctgtgtttggaggtaaggagggg

SEQ ID NO: 281905 - DNA, 122 bp, Homo sapiens
ggggtgggaggccctggctgacagtggctggctctttccatcaagcgttaatgtgtaacccgcagccctggccctgggccaggccacagttgggactttctcctgtcctgttttcaaagccc

SEQ ID NO: 281906 - DNA, 122 bp, Homo sapiens
ggccacagtcgtgcgtcgtggaccagacgggcagcgcccactgcgtggtgtgtcgagcggcgccctgccctgtgccctccagccccggccaggagctttgcggcaacaacaacgtcacctac

SEQ ID NO: 281907 - DNA, 122 bp, Homo sapiens
tcttccgcgtcgccattccctctcccccgcaccagcgcccacacgtattccagacccccacgccaaggtcacagcctgttggagtcacagggaggtctggagagcgcctagcgccgtgctgc

SEQ ID NO: 281908 - DNA, 122 bp, Homo sapiens
ttttgtttcttattctccaatatgcaactacatataatagcaaaatgaaaatatatttcccgaaactaaactaccgaactatcctccccaaattatttgcctgataagaataaaccagaaaa

SEQ ID NO: 281909 - DNA, 122 bp, Homo sapiens
cgcgcctgcgcggccgggtccccgggcccgccgtgaggagagtgaagtggtggagagggacgctcgtgccaccccgggtcctcctaccgtctctatcatggtaaccccttctctgccgctgc

SEQ ID NO: 281910 - DNA, 122 bp, Homo sapiens
cttggctgatctttaatacttccatattcgccgcactctgaatcttggcctgagatcaaacgcctcttctaggatctgtcctcagcctgaggctgcctctgtcactgaccagcccccagtgt

SEQ ID NO: 281911 - DNA, 122 bp, Homo sapiens
tcgaaaaggtcagcccctcagagcagggcccacggatgccccctgagaactgtggggggtcgggggagaggccggaccccatggaccaggaggacagacccaaggccctcaccttccacaca

SEQ ID NO: 281912 - DNA, 122 bp, Homo sapiens
cgggcggctaaaagctgccagctcactttaagagcagctttgtgaaaaacaaccccagtgcgcaggcgcaggccgcggctgctgtccgccctccctgcgcgccccctcccgcgccgcgccgc

SEQ ID NO: 281913 - DNA, 122 bp, Homo sapiens
gctgtccctaaggccttattccatgttgaatctgacgctctcaatgtccaggctcggctgcggcgtggggaccgaaaaggggcggggtgggtcggacggcagtttaattacgtccccgggaa

SEQ ID NO: 281914 - DNA, 122 bp, Homo sapiens
gagcaccgccccctgctccagggcgcccagtcccatcgaccacccaagggctgaggagtgcgagcacacggctcgggactggcaggcagctccacctgcagccccgctgccggatccactag

SEQ ID NO: 281915 - DNA, 122 bp, Homo sapiens
ctgaagcagttttacaaggagaaggatttgtacctacagctagggcaatttagtggttaacgcctggggctttggcatcagaacgggagctggtggcccaccttcagtagctacattagcct

SEQ ID NO: 281916 - DNA, 122 bp, Homo sapiens
tttcagacaggtattaaccgggcagaggatactagatctgcgctggctttcattcattcacgcatccactcattcgtgcatccatcagttatcgagctgcggcaggagttagtgcacaaaaa

SEQ ID NO: 281917 - DNA, 122 bp, Homo sapiens
ttctccctcagcactcgccttagattcctggacttaccagcacaaaggtgattttctcctcgcagactgtaggcgccactgctgggtccggaaaagaaagagaaaaggcccagcgtggtcgc

SEQ ID NO: 281918 - DNA, 122 bp, Homo sapiens
atgtccgcgtgctgcagtcctcgcctgtgtacccgggccagcacacgcagcggccgtccacgcagcgcccgccctcgccacagtcccaggggcagctccgcgtaccacagtcctcgccagtg

SEQ ID NO: 281919 - DNA, 122 bp, Homo sapiens
aggcgcagatagcgcatgcgtagagcagacttcgaggattggagtggaactccgcgcgcacgcgggggctgtcgtgatgcgcgtgctggagacccagactctaaacagaaggatccaaagac

SEQ ID NO: 281920 - DNA, 122 bp, Homo sapiens
tgacctttgtaccttgagccttctgaacctccctgactttccttggctcctctttcagaccgccagagcctgatttagaggacttctcatccacattgtttgggtttagccctggtgtcctc

SEQ ID NO: 281921 - DNA, 122 bp, Homo sapiens
aaggtgttgcctgatttgcttctttccccacaggctgagctggttgcccacaggggcccccgccccatctcagggagtgtccacccagccctgagcccgtcgtgaggggtcagagatggcgc

SEQ ID NO: 281922 - DNA, 122 bp, Homo sapiens
aaccactgccaatcaggaaaacctttgaatccacctatgacctgtgagcatccactgcttcgagatatcccacctctttaggctaaaccaacatacaccttccatgtattgacttatgttat

SEQ ID NO: 281923 - DNA, 122 bp, Homo sapiens
tccacagccagggaccactccctaaagcccgccgcaggcccagccctcacgctttctcttcgcaatggactttgcagcaaccacgtcggccattggctcagctcggccctcgaccaatcaga

SEQ ID NO: 281924 - DNA, 122 bp, Homo sapiens
caagacagtccttgagggacttgataaacattaattcaagtggcttcatagcaatcctgccgaaaacaccaacatccccactttacagaaaaggaaactgaggctgacggaggttcagcaac

SEQ ID NO: 281925 - DNA, 122 bp, Homo sapiens
tcgtgttttcctaagaaaaattggaaccttcgtaatagcatctaatttgacgggggttgtcgatgtgagagctaaatatgcccgcatttactaggtgcgattgtgagagagaaggtggccca

SEQ ID NO: 281926 - DNA, 122 bp, Homo sapiens
tgagtctgaattcacattggtttttttatctttattaagcagtcattcctaaggcctgcccgagcctggcatctctacagaggagtggtgccatcaggacccctgtggggcagatcaacact

SEQ ID NO: 281927 - DNA, 122 bp, Homo sapiens
ttgataccaaattgcagggctacacccccacagtctgctccatgggtctgcgatggggcccgagtatttgcatttctaatgagtccccacaagctgcagctgctgctggcttcaaaaccaca

SEQ ID NO: 281928 - DNA, 122 bp, Homo sapiens
gggctcagggaagaggagaagctgagcccgggccccagaagctcggtggcgaaactttgacgccttctatttaaagtcgcggggctcgcccgcccccggcgccgggaacccgagccgccccc

SEQ ID NO: 281929 - DNA, 122 bp, Homo sapiens
aatagcaggcatcggagccggccttcagcttcgattaggggagatgggacatgacaggtgcgatcaatacgcagccgttctataaagtgtcaagtaatgaatcaatttcgactaaattttcc

SEQ ID NO: 281930 - DNA, 122 bp, Homo sapiens
ctccttcagagaccgctgagacactgggggaatgcggtggtagaacatacgccgacctagcggctgtaaagctcaggctctgccttggagttggagtgcttctggcctatcttactgggcgc

SEQ ID NO: 281931 - DNA, 122 bp, Homo sapiens
tgtggatgcagacttcctcagctgtcagcgatgactcactgaaagtgacccagggctccccgccgcctggaccagcccagtgcagaagcaccttcaggcctcccatggcagccatgggctgg

SEQ ID NO: 281932 - DNA, 122 bp, Homo sapiens
gtgagccaccacacctggcctgttttgcatattttatgacagctcacctccccacttccccgccccaccctgtttcttttttccttgtcgctgaatcacagggaaacaggtcgtttgtcctg

SEQ ID NO: 281933 - DNA, 122 bp, Homo sapiens
ctgtgagtttcaatgcttcggatttctcgtgctagaagcaggcatccctttcagcaatagcgaggaatctgatgccttcctggtttgggccttggaagctttgctgactgcaacatctacgg

SEQ ID NO: 281934 - DNA, 122 bp, Homo sapiens
ggcagttttggcccgtggcctgggcccgggagactcgctcaagagggaatgtgcggtgcccggcaggattttaattccgggtcacccgccccgccctgcggccttgggtagagtttagcccc

SEQ ID NO: 281935 - DNA, 122 bp, Homo sapiens
acccgctcgctcctaaagagaaagacccaggaccctcccccatcacccccaagagaggttcgccatcctctggcctcgagcccttggtccctccgtccgtctgtcctcggggcccgctcccc

SEQ ID NO: 281936 - DNA, 122 bp, Homo sapiens
cgtgatccgcccgcctcagcctcccaaagtgctaggattacaggcgtgagtcactggacccggccgagaactacatttctaaagtaatgtcatatgtcctgagtgctttctccccctggctt

SEQ ID NO: 281937 - DNA, 122 bp, Homo sapiens
ggcccaggggcggcacgcggctgctccggtgcgccgggctcttttcggccgccgcacggccgggcctcacaggctgccctcctgagagaggctcagaacacggccaggtacgcgccgccgcc

SEQ ID NO: 281938 - DNA, 122 bp, Homo sapiens
cctgctcatccatggcagccccatggacaaactcaaattcctcttccaggtgtatgacatcgatggtaagggctcttcctgggtgtgggctggggtggggagatcagtgggcctcagtgaga

SEQ ID NO: 281939 - DNA, 122 bp, Homo sapiens
gacaggaacaggccacccaccggatgaccttgtggcactggtgacacacgggagtcttgccgttgttgctgccccctcctggcacccctccggcagctgcctgcacaatggaggtgcggctc

SEQ ID NO: 281940 - DNA, 122 bp, Homo sapiens
ctccatgcaccatcatcttacccctgaccaccatcttgcagggtgggtattttttccaaccgtaggctgcagctagtgctgatgcaaccaaacaatttgtttgccttctaccggcaggagtc

SEQ ID NO: 281941 - DNA, 122 bp, Homo sapiens
tgctcctggcaggccttgtgcccaccgggttacctgccctcaagcctccgcccagagaagcgcagctgcaggggcgcgtcctgtcactccgccccgccagctaccctcccctgagcccgggt

SEQ ID NO: 281942 - DNA, 122 bp, Homo sapiens
tttactgtaaggctctaagtgtccttagtgtcttagtaattctgctgctacatccataagcgaaaaccaaaaccaaacaaccaacctaaccattctgtttattgagtatttagttagggcta

SEQ ID NO: 281943 - DNA, 122 bp, Homo sapiens
ctctgggcactcttgacctcaccccgttagggcccgggaggggctccctagtataaagttcgcagcaccagacagttgagctcacttgcctgatatttccagtgtcagagggacacagccaa

SEQ ID NO: 281944 - DNA, 122 bp, Homo sapiens
caaattttttttttctttcaggccctctcctgtgtataactgtcatgcaccgcataacaacgttttggtcaactagggaccacatatgtaactggtcatccagtaagctatagttattttat

SEQ ID NO: 281945 - DNA, 122 bp, Homo sapiens
aaaggatgcaactgcaagtgttcagctagtttcacaaggtgctttgtggcctactagcgccgggatcgtcgttctgttggccccgaggctggacagaattgattccaatggatggagtccca

SEQ ID NO: 281946 - DNA, 122 bp, Homo sapiens
ccagaagggaagagctcgtcgcgcagccccggcccgcacccccgctcctggagctccagccgctcgccctccaaatctcgctcgcgctctgcggagaagcggccccacagccccagccgctc

SEQ ID NO: 281947 - DNA, 122 bp, Homo sapiens
ctgctcccccaagggagaattaggcccccctcagcattggcattccagtagaaatcccaccgcaggatcctccctaagccatatgaggtagctacggaaacgtggagaggacccactcactc

SEQ ID NO: 281948 - DNA, 122 bp, Homo sapiens
gggctctctaggagtctgcacctgcagagcctttgccctaggcaactgcagctgagagtgcgttggtggggagtgtgcgggagggggtagagttggcaggtttgactccactgtccccctgc

SEQ ID NO: 281949 - DNA, 122 bp, Homo sapiens
cctcctccggggaaactggcgctcttcgcccacccaactcccctccacccacctcccccgcgcccccagttcgaagttcccccgacagagcccacccacactcgctcccccaactccactcc

SEQ ID NO: 281950 - DNA, 122 bp, Homo sapiens
gcaggagtggcagggcccgtctgcagtgcaggagtggcagggcgtgtccgcggtgctgaccggttggtcttgggccctggcgctgtgtccccgcacaggtctcgggagaggttctccactct

SEQ ID NO: 281951 - DNA, 122 bp, Homo sapiens
gaagcgggagaaggtgctgctgctgaggaccttccagggccgcacgctgcggatcgtgcgcgagcactacctgcggccctgcgtgccctgccacagcccgctctgcccgcagcccgccgcct

SEQ ID NO: 281952 - DNA, 122 bp, Homo sapiens
taagtgttggggaagatgctgaccatcagaagccctgggaaaagccctttagaaagctctcgagcagcatccactaatgccagatatcccagtgagcagcgactccaatcccagcagagaaa

SEQ ID NO: 281953 - DNA, 122 bp, Homo sapiens
tgtgagccaccatgactggcccagaatcacttttgatttgaggtctttatataataatgacggttaatcttttgttatactgtttttttgtttgtggatcttttggatcttgggaatggggt

SEQ ID NO: 281954 - DNA, 122 bp, Homo sapiens
ggggcccgggcctggccggggagggagcctccagagctgcggaggggcggggcggcgaggcgataacaaaaagcagggagggagctccgtcagacaatggggccggcagcccgcttttatct

SEQ ID NO: 281955 - DNA, 122 bp, Homo sapiens
ccgcagagtaataggaaacactggttcctaccactgtggccagtggtaggactgggtctccgaggcaggacctttcttggagtctcggaaccccagcacagtgcctggcaaccagtttcgaa

SEQ ID NO: 281956 - DNA, 122 bp, Homo sapiens
atgtcctgctggctgccagggcagcgtgggacgctacggcggatatggctgcagagcggccggctgggatcttagataggaggggtggatttgcaaggcctagaatagctggggagtggttt

SEQ ID NO: 281957 - DNA, 122 bp, Homo sapiens
cctcctctaccctatgacatcgttagcccattttacagataactatcccaacactcgcagcgtggagctgtccaggagtggcctaggccccatacagtagtgagcagtatgtgtatgtgtgt

SEQ ID NO: 281958 - DNA, 122 bp, Homo sapiens
cgtggtgggggtgtccagaaagacccttctcggcaaactttgccagcccgccggggttctcgggcttctctggcttctgcctggggtggcccagggcccaccagagcacagctgtcgttttt

SEQ ID NO: 281959 - DNA, 122 bp, Homo sapiens
ctggttgacatccagcctgtatccaccacctaatcccatcctttgcttgggttttctcaacgtatccatgtcctggccatgcccagtggcaggtctggaggctcctgctggcagaaggaaat

SEQ ID NO: 281960 - DNA, 122 bp, Homo sapiens
ggtgaccttccgcagatggaggtaggcagcgggagccgggagctatccctgcgtccctcccgcagcggggcccaacagctcgaggaggaaggcccaatggaggaggaggaggcccagccaat

SEQ ID NO: 281961 - DNA, 122 bp, Homo sapiens
tgagcctggggggtggggggtgccgggctggaagctgagcgagggagcctggcctctccccgcgcccgcccccgcgccaccgctccgaggcccggccttacccgacaggccgccgaggcacg

SEQ ID NO: 281962 - DNA, 122 bp, Homo sapiens
catgaaaggagggacattgagaatgcctgggtagcatacgccactttttcttctgtctgccggaggcaaagatgctgagactttcactttcatgtttgaatgaaaatatcttagtgtacaaa

SEQ ID NO: 281963 - DNA, 122 bp, Homo sapiens
cggggtctgcgcagtgggtggggcttcggcggaacctagctaagaggttcctctcgcctccgctccccttttgccttcaaccttcgagccgccacgtaatgccacgtccccgcgcatgcgca

SEQ ID NO: 281964 - DNA, 122 bp, Homo sapiens
ctcagcagtgttaaaagccgacactgactggagctaaccctgagcgaattaggaagctggcgtctcctcaggaatcctgtctccccaccggctgccccatgcatctgccctgaggctccccg

SEQ ID NO: 281965 - DNA, 122 bp, Homo sapiens
ctgagctatatttagtgctgcatggctgtgcgtagcggacttatggcaagcgcgtgcatgcgaattcatcagatggaaacacaggcatgtgtagcctgcgctctaacttcttttccacccca

SEQ ID NO: 281966 - DNA, 122 bp, Homo sapiens
ctggagacttccttggtgcgtccctaaatctgggttttctagctccctagcttggttctgcgtctcagccaatcatgcccctccaaccccaaggtcgcagcgtttgttctcggagggcagta

SEQ ID NO: 281967 - DNA, 122 bp, Homo sapiens
attctgtccacctttacagctgtgggagtggtcaggataacgatctgcgttcctttccaccgtggccgtgaaggagctacgttccagtccttgatccacacatggtcacctggagaaaaagg

SEQ ID NO: 281968 - DNA, 122 bp, Homo sapiens
aggacggcgagggacggcgaaggactgaggccacacgacaaggaagctacgctcgtttcgcgccggcggaaatacagacgagagcgcgagctgcggcctagagcggtaggaaccgacgcgag

SEQ ID NO: 281969 - DNA, 122 bp, Homo sapiens
ccatggggagtactgccaaaaggagcctgcaggacagtgtctctgggcttcctgggactacgggggtccagaataagaatcgacccgaagggagcacagtgtgttgttcatagagagtcatg

SEQ ID NO: 281970 - DNA, 122 bp, Homo sapiens
cagtgaaagttggctgtcaccgactggagcgcccccagttggtgggcagggatacgggcgcgggtagtggcaggaaagttgcagggcagagagccagaacccagtcctaggtctcacctcgt

SEQ ID NO: 281971 - DNA, 122 bp, Homo sapiens
gtccgccagcagcagcatcagcaatgcagggggcgggaggctcggctagcaagggcggcgcggggcgcggcgggggcggcgcgcgctcgttggaacagcccaggcggctgcagccccgcccc

SEQ ID NO: 281972 - DNA, 122 bp, Homo sapiens
ctgtggaggggaaacgtggtgagatcagcgccacctgcaggcctccgctgaagagttggacggcctggtgcaccaaggatgtaggtttccagttgctgttccggtgggtttgggtcccggcc

SEQ ID NO: 281973 - DNA, 122 bp, Homo sapiens
cacttttgtagctgccaacaggccttgattcaggcagtgggaggtaggctggctgaggcccggcactggataatatttgcctggcaaatactgttggcttggggcagtgagggggaggtgct

SEQ ID NO: 281974 - DNA, 122 bp, Homo sapiens
tgccaggatgactcttgctgcaagcatgtccttggaaagctctggaaatagggagcctgccgggagtttatgtaacatgctgagtggccagaggactgtgcgcaaagggctctgatcccata

SEQ ID NO: 281975 - DNA, 122 bp, Homo sapiens
gcaagtgacttgcattgtttcctcagttgtcagatggagagacttatcccaacttgatagcgtcatttggagcattacatgatgtgaaaggtgatagcactggacacagctcacaccaggga

SEQ ID NO: 281976 - DNA, 122 bp, Homo sapiens
ccgacccctccaggattccggcgcccaggcacgtctggtctcaccacgcgctccccatcacggacctgcactgcggctttgggggccccctggcccgggtggccacctcctcactggaccag

SEQ ID NO: 281977 - DNA, 122 bp, Homo sapiens
ctcagagtgaagccgataggatcaagcccaagtgttcagggcgctcagctgtgggtggcccgtgtacaggaatgggatcgcacggtggtccagatcgtctgtgcacccatccttgccctgcc

SEQ ID NO: 281978 - DNA, 122 bp, Homo sapiens
agatttctgtggatttcagggatgggcagagatgccagaccctgaccttccagccctccccggccccccacccccacccccccactcccccgctctcccaccccaccaccatgctcagtctg

SEQ ID NO: 281979 - DNA, 122 bp, Homo sapiens
cacatcagggaagctggcaggggccgggcgcgagcgctcacgcctgcagtcccaggagcacggcgcggcccaaatcaaggaagctggcagaggctcatgtcctgagggctggctcgaggcct

SEQ ID NO: 281980 - DNA, 122 bp, Homo sapiens
ttcccaccctgggttctggtactgctcccaggctgtgtggcattgactagagtgcttcaacggcccactggccccacacagctggtgcctggggcccagggtggatccatgagtttgggcaa

SEQ ID NO: 281981 - DNA, 122 bp, Homo sapiens
cgcccctctacctggcgggcgcgcgagggtcggtcccgcaggcagcgccgcgaggtgcttcgcagagtaccaggctgatccgcccaggcccgcatctctgctctaggcccttgggaacgggt

SEQ ID NO: 281982 - DNA, 122 bp, Homo sapiens
tgccaatataaaacaggacccagccacttataactttcatacccgtatttaaagaagttgcgcctcccagagattctgctggaactgtatttcctatgtccacatctaaacaagggctattt

SEQ ID NO: 281983 - DNA, 122 bp, Homo sapiens
caaacgccttatgtgttccagtgggaaaaccgcccgatggtcactcttaaaagcgcagaccggatgaactgggcctggggagggctgaagctcccggcagcacgggcggggccagccccacc

SEQ ID NO: 281984 - DNA, 122 bp, Homo sapiens
ctccccggagagcacggctaccgacaaatcgcttccccttctgggttttggttgcttaggcgcggtggagatgttatcgtcattggcctggagaaggattctggcgcccagcggggccgagt

SEQ ID NO: 281985 - DNA, 122 bp, Homo sapiens
tcacgacagagtgccctttctccccgcctcttccccctcccgggagctgccagtacttgacgtggcgtcaccgccctctaccctcgctttgcgtgcgtgtttgcgtacagcggaggtggcgg

SEQ ID NO: 281986 - DNA, 122 bp, Homo sapiens
atctctttttatcatcccaaactgaaattgtgtattcattaaacaataactccccatttccgcctcctcccagcccctggcaaccaacattctactttctgtctctatgattttgactattc

SEQ ID NO: 281987 - DNA, 122 bp, Homo sapiens
aagtgttttaaaccatgcattgtaaaactacatcctgccttagaaagaattattatttgccggcacatagatgggaacagattccaatagtattaataataagccaggagttagagtttgtt

SEQ ID NO: 281988 - DNA, 122 bp, Homo sapiens
caaattgggaaagaaactctgggagaacaggacacctgtcagtgccacacagctcattgccggtaaaaccgggatttgagcagagatcttctgatacccattggggttcattaccacttaca

SEQ ID NO: 281989 - DNA, 122 bp, Homo sapiens
tgggatttcaggcatgagccactgtgcctggcagatacgctgaattgaggttttcttacacgctcatcatcccttattctgaaaattccaggggccccaagtttcatagaattcagaatatt

SEQ ID NO: 281990 - DNA, 122 bp, Homo sapiens
ggcggcccggccccgcgcgggtcacgtggctgcgggtcacgcggcgccgcgtgcgccgcccgccgggctgactcagcttggccgcagctacccggaccgactctcccaggtggaggagttcc

SEQ ID NO: 281991 - DNA, 122 bp, Homo sapiens
cccgggcctcccctcgtccctcttctagtggtaccgcccaggccttaatcacccccattccgtgcggtggtatctcccaggctctacattctcgggagcggcgcctcccaagggggtcctgg

SEQ ID NO: 281992 - DNA, 122 bp, Homo sapiens
tgtcttttcacacaccacgtggtgacaaaaggaagaaattgaggcttataaggagtaagtcgaatatatgcaagacttgatgccatccagctaggcttttatttgaaaggaggtctatgtat

SEQ ID NO: 281993 - DNA, 122 bp, Homo sapiens
cggaactgctctgaaggcatggaggagcgacgctgaaggtggaggcttcgcccaccatgccgggagctaaaatttcttaaccaatgccggccagcgatggcagggctgcgggactacaatcc

SEQ ID NO: 281994 - DNA, 122 bp, Homo sapiens
cgtctgagggacggaactggctcagagggatcaggtcagcggttggagacccctcccctccgttagatcagcggctggagacccctccgcggcctgagcgtctgtcccagccggaggggcgg

SEQ ID NO: 281995 - DNA, 122 bp, Homo sapiens
tgcgaccccgactctaattctgcctggggacggctgtgggggtgtcctgcagctggtgctcgccggaacccagtcctcccccagcagcatgggacggttggcccggagccttgcaccgaacg

SEQ ID NO: 281996 - DNA, 122 bp, Homo sapiens
catcccccagagaccggcggagtttcgcacagccttctgggacttatagttctttaaggacgcggagtgggctcacgccgcgggtaggcaaacagagcgggactgcatttcccagagtgcac

SEQ ID NO: 281997 - DNA, 122 bp, Homo sapiens
aaagtactgggaaggctaaaggcagcaagccactgaggctcctgactacctgctgcctctcgtcccaccaagtcagtctgctccttattctgtcccttcccctggcctcttgcacatatcca

SEQ ID NO: 281998 - DNA, 122 bp, Homo sapiens
ggacaggtacacgacgatgacgaccggggtggtgagaagctgcccgaccaggtcggtgagcgccagccagccgatgcacagcaggaaggacttcttgcgcttgctctcccggcgccggtagc

SEQ ID NO: 281999 - DNA, 122 bp, Homo sapiens
aatccaaaccagaatacccacccttagctgctgcctgagctgggtccctgttgagactggcgaggaagtgtgacttataatacaaaaatattctagaaatggaggaacaacaatactagctt

SEQ ID NO: 282000 - DNA, 122 bp, Homo sapiens
tctctccagctacaagggaaaaaaaaagttcaggcagctgaggaagggaagttgctattacgacttggtcttgggacaagcagcagcagcagcagcagcagctgagcctgatctttaatcag

SEQ ID NO: 282001 - DNA, 122 bp, Homo sapiens
gcaggcggagttggccttctggggcggcgggagggcgcgagggcgtggggatgttggcagcggggtctcttgaaagcgtttcgccttccgctgtcccgcgccgggggcctgctgggaagcct

SEQ ID NO: 282002 - DNA, 122 bp, Homo sapiens
aatcacattttctactccacctgaatgtgtagacagtgacttgtacattgaactgtgctgcgtgtgtgtgaagtcagcctctggaattcatcccagcaacatcatcccaaacatccacattt

SEQ ID NO: 282003 - DNA, 122 bp, Homo sapiens
ctcttcctctctcccattgcactttgatgaaatggttttgtctgtctaaacattggccctcggagctatttcatcagatagtatccgcagaatcgagaggcggatcccacctgtgggatccc

SEQ ID NO: 282004 - DNA, 122 bp, Homo sapiens
ccaccttttcctttttctctgctcagcccgtgttagggtgaagcctggaggaaccccgggcgctgtaccagaggagaaaagacaaggatgaccctcagcccaccagcccaatcactgggttc

SEQ ID NO: 282005 - DNA, 122 bp, Homo sapiens
gatgggaagaaacaaatggggagaggcggggtggggggctgtcagccgccaggccctgcccgggccaactcccacctctgagaaccaggcacagggggctccaggctcatgctgccccagca

SEQ ID NO: 282006 - DNA, 122 bp, Homo sapiens
cacggcgtccgcgacggaccccgcccccaggcagtgcgccgcgctcccgtgacgtatttccgcgtcatctgccgccgaggcttgcccccattggttgtctgcgaggcaataggggcggagcc

SEQ ID NO: 282007 - DNA, 122 bp, Homo sapiens
gcgccggagtctgacgagagaagggaggggaacaaggatagagcgctcgccaacggccgacgctccaggccgtcccgcccagcgcagctgcacccaatcacaatgctcagatcgggaggtgg

SEQ ID NO: 282008 - DNA, 122 bp, Homo sapiens
tataacaagatactgagtgggatttttactgttgccttggagcttcgtctgaaaataagacgcactgatatgccacagtctaaatagagctgccaacactggggcctgataatccccccaga

SEQ ID NO: 282009 - DNA, 122 bp, Homo sapiens
gaagaggaaaaaagccagagctgcagcaacagcgtctcaacctgggatgtgcaccaaccccggagagcgagatcaaagggactggaaacagactggggactggcggggggagggggccggcc

SEQ ID NO: 282010 - DNA, 122 bp, Homo sapiens
ccagccgcggggcactcacagctgccgctatgaaaatgcagacctgtggggcaggaattccgagtccggggtggagcgcgatgtggaatctgactcgcttgaaacagcaccgcggtggattc

SEQ ID NO: 282011 - DNA, 122 bp, Homo sapiens
cagctcgggagacactctatttgcatcctaaataggttacactacagcacccccttctgccgactgagctgtgtgacaagaaggcctcactacaactcagttttctcccctgatgacagccc

SEQ ID NO: 282012 - DNA, 122 bp, Homo sapiens
tcaatgcctaacagagcacttgtcacataccaatttgtcaataaggacttgccaaatgaacgaccaacaaacagtaaggaacaggatgacaatagaagaggattggatgtgtttcaatgtgt

SEQ ID NO: 282013 - DNA, 122 bp, Homo sapiens
tgctacagttcttaaaggcagcgtgtctggagtttgtttcttctgatgttccaatgtgttcggagtttcttccttctggtggggtcgtggtctcgctggctcaggagtgaagctgcggacct

SEQ ID NO: 282014 - DNA, 122 bp, Homo sapiens
ctctagagtccggcagcagcgggcgggcaccggcgccttctccacacaggagaatctcggcgatttacacccccaggctacgcagaaaaagcggcttcggaatccgccgcaagtcccctcct

SEQ ID NO: 282015 - DNA, 122 bp, Homo sapiens
catcggctgtggaaatgggaaacagggagcgcaggtttaatctacacagagggtcactcacgctcgacgccgtcaccttcacccaacgcgatccgtttccgggcctgtaggaaactgcgcat

SEQ ID NO: 282016 - DNA, 122 bp, Homo sapiens
ttcttagactctaaatccctcgatgccagcgatagcaccacccgctccgctgggcggcggcgggccaaggtcctgactagagggcagaaagcgtcagctgcaacccgggaccacgccgcctc

SEQ ID NO: 282017 - DNA, 122 bp, Homo sapiens
atcctctggtcctccctgaaccccggtcggagcccaaagatgatccccaacctgtagaaccgaaaccagggctatgaactctggggcagacacctgccctcagcccctttcaagcctcagat

SEQ ID NO: 282018 - DNA, 122 bp, Homo sapiens
gagctaccagctgcccaacagccaggtcatcaccattggcaacgagtggttctgctgccccgaggcgctcttccagccttccttcctgggcatggagtcctgtggcatccacgaaactacct

SEQ ID NO: 282019 - DNA, 122 bp, Homo sapiens
cctgagtgcaagatgacggtggcagacacgtacaaagacttccccaccaggtcttctgctcgggggttctgcaccccgtccagcagtaccttccggctcagcacaacctcccccgagccatc

SEQ ID NO: 282020 - DNA, 122 bp, Homo sapiens
tgactcagggattcatcatccgcttcctgttgaaatagtaaacgcctccacatggactcacgggttcacctccttccggtctgaacagtgaactcctccgcatcaactcacccattcacccc

SEQ ID NO: 282021 - DNA, 122 bp, Homo sapiens
atttaaatttttaaagttagctttgctacagggactgcagtgatgccgaagggcgggcaccgcagaggaggctgcgccgcagttggtggggagcgccagggtcggtactggcagttccttct

SEQ ID NO: 282022 - DNA, 122 bp, Homo sapiens
ccgtcctcgggaagctgggggctctgcgagggggcggggctcagacacgggtggggtcaccgggagcgcccctccccacgggccacagggctcgtcctacctggaggaggatgtaggtgcag

SEQ ID NO: 282023 - DNA, 122 bp, Homo sapiens
gaacatggacacaaacgatggtcaccaagtcccagaacggattgtgtgagctctttgaggcgttcatccagcgttgtttcggagaaatctctatttcaatctattcctatacattagttatt

SEQ ID NO: 282024 - DNA, 122 bp, Homo sapiens
ctcgccttagattcctggacttaccagcacaaaggtgattttctcctcgcagactgtaggcgccactgctgggtccggaaaagaaagagaaaaggcccagcgtggtcgcgtgtgtaactcag

SEQ ID NO: 282025 - DNA, 122 bp, Homo sapiens
gggccgctccccacgtgcgtctgcccaacaggcgtggacacctgcggcacttccagagcccggcagcctggacaggaagttacctcgctgttcccccccagggccacgccaaagctgtgctg

SEQ ID NO: 282026 - DNA, 122 bp, Homo sapiens
tgagcaggccagaccctgcgtcgtaaggacagagcaggacacgtcctgtcatggggcacccgctgtctgcgactttgtttccgtttgtttccgcctcagcttgggggagacagttggcaggc

SEQ ID NO: 282027 - DNA, 122 bp, Homo sapiens
ttaaaagaagcctgctgtgctgtggaagtgtgggtattctccagctttcccaggtcaggccgactgcttccgggcagcctacagatcagaaggcagggctcctttgtgcgaggaatttgcat

SEQ ID NO: 282028 - DNA, 122 bp, Homo sapiens
tttttaatgaataggactcaggatttgaagacaaaaaagcatcatattccagtggttgatcgaactccactagagcccccaccaatagtggtagtggtgatgggacctccaaaagttggaaa

SEQ ID NO: 282029 - DNA, 122 bp, Homo sapiens
cacatgccctcagcgcatctctgccttgcccggggccagcaggtgcacgccggaatgctgcggaccaaccaagtggcccggccagccctgacccctgcgggtggaaaagggtgcaccctggg

SEQ ID NO: 282030 - DNA, 122 bp, Homo sapiens
atgctgatggggggctgcaggcagtgaagccccttgactcaaagcagagacttgaatgggcgctggagagtggagacagtggagaggccagggagggctgggcgggccccccaggctgggcc

SEQ ID NO: 282031 - DNA, 122 bp, Homo sapiens
cgcctccaggcactgtgtggaactttgcaaactcgggtcctcacccgaggaccgcacggccgacctcggggaggctccaccccagaaactatttcattggcgccacctctagcccacacttc

SEQ ID NO: 282032 - DNA, 122 bp, Homo sapiens
gtgggcccgacacgctcccgggacttggccacggtccctgcatctcctgatgagagcccgcgcttctaattcgggtccgccccgcactcttcccgcgccctgcccgcgctgtcattacggcg

SEQ ID NO: 282033 - DNA, 122 bp, Homo sapiens
ccgtcttcctcacacagccaaaaccgccgccatcttggttcgcccctcaaaagcggcgcgcggggccacccagggagcagctgcaggggcggctcgtagccccaccatttaaagagacagca

SEQ ID NO: 282034 - DNA, 122 bp, Homo sapiens
gcggccgccagcttcggaatgttctagttcctcggcaaccacctgcgggattcccagggacggctggacagcacgcgcgggctgctgtgctgcctgggcgctggagtggctgaggccgtggt

SEQ ID NO: 282035 - DNA, 122 bp, Homo sapiens
tctgcctgtcttcagtgtcccagtctctacacaagctcagctaagggtggtgccatctcacgggagcattccctcataaccatcactggcttggggaatggagctggcaaatcaaattgtca

SEQ ID NO: 282036 - DNA, 122 bp, Homo sapiens
gtgcttccaatccactccacgcagctcattgcgctattgttccgtctagcgggggatgtgcgggacaccctggaaccgttcgtggctctgtttaaagatgtttttcttagaagcaggaagtt

SEQ ID NO: 282037 - DNA, 122 bp, Homo sapiens
agctttcttgcctttcaaccatagacaaggcaggaacaacggtgtgaaaagcgtcctccccgccccggtctttttccgccggcggaacgcagatgctgtggccttcaggcgctgaggggacc

SEQ ID NO: 282038 - DNA, 122 bp, Homo sapiens
ggttcccaaggcctgggagtttgttggaaaatgcctttcaagggagattgcctggggccacgaattgttgctggacagataactatgggctcttgggtaagaggaatcagggatgttagggt

SEQ ID NO: 282039 - DNA, 122 bp, Homo sapiens
gggtagttgctggtaaagccctgagggtcccgccagcgcgtgagttggaagctgaattaccgcgagaagtacagtcttgccgaggagacctctgggaagcgtagtcagagacgtatcaaggc

SEQ ID NO: 282040 - DNA, 122 bp, Homo sapiens
gtcggccccaatgcccttaccgccagggtttcattcccacctaccccagcacagcgcaggcgcagaactgcgctccgccgagccccaccagcaggccgcaactgcgcagccgcaacgttagc

SEQ ID NO: 282041 - DNA, 122 bp, Homo sapiens
gatgcgggaaaaacagtgcagagagatcctgagcttccgcacgtcatcatttctcagagtcgccatctgttccttcaagcaagtaacacctttggggctgcagtgtggctcagagcaggtgt

SEQ ID NO: 282042 - DNA, 122 bp, Homo sapiens
tggtttctttttagtgtagtcctttattttctggtaaaaattcaggagttaggcgcttcccggatcaagactcactgcgcagtctgataaggtaacctaccatttactcagcacaaggacgc

SEQ ID NO: 282043 - DNA, 122 bp, Homo sapiens
gcccccgggcctccttctgcgcagcgcctcctggttctctcgctcggtttccgccgctcccgggccaccccaagagttgcgccgtccaacaaaaatatccacccaggtcgcgccctcctggc

SEQ ID NO: 282044 - DNA, 122 bp, Homo sapiens
gcctcatgtgatccacctgcttccacctcccaaagagctgggagtacaggggtgagccaccgcacccggccctcaaatgccattttatatcagagacttgagcatctttgtatgtcatttta

SEQ ID NO: 282045 - DNA, 122 bp, Homo sapiens
ctaatgagccccatcccaggcagaagagtgggctgttgagctaccctgtccccctcttagcggtgcagaggctcctgacctgggggctgccagtctcctgtagctggttcctgtggcgccag

SEQ ID NO: 282046 - DNA, 122 bp, Homo sapiens
cagccctatgaagtcggctgtgtccagccctgggggaaagaggggttgaggccgactcctcgactgggctctgaggcactgacagggtctccttgtgctcaccctcccgccaggagccaaag

SEQ ID NO: 282047 - DNA, 122 bp, Homo sapiens
cagtttggcatcttggaatgttgcatagagcttgggaatgagaaactagaggcaagcaatcggtagaagcacctcaaatctgtaacatcctaaactgaggtaccacctcccatcagagtgtt

SEQ ID NO: 282048 - DNA, 122 bp, Homo sapiens
attcagattaaccatgttatgaccactcacactcgctgatacatatcttcctgtcacttccgtggagagtgaaattttctcttttattttttattctttgagacagagtttcactcttgttg

SEQ ID NO: 282049 - DNA, 122 bp, Homo sapiens
tggcctaacatgatgatgtcagatccccggccttattttcttcgcctattggttcctctgcgtcggagggggcggggagatggggcggggccgactgactatgggggtgggaagacaaaggt

SEQ ID NO: 282050 - DNA, 122 bp, Homo sapiens
ggggtctttccagggagtggagcctgggcagattggggcctgtggaggccgcactaggatcgtagaaggagtggagccgtgctctcaccctgtcttagaggacccggaagcgccaagtgact

SEQ ID NO: 282051 - DNA, 122 bp, Homo sapiens
ggaacagagacgctctcctttagtttggtacctctgagccctttctcacttaggcctcaacgttgacctccctgtgtcctggctgagcccaaatgttagcaagaagcatgctaaatcatcca

SEQ ID NO: 282052 - DNA, 122 bp, Homo sapiens
tcctctcaggccccctgcgacagctgaagagtgtgcgggggaggggactaggggtccgggcggcgctggtcacaccctcgttgctctcactcagggcccccactcccagcccctcccccccc

SEQ ID NO: 282053 - DNA, 122 bp, Homo sapiens
taggcggcggggacagatggccacgcaggcactggcactttccagttgtctgatgggcgccgtctgccaaacaagccccccaccgcctcgcagccgctcccaccccaaacacagagcttagg

SEQ ID NO: 282054 - DNA, 122 bp, Homo sapiens
ctggtgggtcctgtcttctctggagatgctccccgatgggaggaaaggccagcttcctgccggccacttgcagaagcgagcatccagtgcttccgccagcctgtccctcaccccagacccag

SEQ ID NO: 282055 - DNA, 122 bp, Homo sapiens
ggtctaggagctctcagtccccagaattagccagccctctctgggaagtacagctgtgggcgggtgggtaggcggaagattccagaaggtggagggttggctctgaatctcagagctggggc

SEQ ID NO: 282056 - DNA, 122 bp, Homo sapiens
cgaaggagaagcgcgcttttttccctggcgggggatttggctagaaggctgggccggcagcggttgtgaggagttagctcgcggcattgcaggctctgagaggaggggacccggttcccggg

SEQ ID NO: 282057 - DNA, 122 bp, Homo sapiens
aggtgtgtccggagctggccccagacacaaagcgccaagaattggcggggacatctcagccggcggggacacaccccggagtccgaggtccccgtcaccagggtgcagctgcccaggtaggg

SEQ ID NO: 282058 - DNA, 122 bp, Homo sapiens
ctttaacgagatcggaaagggcggccaacccagcccccagtgaggcttggagtggagacgcgcccggggccccttccttcaccgaggctcttgggacagggctcaaagctgcccctagcctc

SEQ ID NO: 282059 - DNA, 122 bp, Homo sapiens
tgagcccgcgggtggagcgacagggccgccctgcagaggccggagcacgtggttggagggcggagcacacgctggagtgcggggcacagcagggagggcggggctgcggctggagggcgggg

SEQ ID NO: 282060 - DNA, 122 bp, Homo sapiens
ggaatggtaagtaggggcttgtgccaggacgctcagggggcagcacagaacgcgcgcaaccgtggctggaagtgaaaatgtaaaaaccctcccacggcctcgctgggagtcactgctctgca

SEQ ID NO: 282061 - DNA, 122 bp, Homo sapiens
ttcccagagggccttggggcacagtccaatgaggagcgagccgggtggccggctgaggggcgtgcttcatgctcgcgggatttttaaaaatggtttctcctggatcttatcccaactgcgcc

SEQ ID NO: 282062 - DNA, 122 bp, Homo sapiens
gcgtccgagccctgcaggcgaggccaggcttggcgcggagggacctcagcgtccggggagcgctcgctgtctttgagttcctgctgccagagccgggcctcctctgctctccgcagcctcgc

SEQ ID NO: 282063 - DNA, 122 bp, Homo sapiens
cgctgaggaagggtggaaagcagttctgcgtccgtgggtggagcccgccccttggctgaccgcatggtgcccgcacggtcccttcccttcccccagcgtccagcgcccggaggttctggatt

SEQ ID NO: 282064 - DNA, 122 bp, Homo sapiens
cgggcaggcaactgcacaggcagacagcccaccccaagggcagaatcagggaagaagagacgcaggaccccggaagcatgccaacgtcacaccgcgcacttcatccctcaagtcacccgcgt

SEQ ID NO: 282065 - DNA, 122 bp, Homo sapiens
aggagcaggaaaaggagcccacgccgtcttggcacgagccaccgttcaggcatgggtctgcggacaggaggaaggcggtctggtcacctaccttgcccccattagcccagtctgactgggat

SEQ ID NO: 282066 - DNA, 122 bp, Homo sapiens
ggtccgcagctcctgaagggcctggccgttcacggggcaggcaggacgggcgaaatcccccgcagttagcggtcaacagaaagggcgacacggaacggggttcctggcacccgagctcgccg

SEQ ID NO: 282067 - DNA, 122 bp, Homo sapiens
tcccccaagggcggggacctcaaccccaatgcggcggctcccctaggagcggggccgacacgagccaacttggctacatcgcccggcccaggaccattctctaaacctcttttctcagtctc

SEQ ID NO: 282068 - DNA, 122 bp, Homo sapiens
cggcacagcacgaggccacacgaggtaccagacgggagtgtgagcggctccaccacgtcacgccttttcccgctcccaagcctacttctcttaataggttggtgaatagcagccatcttcaa

SEQ ID NO: 282069 - DNA, 122 bp, Homo sapiens
ccaggaacactggtttttatgaatgggccccgcgcccacccacctgctgcctgttctccccgcaaagggtcagagctcagaggccgccagcaccttcagacacctatcccactaatcgtctt

SEQ ID NO: 282070 - DNA, 122 bp, Homo sapiens
ttttgcgaaatttttgaagatgtcctttatcagcttctggagttttaaaaaaaatatcaacgggtgttgaatattttgagtgactttgctgcatcaattgagatgaatacattttccccctt

SEQ ID NO: 282071 - DNA, 122 bp, Homo sapiens
tttaagaattaccgcgggactcggtagggggagcgtaggcgcttctcgccaagatagaagcgttcagactacaactcccagcagccacgaggagccctagggcttgatgggaacgggaaacc

SEQ ID NO: 282072 - DNA, 122 bp, Homo sapiens
ccgcgcccggcccacctggtgtctttcaatcagggaaagaaaaaatagtggaggaggaaacggcaaggttggattcactgcgaaggctgactgtacaataagaagcaaaaggaaaagcggtt

SEQ ID NO: 282073 - DNA, 122 bp, Homo sapiens
catcatttccaggggtcctggatttactcaggacctgcctgtcctgcctccctccttgtacggaccttggctttgtcctttgtcctcttcttggcctgtcagacacaggattagcaggtgtc

SEQ ID NO: 282074 - DNA, 122 bp, Homo sapiens
cgggggcgtctgggcagagacgctcctcacatcccagatgtgatggcggccgggaagaggcgctcctcacttcctagatgggatggcggccgggcagagacgctcctcactttccagactgg

SEQ ID NO: 282075 - DNA, 122 bp, Homo sapiens
gggcgggggctcaggggcggggccacgtggctcctccttgcgggcggaggcaggcggtgccgcggcgccgggacccgactcatccggtgcttgcgtgtggtggtgagcgcagcgccgaggat

SEQ ID NO: 282076 - DNA, 122 bp, Homo sapiens
aagggctgaaaatccttctcctgagactgtgatgtgtagatagaacgtggtgcaggcgatcggaaaactgtaggcctaaggaaacgattttaaattttccagcgtctcccacccaactccta

SEQ ID NO: 282077 - DNA, 122 bp, Homo sapiens
aagacaagaaaagcatgaaaggactcatgaaatcataccaattaatgtgaataataactacgagcacagacacacaagccacctgggacatgcagtactcccaagtaatgccaggggcccca

SEQ ID NO: 282078 - DNA, 122 bp, Homo sapiens
aggacagtggtttccaatctttttggcaccagggtctggttttgcagaagacaacttttccgcacatgtggcgggatggtttccttttgggatgattcaagcacattacacttactgtgcac

SEQ ID NO: 282079 - DNA, 122 bp, Homo sapiens
agaaaaagcacaaagaagtgaagtgacttctccaaggtcccagttaatacaaatcaggagcgcttagctcctgttagagagcctaacagttagaaaacagtgttagaattcacaaagagctg

SEQ ID NO: 282080 - DNA, 122 bp, Homo sapiens
ctgaggtgctagcgttgtccagcagagactggggccggcctggggatgactcctctcctacggctgctgggctgattttctgttgactttgctctttaatgtgagaatctctgggtattggt

SEQ ID NO: 282081 - DNA, 122 bp, Homo sapiens
ggcgggaagcgagagaaagccagggcgctgccctgccggggtcagccgtccagctgaggacgcgacgtggaggggtggcatcgatccctgtggggagcgtgggaacggagaaacgcccaggg

SEQ ID NO: 282082 - DNA, 122 bp, Homo sapiens
ttgttctcataggaagggggtgaaatatgaattcagaactggggcgtgggagatagaggacggggaacacaactctacttaatttaacgaagataaactaagtttctgctctggaactgttt

SEQ ID NO: 282083 - DNA, 122 bp, Homo sapiens
ggagggtgcagcgaggaggcagagctgggcccagggtggtgctgcgctccatggagccagcgggagccggggacaagcgagagccatcccctaggagcccaccgcccccggaagccgccgca

SEQ ID NO: 282084 - DNA, 122 bp, Homo sapiens
ccaccctgggacgcccagcagtacacccggacctccaaaacccacccagcccgcagaagccgttcagaggacaccacaggagtctcaacccgatatgacacgcacctgctcggcctgggccc

SEQ ID NO: 282085 - DNA, 122 bp, Homo sapiens
gttcaatactgctgggtaactttgggggactgcagaataccgtttcctaacccggctgaacgttgcactcatcagggagatttaaaaaatatgaatgcctgagttctatccacagagattct

SEQ ID NO: 282086 - DNA, 122 bp, Homo sapiens
cagccaccccatgggcaaccagcgcggtgcaggctcattgtgtctgcgacaggcagaagccgagcgggtcccaacgttttttttaaaaaagtatttttttttagagacagggtcttgctatg

SEQ ID NO: 282087 - DNA, 122 bp, Homo sapiens
ttgcttgtctcttaatctgtcacaggcagttctgtttctggtcaaaccagcttgcttatgcgttctccactccctctctaacacttgctttcagatacgtaccacagtcacagctccctttt

SEQ ID NO: 282088 - DNA, 122 bp, Homo sapiens
gctgagccagggagcgtggcagaaggtgatcgggaaccctgatccctgcacgaacacaatcgttgtgattaaatgatgcttctcatattcaggttgcaaaccgctccaggcaagagcctggg

SEQ ID NO: 282089 - DNA, 122 bp, Homo sapiens
cgcctgagtggggcggggtgggagtgtgccgagctttgttgtgacttgtcgccaagcaaacgcggtgtcagcttccacgcaggaggctgagcatggagcatcctggggcctgtgcagaggat

SEQ ID NO: 282090 - DNA, 122 bp, Homo sapiens
gttcaaatggttttagaaaatgttttttgggttcttaatatttagatgagccaatatatgcgcacagggatgtatacagatgagagaacctgacacttcttaaaattctatggcagtacaga

SEQ ID NO: 282091 - DNA, 122 bp, Homo sapiens
gggagggggctaccggacctggatcccgggacaccccgggggtctggggggcgggccgcgcgcttacctgcgtcctcgtcgtcgaaggagttcatgcacgggaagtagatggcgagcgcctc

SEQ ID NO: 282092 - DNA, 122 bp, Homo sapiens
aggcctggggcgataatgagtctagtaattagggcctctctggattcaacccagccctttcgcccgccccccggcggcgcacaatgggctctgcgcgggtatcgagggagcggccaacagtc

SEQ ID NO: 282093 - DNA, 122 bp, Homo sapiens
tttttctcctgaatcttactttcagctgttacaagattatacagggattgctttagtgttcggtatcacttttgtaatagttatcctttagctattttgactggataattaaaaaacaaata

SEQ ID NO: 282094 - DNA, 122 bp, Homo sapiens
gcgccctgtgctcagcacttccactggtcttattttattgctgtttgtccaattaggtatcgcagcgtcctccaccaggtgttgttttcaaatgtgagggcacccagagctttctgaatgcg

SEQ ID NO: 282095 - DNA, 122 bp, Homo sapiens
tcctaccttctaaaaggatcttccttctccaggcacatggtcaccctgcacgtcaggggccggctcacccctgatattagcaaccccaagcgtcttggcgcagggagggatccccgtcagcc

SEQ ID NO: 282096 - DNA, 122 bp, Homo sapiens
gatggggtgtaagtaagaaacatttgtgtttcaaggaggaagctttatttgggaagagtgcggttctgctcggccctgatcagctctgccctgcccaccccatctcagccaggcggctttac

SEQ ID NO: 282097 - DNA, 122 bp, Homo sapiens
ctgccagcctgctctggcctgggacactccagtctcaggcccatctccacggctggatgccgcctgccctgtgccctcccgtggggcaggtgctggtccgggagatacctttgtttcttctg

SEQ ID NO: 282098 - DNA, 122 bp, Homo sapiens
cataggcttggtggtgtaaataagaacagtagcttaatttctataccacgccctctgcgacggtttgcaggcattagcacctatggaagtatgtactcgtttccctgttgtataggcgaaaa

SEQ ID NO: 282099 - DNA, 122 bp, Homo sapiens
ggtgttccttcacggaatctgtgcctgaatctgcggtctacaatttttaggtgcctcattcgaccagtcccagtggtattttgtcttttagccttggcactgccgttatactttctcttgcg

SEQ ID NO: 282100 - DNA, 122 bp, Homo sapiens
ggtttgaatcctgacactgtcacttactactagctgtgcaagttttacttattcaacaaacgtttattaaacacctactataaactggatactgtactaagaacttgaatacaaagtcagat

SEQ ID NO: 282101 - DNA, 122 bp, Homo sapiens
gggtgttccggccccgcagatcagtgccctctcaccccccacccctacccaaatgcgcggcgagtagagaaagtgctgttttagtgccagagtagcctggaggaagaatagggggagagggg

SEQ ID NO: 282102 - DNA, 122 bp, Homo sapiens
ctggactagagggattgattattgattggtgatcggggtcgctgaggctccgggccggcccggccgactggccgcggcaagaaggagctggctgggcggcgtgggcggcggggcgacgcggg

SEQ ID NO: 282103 - DNA, 122 bp, Homo sapiens
gtggtcgcccagcagccatcttaggaccccgtcaacatcgcgccttctcattggctcctgcgtctcaaccaatgggctggggccgttctggccctagggtcgccttagcaaccggcctcctg

SEQ ID NO: 282104 - DNA, 122 bp, Homo sapiens
cggcgcgcagtgcctactagcaattgtagtccttgccccaccttggcctggcgaagatcccgcccctggaactacgctcccgtcgtgctccgcggctccaggcggagacgaggcggggtgag

SEQ ID NO: 282105 - DNA, 122 bp, Homo sapiens
acagcttcttcaagggcacatggctagtaaacagaagagccagactcacccctaggctgtcgggctccagagccctgggattggaagatgaatgaagaaatggtggctccagggctccactc

SEQ ID NO: 282106 - DNA, 122 bp, Homo sapiens
ggcgcccgcgcgcgtcggagcagctccccgtcctccgcagccgtcaccgccggccgtcgccgcgccctggcctcccgcactcgcgcactcctgtccgccgcccaccgcccacctcccacctc

SEQ ID NO: 282107 - DNA, 122 bp, Homo sapiens
ccttcacttttagaaatcaaagcacaaccctctatcacatggtaaagagagtcagccatacggaaaaccaagctgattgttctattcctgtgcaaattctaaccctaaaatatttctctata

SEQ ID NO: 282108 - DNA, 122 bp, Homo sapiens
gcacgcgcacgcgcgcccgcagccgctcccccgcccgcgccgctccggctcccgcgcgcgcgcacttgaggcctcccttgtgcgtctcctccattcgctacgtgcagaatggtccgtcggca

SEQ ID NO: 282109 - DNA, 122 bp, Homo sapiens
cggctggcccgatccccgcccccttagctccgattggctgagatggtgggaggggtgtgccggcccagaagacctggactgtgggcggtggctaccgcctgaaccacctcggttcctggggc

SEQ ID NO: 282110 - DNA, 122 bp, Homo sapiens
ggctgcgagatgaagagagatgcggtgaccacaagcccatgcgagccttagggtgaaaatcgctgatctgtgaagcctccgcatggacaatattagttgggaggcaattttatcatctcctg

SEQ ID NO: 282111 - DNA, 122 bp, Homo sapiens
gtggaagcgtgggtgacggcctcccatttctgagggggactgtgaggcaggacaggaaggcgatgatgtgtcaggctccctcaaggtggccacaacagagctgggactggagcctgggtccc

SEQ ID NO: 282112 - DNA, 122 bp, Homo sapiens
tcactaaaatctctactttcgtatatattttatattaggcaagaaaagaaagtagcagaacggaatagaaacagtgtgtgtattttttgtgtgtggtaaagaaaaaatacatgacaataatg

SEQ ID NO: 282113 - DNA, 122 bp, Homo sapiens
tgcagctgggagtgaaagactagaatacagaaaggcgcaggcagtcacgtaggactaggccgggtttaacacccgaacagtggtgctagaaggtcagagtcttctacgtacatgttggaaac

SEQ ID NO: 282114 - DNA, 122 bp, Homo sapiens
tcctgtcggccttctctggcactcgagtttcttcagttttgtctgcgcaccccctcccttcggtgaccaacagaggacgctggtggtccaggattggattgaggattaaatttttcaaggca

SEQ ID NO: 282115 - DNA, 122 bp, Homo sapiens
ccagccagaagcaagcgcccccgctgcccctgggcagtgggctcggtaccgccacgcacccgtcctatgtgttacctggtcgctgctcactggagtgaaagccatttagtggctgatccaag

SEQ ID NO: 282116 - DNA, 122 bp, Homo sapiens
taggtagagaggcaaaactgaggtaccacaggggtacaatttattaaaattaactgagctcgtgtaatttggattcatgtttcctgataactgcagcttatagaccttacctcaaatgtctc

SEQ ID NO: 282117 - DNA, 122 bp, Homo sapiens
aatatcctagattgactttaatgagtagcctgaaatagctacaggctccagggggtagaccgaacctattgagggcctctcctaggagataaaaaggcgcttacatagcttgcctcataaag

SEQ ID NO: 282118 - DNA, 122 bp, Homo sapiens
ccaggatcactgataacagcaaagtagtgaagacctcgctctctgcggttatgtgattgacgtgactgtctccagtgtaaatctgcacccacatctagcacatgggaagcccgtctattctt

SEQ ID NO: 282119 - DNA, 122 bp, Homo sapiens
ctggattctgtaactaaagctaaattactttataaaaggagaaaaatggtaccattctgacgggtttgtggtgaagctgaaatgagatagccacataaagaaccatcacaatccctgacaca

SEQ ID NO: 282120 - DNA, 122 bp, Homo sapiens
ttcccaagctccctgaagtctgggtgtcggggtgtttgatgagccttttcataggtgaaccgcagcagtccatactactgaaaacaagggctgtcattattgaaagagccaaagtgggtggc

SEQ ID NO: 282121 - DNA, 122 bp, Homo sapiens
gaataatggagttcttgcccatggatatggaaagggcaaatcgtagcaccatattattttcgaaagcctcatactgagattattgtcagatatggtgcttttgtggcagggtaattaaagtt

SEQ ID NO: 282122 - DNA, 122 bp, Homo sapiens
aactgtttctaattacttccctgcctagactctccactgaggggtttggcaccagcaccccgcccagagcagtgccgctgcccaaatcctcgcaggcagctcatcaacgcaattgcaactcc

SEQ ID NO: 282123 - DNA, 122 bp, Homo sapiens
gcatttgcaggagttgctgaacaccaggcctgtcgggcagctttgctggaacagccgccccgctgcacagctgtagaagctggaccgttcccgaggattgggatagagcccatcagctttgc

SEQ ID NO: 282124 - DNA, 122 bp, Homo sapiens
gaacagaaaggaggcttacatggccaccatgaagtgatcaacagagatggtggccggggacgagaaggtggtggtagcagacagaagctacatcacatcaggcttctaggtcacaatgggga

SEQ ID NO: 282125 - DNA, 122 bp, Homo sapiens
actcagcacagtgagatcgcctcttctgttactcggtctccagggggcgggacctggagccgtatccaatcagggccatggggtggggtcgtgagaactgtggatcaggcgcactgcaggga

SEQ ID NO: 282126 - DNA, 122 bp, Homo sapiens
ggggacagtaggtttttgtgactacttaagtcttggcagcaagaatggggccccagaaggcgctagtgtttctggaacaaccgatatcagggcagatgtcttgtgcttggccccttggtggg

SEQ ID NO: 282127 - DNA, 122 bp, Homo sapiens
tttccaattcagggacttagagggaatactagcaataccaggcaggatgacacaaacaggcgattgctgtcctcccttgactttttctagaatgatgattattgaaagggaacagatgtgag

SEQ ID NO: 282128 - DNA, 122 bp, Homo sapiens
cccagccaggggaggcccggcatgctctggctggacatggagcagctgctggctgtcaggcgctcagcttccgagaccgagctgcctcgtgtagcctccgtgccagaggcgggggcatctgg

SEQ ID NO: 282129 - DNA, 122 bp, Homo sapiens
gaccgaaggtcgcgtcgggtcagtgtgcagcccgtggctgagaggcggctgctgaggggccgggcgggctaggggccggctagccgccgttcgcccctgctttgcatattcatgaagtctag

SEQ ID NO: 282130 - DNA, 122 bp, Homo sapiens
tgccctgtcctctgctttgcagacataacagctgggagccggaggagaacatcctggacccgaggctgctcctggccttccagaagaagtgaggacgctgacagcactggggagggtgtggg

SEQ ID NO: 282131 - DNA, 122 bp, Homo sapiens
acgatactgtttcatccccggacggctccgagagatgagtaccaatattatcacatcttacgtaagaggacactgagtctcagagaggcaaagtcagtgtccctggtgcacccagctagtgg

SEQ ID NO: 282132 - DNA, 122 bp, Homo sapiens
gaggttactagggaaggaaagagactccagggaaagctggagagctgcttaatatactttcgaaagtaagaagagtttcttcaagatttatgaacatgttaagttttccagactactaccct

SEQ ID NO: 282133 - DNA, 122 bp, Homo sapiens
cgcccccgcccccgcccccgcccccgcccccgcccccgcccccgcccccgcccccgcccccgcccccgccccgctcggacccctccgctgcgcgcgcagtttcccacaaacccggaagcgga

SEQ ID NO: 282134 - DNA, 122 bp, Homo sapiens
caggccgaacccccctcccggcctgggttcgcgggctggttccctcccaaccgaggagaacgcgccgccacccccgcccccgtcacgccaccatcgagagccggaccgccaggggagaaaga

SEQ ID NO: 282135 - DNA, 122 bp, Homo sapiens
gaggcggcgccgccgcacaatcgccccggaatgcccgccagggcgcgcgtggggtgcggccgtccggccctgcaactcgagctgctgcccctggttaaaaataccccctgcccggccctccc

SEQ ID NO: 282136 - DNA, 122 bp, Homo sapiens
tcatggactttgctagtccagtggcttttctttttcaagcttttggacatggcagtggggcgagtcgcctcagttcctgggctccttggggttaggggggctggtggtgagagaatgaggat

SEQ ID NO: 282137 - DNA, 122 bp, Homo sapiens
gaacccacctccggcaacaatagcgtattagacaccagtggaacaacttgatccagtgagcgaattcgtgatttctgtttacatcacagcaggatgtgtctagaaatcccaggttaggaatg

SEQ ID NO: 282138 - DNA, 122 bp, Homo sapiens
catctcttcttcctctccccttccccctgcgttcacttacttccttcttttccttcacctcggcccggctctgaaaggatcgggcccctccggcccgcacccacccccaagaggggccttca

SEQ ID NO: 282139 - DNA, 122 bp, Homo sapiens
ctctgagcctgctgctgactctttggtgaagatccagtagctagacatacagtagatctccggtaggggttgggaggggcaagaaaaagggacatctaggccgggcgcggtggctcacgtct

SEQ ID NO: 282140 - DNA, 122 bp, Homo sapiens
tgtcctgacttctttcttcccctaccactccctagaccatataagcagataagcagagctcgtggtgattaacagctctacctgtgatttaaaaacaaatgcttggcaaacagctattatct

SEQ ID NO: 282141 - DNA, 122 bp, Homo sapiens
atgccgcacaggtcccggcagttgtctgatgtcacaccgcagctctccagcctggggacacgggtcacacgtgaggcagcacgggaccccccctagcccacaccccgcacccccccaaggcc

SEQ ID NO: 282142 - DNA, 122 bp, Homo sapiens
ccaaccagccatgctgcgtggaagaagcaaaaagagggagaccacatgctccaggaccaacgccatgcccagaagactcgacagccgcccgccaatctacagtgatggaaagcacgtcggcg

SEQ ID NO: 282143 - DNA, 122 bp, Homo sapiens
caacaataggaaaaatataacccaatgtaaaactgggcaaagcatgcatacagacacttccgcaaagaagatataaggatggcaaagaaacaataacaaaaaaagaaatatctgctgaacac

SEQ ID NO: 282144 - DNA, 122 bp, Homo sapiens
actccactgtggcagggaggtaacgagccatgacattgtgttcatcacagtccctttgctcgtggaaatgccaggcatagatcagcaggatctgggagcctaagagaagcagcagcagcgcc

SEQ ID NO: 282145 - DNA, 122 bp, Homo sapiens
gagaaaaaattctgaaaatgaccatcagtcctggctgacaatactcttccttattctgcccgtctgttacattctaagaattattgcaacactgcagatatttattccaaacgatttcttta

SEQ ID NO: 282146 - DNA, 122 bp, Homo sapiens
cggggtgggccatccccgaggccatccgcagattttctcgcactctttgctccacccccacgtgcaacaaggacaaccggctgccgcctccagcttccagcagggctagaagatgcgctgcc

SEQ ID NO: 282147 - DNA, 122 bp, Homo sapiens
gctgcagcgtcgggctccggaggcgggggcgggaactggggcgcgctgggagctgtagtccggatcctatcgccgcctgcggcgtccctgcgcggggcgggagataagaatccgacgcgccc

SEQ ID NO: 282148 - DNA, 122 bp, Homo sapiens
tgaagacacagctctttctggatacagagaccagtttagtttggagattacaggttctatcgtgcctcattctctgcattcactgaccatgctgctcaaatcttcacagagcgggtctttct

SEQ ID NO: 282149 - DNA, 122 bp, Homo sapiens
ttcgtcagttagtggaaactggtgacaacagcagagaaaactctggagagctataaactgcgtgaaatcaagtgcattggaagttacagaaaatacgcaagaacaatgggaaaagaactcca

SEQ ID NO: 282150 - DNA, 122 bp, Homo sapiens
tcttctttccaaatataaccagaatcctgggtattcactgtaaagttcaacttggctctacgtttgaatatttttatgataatatttggaaaatataaatataactgaaaccaatactagcc

SEQ ID NO: 282151 - DNA, 122 bp, Homo sapiens
gcaattttcatacgttatcttgagtaatttcacttagagatttcattgaagttaattcttcgtcactattgttggtaaattaagagtttttaggaagcagtttctgtaatgaaatttcagat

SEQ ID NO: 282152 - DNA, 122 bp, Homo sapiens
ctgggaaacaatgtgaagttaagcctagatctgtgactaacaccataaaagcaaaacaatcgctctacctcataggagtgctgctaaaaagacacaaagacatattttaaaatatttacgtt

SEQ ID NO: 282153 - DNA, 122 bp, Homo sapiens
tggtggtcttcagtggaatgatgaaataatctgtcaatctggataaagagaggaactgcacgcattcaggtttggagatgaagagggcacagagctgcccacacaactctcactcctgaatg

SEQ ID NO: 282154 - DNA, 122 bp, Homo sapiens
tttgagggaagtgttggcttttacgttttggaagagaattggatctctctcttcaataggcgatgtgcacaaatcattgcatggattctaggtccaggatctgaccccactggctttcacct

SEQ ID NO: 282155 - DNA, 122 bp, Homo sapiens
gtcctcccgcaagggcagggctgtcgacctgtgcgccccaggtcacgatcgggttcacggcgactcctgaggacggtaagtgcatttctcactttcgctgcttagtgagtatttaaatatta

SEQ ID NO: 282156 - DNA, 122 bp, Homo sapiens
cagagctcgatgtggatgtggttgagaaccatgacggtacctttgacatctactacacagcgcccgagccgggcaagtacgtcatcaccatccgcttcgggggtgagcacatccccaacagc

SEQ ID NO: 282157 - DNA, 122 bp, Homo sapiens
gtgcgtttggccgaggagtgggtgggagacacgcgtgtccatgccgcgagggtgtgtcgacgcccgagcctgcgtggggcccggggccgtgtgtctggagtggccgagggcgtgaggggcgc

SEQ ID NO: 282158 - DNA, 122 bp, Homo sapiens
cagcagctataggccgtggaggtgggacgatgcgtcacttcctggtcttttggggggagccgggatatataagggcggtgctcacgcagcgctctcgcttacacagtatggccggcgacatt

SEQ ID NO: 282159 - DNA, 122 bp, Homo sapiens
ctacctgatgggagaggacaagctaccaggacagcttgtctcaccaagaaattgtgataccgcatcccccaacgtgctggcttcctgacttccaaagttgcggtaagtttgatttctcacag

SEQ ID NO: 282160 - DNA, 122 bp, Homo sapiens
cctgagacctcagcactgattagtagccctggaggcaaaagtagatgtggagctgagcctcgaaaccccatacaccttgtgcctacagcttggggtgggtggggactgggattttgtcctca

SEQ ID NO: 282161 - DNA, 122 bp, Homo sapiens
agtaccgagaaggcacgcagctgaagatctggtaggggatgcatgcggcaccagcatggtcgtggcacccgagtgggaagtgcaacaaacgccaacatcttgttacttttaacgcctaactt

SEQ ID NO: 282162 - DNA, 122 bp, Homo sapiens
agatctcatgtgaccaggagtcgacgtgtgcagaagtcctggtaatctggtccttgttcccgtctggataccagcttccttcagcagcgcaggcggtggtccctgaggcccgtggaaggagt

SEQ ID NO: 282163 - DNA, 122 bp, Homo sapiens
aacgacaaggcaggggtttctgtcaccgggagagctcagccacgttcagggctaccttggcgtgggcacggtcactgcttctgtctcattttcttccagcaacttcgtgtacgacgacggga

SEQ ID NO: 282164 - DNA, 122 bp, Homo sapiens
agcgggagaggggtgtgatgtggcattcaggggcatggaaacatggtgcctggcccactgcggtcagcgctcactcgtggggaggggagacgagccagctgttgaatgctttttttccagct

SEQ ID NO: 282165 - DNA, 122 bp, Homo sapiens
agacagtaaacatacaggctccctcgaagtaaggtaaacaaggcatacatttgaccatcacgtacattcatgcaaaatacagcaacgcatgcctggtcttacaaacagatcgcattgtgcct

SEQ ID NO: 282166 - DNA, 122 bp, Homo sapiens
ccttcaataatcaagtttttgttgactaccacccagggattagtggggcccacaaaaccacgtgtcaacaagacacatctacaccacacatcaacaacgagtgtaccgcgcgtgtctacacc

SEQ ID NO: 282167 - DNA, 122 bp, Homo sapiens
gcagaaagacagccgggaaatggagaagggaagtccgtccctccgacactgaggctgcagcgggaattcgcactcggcaccaatcagagccccatgccgcggcccctctgttgtttcagact

SEQ ID NO: 282168 - DNA, 122 bp, Homo sapiens
ctgttgtctgaaagaaaagaaaatggttccctttagagtgttacgctttgagaaaagcatcgctgatcttggtaacacatttgcagagaatgcttataatcagacgtggatgatgttgaagt

SEQ ID NO: 282169 - DNA, 122 bp, Homo sapiens
agcttcccctcttcccctgcagtgagtttcctgcgcagcggcactaagctcatcttccgccggaggcctaggcagaaggaagctggcctgagccaatcacacgatgacctctccaacgcaac

SEQ ID NO: 282170 - DNA, 122 bp, Homo sapiens
ttacttaacatataataattggactagagtggtgtcttatctgtcacaacacttttctaacggtagagtgtgtattactgctgtttcccacaacaaatggtgtcatatcttggttttggctg

SEQ ID NO: 282171 - DNA, 122 bp, Homo sapiens
gtctcactgttccaccccctcgtctcttcccccttcctggaatggaaatttgtcttctgacgctgccacctggcagcaggcgatggctgtggcgagactactcagaatggcagcagccacca

SEQ ID NO: 282172 - DNA, 122 bp, Homo sapiens
gtcgggtgcggagctcgcgagtctccggcaagccgccgccgccctggggccacctgaccccgctcctgaacgcggggcctcagaggcgagttttgggtctacacagcaaaatgtggcccgtt

SEQ ID NO: 282173 - DNA, 122 bp, Homo sapiens
cacctcggcccccgacggagccggcacagagcaagaatgaggtggtgctcatcccacacacgacgttccctgtgctggcgtcgaagcacctgcacaacgttgcttctttgggaacacgcatt

SEQ ID NO: 282174 - DNA, 122 bp, Homo sapiens
tgagctttgtctcttcctcggacatccgcccactgagcagagtagctgcttgttacacaccgggttcccagctcccaattaggtgcccaggagcggagggtccccagggatgctgggggagg

SEQ ID NO: 282175 - DNA, 122 bp, Homo sapiens
gaggtggcaggagtcatccgttctggaaacagccagaggtacaacctcgtgtccaggcaccggccgagttgggactcagggtcaaagccaagctgaggcaacgtcgagatggcgcgtaacag

SEQ ID NO: 282176 - DNA, 122 bp, Homo sapiens
gattcagggtgctactgtaccccgagtggttcgagtcctggctctgccgccttcactggtcgagctgacgctctttacaccgggggcatgggctgccacatcccagcagagtgcaagggccc

SEQ ID NO: 282177 - DNA, 122 bp, Homo sapiens
gggctgtaactggtggcatttgtcccgggaccaggtaaggggccttgggacaatggcgctcgccctgtctacctccaatccccacatctcgggtgggtgctgagattgctgtcctgactgcc

SEQ ID NO: 282178 - DNA, 122 bp, Homo sapiens
aggaatccggcctttcggcgttcccacctgctgctacgggcgccgggagcctagttgctgcgtctcacggatgcaggtgaacccagcgctgaaccactttcacagtccagaaagcatgacat

SEQ ID NO: 282179 - DNA, 122 bp, Homo sapiens
gtacctgctaccagatgtttgttttaagcgtagaaaccactgatatacacaatatgaatccgcttacagcatataggcaatacataaggagaaatgcccagaaacttcctgtctggtttatc

SEQ ID NO: 282180 - DNA, 122 bp, Homo sapiens
cagctcctgccgtgtgtgagccttccctaccagactccggccatgatggggcagacgccgcggtcataaactgtaaacttggttcccctgaggttagatctaagtttgccagtatacctttc

SEQ ID NO: 282181 - DNA, 122 bp, Homo sapiens
ggctgctgtctacaagtcttatgacccagtgagggagcagactgttctgccaaatgccatcgctactaggacaaaggacagtcacctggtgaggatctgccatcaggccacattttcccatt

SEQ ID NO: 282182 - DNA, 122 bp, Homo sapiens
gcacaaggtcctacaggaagtaagttgcaaggctggtagtgagactcgggcagttggctccggagtctttgctcctaaccactatccacactatctctcatcaaataattcacaggccaggg

SEQ ID NO: 282183 - DNA, 122 bp, Homo sapiens
atcccccagcactcagggccgcgtcttcaccgggagctgtaatcccccagcactcggggccgcgttttcactggaaactgtagtcccccagcactcggggccgcgtcttcactgggagctgt

SEQ ID NO: 282184 - DNA, 122 bp, Homo sapiens
cacttaccctgggtgttggcaggtccagcactccacgccccgtagcctgcaagaagaccccgtgagttaaaattctatttgtcacaccagagaacgggtccttttgggggtactcctaaagg

SEQ ID NO: 282185 - DNA, 122 bp, Homo sapiens
gagaaagaggcgaggccccgccccaaggactaccaataaatgggcgaagttggaatcgcccggatgggttccgttttatgcaaattttagccgaagaccacacccttcctcattccaaccat

SEQ ID NO: 282186 - DNA, 122 bp, Homo sapiens
gcaccttgggaggccgaggtgggtggatcacgagggagatcgagaccatcctggctaactcggtgaaaccccgtctctactaaaaatacaaaaaattaccggggtgtagtggcaggcacctg

SEQ ID NO: 282187 - DNA, 122 bp, Homo sapiens
ggctcagcagcaattccggtgagcacgggccgggggctcagcatttcagtgagcacgggccgggggctcggcatttccagtgagcacgggccgggtgctccgcagcatttccggtgagcacg

SEQ ID NO: 282188 - DNA, 122 bp, Homo sapiens
gctctttccccagtctaggctccctcctgccatctaacaaaatgaagccaatttctcttacggttctagggcctctccttcgcgtctctgctgtggcacctttccttagccgcctctccgac

SEQ ID NO: 282189 - DNA, 122 bp, Homo sapiens
tcagcctcctgggctggagaagtagatagtccctcccaggtcaaattccagggcctccaccgtccctcctgcctgcaactgaggcctcctaccccgtaggcctctcctgtaagaatgtgtaa

SEQ ID NO: 282190 - DNA, 122 bp, Homo sapiens
ccctgggctgcgaggccccagcccgggttttcccacgctccggtgtgcgggccagtggttcgctcccgccgccggagcaggcgaccagaactccagcggagaaactctcatgctgcggggca

SEQ ID NO: 282191 - DNA, 122 bp, Homo sapiens
cacaggccagggcgctggagagggacgtcgccgggacagagtaggctgtggctgcccggacgcccccagagcttcccctagggcctcagcattttaggcctggttttggagggctgaagcct

SEQ ID NO: 282192 - DNA, 122 bp, Homo sapiens
acagattaataaaatcttattttgagcagacaggaaattagaaccagtcagggctggagccgtggcaaccgaaactctgtgccgtctttttgatagtgctttattaaaactgtagcttgtaa

SEQ ID NO: 282193 - DNA, 122 bp, Homo sapiens
aagctgctatttcatgataacagctcacggagctgtgggcctgctaagcctttcccatctcgttctggaattcctctatagcccatccgtactaccaggagactggatccgcaaagtagaca

SEQ ID NO: 282194 - DNA, 122 bp, Homo sapiens
tctcacatatagccagtgctgggatccacggattttatgtgcgagaaaaagtggatctcccgcagcacgggaactgttttttgttgtggtggtggttgctgttgttgtttcctctgctggct

SEQ ID NO: 282195 - DNA, 122 bp, Homo sapiens
agataatttcggtaaatttcgccaagcaggggcaggacaaagagtatttgaagtctaccgcggggagaacttacctaatccttgaatgttaaaaggctaaaaactccactagtcggaagtga

SEQ ID NO: 282196 - DNA, 122 bp, Homo sapiens
tcccacctctgctgagccttcacagagggggtccttgacctttgctctcaggaaggagcccgtgccagctgatactggagtaggagtgggtgaagaccctccgggctcccgagctctagagg

SEQ ID NO: 282197 - DNA, 122 bp, Homo sapiens
ggtccgccatcttggtccccattcggcacttccggtcccgcgaggccccctcttcgttggcgcctatttggggctgcccacagaagtgcccaatgaactctaatggttttttttttttaaag

SEQ ID NO: 282198 - DNA, 122 bp, Homo sapiens
caggactccgcgtctctcctgttccggcctgttccgtacgcctcgtcaggttttctgctccggtgaacttggagtgtgttggggactgacagatccagagaacatgcccctctgctgcatga

SEQ ID NO: 282199 - DNA, 122 bp, Homo sapiens
tgggccttgcggaagccgtcctcggccgcccggctctcgcggaagccgcccagcacaggccggtggaaagccccccgctgccaggcgcgcacccgctcactgtcctgcccttgcagcttctc

SEQ ID NO: 282200 - DNA, 122 bp, Homo sapiens
cctgggagcgctatgggagactggggcttatttcatccctacagctttgaccataaaagacggccgccccccgaagcggccatttcggaggcctaccctcagggacacattctctttctcag

SEQ ID NO: 282201 - DNA, 122 bp, Homo sapiens
cgcagcgtctgttcacaccagagcctcgcggctgtcgtgcaggaaggcaggcacgaggtacgtaccgtggcggctccgttcacctgcaccgatttacacgcggtcgcagtgagggcggaagg

SEQ ID NO: 282202 - DNA, 122 bp, Homo sapiens
tgctgtcgctctatgcgcgctgcacgtgaaggcggcgcgcgcccgggaccgggattaccgcgctctctgcgacgtgggcaccgccattagctgtccgcgcgtcttctcctccaggtagggca

SEQ ID NO: 282203 - DNA, 122 bp, Homo sapiens
aggaactgacaggcaatttacaacgggattataagtgaaggccttagaatccagaggggccgattaggcaacaccaggggataaacaattgaggtcacactgctcggcatgggcagaagcag

SEQ ID NO: 282204 - DNA, 122 bp, Homo sapiens
ctagtctccaccttttattttgaccggtccgatggcgacaggctcgcactaggacccaggcgccagagtgcctccgtctgtcctgtaggttcattcaatctcccatacacacagactcacag

SEQ ID NO: 282205 - DNA, 122 bp, Homo sapiens
tgcactgagcccctggagggactggtcccattccgggcttccaggtcctcctggctgcctcgaaaacgcctcctcctccagcccttgtcgtccagggacagggctcgctccagtcgaggcct

SEQ ID NO: 282206 - DNA, 122 bp, Homo sapiens
gagcgttcctccccagctcgaatgcccggcggccgaggcggctagagcgtcgcctcctcccggggaaccgcgtgtgaccttccagcccgcggaccgatgctgccggcggccgctcgccccct

SEQ ID NO: 282207 - DNA, 122 bp, Homo sapiens
cgtggagcaggttggagttcagatccccctctgtgttttcagccatggcgaccagacaggcgtacgggccgggggccggcgaagacactgagttggggtggggggtggcttggggttcgctc

SEQ ID NO: 282208 - DNA, 122 bp, Homo sapiens
ctgctttgtaaagattgtggcttccgcctgaactgcttctttcctgcctcaaaggtgagccgctacgggagggaatgggaagaaaaactccgagactgctgatgaatatgtgataaagtggt

SEQ ID NO: 282209 - DNA, 122 bp, Homo sapiens
ccgcaacaccgcccccagtgccgccccacagcccccgccccttccgccccggtgcccgctcgcacctccaggcaccaacaacaggaagcccggcacgaagaagatggcgctggagacacctg

SEQ ID NO: 282210 - DNA, 122 bp, Homo sapiens
tctgattgacgcttctgccttccaccatgtgaagactcgatgttcctcctctctggaggacgcagccctcaccaggcaactgaaccagccagcgccttgatcttggagttcccagcctctgg

SEQ ID NO: 282211 - DNA, 122 bp, Homo sapiens
ctatggaatcatactctggaggtaggcccagcaatctgttttcatgcctccaggtgattccgatgcatgcccaggcttgatttttttttttttttttttttttttttttttacagggtcttg

SEQ ID NO: 282212 - DNA, 122 bp, Homo sapiens
aggcagaggttggggggtcaggcgaccacatgggccgttcatctttgcaggaactgacagcgttagccccgacacagagggcatgggccccgcggctccaccgggaagggggctcgcccgcc

SEQ ID NO: 282213 - DNA, 122 bp, Homo sapiens
cagggcagttccctcagccgaacaccccgggagggagactcgcctggaagtgtctcggagcgacccttgctcgggtgctgccccttcagtgtcccggacgtgccgggcaacgcgatgaccag

SEQ ID NO: 282214 - DNA, 122 bp, Homo sapiens
ctcctagggctgtggagggtgcggttcactcctgggactgtggagggtgcggatcactcccgggactgtggagggtgcggatcgctcccggggctgtggagggtgcggatcgctcccggggc

SEQ ID NO: 282215 - DNA, 122 bp, Homo sapiens
tgtgtgtgcgcgcgcgcgcatgcacgctcgcaaagaggttaaatgtcctttcataaactgcggtttcctctttcccttgcctcccctgaccctatatcctcttcgtgcgctccccggagagc

SEQ ID NO: 282216 - DNA, 122 bp, Homo sapiens
ctagctcacctgcatctttctaaagtatctaaggaacttgcttcttcctgttcatgaggtcgactcagcaggatatcatcaatatagtggactagtgtgatgttctatgacatgttaagaca

SEQ ID NO: 282217 - DNA, 122 bp, Homo sapiens
catgcgcgtagggagcacgtagtgcgcgtgggaggctccgccttttcggtcctgggaacccgcgccccctgccggtgccctccccgcccggccctagctctctcgccttctcgcccgcccgg

SEQ ID NO: 282218 - DNA, 122 bp, Homo sapiens
ttgcgtcaacattgcgaaaaggagaaggcggagcggtggcccctccccctcccctccccccgccggctcctgggagagaaaagccccagcacacgacctaagtacacagcgcgccagccgcc

SEQ ID NO: 282219 - DNA, 122 bp, Homo sapiens
tggtgttgtgggtgagatgagtttgtgatcgggcccttgcgaagccaaagaggtgcccggcgggcaggcggcggcgggatgcgtgtgcgctcgctctgtcggcgtctctgcctctctcagct

SEQ ID NO: 282220 - DNA, 122 bp, Homo sapiens
ggcagccatagctaagtgccacaaactgggtgactttaagcaacagacatcagccaggcacgctggctcatgcctgtaatcccagcactttgggaggccaaggagggcagatcccttgagac

SEQ ID NO: 282221 - DNA, 122 bp, Homo sapiens
ctgccttcccgtaggcgtggaatgctagtgcaaaagaaaaaggaacactcaatccaacagcgtgagaagctcgtccagaacaaaggtactgagccaagctgtcaagggcgatttcacagaaa

SEQ ID NO: 282222 - DNA, 122 bp, Homo sapiens
gaaaggaaactgttcaggcatcctgaggttcaggcatcctgaggttcttcaaattcctaccgcctcacaatgcatgactaagaacatcctttgttcagacttccttgtccgtaatgtctcca

SEQ ID NO: 282223 - DNA, 122 bp, Homo sapiens
ggacaaggcgcccaagcggcggaaagctgcagctggcccggccatagctgtagaacaggacgcaccggaccaacgccgcccaggccacccaagaggccagccaatcccgaccgcccatgcaa

SEQ ID NO: 282224 - DNA, 122 bp, Homo sapiens
gtctcgcagctgttccccagttgctattccttctcctggagccaacaaccaagggaggggcgggagggggcagcagctgtcccagcacctccctaggcccagccctctcctccccctccatt

SEQ ID NO: 282225 - DNA, 122 bp, Homo sapiens
tgaaagagaaaaaggtagctttgggttctccgggtggatgagacagcgaagagctgtccgcgacctgatggtgctgaaggcaggggagggagaccggggttcaggtgcacccccagaccagg

SEQ ID NO: 282226 - DNA, 122 bp, Homo sapiens
ttcggagagtctgatggtattgtctggggagggggcggtgggagggtgggagcgacctggcgacaaggcaaaaagtagagggtgcagagggtaggtccctattccaggaggcagaggaagag

SEQ ID NO: 282227 - DNA, 122 bp, Homo sapiens
ggctacgtcctcccagtgaaggtggtggcagagtgtggctgccagaagtgtctgccccctcgggggctggtccggggccgtgttgtggctgctgactccggggagccgctacgcttcgccag

SEQ ID NO: 282228 - DNA, 122 bp, Homo sapiens
gatcatggttaggactttttctggccaatgagttatgagcagatgtgaagcgtcaccttccgattaaggtggttatttaccctgatgaaactccagagctctccttcccttctgagacagag

SEQ ID NO: 282229 - DNA, 122 bp, Homo sapiens
cttacctgtagcatgtggtgagctcgcctgaagacttcagacacgggtatttagtcgtcgcgattttgctctctgagcagatttctctatgaaaaagtgcagaggaaatgttcgattctcag

SEQ ID NO: 282230 - DNA, 122 bp, Homo sapiens
gataaagcccaggaggccgagcagcaggcgcatcaccgccttaccagcaccacgtttttccgcagtaaccggatgactcctacgggtcacctcgcaagccccgccccctcctcccatgtgag

SEQ ID NO: 282231 - DNA, 122 bp, Homo sapiens
ttgcatgatgaacatgtgaacatggtgtgtggggtggacgggccagaccagaagcccttgcgagagaataaaggagcacaagacccagctttgaccttggctcagccacacacagctgtgtg

SEQ ID NO: 282232 - DNA, 122 bp, Homo sapiens
ctttccgggcagtgctgggtgatcgcagtgggtctgcgtctgggcccctccttctaagaccgagtctcggggacgggaaagatgcacagctgcttcaggagcatttcacccagtgggcgggc

SEQ ID NO: 282233 - DNA, 122 bp, Homo sapiens
ttggagagattaaattttcctcggctgtcccagggccgggcttgggagtttccgcagcaccggcctcttggagggaggtgttttctgtgtgtttagcaaccgctgtagccccaggtgcattg

SEQ ID NO: 282234 - DNA, 122 bp, Homo sapiens
gcatgagggcctgagaatatgcatttctagaaagtttccaggggaagcagatgctgctggcgctaagaccacaccttgagaaccactggtttaacccatgttcagggtccagaacccctgaa

SEQ ID NO: 282235 - DNA, 122 bp, Homo sapiens
ccctttgctggggtccaggcaccccccttttgtccccaatgtatcttagagggggctccgcgcctttcccttccaccgacccctgggtccccgccctccaccctccgctctctctcgaagtt

SEQ ID NO: 282236 - DNA, 122 bp, Homo sapiens
tgacacatgctaagacacggataaatcttgaggacattatgcttagtgaaataagtcagtcgctaaatgacaaatattgtatgattccacttatatgagatacttagatcagttaaaatcat

SEQ ID NO: 282237 - DNA, 122 bp, Homo sapiens
gtcctccagggagaccacatgccgggtgccgtcaatccagtaggtgagatccagcgtgtccgcggggccgttggagacgatctcgaactgcctctgggagagaccggggccctccagagcca

SEQ ID NO: 282238 - DNA, 122 bp, Homo sapiens
aatggcaaaaaccacaattacttttgtaccaccctaataaatgctaaatttatttgttaacgtctatacatctctttttcttaagacattatttgacataagaaacttaacttacgaccagg

SEQ ID NO: 282239 - DNA, 122 bp, Homo sapiens
ctctcggagggggaacaaagagcagcgactaaggcggcagaggagcggcggcggtggcggcgctgcagcagcgggcgggactggtatggtggttccacagggcagaccccgctgcactcaca

SEQ ID NO: 282240 - DNA, 122 bp, Homo sapiens
gaagccggtcagcgccagccggaagccccgccccctagaggcaccgcggacaccgtgcagcgctgttcacccagatgccagctgtgaccttggctaagccagtgacttaactcgggcccgtt

SEQ ID NO: 282241 - DNA, 122 bp, Homo sapiens
tagtccactgggagagagagagaccgagccggtctcccttcacatgctctgcattataagcgaaggggcgggcaggtggaaattcagaatattacagagaccggaaagaacatcatgggctg

SEQ ID NO: 282242 - DNA, 122 bp, Homo sapiens
tgcaaatgcaacctgcagacaagtcccccaactcttcctggaagagacagattctggaggcgcagaggcactgccaagggggccgcaacagaccccgaaagaccttgcgagcctgccatgtc

SEQ ID NO: 282243 - DNA, 122 bp, Homo sapiens
tcatgcacctctgcctgcgttacatctttctttcagtaatacacagaggcctatacaaggcgttggagatataagactgttgggatatgaggctcccaccttcatcttggatggggagacag

SEQ ID NO: 282244 - DNA, 122 bp, Homo sapiens
cgtcggtctttagcgtccggcgagaaactagagcacgtcggaaacatggcggttcctattcgcggcactagctccgccttccgctgcttccgtcaggaggacgcggagactcggaggaagag

SEQ ID NO: 282245 - DNA, 122 bp, Homo sapiens
agggaagagtacccctaccccccagggttccagggaacacagtttgaagaccgtttggtccgctcatcacaaggcccctttatgcctgctcctctggggttcgagtgtttaggattccaaga

SEQ ID NO: 282246 - DNA, 122 bp, Homo sapiens
gtttttgtctaaatatgtctttgttgtaaattatactacatttctgaaactgaggttgaacgagactgaaccctgcttcccgtggtgttcagggaattatgtatgagtgttgtgaagtgagg

SEQ ID NO: 282247 - DNA, 122 bp, Homo sapiens
tccagcgtcagcgcggggcctgggggcggtggcttgagggctcgaagccgggcggctgggcgcccagagccccgtctgggcccttcgctctttctcctcccccctccccccgcctccgcccc

SEQ ID NO: 282248 - DNA, 122 bp, Homo sapiens
gaaggcggcccgggcagcgctctctagggtggcaccaagttgctggttgccctctctccacgcagcctctgcgcgcaccgagcgggcactgcggtcgggcgacaccccttccacgcccccct

SEQ ID NO: 282249 - DNA, 122 bp, Homo sapiens
gcaaagggaagccctttctgttgtctgaaagaagagaaagcgcttccctttgctggattacggtttgagaaaaacaacactgaagctgatgccgatcgtggtaatacatttgcagagcatgc

SEQ ID NO: 282250 - DNA, 122 bp, Homo sapiens
cttctttggagctgtctgactccgaccccacggagtagtcggagaagctctgggccatctcgtcctcgctggatgttgggctgcgcggcatggctgcctgtgtcttcgaggtggggagaagg

SEQ ID NO: 282251 - DNA, 122 bp, Homo sapiens
ccaccgccgcggctttttatggctttcttccccccaccgccgcggctttttgccccctgccgtcgcggccttttgcccccgccgcgaccttttgcccccgccgccacagattttggccgccg

SEQ ID NO: 282252 - DNA, 122 bp, Homo sapiens
ttgacaggagagaagaaggtttggacagtgtgattcatggtgtccagcgaagaccagcggcggtcgggttactgggatggttctcagtgagccctccctttccccagtagtttcggtttctc

SEQ ID NO: 282253 - DNA, 122 bp, Homo sapiens
tatgaatgtacagtgcgcaagagggggggcgggagggcggaggacgctggaggaggggcacgtgacggtgtcagccaatggctgagcctcctgcaaaagtttgccggcttccgcagtgatgg

SEQ ID NO: 282254 - DNA, 122 bp, Homo sapiens
acagtgccagcccctgccatcccaaagctattgttaagccccccaggcgtcctccacccacgcccactagcctgccatgtccacagttccttgggctgctgaggggctagtgcagtggtcct

SEQ ID NO: 282255 - DNA, 122 bp, Homo sapiens
acctccacaggctgctccttacctgccgagccctgtgactgagggatcagaagccccctccgctggctgcggtctccctgcagctgctggcctcttccccggctcctggttgccaccaacct

SEQ ID NO: 282256 - DNA, 122 bp, Homo sapiens
tcggagaattggagcaaggactactgtatcctgttcagctccgactacatcaccctcccccgggacctgcaccacgccccactcctgcccctgtatgatggcaccaaggcaccctggtgccc

SEQ ID NO: 282257 - DNA, 122 bp, Homo sapiens
catccgcctcacgtggctcagcttcacgctctttgtcatcctggtcttcttcccgctcatcgcccactattacctcaccactctggatgaggctgatgaggcaggcaagcggatttttggtc

SEQ ID NO: 282258 - DNA, 122 bp, Homo sapiens
gagtcagggtggaaaaaaacaagcaagcctggagcgcccggctgccccgccgcccgagcgcgccccacacaaaaggcgccgagagccccgcgccacccaggactccagtcacggcgccgacg

SEQ ID NO: 282259 - DNA, 122 bp, Homo sapiens
aaggacccgtcataaacacaagcttggcaggggccacggaaaggtgcgcgcaggcgtcttcgggtctttgatagctgttcacgtgcaatccgtgtacttgcacacctccaacaaataaccaa

SEQ ID NO: 282260 - DNA, 122 bp, Homo sapiens
gtggcaccttcctcacttcagtcatttctttcccgctctggtctcagtggttccagtcagcgagcaggacagaggagcccggaagaggcgccgtgcacttccgggtcgaagagcgcacggcg

SEQ ID NO: 282261 - DNA, 122 bp, Homo sapiens
ctccccgtccgcccagctgagccgagatgcggggttcagacagggtcccatccgcgggtccgcgaggcagcgcctctacccgctacccccaagcctgggcgcaccccctcgggctcctcacc

SEQ ID NO: 282262 - DNA, 122 bp, Homo sapiens
ttctcagccaatgggaagagagcgacgcccaggaagtcccgccctgtcccggcctgtgggcgcgtcctcgggtccttctacgtcgctgactcgtgacctgaccggtatttttttcctaaact

SEQ ID NO: 282263 - DNA, 122 bp, Homo sapiens
gtgcccaggtgcgccattcgcggttgggacctggcagagtcatatggctggggcctgagccgcgagcagggcggagcgggggcggagaactcggagctgagtccacgcgggccgcggcgcct

SEQ ID NO: 282264 - DNA, 122 bp, Homo sapiens
cactctgtggctgttgttatgattaggatcatttcctgctggaggcactgctgggggctccgtgagatggtgaatgacaagtggtggatacgtgggactgagattcctcccccgacactcaa

SEQ ID NO: 282265 - DNA, 122 bp, Homo sapiens
ctccctcctcccttgctcgctcgctggctccctccccccgggccggctcggcgttgactccgccgcacgctgcagccgcggctggaagatggcggggaacgactgcggcgcgctgctggacg

SEQ ID NO: 282266 - DNA, 122 bp, Homo sapiens
ggcccccggttcagctgcgccggggcggcccagcgcgactccgcgggccttttggctgctcgccccggctccggaacactgtcagatccttctccgcagaggtagcgcgccaccccagtccc

SEQ ID NO: 282267 - DNA, 122 bp, Homo sapiens
cggccccggtcccgagcccggcgactgcaggacgcccgcgcccccggcaccgcctcttcccgcctcacccatgccctgcgcgcccagcatccaggagtcgcacacactcgacctctgcacac

SEQ ID NO: 282268 - DNA, 122 bp, Homo sapiens
tgcatggtttccggcatttggctgggcctttgtctctcgctcccaccagagcttggaatccgtctctgctcttctgcattctccacctcgggagcccctggggactctgtgacggcctctgt

SEQ ID NO: 282269 - DNA, 122 bp, Homo sapiens
tctatctgtacaacggggataacgtggaatttggagtgttgtgagggttgagataatatacgtgataacttacacaatgacgttcaacaaatacttgtggagtgaaagatgcgcgattcatt

SEQ ID NO: 282270 - DNA, 122 bp, Homo sapiens
ggctcgtccacccgacaggagcggggggctgcagcccacgagcccacgagcccgcagcgacgcacccggagtgtaacctcgcagagtcacggagacactttcccggtgtgggcgcctcgccg

SEQ ID NO: 282271 - DNA, 122 bp, Homo sapiens
atcactgctgtaatgcatttcgaaacatactaccaggaaagagaaagaaaaaaattaagacgcattagtgtaagtgatattaaagaaaatggccggagatggaactcctgcctagcaattca

SEQ ID NO: 282272 - DNA, 122 bp, Homo sapiens
tactccagaggctgaggcaagagaattgcttgaacctgggaggcaaaggttgcagcgagccgagatcgagccactgcactctagcatgggcgacagagcaagtgccaaaaaaaaaaaaaaaa

SEQ ID NO: 282273 - DNA, 122 bp, Homo sapiens
ttctacgtggctagcattgaccaataggagaccgtagtgatagcgacggggaaattcaaacgtgtttgcggaaaggagtttgggttccatcttttcatttccccagcgcagctttctgtagg

SEQ ID NO: 282274 - DNA, 122 bp, Homo sapiens
aacctaaatccttgtgactttactttatcctgacagaattctcgtagtattttcccaaatcgagatagttacatctctgagataacctcttgtgccaactgtttagataatgtatttttctt

SEQ ID NO: 282275 - DNA, 122 bp, Homo sapiens
actccgcctccaaggacgtcaccctagttaaagatagtaaccatctgaagagctcctctccgcttaggcaggccagaatcaatttagcctgtttgctaccacttcttgtgctccatgctctg

SEQ ID NO: 282276 - DNA, 122 bp, Homo sapiens
gcttcggccccagagttcggggaccgctgcacagccagagggagcgcgcgggaagagccgcgtcccgccagccccgtcgcctcgtgggcccccccgggcctggcagtcccccaaccccctca

SEQ ID NO: 282277 - DNA, 122 bp, Homo sapiens
agctgaggaaaacccgctgcggcgtagggcaacgctcagaagccgagagtggcaccgcgacgcgccggaacgcgtcagcatccttcacacctaagaccagacttcctcctcctcacccagga

SEQ ID NO: 282278 - DNA, 122 bp, Homo sapiens
aggcaaccccgtcctgctccttccttgcaggtctattacctcggagagggggaggcctcgcgccggtggctacagcaagagcagaacagcacggggaagttgtgcctgtcacacatgcgggc

SEQ ID NO: 282279 - DNA, 122 bp, Homo sapiens
taggccgaggcaggagggtagcttgagcccaagagtttgagaccagcctgggcaacattgcgagaccccatctctacaaaacatttaaaagttagctgggactgcgcgcagtggctcacgcc

SEQ ID NO: 282280 - DNA, 122 bp, Homo sapiens
cagatggatcaaggccccctgtgggtccaggtttctccccagagcctgaagggttggccccggtggtctgtgacagcttcctgctctggtggtcagcagctgggcacagaactacctggagt

SEQ ID NO: 282281 - DNA, 122 bp, Homo sapiens
ctgctgaccgtgcaccggtcctggggctgggtaattctgcagcagcagcgcagcccatgccggggaatttgcgggcagaggagacagtgaggcccgcgttctgtgcgggaactcccgagctc

SEQ ID NO: 282282 - DNA, 122 bp, Homo sapiens
agtttactctgctttagtctttagggagctatgagaagtaaatttgcttgggaaaagatccggaaacaaaactaggcattgaaaaagcaggaccagcactcaggtgaggtgaataaagtaag

SEQ ID NO: 282283 - DNA, 122 bp, Homo sapiens
aaaaaaaggaaaaactggaaactgttcaaaagcttcatcatctcgatgatcttggtcttccgcctcgccttcttctccaaggtgaatatgtactgggccagcaccacccccgccaccagggc

SEQ ID NO: 282284 - DNA, 122 bp, Homo sapiens
acctctgttctgcctgtttcctcaaagcatgatagtaaagtgagctaatatatgggatctcgcaacaccaacacatcctacaagagacaagatttaaagacaggattccaggtaaattgtct

SEQ ID NO: 282285 - DNA, 122 bp, Homo sapiens
ggttgctgagaaactgatctgtggctggtccaatgtgagatgtgctgttggcatcaaatacgctctggatagtgaaggcgtcacatgaaagaaaagactgtaaaacatctcaacaattttca

SEQ ID NO: 282286 - DNA, 122 bp, Homo sapiens
atcgtgaggatcaggaaacacagtgtctgtgaaacactctagagctgagctcacacggtacgcgtcacagtagatagtgtcctatagccactggaatgtcctaaaccgaatgaatctgactc

SEQ ID NO: 282287 - DNA, 122 bp, Homo sapiens
tctgcgccaccccctgtccccagggtcaagggtaggaccggaggacgctatgccccgcatcgtggagcagccgccagatctgctggtctcccgaggcgagcccgccacgttgccctgccgcg

SEQ ID NO: 282288 - DNA, 122 bp, Homo sapiens
ggagctcaaatgcccagatacatataaccaaccaattctcctagaatgcattgctaaaaacgaattttgcttatatgcttcaaagacctcatttatagttatacttaaaacagtgcatagga

SEQ ID NO: 282289 - DNA, 122 bp, Homo sapiens
acaaaagcccacagaaggagagaaaggatgctgcaaaggctggagccagccagtttgaaccggcactagttagtagtgacacagagaaaagaggtgggaccagcacaggaaggaggagcatt

SEQ ID NO: 282290 - DNA, 122 bp, Homo sapiens
tgctccagcgccaggacgagcggctgctgctcaagtcccatagccggacactgacgcccacgcccgatggcaagaccatgctgcggcccgtgctgcggctcacctccgccatgacccgcgag

SEQ ID NO: 282291 - DNA, 122 bp, Homo sapiens
atagctgagatgcatggagaaccacctctccttcaggcgctgctcctcggcttccgtggacgggcatggctatttctcggaaccctctgaggttagagctgtcatggtctttcttctgaaag

SEQ ID NO: 282292 - DNA, 122 bp, Homo sapiens
ttcgagcaggggaggctttgcactcccatcgcacttttctcgtccgaagatacgaaactccgtccgggcgtcgcaaataattcgaattcggctctctgacacctacctcggcgggcgcgcgc

SEQ ID NO: 282293 - DNA, 122 bp, Homo sapiens
agccacatccatatttgtaagtggaaaaatgtgaagtctgaacatctttagagcttgcagcgtgctctctggcaggaaatgtgaagaatagcggctggcctggctctgccatcccagctgcc

SEQ ID NO: 282294 - DNA, 122 bp, Homo sapiens
tgcctggaaaagccaacaggtgtgtccatgtgcaagggtatacattggcccattgtcatacgtgcgccctgagcaggtgactaggcctgcaagcgtcccctccagcgtgggccacccagagc

SEQ ID NO: 282295 - DNA, 122 bp, Homo sapiens
atcacagggtcaggacagccagagcccagagcagcactttcaagtggccaaaacagtgaccgctgcaggctacgaagagccatggggatgagacccggcctctgctctgacctcccggactt

SEQ ID NO: 282296 - DNA, 122 bp, Homo sapiens
ctgcggactcctgtggagtggtccaggcctctgtaaggaggttcctcgattaccctgggtcgattgtgacctctgccaccccccgaaacaccgcccaacccactagtccacacgagcctcac

SEQ ID NO: 282297 - DNA, 122 bp, Homo sapiens
tgtgagtacttccggggcaaaaggcggagccaggcagaagaagtcccacggcgaagcgctcgccctctagcctgaggcggaagacaggaagtggattctagttcccaagccgcaccgcctaa

SEQ ID NO: 282298 - DNA, 122 bp, Homo sapiens
agttcccccgtcgcttccgccgccgtgggtagaacagacccgagctgggagccaggcctgcggcccctcgaacactagccacatctggcccgccgggcctagcacggagagaggccctgggg

SEQ ID NO: 282299 - DNA, 122 bp, Homo sapiens
gatattctatccctcaacttccaaagtgaacaaagtcctaattcggagcccattgctctgcggcctctcatgccctggtagggccaggaccccagggaataggatctggccgctgggtcagc

SEQ ID NO: 282300 - DNA, 122 bp, Homo sapiens
cccaccccttactccgccgtggggcggagccgcgccacagctgacccaatgagaaaccgtcgtttcccagagtgacgtgtacgcagagcaatcatggagtccagcccagccgggggcggggc

SEQ ID NO: 282301 - DNA, 122 bp, Homo sapiens
tttttgcattactggaatttcaagacaagatctgaaaaatcaaggaaattttggagacttcgtatatttggaaatcacaagtctcattttgcaatacaagtgcggatcaggtagagaaatct

SEQ ID NO: 282302 - DNA, 122 bp, Homo sapiens
acccgccgaactggcggccggtgctttggccgatcccgcgccgctgcctcgggccttgggcggcagcgccccccgcccaacccgcctctgcagcgttcctggcgtcagcccctatcctccag

SEQ ID NO: 282303 - DNA, 122 bp, Homo sapiens
agaggacgatcagtctttgctgctgggactcgaggacagccgagcggagaaacctgctgtcgttggggcacaacaatattgtacgctgcatagtgcactcccccaccaaccccgggttcatg

SEQ ID NO: 282304 - DNA, 122 bp, Homo sapiens
taaagaggtatctgtcaaaggaaaccttttcaaattagttggactaaacgggacctaggccggacatggctcacacctgtaatcccagcactttgggaggacgaggcgggtggatcacctga

SEQ ID NO: 282305 - DNA, 122 bp, Homo sapiens
gccgcctctctttaagggtggctacaaggacgtgagctggagtgaccgtgtcagacagcgcggtagaggccagggatggggctgcacaggatgcccacaaggcctcgtgattaactgttttt

SEQ ID NO: 282306 - DNA, 122 bp, Homo sapiens
ctcagtgccatcgggattagagctaatgagttggaagaagttaacaatgcttcgggccagcggaggcccaggagacctctcaggccccgcgttgtggccgcctttcaccactgaggtgtaat

SEQ ID NO: 282307 - DNA, 122 bp, Homo sapiens
tgtgcttcataaaacatagtgacaatgtgttttccgtgcattaaaggctaaaatgagtaacgtgaagcccagttgtcttaacggggtcagaaaaataacatcaacttcagaaaccgaacagt

SEQ ID NO: 282308 - DNA, 122 bp, Homo sapiens
cccgtccttaagggactcagagtaaactggagttgctgaaaaccattctaaagcaatccacgttaataacagatacaagtaaaacgtgggaacgtacaggaaaaagtgaccaattctgaggc

SEQ ID NO: 282309 - DNA, 122 bp, Homo sapiens
acttcaggtgatcagcccaccttggcctcccaaagtgctgggattacaggcataagccaccgagccccggtaatttttttaaaatactggtatttaacgtatggagagtttgaaaattttga

SEQ ID NO: 282310 - DNA, 122 bp, Homo sapiens
ggatctctgtctccctgtggactttattttgccgtggaaaccacctgccgccccggccaccgcgggctttggttaaaaaacccttagtttatcagcagtgcaatggagactggaaaatgcag

SEQ ID NO: 282311 - DNA, 122 bp, Homo sapiens
ctggaggctgattggccgtgtgctgcggaggcggcaagaggaacgtgtcctggcacgtgccgaaggagcgctaaaggccaggggcggtcccacccgcgaagccctggaaggcggattggctg

SEQ ID NO: 282312 - DNA, 122 bp, Homo sapiens
tttttctaaacatgaattttctttttttaattcaatgtataggccgggcgcagtggctcacgcctgtaatcctagcactttgggaggccaaggcaggcagatcactttaggtcaggagttcg

SEQ ID NO: 282313 - DNA, 122 bp, Homo sapiens
ccccatccctgagaagcacatttttcctaatggctgcctgcgttctatggttctgctgtccggccacccaatacctcagactctgtctacacagcgtcctcctctccagcctccttattggc

SEQ ID NO: 282314 - DNA, 122 bp, Homo sapiens
aattcacgggcggttttgtgaattacagagccatcctgccttccctctcagcagacaccccgcccacctgggcgatctcagccgtgacccccgggcccctcgagtcaggatccccgcctccc

SEQ ID NO: 282315 - DNA, 122 bp, Homo sapiens
tttcctgctgaaaacttttctccaagtgatacctcgtgacataatcctagatggtatttccggggaaaataaagaacatgtctagataacattggcttcagtgatagcaatgtttagctttc

SEQ ID NO: 282316 - DNA, 122 bp, Homo sapiens
caggaatgaatgcacctgggacttcccgcttcggaggcaacgcgctgcgggtggggggcgcggaggtacggccgtgtgcgcccccaggtcaacctgctgcctttctcatctctggcaggact

SEQ ID NO: 282317 - DNA, 122 bp, Homo sapiens
atgtcatgcggggcccgcggggctgcggggctggggggcgtgcgcccgcccacccgagcccgcacccgggcaggagagaacctcctcgccgtacccctgagagccccccgggggggaccgtg

SEQ ID NO: 282318 - DNA, 122 bp, Homo sapiens
gatggtctggagctcgtcggactcagagggcctgtctttgaaggtgttgtcctccctccccggggcatctcgggaaaagaggcggatcaagtgggggcggctccctgggtcagctgggtggg

SEQ ID NO: 282319 - DNA, 122 bp, Homo sapiens
cagagacctgcagggagggcagagtggtccaggtgcggggggcggccagcaaacaccacccggggaacgggccgagagtgcggggtggctgcgaggacgtgccgagggggtgagagcaacct

SEQ ID NO: 282320 - DNA, 122 bp, Homo sapiens
acgaggctcggaagcatgagcggaagcttcgaggcatgatggtcgactacaagaagagggcggagcggagacgggagtattatgaaaagatcgtgagtaactggccttttgtctggggtgag

SEQ ID NO: 282321 - DNA, 122 bp, Homo sapiens
tgatacttctcagcctgggtgaggggccgtgccgggctctgagctcacctcccccttgggcgttgtcactgcagtccggcgggggtcgatgtcctcgttgatgctggacaggaagttctggg

SEQ ID NO: 282322 - DNA, 122 bp, Homo sapiens
ccccatctggtttcacatcctccccttcctaatacttgcttcttctatattccccaagcacgatgtctctggaaatgtcaaggggaccgtttatgaagccactttattttttgctctggagt

SEQ ID NO: 282323 - DNA, 122 bp, Homo sapiens
tatgagggtgaacttagcttgctactcacacactactcaccctgtggaggaagttcgcctcgcttttgtggtgagtcttgctgtaatgatagcttatatttacaaataccgtcggcagtgca

SEQ ID NO: 282324 - DNA, 122 bp, Homo sapiens
cttctaccctgcggagatcatactgacctggcagcgggatggggaggaccagacccaggacgtggagctcgtggagaccaggcctgcaggggatggaaccttccagaagtgggcagctgtgg

SEQ ID NO: 282325 - DNA, 122 bp, Homo sapiens
gtgtttgttgctttttgcctgcactgcccaggtaattgcagttatgtggaattggcctaacgtgaccttggaaaactgcttaaccttttggagcctcaggttattcatctgtaaagtgaata

SEQ ID NO: 282326 - DNA, 122 bp, Homo sapiens
tgtgaaaggatcataccataaccaaaaaccatcacctggggatgcactcttcctatggaacgtgagtaattcccaagaattcatgtagaacaagaggcatagattaaagtcttggcaagact

SEQ ID NO: 282327 - DNA, 122 bp, Homo sapiens
cctctcccaaggttaacagaagcgtgcggagcgtgagaagcagcacctcgcacgcagactcgcccgccggccgggtggcaccgctcagccgcccgcccgctagaaggcagcgcggccccggc

SEQ ID NO: 282328 - DNA, 122 bp, Homo sapiens
cagcaggacgtgagacttctacctgctcactcagaatcatttccgcaccaaccatggccacgtttgtggagctcagtacaaaagccaagatgcccattgtgggcctgggcacttggagggta

SEQ ID NO: 282329 - DNA, 122 bp, Homo sapiens
gtgtgctcagcgtgtccgggcccgggtgggcggggggagctgagccaccggaaccggaaccggagtgtgtaccgccatcttgaatgtgtctaactgtagaacagggctcaatgtgtcgtcat

SEQ ID NO: 282330 - DNA, 122 bp, Homo sapiens
cggaatgaatgatagatcggactccaaaggcacgtaggctcgtacaagagaaagtgcggccgtctcactcacttctgccgcaggctctcctccctctccttgtcgaggaggctaggccaagg

SEQ ID NO: 282331 - DNA, 122 bp, Homo sapiens
ctattcatgatagggcccttttctcccctatttttgtggcttgatattagtattttcattcgaaacggccgtcctcaattatcagagagaaaattcacacctttcaaagctacggcaatcac

SEQ ID NO: 282332 - DNA, 122 bp, Homo sapiens
gggtcaaaaactgtgacatccgataagacccagaacttatgtttccccctgataatttcccgcatcctcttgcctgctttcactgcgatgaaaaagatttctgttccaaaagagaaattcct

SEQ ID NO: 282333 - DNA, 122 bp, Homo sapiens
cccgggtacttgtctcagaggccccaaagccaaatcctgattgctcagcgggctggaaggcgtggcctcagccccgccccgccccgcctcaccacaaagcggttggttgcggcagggactac

SEQ ID NO: 282334 - DNA, 122 bp, Homo sapiens
gacactggagagccctctctctttccccacaggcatataagaggccatgtgagcccacagcgagaaggctgccatctgctggccaagagaattggtctcggaatgaaaccaccttgtggcca

SEQ ID NO: 282335 - DNA, 122 bp, Homo sapiens
atccctgcaatatcgcctggagccactaggggtatctttgtaccatttttcatcctgcaccgatttggagtagaaacctatattagggtaaaaccagggtcctcggcatttttttttttttt

SEQ ID NO: 282336 - DNA, 122 bp, Homo sapiens
gctgaccctggtggtggtgcgggcccaggaacctcaggcccctcagtaacacattccctgcggtcttcgagaactttcctcagggcgcccacagccctgtgccatcttctccacccgcgctt

SEQ ID NO: 282337 - DNA, 122 bp, Homo sapiens
ctggaccctgcatgaggtgggggtgagtcagcctgagcagcccagccccccagtcccagacgttacctcatctcccaggcctgggcccacagccagcccttgcccctcccacctccctccat

SEQ ID NO: 282338 - DNA, 122 bp, Homo sapiens
ctgcccctctggaagcagagagggcctgccctggagggccggggacctctgcagcatgtccgtggaacacgtgggccagggattgtgtgcccggcccccattccagctctgccacgtgagca

SEQ ID NO: 282339 - DNA, 122 bp, Homo sapiens
aaagtgcaaacgtgccttaaatcagtcatgtgcgacaagcagctatagctagggtttggccgcaggctcagagaagcgcatgaatgagctaaagccacaaagcgcggggctggaggtttggc

SEQ ID NO: 282340 - DNA, 122 bp, Homo sapiens
gccagcgagacacggagcgagggttcagagtatgaggaaatccccaagcggcgccggcagcggggctcagaaacaggcagcgagacccatgagagtgatctggctccttcagacaaggaggc

SEQ ID NO: 282341 - DNA, 122 bp, Homo sapiens
cgttccttgaagcgggccagaaacgccggctcggctggccgcacgtacgatacctggttccgcttgctcatggtagctctgggtaaagacagaagacaggttccgcgacggattcgcgacga

SEQ ID NO: 282342 - DNA, 122 bp, Homo sapiens
cttttaagtccatgagactccggctttcaacaagggtgtaggatggccagggaagtatgccgggccttggcatttctatgttagttggaaggatcaggctcgaggcatctaaacacagactt

SEQ ID NO: 282343 - DNA, 122 bp, Homo sapiens
ctcccagtcttccttacagtttagcagtggccatgaaagtgaattctggccaatggaattcgagcaaagtgttgcttgtcccttccaggcctggctcattcacatttaacaggtgaaatcct

SEQ ID NO: 282344 - DNA, 122 bp, Homo sapiens
tgctagcggcggtgcggcctgttcagggccggggcctgagccggctgtgttctgcgagcccgtggtgaagctgtactaccgggaagaggcagtggctgaggacgtgctcaacgtggatgcct

SEQ ID NO: 282345 - DNA, 122 bp, Homo sapiens
ggccagcccccaagtcagacccaacacacacacccaacgaagcccacatcctgcctggaccgtaactagatgtgtgaccttgggaaaaacaaagagcctctctgagtgtgaggacactcaac

SEQ ID NO: 282346 - DNA, 122 bp, Homo sapiens
cactcttctttggctcctatgtaactcagtttttgagagggaggggaaataccggattgacgctatgtggttcaaccaatgcaaaagataacaccgccttaaaaagtctactacaggaacat

SEQ ID NO: 282347 - DNA, 122 bp, Homo sapiens
cagtgaggcagaggtggcttcagtgacctgatcaagtcccattttgttaggttgtctctccggtggggagtgagcgagcacacagcccccaccccaccccgggtgagagagaatgtcctgca

SEQ ID NO: 282348 - DNA, 122 bp, Homo sapiens
gcacggacgggattgggactcagcccctccggccccccaggagacacaggccactgtgcacgctgagctgctgtgtggccctggacacctgctgaccctctctgagcggtgctgagaggcgg

SEQ ID NO: 282349 - DNA, 122 bp, Homo sapiens
gtaactcaccacaaattgtgtggcgtgcaaactaatatattcacctgattggcctccacacgtgagggggacgcagccgggcctcctcgagtcccgcgttccttctgtgagggggacgcagc

SEQ ID NO: 282350 - DNA, 122 bp, Homo sapiens
cctgcaggtgcccattgccaccaggagatggcgcccacgcagcgcctgagagtttcctaccggagatgatcagaaggcaacttttaatgcttaaaaaatgaggatattaggctgggcgcggt

SEQ ID NO: 282351 - DNA, 122 bp, Homo sapiens
agccgctggggtggtttcttgggggcccccttacacttcagcaccagtggctcgccaatccgggctgtgatgttttgagcacctactactgcccctgggagatagcaccatggtagaggggt

SEQ ID NO: 282352 - DNA, 122 bp, Homo sapiens
gcggtgcccattgatggggaacatcttccccctcttccttgccccaccagtttgtcttcccgggttatttgcagataggaaaataaataaagccggcattcgttaaccctcttctggcgcaa

SEQ ID NO: 282353 - DNA, 122 bp, Homo sapiens
cgcaaaccttctggatgggcggcagcctccggctctcccgctgcacggcctccagggtctcgatgtgcatctggacaatgtctgggggaagacagttctcacactttgtgcccagccccacc

SEQ ID NO: 282354 - DNA, 122 bp, Homo sapiens
ggtcctgaagtcggggtccgccccgtctccccgctgccagcccgatttcctcggaagccgcgaccccccacgctgggctggcagttctgggctctgccggctgcgccttgccgggactccca

SEQ ID NO: 282355 - DNA, 122 bp, Homo sapiens
tttgtggccatctctttgccttacaaattttgagctgtaggaaatctcctgagccgggcgcggtggttcacgcctgtaatcccagcagtttgggacgtcgaggcgggcggatcaccggaggt

SEQ ID NO: 282356 - DNA, 122 bp, Homo sapiens
agtcagtgaactgaaaagcccttgtggtcaggacaaggaggacaaggcagtgaccatgttcgctgatgcactggctacacctaccaggacatacagcaaaggctcagactgacagccctaca

SEQ ID NO: 282357 - DNA, 122 bp, Homo sapiens
atgcaggaactcccgccagagcttgtccagttcttcgccggagaatttcccagaggtcttcgcctaagagggaaacaaggcctggagtgaacccgccgcgggctcgtgtggccagggccgct

SEQ ID NO: 282358 - DNA, 122 bp, Homo sapiens
gccaggagctctccccctgtttcaagtctgttcctgtctttcgaccagtccggatctggacggctctctcctttttgctaatgaataaccaaccagcagaggctgttgcctttaacattctg

SEQ ID NO: 282359 - DNA, 122 bp, Homo sapiens
tgctgactcacagtgcttctcctgctttcccaccttctattctctcatttgaatttggtccggattcagggggtgggagcaagggaagatcagagacttcttaagatgaaaaggcactcgag

SEQ ID NO: 282360 - DNA, 122 bp, Homo sapiens
ggagggtgggaccccacatgagctggaaaaggcaggcccatctcgggcccccaacaccgacggaatcggggctgcttctaggaagtggtatagtcagtcttcctggtcacttgtgtggaggc

SEQ ID NO: 282361 - DNA, 122 bp, Homo sapiens
aggggcgtgggaagcggctgcgagagctgggggggtcttacaaggtggccggcccagggtcggcgtccggctgagctccttgtcccgagggtctccttgtcccgaggcggggtgggggctac

SEQ ID NO: 282362 - DNA, 122 bp, Homo sapiens
gtaaggatgcagatttggtgacctgataactgctctaactgattggtttattttttgcttcgtttcctgcttttcaacattctctactgatttgcttattttgcagcaagtacactcttttt

SEQ ID NO: 282363 - DNA, 122 bp, Homo sapiens
tggaatacgttcccggtgggcactgcggtgtgtgtagtcaaggaccaccgcggagtccaacgcttcccgctgaagagtgagattatagacattttcctttggcattggaggaagcggagtcc

SEQ ID NO: 282364 - DNA, 122 bp, Homo sapiens
gttcacctctttaactcagtttcttcatctgtaaattgtaaaaaatctcttaagagtaagcgttaagcgaaacaatgtatgtgaagtgcttagaacttgtaacatctaagagctaaggaatc

SEQ ID NO: 282365 - DNA, 122 bp, Homo sapiens
ctccgggtacagagcagttgagccgcgccttcaggaaggacgtccactgcttctccagcacgcggggggagcctcccacgtcgttcttgcacactcgggccacgcgggacaccaccacctgg

SEQ ID NO: 282366 - DNA, 122 bp, Homo sapiens
ggggacgtgggggtgaagacaggggcagcccagcggctcgagggcaggcagaaacggccgcggctactcactgagccaggactccaggctttccccttccgcctccgccatattgcagccgc

SEQ ID NO: 282367 - DNA, 122 bp, Homo sapiens
ggcctttaccttttctttatacaccagcatccagcacaatcttggacagacaaaaagtgccgaataaacaactggtagatgaataatgagaattgattgcttcttctttagcattcaaatct

SEQ ID NO: 282368 - DNA, 122 bp, Homo sapiens
cctcctgggagtcttgagcctaaggcagcacggcttccccctatgcgtagagagagtggtcgccccatcaagcccccacgcaaagacttgcctgactctcagcaacaacaccagagctctaa

SEQ ID NO: 282369 - DNA, 122 bp, Homo sapiens
tcaaatgtcatgccctgtgactttcactgaccacccttttaaaaattgagcctcaccccacgctctctctcttttttcctgctttttattttctccatagcactaacatactctgtcttaca

SEQ ID NO: 282370 - DNA, 122 bp, Homo sapiens
ctggcggccgcctgccctgctgaggatatgtggccgccaggcgcccggtcgccgcaggagcgctaggcctgcgggtagcactgccctgacgcctcaggcttgcctgcacctggaaggagctt

SEQ ID NO: 282371 - DNA, 122 bp, Homo sapiens
ctgggctggtctcacctctgctgcagtggctctcccctgcctggaatacagctcaaaatgcgaactctaggattcatgtcagaggtggcaaaagaagtgaaagataagaaatacacactttg

SEQ ID NO: 282372 - DNA, 122 bp, Homo sapiens
ccggaacaggcagggcggaagtgcgtcaccggcggcacgcccctgcacatggacctcccccgtccccgccatccctgccgatcctgttgctgccgccttcccgccgtgctcgggctgcccgg

SEQ ID NO: 282373 - DNA, 122 bp, Homo sapiens
ggccaccgaaccctgttctcgccaaggcctcctttgtccacgcctccgaggagctcggcccggtggtcacaagtgcagccaagaatgaggggctatttgggtcaggcaagcctgccatgttt

SEQ ID NO: 282374 - DNA, 122 bp, Homo sapiens
gctgcccaccgccgcccctcccctttctcgcagacgccccctcccctcggagttgacccccgggagtctcccattggggccgcctccgcttttccagggagttcctccgtgggtcaccccca

SEQ ID NO: 282375 - DNA, 122 bp, Homo sapiens
aggttgtgggtacgaagagcgcgggatttgatccagggtgagaatttgatacagacttggcgtctgtttgcgaacaaggaggaaacaggcgcctgtttaattcatttccctgtccttgcgca

SEQ ID NO: 282376 - DNA, 122 bp, Homo sapiens
gtattggaatccatatagaacattgtccctgcaaaactgcaattggataggcttgggcaacgcagccacagtgaatagctgcatcacgggaacatcaaccacacctggacattaaaatcatc

SEQ ID NO: 282377 - DNA, 122 bp, Homo sapiens
cccagaggagcgccccagccgggccttcttatcctgccccgggccgctgtgctctcggcccgtgatggccatagatttgccttgtggtgttggatcaggaactgtgtctgctcttaagtgct

SEQ ID NO: 282378 - DNA, 122 bp, Homo sapiens
tgggaggaatccgggacgtgcgcccagggactgggagggcctggaaatcagggcgatggacgtggctgatcggggtggggcctggtctgagccccgcctcggtccgcccaccaagtttaaag

SEQ ID NO: 282379 - DNA, 122 bp, Homo sapiens
ttccctgcagattgtcatgaaccaaaccagaaaggggtatcctgtagagaagttaggggacggaggataaacttgacagtgcatgaaaaaatgtaataaatgggatacagaggactatcaaa

SEQ ID NO: 282380 - DNA, 122 bp, Homo sapiens
gtaatttctggatgttgtgtttcattagcagcctctgagcggaggtggtttaaatttgagcgtgcaggatttagatgttttatttttatatctgtctccgacactcccagagccacctggtt

SEQ ID NO: 282381 - DNA, 122 bp, Homo sapiens
atgaaaatgaagcccaaattcttcaacctgacttttgaggctccaaattgcctttccaaccgtattggtcactactcctgttcatgtaccctgctccctgagtaaataaagctcctggatgt

SEQ ID NO: 282382 - DNA, 122 bp, Homo sapiens
gggaggtggatcacctgaggtcaggagttcaagaccggcctggcaaacatgttgaaactccgtttctactaaaagtacaaaaaaaattagccaagcgtggtagcaggtatctgtaatcccag

SEQ ID NO: 282383 - DNA, 122 bp, Homo sapiens
actaaattatcaaaacaatttttttggcggaggctggggagggggtggtggctgaagcctcgccagagactgaatgtggtgtgggattcaactaaagcagcacatcttcagtaggtcccccg

SEQ ID NO: 282384 - DNA, 122 bp, Homo sapiens
caggccatcctctggatttgtgggcctgagagtgtgtgtgggtgtgggtgcgcgcgtgcgcgcgcgtgcttttgagaaggcatatgctgggtgtgtctgtctgtgcctatatctttgtttgg

SEQ ID NO: 282385 - DNA, 122 bp, Homo sapiens
cgggtctgcagcacatcctcctcagtattccagtgcagctgtctgaagttttttctgctgcgcctgaactgatgtcatttcccccttggcagacagcttcggctttgctgcgtctgagatat

SEQ ID NO: 282386 - DNA, 122 bp, Homo sapiens
ctcagtaccagatggagcctggaagtcacctggcccaactgctgtcagtgcaggtatgcacgtgtgtctatgcgtggagataagatgtgagtggattcacacattgttggatatgtgtgtat

SEQ ID NO: 282387 - DNA, 122 bp, Homo sapiens
gcccagtctacgcctcccacagtgctgggcacctccccgtcccacgcccggggacacgcccggattgagaggcttgtttttcacctgagcagattccggaaggaggcagcgggggcggcggg

SEQ ID NO: 282388 - DNA, 122 bp, Homo sapiens
cgagactgggagagtgcccgaatccagtccccagcatggcgcctcccagtcctctgtgtgcgtgtcctgttcccagtgacgcctcactggacattctcagtgcgtgggcgtgaaccccacag

SEQ ID NO: 282389 - DNA, 122 bp, Homo sapiens
caaataactcacagggaaagtaaaaggaggctgagagggaaccacagagtcaaggaaactcgagagacctatggccagctgccatgtacagtaaaccttacttggttctgttgaagttccaa

SEQ ID NO: 282390 - DNA, 122 bp, Homo sapiens
cttcaaactgcaccattggctctcctgggtcatcagcctgcaggcccacactgtgggattcgggcttgccagccttcataattaggtaagccaattctttatgataaatctcttttatgcac

SEQ ID NO: 282391 - DNA, 122 bp, Homo sapiens
gctattcatagtcttgggcagagagattacagggtcttgggtagggtggtagagttacaacgaaagagaatgttggcctcaagtgatatttaggtggaaaactggacttggattgtcactag

SEQ ID NO: 282392 - DNA, 122 bp, Homo sapiens
cggatccaggctgcgccctggggtgtctcacagaggccctgtcggcggggcgcggcgggtcggggtgtctaaagtcagatccctaacttcagacacccgaatttagcatcgtggcttagaaa

SEQ ID NO: 282393 - DNA, 122 bp, Homo sapiens
agcttgttgcctgcctaacacagcttcccttctctaaaggcatgtggggagcccgaaaggcggccatcaagaactgtgtttcttggaactcctgtcaccacgtaacacttttctggggcttc

SEQ ID NO: 282394 - DNA, 122 bp, Homo sapiens
gccccacggtatggactcttctgtgctaggtaaacaaactccctgttcctatggagctcacgttcttcaatgagctcttcctgctcctagaataacaattattctgtgtgtgtgtgcaattg

SEQ ID NO: 282395 - DNA, 122 bp, Homo sapiens
agcgtaggaaagggcgcccgccctgtcctcgcttatttgcataaccaagactgcggaaggcgcaggactttaccctgggactgaggctgtgaagaccgcaagttggggcagatggcttccga

SEQ ID NO: 282396 - DNA, 122 bp, Homo sapiens
ccctaacccttgactaacttcctgtatgtatgtagtcagtttactccctcagtttctactcgctcagaaactgagtggactacatacgggaaattagtcgagacaaggaagatggaacagag

SEQ ID NO: 282397 - DNA, 122 bp, Homo sapiens
cgtccctctccggcccttgggcgcccagtcggaggtcggggcgggatggggcacgagtctcggggcggcccgcgctccccctactagtcccctcattgcctcggccccgtccccgcagcctc

SEQ ID NO: 282398 - DNA, 122 bp, Homo sapiens
tatgcaccaaaactcccacgtgccccagcagcactttgagctggtgggcgtggctgatcccggagtcactgtggccacagacacagcttcaggcacgggcctctatcagacccttgtgcagg

SEQ ID NO: 282399 - DNA, 122 bp, Homo sapiens
caccacgtgggacctcatgggttctaaaggtaaaatacacgctggatcccaaagaagtaacgggaaaaaggaatgtaaggcatctcgataatgttttcatattgattacatgttgaaataat

SEQ ID NO: 282400 - DNA, 122 bp, Homo sapiens
cgtgggtttcagcccctcttcaggcgggtttctagccacatgcaaaggtgctttctggcccggctcttttcacccgccaatcatccccttcagccagtcatcaccgacttcctccacgtttt

SEQ ID NO: 282401 - DNA, 122 bp, Homo sapiens
tccgacttcattcctgagctcttgaacaggggtaaggcaaactttttctgcaaaggaacacgtggtaagtattttcggccttgacggtcacatgtctctgccacgagtcgtctgccttgggg

SEQ ID NO: 282402 - DNA, 122 bp, Homo sapiens
ctttgtctaaagcctcgcgccggtggtggctggggtcaggaaagctgggaggttcaactacgggcgagaaaattggggcactttccacgtctctcccgaaaataaaagaaaggatgccgggc

SEQ ID NO: 282403 - DNA, 122 bp, Homo sapiens
actgtagagtgtgggattagcccgggtcggtcaagtcctagaaagccttgtttttggattcgattttgttttgaatttaaattgtggtcaggacatcaccgtttgcacctctgcaataacac

SEQ ID NO: 282404 - DNA, 122 bp, Homo sapiens
taaaatcacatgcccgcggattccctgcttctcactgctgggccctcggtcctggcctcgcgcggacccgccctggcgactggtcaactctgtttgacccccagcacacgcaataaattacc

SEQ ID NO: 282405 - DNA, 122 bp, Homo sapiens
gaactgagtgggttcagaagagtactggcgttggcacttcagaggctggactagagaaggcgcgttcagccgacggtgcgggatacactgccgaggaagtccgcggcgaggggcgtggttgg

SEQ ID NO: 282406 - DNA, 122 bp, Homo sapiens
gacctccgtgccgggcctgccggggctctggtggggctgggtctggcggggccgggtggccggggcatgaccctgtcgcgatagggtccccacgggagggtcgggagccggcagctcgccca

SEQ ID NO: 282407 - DNA, 122 bp, Homo sapiens
gccacaggtggtaagacaggtttggcagaggtgttggtgcggaatatgccctcgggaggccgctccgcccttcatatgctcgggtaggctaattacaacctcagaggaagccccaagggcct

SEQ ID NO: 282408 - DNA, 122 bp, Homo sapiens
ccagcagctggcgcaggctgtgctgctggtcctgcaggaggctggagttgtgcctgacaccgcgcaggccgcgctcgatgttggtgagggcggcgctctggcggctcagcgtgttcagcagc

SEQ ID NO: 282409 - DNA, 122 bp, Homo sapiens
ggttagtccagcaagaatgcacctacccttaatgtctcctcttagtaattttccatctatcgacccccttactctgtaccttggctataaatccccacttccccttgttgagcccagtctct

SEQ ID NO: 282410 - DNA, 122 bp, Homo sapiens
ctccctctccgcgttacatcgccctctccgctctgtcccgagttagggcctttgcacttgcggttgccccggcctggaaagccctcccgaggtttgcatccagcttcgcttacgtccctcac

SEQ ID NO: 282411 - DNA, 122 bp, Homo sapiens
tttgctttttaatcattgatttgaaactgttggccgctgaattccaggtgcctgctacagcgcctgctgtgtcagtagagtcttagccaatcctcattcaacaaatggctggaatttgttca

SEQ ID NO: 282412 - DNA, 122 bp, Homo sapiens
tgtgcagggttgttacaggggtatatggcttgatgctgaggtttggggtacgaatgatcccgtcacccaggtagtgaacatagcacccaacagttattcagtcctgcccagtctctcctcac

SEQ ID NO: 282413 - DNA, 122 bp, Homo sapiens
agaagcccagcctgccgctgcttctcggaaacgggcccaccactcagacacggtcgccgccggttctagtaaaatggcaaagactttatttattggagaaagaggccttgggtacagtctag

SEQ ID NO: 282414 - DNA, 122 bp, Homo sapiens
gtgatgagctttgtttcttcatttgttcattcattcaccagactttttgccggggcttgccgtgagccctacgctgctctgaagaaagccgggctggggtgagcgtgatggatgaggtgtct

SEQ ID NO: 282415 - DNA, 122 bp, Homo sapiens
ctcacccggcgcacactgcagggctccatgcgggagtgaggcggcagcgcgtggacctgccggccctcctgggttggggcaggcttggcgggaacagcccaaagaccaacagtggttcccaa

SEQ ID NO: 282416 - DNA, 122 bp, Homo sapiens
ttcaggtccaaaatgagagctgggaaggaggccaataacagggccaggcacagggccaagcgagaagcttgcattgatttcatgcctgggtctatagatgtaattaaaaaagagtcctgttt

SEQ ID NO: 282417 - DNA, 122 bp, Homo sapiens
atatgaaaactgaagatgcttctggtagctctcaggaccttccaattctgttgtctgtagcggggcttgtatgattctcatggaggacaccaggtaggacctcaagctgagaggggtggaaa

SEQ ID NO: 282418 - DNA, 122 bp, Homo sapiens
gccggcggttttatctccgggagggggtccacctattgacggtggcggcgcagtgcaccgcgccctgcagcacgccaatgcggaaccgcgcgggagggggcggggcgcggacgcgcgcgggc

SEQ ID NO: 282419 - DNA, 122 bp, Homo sapiens
tcaaagtcactacctctacaaggacttctcttgagaagggccaaaaaacagagcatctttcgccaagaggtgaaatttgaatgggagaggcccttactcctctcgttctgacttaacaagtc

SEQ ID NO: 282420 - DNA, 122 bp, Homo sapiens
ccagagaaatgttcttgaaagctgcccaggccttagggaggggcccatgaacaggctccccggagctagccagcagtgcagggtcctgacctgccagtggaggttccacagagtgccatgga

SEQ ID NO: 282421 - DNA, 122 bp, Homo sapiens
cctagggcatttgacgttcgcacagggtcgaggggatgaaaatggaagttgagagccttccggtgggagaatttctgataaaacatcctaggttttggtcgagcctcctgcaggcctgtgct

SEQ ID NO: 282422 - DNA, 122 bp, Homo sapiens
cggggagagagcggggatccggagggagggaggcaggcaaagggacagagagagagcgggcgccaaataaatatgaataaataaaaatgaaagtgggcgagaaaggaaagaggcgcccacca

SEQ ID NO: 282423 - DNA, 122 bp, Homo sapiens
aactctcccatctgccccattcccagcattttcaacgtggaacaatgaacagctgtgctacgtgtttttaggccgacagcaaatacgtgtgctaaagtaaactgtcatggaagcatggcctt

SEQ ID NO: 282424 - DNA, 122 bp, Homo sapiens
gaagaagagggtccaatgatgcccaatgagagaatgactaagagccagccttgctcctctcgagggaagagtgaagtgatattaatcagcgcactattgtgcacaaagagtgttctctcagg

SEQ ID NO: 282425 - DNA, 122 bp, Homo sapiens
tgactgtcccagcaagcagtcagtagaggtccccggagttcagtgggggcctggagatgtcggacttgtgagggaagggccactctccccttgtaacctgtgggggaggagctgggtcattc

SEQ ID NO: 282426 - DNA, 122 bp, Homo sapiens
aatgtcatctaccatgaacacaaacacacagacagtccctccagaggttcggaagactcacgaacccaaaacttgatgtttcccatgtgtgggctcatcctgagacgcagccatcactatcc

SEQ ID NO: 282427 - DNA, 122 bp, Homo sapiens
agtgggagctgtgccccaaatttatgccctgcctgggctgggagctaacctcttcactgccggcccctgcagccaggaggccccacgtctgcaccagcccatctcctgcaccctcgaatcca

SEQ ID NO: 282428 - DNA, 122 bp, Homo sapiens
ctcggactgactcctaatgaacagatggctggtcctggactggagaacatggcacagaaccgggcagcctctgcgccctgaggtccacgtctgcccccgagagagcagttcctccaagcagt

SEQ ID NO: 282429 - DNA, 122 bp, Homo sapiens
tcctctgccgccctccggctccaaggaccaggtgggaggtggtggcgaattcgggggccacgacaagcccaaaatcacggcgtgggaggcaggctggaacgtgaccaacgccatccaggtaa

SEQ ID NO: 282430 - DNA, 122 bp, Homo sapiens
agtaaatagcccttctcttcctatctctccttttccaattatctttagagcccttgcctccgctacacgaaagcctaagcctgtctatttcactgaaaccaggataataataatagcaaaca

SEQ ID NO: 282431 - DNA, 122 bp, Homo sapiens
tctgttcaaaacttgacttgtcagcccaaagcccgtttctatggggtaggctgggggaagcggtgggggccgggctgaacttctgctgtgaggctggtgactactcctctgtaagtccttga

SEQ ID NO: 282432 - DNA, 122 bp, Homo sapiens
catttccgacgtggggtgcctcaggctcgtgtaagggatcccaggtatccgaatttccgacgtggggtgcctcacgctcgcataagggatcccaggtctcccggggcctggtgtgtgcacca

SEQ ID NO: 282433 - DNA, 122 bp, Homo sapiens
agccctgtctctgagggctgggggattggccctgctcagtatccatgaagagccaggccacgggctcctgggcgggccccggccaccgagatcacccaccgcagctgggcgaggcctggggt

SEQ ID NO: 282434 - DNA, 122 bp, Homo sapiens
ccctccacagttgctgctgcacttgctccaggagccccaggaagcccagaagatgggcaccgggcaaggcgtgttctcattacagaacctggggtcgggggagaggcgtcaatccagggagg

SEQ ID NO: 282435 - DNA, 122 bp, Homo sapiens
gctcctcgtggacattttccacgcctctggctggatttctgctcagtagccttcagccagcggtgttctcatcgtgtccatctgcttctattaagttaatgggcacagacacacggcccata

SEQ ID NO: 282436 - DNA, 122 bp, Homo sapiens
catgccacgcccgccgcccccatccagtcaggagggttggcctaaaagcttagtctgtatcgaaacacaaagatgggatgttgtgtccatcctcctcccccgatttccttcacagctgctcc

SEQ ID NO: 282437 - DNA, 122 bp, Homo sapiens
tgggagccgtggagaagccaggcgagtgcgtagggcggagccagcgcacaggaaataggacgtgatgaggtcaaccggctggtccaagtgtggacggaagtagaggatgcaagcaccgagcc

SEQ ID NO: 282438 - DNA, 122 bp, Homo sapiens
tatatttctctggcactgggctccactgaatgtatcctcttggctgacatggccttggatcggtacattgctgtctgcaaacccctccactatgtagtcatcatgaacccacggctttgcca

SEQ ID NO: 282439 - DNA, 122 bp, Homo sapiens
agacagccccaccccagccgcctcagggccccggtggagtcgaaggggctgcagtggaggcgtggatggagtacaggaattctgatcctggagacccccaaagccccttctccccagagctg

SEQ ID NO: 282440 - DNA, 122 bp, Homo sapiens
ctgtcactctcgctgtataggttagggggagacagattgagtctcaattgccccccttggcgtggggctctgctctgggaccagcacccccatcccccatgtggactctagtggactctgcc

SEQ ID NO: 282441 - DNA, 122 bp, Homo sapiens
ctcaggtgatccaccggactcggcctcccaaaatactgggattacaggccagagtcaccgcgaccggcctgcgtccatgttacttaaagtacaaagtaacctacaaagtaacccgccaggcg

SEQ ID NO: 282442 - DNA, 122 bp, Homo sapiens
cccggcgcgtgtgtgtagagcctcagggctgagtgcccaataaaggtggcggcaaggctgcggtgaggcacttgaagcctaagtgagtgggtggggagaggcgggcgaagaatggggagaag

SEQ ID NO: 282443 - DNA, 122 bp, Homo sapiens
gtagtctttccttctggattctgcagtgacgaatgaaggcgcgggctcagcccctgagagcgcagcaccgtcgccctaagctaacccaccttgggccacgtggaaaccaggggccaggagga

SEQ ID NO: 282444 - DNA, 122 bp, Homo sapiens
tcgcggcgcacgagtctctgatcccgattggctgggcagggcaggcggcgggacgcagggcgcgcccgggcggtgctgattggccggaggaggccagccgggggaaacttccgggaatgtcc

SEQ ID NO: 282445 - DNA, 122 bp, Homo sapiens
ctgaggtgggactccaagcaggggcgggactccaagtaggggcgggactccaagtaggggcgggactccaactaggggcggggctgaggtggttttgaggggcaggggcagggaagcggggt

SEQ ID NO: 282446 - DNA, 122 bp, Homo sapiens
gtgggaagctccctgctgcaccagctgtgcagctgcacagaggccttcttcctgggcctgcgcgtcaagtgcctgccgtcggtggcagccgcgtccatccgctgctcctcgcggcccagccg

SEQ ID NO: 282447 - DNA, 122 bp, Homo sapiens
tccaaggtggttatgagtgcaaatactgcccctactccacgcaaaacctgaacgagttcacggagcatgtcgacatgcagcatcccaacgtgattctcaaccccctctacgtgtgtgcagaa

SEQ ID NO: 282448 - DNA, 122 bp, Homo sapiens
ggtttgggtccagacatcagctcacccaagcttatcttgggcttttaagtgtgttgcttccggtagatctcggggactggaggggaagtgcagcattatttgtgacccaagagggacttgaa

SEQ ID NO: 282449 - DNA, 122 bp, Homo sapiens
ggaccctccgctcctctacagggcttccagagaaacctggaaaaccagctcaggccctgccgcaaagggggtcggacccgctccgccctctccctctgggcgctgtgcttagagactcaggc

SEQ ID NO: 282450 - DNA, 122 bp, Homo sapiens
tgccggcagccaggcagggatttaggtggtttctgtttggcctccagtgcttgcctctcccgtgtcctatccgcccagacctcagacctcagagaagcctcctcccacaggaagctctcctg

SEQ ID NO: 282451 - DNA, 122 bp, Homo sapiens
actccatgggagttttttcagtaaactaatgaatgggtgtcactgacaagctttccaaagcggaaattatgtgaaaactcccatcttatgggaaaggctaaacagaggagaaaccctgggct

SEQ ID NO: 282452 - DNA, 122 bp, Homo sapiens
gaccaaaacaaaggagcggcggccgggagcggacttaccttaccttctctgccttcggcgcgcttctcagccgggccgccgacccaaaggagccgtccgactatgtctaacatggagaaaca

SEQ ID NO: 282453 - DNA, 122 bp, Homo sapiens
ctgttgacccacggcatcaccttagcaagggtgttgtccttttcagtccattccctgaagcgcagaaccggaggccttgtgagaacctggctttttgtccagtcctgtcctcagaactcaag

SEQ ID NO: 282454 - DNA, 122 bp, Homo sapiens
tgtctaaaaatgaagctgaacattttcatgtgaaaaagagcaaatcaaaaaagccgatctcgcaggaaagaaacgtgcccagctgccagcgagccgcttcctaactcgcagctctgcttcca

SEQ ID NO: 282455 - DNA, 122 bp, Homo sapiens
gtcttttctaacaaaactcaacttgtgctcaggtgtctcttccaccctcagatgattcatcgaaagctgactgaattcccagtgacaggagtagactgcccttcatcttagccagatatcac

SEQ ID NO: 282456 - DNA, 122 bp, Homo sapiens
gcctgagcaacatgatgaaaccctgtttctacaaaaaattaaaaaattagctggatgtggcggtgcacaccttgtagtcccagctacttgaaaggatgacatgggaggattgcttgagccca

SEQ ID NO: 282457 - DNA, 122 bp, Homo sapiens
attcctttacggtagacttggcccagaaacaatttccaggcccttggggtaattccatcccggccctcaaaaatgccaacccaccaccaagggagactcctggactctgcagccaggagccc

SEQ ID NO: 282458 - DNA, 122 bp, Homo sapiens
ggcatcgagccatcgtggcagcggtggttcttctccgggaagctgctcacagaccgcacacggctccaggagaccaagatccagaaagattttgtcatccaggtcatcatcaaccagccccc

SEQ ID NO: 282459 - DNA, 122 bp, Homo sapiens
gcccaggctgccccaccgccatccccagttggaggacttaggccccagccggcacctgcccggagttttgaccttaagctctagccccgcccgccccctttaggaagagaggtcgggcgggg

SEQ ID NO: 282460 - DNA, 122 bp, Homo sapiens
gaatcacctctagagctgagtaggtttgaagtcctccctcatgacttgtattgcctggctcgcctgtgggagtatatgtcatgacagcaatctatccctctctcatgctctggggactaatg

SEQ ID NO: 282461 - DNA, 122 bp, Homo sapiens
gggcgcgggcggcggcggcgacggggctggcggtggctgctggcccgagcatcttcttcccggaggctcccacagcgcctggcccctcccacccaacgaggtcacgcccatgccgggtaggg

SEQ ID NO: 282462 - DNA, 122 bp, Homo sapiens
ttaagtaagaatttgcaggagagacacacatctcctttaataacctcataaaccacactgcgctcaattgtttaaacaaggtgcaactgtttttttctttttctctttgcattttgcaaaca

SEQ ID NO: 282463 - DNA, 122 bp, Homo sapiens
gcagctcccgcgtacacgtgactttcttttcctgctcctgctccctgctcgggtttggtccgtattttcttctcatcgtctcctccagcttcagtcactgaagtctctatatccttcgcatc

SEQ ID NO: 282464 - DNA, 122 bp, Homo sapiens
ccacggggcccagcagaggcctgaggggagaccctgggcgggggctgaatcactgcctcccgacagtcccccaatgcccgggctttggaggggagccgggagcttcccatctccttttgcag

SEQ ID NO: 282465 - DNA, 122 bp, Homo sapiens
aaatgcagcctgcccggtttctgttccccattactgcgtatgcggtgggcaaacctcctccggccctgaaagctcctggctgcctggggattttctgtgtgctcctacataaaaagcagctt

SEQ ID NO: 282466 - DNA, 122 bp, Homo sapiens
ccccgcaaggccgcccaccggggtacgctctcccgcgcctgcgccaattccgccccgccccgcccccatctaccgaccggatgttagcagatttcccatagtgcctcgctagtggcgggcat

SEQ ID NO: 282467 - DNA, 122 bp, Homo sapiens
gtgaccagctcctcggcgttctgcagagcgtgggtttcagcgagttctacgtgccaggtccgcccggtgccggcttcctcgctgcccctggcggctcgtcagcccccactacccctgaactt

SEQ ID NO: 282468 - DNA, 122 bp, Homo sapiens
ggcacgaggcccggggcagacgcggaaagtgggtagcagcgtttgtttgcacctgacacccggtttgaaaaccacccactttaacctgtgggcggccagcagaccccctgtgcctcagtctc

SEQ ID NO: 282469 - DNA, 122 bp, Homo sapiens
aaggcggggagagccgcagggggaggaggaagaggaggaggagaaggcggcgcctcccagcgctttctccaaataagtcccgaaaaggggcactttccagcagctgtggccagcggtgccga

SEQ ID NO: 282470 - DNA, 122 bp, Homo sapiens
gggcgggggcgggggcggggggggaaggccgccgcagctgggaggagggaccagggcgcgcggctacagctgtgcggccccaacctcagcgcgcggacccaggcctcacctgcgagccctgc

SEQ ID NO: 282471 - DNA, 122 bp, Homo sapiens
cggcggtaaaatgcagcactcgcagagcgcctgcgcggctttcaggccgggcggcggcggcggcggtggctatttatagtaggtgacgtcaccttgaaatagaccgttagggccggcccgcc

SEQ ID NO: 282472 - DNA, 122 bp, Homo sapiens
tcgtgccataaataccaccgacatgtgcggacttccacctcgagaatccacccctgccttcgtctcccttcagtaaaggaacccaccagtgactctcggttatacagtcaccgctgggtaca

SEQ ID NO: 282473 - DNA, 122 bp, Homo sapiens
aaactgcggctttcagaagtgcgtcactgatcccagccaatgaggtttcgcttcattgtgcgtgtgcgtgcgcaggggttagggggtggggagagaggagttcattgtggtcgcctttgttt

SEQ ID NO: 282474 - DNA, 122 bp, Homo sapiens
aggcggctctgggtgctcaagggttgacactgtgtcttccctcctctctcttaaagagaccgcagcacctcccctgctctggaatcagctaggtgctctctggagctggctggggaggccat

SEQ ID NO: 282475 - DNA, 122 bp, Homo sapiens
ccactctcagatccaggggccctggactatctcccattgtatgcaaaaatattttatttccgttgacacattactctttggggcagcttgatggttttattaaattttggaaggaggcttca

SEQ ID NO: 282476 - DNA, 122 bp, Homo sapiens
ggaaggggggttgggcacagcgattggtgggcggggggccgggcctgggccggcggggagcggattggtcggaaagtaggttagtggtgcgacatttagggaaggcagaaagtaggtcaggg

SEQ ID NO: 282477 - DNA, 122 bp, Homo sapiens
gcaccatgtccttctggagacccggaaccccccagcaggccagggaggcaaggcctgggccgccaggaagccatgcttgaacactaggttgggaggggaacaccccagcaccttggtcctat

SEQ ID NO: 282478 - DNA, 122 bp, Homo sapiens
gtattttaatttacatctgcttaagtttgcgataatattggggaccctctcatgtaaccacgaacacctatcgattttgctaaaaatcagatcagtacactcgtttgtttaattgataattg

SEQ ID NO: 282479 - DNA, 122 bp, Homo sapiens
gagtctctccgctcttgctactctacccgccacttggtttccgcactgaggactcggctgcgaaatgggaggaagcaggcctccttttcgtgggttcccagaagcccccattttgcagttcc

SEQ ID NO: 282480 - DNA, 122 bp, Homo sapiens
ctcagctgtgctgggatgctgttgccctatttcccgcgtagaaacaactgctggtggcgccgccggctgaagagtgcagaactgtggccctgagccaagctggggcaaatatgggagacgcg

SEQ ID NO: 282481 - DNA, 122 bp, Homo sapiens
tttgttttatttttctttttaatagggtctcatactgtcctccaggctggagtgcagtggcgtgatcataactcaccgcagccttgactcaagtgaggggcttgagccctggactcaagcaa

SEQ ID NO: 282482 - DNA, 122 bp, Homo sapiens
agcgcgccccgccgtgtctcccacgcccgccaccagggggtgccgctggctaacattgggcgcccagatgcttgactttgagctggcaagaggacctctctgcgcctcagtttcctcatcag

SEQ ID NO: 282483 - DNA, 122 bp, Homo sapiens
tcagcgctggcgagcagggggcgcggggacagcgaggggggcgggctcccggcggcctcccgccccccaggcccctggacaatgctgtcattgtcagcacggagagtggttaattctggatg

SEQ ID NO: 282484 - DNA, 122 bp, Homo sapiens
accttcccacgcgcacgactcgcgatcttcccagtgccccagagccacggacccaaccgccgcctaccccagcccgcggcacctaacctgttcacaactgcgactccttaggtccgcttgga

SEQ ID NO: 282485 - DNA, 122 bp, Homo sapiens
tgatgcatagtttcgattgtgagccccgtcaccttccccccattcccgtccccgaatcttcgagcccgctttccagggaccctacctgagggcccacaggtgaagccacttagtgcctgatc

SEQ ID NO: 282486 - DNA, 122 bp, Homo sapiens
gggggggcgggctacgctaatgaggctactgcataatcatgagctctggcaaggagggctcgcgtctccggacacttaaggagggggacgggccaaagaaagggaggagctatgttaataag

SEQ ID NO: 282487 - DNA, 122 bp, Homo sapiens
cccgatttccttctccttcgagggtcctggaggggcgtgggggcaggcagtgtctggctccgggtggagcctcccaggtgctcccgcaagccccgaatggcgattagggaggccgtgggagg

SEQ ID NO: 282488 - DNA, 122 bp, Homo sapiens
gtgcagggcccattctttttctaggaaaggggttaacatccttgaacgtccccagacaagcgtcttaaagcattgaacctagaatagggattaactgaaactaggctcgttggtaagcgcca

SEQ ID NO: 282489 - DNA, 122 bp, Homo sapiens
gactcctttactaggcgaccagccctgaaacagaagttggacattttttaaaggttcttgcgctcggcaaggggagcagatagatgctcaggagcgaaagacgcagagaattggatctggcg

SEQ ID NO: 282490 - DNA, 122 bp, Homo sapiens
gcagggccgaagagggtgggactaacctggcaaagccccggcccagcgcggggaggggcacgctggcgacagagccccgtctttattgggcaagatcacgccgtgagcgccaattggctgag

SEQ ID NO: 282491 - DNA, 122 bp, Homo sapiens
aagacatgagaccgaagatctcaagatgagagtctacattctggctcatcacttactagtcgtagaatcttaagcaagtcactcagcttctctgaaccccagtttcctcattttattagaag

SEQ ID NO: 282492 - DNA, 122 bp, Homo sapiens
tttttaaaaatttgtttgtgtgtgagttaagcgcaaatctacaaagggtgcaaatctgaccgtcccattcaaaaaacaatgtggctgtagtgtcaagggatccccagagccaaaatagtgtc

SEQ ID NO: 282493 - DNA, 122 bp, Homo sapiens
ccctgggctgtacccaattcccctcctagggccttgtccccactgggaaacctgaacccccgggagtgtcaactgtggccacctgagcttttagggctctgggcagaccctctgcaccagag

SEQ ID NO: 282494 - DNA, 122 bp, Homo sapiens
ggggtgggtagctgccgcagcggggcgggtagctcctggcaccgtcaccgagcgagactgcggcgggaccaggcataccgcaagcagcttccactgtagacacgagtgtctggacgagggga

SEQ ID NO: 282495 - DNA, 122 bp, Homo sapiens
gtagcgtccttggacacctgtctccaaggctctgcagaagggggaggtgccgggccctgacggctgatgtccaaggaccagccgggatggaccagccccaggaggccccagtggaggaaaac

SEQ ID NO: 282496 - DNA, 122 bp, Homo sapiens
gcacaacgacgtggtgcccaccatggcacaaggcgtgcttgagtacaaggacacctacggcgatgaccccgtctccaaccagaacatccagtacttcctggaccgcttctacctcagccgca

SEQ ID NO: 282497 - DNA, 122 bp, Homo sapiens
gaggcgtggccgctgtgtgctctaccgggcggtctctggggccatccgcgtgtggggctgcgcgtgagtgcatgcgtgtgagcttgtgcttgtgcctctgctgggcacgactgtgcgcgccg

SEQ ID NO: 282498 - DNA, 122 bp, Homo sapiens
ccgtcaaaaaaaaaaaaaaaaaaaaaaaaaccctgtaaaaccggcagttcccactgtacgcggcagtgccaagaattcttaccggttaaaatcgccaaggctttcctttatcatcgtaaaat

SEQ ID NO: 282499 - DNA, 122 bp, Homo sapiens
cccgggaaccgaacctggaatccccggcggcagtggggctgttgctgttgctgtggctgtcgctgcccgtcaggctgccttcttttgtcgtttcccagcgctgcgcaggacttctcctggcg

SEQ ID NO: 282500 - DNA, 122 bp, Homo sapiens
tttggttctgtagcctttggtgtgttctctaaatctctcctctatagcattttcaaaaaccgttttgttagtgggtatttgcttgtccgtatcccactgtagaatgcaagcagtacaggcac

SEQ ID NO: 282501 - DNA, 122 bp, Homo sapiens
gcgcgcccgcgggcagcctcgttgtggctccttgggctctgttggcggcggcgctagcttcggagtctcccgcgcgcacctcagccgcctcctagcggcgcggcgctcgctcctacggtaag

SEQ ID NO: 282502 - DNA, 122 bp, Homo sapiens
tctcagaagtgttcagagcccaagatggaatggaaggtgaaaattaggagcgacgggacacggtacatcacaaagagacccgtgcgagaccgaatcctgaaggaacgtgccttaaagatcaa

SEQ ID NO: 282503 - DNA, 122 bp, Homo sapiens
cagaaacaaaacaaggatgtatgctctcaccatttctattcaacattgtactggaggttccggttggggtaattaggcaagaaaaaagaacaggaggcattcagatcacaaagaaagaagta

SEQ ID NO: 282504 - DNA, 122 bp, Homo sapiens
taaaactcgtaaggatcgagacaagctgagaaactttcccagggtggcccagcagggctccgggaggaggagccctctcttgggaggtgaggctcagtcctatgcagttgtattcccagagg

SEQ ID NO: 282505 - DNA, 122 bp, Homo sapiens
ggaaagctgcccctctgaaagaggaagaaaatgggcttaatcctcatcgagctgggggcgcggggggggtctcaaaattggtatttgtttcttagcagctgctgctgtgtccaaggcttgga

SEQ ID NO: 282506 - DNA, 122 bp, Homo sapiens
tcctgaggccccgcctttcattcggtttatgtggccccgcgcagttcacgcagttttctccgttcttaggcaaccagctcgtgggaaattcactccagaaaagcgtgcgccatatcattatt

SEQ ID NO: 282507 - DNA, 122 bp, Homo sapiens
ggatggaaaacatttgtgggatgtgaaactgacctatgtggagggctgaatttgtatccacgggttccacagaccatatggaatacttgtgttccacagacgagtggctgcgtggagtatgt

SEQ ID NO: 282508 - DNA, 122 bp, Homo sapiens
tgtaaaaaggagaaagacctagaggccttcctcttcctgtatagttgaagatacaccaaacgagaagcaggaagcgggtttacttaaaaaaaaaaaaaaaaaaagggaagtgctgtcatgga

SEQ ID NO: 282509 - DNA, 122 bp, Homo sapiens
gtcatttgttttaaataacacccaccccttattttccgtaaatacacacacaaaatggatcgcatctgtgtgactaatggtttatttgtattatatcatcatcatcatcctaaaattaacaa

SEQ ID NO: 282510 - DNA, 122 bp, Homo sapiens
acgcccaggctcgcctcctgcctgggttccagggggctgcacccggccagcgccgccctccggagcccaggcctgtgcccagggcaccctggaggcccagcctttcttgcccggtggcggcg

SEQ ID NO: 282511 - DNA, 122 bp, Homo sapiens
atctggcccccagagacagtctacagtgttgaagttccactctactgctgatgagtctcacgattttgggcaagttacttaacctagctgtggtctccattgtttcatccataaaatattag

SEQ ID NO: 282512 - DNA, 122 bp, Homo sapiens
ctgtacatgtgaacagtcaggagggaaacttattccaattggtagtcaggctctcttacacgccgtttctgcgcctctcccctcgccaatctcaatacccagtggaaagggatcgaagccgc

SEQ ID NO: 282513 - DNA, 122 bp, Homo sapiens
gtggatgtggctgtgctgtaataaagcttcatttccaaacgcctgtggccagccgggagacggcgctgccgaggtgaagaaagcagacccacgtcgtgggacgggcgctcagagagagtgtg

SEQ ID NO: 282514 - DNA, 122 bp, Homo sapiens
tccggaggctggtccagtccctggtctttctgctgtagggcagtgtatacacttctatagcgtaattttcctgctcaaaacctttttctgactctcccgccccgtgcttcttaaagtcctca

SEQ ID NO: 282515 - DNA, 122 bp, Homo sapiens
gcagcagccgtcagtcaggggtgcctgcaccttcttcttgctcaggctcctgaggaagggcggagacagcccagggctcccactaagtcctcagcagcagggaggcctcactcagtgacagc

SEQ ID NO: 282516 - DNA, 122 bp, Homo sapiens
aggctcgcgggaggcccgcaggagagcagccacctcgggggcgtccggaggccgggcgcgcggtgcagggttgcactgtagctccaccttgtggccgccccaagaggagggccgcatccgtc

SEQ ID NO: 282517 - DNA, 122 bp, Homo sapiens
gctcatcatggtcagccttccacttcttgatggtttccttctgctatgaatgcgcatgtccggttgtctgcttcttagagcagacatttacctgaaagaaaatgttacaataattagttact

SEQ ID NO: 282518 - DNA, 122 bp, Homo sapiens
gaaataaggcccagctccttgtgctcctgactcttctcagtgtgctcttctcacagacttcggcatggcctctttacagggcaccttctgctctcaggtaagttccctttcaattcaaacat

SEQ ID NO: 282519 - DNA, 122 bp, Homo sapiens
ccattgcaatgaatatcaaaaatgatcctaaaatggcccatctgaatcagaccaatagcccggactattcctgacaacagaaccattgcaaaaccgaaccaaaactagcacattaccagtat

SEQ ID NO: 282520 - DNA, 122 bp, Homo sapiens
ctcaagaaaaaaaagcagttggtggtggcctaacatccctccggggacaggacccatcgccgaacgatgggtatggtggcatgtgcctgtagcgtttttaacacacagggaagcgaccgcca

SEQ ID NO: 282521 - DNA, 122 bp, Homo sapiens
ctaacagggaccctgagcaattccgtaacatgctgtcttcctttcctagacccttgagaccgccggctacgtgaagagcgtgttagtaagtatggtcagcgcccgcttccccacgcctccgc

SEQ ID NO: 282522 - DNA, 122 bp, Homo sapiens
attttattctccccattctgttatacactttccatggcatggttcatttccagggtgaagcggcaagagaaaagaagcaaaaggctctccccaccctttcagataacagggatccttttcct

SEQ ID NO: 282523 - DNA, 122 bp, Homo sapiens
aaagtgttgcacgtctagggcctttggggaacgaggtcggccccagcgcaggcgcggtggcgcgagttggactgtgaagaaacatggcggccgcgacgttgacttcgaaattgtactccctg

SEQ ID NO: 282524 - DNA, 122 bp, Homo sapiens
tctttctctgccggaccgtggaaaaggcggcgtcagcgccggctttgtctggccccgccgcgccgctgttctcagggctggacaaagccgcccgcttcacagccgcccgggcggatgcagcc

SEQ ID NO: 282525 - DNA, 122 bp, Homo sapiens
tcctctacactttatgccaactaattttacataaatgggaaactgtcatttctaccaaagcgagctgcactgtgtttcttggggtgaacctttagggagacagccattgtgagaatgaaagg

SEQ ID NO: 282526 - DNA, 122 bp, Homo sapiens
ggggccgtgccctggacagcttggtcaccagcaatggaaggacgaagcccaagtcaggaccgctgaaagtggggaggaaggggttacggccacagcgccccctcccccttcccgacctcctt

SEQ ID NO: 282527 - DNA, 122 bp, Homo sapiens
gagcccttggccaggtcccaggcagtcgtgggtaacaccgcagacgtgtgttacccagggcggggcccctgagagctggggtggttcagagcccgtccccactccgggagcaacgtcagggc

SEQ ID NO: 282528 - DNA, 122 bp, Homo sapiens
tctgccgccccgcgggagtgaatggatctccgtgccctatgagccgagccccagagcgggcggggaggcggtctccgcagtctcctgccagagaggcgtgaggccgcaggcaggctgggccc

SEQ ID NO: 282529 - DNA, 122 bp, Homo sapiens
aagcaatctttcgggacggaagttaagtagccccgagcgggaggctgtggcggaagtggtcgcgttaccgcttgtttgtgcgcatgcgccactctcgtctggccgccgcgctttcaggaggt

SEQ ID NO: 282530 - DNA, 122 bp, Homo sapiens
aatcaaatgaatcagtaactaatacatctgcacgtgtgaactttcacaagatcatttccccgttcccgtcacaccgctaaattatgaaagaaataattatcaacactttctaattacctaac

SEQ ID NO: 282531 - DNA, 122 bp, Homo sapiens
gggggagccaagtccctggttggtttggtggggtcttgaaatagattaggacatgtgccccgagttattacaaatataaataccaatgatagcatgcaggcagaggaaacagaggtgccaca

SEQ ID NO: 282532 - DNA, 122 bp, Homo sapiens
tgattggccgatagcgcaggctctccttgacaggattggttgaactcacccttggattctcgaggggaaaatgggggaacagggcattctgggattcgtagttcttttctgaacaacagcca

SEQ ID NO: 282533 - DNA, 122 bp, Homo sapiens
cgccccttggcaggcccctacagccaatggaacggccctggaagagacccgggtcgcctccggagcttcaaaaacatgtgaggagggaagagtgtgcagacggaacttcagccgctgcctct

SEQ ID NO: 282534 - DNA, 122 bp, Homo sapiens
accgtttctgtcggggccgtgagaggagacagtataagacttcctggacccaagggacgccgggtcccctggaagcgcccatcgcattgaagaccacgtgtgccttgctggggtcccattca

SEQ ID NO: 282535 - DNA, 122 bp, Homo sapiens
gggcgggagcaggcgaccatagagtggtaaacagagcgcctagagaggcggccaagatggcggtgctggtcgaccacgcctcctccgggagcggaggcgggtggctgttctcgggtaggcgt

SEQ ID NO: 282536 - DNA, 122 bp, Homo sapiens
ggtgaagggggctgcaggtgaagaaactaaaatggagtctgtccggcgctctctctgctacgagaaggtcacttaggttaaaacaaggttgggtatcacactgggaggccgaggcgggcgga

SEQ ID NO: 282537 - DNA, 122 bp, Homo sapiens
aacaaaaatgcaggggggcagcctgaggcgagctggtgaagcggcgtgtctgtgtcccttcggctgcggtctcctcctgcccgccgtcatccccagtcggcagctgcgagcgccgagagcag

SEQ ID NO: 282538 - DNA, 122 bp, Homo sapiens
catcctggaagcctttgcacaaccacactgatcccgatggcagtggaggcttgaaaccaacgaggggcaagtcaacagaaaagaagtgagatgcacgcagagccccatgagcgagtcaataa

SEQ ID NO: 282539 - DNA, 122 bp, Homo sapiens
gccaaacccagttagagccacttcatcccctctctgcccaaatgaaaactaaaatgcaagcgtcagcaggcctgtctatgcctgtgtcgggactaccccttcaattcacccatgcaacgtcg

SEQ ID NO: 282540 - DNA, 122 bp, Homo sapiens
aaccctggcaagctactaaaacagaacagggctgagtccatgtgtttttactgcattccccggatgattctgatgctcttcaaggtgtagggaccactgcaatgatgtcttttgtcttgctc

SEQ ID NO: 282541 - DNA, 122 bp, Homo sapiens
tggaagaccttgctgccctccggagcgcccctcactgcccgaccgtcccgcctgaggccccggttctactgatagggagctccagcctggggtttggcgataaaggcccttgccctgtgcgg

SEQ ID NO: 282542 - DNA, 122 bp, Homo sapiens
gctccctcgctgggtctgaaccaggagcagctgagaacgtgccggggagaggccgagctccgactcactcatcccttagcaccgagccgcctacttattttaatccaccaccctccctcctc

SEQ ID NO: 282543 - DNA, 122 bp, Homo sapiens
tgaagaaaaaaaaataatgagtcgagagatgaattttgttttccatattatgtgaactgacggattagtgaaaagacctccactctggctttcaaccagaagctacacccagtacccatgtc

SEQ ID NO: 282544 - DNA, 122 bp, Homo sapiens
tgataaaatctacccagcagagatatgatgagaatgaggggaaacatagaaaacatccaacggggagtctaatacataaagactctcactaaatgaggaaatgactacactttatatccaat

SEQ ID NO: 282545 - DNA, 122 bp, Homo sapiens
ctctgctcctggctgggggtctccttggccttcttacaggtgtacagccacttgatgatgcgggcgttcctctcgatgaccgaagtggtgctgggcacctgctctatcagctcctcctcctg

SEQ ID NO: 282546 - DNA, 122 bp, Homo sapiens
gcggccgcggcgtccacgtcaggcttcaagcacccctttgccattgagaacattattggccgggactacaagggcgtgctgcaggctggagggctgcccttggcgtccgtcatgcaccacct

SEQ ID NO: 282547 - DNA, 122 bp, Homo sapiens
tccagtctagagagaaaaggcggagagcgcagaagaagggctgctagtggcacaaggagccgctgccgtggaggctggactcaaccatccttacccacagagaggggaccgaggctgggcac

SEQ ID NO: 282548 - DNA, 122 bp, Homo sapiens
tgggcatatagaattatgtatcactttaaatctttattggtttgctgcatctgactcccccgatcctatttaatatcgtgtcaggacatacagatgcattttgttaatcaacagtgctacct

SEQ ID NO: 282549 - DNA, 122 bp, Homo sapiens
ccgctgcgcatgcgcactccgggacgcgcgcgaacacgcagcagccagaatccacaggggcgtggtttgcgcgcgcaggaacttggatctcaaccccagggctaggtgcctcctcccgctgc

SEQ ID NO: 282550 - DNA, 122 bp, Homo sapiens
tactggggacttgggataaccttctttatttctcagtgtctcctcctttgtgtacagtagcgacacaaatatccactgtgtttccaaagagaagtcaagtgcttaagctcctcaaattttct

SEQ ID NO: 282551 - DNA, 122 bp, Homo sapiens
gcccagaccttaaacgtaaacattcagcttcgcaggtactttgggctgcacacgcttctccggacccaaaagatgcacatgcttttcagaaaccgtaaggtttacctggggctgtaaaaccg

SEQ ID NO: 282552 - DNA, 122 bp, Homo sapiens
ttcctggagctgggtttcggacacttgccagactggggtgtctcccttctctgggctacacgtaattttggttcttttaaagtaaacagcgagatggaaatgtctggtcaccaagagacagg

SEQ ID NO: 282553 - DNA, 122 bp, Homo sapiens
ctgtagtagtctgtcctctgttgattttttctctgtatgtctccagtatgctggtgtctccgtgcccattctttgctttgccaattctgtctatatgttcttcttcttccttcttggtgctt

SEQ ID NO: 282554 - DNA, 122 bp, Homo sapiens
tgggtggcatgttctgcaggtgtctgtcctcccaggcatgtgagaagaacgtgaatgctgcggttgctgggtggagagttctgcagatatctgtcctcccgggcacgtgaaaagaacctgca

SEQ ID NO: 282555 - DNA, 122 bp, Homo sapiens
cggcgaggggggcgcgggccggagccaggcggcggggaccagggcggcgcgcagcgctcgcgccagctggaggacctccccagcggacgcccaggtccctggtcgggctcccggtccccagc

SEQ ID NO: 282556 - DNA, 122 bp, Homo sapiens
ggtaatttgtaaaggaaagaggctcaattgactcacagttccatatggctggggaagcatcgggaaacttacgctcatggcagaaagtgaagaggaggcaagaaccttcttcacatggtggc

SEQ ID NO: 282557 - DNA, 122 bp, Homo sapiens
gggaggagggcccagccaggggagagggcgccccaggccccaaactagccagcgagtccccgggaccctcactcttggaccgctttccagaactccgaaccctgtcgcgggtccgcgtcgcc

SEQ ID NO: 282558 - DNA, 122 bp, Homo sapiens
ggcgcgccggaaatacgtcacgggaacgccggcagcgcgtgaagttggtgaggcctgggccgcggcatacttccggcctgagtccggcaccgcgggtgagagaccgaggccgagcgtgctca

SEQ ID NO: 282559 - DNA, 122 bp, Homo sapiens
aaaaaaaaaaaaaaagaggggctggatgcagtagctcacatctgtaatcccagcattttgcgaggccgaggcaggaagatcccttgaaccgaggagtttgagaccagtctgggcaacacagg

SEQ ID NO: 282560 - DNA, 122 bp, Homo sapiens
cccaacccggccgctggctctcattggccaattacaggcatctccactggggctttaaaccgggctcttttgagacaatgcaggaaggctgaaagaaattctcttttccttggtgaagtttt

SEQ ID NO: 282561 - DNA, 122 bp, Homo sapiens
caatcccgtgatctccacgtgtcatgggaggtagtttaatcatgggggtggttaccctcacgctggtttttgtgatagtaagttctcgggatctgatggttttataaggggcttcccccttc

SEQ ID NO: 282562 - DNA, 122 bp, Homo sapiens
cgcgaaccccgctcgctgccggctgcccagcctggctggcaccatgctgcccgcgcgctgcgcccgcctgctcacgccccacttgctgctggtgttggtgcagctgtcccctgctcgcggcc

SEQ ID NO: 282563 - DNA, 122 bp, Homo sapiens
aagtggtttctctctggaaattcccattttcctgcaagagagttcatggatattcctttccgaagtggtggaaacagcattgaatccaaattccttcttttcagctgtgggaatgacatctt

SEQ ID NO: 282564 - DNA, 122 bp, Homo sapiens
tcatgtggagtccttccagactcagcaaaaacaaacacacagcatagctttcatataactcggcccttcaaggaaagccagttacttgttgtggtgctctttgatgaaacaataatctatct

SEQ ID NO: 282565 - DNA, 122 bp, Homo sapiens
attctcctagatttgatcagtgggagcccaccaggccaattcccagctccttccctctttcgttcccacctccttccctctttcgttccccaccttcctttctcttcctgctaccctctgcc

SEQ ID NO: 282566 - DNA, 122 bp, Homo sapiens
agcgagggagaggaggctgggctcccctcccagacaacacaggcaagatgagacaagaggcgagggaggcagcgagccaggcagagaagctgggagggaggagggcgggccgggggaagaag

SEQ ID NO: 282567 - DNA, 122 bp, Homo sapiens
gcggtccccaactgacgcgcccgcggcgggaaggagagggggccgccggtgcgaggtaggcgtcctgagaggaaattggcagacgagatgagtgaggtcagaggacttcattggtggttgac

SEQ ID NO: 282568 - DNA, 122 bp, Homo sapiens
gctatctagtcttcctccatttagataagatttattaagatatgcaaccttagaattatacgcatttcctgacaacatccagtccacaggagagcctctcttccttaagctctcccaggtca

SEQ ID NO: 282569 - DNA, 122 bp, Homo sapiens
ggccatccgtctaggccgctgcaagtctcttgcaaaccaagactggacaaaaagctaaagcgaatgaggaaggggattccaggcttgactggctactactccaaaacctgaacccagtgacc

SEQ ID NO: 282570 - DNA, 122 bp, Homo sapiens
tttgccctcagctattgcaatatttttatctcagagcctccagtgtcaactacttgaatccgtacttcttaccccccaccaggagaatgttcctatacttcacattcggtgttgtcatttaa

SEQ ID NO: 282571 - DNA, 122 bp, Homo sapiens
ggttcgtgcatggatcgcgggatgcccgtgtgagtgggttattagggcctttcagaaactcgattgtgctcgagcgtccgtaaagaccactggagcctctgccttccccgcggctatttcta

SEQ ID NO: 282572 - DNA, 122 bp, Homo sapiens
tgaacctccaaggtcatagaggtttgggggcagagatctggatgccccggctctacctgccggtaactgctgcctctggtcctggggcggggccaggcagtgggggaagctgccctccgagc

SEQ ID NO: 282573 - DNA, 122 bp, Homo sapiens
ctggtcctgccgctgcttgtcatggtcatctgctactcgggaatcctaaaaactctgcttcggtgtcgaaatgagaagaagaggcacagggctgtgaggcttatcttcaccatcatgattgt

SEQ ID NO: 282574 - DNA, 122 bp, Homo sapiens
agtaaccctagagccctaaaggccagacccgctctttttacaaaggagattttctttaggcgcctggaccgcggccatacaactggacaactccagtttggtacctaccgccgaggtcaccg

SEQ ID NO: 282575 - DNA, 122 bp, Homo sapiens
agctctgccggacctgtttgggtagagggccccgttcagctgaactggatcctcctgagccggccgggggccgaggtcccctaataaatgggcccctgggccctcagcctggaacccccggc

SEQ ID NO: 282576 - DNA, 122 bp, Homo sapiens
agcggcagggggcgggtggccagaacacttggcacccatcacccatcccggaaggcactgcggtgctcaggctgctgttttggggcatggcgcccatccgcaccacctcccagccctgcccg

SEQ ID NO: 282577 - DNA, 122 bp, Homo sapiens
tgcagggcacaggcagagcctagctgctggagggtgagctgcccctcctgcttttgtcagcgcagtgggaaccccagccaagtcctttcaagtcgcaccttgcactttgcggtttctcctct

SEQ ID NO: 282578 - DNA, 122 bp, Homo sapiens
agatgagaaaactgagtcagagaaagtaaatcttaaaagttttgacatagaataatgtgacgctgacatctcttttgtaagaagaggaaatctttaatttgcatgctgtgttgggaactttg

SEQ ID NO: 282579 - DNA, 122 bp, Homo sapiens
tggaatcatgcacttgtgactggcttagcataacgtcctcattgcggctcccccatgctgcggcgcgcgtcaagatttccttcctgttcaaggctgcaggacattccgttgcatggctagac

SEQ ID NO: 282580 - DNA, 122 bp, Homo sapiens
atgctaagagaattggcaacgccgaaccccagactcaaatttctccttagtttaagggaacgtcttcatggggatgtcttgactatctttaagggaacgtctagaaagtctctgcttcctgt

SEQ ID NO: 282581 - DNA, 122 bp, Homo sapiens
gcctgggcacacagtaggcgctttgatgcgggctggagaaggtcctgcccggtgggattgcgccctggggcaccgcgcacgggtcggggaagcccggggcagggccgtatgcaaatagcgcg

SEQ ID NO: 282582 - DNA, 122 bp, Homo sapiens
cgcccccacgcccatggcatgcttgcggctgtctctcctgcctctgccttgcaggtcccacgcccgtggcatgcttgcggctgtctctcctgcctctgcctcgccggtcccacgtccgtggc

SEQ ID NO: 282583 - DNA, 122 bp, Homo sapiens
ggtgggtaattctacatttcttgtaaggtgaaagtgctgagtactcaccttcccaccctgcgttaaaggtaggatgtgggcatttcacctagactctgctaatcagaggcacccacactgaa

SEQ ID NO: 282584 - DNA, 122 bp, Homo sapiens
tttaggatcccaagaagcattgtttgaattaaatagaatggaacagattacgctagaaaacgaaagaatatgtaatacaagcggatgtcagggaagcaaaagtattattctcaatatatcta

SEQ ID NO: 282585 - DNA, 122 bp, Homo sapiens
agctgattgaaacctccgggaagctgcacctctggatccatcagggtgttcgcacctggccgcacttctgccagctgcctccggccaacactgagcctggcagtggtgctagaagtgggcca

SEQ ID NO: 282586 - DNA, 122 bp, Homo sapiens
gtattttatactagtagccaggtgtgggcagtgatacagggcttgggggatctctcttaccggcccagggatccaaggcattcagtgcaaaacctggccagcagcccgagtgagtaggagcc

SEQ ID NO: 282587 - DNA, 122 bp, Homo sapiens
gacgtggctagtcataaccttaccagatttttacacatgtatctatgcattttctggacccgttcaacttttcctttgaatcctctctctgtgttacccagtaactcatctgtcaccaagcc

SEQ ID NO: 282588 - DNA, 122 bp, Homo sapiens
agaatagacacgtactccccactatcaaatctttggcagctacaaatcaaaggctggtgccgtggggcgctaaccagagtctgcgtccagagggcgctagtgtagccccgagcagtttcaag

SEQ ID NO: 282589 - DNA, 122 bp, Homo sapiens
agctccagggcacagaaggcttaatctttagaagagcccctacttccctggccctactgccgggtttttatggagctacactggccatcctcagcgtggctagagagagcatcagtctgggc

SEQ ID NO: 282590 - DNA, 122 bp, Homo sapiens
tcaccatttgtgcaacagatcttttgaacttatttctcctaactgaagttttatattcttcgatcaatatcttctcaattactgttccctacccccaacccctagtaaccattattttactc

SEQ ID NO: 282591 - DNA, 122 bp, Homo sapiens
ctccctaattcttagcctgaatgatagtgctcccaggccagtattacccacaggaggagacgttcactataaaggtagtacctgctagaattgttggatagttactataatggactccttaa

SEQ ID NO: 282592 - DNA, 122 bp, Homo sapiens
tccccgatctggcctcacaggaggagttggcggggagccttgggcccctctggcctcagccggatttcccagccaaacgcagagagagatgccctggaccatcttgctctttgcagctggtg

SEQ ID NO: 282593 - DNA, 122 bp, Homo sapiens
cctgactttttaccatagatgatgtgggtgacttcttatgcaagcatagttgtgtatctccgaagaagctccaagagagttttataaggctgcttctctgaactgccctgagagatatatat

SEQ ID NO: 282594 - DNA, 122 bp, Homo sapiens
ggtgttgtcttaatgactgtgtggatgaaagtgtgtgggcaggctcatagcaataaaatacgggaaatccccgggcttgagtgctgtcaaagaaaactaaatttggacagtagataaagata

SEQ ID NO: 282595 - DNA, 122 bp, Homo sapiens
gatatcagtttagatcacaggcaactattttatcgatagcctaaagtgggcctggcatgacgggttgtgcctataacccaattactctggagactgtgggtggatcacttgaggccaggagt

SEQ ID NO: 282596 - DNA, 122 bp, Homo sapiens
gaagctgcagaggagggaacgctattgtgggaagaatgggggctgtgctaagacatgaaacgggatatttgaggatggaagagtgtttatgtggaaggaaatggcccagaggaagaggaaaa

SEQ ID NO: 282597 - DNA, 122 bp, Homo sapiens
gtggacaggcggcagggactcggggtcactgaggcaggcagaggaaataattggcaagaccgcagggaatgctggccgtccctcaataagacctttcccatcccggaagccccccagggatg

SEQ ID NO: 282598 - DNA, 122 bp, Homo sapiens
catgctgcgtccaggtgggttctggggaatcccattcccagtccagcgctaagtcactgtcgtcgaggcccctttagctgataccccaatcaaaccctttcgtccaacctgctaccaatatt

SEQ ID NO: 282599 - DNA, 122 bp, Homo sapiens
ccggtgcctccgaagacggcgacccgcagcggcccctcaggggagtcccccctgctagaccgacagcccgagcgctctgggccagagaaaactcagcaaaagccgccgctgctaccacctca

SEQ ID NO: 282600 - DNA, 122 bp, Homo sapiens
ctactgtgagtgttgggctgtgggctggaatcagggaatagactcagggaagccccaggacgagagaagctagataaaaaagttcatgaggcaagcacagaatggagcagattctgaaagct

SEQ ID NO: 282601 - DNA, 122 bp, Homo sapiens
cactctatagaaggaaaggacaatctctctcctcccagcagagggcgtgctgatggcagacggtgcttggagcagcaaagttaaggagactgaggcccttggagtttggggtttggtttggt

SEQ ID NO: 282602 - DNA, 122 bp, Homo sapiens
cgccctgcggatgactcactgcgtttgcactgccgcaggcgggctcggtggtggtggtgacgcggcccggcagcccgggaacgcaggcgggctgcaccctctggaagccagcccgggtctcc

SEQ ID NO: 282603 - DNA, 122 bp, Homo sapiens
ttcatttcctcccctgccgcactctgatgggtagagaacacctgtcttcgcaaccagtatcgctgcagcaacgggaactgtatcaacagcatttggtggtgtgactttgacaacgactgtgg

SEQ ID NO: 282604 - DNA, 122 bp, Homo sapiens
tagggcaaaccttcgggattacttgcgtgccgggccccggaccaaactggtcaagagcaccgactggagccaaccgtctgggttcaaatctcagcaccacccccactagcgatttcccccag

SEQ ID NO: 282605 - DNA, 122 bp, Homo sapiens
tccttaagaggggccgcccgtgccctcacagtaatgccattcgcgagagccaggaagcagcgcccaccccacggcccatcaactgctggtggacaaacaccctgaggtcgaccacgcgtagg

SEQ ID NO: 282606 - DNA, 122 bp, Homo sapiens
tcaaaccaaagctactctatcttgaataggggatgggtaaaatagggctgaagccagctgcgttcccaggaggttaaggtattcttagttgcagatgagttaggaggtccgcacacggtaca

SEQ ID NO: 282607 - DNA, 122 bp, Homo sapiens
gatccgagaactgttgcagaagcccaacgcgcgcgtcgtggtcctcttcatgcgcagcgacgactcgcgggagctcattgcagccgccagccgcgccaatgcctccttcacctgggtggcca

SEQ ID NO: 282608 - DNA, 122 bp, Homo sapiens
gaactctgcattttcgcagaatgcccccatcatgtgaaggggttcggctcactctgtggccggcctggaggcctgggtgtgcttcctaggcaggcagttggattctgtttaattttctttag

SEQ ID NO: 282609 - DNA, 122 bp, Homo sapiens
gtggtatgttaacttactcttctttgtataattgaggaaggaataatattcgactgttcacgattgaatgtcttgtctttaggcagatcaagatactggctccggtcaaatactgtgtttcg

SEQ ID NO: 282610 - DNA, 122 bp, Homo sapiens
gaagcatcgtcgggctggggctggggctggggtaacctacttctggccttaggacaaggtcggcaaaaatctcagcagtgaggaggccagaaaagtctccaaggggcaggctgcaatgccag

SEQ ID NO: 282611 - DNA, 122 bp, Homo sapiens
gtgcttaaagaactttaagaaaatgaaaattgaggtgttgaaaaaagcttttaaggctaacgtgaatgaggcgtccaagtgggaaacccatccagttctacttttttgaactttgcctgtcg

SEQ ID NO: 282612 - DNA, 122 bp, Homo sapiens
tcagtgcattcccggcatctggatgtagcctttacttgtccctgtgcagcccgagggacccgcgagactccagtgatcatagaggtgccagcggcacccggctccaatcagctccctctaga

SEQ ID NO: 282613 - DNA, 122 bp, Homo sapiens
ggctggtgagttatccaagctggtgagttctgcagggaggacccaggactcaggggtccccggctgggaaagagcttggaagtggtggaaggcaggtgcagtggacgcacagaagggagaga

SEQ ID NO: 282614 - DNA, 122 bp, Homo sapiens
ctgcgcgggcagcaggtgggagccgcgaccggggtggggcgcggagcgctgggggcctcccgactcccgcagtccccgccgcgaccaccaggggcagcaccgtccccgcccggcccgcgcct

SEQ ID NO: 282615 - DNA, 122 bp, Homo sapiens
tgtgagagttttaagaggtggggcctttgaaaagtgactaagacatgagggcactgcctccgtgagagggattcatgccttcccttataaaagaggtggaaagggccgggcacagtggctca

SEQ ID NO: 282616 - DNA, 122 bp, Homo sapiens
taacgtatccaacctaaagggaagtgggacagttaccttgggacctattgttcggtacttcgggtcctggaaagcgagatttgggtgttcagtctcgaggtctctgaatcttcccgctgctg

SEQ ID NO: 282617 - DNA, 122 bp, Homo sapiens
agggtcaatgccatggggtcagtgctcactgccacattgtagatagccatgcccacagcccggtgatcattgatcttctcagtggacacactcttggtctcataagcaaggaagattcccag

SEQ ID NO: 282618 - DNA, 122 bp, Homo sapiens
agaaaaaagtgactcagtcacttattatatctcaatggtctttgctgatttagtacaactcggctcctgttgttatttgtggtttttggaactactgattattttgataaagatttcattgc

SEQ ID NO: 282619 - DNA, 122 bp, Homo sapiens
gtttttattccccaggaacaaagataatgtggagaagaaactccaaaaggaaacagagcacggatgacagaaatgacaccacggcagcctggctcaggagtcaggtagatagatggctgctc

SEQ ID NO: 282620 - DNA, 122 bp, Homo sapiens
tactgtcttacccaccaggccaaaggagagcctttcctgtaaggacacacagggtaggcacgacacaattcacaaagataaccatgcaaggcggcccctgaagttgtgcaagagggacctcc

SEQ ID NO: 282621 - DNA, 122 bp, Homo sapiens
gggtctggtctcagacaatgcagagagtggttcccacggtgcagcggcgggctcctcaagcgcggccagagtgggcaccgaagcagaggaggcgctgagagggagtgctgcccgcacactgt

SEQ ID NO: 282622 - DNA, 122 bp, Homo sapiens
atttatatgctcctagaattttcagataagattagagtttctccttttgagacctcttagcggaaagatcaaaggctctgaggtcagcccagcccggtttcaaatctcagcgctactgttta

SEQ ID NO: 282623 - DNA, 122 bp, Homo sapiens
accacttttaggcccaggtgaggtcaagtccggggtactccgggaaggggctcacgccgacgcctctgagagccccgagagccactcaccttactcagtcgccggcctcccaccagcagcca

SEQ ID NO: 282624 - DNA, 122 bp, Homo sapiens
aacccagacccgaggttttagaagcagagtcaggcgaagctgggccagaaccgcgacctccgcaaccttgagcggcatccgtggagtgcgcctgcgcagctacgaccgcagcaggaaagcgc

SEQ ID NO: 282625 - DNA, 122 bp, Homo sapiens
atgagagtgtgtcttggacacatctggcagattcaatagcaaaaggccacaaaactgccccgtaccgctggagtgctggtggctagaattagccccatgtcaatgaagaagggacttctgtg

SEQ ID NO: 282626 - DNA, 122 bp, Homo sapiens
cccaagggatctgcccaccattcccggggtcaccagccctgccagtgatgatccccccaacggaagccagccagagccacctgagcaatagtccagaagataagcagggcgggcagtgaaga

SEQ ID NO: 282627 - DNA, 122 bp, Homo sapiens
gcccaccccgacaccggcccggccgctcaccgtcgtagtagtagcagactttttttttgccgcctccttgactgtacgccatgggctccccggccaccgccgccaccgggctcctcctcctg

SEQ ID NO: 282628 - DNA, 122 bp, Homo sapiens
agcgcagctgtgagggagtcgctgtgatccggggccccggaacccgagctggagctgaagcgcaggctgcggggcgcggagtcgggaggtgagcgcccagggaaaagagggcccgggaggga

SEQ ID NO: 282629 - DNA, 122 bp, Homo sapiens
cctgcgtgcagctgggtctgcagctgctgcccgaggggcctgcggccgacgaggtgttcgcgctgctgcggcgcgaggtgctgcgcaccgtgtgcgagcgcccgggccccgcggcctgcgcg

SEQ ID NO: 282630 - DNA, 122 bp, Homo sapiens
gcactctccggcgcacccccgcccgccagcgcctagtccagccctcccgtcccagggccccgcagcacgctgggaattgtagttcttggcctccccatcccggaagtgggcgcggcaaatgt

SEQ ID NO: 282631 - DNA, 122 bp, Homo sapiens
gcatggcttctccccgaaggcacagaaggctccgaagttgccacctcttgcctgagttgccggaaatccaagggtaggtttatatcaaatcagcagacaaacttgacttctgggtaaaggct

SEQ ID NO: 282632 - DNA, 122 bp, Homo sapiens
agtggcgccgcgaccgacaaaggaaagcctccgggaggtcaaaagagataccagagagtgcgtcccgcactggaggaagaggaaggtttttaccaagcagcgagtccagagcccgcgccgtc

SEQ ID NO: 282633 - DNA, 122 bp, Homo sapiens
ctctgccgcggtgtgttggtcggcgggggacggaggccagtgagtgggcgcgcacttggacgtatgtgggtgcactggtagggtgcctctgtggagctgtatattccagatactccttcagc

SEQ ID NO: 282634 - DNA, 122 bp, Homo sapiens
gtctttgggaaaggtgtggggaggcggtgggcacaggcctagggaagggcaggatttagacgaaagcagagccattggaaaggcatattctgtgtttccactattgacagcctcaattattg

SEQ ID NO: 282635 - DNA, 122 bp, Homo sapiens
tgtttcttgccctggatgtgcaaggatctattccctccagggattatcctgatgggtttacgaacctcagttgagaaacaacagaagctgagacaattttacgcaggtgaggagatgctgtt

SEQ ID NO: 282636 - DNA, 122 bp, Homo sapiens
ggaaattccacatcggctccctgatcccgggccagccgcggccggccaggcggcagcgcccgccccgcgctccagaccccaccctccggcctagccaccgcccctccgcgcagcccccgccc

SEQ ID NO: 282637 - DNA, 122 bp, Homo sapiens
acaccagacccaggtcggccgtagcttctcggggacagagcctggtcgctggacaaaggccgaggccaggcaggctctcccacttccgggaaagccgaggagcagcagaggggccgccggag

SEQ ID NO: 282638 - DNA, 122 bp, Homo sapiens
gaggatgaggaaccaatcgagcatgactgccaacaaattatagtccagacttatgccgcccgagatgatctcttggaggtccccttggctaatcctgaccttaacctatatgttgatggagg

SEQ ID NO: 282639 - DNA, 122 bp, Homo sapiens
cttttcctgatccaagggggggtttgtgcgggggacgagaggactagcgcgacgccccggcgctcgctgaccacacactgggctcgcacattgagaaactttttcggttcctctttaaacta

SEQ ID NO: 282640 - DNA, 122 bp, Homo sapiens
ggccgcgcagcgacggggggtgaggactacatgtcccgacgtgcctcgggcagggcggggcggtgccggagccgggcctggaggccggccggggccaggcgtgcgcagtggttcttgggagt

SEQ ID NO: 282641 - DNA, 122 bp, Homo sapiens
acctctccctcttggttgcttctttagtgtccttgtaggacccacgtggtggtcatctcccgtcacgggggtccagtcttggctctgcgggcttcccaggggccacatagggagaggatcct

SEQ ID NO: 282642 - DNA, 122 bp, Homo sapiens
agcaaacagggggccggggcccggggccttggagataaggcctggacaggatataacccgcgcaagagccgaggagcaggggtgtgcagggttccagcgacagcagcactggactcgtccag

SEQ ID NO: 282643 - DNA, 122 bp, Homo sapiens
aagtctggaagtgttcggcttctcgtaaccccctggaaagccacacattccacgccccggcgctgggttcctacctgagtcatcagcctgtccgctccggtgttttcttcatccttaaatat

SEQ ID NO: 282644 - DNA, 122 bp, Homo sapiens
tggctccctctgggtctcagcttccttatctgtttatctgttaaataagaggttgtggttcggcgagctctcagttgccacccacccgaacacaaatctttttttttttttttttttttgag

SEQ ID NO: 282645 - DNA, 122 bp, Homo sapiens
tccggaaggttattccggaatcactgggcaaggtgaagggcagggctgcgtaagcgaaagcgtctgctcagtgcagggcagcataaactctgcaacataaaaagagggaagctgagctctgg

SEQ ID NO: 282646 - DNA, 122 bp, Homo sapiens
aaaaatcgttttatattaacattaaccagagattaataaatttaggaaagattgcaaaaacgtgactgacaattaggatttaggagcctatgttcgggtactcaattttcacatctacaaaa

SEQ ID NO: 282647 - DNA, 122 bp, Homo sapiens
gcaggcgcttcgcaacatgatcaactcctcctgtgaccagccgctgggctaccccatctacgtgtcgcctctcaccacctcgctggctggcagccacccccagctacgggcactgtggggtg

SEQ ID NO: 282648 - DNA, 122 bp, Homo sapiens
ggtagctttccgaccgagcggggcacaggctgaggcggcgccagcacaactgccgccgcgcgccccgaggagacccgggcacgaggaaacaaggagaaatcaggactccttccccggaaccg

SEQ ID NO: 282649 - DNA, 122 bp, Homo sapiens
ttgaggttcaccttggtaatgcagcctccatggacgcccttagaaaccctttaaagaaaccggccaaggtaccaccttgttttgagtgagataggcccaggaggcaactgaacctgtgctca

SEQ ID NO: 282650 - DNA, 122 bp, Homo sapiens
caggctgggtctcccccagcacctccaggagggcccaggttgtgtgggtgggtgcatggacggacaggaactggctctttccggcagcggtgacccagggcctgcggtttgattccgggtcc

SEQ ID NO: 282651 - DNA, 122 bp, Homo sapiens
cccctgggaactgaatgtctccgtgtaaagcccgatcgtacatttgttcaactctgagctcggcgaaaagctgccctgtggcgggaggcgagacatgctggcagtaatgctgccttgttatt

SEQ ID NO: 282652 - DNA, 122 bp, Homo sapiens
tgctaaaaagatgcccaattcactcagtaaagccagagtctgaggaaaggctcataaagccgcaacgctttccccctaccttttgaatttctgacgtcagatgctggcaccctaccctgggt

SEQ ID NO: 282653 - DNA, 122 bp, Homo sapiens
agcccccatctggaggctcctatggcttcccacacctagtgtgtccaggaaggctgagcccgcacacattcccatcaataggtgaggggcgtgagaatgaagaggcggtcttcctctttgcg

SEQ ID NO: 282654 - DNA, 122 bp, Homo sapiens
gaggtgtgaaatatttgttcggatcatttctcattaatggggcattccagtaaccacaagcggtgttggccctttcacccaggcacacccaggagggagcgactagtcagtctgactaatct

SEQ ID NO: 282655 - DNA, 122 bp, Homo sapiens
aactataattgttatcaagtacaacaaggggacccggctccctccctgggctctcccctccgctaccccccgcaactctgagttatgggcgatcagttaattggaatcggtggcatgacagg

SEQ ID NO: 282656 - DNA, 122 bp, Homo sapiens
acctcagctttatgcttctactgccagcatctgggactgataaacttgaggttttctggacgtcaacctttgctctatggtagaatttttgagggagtgaggcagacattttcttttcagct

SEQ ID NO: 282657 - DNA, 122 bp, Homo sapiens
ctctccaccgaaagggctacaggaagaagtgaagttactgcgtgttcaagttcgtctcctcgtggatccccctaaagcgcagccttcctaaacggtagcccattcatttgacttcaaaagac

SEQ ID NO: 282658 - DNA, 122 bp, Homo sapiens
agagaaagtggaaagtgaggggtccagaggttgccatgccacccttgcacctatgtgccacgatctgtataattggcagagggactccaacatggcccgactttctcctccttattattagc

SEQ ID NO: 282659 - DNA, 122 bp, Homo sapiens
gtttattttgtcatggttgaggatgcccacaggaaaaaaaaaagagacacaagtcacagtcggatctgtggcccacaagttttcaaaagagggttttaagggcttcaatatttcaaaggtaa

SEQ ID NO: 282660 - DNA, 122 bp, Homo sapiens
tggctgaacggatccacctattattagtgcgcggggattggctccttggcgcagcgtacccgaggtggagccaatcaggatgctggggctcggagatgatgggcggccgcctcctcactgga

SEQ ID NO: 282661 - DNA, 122 bp, Homo sapiens
gtccgcccttgcttcctgcccacgagtgaggcctctggttgcccgcaacctaaggggcatcgcagccccgagcaacaccgcccccaccagccttagctgagtgctcccattggccagaggcc

SEQ ID NO: 282662 - DNA, 122 bp, Homo sapiens
tgggcgggagagagctgtggtgtctgccgcacgcgtttggcatggtaggtgtgaggggggcgatctcagaacagggaggtgttgattaacgtaggagtgggctcgttctagacagtgtagag

SEQ ID NO: 282663 - DNA, 122 bp, Homo sapiens
cccctgggccctggcaggcgatccaggtgggatgccatggaatatgatgagaagctggcccggttccggcaggcccacctcaaccccttcaacaagcagtctgggccgagacagcatgagct

SEQ ID NO: 282664 - DNA, 122 bp, Homo sapiens
agaagacagacgtgcatgggacgtggactcaccgacatggacggaacacgtaacctcacccgcaccctccctgactcagccagatgcgtgccaggagggccacggggttgggcctgggcagg

SEQ ID NO: 282665 - DNA, 122 bp, Homo sapiens
acagtggccgtggcgctcccgcccagagccttccctgcagcccgagggccttcaggcctccgccattctgtcccccgcacctgccgctcgctcggcacagatgggaccccaccgcgtcactc

SEQ ID NO: 282666 - DNA, 122 bp, Homo sapiens
tggctgcgctggtaataaggacagaaacgccgccagccatgggggctgccctcaggagagcgggacgggcaggagggcaccacaggtggctcagtcctgggcctgaagctagttgctgtggg

SEQ ID NO: 282667 - DNA, 122 bp, Homo sapiens
ccatatctacttgtaaattttatctttcctttgaaaattcaatccacaaggattacatcacggaaaagctatacaatgcttttctggctggctctgtacctgttgttctgggaccatctagg

SEQ ID NO: 282668 - DNA, 122 bp, Homo sapiens
aaatagatctacagccatacctgaacatgcctgatcttggaagctaagtgaggtccagcccggttagtacgtggatgggagaagacagaaatagcatgtaaataaacaggttaatttcagga

SEQ ID NO: 282669 - DNA, 122 bp, Homo sapiens
tgaggcacttccgtgttccccacatttgaatttgctcccgattcgagagaggcaggcatccgcggcagcagcttccaacccagacaggcttaagccgcgcgagggtgcccgggtgggtggct

SEQ ID NO: 282670 - DNA, 122 bp, Homo sapiens
caaactgttaactactgtgctataatgtactttagcctgcataatatttgaagatttatacgcaacttggtggtcctgtcttcttgagggtgaaggagatactgcatgtgtatggatcccca

SEQ ID NO: 282671 - DNA, 122 bp, Homo sapiens
taataaacagtctgaaattttaaggagttacataaaaagcaatatagccttttcctctttcgcttgctgtctccccttcccctccttctttctccaaatggagggagttctttttttcttct

SEQ ID NO: 282672 - DNA, 122 bp, Homo sapiens
acacatctcatctgatatacaatattttcttaaattgtataaagagaaattattgtacatcggatgagctgtgtctgggattaagtattagctccactgtaaccttcattttcttgaacact

SEQ ID NO: 282673 - DNA, 122 bp, Homo sapiens
tccgttatagggccatgccacacacatgggtgggagtgttgccggtccctttcaagacctcgagtccctgcctcccagtgccggacccgtgctgagccttctcggagggaatgaggggggcc

SEQ ID NO: 282674 - DNA, 122 bp, Homo sapiens
ggaacccgcaaccacagggaagaagcctccagctctttcggctgactcttcagggcagctcgggcaatccagagctgattgggctgcccagaacaaagctaggggctagaccgccccctgca

SEQ ID NO: 282675 - DNA, 122 bp, Homo sapiens
tgtggacttcagttcacaacgaggtatggatacgggtcctctagttacgacaaatgtacccggttaatgccagacggtgacgtaaggggaaactgcttctggggaacaagggaactctctgt

SEQ ID NO: 282676 - DNA, 122 bp, Homo sapiens
cgccccttctcgcagcaggatccagggccacgacccttgccgccagtttctgtgcggccacgcccccaaccctgccagaccacgccctttgtgcgcctaggctcggggtgaagccatgcctc

SEQ ID NO: 282677 - DNA, 122 bp, Homo sapiens
gtggagaaccacgtgagggtgagcacttcgaaacgtggggcgcggggcgcatgtccttggcgtgatgggctactgttgcgcgttgtgggtgctgccggggcgcgcctagctcctggcagggc

SEQ ID NO: 282678 - DNA, 122 bp, Homo sapiens
taaggggacctgctgagccatgagtgaaccagtggggttcacgttctcttggggacattacgaagtgtcaaggaaaaggcagcgggtacaggttattagatggctgagtcctttctgagcag

SEQ ID NO: 282679 - DNA, 122 bp, Homo sapiens
tttgcacatagtgtttacaatgcatttttgcattgttgtaaaactgtagtaagaacacaacgtggtatctgctctcttaacaaatttttaagtgcccagtatggtatcgttagctatatgca

SEQ ID NO: 282680 - DNA, 122 bp, Homo sapiens
gtcaacatggcgaaattctgtctctactaaaaacccaaaaattagccgggtgtggtggcacgcgcctgtaaatccaggaggcataggttgcagtgagtggagatcttgccattgcactccag

SEQ ID NO: 282681 - DNA, 122 bp, Homo sapiens
cccaagcgtcttcagtgctctggcgcggcccttcctgtgtctcagtggggccatggccagcgcctcagggtctgagaagcctgccctgaccaggggtgccttcttcagatgacccaccatgg

SEQ ID NO: 282682 - DNA, 122 bp, Homo sapiens
aaactacaagtcccagcagggaccgggacgcgggtgggagaggcgcctgtggccccgaggcgtgccgcgagttgtagtccctcctgcccgctgtgttcgcttttgagctctccgatgggatg

SEQ ID NO: 282683 - DNA, 122 bp, Homo sapiens
taagggcgacaccccagaccagggtaggtggacaaatgcccttcctgtccttgcttctcccgcagcccagcgggaagagcaaagactgcgtgttcacggagatcgtgctggagaacaactat

SEQ ID NO: 282684 - DNA, 122 bp, Homo sapiens
ctgtaaggctctcagagcagcgcctggcacgtcgtaagcactgtgtaagtgttatccactcgtcctattagctattaatcagagctcaaatacagggaaaggcaatgaatgactcagatact

SEQ ID NO: 282685 - DNA, 122 bp, Homo sapiens
gcgacccgtctgtgattgtgaacccataaaagtggctggtgggaggccgggcagaggcagcggcgggctcggaggggccctgaaggacatgccccgtgaaagtggagggcccaggcggccac

SEQ ID NO: 282686 - DNA, 122 bp, Homo sapiens
tttagccagtgagcagtgtaactgagccctgccagatgggagtgaggaaggcaggcagaacgcaaaaggcaagcttccttgcacagccaagggagagggctcatgtgtgcaaggggtcagat

SEQ ID NO: 282687 - DNA, 122 bp, Homo sapiens
cgcagcgcgttcgttaaggagcccaacttcggcttcttagaatgcagcccactttctagacgcccccggcgcacctgcctcgaggccgcgagaaaggccagctccggccgggagccggggac

SEQ ID NO: 282688 - DNA, 122 bp, Homo sapiens
gccatagaattggagctaggtgttctttgtgccattggctttcctctctggcatgcttcccgggtggttggagccagccagtgcctgatccagcttcacagacccagtaatgaaatttggag

SEQ ID NO: 282689 - DNA, 122 bp, Homo sapiens
ttccaagaggctcttgcaaagacccgagattctcataaatccccgcccagaagagctgcacgtatccctttcatgagtccagggaagagggtcctccaggtcttggaagacagaggggagct

SEQ ID NO: 282690 - DNA, 122 bp, Homo sapiens
aaggccactctgcagaaaggaaattagaaagaagaaatgatttcttggctcatgtcttcacgaacaagggagaaagttgctggcgtggtctcctcacagaagagccagggtatctgagggga

SEQ ID NO: 282691 - DNA, 122 bp, Homo sapiens
catgagggtctatttggaggctggggatgtgtgagaccatgatcatctggtcctgaacctcgctgagtgctctgtgaatgtctgcagatggacaggctgacttttgcatgttgctgtccacc

SEQ ID NO: 282692 - DNA, 122 bp, Homo sapiens
cgcgacgtccccatcggctgggcgaatttgcagccgggcgtgcaggcactgctgtaggagcgcccgggcctgaggaatccggctaccctcagccatggcttaagccagcgccgcggccggac

SEQ ID NO: 282693 - DNA, 122 bp, Homo sapiens
acaattttttttaaaaaaagagttctacctttctgaacccatcactcactcaccttccagcgattcattctaaatgctaacagtgtaaatactagggtgagagttgtcctggagtcctgggc

SEQ ID NO: 282694 - DNA, 122 bp, Homo sapiens
agaaaagatgaccaagcatgtttctggctttttctttcagaagtattcatccagtgtgcacgaccctaacggtgaatacatgttcatgagagcagtgaacacagccaaaaaatctagactca

SEQ ID NO: 282695 - DNA, 122 bp, Homo sapiens
cccggctttcgtaagcctctggcttgagtatggaaggtgagtctgggacagggagcccagcgccgaagtgttgcaacgctatagggagacatacagaccaattccctcccacctaacagctc

SEQ ID NO: 282696 - DNA, 122 bp, Homo sapiens
gcccggaattctgcaccgggagaaacttttcagcccgcagagcaaccgcagggcagtggacgggggccgcgcgaggacaaacagcggcggcgggtgcaaagccccttctccaagccgcgggg

SEQ ID NO: 282697 - DNA, 122 bp, Homo sapiens
ccggcggccagggcgcggccgggcggggaagccaggggcggagggggcgcggtaagcccacggagggctgactcatcctggcgccgccctgactcacccgcggccgccctggcagccccgtc

SEQ ID NO: 282698 - DNA, 122 bp, Homo sapiens
gcccgcggggtaagcgctggtgtgggtggaggggaaagacggggtggaggggaacgggggcggctcaccctggtgcgtggccgcctgcagctgcccggccatctcctgcaggcccatgtcgc

SEQ ID NO: 282699 - DNA, 122 bp, Homo sapiens
gtggcttctgggaagggagcgacctctcgggttggctatcagctttacctgcggtgtcgccgcttctcccatcggcttgcctcaacgtcccactctgtcgttgccacccgcccaagccaccc

SEQ ID NO: 282700 - DNA, 122 bp, Homo sapiens
agggctgatgctcttgacaaccattgtttgatttgagcccctgcctactctgctgaatgccgtgtttccacatcaggaaaggaacttgatctttgcacctgctgcctcctccttagaggggc

SEQ ID NO: 282701 - DNA, 122 bp, Homo sapiens
gggaggacagacagaaacgcagcaaggcacacaccaaggctgccggggaggcccgggcaccggacagatgcctgttgggaagccaggagctgccgagccacggaccacctaacagcctctcc

SEQ ID NO: 282702 - DNA, 122 bp, Homo sapiens
cgtccttcacagacacagtccaatcagagtttcccaggcacatcgatgcaccgcctccttcgagaaacaaggtaactttcgggttctggttgtctccaaagtcatccgaccaatctcgcacc

SEQ ID NO: 282703 - DNA, 122 bp, Homo sapiens
cccacgagggccaggctgtgtgtcggcccggcaggaaattcaggctgacgtgggaccccacggtaactgcacctgtgtcccgctttggttcatgttacaacacacatccgaaagaaaaccaa

SEQ ID NO: 282704 - DNA, 122 bp, Homo sapiens
acctgaccggagagccggctagatatggcgtcctctttgcttgcgggcgagcgattggtgcgtgctttgggccccggcggggagctggagccagagcggctaccccgaaagctgcgggccga

SEQ ID NO: 282705 - DNA, 122 bp, Homo sapiens
ggactgtactttgagaaccaccggtgcagaccctggccaacgttctttagtctgatgcgtcggggagctgtaaagctgccatccttcaccggtgggcaagtaacctggtggcgccaccccag

SEQ ID NO: 282706 - DNA, 122 bp, Homo sapiens
acatccctaaatgctgctgttgggctggagcccaaaagtgctcatcgaagccctggcacccgcttgcctgcgtgctcccgctcccacagagagtttgagcatggtggtggccaagtaagtag

SEQ ID NO: 282707 - DNA, 122 bp, Homo sapiens
gcctgtacttggtttttgatatgaaattattctcctgggttgtgatcagaagccacctttcgagttggtccgctggagtagctcatgcctcccctttcctttatgccacggctgccacgcct

SEQ ID NO: 282708 - DNA, 122 bp, Homo sapiens
cttccgttaatgaaggctctataaacatctgacaaacacacagggcatgcgggaaggacacggcctactgtaaagaatctgtgcttctccagggggttattgccccctaattaggatacttt

SEQ ID NO: 282709 - DNA, 122 bp, Homo sapiens
atcaacacttattgactgcctgggggttcctggtgctgtaatgcacctcagaggcagcgacgtaagctgactctgggaagaagtcatcgtggtattctgctaaaaacctcacaaagagatca

SEQ ID NO: 282710 - DNA, 122 bp, Homo sapiens
tgtttagtcaagtccctttgtcaacttcttcccggcgcctgagcctcagccgctgctctgcgcccaggacctggcccctcccggccccctagtccagtggtcaggcggtcgggccggcaggg

SEQ ID NO: 282711 - DNA, 122 bp, Homo sapiens
agtgatccacccacctcagcctcccaaagtgctgggattacaggcgtgagccaccatgcccgccggctagagttttttaatgatagtttgatgggcaaggggctagagaatgggtgctgcta

SEQ ID NO: 282712 - DNA, 122 bp, Homo sapiens
ggagcgggaagccagcactcgcactttggccaggggcgcgtggaaggtggtggcaggcaccggcctgggcagcttccaggcctggctggccacgaccacggcccgagggggagcccgccagg

SEQ ID NO: 282713 - DNA, 122 bp, Homo sapiens
gaggttagttcaaattcccacactcattatctgtgctggatcccagacaggaggtgtcaccgaggtgggatgttcagcacttctgaacacacagatgggaaagttcaacctgtgctgtaaac

SEQ ID NO: 282714 - DNA, 122 bp, Homo sapiens
tgccaactgcttgcgctacctcttcttggctgagctgtttgagctcaaagaggtatcagacgtagcttactctggcattcgggacaacttccactactgggccagtcctgagggctccatgc

SEQ ID NO: 282715 - DNA, 122 bp, Homo sapiens
cactcgaggcggtccctgctcgggtgcccctcccacaggcaggcgccgttgccgaccaaacgcccaggttcacccaacgccagaggctcgtcctcaattcccgcgaggcccccggaggtgct

SEQ ID NO: 282716 - DNA, 122 bp, Homo sapiens
atcttcctcgcttgggtactttcctctcggtgtgtgtttctggccggagccgtttcgcgacggcccgggcgccccgccccaaccttccttccctagaccctcttctctcccttcggcttctc

SEQ ID NO: 282717 - DNA, 122 bp, Homo sapiens
ctgggctctcgacaaagagcccaggacctcgagcgcgcccgcgtggcttctgtctccgggcgcagggacctgagggtaaccgagtgtctgttgctctgcgtccacctgtggcagaggctcac

SEQ ID NO: 282718 - DNA, 122 bp, Homo sapiens
atccacgggaccggggagggtgactgagttacccctcaacacgcagaaaaagctagtggccgctcagctcgcaggcgcagtgggtgggtgcgcgtggggagcaggcgcgcgcagggggcggg

SEQ ID NO: 282719 - DNA, 122 bp, Homo sapiens
ttcttataatccttgatctatggaaaccagctcccttctttccacatttggtcactatagcgccatggttaggagttagactagtctctgtttcaatttggattctccactgtctagttgtg

SEQ ID NO: 282720 - DNA, 122 bp, Homo sapiens
gtgcatcacagagcgctccagccttgcgccccggccgacagattgggccactgacaaggccgtcccccggtgctgccaaaagtgtttggcgtggagctggctgcagtccaggccggatccca

SEQ ID NO: 282721 - DNA, 122 bp, Homo sapiens
gcctagccgtccccctcctctcccctcccccgggcgaatcacgcgccctcctctgacactcgtagcggacccgagctccgaatttatccttcacgtgacctgagggggttgggtggttggct

SEQ ID NO: 282722 - DNA, 122 bp, Homo sapiens
acgttgctgcgctaactacaaacctggccaacatgtctttgtaaccctatcatttaaaaacgcttccaggcacctggccgctgccagatcaggttcgcgggcccggaggaggtcctcccacc

SEQ ID NO: 282723 - DNA, 122 bp, Homo sapiens
tgactccttccagtgtgctcagcgtgtccgggcccgggtgggcggggggagctgagccaccggaaccggaaccggagtgtgtaccgccatcttgaatgtgtctaactgtagaacagggctca

SEQ ID NO: 282724 - DNA, 122 bp, Homo sapiens
ctctccaaactcagtcttcctcagcagctaagctgggagctgtccttcagcaccaagggccgccttgtcctcgggcaggacggtgagggcgaaggtggagttagggacactggactggtccg

SEQ ID NO: 282725 - DNA, 122 bp, Homo sapiens
cgccgggggagtgagagacgcctcctggcgggagctggcggctgtggaccccagcgggggcggaggggaagaggggagcaggggcggggagcaaggagccgggaggagggcggcgggcgggc

SEQ ID NO: 282726 - DNA, 122 bp, Homo sapiens
cccatttgcctgcagtcgctgcctttgctcctgagaaggtctgtagcctcgtttcgggcccgtattgagcccccttctccctaagtccgggtgggctttgtgcaggaggggcgggaggggag

SEQ ID NO: 282727 - DNA, 122 bp, Homo sapiens
agcggggagagggatgggggtggggaacgccggaggaagggaccacagcatcctccccgccgcagctcccccaatcacacagacaatgagataacagcgacgtcttccaaaggctctttgtt

SEQ ID NO: 282728 - DNA, 122 bp, Homo sapiens
gtttattaaaacgcaagcctcttcacagggtctctgattccagaaatctacggtggggtccgtaatttacatttttaatggactcccagaaaatgcttaatagccctgaccttggttggata

SEQ ID NO: 282729 - DNA, 122 bp, Homo sapiens
cagtcctgcagggcggggcaaacttggagaggcgctgcgtcgggggacggggctacaagccgtcgctgggggcggggcttgcggcccacctgtaggtcccggtgccacctcgtcagtgtccc

SEQ ID NO: 282730 - DNA, 122 bp, Homo sapiens
taacccagcacgcggcacttcctgtctctggataaggtaggtatgcagccatggcacgtgcgggaaagcgggacagcgccctctagtgttggaaatcccactcacaactagcattgtgcgat

SEQ ID NO: 282731 - DNA, 122 bp, Homo sapiens
tgttttccaattgtgggttttcacaagacactcccttcccccacagcaacaacaaaatgccgatccctgattcagcttggagaatcattgtttgggtggtgaaaatcccatcttgagccagc

SEQ ID NO: 282732 - DNA, 122 bp, Homo sapiens
tggtcccacgcccgtagcaggccattcattgatttattgcgctgaccaacagtttcagggcgccagttgtgttctgggcgccggcgtcgatgaggggaattccatggtcaatctgacgcggc

SEQ ID NO: 282733 - DNA, 122 bp, Homo sapiens
cagccgagggtcacctagctcctacccggaaccactgacccctcagtcagacacagcttccgggtcatttaggcagctgcggagatcatagagatgaaggactccagaggatcgctccggtc

SEQ ID NO: 282734 - DNA, 122 bp, Homo sapiens
gcctgtgggttggggaagagtactctcgtttacagcgaaagaactgaggatccggccggacgcggcggctcacgcttgtaatcccagcactttgggaggctgaggcgggcagatcacctgag

SEQ ID NO: 282735 - DNA, 122 bp, Homo sapiens
tccccctccctcggccatctaggcgcttcgagtttaggactggctttgtggggcggagggcggaggttccctcccggcgctggaggaaggagatgaggagggccactcttacctccatcagc

SEQ ID NO: 282736 - DNA, 122 bp, Homo sapiens
tcccgggctggaactcagacagcagggagggcctccgccgctggggctggatgatggagccgggcgacaggtgggaggcatagtcgcgggagtggtgctggtactccaggagcccgacgtcc

SEQ ID NO: 282737 - DNA, 122 bp, Homo sapiens
cacgcgcgcgttggcgtaaccgctaggttctctgggaagtgtaggcgtagggcgtcaggccgcaggcgcagagacctccctcgggctgggagttgtagttcttagcagtggtaagggctgga

SEQ ID NO: 282738 - DNA, 122 bp, Homo sapiens
tctccggagcaggatttccaccacatgaaggtggacgataagaaagtgtgggacccacgccggggaggggcaagtacagcccccgcaaggccgcccattaaatcaggattgggggaaacggt

SEQ ID NO: 282739 - DNA, 122 bp, Homo sapiens
cagcgctgcaggaccaggtctgggggactcaggtctcccgcatcctattccagtgcccagcgcggccccagctcgctgccagggcgctggcaacggtgggcccggacgagggggaggcggcg

SEQ ID NO: 282740 - DNA, 122 bp, Homo sapiens
accaggcagccaaagtgagaggatcagcaagggccaaaatcaatggtgttggggcctcaccgaggcagcccaaccttacgggagccaaaagtcacccctgctcagcctacaaggcaagaggc

SEQ ID NO: 282741 - DNA, 122 bp, Homo sapiens
gagcaaggcccgccggctacacggttcctgccatcctcgctgcgccctttctcccatgctcgcggcctccatccggcagaaactggcacagcaaacccgacagccacagacctgtggcccct

SEQ ID NO: 282742 - DNA, 122 bp, Homo sapiens
tcaggaaggagatatttcttgaacgcctttccatgacagtacatagagatttctcccattcgttctaacattttaacagtcttcctaaagaagcgacttctgaaagtattatttaaaaacaa

SEQ ID NO: 282743 - DNA, 122 bp, Homo sapiens
gacacgttataacgaggagccgtgggatcggcgctccgggccctgctcccacgctccccccgccgtgtctcacacgcgtctctgccatctcgcagtctctgtgcccagccttcgtcctgtgt

SEQ ID NO: 282744 - DNA, 122 bp, Homo sapiens
accaaggggcggggaggaggcactttggcttcggagtcccctgcggggtcgcggtggccccgcaagaagggacgcgcggggcggggcgcggggcggggcgcggggcggggaacctggccacc

SEQ ID NO: 282745 - DNA, 122 bp, Homo sapiens
cgggggaaccgctgggagccctgcccccggcctgcggcggccctagacgctgcaccgcgtcgccccacggcgcccgaagagcccccagaaacacgatggtttctgctcgaggatcacattct

SEQ ID NO: 282746 - DNA, 122 bp, Homo sapiens
ttccttctcctgctcgcgtcaatgcaagtgacgtctgtcaggccattttcctgacaaaaacgcaccacctcactacttttggcgtagcctaaggccttcggatctccctgtatggagagttt

SEQ ID NO: 282747 - DNA, 122 bp, Homo sapiens
tctctggggcaagaggtcggggagctggaagaggcaggaaaaggagcacactcgaagtaacgtttattggggaaaaaaaacgcctacgtgtaaatggacccgcacagctcaaacctgtgttg

SEQ ID NO: 282748 - DNA, 122 bp, Homo sapiens
aacgccccggcccttccagattcgcctgtgagcgatgaggcccgcccatgcgggttgctacgtccccttcttggtccacagtctgccctcatccctctggcagtcacgctgtcttccctgca

SEQ ID NO: 282749 - DNA, 122 bp, Homo sapiens
tctctacattagacatcagtcctacaagctggttgacaggcctcttcagaaaaagcaccccgatgggttcattttcctcttcagcagaatagtcaactgatctacaggaagcagcgtacctt

SEQ ID NO: 282750 - DNA, 122 bp, Homo sapiens
cggatgctggaatggtgcacgcacgctctgttggacgctggaatgctggtgcattgttgccggatgctggaatggtgcacgcatgccctgttggactctggaatgctggtgcattgttgcca

SEQ ID NO: 282751 - DNA, 122 bp, Homo sapiens
gtgaacccttcactcccagggctagcttttcctgctgtcaatttcataattatattgctccgccccttggcttagcacttcctttcccctcactaccttctcaccccaacccccagcaatga

SEQ ID NO: 282752 - DNA, 122 bp, Homo sapiens
cagcagggggaaggcggggctacatgagggagccctgcttgcctgcaagcagggcacaggcgcacacgcatacactctcctacatgaacttacactcacacctgcgcactcgctgccggtgg

SEQ ID NO: 282753 - DNA, 122 bp, Homo sapiens
agggctgggtccatggtgcccgctgagtatttgctgctgtgtttcaagatgcccttcctccggcaggagaggctgtgggaggttaccctggctgggtccggggggctgggggaggggatgct

SEQ ID NO: 282754 - DNA, 122 bp, Homo sapiens
cacgacgtcatcgtgggaagcgtgtactttttcggattactgcttggcggattagaaacccgtagatcagttctaggttagccctgattaactgccctgggtgtttctgggccagagggaat

SEQ ID NO: 282755 - DNA, 122 bp, Homo sapiens
tttcattcttccacttaggggtctccaggaatgaaaactggccccagccaggccagagcgcgcgaatgaaaggcggcactgggaccaagagagaagcttcgtcccgcctgggctgcggaaac

SEQ ID NO: 282756 - DNA, 122 bp, Homo sapiens
ctagatagttctactagccccagcgcgggagcttcaggccctgtgaaattacgctttgagcgacgaccaaaaatctcttcacagtcctttaaaaccctactaagctctcgggaaggcaccat

SEQ ID NO: 282757 - DNA, 122 bp, Homo sapiens
cggggccggcaggccactccgagtggggggccctccgagcccacgcccacccggaactggcgctggccccgcaagcacagcatgcagccccggttgccacccgcgcctctccctccacacct

SEQ ID NO: 282758 - DNA, 122 bp, Homo sapiens
gaccagaggaaggggtcggtggtgggcacagggattcatcttagagccgccttcgtctggcgcgcacgatgtttttctttgggaaagggtccctccggagaagagctgggagagattaatgt

SEQ ID NO: 282759 - DNA, 122 bp, Homo sapiens
acctttttgtagtgggtcatattttctttggtgtttttctcaactgctttctgcttggcccgctccattcttcaatgccctccttcccaggtccttagtacctttccactgtcctctggcta

SEQ ID NO: 282760 - DNA, 122 bp, Homo sapiens
cccagtctcaagtatttctttatagcaatgcgagaaccggctaacacggaaaattggtaccggggatcaataggatccctactcttactttgtctacctctctatttctttacccatatcct

SEQ ID NO: 282761 - DNA, 122 bp, Homo sapiens
ggacctggggcccggcggctggactagaggcgcagttggcggctctggggctcgggcagccggcggggccgggggtcaagacagtcggtgggggttgctgcccgtgtccgtgtcctcctcag

SEQ ID NO: 282762 - DNA, 122 bp, Homo sapiens
ccctggctacccgacctgttttttcttacattatcatacagccaatccatcagtagagctcgttggctgtgctcaaaatatatcttgaaccctaccagttttcaacatcccaccatcttatt

SEQ ID NO: 282763 - DNA, 122 bp, Homo sapiens
tacgtgtatgaggagaatgtggcaaagtctggcacgtggtagtgcttcaataaaggtttacgggtcaaataaacaaatgaagagctcagaggacaaacctgtgacaaacgaacagaaattaa

SEQ ID NO: 282764 - DNA, 122 bp, Homo sapiens
aaactggggcagttttattgacgatggcaatgtacaagactccacacctaggtatgtgcacgaggtaaggcctgagctcaggccttatgatcctcctcaggacccttgggggcaaacttctc

SEQ ID NO: 282765 - DNA, 122 bp, Homo sapiens
cacctggagtggtttctgcttcctacgcgatccctggttgataaaccctgcctggcaaaccgagcacgcgtgaaggcctcaggagccacagtggaagtggtttggaaagcacagctatttac

SEQ ID NO: 282766 - DNA, 122 bp, Homo sapiens
tctcggcggcgtctgtttacagttagtgagccctccctccccactcatttgcctgcacagcgactttccggagcccgagggcggggcctggggggcggagaggaggcggcttcccgtcctca

SEQ ID NO: 282767 - DNA, 122 bp, Homo sapiens
agcctaggattcgactttgaatggtccgttaatgtggttacaaaacgtgactcggttcatcgggagccctccgtaagcaagacaagcacccacctgcggtcagagcaggggtccggctcgcg

SEQ ID NO: 282768 - DNA, 122 bp, Homo sapiens
tgaactgagagaggggtcaggagcgggggccagatccaaagtggtagcctaggagcaggccgaggagttaggagagccccatggtgggcttaaggaagacccttggggctgcctggaggagg

SEQ ID NO: 282769 - DNA, 122 bp, Homo sapiens
atcctcccctcccagcaaaacaagagggcgggaggtccttacagcacctcgaaggcttatcgcggtggggaaagatccagcacaacagtcctaaagggtatttccatggtggaggatgctct

SEQ ID NO: 282770 - DNA, 122 bp, Homo sapiens
aagccccaggggcccaaaaaatgtcagagagacacgggaggaaaatcaagagaacaatcccgtaaaagtttatgaactcctgggctaagctctgagctgtgcaagcgtagatctgtccctga

SEQ ID NO: 282771 - DNA, 122 bp, Homo sapiens
cattcgcttggaatcagcctgattgatggacgtggaggagggtcagtcctgattccgccacggtgatcatatctgcctctctgcagccacttcggagcacacacgcacacacgtgcacccac

SEQ ID NO: 282772 - DNA, 122 bp, Homo sapiens
attctatctataatgcacagaataggccctacaacaatactcaacccaaaacgtcagtagcgccaagactgagacactccacaacccaaggaaccattttgttcaattctgaaagtaaccag

SEQ ID NO: 282773 - DNA, 122 bp, Homo sapiens
acaaacatttcttaggcaactgaaaggctgatgggattccacagccaattgggagaaaagcgctctcgagggtgggggtatgctttttccagggcagatggtgttcagcccaagttacgggg

SEQ ID NO: 282774 - DNA, 122 bp, Homo sapiens
aaagcgctgaaaacagattttattcagtaactactgcaggtaaagagctgagctccatcccggtttgtgcagaggtgactttgggcgttttaaagggagaatgagcgaggcgggagtgtagg

SEQ ID NO: 282775 - DNA, 122 bp, Homo sapiens
tgcgtccaccgccagcgtcgaaaaaccgccgtggtgcccgcgcacagtgcaccgcgcctgcgcatggtctccaaaggctgagcgagggcctgccagtgcgcatgctccgctctttagcgctt

SEQ ID NO: 282776 - DNA, 122 bp, Homo sapiens
tgtcatgccagatagtggaaggctgctatgttgagaaaggcaattgagcagttttggcggcggagtcaaacagaaggcttagaatcaacatctgttttctacagtatgctcgctttgatttc

SEQ ID NO: 282777 - DNA, 122 bp, Homo sapiens
ccacttcggctcggaggcagtcaaagaagcccagggctgcgtgcttggaggcagcgtctgcgagacaaaccatccggaggtgggcgcaggacactcccggccctgcttcctggtgggcgcat

SEQ ID NO: 282778 - DNA, 122 bp, Homo sapiens
aagagtaaataacactggcacccatttaactcgtatgcacacgagaggttgcataagcaacgctttgtacatggcagacttttctaagaagtctaaatttagaagacctctgttgaatttaa

SEQ ID NO: 282779 - DNA, 122 bp, Homo sapiens
caggaaagagcgttggcccgaaatccgaaaggagaacatccctctcctgcacagactgcccggctgaatggtgccccacacatcgaattatggagaattttcaaaaataataaaatggcatt

SEQ ID NO: 282780 - DNA, 122 bp, Homo sapiens
ttcctgggaagctaactattggctgaggccaggtgtttccggcggtggcttcagagttgccgaagtgggcggagccctgagcttccggcaggcaggaaggaactgcttgtggggggaggagg

SEQ ID NO: 282781 - DNA, 122 bp, Homo sapiens
ggtcgccatgttgggaaggtctgcacttggcctttggtcggccatgatgaggcggtctgacgtggctcttagagccgccatggtgggaaggtccaagggggattaaattttttgttttgttt

SEQ ID NO: 282782 - DNA, 122 bp, Homo sapiens
cgggagcctcccgaggctcgcgcgaagccactcgggcgcccgcaggcccggccggcccggcgcctcttggagctgacgccgcccgcgccatcttgaccgagggcagctttccactatttccg

SEQ ID NO: 282783 - DNA, 122 bp, Homo sapiens
atggtgcgccctgagtgacgtcaggagcagaggccggagctgtccatcagcaccaaaggccgcgggcgggctcagggcatggggccgcggttctggggcggcccgagccccggctcctgcgc

SEQ ID NO: 282784 - DNA, 122 bp, Homo sapiens
gagagtaggaaatgcgccgtctgcgaggggcgccctgcgtggacccggggcctcggggcgcgtccacttacccgagccaggagagactgggccccacggtgttagccccgcgctcgggctcg

SEQ ID NO: 282785 - DNA, 122 bp, Homo sapiens
gaaaggctgcctgccggtgcgcaggaaaagggaagagagccggggaattgctttttgacccgtaagggagcgtttcttggtggatggggaaatcaaaaaattgactacggtgtagtcagcta

SEQ ID NO: 282786 - DNA, 122 bp, Homo sapiens
ccagcgcccccacccccacgttggcaatgtcattggattacaatgcgaggtcttcccctccgcgacgccccctcctccctccgcgggcccgcccgcccgcgcccctcctccccacccctgcc

SEQ ID NO: 282787 - DNA, 122 bp, Homo sapiens
atgttttccatttttctcatttccctgcagctcctcccaacacgctaaatttcaacggagcgcatcgtaagaggaagacgctggtggccccagagatcaacatttctctggatcagagtgag

SEQ ID NO: 282788 - DNA, 122 bp, Homo sapiens
tgccgtacaacgtggtggttccctgcatctctgcccacgtcggagaggtgcgtcggcttccgtacaacacggatactctctctctgacgcaacttcctgtcctgcgcaattctatttgacct

SEQ ID NO: 282789 - DNA, 122 bp, Homo sapiens
aagtaaataattggaagaattatgttgcccaacatgaagaagggaaagtctcagtctcttcgactgagcgactcaagggggtagattcaagagagagtccagagcaaagaaacaaaaaatgc

SEQ ID NO: 282790 - DNA, 122 bp, Homo sapiens
gtacgggcccagctcgcagactctcactttcctggacacggaggaggccgagctgcttggcgccgacacacagggctccgagttcgagttcaccgactttactcttcctagccagacgcaga

SEQ ID NO: 282791 - DNA, 122 bp, Homo sapiens
gggagaaaataaaacaaaacaaaacccccaacttgaatcaactgtatttctttggaaggacggtgtcatacacggctcctcaagctggcaccgtgtgtctcagtagtggcattttaagggtg

SEQ ID NO: 282792 - DNA, 122 bp, Homo sapiens
gagcgcccacttcctccaccgctggggaatttaagggctactcctaggggtcagataggacgcctagaaatctaaagccctagttgttccagcttgagtagcaagtggaggcgaggtgtaca

SEQ ID NO: 282793 - DNA, 122 bp, Homo sapiens
acagagggccgcgttgctccctcttgggagcagcagtgctaaaatcgaagcaggcagctgcgggaccgctatagccggccctgcgctcgggcccttcccgggcaggaaacgcgtcgctgtcc

SEQ ID NO: 282794 - DNA, 122 bp, Homo sapiens
cccaggaagagccctagggtcctagaagagagggaggatacagaaacactctttgcacttcgtctcctaatgcagagtccatagctcggagttcctgtaaagcagccacaaaagatagaggc

SEQ ID NO: 282795 - DNA, 122 bp, Homo sapiens
caccttcgtccttcggcggtttagcacggcctgcgctttcctgcgagccctgctgtcacccgaacagcctgatgacttcacgctcaaccactggagggcacaaccacatcatttttaaaaaa

SEQ ID NO: 282796 - DNA, 122 bp, Homo sapiens
tgtttgaaaagtgctgcaagaccttggagcgagaacaggattaggtacacagccctgggccggcggggtgagccgcgcgcgccactggaagagcggcgctgtatagcagcagccccaggtct

SEQ ID NO: 282797 - DNA, 122 bp, Homo sapiens
gagaacgcccagttctccttgctgctcagtcatggagtctctctggggaccccgctgccgcgctggtccttctgcagaggccgcctccctgcagcgctgtcttggtcaggctcccagcagga

SEQ ID NO: 282798 - DNA, 122 bp, Homo sapiens
tgagatttcggtgggtcaaaccaaatcacagccattccagaaagggccctgccccttacccggaaggaaggaatgcatgctcagagaagccaggaagaatgtagacagacaggccttgctgc

SEQ ID NO: 282799 - DNA, 122 bp, Homo sapiens
tgggtgggtagacgtcgcacccggaagtaaagcggctccgtgacggagcggcggtgcgcgcggcagggcccggagtatcccgctttctttggaggaaaccaccgcatcagatctgcgctgcg

SEQ ID NO: 282800 - DNA, 122 bp, Homo sapiens
gaacgatcgtttgatgtgccgagccggaaaaagagaggagagggagaggctcccagcgagcgcggagacagaggagcccacgcggcacagcacgagccctactcttgcccgcgtagaggtgt

SEQ ID NO: 282801 - DNA, 122 bp, Homo sapiens
cgcagcgcaaaggcggccgggagtaaggcggagctgaaggaggagcttgatggaagcgtgcgagaaggggcgtaactgatttggaaaccagaggaaaggcgctgttttcaccgaattagaat

SEQ ID NO: 282802 - DNA, 122 bp, Homo sapiens
ccccgaccgctgtgccccattgggcggcacggacgcctgggacactctttagtccaattgcgggcggcgggcggcctgtctcagggctgggcccgcctggctcctgtgggatcagggtgggt

SEQ ID NO: 282803 - DNA, 122 bp, Homo sapiens
ccccagccctccttcttcacccgaaactgtagtctatggggagagaagaaagcttgggggcgctggctgaggtcccccgccccacccaactctcgctggttggggcaggggcggggccgcgg

SEQ ID NO: 282804 - DNA, 122 bp, Homo sapiens
gctctggctggcagggggaagggaggagggtgtgtcggggtctcgcgggggttgagccatcgggcctgctggagccaggccttgctgttttttgaagacagccccgccatcctggccccctg

SEQ ID NO: 282805 - DNA, 122 bp, Homo sapiens
cgtagtcacggtcttgtgctctaaggtgagtggaggacgagcttgggcttagcggcagcccgtatcacatcctagactttttacttcgaggagaagagtctcacgagttgtcctggaagtaa

SEQ ID NO: 282806 - DNA, 122 bp, Homo sapiens
gctcattttgctcctctgggccacagccagctcagagggttgctctaggaaatatctacacgttcttgaagcacaggtttatgtgccaggcactgtactaagtgctggggacacggcgttaa

SEQ ID NO: 282807 - DNA, 122 bp, Homo sapiens
ggcagttcttggagtcccgccctggccactccccgccctatcgcggcggctcccactgcacgactttgttgccacctaagggagggggtgcgcgcccaacaaagggaccaggactccgggcc

SEQ ID NO: 282808 - DNA, 122 bp, Homo sapiens
ggccccggggcgccctcacacctctccctgcagtcccgccctcctcctcctggcgggcggcggcctctcccaaagttgtgccgcagacccagaggttgagggggggaaaagcgaaacttgca

SEQ ID NO: 282809 - DNA, 122 bp, Homo sapiens
gaacaaattgagcctaaggaacagtatacagctgtgttctcagtatcttcttctttattccgggtcaattgtctcctacaaagcctcccgtcatctatttctccccacatcccttattcaaa

SEQ ID NO: 282810 - DNA, 122 bp, Homo sapiens
tccgctagcccggggggccctccccgcggggcagatggtaagtggggcggtgcaggtggtcgccttgggaagggagcgcgcaggggggtaaggtggggcggcgggaagtgctagaagtcacc

SEQ ID NO: 282811 - DNA, 122 bp, Homo sapiens
aattgcacacctattgaaataaacctgtagtttctagaagtggaagaaaatttgctgagacgtcagctggggattcttcctggagaactccagaaatggagagcttccacaccagatttagt

SEQ ID NO: 282812 - DNA, 122 bp, Homo sapiens
cacactcagaagtggacagtcccacagatgcacagagggaaatgcacttacaaagacacacggagagagagagacagagatcctttaacacacacagaccaacagggaaaacacagtgggat

SEQ ID NO: 282813 - DNA, 122 bp, Homo sapiens
ctgtgccaggcactgaagcctccggatttgatgcaccatgaatgaggagaaatggcctcccgtcttgtgaacttcaatggggagaaataattagaatgagcaatagaaatgcacagatgcct

SEQ ID NO: 282814 - DNA, 122 bp, Homo sapiens
cgggcggcagcaagttttgggagctggaggtaaccgaattaaaaggcgccttagaaactccgcttcgggactttgctcagcagggctccgggttggagggcgccgaggcctggcggacggga

SEQ ID NO: 282815 - DNA, 122 bp, Homo sapiens
ggacgaggcgcaagtgctggcgagccagatgcggaggctggcggccgaggagctgggggtcgtcaccatgcaggtaagtggcccccgagctggccagacatcccgcctttctcctttgctca

SEQ ID NO: 282816 - DNA, 122 bp, Homo sapiens
ggggaaggaggtatcctttctctatcgacccatcgcgaattcaggttatcccccgccaggcggggtccagaacaagggtctagagatttctacaagcagcaaggaacttgtccagagaatta

SEQ ID NO: 282817 - DNA, 122 bp, Homo sapiens
gggggggagctcgacctcgggcctcagacctgccgcctgcgatccctccggttgccaccccgcgtcctctgaggcctggtcctcgcccaactgggtcctgagctggggccaaccgggccaag

SEQ ID NO: 282818 - DNA, 122 bp, Homo sapiens
ctgggtcacagcagggaatcttagcttggttttggtgtgctgctggatgaccagaccgggcgtcgggtgagcccagaagtgagagcagttggctgtgccccagtgctgtgtgacccagaggc

SEQ ID NO: 282819 - DNA, 122 bp, Homo sapiens
ctgacacccacgagacgctgcttctacgacttagaacaaactcaactgcacactcgcgaacgcgccagcttcaccagccggttcaagatcatccccgagggtaaggggaatcacttccacat

SEQ ID NO: 282820 - DNA, 122 bp, Homo sapiens
acgcggtgctggaaaaagtgcagcaggaaacagcattctggggaggcaggcctttcagaccggatttagtgagcagtcagtaacccagagcttcttgtctgagagcagaagctggagaaaaa

SEQ ID NO: 282821 - DNA, 122 bp, Homo sapiens
gctccatcttttctccacggagggggcctggtgctgcagacggggttcccggggtcaggacgatccaggtgacttgagagaaaataaggggagttgtattgacaccaactgttttatttatt

SEQ ID NO: 282822 - DNA, 122 bp, Homo sapiens
ccacccttctctgtctacctctgggcgggactgccgggtgatgagatactcggtcggcgacggtagaacgggcgacggcgacaaccgcaatcacatccacgacggtgatcatggcagaggtg

SEQ ID NO: 282823 - DNA, 122 bp, Homo sapiens
cccgctcctgctccaagaagtccttatagttgttccagtcctcgatgctccgccccagctcggtcaccgcctggaactccccaacgtcgctgtcgaagcgcccgtactcctcgcggttatag

SEQ ID NO: 282824 - DNA, 122 bp, Homo sapiens
aaaacaaagcatttcccttggagcatctgcaactcgtgattcggctgaatccacatggctcgtggtccttcctgtcagtactggaggtggccgagaggagggaggagtggagaaagactcca

SEQ ID NO: 282825 - DNA, 122 bp, Homo sapiens
atcaggggttagggaccctcgcgggggtgggtgcgatggggcgtggtttcagagctgagtcgccgccccggtggagctgggcattggctttccggatgaagaaaaccatgtgtagctggtct

SEQ ID NO: 282826 - DNA, 122 bp, Homo sapiens
gccgcgatcaccgtgtgccgccgctcggacgtgtgcaccagccccacgttggagaagcgccggcccccgctgcccccgccgcccccgccccccagggtccggtactcccgcgggtactccgc

SEQ ID NO: 282827 - DNA, 122 bp, Homo sapiens
cctcatgatctgcccgtctcagcctcccaaatcttcttttcttaaaacaaaatgtgtagacggttgacatttcagagtgatctcaagtgtgcagattctctgggtaactaagaaaaattctt

SEQ ID NO: 282828 - DNA, 122 bp, Homo sapiens
aactctttgatcttcatagtaactgaaaatgatgttctcgtgtgaataagcagctagtctcgctacagctcggttttgttgaaacagcctaaaattttgagataaatgtgtccctcttgact

SEQ ID NO: 282829 - DNA, 122 bp, Homo sapiens
tgtgctgagctgggctttgcacttgggacaagaaagggtgtcagatcagtctctttccagcgagtagacgtgaaaactcaggtggtgctgtctcgcttctccacgtgaaggatcagcctgca

SEQ ID NO: 282830 - DNA, 122 bp, Homo sapiens
ctgaaaaacctctctatctgcaatgcccgcagcatttaaagtagtgcgggtgcaagtaggcgagtgttaaagctgggtggggggaggaccctgaaaataatgttcctttgtgggggtggggt

SEQ ID NO: 282831 - DNA, 122 bp, Homo sapiens
cggctgcatagcctgagaatcccggtggtgagcggggatggcggttgtagcggcggctgccggctggctactcaggctcagggcggcaggggctgaggggcactggcgtcggcttcctggcg

SEQ ID NO: 282832 - DNA, 122 bp, Homo sapiens
tgattctggcaggaaacaggtgacacatgcaaacagatacattaattgagggaccatggccgagccatgccaggatgaagggagaccagcagaggctagccacagcgacaaccatggaatcc

SEQ ID NO: 282833 - DNA, 122 bp, Homo sapiens
aaatgaccctgagtgactttcattttgagggtcagaggttgactcagagtttgttccttccgggacgtttagagagctgaacctagtgggagtgcctggcttgaagagatgcaggtgtgggg

SEQ ID NO: 282834 - DNA, 122 bp, Homo sapiens
gcggcgccggccggggcaagtgggcgagagggcgggggccgggccgcaggtcgaggtctgcgccttctgtccggggccccacagcgcggccggcccgcggctcgccgtcccggcccccagac

SEQ ID NO: 282835 - DNA, 122 bp, Homo sapiens
ggcgcggccgtggggtcggcgtccgtcgggcgttggcaaatggggctctgcgagggtccgcgcagggcgccaggggcgctcggcgacctcgctcctccgcgggcccgggcattcggccgatt

SEQ ID NO: 282836 - DNA, 122 bp, Homo sapiens
tcatggtggggtgctggggcctgaggggttcaaggcctgcctcatcagcctgggctatgacgtggagaacgaccggcagggtgaggccgagttcaaccgcatcatgagcctggtcgacccca

SEQ ID NO: 282837 - DNA, 122 bp, Homo sapiens
ccctttatttctcagaccagccaacacttagggaaatagaaaagaacctacatgaaataacgatgaattatcaggggcggattcacccaatactgagcaggtgccagaaagtagtagctgca

SEQ ID NO: 282838 - DNA, 122 bp, Homo sapiens
ctcggcctcctcgtcagtgacagatctgtactgcacccctcacagcagtaggtcagacctcgtcctgcccggcacggccggggacttcagcctgagcgccagcctgtcggcctgtacgctgc

SEQ ID NO: 282839 - DNA, 122 bp, Homo sapiens
atggcgtgcaggaactcctcaaagttccggaagggtgtgccctcgccccagatacccaagcggctcatgtagatcatgttccgaggctcagaggcacctgtggggggaagctgccgtcagct

SEQ ID NO: 282840 - DNA, 122 bp, Homo sapiens
tgaggaaaactacactacttagaaggctgtgcattatgcgtacggcgggagctgggccaacgacggcctaggacggggacgtttccgacggctcacgccggtgggggcgggacttccgggtt

SEQ ID NO: 282841 - DNA, 122 bp, Homo sapiens
gggccgaggaggaatgcgctcccggggctggggacgtggtgggctcgagtccagcgggctcgggcactgctttgacagtcacacctcccgtctcctggattgggaatcggaccctagtcctg

SEQ ID NO: 282842 - DNA, 122 bp, Homo sapiens
tactcgcccaccaaacctggtattaacccacagcaagatccgcccatcaaacctaatgcccgcccacaacctcgccccggaacttagtctctgtcctgacagccccgcccccatgcctggta

SEQ ID NO: 282843 - DNA, 122 bp, Homo sapiens
aaacttcctcttgcctggctgcaggtgcaggggcagtggggcctctcctccctagtggggcgaagagacctgcctcctggaagtcactgtgaggtaatgttctggtctgcagaacctcatct

SEQ ID NO: 282844 - DNA, 122 bp, Homo sapiens
cagtttccatgggctaggaatctgggtgaggttagctgtgtcctctggctcaggctctcacgaggatacaatcaggctgtcagccagggctgcagctctctcaaggcttcagaatcctcttt

SEQ ID NO: 282845 - DNA, 122 bp, Homo sapiens
cccgcgcaggctgccaatggagatgccgatgagcttctggagctgcctgcagggctgcagcgcccggctggccgcggcccctgtgcctccctccgcgatagccgcgtcacccccgccaccgc

SEQ ID NO: 282846 - DNA, 122 bp, Homo sapiens
gatcaagctgtgggacatcaacgcccacatcacctgccgcctgtgcagcgggtacctcatcgacgccaccacggtgaccgagtgtctgcacacctgtacgtgccctgcccgcgccacccagg

SEQ ID NO: 282847 - DNA, 122 bp, Homo sapiens
ctgggagagcttgcttatgggccagaggatgtctggctcatctcagtactgctcatggggcggaatgaatgcgaagtccccccagatggggacaccatgtggcagagtgggaccactctggc

SEQ ID NO: 282848 - DNA, 122 bp, Homo sapiens
atctggtgcttgccagggcctgggttccagagacaggcttctctaaacagttaaagggctcggctgtacaggaggactccggacacaattggggagtggctaagtgctctcttgtggcccga

SEQ ID NO: 282849 - DNA, 122 bp, Homo sapiens
catctcttcctgcaatggggtcaacggcttggagactacaggtggccgctgcaggcacaacgcgcccaacaagcgccatggggatccgttgcttgagggtgcggctgcaagagccaggctgc

SEQ ID NO: 282850 - DNA, 122 bp, Homo sapiens
gacagttactcacagatagaggagcaccaggctgacagccaggagaagccaggtttccaccgccaaatttgggatgaggtccatcgccactttccttcttcaactgtgttctgtgagtcttc

SEQ ID NO: 282851 - DNA, 122 bp, Homo sapiens
gcgcccgggacctcaaagctggactccccggggactgagtccaaccgtggctgcaggggccgcggcctggcggagggtccgcgtgggtgtctacgaggatcccccccgttccatctcctctt

SEQ ID NO: 282852 - DNA, 122 bp, Homo sapiens
ccggccccccccggccacggcgcaccgcctccccgcccccgcccgccctcccccaccgcgcgcgctccgcccgccccggagcctcgccctccgccacgatgagcaaatgagcgcgagcgagg

SEQ ID NO: 282853 - DNA, 122 bp, Homo sapiens
cagaagtttctaagagtcacgagcatctgctctgctagtctagagggctcaagtctagggcgccttttgaggtatgatgcttcattccttgggctctgatgtgggactgagtttgcttgcaa

SEQ ID NO: 282854 - DNA, 122 bp, Homo sapiens
gcggggcgtggctgccggcaaaggatggagttcgggcgggctcccgcgaagggaagtctgcgggctccgaggtttccgggactcgccacactcgagccacaggaaacctctgctgcaactgt

SEQ ID NO: 282855 - DNA, 122 bp, Homo sapiens
caaggctctgataatggagatatgtcagaaatgctggggctgtgtgtccagaatagtaggcgccagccataggtggctgttgagctcttaaaatgtagcaagtctgatttgagatgtgctgt

SEQ ID NO: 282856 - DNA, 122 bp, Homo sapiens
gcttggggagattccctcgcagctgagcagaaaacagtgctggacgtcgcactgtgtgggcgcaagggcatcgccttaaagagtgaacactgtccactgtctcggccgcagcggctgccatg

SEQ ID NO: 282857 - DNA, 122 bp, Homo sapiens
tcctcaccatggttgcagcacaaagcaacaagccccagaggccgcttcctccctgaggagcggctccggcggccggagaaggcgcaggaggaggaagaggcggaggaagaggaggggaatcg

SEQ ID NO: 282858 - DNA, 122 bp, Homo sapiens
ttaatggagggacatccagctaaagggaatcttggagacctccgcgggtttctagcagctcgcggcatgttggtttcccagggcaagaggccgccactgaaggtcagctctgtctttccagc

SEQ ID NO: 282859 - DNA, 122 bp, Homo sapiens
gagagcccggcaggctgtttgttctcggacgtgtgcaaccgctgccggcggggctgtgggcgccgcagcgtggaaggaaggggtgggaaggggtgcattctggaccctcgcattgattggac

SEQ ID NO: 282860 - DNA, 122 bp, Homo sapiens
ccattccacccaccccaattctttcatcgtagcttcttttctggatttggaagaagagaccgccctttgtgactggttcatggactttgtcagaaatcaacacaatgtcttattctcccatc

SEQ ID NO: 282861 - DNA, 122 bp, Homo sapiens
tggaaactgagtcccgtgtggctctgtgtgtgtggaaactgagtcccgtgcggctctgtgcgtgggggctgagtcccgtgcggccctgtgcgtggaaactgagtcccgtgtggctctgtgcg

SEQ ID NO: 282862 - DNA, 122 bp, Homo sapiens
agcgcccaaaagccatctaacactgccacatggtgtgcgaagtaggaattgttagaaagccgaagttagtactggtgtgccccattttaaccaaacatcaaaatagaggcaatatatgatga

SEQ ID NO: 282863 - DNA, 122 bp, Homo sapiens
ttatcgctgtctttttctccttcagcaagtagaggtcaatgaagcagggtgtgttagttacgcaaattcctataaggcactttacggttttcatattggacagtgaggtacacaggatatat

SEQ ID NO: 282864 - DNA, 122 bp, Homo sapiens
tccgtgtgtttcggggacaggcagcccatcctggtggacagagtgtgggggcacagggtccgcacacccggtccacgaggctccaccacgctcgagctgtgcggccatgggcaggctgcgtg

SEQ ID NO: 282865 - DNA, 122 bp, Homo sapiens
gacctcctgacctagaaccatgcccggcgcagggagaacaacgagcttacggaccgggtgcgggggctgctgtgcgagaaagcctacctgctggcccgggagcgttcgccggcccacctggt

SEQ ID NO: 282866 - DNA, 122 bp, Homo sapiens
gggattaaacagaaaaggtgtggctgagatttcccagtggtgctcacagtgcatggacagcgcggggtggggcacggcgggcttcacacagttctgtccgtccctgagtgcttcctcaccac

SEQ ID NO: 282867 - DNA, 122 bp, Homo sapiens
ccctccctacatcaggctgagatcacttgcaaactttatcctgagcacctggagagcttgcgacatggtccttacagcaggaagaatttaaaagaagataactttgggggaatgcttgttgt

SEQ ID NO: 282868 - DNA, 122 bp, Homo sapiens
ggggaggcctggcctgctgtgccctgagctccccacataccgcactgcagagtgggggtgcgaggcgggcggctgcagactgtgtctgaacctggtcacgtaggctgagtgacgagaagcaa

SEQ ID NO: 282869 - DNA, 122 bp, Homo sapiens
gggaaaaggttttatgtaaaggacatagacaagagtttgtaagatcaatcgattttgaagcgttgctgtaagaattggtccatgttagcaagagaagttttgccttcttgtagagccctcac

SEQ ID NO: 282870 - DNA, 122 bp, Homo sapiens
gcccccggcggcatgtgcatcctctccagggaaggccctggctacaggtctcctggcctgcggaatgggaatgattccaggacctgcgatggtggtaaggacttccttaggagatgaagcca

SEQ ID NO: 282871 - DNA, 122 bp, Homo sapiens
cctggcctgaactctctggtccacttcaaaggcctcagagctcagtgcaggcagctgccccgagaacaaaggctgctcaagtgagaaggctttaacctcttccttgctgttgctcagccccg

SEQ ID NO: 282872 - DNA, 122 bp, Homo sapiens
tccacaggcccctacctccaacttgggtaaataggccgcggacctcaagtcccagaactccgcgcggcggacttctaagggtattgtgatggagcatggggctctgggaattgtagtagcac

SEQ ID NO: 282873 - DNA, 122 bp, Homo sapiens
gcagtcccgaggcctgccccgtgggaaggcagctaagcagtaagaaatcgagctcggcgccggcgggctggcactgctgggggacccagtacaccctctgcagctgctggtccgggtgctaa

SEQ ID NO: 282874 - DNA, 122 bp, Homo sapiens
ttcccagacagtgtagtccctgggcagaggggcacctcacttcacagatggggcagcgaccgcagaggcactcctcacttcccagacggcgggggagccaggcagaggagctcttcacttcc

SEQ ID NO: 282875 - DNA, 122 bp, Homo sapiens
ggactgcgcggggactggcggggctggcggggctggcggggctggcggggctggcgggcccggcgcactgcgggtgcgcctagaaggcggtgcccgccagggggcgctcgccagcctccccg

SEQ ID NO: 282876 - DNA, 122 bp, Homo sapiens
ataacaaccagacgacactgaagcggctggtgcgggatacagtatctcatttgcatagagcgcgctggttggctactgtcatcatagtaccactccgccgggaagcggccgggccccattgg

SEQ ID NO: 282877 - DNA, 122 bp, Homo sapiens
caacaggccacaggaatgcaaatcatccacaaagccaagagtggagctagcaggtggcctcgcccattcatctgatgtcaacactttattcagctcaggcccctttaacatctgggaaggcc

SEQ ID NO: 282878 - DNA, 122 bp, Homo sapiens
gcctgggggtcctggctgaactgggctgggtgaagggggccccctgacccccttggggtccgggctgggctgggtgaggggcggtttccgacccccagccaggttcccaggcaggatgagct

SEQ ID NO: 282879 - DNA, 122 bp, Homo sapiens
cggggctgcgagtgtttggtgccaactcattaggggggccgggcggtgtgtcgggaaacgcgggcttgggcactgcggccgggagcgctggcggagaacgggggatccagtacccgaccggg

SEQ ID NO: 282880 - DNA, 122 bp, Homo sapiens
ccgcgtcacccaggccccagcgcccttttctgtggtgtgtgggtgtagtgagccctggggcggggaacaccattgctgggggtcggaggctttgttgagagtctctgggacgagaaacgtgg

SEQ ID NO: 282881 - DNA, 122 bp, Homo sapiens
gaatttcaaacccaaaacagctgcttggaaggagccagcatgccagaggctgggcgcaggcgcagagcgccgcagagccaaattcaaatcactttcacactaagagccaaagatcagttttc

SEQ ID NO: 282882 - DNA, 122 bp, Homo sapiens
cccactcatcgacgcccagtgcaggcctgggtcgagtccttgcggggcttcgagcaggagcgcgtgggcctggccgacctgcaccccgatgttttcgccaccgcgcccaggtgagcgagggc

SEQ ID NO: 282883 - DNA, 122 bp, Homo sapiens
atataatgcaagtggcatgctgtgtgtttcattttaacttcgttaagcttgtgttttcaccggggccttacaaatagtggtcaacggccatttcacagaatggaagtcagggttcttggatt

SEQ ID NO: 282884 - DNA, 122 bp, Homo sapiens
tccgcgactacagacctcgggagaggagcggtgggcaacgtgtctgtgctcggtcgaatgcgcacactccagttaggccgctggctcggacctagaaatgtttccgctttccttagtgcctg

SEQ ID NO: 282885 - DNA, 122 bp, Homo sapiens
gccccgtacagccgtcgcggacccggggcaaacgtttccatacagtcgtacatcgcgacccggcttgaagggaaactgggtgctggaaacaccaaggacccgcagccgattccccctcctcc

SEQ ID NO: 282886 - DNA, 122 bp, Homo sapiens
cccggagtccctgcgaccgcccggccacttcctcccggcggccgggacctgcccccgccccgccctgtcccgccctgcgggccgcctcctccaggacacgtgtgtgtgtatgtgtgtgtgcg

SEQ ID NO: 282887 - DNA, 122 bp, Homo sapiens
atttgaggttacagtgagctgtgttgtgtcaccacactccagccggagtgacagcaagaccgtgtctctaaaaaaaaaaaaaaattaagaaatgagagtggccagctttcctgtcattcact

SEQ ID NO: 282888 - DNA, 122 bp, Homo sapiens
aatggacaatgaacgatttgggtgataaaagaaaatcctcaaacattacgggagggagtgcggtcgaggctagagtcctgcccccgatcgagtcccgctgccctccgttctcaggcccctgc

SEQ ID NO: 282889 - DNA, 122 bp, Homo sapiens
aagtgccaggaccggcaggacctctactacctggcgggcacctacgaccccaccaccgggcgcctggtgacggctgatggcgtgcccatcctatgctgagccgcccaccgcagatgcctccc

SEQ ID NO: 282890 - DNA, 122 bp, Homo sapiens
gggcaggcagccagaaggaggcaagaaccaaaaaaaaaaaaagaaaaaaaaattccgaagcgcccgcagcactgagcccgaaccggctcagtcccgccgtctctagaaagttctgcaccccg

SEQ ID NO: 282891 - DNA, 122 bp, Homo sapiens
cagttagcctgtgcagactaatactcatatacccttgctaccaaaatggtaagagacctccggttggaaaagacccagaagtgaatcctgaggatcaaagattggatggggccattgaatat

SEQ ID NO: 282892 - DNA, 122 bp, Homo sapiens
ggtccgcagccccgttcccaccctccgatcagccaggaacccgctgcttgtggcgctggccgcaggagagaggagcctgtcaccctgtggagaatgcactcccagttctagtcgttgcccct

SEQ ID NO: 282893 - DNA, 122 bp, Homo sapiens
ctttagagccagggcttttgactgccctttgtttctacccctcctgcacagttgggccaccggaacagtagtagatgtgaaagcttctgctatgtaaacaggtttgctccactcacaaacat

SEQ ID NO: 282894 - DNA, 122 bp, Homo sapiens
atctcccctcccagctctgtctttctaggatttcgaggaatgcagcctttagtacttgagcgaacacttgtatctaatccctgaatgtcaagcaatttcatctagccctaatatttttactc

SEQ ID NO: 282895 - DNA, 122 bp, Homo sapiens
aggctaagacctgttgacgcctgctatggcagcgcttgagaaatgactgggggagtccagcgaggtcggggacgcagcggtctccgggctccagaaacctccttagccttttgtggtaactt

SEQ ID NO: 282896 - DNA, 122 bp, Homo sapiens
ggtgcaggcatgggcccggcacccccaaactccggcccccacacggttcagggccccccacgcaagactcacctccagcggccacccccactcctgtcgcgctgtgatctcggctggggccc

SEQ ID NO: 282897 - DNA, 122 bp, Homo sapiens
cagccgcccaaggcgaagcgcacgtggcagttggcgggaaatccctggggggtggagcctcggctcgaggtccggccgccccgtaccacgtcatcgagcagctccccctccccttgctacaa

SEQ ID NO: 282898 - DNA, 122 bp, Homo sapiens
ccctggagtgccaggtggccgaagtcgagactggggagcagagggtggtgaccctcaacgcgagaagccacctccgagccagggtccaggcccagagcaccaatgacgggcttgatttccag

SEQ ID NO: 282899 - DNA, 122 bp, Homo sapiens
aaatgaggggccctgcctcccaccttcctttaaaatacagtcgtaaggcagttagtaggacgtcgtcagtgcccttgctaagagagttcccacgcggggcctcaggggcggcggggccgcct

SEQ ID NO: 282900 - DNA, 122 bp, Homo sapiens
gtctgtcctagcacccccaaaccacctgtgtgtcgtggggcacctgatggctgagcgagccggtgaggatcaggggactcaaaagtgaggaggtggcactttcagcagaggggccatgccat

SEQ ID NO: 282901 - DNA, 122 bp, Homo sapiens
attggacaggtaggaggaggggcctctgtcaatcaccacctcattcaggacctggaggggcgacagcattgcacactcagggcgggggatgccgcacggctcgcagacaccctccgtctcac

SEQ ID NO: 282902 - DNA, 122 bp, Homo sapiens
ccgggaggaggcgcccgcgggacgggccctcggcggcgcggggaagccccaaggccggggcggagcctacgtccttccgccgccactgtcgctcgcgctccacaggtagggagcgcaaagtc

SEQ ID NO: 282903 - DNA, 122 bp, Homo sapiens
tcagtctactttccctcattactccaattgaatcacaggtcacaaccagaccaggtggcacgctccttttggagcttggaggtggctctgaaaagagcctttgggttcggggcgccgggacg

SEQ ID NO: 282904 - DNA, 122 bp, Homo sapiens
tcctctgtcctctgcacgccgccggccctgctggggttgctttctgccgcggcgtcttcgcgaatatcccctcttgctgtctgcctgggcgtccctccgggttaccgcacaccgcctccgac

SEQ ID NO: 282905 - DNA, 122 bp, Homo sapiens
aagtgaggagcgtctctgcccggccaccatcccatctaggaagtgaggagcgcctcttcccggccgccatcccatgtacgaagtgaggagcgtctctgcctggccgcccatcgtctgagatg

SEQ ID NO: 282906 - DNA, 122 bp, Homo sapiens
ggccgtcaagtcagttggccatatttgcaagccaacatcgacatcctgggcagcattcagcgctttgagggtacggggtgcctgtggacagcaggtccgtctgtgttgcctttttcaagcca

SEQ ID NO: 282907 - DNA, 122 bp, Homo sapiens
gggacagggacaacgccttaaaatgggtcaacgcgcggacgcgagggggcactgtgagtccgctttggcgagggagaggcggcggcccgcgcggggcggggagggctgcgcccttccagcat

SEQ ID NO: 282908 - DNA, 122 bp, Homo sapiens
gaaaataacatattgctcattaggggcacggggtgggtgagatgagccagtgcattgccacgatcgttgcttttaactttcccattgtgtttcacaggtccacatgcatcttctggtagtct

SEQ ID NO: 282909 - DNA, 122 bp, Homo sapiens
ccgagggccccgaggaacagcaggacgaggaagacaagtttcatgtctgcggtctggaggcgacttggcaaacgaaggctctgccacttgcgcctgccctgcgcccctttattcagggcttt

SEQ ID NO: 282910 - DNA, 122 bp, Homo sapiens
gggcggggcaacgaggcagcgcgcccggaaggctttcaagtgggaatcaagttttgagcacgagcaaatggggttcagactggccactgttataacaaaccctggggtggaattcggccttt

SEQ ID NO: 282911 - DNA, 122 bp, Homo sapiens
ctttcacacagaagtgagggcaggaagcaggctgtgccagctcacaccacccctaatgctcgcagcgctgactctaattgtttccaggaagatcgcagctttgcttttgtgctgttcctggt

SEQ ID NO: 282912 - DNA, 122 bp, Homo sapiens
ggataagtaccatgacagacacaggtgtatatcagatgtggtgttaacatgctagcagcccgtgggagatatcacaggttcattggttaccacaatatgctctgaagagaaatgtcccaaga

SEQ ID NO: 282913 - DNA, 122 bp, Homo sapiens
cgcacacggtaattgctaaattacccgccatctgctccgctctcagacataaattacctgcgaggaggaaagacgcagaggctgcgcactttccttcctctcccccagacccgcgcaaggcg

SEQ ID NO: 282914 - DNA, 122 bp, Homo sapiens
gagcgcccgtgagggctacgtgctgcaggtagggtggaggggctgctgtggcccatggtgcgctcaggagcttcagtgtgaagggttcatgctcaggcaggctaggagtgtgcaaaacttgg

SEQ ID NO: 282915 - DNA, 122 bp, Homo sapiens
cacgctgccccagggccctggtctcccggtgtggctcggtcttggtgtccccgctgcggtcgtcccatttgccaccgccgtttgcatgtgggcctttccactaagaagcgggcaccctaagg

SEQ ID NO: 282916 - DNA, 122 bp, Homo sapiens
cggaacgagctgggctcggccttctgggcctcctgaatgaggcggtgcatggggtagccgcggcgcgggaaggccacgtcgccgcccgccagcagccccatggggcagaagtcgttggcgcc

SEQ ID NO: 282917 - DNA, 122 bp, Homo sapiens
tcgtcggcactgaaggacggctggtagcagggtaccgcgcagttgggcacctggcccgtccgcaccttgttgtagagcgggtgtgactccttcagaatgggcacgaagggctcgcgacactt

SEQ ID NO: 282918 - DNA, 122 bp, Homo sapiens
catttgaagaaactgccacactgttttccaaatgactgaaccattttacattcttataagcggtgttcctctccacacctcaccagcacttatcttttgtcttttgcatcgtggccattttt

SEQ ID NO: 282919 - DNA, 122 bp, Homo sapiens
gctgcacccctgcactcctctgttggtagagccgcaagaggtcaactcctcccaggttggcgcagaggcttgtgggaggccaactagtaaaaataccgagaactctcgaggagagccgacta

SEQ ID NO: 282920 - DNA, 122 bp, Homo sapiens
catacccttttcagctctggggagatggtggctcctgtggggtcggggattgggggtctccgttcctttcatcctccagcctcgtgggggagtcaagtctccgtaggcggagagcccggatg

SEQ ID NO: 282921 - DNA, 122 bp, Homo sapiens
gtctcagcgtcacggtggggagctgagggtcacgtgcacccaggcatggccgtgggcggacggagaggggcaggggcagcgccggcgttctcagcacccccggatgtcgttagcgggtaagg

SEQ ID NO: 282922 - DNA, 122 bp, Homo sapiens
tgaactctgcgacaaatggtgtagtggagtcccctccccggagggctgtctcgtttacctcgggagcatgcgtggggtaggttgcatcctcccggctgtttgatacaggctgagatttctgt

SEQ ID NO: 282923 - DNA, 122 bp, Homo sapiens
ttccggcctgtgggactgcatggctgtgacactgagcaacagctgaagtctttattctctcggaggggaaggaaaaaaggaaacaacagtcagtccaggcttgtccacggctggaagcctcg

SEQ ID NO: 282924 - DNA, 122 bp, Homo sapiens
agtgagcttttgttgtctggagatgccttgactatcagggatggaagagaagagggaattcgcctggcccagccaagccgagagcgcatctgcacagatgctgcccgtggggcctgcagtct

SEQ ID NO: 282925 - DNA, 122 bp, Homo sapiens
gccatccttttttttctttttcttcaacttttaagttccagggtacgtgtacaggatgtacgtgtgcttactgttacacaggtaagcaagtgccatggtggtttgcttcacaaatcatccca

SEQ ID NO: 282926 - DNA, 122 bp, Homo sapiens
ggagtcctggctcccattggctgcagcgggaaatggtgaaccaatgctcatagaccttaacgccctcctctcgggatcacttccgcctctggggtcaggctccgcccagcttgcccggcatc

SEQ ID NO: 282927 - DNA, 122 bp, Homo sapiens
gggcgggcggaaagcctggcggtcgtcggtcaggcaacagtactgcagcgtgactgggtccgtctggctcagcggccggtccgtgtacatcacacggagaggagtggcctcggggtggccgc

SEQ ID NO: 282928 - DNA, 122 bp, Homo sapiens
gtgcaagatcacgtgaggtacgactgaacacggagatctccaaaactgcggagagttttgcgtgtgaacgtatgcacagacatctacatggaaatggctgtaacgcatccagccataaggcg

SEQ ID NO: 282929 - DNA, 122 bp, Homo sapiens
aagctcccaggagatccaggagcggcttgtccgggcctacgagctcatgctgggcttctacgggatccggctggaggaccgaggcacgggcacggtgggccgagcacagaactaccagaagc

SEQ ID NO: 282930 - DNA, 122 bp, Homo sapiens
tccccctcccaggtctcagtttcctgccttcctgggaagtggggaaaggctgagaggccccgtgctgggggtgaagctaattcattagttacgcctcaacaaggaccgggtgcctgcagtgc

SEQ ID NO: 282931 - DNA, 122 bp, Homo sapiens
gttcggaaacgcggagcaggagttcgagcccccaaggtcacgggtggcgcgggaagaactcgggccccagagggacggaggggaagggagacaggacagtcgaggtacaaggtcctggcggc

SEQ ID NO: 282932 - DNA, 122 bp, Homo sapiens
ctgtcaggggatgctgccaccccagtgccagggtggctccgcccagccccttcctgctgccgccctcgctgactcacctgtccagcctcctactgggctggggcaagggcttgttgccccag

SEQ ID NO: 282933 - DNA, 122 bp, Homo sapiens
ggtgatccgcccatctcagcgtcccaacgtgctgggtgggattacaggcatgagccactgcgcccaactagtttatgactttttaaatgcaatttatgttctgtcattggagtggggtttgg

SEQ ID NO: 282934 - DNA, 122 bp, Homo sapiens
cctatcctagtcaaagaaaggggtgacagacggcacctggaaaatcgggtcactcccacccgaatactgggcttttccgacgggcttaaaaaatggcgcaccaagagattatatcccacacc

SEQ ID NO: 282935 - DNA, 122 bp, Homo sapiens
cgcggccggcgctgggagggcggggcgctccaggtggccacctggctcgacgtcccgccccgcccttctgcccaccagcctctgccaggctgcctgttccgcttcccgcgacactcgggccg

SEQ ID NO: 282936 - DNA, 122 bp, Homo sapiens
agctgtggcagcaggtctcaagctttgtcggtgattagttgcacggcggggaaggctcttcgcattttcctctgttctggggctctctggtggattggagcaggcaaatcgggctcctcact

SEQ ID NO: 282937 - DNA, 122 bp, Homo sapiens
ccgaatgctgcttctgctgtgctcaccaagggagcgcgtgtgcggcgtgtgtctgcgaagcgggcaggttgtgtttagttgtgctgtgccttggaacagtccgtgtgaacagaggagggctt

SEQ ID NO: 282938 - DNA, 122 bp, Homo sapiens
accgcttcagagcggagaagagcgagcaggggagagcgagaccagttttaaggggaggaccggtgcgagtgaggcagccccgaggctctgctcgcccaccacccaatcctcgcctcccttct

SEQ ID NO: 282939 - DNA, 122 bp, Homo sapiens
agaagatgttggaacccccctgcatggcggcgggtggcattgccctgccccattcatctgcgcgttcatccgtttctcttacggagcagcctcaatgctctaccgatgtgcgggtgccaatc

SEQ ID NO: 282940 - DNA, 122 bp, Homo sapiens
ccctgggccgggcgctgaggcgggcccctctgggcagggcccgggcggggctgggtgggccgcccctgctgctgccgtccatgctgatgtttgcggtgatcgtggcctccagcgggctgctg

SEQ ID NO: 282941 - DNA, 122 bp, Homo sapiens
atcctcggggccgcactgcccaagggggcaatccccgcggccgtccgcaacgggtccccgcgcctgtcggggccagaatcagatcatctccgttgtaaacatttgtccaagtcaatggaaga

SEQ ID NO: 282942 - DNA, 122 bp, Homo sapiens
cattaagaaaaaatctacccctacttctcgcttcttaaaaatctctttatgaaattgactcgttataaaactaggtcagttactgactgcctgttcctaaattccaagtcacatttcaaatt

SEQ ID NO: 282943 - DNA, 122 bp, Homo sapiens
tacttttgcattgaagatgtccggtccctttaaggtcttgggtgacgtaatgactagccccgccccctctcttctcgcttctcagccctgcccacttctttttgtcctcagccaattagcgg

SEQ ID NO: 282944 - DNA, 122 bp, Homo sapiens
gccccggccggcggcgcgatcccgagaaccagccggcccgcgcactcactggtcgtcatgcgctgtctgtcatgaagctggccacaccttccatggggtgcgggtcctgggagtcctggctg

SEQ ID NO: 282945 - DNA, 122 bp, Homo sapiens
ctcctttgacaccctcgagtcttgaacatgccaagctcattctcaattacaacttttgcacgtgatgctctccctgcctgggaatcgtgagtctcagagctgcagggaaggggttctttaag

SEQ ID NO: 282946 - DNA, 122 bp, Homo sapiens
gtattttcagaattttccttacctgtgggctattttgtttcatgaattgatgtttattaacgtggcccaatatgtaggagataaaggccgtttgaacacctgaaatctattgtgggtaggca

SEQ ID NO: 282947 - DNA, 122 bp, Homo sapiens
gggaacgcacctcctctgcccaagcttgatttacatgcggagactgcagctcctcgccttcgcctctcctgacgtctgaatgcattcctttattattgctatgacagctttctgattgcatt

SEQ ID NO: 282948 - DNA, 122 bp, Homo sapiens
caccattttatacatgatgagccgtcagtaataggattattaaacaaaaaccgtctcaggcgctggcgttaaccttttttaaaatggctaattaggttttggacagaaaaattagatttaac

SEQ ID NO: 282949 - DNA, 122 bp, Homo sapiens
agcttttccagggggcccattgtcaccctgcaagatacaagttggtgagacagcacactacggctcacactaccccaagtgggcacacacaggccctggcaggccgctcccaaaggctctcc

SEQ ID NO: 282950 - DNA, 122 bp, Homo sapiens
gcggaggacgggagggtcggggaccggcctcgtgcggacagggtcttgagcacgcgggggcggccggtgtgtgtgggatcttggagcccctggtggaaggggcagcccgtgtgtccgcgtgt

SEQ ID NO: 282951 - DNA, 122 bp, Homo sapiens
cctggggcagtgagtgggagaagaatgccaaggctggggcggccatgaggctcctctcaccggccccactggtgctcacctctgttggccaccatgactttcttgatgggcttatactccag

SEQ ID NO: 282952 - DNA, 122 bp, Homo sapiens
ccccgtcttcaagcctcggggactgggagctctggcttttagcgcgggtccttgtgtaggcgagctcatatactacgatggggcaggggcgcgacggtctggcggctccggggcattgtcta

SEQ ID NO: 282953 - DNA, 122 bp, Homo sapiens
aaagctcagacctttctgtcttaatgtgatacatagctgtttggattctcctatcctctccggttgtttcatggtttcactagggttctgaaagcaggtgaaaaaaaacaagaaagcctcac

SEQ ID NO: 282954 - DNA, 122 bp, Homo sapiens
gggggctcttctcactggacaggccgaacgcggtggccgcgggagggcagggcagggcatcggcggggttggtgcacttggcagtaccccccaactcctggcaaccgcacggagactttgcg

SEQ ID NO: 282955 - DNA, 122 bp, Homo sapiens
gatctttttgatcatgcgttccacagatcttgagcatctactgtatgtcagacactaaaacgctaggaagtataaagaaagttttaaaatggggccaggcgcggtagtttacgcctgtaatc

SEQ ID NO: 282956 - DNA, 122 bp, Homo sapiens
tttgtctctggctcaggccggagcctgagatccatctctactgtcccgcgtgttgcccctcgggagcactaggtgactttgtcacatcctctgttgccctgagatctggaggtactgggaaa

SEQ ID NO: 282957 - DNA, 122 bp, Homo sapiens
gactcccttgagaacgggagaataatcctcttgttatcatttgtgcacttaaatgccactcggaaaaatcaaaaagataaatgcacctaagagggaaacacaggcaggccgatgcagcctgg

SEQ ID NO: 282958 - DNA, 122 bp, Homo sapiens
gcacaggggcacagactgggtgttatttgtgtctgtgaagctgtgtggtttgcacagcttcggggacaatgcctgccctggcaacgtttgttgaatgacaaacggatgtaccggtgaagtgg

SEQ ID NO: 282959 - DNA, 122 bp, Homo sapiens
agtcctcgcctgtgtacccgggccagcacacgcagcggccgtccacgcagcgcccgccctcgccacagtcccaggggcagctccgcgtaccacagtcctcgccagtgtagccggggtcacac

SEQ ID NO: 282960 - DNA, 122 bp, Homo sapiens
acttactctttctaaaggtcagtttcctcatctgaaatgtgaataaatagggttgttgaacggattaagtaaatcaatgcatttaaagaacctatgacatagtaaacattcaaataaactag

SEQ ID NO: 282961 - DNA, 122 bp, Homo sapiens
ggccaccatcttcagcaatgtcaattttgttatcaaaggcatcctcctgacggatgctggcggagtcagtgagttgaggtggttgttgaactgtgtttcccgtgatcccttgcatgaaagag

SEQ ID NO: 282962 - DNA, 122 bp, Homo sapiens
atataactaaggacaaaaaatgttttgtttttcttgtgtatttatgatcacctaatttcacgttttgtgaaatggacagtaacctgtttcctgaaagattcctgtgggtactttttgagctg

SEQ ID NO: 282963 - DNA, 122 bp, Homo sapiens
aaaacaacccgaccaaatcaaccaacaaaaccaagcaagagaaatctgatggtgaagtggcgaggaagcagcaaaagcttcttgcagctggagttagggatgcggatgaaaggtggatcaag

SEQ ID NO: 282964 - DNA, 122 bp, Homo sapiens
aagccacgaagaaaacagttcaactcagaccaaaagataaagctgatctcgaggtaaccgcgctcactaatgaagatctcgtggacccgcttgcgaggtataaagagaaacctagtcctact

SEQ ID NO: 282965 - DNA, 122 bp, Homo sapiens
ggcggcgggggaggctgcggaaagagcgcggtgagcgctctgaggagttggcttcgtctgcgctgtagactctacggtgtagagtgtggcgctcttgagcgagtgtgctcgagaccagctgt

SEQ ID NO: 282966 - DNA, 122 bp, Homo sapiens
gaggcggctgcggcagcagtagctgtcgaatgaggcccggacgccatagtcttagcgagccgcacgcaagcccaacgcagccggaacccgaaacaagactaaccagcgttctcggcgcgacg

SEQ ID NO: 282967 - DNA, 122 bp, Homo sapiens
gcatccatgacccaattttcaaagattttccattcatctagttgttaggcagtggtggtccgggcatgcttctttggccaggccagggatgatttctgtttcatggtacagtctttgctgtg

SEQ ID NO: 282968 - DNA, 122 bp, Homo sapiens
gtctgaggtagagaagaaacctttgtaactggagtataattcgctttttaattagaacgacgtgtgtaaatgacagaataccaccaccctgcgcagatggcggccacagaatacgcatcgaa

SEQ ID NO: 282969 - DNA, 122 bp, Homo sapiens
atcctagaggaaatgtcagtgctaaaaaccccagagcatctggagggtggcctataataccgatgctgagaacccaaaatgcctgcgtttcagccaacaaggatgccctcgccaaagcagct

SEQ ID NO: 282970 - DNA, 122 bp, Homo sapiens
ctgcccaataaatttatattttaaaagacctatgtgagaatagagtctacatattttcatcgtagcattaatttgattgtttgtttccaatgactactaggatgtcagctccaggaaagcag

SEQ ID NO: 282971 - DNA, 122 bp, Homo sapiens
gcccggcagggaaaccggaagtgtggtgagctccggtcccgacaccggaaatgtggcgcccgcgcttccgcctgcgctcgccggctcgcggggagcggggggctctgggtgccagtcccgtt

SEQ ID NO: 282972 - DNA, 122 bp, Homo sapiens
gcaataatttttgtgtgtgtgtgattcttatcagaaagttgaattgttttctgcctacaccgttcatcagccccataacccaggaaggaacaggcattgttagcatcagattatacctcatt

SEQ ID NO: 282973 - DNA, 122 bp, Homo sapiens
tcacagatcttactagtttacttaggttttaagttaagttttgacaaatgtaagccatgtcgccaaagcctaatcaagatgtagaacacttgcctctcagaaagttctctcatgccccttcc

SEQ ID NO: 282974 - DNA, 122 bp, Homo sapiens
cctgcgcactacggctctccccgcagcctctggccctccttccccctcccccagtcagggcgcacccttgcgcctgcgctgtgtgtgttcctggtctgcggcagccatgctgaactcgtatg

SEQ ID NO: 282975 - DNA, 122 bp, Homo sapiens
ggcacggttccttcaggccggggatcccggggaggggttcttcccctcggccagggtcatcgttttgcgatctctcctgggagtctgggtttggagtctggtcttagccggtagcaactgac

SEQ ID NO: 282976 - DNA, 122 bp, Homo sapiens
tgatcctaggacttttataagcccgtcttttccccatgcgtcttccgtagggtgggcatgcgcacagcccttcttacgcttgagaaatgcgcacgcgcagtgtatttagggagttatacaca

SEQ ID NO: 282977 - DNA, 122 bp, Homo sapiens
acaaaaatcatagttagagtaagaatgtgagttctaaggacagttgaagaaaatctccttcggcttccctaggcaaagggtcaatcccaggcaatgtgttcagcgggtgttcagcctcttgc

SEQ ID NO: 282978 - DNA, 122 bp, Homo sapiens
tttcacaagatactacaatatgtaagcagtctgggttagggtccttgatccagagccctgcgtatttttctctccatgaaacccagagctcctggaaacacagtttgaataccttatttgtc

SEQ ID NO: 282979 - DNA, 122 bp, Homo sapiens
gaaacattgggatgacattttgtttgggaatccatggtggtccttggaaattcaggccaacggctgcttcaattgccagttgagggagccccgctgtgtggctaggtgataccaccactccc

SEQ ID NO: 282980 - DNA, 122 bp, Homo sapiens
agcccttcacaaaggggctccaggcgggcgcctccgcggcacagcctccgccccaccgcccgcggcgaattaattgggccctgaaagaaggggcgacatagcttccagttaattagtcaaga

SEQ ID NO: 282981 - DNA, 122 bp, Homo sapiens
gagagcagaggggtcaggcccaggggaacgagctggccttgccaaccctctgcttgactccgcactgccacttgtccccccacacccgtccacctgcccagagctcagagctaaccaccatc

SEQ ID NO: 282982 - DNA, 122 bp, Homo sapiens
ggggcgggggcgggggcggggcgctcctctgggcaccgcccccggcccgccccccgcgctcgcagtcccgctcgcacactggctcccacccgccgcccgcccaggcactgcccgcgggagcc

SEQ ID NO: 282983 - DNA, 122 bp, Homo sapiens
caaagaatttatgaccaagtcttcacgagcaatcacaacaaaaacaaaaattgatccctccgcagccgctgccagagcggaagggcggggtcttgtgcctcccccacccccaacccaatggg

SEQ ID NO: 282984 - DNA, 122 bp, Homo sapiens
agcggtatccctgcaaatctgaaaactggaagaggaattggaagtaaccttttcggataccgtctggagcccacgaaggcattacaattttgcaagtgagaagcttctcctctaagttgtca

SEQ ID NO: 282985 - DNA, 122 bp, Homo sapiens
tttctgtctgggggttgcagccacaggttgaagtcagcctgggctgcttctccttggggacggatgttatctacagtgcagttgctgcattttgtttgtagagctgcccaaactctctcctt

SEQ ID NO: 282986 - DNA, 122 bp, Homo sapiens
ctccagagcaagaacaggataaatctcatttcacagacaaagagaccaggcaggaacatgcgcttatcaagagcatgcccctgttgaaatggtttgctaacaactataaaaaagtcggagct

SEQ ID NO: 282987 - DNA, 122 bp, Homo sapiens
actctctatcaacataccgggggagttgggggctgagagaatcattgatcatgaaggtgtcgcttgccaggaagacctgaagcagagatggcaatgcttgtgtcatccccagagccaactct

SEQ ID NO: 282988 - DNA, 122 bp, Homo sapiens
cggcggaccagccgcgctgggtgagccaccaccaccccgccgtgctcaacgggcagcacccggacacgcaccacccgggcctcagccactcctacatggacgcggcgcagtacccgctgccg

SEQ ID NO: 282989 - DNA, 122 bp, Homo sapiens
taatcccgtccaactctcccagtgaggcgtttactgttattacctatcccattctacaaacggggaagctgaggcgctgagcagtgatgtgacttgctcagggtgggttatgggcacacacc

SEQ ID NO: 282990 - DNA, 122 bp, Homo sapiens
gtcctcggggatttgcgtggctcgataaccacctctaagtagtgcctgtaactggggagtcggggtgaatgggtgggtgacaacagttgttttccgtggagcttgcccgcagtgcctggctg

SEQ ID NO: 282991 - DNA, 122 bp, Homo sapiens
tcctcatcaattctcaggctgcagggacaaactttccgatagggctcagtaggatcaagccgacccagagtgggcatgggatgctccaggaggtctggggtaccagtgggctcagatgaagc

SEQ ID NO: 282992 - DNA, 122 bp, Homo sapiens
gagggccggggtggcaccattttgttgacttaggtcggacgtggctgcctgagtctgcatcgatcctgcagctggaacagcatctgccctggctggttcggggccactgccccctgagcgtt

SEQ ID NO: 282993 - DNA, 122 bp, Homo sapiens
gaggggcgaaaaaaaattttatagtggaaatacagtaacgagttggcctagcctcgcctccgttacaacggcctacggtgctggaggatccttctgcgcacgcgcacagcctccggccggct

SEQ ID NO: 282994 - DNA, 122 bp, Homo sapiens
acacaggggacttttggcaggagacatttttggttgtcacaattggaaaggtactattggcgtctagtgagtagaagccagggatactgccaaacattctaaaatgcataagatatctcctc

SEQ ID NO: 282995 - DNA, 122 bp, Homo sapiens
cctaccggatgtgacccccttgcaacgtccggcgccccagtggcgcgcgtgctcgccccgcgaccccgttggccgccccgcctcgcgcgcctctgagttaccacgacatcgtgccacacaca

SEQ ID NO: 282996 - DNA, 122 bp, Homo sapiens
cctctcccgggggagcacaggcgggcgcaggttcctacaaagggtcttgaagggacacggcggaaggcaggggaggctgtccctgctagaaactcccaggacactaaagtcgaggtctgcag

SEQ ID NO: 282997 - DNA, 122 bp, Homo sapiens
cacatgcagaacatcaaggacatcaccagcagcatccacttcgaggcgtaccgtgtgaagcgcctcaacgagggcagcagcgccatggccaacggcatggaggagaaggagccagaagcccc

SEQ ID NO: 282998 - DNA, 122 bp, Homo sapiens
ccctccctgcccgcgcctgcgcaccggctgctgggcgggaactggtcgcgtccggacgcgcgacagcttccacccgcctcaggcagtatcagccgcgccgcagtcggaggaaatagacgcgg

SEQ ID NO: 282999 - DNA, 122 bp, Homo sapiens
cgtccagggcaccctcttatcaggccatggccctgagacgcgtagtgcagacgcccccggcgctgaggctgaggaggcagatggcccctccccgcactgtgcagggcacccggttgggggtg

SEQ ID NO: 283000 - DNA, 122 bp, Homo sapiens
gcaggaccaatgcgagggaacggggcagaggaaacctctcggcatcagccccgcccctggcgcctctgcctccgagccgctttcctggtgcctccgggtgctctgggatggttctggtcttt

SEQ ID NO: 283001 - DNA, 122 bp, Homo sapiens
agatcgatgcctgccacacagttgtgcatagtgcatacttttttaatgaatgaatcacatcgtatcatttttctaaatgcaagcatcacttacctaacagtatcaaattttaaacaggaaat

SEQ ID NO: 283002 - DNA, 122 bp, Homo sapiens
gctcccttgcacattttcattgctactgtcttcaagcaccccaaatagagaaaacctgggcgtcagtggctcaatttgggccctgatctattctccctctttcttgtctatgttataacaga

SEQ ID NO: 283003 - DNA, 122 bp, Homo sapiens
ttgtcacaactagaataagagatgcagtccaccagcaacaggaagctgctcacaaacaggcggcctcatctcagctggggcccccttaacagcagcaggtgttgcttacaggaccagttttg

SEQ ID NO: 283004 - DNA, 122 bp, Homo sapiens
cagtaaatggacataaggcagttttattaacacagtcccaaatgctttgttgcttataatcgccttaattttgctttaggttatcatataactccatggttcagaaagactggctgtgtgtc

SEQ ID NO: 283005 - DNA, 122 bp, Homo sapiens
tcaaagacattattgctgcacatacacaaacccgactgttgcacggatttgtcttgctctcggcaggacctaggtgtcctgttccatgaccgagttatccggttactagagacttcaagcgg

SEQ ID NO: 283006 - DNA, 122 bp, Homo sapiens
gcgcatgcgccggcgacacttctggcggcaggagaaaggcgcgcatgcgcagagccgagacgaaaaatgaagccacagggtgcctggctgattgagggcgctgctttagctaccgaagggcc

SEQ ID NO: 283007 - DNA, 122 bp, Homo sapiens
gattctggaaccaggtgatgacttgcgcgttggtgaggcccagctgctgcgcgatttggtcgcgatcggcgggggacaggtacttctggtatagaaagcgcttttccaattcatagatctgg

SEQ ID NO: 283008 - DNA, 122 bp, Homo sapiens
aggagcgacgttccctaggcgccgggtccggacagcgccgcgcagcccccgcgcaccccgcgccccccgcgccccccgggcccgccccgtatccctgaccgcgtcccctggagacactgcgg

SEQ ID NO: 283009 - DNA, 122 bp, Homo sapiens
ctcccgatcagaggttcggaaattttacttagaaactgctctcctggctgtgttcctgtccggcaggacactggggtgaattcagagatgtcagaacacacccctaaatacgaccttcaccc

SEQ ID NO: 283010 - DNA, 122 bp, Homo sapiens
tctgtgtatcccgccccaggtttgaaaaggcttttctggcgtcggaggcggtgagcgagccgcacctgggcgcctacatcaacgcctgcgaggagctcaggtagggctcgcccgctcctgtg

SEQ ID NO: 283011 - DNA, 122 bp, Homo sapiens
agcttcggggtgctggctgggctgcgcggactcctcttgggatccgatgatggatcccaccgggcgatcggcaatggggtcataatgcagtgaggcggaaagggtctcgctggggcacagaa

SEQ ID NO: 283012 - DNA, 122 bp, Homo sapiens
tgggaagacactgtgaacaagcatccaattagccagaaaaacaaaatctgcctggattcccgcttcagccagaggcctctccctcaaaagcctggagaccacactccacacacaggctgctt

SEQ ID NO: 283013 - DNA, 122 bp, Homo sapiens
caagcgcacaaggggctctttgctgaggagtgtgtggggcggtcctctcctggactcatgcggtccctctgggggtccgccctcgggtgacagggcaccctgctccttcagtgtgcagtgct

SEQ ID NO: 283014 - DNA, 122 bp, Homo sapiens
tctgtccccatctggttttaggtaacaagcggagcttctgaacttctcggctctcggcagcggctgtatttcctctggcctggttgggcttttcccgcctctggttgcttttctgcctttct

SEQ ID NO: 283015 - DNA, 122 bp, Homo sapiens
atcctccttgaggtaccctccgtgtacctcccaggattgttgggaagatgtataggatagcggatccctacgcacctcagggagtctgaggcgggcctcttcgcaccccgggaggtgcactt

SEQ ID NO: 283016 - DNA, 122 bp, Homo sapiens
gtgtcctgctcgcgagtgacgcctgtccttcttgcccccagagatcctgaaggagctagacgagtgctacgagcgcttcagtcgcgagacagacggggcgcagaagcggcggatgctgcact

SEQ ID NO: 283017 - DNA, 122 bp, Homo sapiens
gacacgccgtgacaacgcggccgggcccggggcccgcccccggccggtgaccgcagtgcgcggaggctgaagtcgtaggtgggcgtctggcttccccggcctcctccatccctccccgaacc

SEQ ID NO: 283018 - DNA, 122 bp, Homo sapiens
accttgggatgctgcacccgggaccccacctggtccttcagggccaggaggtgggcgggccgagacctctttctgggggttctggtttctgggacagagctggccccacttctggcatccca

SEQ ID NO: 283019 - DNA, 122 bp, Homo sapiens
gagccgtccagcattttccagagcttcctgcagggctgcggcagatgtagaggccggcatcgccgcgcccaacaaagaagacggcatctcggaaatcgtagacaccagggtccagaaaaagt

SEQ ID NO: 283020 - DNA, 122 bp, Homo sapiens
tgtcacgaatcgtgtatggggacacacaggcaagagcagggtctacaaaaatacacgccccgggccccgttcagccagtccgtcccacacctgaggcaggctcagcaattcccctcagcctc

SEQ ID NO: 283021 - DNA, 122 bp, Homo sapiens
gaggaatctccatttgtaaaagctgagttagggaactagagggttcctgaagctttaaagcgcctcaaagccctcaccctgcacgtgacctgtcacctggagcctgccccagcccccacgcc

SEQ ID NO: 283022 - DNA, 122 bp, Homo sapiens
aaatttctacggaaaatctgaccggcgcggccaccgcccctgccataggcgggcggagagcgcttatatctttaaggcaaaggcgggccggctggcgtccaagttcctgaccaggcgcgggc

SEQ ID NO: 283023 - DNA, 122 bp, Homo sapiens
gacgcacgacccacgacccacgagtggcctcggcggcccggggcgcggcgactgccgccgcggagctccaaggctgttgttttgtaggcttggaattcgtgagagctctctcccgctgagag

SEQ ID NO: 283024 - DNA, 122 bp, Homo sapiens
atatatatatatatatattttatccaaagtaggccttataaaattttgaatttttgaagtcgttgtatagaaggtgccaatagttaaggaatatactctactaaatgtcaggttttagtaca

SEQ ID NO: 283025 - DNA, 122 bp, Homo sapiens
ctccgtggccctttggcgcgtgagtgacagcggcccagacagagggggcgatgtccgcgtcgtggctggggccggtcgcggggcagactaatcccctgctcctggccaggggaggctcccga

SEQ ID NO: 283026 - DNA, 122 bp, Homo sapiens
tgcctcggcccccctaagtgctgggattacagatgtgagccacctcgcccggcctgtccacggctaattttttaaaaatcttttgtagagacagggtcacactatgttgccgaggctggtcc

SEQ ID NO: 283027 - DNA, 122 bp, Homo sapiens
acgaaccttcccatggaaacattgcaaggggccgagcaaaattccgaccgtcgccagaagcgcagtcggagcgccgtcgccagtgcggattctgtccctaacacaggctctggaagcgccag

SEQ ID NO: 283028 - DNA, 122 bp, Homo sapiens
gcggcctccggctcaggctggctgagaggctcccagctgcagcgtccccgcccgcctcctcgggagctctgatctcagctgacagtgccctcggggaccaaacaagcctggcaggtaaagat

SEQ ID NO: 283029 - DNA, 122 bp, Homo sapiens
ccctggatgctgtactgtctgccaagccagccccaggggctgagcggtgagggcatacagcgtcaccaagtccactgtgggccctctccgcaccagaccctgggccgcagtgcctcgtggga

SEQ ID NO: 283030 - DNA, 122 bp, Homo sapiens
gggggaccaggttccctggaggaagcgggtcgcctcgggagcgggcagcgcaggcagcaccgaggccactggagctggctccagccctggcattcctgcagcccttttcccgccactgtgtc

SEQ ID NO: 283031 - DNA, 122 bp, Homo sapiens
ccccagaattgggaagtgcccagctttgggccactgtgatccctgggtctttcctgtgcgcgtagtctcatgccgccttccaccctagtcctgtgtcctgtgccccggttcaggatactaca

SEQ ID NO: 283032 - DNA, 122 bp, Homo sapiens
aaccttttagaaacataaaaagcattcttagcccgtgggctggacaaaaaaaggccatgacgggctgtatggatttggcccagcaggcccttgcttgccaagccctgttttagacaaggagc

SEQ ID NO: 283033 - DNA, 122 bp, Homo sapiens
aaggatgcgggaccctcggggagactgaggcagtgtaacacatgcccacacccaggaagtcgcccctcccacggcagccagaatgcccttactgcccctcccccagcctccagggaaagtca

SEQ ID NO: 283034 - DNA, 122 bp, Homo sapiens
gatactttgggccaagagtacactttttagcaaataacagtgtttatacacagactaccacgcctaaccacataatgacaatacaaacaaaaaactgctttttggaattagccacttggact

SEQ ID NO: 283035 - DNA, 122 bp, Homo sapiens
catcctgagtgctcagacccgtgagccccggcagtggggcgtcaagcaggaggtgggcagcggcggaaagcacgtgacggccaccgtggcctgccagcgcctggggcccagcccacgcaaca

SEQ ID NO: 283036 - DNA, 122 bp, Homo sapiens
gggcccccaagacttttccccaacccttgtctgaatgccacaggcttccggagacacctccgaacagcccgcagggtcttttggtcctgtgccaaattcacagggcgcagcgaaccagttat

SEQ ID NO: 283037 - DNA, 122 bp, Homo sapiens
ctcaggagccccatcggcgaagcctcagcaagtggcatctcccggggtccagagagtcggcgtgctgtctggtttgggtccagacatcagctcacccaagcttatcttgggcttttaagtgt

SEQ ID NO: 283038 - DNA, 122 bp, Homo sapiens
ttccctcacttccaggacaacctgttgcgcctctatctcctcccctccccgcagtttccccgccttggcctctaagagctgattggcagaaattactacccaaccctcagctccgcacctcc

SEQ ID NO: 283039 - DNA, 122 bp, Homo sapiens
tgacttcctgactgtgttgatcgtctttcttctccaactagaatgcaaccctcgtgaggacggggacttggctgtttttctcactgctacaccctgggtcaacagtcttgggatacagtagc

SEQ ID NO: 283040 - DNA, 122 bp, Homo sapiens
tagcactgaggctacaagatcgtaagtactgagggaagaaagaacaagcgagcgattgaacgttaaaaagatgccttagcatgcactccacctctgaaccttcctgtgtgttcttaatccta

SEQ ID NO: 283041 - DNA, 122 bp, Homo sapiens
agttttctgtaaaacatgcatattataagcaaaacaacagcttctggcttctctcaaacccgtgaattctgaaagaaattttctccatctatgaagtagattacgtgatttcgtgggacttt

SEQ ID NO: 283042 - DNA, 122 bp, Homo sapiens
gctgcctctcaggccccctctcctccaatgccactccctaggaccctctccccagggttccggacccccaaccccggatatgttcccccagggccatccagttgttctacctccaggattac

SEQ ID NO: 283043 - DNA, 122 bp, Homo sapiens
ggcgtgcgccacgattaggggttccttcctcccggtgaggctgttgtacacctgcacacccgtctcccggcccgtgggctgcagccaggcccgcccgcgccccccgctcgccgcccggcccg

SEQ ID NO: 283044 - DNA, 122 bp, Homo sapiens
acccctccctttccccagaagtagccagtgttagcagttggatgtatatcagaactttctcgcgcaccgaacccgagccaggtctggctccagggcagatctaaccacctactccgaccgag

SEQ ID NO: 283045 - DNA, 122 bp, Homo sapiens
cggaaagggaagtttgagaagttggttatctgaaggcggccggggagcagcggcccggagcggcagcctgagctgccaaagcagccagcgcacctgggccactccgcccatggcgatgccgc

SEQ ID NO: 283046 - DNA, 122 bp, Homo sapiens
cagcccctcacccgaggccgagatgctgaagtttaacttggaatgtctccacaagaccttcggccctggtgagcagagggtggcccttccccttgagcctctctccaaggaacctggatggg

SEQ ID NO: 283047 - DNA, 122 bp, Homo sapiens
ccaccgtcctgtaacggagggggaggagcgggccaccgtcctgtaacggaggggcaggagcgggccctcaatagtgtcagctgcactgtgggacctttcccaaggtcatgctccacccctgg

SEQ ID NO: 283048 - DNA, 122 bp, Homo sapiens
acaaatcaatatcttattattaaaataataagacttgaatctctacttgttttctaggatcgccctaataaagtacacaaactgggaggctttaaacaacagaaatggactttctcacagtt

SEQ ID NO: 283049 - DNA, 122 bp, Homo sapiens
gcgggcagtagagggaggtgcatttggatggggaccagtctccttgagggccccccaccccgttaccaacagcaacacaggaactgcactcccgttgccatggcgcccaccctgccctggca

SEQ ID NO: 283050 - DNA, 122 bp, Homo sapiens
actgagtaggaagtgaggagcgggagccaggaccacgggggtacctcgaagccgcggaatcgacaggggccgcaatgcccgcggctgcccgaagtccccgcagggagacgagaccccggggc

SEQ ID NO: 283051 - DNA, 122 bp, Homo sapiens
actttagcagtacacacctcaggtggctgtgcgtgcatcttttgttgcaggtcagccactcgcatgataagcgcttatgtctgtttttccacaatttcagctctttctctacaggagataag

SEQ ID NO: 283052 - DNA, 122 bp, Homo sapiens
tttttcagaatgcatctatggtcatagcgcatgtatttttcagaacgtctgccatcacggcgcacgtgtttttcagaacgcgtctgcggtctcggcgcacgtgctgcgatcacagtgcatgt

SEQ ID NO: 283053 - DNA, 122 bp, Homo sapiens
cttgtctcctaccacctgccttactaactatagaccataatggggctttactgaacttgccgaagtgctgcctttaacagtcactcccctgctcaaaaaccttctgtggctccccattgccc

SEQ ID NO: 283054 - DNA, 122 bp, Homo sapiens
ccataagccgcggctcccgaagcgcctagaaccggaagagaaaggggctgcggtgcagcacgggaaatagggtcaacaacgccggaaagtactactggaaaagcttccccaggctccgcgaa

SEQ ID NO: 283055 - DNA, 122 bp, Homo sapiens
agatgcatccccaaccgtctcctcaaactgcccccttggggacaccctccccccacaaaacgactcgcgcccagtagtcaccttggtaccccaagtccctgtgacggctttggggaagcgtg

SEQ ID NO: 283056 - DNA, 122 bp, Homo sapiens
gtctattttgttttctccatacgatttgcgccagggtctcagccaatctccgattggttacgtaacgcttaaagtctaagatggagtttaacaccctccttggtgagttcctgaaatccgga

SEQ ID NO: 283057 - DNA, 122 bp, Homo sapiens
ccccttcaccttctgccatgattggaagcttcctgagtccccatcagaagcagatgctggcgcatgcttctcatccagcctgtggaaccatgagccaaaataaacctctttaccttataaat

SEQ ID NO: 283058 - DNA, 122 bp, Homo sapiens
agctggcggcgcagtggagcgggcgttgtggtggacccggtggcgtggcagaccaggcgacgtggtggacccggccgcatggtggaccaggcaacgtggtagactgggcagcgtgatggacc

SEQ ID NO: 283059 - DNA, 122 bp, Homo sapiens
gcagctgcatctgcagctgcggttgtggtcgggagaatgagggcctggagctgcccaggacgggctcaggcacaggcacccagccgagagtcccctgctgttccctctgcagagcaaacaca

SEQ ID NO: 283060 - DNA, 122 bp, Homo sapiens
agactgaaatcccagctgtgcactgccctggtggtctcctgtcccaaccgggcgttgatccgggccttgcaggctcacgtgctctgcagaaaatagagaaaccaataaatgctcccctgggt

SEQ ID NO: 283061 - DNA, 122 bp, Homo sapiens
gagtctcggcgtttctacctcttcgcaccctttcctgccaccctttgtcccctggaagcccggagacatcagcggctgcaattttgctactcgctgctcggcgtggaactgtcaggtaccgc

SEQ ID NO: 283062 - DNA, 122 bp, Homo sapiens
ctggatcccgtttgcggagggcccagcttagaggaagctttataggattgggctgccggtcgggcgcgggaggcctgaagggctccaatcagctgggcgcgggcgcgtcgccgttccggacc

SEQ ID NO: 283063 - DNA, 122 bp, Homo sapiens
ttccgggggggggggggggggggtggctggccacaggcgcctgcgcagtgtgccgctttgcgttgctttaagagggaaaagccaaatacagaaagttggagtttgcgaagacaaacgaagaa

SEQ ID NO: 283064 - DNA, 122 bp, Homo sapiens
agcagtggcgctgcggtgtccgagctccccgtctgcccataggagccccgccatcacccacgggaagcagcactgcaatctccgagcctcaccctccgcaggacaccaggagcgtcagcatg

SEQ ID NO: 283065 - DNA, 122 bp, Homo sapiens
atagtcctgtaattaaatctgtatctcttcagaagattatgacccatccaaagaattccacgcttcacttttgagtgatgtggagggcagcaggcctgctctcataaatgtgtttttactat

SEQ ID NO: 283066 - DNA, 122 bp, Homo sapiens
ccaggagactggtgaggagagctgtccggctgagcagcagcatgcatggtccttctttcccgctttctggaggtgaccttggaccagggtcccttctttatccctaaggatttgcagatcca

SEQ ID NO: 283067 - DNA, 122 bp, Homo sapiens
gggtcggagctggagctgcctgttatccagctgtgcgggctggtggaggagctcaggtaccgccgcccgcgcctgggggccgcccctcttcctcctaggccctcctctccgggcggcctcgg

SEQ ID NO: 283068 - DNA, 122 bp, Homo sapiens
gaactaggacatttagaatgcagttccttaggtggatgttataagggctggagcacttagcgtgagtacaaactcctcccagactggtgacaggttaataattgtctcgttaactccccaag

SEQ ID NO: 283069 - DNA, 122 bp, Homo sapiens
ctcctcctaacgccagaacctcatcccgctttccagccagcccaccgagaccgccccgaacggctccgccttttttagtactggctcggggatagaccccaccccgtctgactcctccaggc

SEQ ID NO: 283070 - DNA, 122 bp, Homo sapiens
gaaacattttgttcttacagcttgtgtttaaacaccagaaaaagaattcattccacctcacgtacttggtccccaatagttcccttcagccactcttttgatccagataatattgcagatca

SEQ ID NO: 283071 - DNA, 122 bp, Homo sapiens
ttactcaccatagtggctagggattaggaggcgaaggcgacaggagcagacaccgggtcccggttaccgtccccgacaagctaagagtcgaggtaagtaacgcactagggcggggccggcgc

SEQ ID NO: 283072 - DNA, 122 bp, Homo sapiens
tccttgacagcgcggccgagcgccgctgcgggttgtggagactgtccgccctctagtggtcggcttcaaaagttgcttcaaagacaaggctgaatgaaaagcgttggggcgccctaagccga

SEQ ID NO: 283073 - DNA, 122 bp, Homo sapiens
cgctggcgagaggctccgagtcccctcgggacccaagagttgggggcgtcctgggtctcccgaagcccactcaccagagacatttaactggcctcccaggaaccagccgatcttgccagtgc

SEQ ID NO: 283074 - DNA, 122 bp, Homo sapiens
aatgatatatatatactctaagaattccctggcacatctatttatcaatagctggaaaaacgtactgaataacaagaatcagacgtgttgctaagcatcctgggaaagagatatgcaaaatt

SEQ ID NO: 283075 - DNA, 122 bp, Homo sapiens
atttgccagtgtccgcttttaattttggtcgctaagggcaagcgcccgtgacaaacatggcggcggcagcctcaggcgcagtcacctgccggagctgcgcccgggggccgcgcggagccaat

SEQ ID NO: 283076 - DNA, 122 bp, Homo sapiens
aaaaaaaaaaaaaagtcactgccaatatcaggcgactttccacatgaaagccaatgaggccgcttcccacttaaaaaacgtttgtttaaaacgtattttctaagcattccttagactccctt

SEQ ID NO: 283077 - DNA, 122 bp, Homo sapiens
tgtgaggtgaagacccacacctgtaattccagagaaagcatatttgttgtttaagtataacgtctggctctacattaccgatggctttagtttggttcttgagccttggtttgctccatcat

SEQ ID NO: 283078 - DNA, 122 bp, Homo sapiens
gacacccacgtagaattctctacacaccagtaacgggatttcaattccgatggactctgccgccctggcggcccttcctgtgacttttgcgccccgcgcctggggtggggggtgcgaagaga

SEQ ID NO: 283079 - DNA, 122 bp, Homo sapiens
gctgttatcggccagagcagagattaacgatgaagtaaaaaccagtagtgcaagtggaaccgtcagagcaacatagttgggacacaaaagattaatcccttagccatagcacctcgcctggc

SEQ ID NO: 283080 - DNA, 122 bp, Homo sapiens
agcggaagtgcgtcacggcgacggccggcaagcacgcaccgcgcagactcgctgtggtggcgtgacccggaagcgctcgccgaggcccctccttgcccgccgatatctctgccgggtgacta

SEQ ID NO: 283081 - DNA, 122 bp, Homo sapiens
actgatgccagagtgatctttctgaagtgtatgtgttgtgcttattctttactgttaaaacgatatcatggttgaaaactattagctaattactgagtgttcttgtgttcttactgttttag

SEQ ID NO: 283082 - DNA, 122 bp, Homo sapiens
taaataaaagcaaacatctaaaggtaatgagacaggaagaagtaaaacatgtaggtaactcgattgagttactcaactttaacccggggaagtgggtttgactttcatagtaaccaaaattt

SEQ ID NO: 283083 - DNA, 122 bp, Homo sapiens
cactccagccaggcaacagagcaaaactccatctcaaagaaactaaaataaaataaaacgcgggtcctagaggaagaggaaggagctccgatggaagtgctgctacagaaaagtcacatgga

SEQ ID NO: 283084 - DNA, 122 bp, Homo sapiens
ctcatccaccaaatctgaaggccttaaaattgtgtgttgggaggatgtgaattgggaggacggtgtcactagactgtggattagggatggtaaagtagggaggatgctattttgcaactata

SEQ ID NO: 283085 - DNA, 122 bp, Homo sapiens
tctgccttgatgttaatgctggaggagtgtaaaaaggcatgtccaactcttacttcccttcgaggccagaatagtctctcaggttgaacttcagggtcccctggtaaaggagggagtccagt

SEQ ID NO: 283086 - DNA, 122 bp, Homo sapiens
ccctcgcccgctgcccactgtgagaaccagggggtctaggaagtcagctgctgcacccctcgacggccgctggccgcgagtccccaggaggtgaagagctgggtggggaggcgtggggggcg

SEQ ID NO: 283087 - DNA, 122 bp, Homo sapiens
cagagaatcttgaagtggagactgaggcccagaccagagtgtggcctgctcaaggttaaacgacaagttagtgttcatccccctgaactagtacctgggctctagcccttcagtccagagct

SEQ ID NO: 283088 - DNA, 122 bp, Homo sapiens
acgccgatcgctccctcgggctccgagtccggctgcggcccgggccccggctccgcccggcgcagcccgccccccgcgcagccccgccagctccccgccccgccgcctcggctcgggggcgc

SEQ ID NO: 283089 - DNA, 122 bp, Homo sapiens
catgaatgtcttggtgcccttcccgaggtaatgggtgagttattgctctgtcatttcatgcggatctggttgttaaaacgtggcacgtccttctctctcgctctctcacttgccatgtgaca

SEQ ID NO: 283090 - DNA, 122 bp, Homo sapiens
cagcgatcggggttcttccgcctcgcgagaaagggactctggtagcggctgtacccgaaacgtcacttcctgcgacacgcaggaaacaaaggctcccagttcacgcgataataagaccaact

SEQ ID NO: 283091 - DNA, 122 bp, Homo sapiens
aggagcgtgggaaccctgcttaagggctttactagggaaaacggtgctggttcactggggcgcgtttccgggaaggtgaataccggtgaaagttatgctgagggtgaggtaggctctgacga

SEQ ID NO: 283092 - DNA, 122 bp, Homo sapiens
accggagaacttggggcgacaaccggaaagccgggatccggtagccgcacagcagggatgcgggcggctgtcccggactcttctcccgccacactgggcctgtcccctccccatctgagtct

SEQ ID NO: 283093 - DNA, 122 bp, Homo sapiens
ccacctctatgaagtgtttcctgtcagattctttcttcccagtccttattagtcattagtcggcattacttatcactgttgattatagcaatgcttattgctgactatagaagaaaattgtg

SEQ ID NO: 283094 - DNA, 122 bp, Homo sapiens
catatcaaaactaaacccaaattaattggctaaattgggaatcaacacctccaggagctacgcagaagaaagccccaccacactttaaagtagcttacctcatatttgacgaaagcaaaaca

SEQ ID NO: 283095 - DNA, 122 bp, Homo sapiens
aggtaggtcggaagaatcaggctggcactgcccccagcctctgtccaacacaggaggaatcgaggtagcaaacggctgaaatgctctgactaggggttaaaagggaagtgaaggaaaggaag

SEQ ID NO: 283096 - DNA, 122 bp, Homo sapiens
cagcaggtggcatggacggcgcccacctagcccaggagtccggaagcctgggttccaatccggccactgtgggctggtggctggctctgttttattgtgcagttttctcccctgtgactcag

SEQ ID NO: 283097 - DNA, 122 bp, Homo sapiens
ggaggaggtggtgtatcagtgacagtagtcactgcgttcatacgcgtggaggaggcgaaacgtcagtgacagggctcattgtatggatgggtggtgtttgatgcagcctcctaagccatgga

SEQ ID NO: 283098 - DNA, 122 bp, Homo sapiens
gtcatcgcgttaaaatagttctgccctcagcccctctttatctgtagatggcagagcgagcgccggtaaagatgctctgtcgtggagggctcagtggggcggaggagatggggagcctctgg

SEQ ID NO: 283099 - DNA, 122 bp, Homo sapiens
ctccccttcccctgcatttatataagggatgtttctgcctcctgagagtgtgatgcagcccggatctctcgcctgttgcttgggatgagtcatcttttggagggctctttgtaatgcgggtg

SEQ ID NO: 283100 - DNA, 122 bp, Homo sapiens
tttctcatcctcatcccctttttaaaggatgcatctccatgcaggctgtcagctaggaaacgatgatatacatgtttagttgctatactattgagatggattctgctatcattctccataaa

SEQ ID NO: 283101 - DNA, 122 bp, Homo sapiens
tcacagtgacaggctcccagcacggcgcacggcactcacagtgccaggctcccagcacggcgcacggccctcacagtgccaggctcccagcacggcgcacggcactcacagtgccaggctcc

SEQ ID NO: 283102 - DNA, 122 bp, Homo sapiens
ttaacctggccgttttcacaaaatttgcagaagatactgcttccaggaacattcccatcacgccatagaatcatgacgtgaaagtgaaggaccaaaagtgaagcgaagatgattttgggctg

SEQ ID NO: 283103 - DNA, 122 bp, Homo sapiens
aaggacagggagaacatggcgaggggaggggcctcaggaggacccatcctgcccacacctcggtgtctgacttccaggctccagaactgcgaggtgatacattcctgctgttgaagtcaccc

SEQ ID NO: 283104 - DNA, 122 bp, Homo sapiens
tgggagctgacctagaaccagggttggcctggcaacgaggtcctcaggggctggcatgctcgcagtcattttagaaatcaatgtctgtgttttgtggatttcaatgaatttatgtgcatgtt

SEQ ID NO: 283105 - DNA, 122 bp, Homo sapiens
cgatcctcaaactgaggccggcctctgtggtctctatgcctactccttccatgaaccccacggggaagtctgaagcagcttccagataccacagcggcatttcatgagtaaataagaatgct

SEQ ID NO: 283106 - DNA, 122 bp, Homo sapiens
gagcgggaggacagcagccagccctgtgccagggacacccctcaggcccggcagagggcacgaggccgcaggcaggctcctccaccccagctccaggcagagctccaaagtgcacatctgca

SEQ ID NO: 283107 - DNA, 122 bp, Homo sapiens
agcagaaatcagtctgatgttcctctacgtgctgtaggtagaggcattggcccagcggagcgaaaaccatgtggaacaggtggagtgagaggtaacttagcggaggcgtgcagggcccaccg

SEQ ID NO: 283108 - DNA, 122 bp, Homo sapiens
ggccgtcatcgactgccctgctgatgggtcgtcctggtttccgcggtgacaggggcatctcggccactgtgtatcttgaactgtccgtgtgaggtgcctgggttggaggtgtggccctggag

SEQ ID NO: 283109 - DNA, 122 bp, Homo sapiens
tcaaaggtggtatctgaacactgttgctagttgagtagttgctacagaaaccatatggcccgcaaagccaaacacatattttcaatctggcccttcacaaacaaaagggaaaaagaaaagtt

SEQ ID NO: 283110 - DNA, 122 bp, Homo sapiens
tctactgcggttaaatccaggcaagagcctgaccagtatctccagctctgtaggtctcagcgccccagtgcagggcctcatattttcctctggagccctgtggcttttcagctctctgtgtg

SEQ ID NO: 283111 - DNA, 122 bp, Homo sapiens
agtctgggcacaaagccggctttatgtgaatatccgtgggacgatcaagaacaatctccacgtgggttacatccccacgcccccaccctttccactttgggacgcgccggccgctgggcggg

SEQ ID NO: 283112 - DNA, 122 bp, Homo sapiens
catgagcagccgggccaagggggacaaggcagaggccctcgcggcgctgcaggcggccaacgaggatcttcgagccaagctcacagacatccagatcgagctgcagcaggagaagagcaagg

SEQ ID NO: 283113 - DNA, 122 bp, Homo sapiens
acctcctgttaactacctcatttttctttctttccttgctctttgactctttcttgctgacgcttcccttctaggtctcttttttcctttcaatcaccccctattgaactgctttcttccct

SEQ ID NO: 283114 - DNA, 122 bp, Homo sapiens
gctgctaggcagactgggttgcacctgattacccggatgataataaactgcacaaaacctcggtcaaattaatattgaaactgccttttgcttgggctcgtttcccttgcggaagaaggatg

SEQ ID NO: 283115 - DNA, 122 bp, Homo sapiens
cccgcctcagtctcctagagtgctgggattacaggcgtgagccaccatgccggccttgagcgatcttgattgccctccaaaataggacagtttgctgaggcctgggagctccccacctccag

SEQ ID NO: 283116 - DNA, 122 bp, Homo sapiens
atctagctgctctggtggggatgtggagagtctttatgtctagctcagggattgtaaatacgccaatcagcaccctgtgtttagctcaaggtttgtgagtgcaccagtcgacactctgtatc

SEQ ID NO: 283117 - DNA, 122 bp, Homo sapiens
ctaccacacccatcaccatcaccatcaccatggagtcaacaggagacactgggctataatcggtttttggagagatggttttgtcctggaattcacattgcatcttccctgtgttttgctgt

SEQ ID NO: 283118 - DNA, 122 bp, Homo sapiens
ctcggctcactgcagcctccatctccagggctcaagccattctcccgcctcagccacccgcgtagctggaccacaggcgcgcgccaccagatctcagttctctcaacaggactctcattgct

SEQ ID NO: 283119 - DNA, 122 bp, Homo sapiens
tgtcctggacctttgatgaaatgggatcccggtcacgcaggctgagacagtggggaccgccgaggccagagtgggctatgcttgagcagggatgagaagggccgcggcagcacgcagccttg

SEQ ID NO: 283120 - DNA, 122 bp, Homo sapiens
gtggccagcgcgtcctcctgagcctgggtgggaaagcttggcgcccggaacctttgtactcgcccttccctgtgctcgggcactattgggcgttacgcgagggcggggccggttgccaggac

SEQ ID NO: 283121 - DNA, 122 bp, Homo sapiens
ggccttcggtgctcaccagtccggcccgccgaggaagggcgcggaccacggccgcagcaacgcgcacggacagcatctttgcagttactccgcaggcggtacttctgcagccgcagcctccg

SEQ ID NO: 283122 - DNA, 122 bp, Homo sapiens
ttccccagtacgagccatgagccagctgaatctgaatgagaagatggaacgaggaccgaccggagtcttgatgcttaacagaccaatgctttctggctgagctcctctctaccctgaataca

SEQ ID NO: 283123 - DNA, 122 bp, Homo sapiens
gcgcgccccctcccacccagcgcgcccccttccaccctgcgcgcctcctcacaccctgcgcgcacacacacagaacccagctgcaccatccctgcaccatcacggtgcagccctgggctgcg

SEQ ID NO: 283124 - DNA, 122 bp, Homo sapiens
atctccgggaagaatctcatgggatctgggccctgcaacacaagggcctttgaagtgagacgaggaggagcctcaggaagggtcgccggggtgactaaagaaacctgcggagggagctaagg

SEQ ID NO: 283125 - DNA, 122 bp, Homo sapiens
gacgcggaggagacagcgcctttgaagatgctgtccgggtggtcatgcagcgtctcctcccgctgtggaccgctcgcatccccagccctccaccgcattccggggttgtagcggtacttgtg

SEQ ID NO: 283126 - DNA, 122 bp, Homo sapiens
ttgcacttaggtcctagggtagtaaacgttgattgaaacaaaagaacccttggatcaattcgccgtcttctaaagaaaagtctctaaaaaatgagttcttctagtcttgaaaacagcctgac

SEQ ID NO: 283127 - DNA, 122 bp, Homo sapiens
ctcgtccttcttgtcgaattttttaatcatcttggacgacttcccagcgcccagacccaccgcaaccgtcccaggcgccgcagccggcgagcggaagaggctgcaggaaggccggccccgcg

SEQ ID NO: 283128 - DNA, 122 bp, Homo sapiens
cagccctagggatgttgacgttggggtggcacctgctgcagagggtaacgtgcagcatgtcgagggcagcactgccaaggctggtttgagctcaaggtcaggtggaggaggtagtctctccc

SEQ ID NO: 283129 - DNA, 122 bp, Homo sapiens
tgccgcccagtgtcatgattaaaggcgtgagccaccacacccaactttcaactcccaacccgctccctggcactctctcaggctctgcacatcccagctgtctggaatcactcccacacctc

SEQ ID NO: 283130 - DNA, 122 bp, Homo sapiens
atgtcagctcggccaagagaaataaggcggcggggctggctgcgcaccagagggaggcggcggcccctaaccgaaggtttccgcacggagaattacgccgcagaagcagcaacagacccgcg

SEQ ID NO: 283131 - DNA, 122 bp, Homo sapiens
tcttatgttccattttcaccgtgtttagattagagcagacatgaacttcctgtgtctcagcgccggccatgaatcaggctgggagctgggaccacagggctgtcaggggagctgcctggatc

SEQ ID NO: 283132 - DNA, 122 bp, Homo sapiens
gtcaccatgccagtgcgtttgcagggatttccaaggtaacattgtgtgaaaaggacaagacgtagactagagtgatacatatcccatttttgtaaagccacgccaaaatcccctatgcgtgg

SEQ ID NO: 283133 - DNA, 122 bp, Homo sapiens
tgcccctgtgagccacaggaccggggtgcccagcacgcacagggtgtggccaggaggggccggggcagtgggagcccggggctgcctgagctctcaccaagggctcccttctgggggtctca

SEQ ID NO: 283134 - DNA, 122 bp, Homo sapiens
agtgggggcttttccaagtggaaggttgacactcagcgggtggaaatgtaactggctccacgtcttcggggcttttcggtgtggatgtgaagagcctggaaggcttgctcatcatttcattc

SEQ ID NO: 283135 - DNA, 122 bp, Homo sapiens
gctgggagggcgcgcagggccggcgctgattgacggggcgcgcagtcaggtgacttggggcgccaagttcccgacgcggtggccgcggtgaccgccgaggcccggcagacgctgacccggga

SEQ ID NO: 283136 - DNA, 122 bp, Homo sapiens
gggcggggcccgggagagggcctcgggaggccgcgggtgggctctgccgagggccgcgttcgcagggccccccgggactggcggccccgcggcaggccaggcgcacctctcggggagaaacg

SEQ ID NO: 283137 - DNA, 122 bp, Homo sapiens
gtggctggcatagacaaagttgaaggcggcattgaaggcagccatgcagaggtcagccagcgccagattgacgatgaagtagttggtgactgtgcgcatcctccgatgggccaggatgatcc

SEQ ID NO: 283138 - DNA, 122 bp, Homo sapiens
aggccacacagaggaggacagacactcactgggcttccaggcctcctctgggactgtccccggccagaactctggctcattcggcctcggtccctacccctgttctagccggacggtcaggt

SEQ ID NO: 283139 - DNA, 122 bp, Homo sapiens
ggtgggttgaaaatccggcgccgggcagatgcccacgttcgctggacccctgcttgccggcgtccgctacaacccaaggaaggtgggcccgacctcgccaggtcgctcgcctgcgggtgggc

SEQ ID NO: 283140 - DNA, 122 bp, Homo sapiens
gtcagcacctttctgtcggggagagagtgtgaccgtgatgagaacaacagtgcttccacacggtcttcccttgcagaaggagaacgtcagacagagttctagttatacctcgacatagcttt

SEQ ID NO: 283141 - DNA, 122 bp, Homo sapiens
tgttacagctcttaagggggcatctggagctcttcgtttctcgcggtgggttcttagtctcgctggcttcaggaatgaagctgcagaccttcacagtatgggttataactcataaaagaagc

SEQ ID NO: 283142 - DNA, 122 bp, Homo sapiens
ggttggtcgcattagtgatatgggtgctagaatggaagaagtaagatcacatagcaggtgcgcctagttcagactgaggagggatctgcagctctagagacgtctgtacttcagagaaatac

SEQ ID NO: 283143 - DNA, 122 bp, Homo sapiens
cttctgtttccaccccagctgcctctcttgtcctgagggttaggctggagtgacagtttccgcccaccccccagcccaagaaagaggctgccggaaagaaaatgctgaccattggaggtgcc

SEQ ID NO: 283144 - DNA, 122 bp, Homo sapiens
gtctcgaactcctgaccttgtgatctgcccgcctcggcctaccaaagtgctcggattacacgcatgagccaccacgcccggcctgaaatttttttttttttttaaagaaatgagtaagtttt

SEQ ID NO: 283145 - DNA, 122 bp, Homo sapiens
cttggagccatcccagggactaacacagatccttcctggggcgcaggcttctcacactagcgtagggtgcctaggtcatcctcatcattgtttatcatcacagacttctttctgcctgccag

SEQ ID NO: 283146 - DNA, 122 bp, Homo sapiens
tgttctcgtgacctggagttaaccggaacagcgtcttcattcatttctgttgggaccagacgcggagcctgggtgcgcgagccgccctccgggaggaaggcgcccggctgcgtctgcagagg

SEQ ID NO: 283147 - DNA, 122 bp, Homo sapiens
tctaaattcgcatctccccaaagccagcaccaacacggtgggaaacccctctagatgaggcgacattttaaggcaaaaacgttgcccatcccgtgctccctgggggactggggaattgtggc

SEQ ID NO: 283148 - DNA, 122 bp, Homo sapiens
acgggtgggaggcagaggagccctcctgctgtcctgggcctgtggcccggaacctctcaccgggagccttggtctgtgcacctgggaaaggggtcaagaacaggaagcatacggggagtttc

SEQ ID NO: 283149 - DNA, 122 bp, Homo sapiens
gagagaagtttcagtgaactttggtttcctcatttgtatttgtatctcataatccatgcccggcctactttcctgggtgatcagatgaattaaatgtgataattgtgaaataacttgactct

SEQ ID NO: 283150 - DNA, 122 bp, Homo sapiens
aaagtaagttgggccactaaccggctgggcagcatggctttcttccccctaggagctgaccggccgcggactccgagggaggacattggcttttgtttcaaaaccgagcccagctgctgact

SEQ ID NO: 283151 - DNA, 122 bp, Homo sapiens
gcaacgatgagctctcctgcttagtgctgatgtgcctcagcccctaaccccactggtgtccggatgaggaacttgaggctcagagaagctaggtcaaggtgaacaccagtgttgagtttcag

SEQ ID NO: 283152 - DNA, 122 bp, Homo sapiens
cctctggacggagcagctgcgtggacagaaggcagcacattggtccagcacagtccaccgcggtgcctgccctctcccaccccacgcatcccaccactgtccaccgtggtgccctgctctct

SEQ ID NO: 283153 - DNA, 122 bp, Homo sapiens
atgcctacgacggcaaggattacatcgccctgaacgaggacctgcgctcctggaccgccgcggataccgcggctcagattacccagcgcaagtatgaggcggccaatgtggctgagcaaagg

SEQ ID NO: 283154 - DNA, 122 bp, Homo sapiens
gaacccagcccgtgtaagaacagaaggctcacctgcagtggctgaccaccctacccaactcggttagtgtctcaccaatttgttactataaacatttgcaccccacacagtcgcttgtggtt

SEQ ID NO: 283155 - DNA, 122 bp, Homo sapiens
atcacctctgagccaatcaaaaaacttattcttccaaagagagattgttattattcctcacgatgacccgacagtctctgctttctttttcctttcttccagaaggagatttaaccatagta

SEQ ID NO: 283156 - DNA, 122 bp, Homo sapiens
aagctcctgttcatccttcaaagcacagctcaataaggctagaaacatctaaatgcccatcggagggggctgaataaattacagcagctcctccctgtggaaaggaactaggaggacattct

SEQ ID NO: 283157 - DNA, 122 bp, Homo sapiens
tcaatttgcccaacatcaccacattgtcagtgagcactggaggtgggttttgaaaccaggcgatctggcttcagggtccacatttataactactgcactagacttccagtgctgtgggccag

SEQ ID NO: 283158 - DNA, 122 bp, Homo sapiens
tgggattattaactccattgtgctcagggcatgcctcctcctccaggaagtccatcaaaccgctccctccctcctctaagcccacacaacctgtttgaccttccaccaccagacctacactc

SEQ ID NO: 283159 - DNA, 122 bp, Homo sapiens
ccgctttaaaaatcccagcctgggcaaaactttgatgataaatcaagcggcagatccctccgccgcctgctccgagcgggaggagggaggggaggagggaggggaggagggaggcgggagga

SEQ ID NO: 283160 - DNA, 122 bp, Homo sapiens
gggggagatatttctgacacagatttacacgtgtaaagacagaacagcatgttagccaggcgcggtggctcacgcctgtaatcccagcactttgggaggccgaggcgggcagatcacgaggt

SEQ ID NO: 283161 - DNA, 122 bp, Homo sapiens
ggggctggggaggaccaagatgaggacaggacctgtagaaaagaccccagagatgactggcggttctgggacctgtggaaaacgctctccttggaaaatgtggccttgaaaaggatgaggaa

SEQ ID NO: 283162 - DNA, 122 bp, Homo sapiens
ccctcctcagcatgggttggtgcgggaagtccttgagtgcctgtgggtcggcaggagctccggtgagactcaagttcgctcaccccacggttctgaaaccggtctcccgcctttcctaccct

SEQ ID NO: 283163 - DNA, 122 bp, Homo sapiens
aaatttgttttttttttctttaggagcctatgcccatatcatgaggagcaacaaactgaccgactgacctcaatcttttcctttttcaggtactactgagggcatctctggcagaactctgg

SEQ ID NO: 283164 - DNA, 122 bp, Homo sapiens
tgttagccaaggttcatggtattcgcaaatggcatcaatattttgactagtgagagctcacgagttgcccttgttttctggctaaaggctttatgcttgcattccttgaagacatctgtatt

SEQ ID NO: 283165 - DNA, 122 bp, Homo sapiens
ggagtctgttccctgttatggaggaggctggccatgcctcctgcagagtcacaacccagacggggcctggacggtgggggtgggcgtggttcagggaaaagacaggtctgccaaaatctccc

SEQ ID NO: 283166 - DNA, 122 bp, Homo sapiens
tgcccttggttgtttggtgaccccattccttctgcgtgctcgggctgcagctcatacccccgacaactccttcatgggcttcgtgtccgaggagctcaacgagacggagaagcggctcatca

SEQ ID NO: 283167 - DNA, 122 bp, Homo sapiens
tacagtttcgcgcagaaaaagagcgtcagccttgctggtcttttcccatggggcagaagacgaaaggcagctctaacatagcctcctcctacctgctccagcagctcatgcaccgctatcag

SEQ ID NO: 283168 - DNA, 122 bp, Homo sapiens
cattttcctttcacacagtctatcacatttgtggtgcatttcacatgaagttgctggcatcggggtgctttgcctccaaacacctcagcgtgcataccattaccagccacgtttatggggat

SEQ ID NO: 283169 - DNA, 122 bp, Homo sapiens
agagtcatgaaaggttacttaaaatgaatcctgtctgccccctttagaaatcacgcttcacgcggtaggtaagaagattgctttgtatgtaagtggttctaacgagctattcgggaagaaag

SEQ ID NO: 283170 - DNA, 122 bp, Homo sapiens
ttctaagggagcggcgcgagggcttgtgggaaatgaagcgtgcactttctaagggagcggcgcgaggacttgtgggagatgtagtgtgcacttttcggcccccgtcgcgggagccgcttcgg

SEQ ID NO: 283171 - DNA, 122 bp, Homo sapiens
gttaaacctcgtctctgctaaaatacaaaaaattatctgggcatgctgttgcgcacctgtcgtcccatctactcaggaggctgaggcagaggaatcacttgaaccgaagaggcagagattgc

SEQ ID NO: 283172 - DNA, 122 bp, Homo sapiens
ctctcactgtcatctgccctaggcgcagctttgcaagaggagcatcaggggactcctcttcgggggctaggaagagatagaaacagaatcttttctcttgctgcaaggaggtgttgaggccc

SEQ ID NO: 283173 - DNA, 122 bp, Homo sapiens
ctcagtttcatttctgtggccagatcaagtagtttcatttctctccctgtttgttgatgacggagcaggggagggagtggttcatatgccacataaaagtgaagtggaggaaagggaagaga

SEQ ID NO: 283174 - DNA, 122 bp, Homo sapiens
aaatcttcacttattgcttgcttgaaaattatacaatcatagaaagatgtttgtgacctgcgtaggtggtttctgcatatcgttgctgatttcacttagctaggtttttgttgatatgaagc

SEQ ID NO: 283175 - DNA, 122 bp, Homo sapiens
tctttgctgagtcatagaagctcggagctgatttgcgcaaaagccggactgagtcttggacgagccgggaaagattctcacagtcgagcagagcgatgggagagaggagcagacagcgagct

SEQ ID NO: 283176 - DNA, 122 bp, Homo sapiens
ttagctggtgtggtggcgcatgcctgtatttccagctactcgggagacaggtcggaggatcgcttgaagtcaggaggcagaggttgcagtgagtggagatcacaccactgcactcctgcctg

SEQ ID NO: 283177 - DNA, 122 bp, Homo sapiens
ctctctttctctctctctcatctctgtctctttaaataagcagctgaggaaataatctcccgcactgaacagaaactgcttcctccttgaaaatgccaccgttcccacctccctggccctct

SEQ ID NO: 283178 - DNA, 122 bp, Homo sapiens
ggtgactatttttctcattttcttttcttttctttctaaacagatggagtctcactctgtcgcccaggctggagtgcagtgatgtgatctcggctcactgcagcctccgcctcctgagttcc

SEQ ID NO: 283179 - DNA, 122 bp, Homo sapiens
gcgcgggtgggacccagcccttcgaggtaagacttcgaggaaatgcgccggcaacagtgacggatgcgagatccgaacgccgacctccgcacgcgcctctccctcggtagttccgagaaagg

SEQ ID NO: 283180 - DNA, 122 bp, Homo sapiens
gtctagcagagagagagtagttatgccaaaaggcactatgtgataagtgtggtcagaacccgctggacagattctcagtgtggtgatcaggaaagaaagaaaggtataggaagggcaatgaa

SEQ ID NO: 283181 - DNA, 122 bp, Homo sapiens
ctcccccagcctctggcttcggccgcgctccctgctcgctcctcgcctaccagccccgcgcgcgccccagagaagttgtcaccagcgcggctggctctccggctgctcacacgccccctggc

SEQ ID NO: 283182 - DNA, 122 bp, Homo sapiens
tgttactcggggacctgccatgtgtcctcgggcccaaagtcacagtttccaggaacccatcgtggagattaggtgagggcgtcccgtgctatctgtgatacatctgtgtggtaggagcagag

SEQ ID NO: 283183 - DNA, 122 bp, Homo sapiens
acgcaagaacctgtacccaaatgttggtggcagcattattcacaagagccaaaacatagacgcagcccaaacgtccatggtgaggcaagatgtggtctatccagacagcgaactattattca

SEQ ID NO: 283184 - DNA, 122 bp, Homo sapiens
gcaacagagaggcaggcatgcgggcagacagacgcccaacacagagacctcccacacgctcgtctgtgtcaccgccgccccttcctggttggccctgcagacgaggaagccctccaacctgc

SEQ ID NO: 283185 - DNA, 122 bp, Homo sapiens
ttctttttacatggtgctgccagcccagctaattaatggtgcacgtggacttttagcaagcgggctcactggaagagactgaacctggcatggaattcctgaagatgtttggggtttttttc

SEQ ID NO: 283186 - DNA, 122 bp, Homo sapiens
cgcttttaatggacgagggaatgaggaagggatttaacccgcagctgcatcgccaggaggcgctgagactggttttgagtctgggtcctcagactccagagctggcctcacaggaaacccct

SEQ ID NO: 283187 - DNA, 122 bp, Homo sapiens
ggagagccgccgaggtggttggggaggcagacattctagacctcttgtgcctcaagcaaacgacacatcagggagctgagaggacatcagggagccaggggccaacctcttcagacagacgg

SEQ ID NO: 283188 - DNA, 122 bp, Homo sapiens
tgctttcttgtatctcatccactatccgcaccccatcgccctgcaaattaatagctgttgcggagttggggtatgtgtgaccacaaaatccaaaggctgaattttgcccagtgcctgagtaa

SEQ ID NO: 283189 - DNA, 122 bp, Homo sapiens
tgaagcagtacattggtagaaccacctgtttttatgaaaatcagaaaaaatcccctttgccgtagaaaatatcctttcaaaaactaaatttataagtaaaataggaaattagaatacttctt

SEQ ID NO: 283190 - DNA, 122 bp, Homo sapiens
ttcattgtctggacgaaatccagtttccatgctagtgtcccttcccttcttcacccgctccggcagcttggtggcctcgtgcccgggccccactcctgccaggacacgattccttccacgac

SEQ ID NO: 283191 - DNA, 122 bp, Homo sapiens
tgcgaacagctggatggttggggcataagctttaactgtcccctttcagagtctgggcaacgaagtcgctgtatttttctctaccctctccccaccccttcttccgcgccccctctgccggg

SEQ ID NO: 283192 - DNA, 122 bp, Homo sapiens
gcggggtgggggcggagccttatgagcggggcggggcaggggcgtggtcggggcggggcgcgcgggcgcccgcggcggccctcacttcctctggcgagcgcagccgggcggaagtgcgtcag

SEQ ID NO: 283193 - DNA, 122 bp, Homo sapiens
ctgggcggttccagaagtggccgtcttgggctgggcgtgtcttcctgccttcacaccactcggccccaaaccaatcgcctttgggatatccacagaaggatgctgggaggctcctgttcaac

SEQ ID NO: 283194 - DNA, 122 bp, Homo sapiens
caggtttccagcgcccctggtttccacgtcgctatggtaacgactcaccctgcacacatgcgaactacaattcccataaccgcccgcggcttccccgcccacagggagagaatggcgggagc

SEQ ID NO: 283195 - DNA, 122 bp, Homo sapiens
ggggtcggggcggggacggggcggggcgctgatcggacgggcagggggcggggccatggccgccaagacaagccccgccatgctgccgctgcccccacggcctcgcttccgttttggggcgg

SEQ ID NO: 283196 - DNA, 122 bp, Homo sapiens
tctgttctctgcaggcacgtccttgtgatgcccagggctgacttggcttttctgatcccccgctaacctgtgtgtccagttcccggcctgcccttcctcaattttgtgcataatttcaatac

SEQ ID NO: 283197 - DNA, 122 bp, Homo sapiens
ggcgccaggactggtgagggagccgttcatctcatggtggctcatcatggcgaagggcgccgcataggagctggtgatggagatgggcgtgcgcagagccgaggctgcgaggggtgggcgtc

SEQ ID NO: 283198 - DNA, 122 bp, Homo sapiens
gggcaccctaatttttgagaaccaaggattctcttaatgagaaacttttaaaactactgacgcctgggacccacccctcagattttgatttttgattgaatcattccagtgtgtggttcttc

SEQ ID NO: 283199 - DNA, 122 bp, Homo sapiens
caggtacacatgacgtcatttcctctgtatgctcagtgaacctccacagtagcaccacctcgttggattgtaactgtttaggttaaacaatttatttgtctctaaaactgtagattcaccaa

SEQ ID NO: 283200 - DNA, 122 bp, Homo sapiens
atatgctcatggggtgtccactgcagatttcttcccagttggcctctacttagtccaagccgacccacccagccttggttaccagaagggagcatcaccatcctgcttgagaagatgaaaca

SEQ ID NO: 283201 - DNA, 122 bp, Homo sapiens
agagctgttaacactcactgcgaaggtctgcggtttccctgctgaagtcaggtaagaccacgaacccaccggaaggaagaaactccggacacatccgaacatctgaaggaacaaactctgga

SEQ ID NO: 283202 - DNA, 122 bp, Homo sapiens
atgcctcatcaggaagctgcacaagatatcaatgatgcgactgcctggctgcacaggcagcgctggcccagctgctgggacattgacaggtcagtggaaaacgagtgcctagggtgaatgta

SEQ ID NO: 283203 - DNA, 122 bp, Homo sapiens
ggagctgctacgcagctggctgggaaagaaaagggagagtgctccgccgggagcggggagcgagtagggtggcgtctccagggatttaacctcctaccctcagttccatgacgccaccccct

SEQ ID NO: 283204 - DNA, 122 bp, Homo sapiens
tttttaaagaagtgtactatccggaccattagtagagatgccattattctttttaaaaaccgtaaaaggaatcaggatatatagtctcctgggcaacatttgccttatcagatactcagcat

SEQ ID NO: 283205 - DNA, 122 bp, Homo sapiens
ccaggccaacaaacttctccgcgtccgccgggagcaggtcagggaagggacgcgaggcggcgctgtcaccgcattctgagcgccgcagctccctgggccccttgtatcatttcagtgaaggt

SEQ ID NO: 283206 - DNA, 122 bp, Homo sapiens
gcagagccgccggagcccaggatccgcacactggaatccagggaggccccgggaagaggccggagggaagctacgccaatgcccgatcccctggggtggatggaaggactgagggcgcagga

SEQ ID NO: 283207 - DNA, 122 bp, Homo sapiens
ctacttactcgggttgctgccgggtcgtgaggctttgtaaattgtttgtatcacttcacccgggattaaaacggggtgtttgtttggggtcccagttggattaaagcgttcctgataattga

SEQ ID NO: 283208 - DNA, 122 bp, Homo sapiens
ttgccctccagccgcgctccggaagcggaggctgcgttgggagcacgtggtttgccccgtcgcccaactaatctgaaatgtgtttgtggcgtgcctggtttctcaggggttctgcacataca

SEQ ID NO: 283209 - DNA, 122 bp, Homo sapiens
caatgttacatctggctccggagctcagagccgagaagcctctggctgcagaacctcggccgcacgcctcctctgagaggggctgggacttagagccgagagctcctctgggagccccactc

SEQ ID NO: 283210 - DNA, 122 bp, Homo sapiens
ggcctgcatcatctgcagatcccctgccgccagcacaaggccaggcccccagcacagacacgctgtctgagtgtccagtccagagcagatacacagcagatgtgtgtttgggtgtgccgctc

SEQ ID NO: 283211 - DNA, 122 bp, Homo sapiens
aagctgtcaaaatatgctgctgcaaaagctgtatattatctggttgctctctcagaatctcgtgggtcagctctttaagaagactcccaaatccttgcagaattcagtagtgggtattggag

SEQ ID NO: 283212 - DNA, 122 bp, Homo sapiens
tgtgaacccctccagcaaagcaggcaaaatggaagagggacataggacacggtgatatatcgctagcacggtgcttcatctgtctacaggcagtggacgcaaaggaagggggatttagggtt

SEQ ID NO: 283213 - DNA, 122 bp, Homo sapiens
ttggtgcctttagcaacctatttagtaacatgcctttgacacccaagaatttagaggattcgtcaaagtagctcaaactctgaggtttgtaaaacttggaggctgggctttgcgtctctgga

SEQ ID NO: 283214 - DNA, 122 bp, Homo sapiens
gctgaaactggccccatatgggattccaggagtagcagcagcccctccccttggggcttccgggaactacagataacttttttaatgaatcaaaataccaaagaactaaccctcccaacagt

SEQ ID NO: 283215 - DNA, 122 bp, Homo sapiens
cagcggaccgggggcggggctccgaggcccgggcgcaaccacgggctcccaggcagcctccgccagccggaccccgtcgccctcctgatgctgctcgtggacgctgatcagccggagcccat

SEQ ID NO: 283216 - DNA, 122 bp, Homo sapiens
tggaacaagaggaacctgtcgtggaggtgggtgtgtggccagggtgaggagcggggcctccgtggaggtgggcgcgtggccagggtgaggaacggggtctccgtggaggtgggcgcgtggcc

SEQ ID NO: 283217 - DNA, 122 bp, Homo sapiens
aactcacttttgacttacagaaaagttgggaaaataatgtggtttccacatatccctcagcgggctttccctaatgctaacatttacataaccatagtacaagtacgagaacccagaaatta

SEQ ID NO: 283218 - DNA, 122 bp, Homo sapiens
gacgacaccccctccccagcttaacccccatccttgagatcagctgtaggccagcactagcgaagaatgctcagtgaaaccttattccatgaataaattaatgccacccatgtggctggtcc

SEQ ID NO: 283219 - DNA, 122 bp, Homo sapiens
cgcgttctgtccccagcatgagatgcagaccgaggccagggagcccttgctttgggtaggcgccctggtgtttcgggcacttggccccttggagcctcagctttcctaactgggaaaacggc

SEQ ID NO: 283220 - DNA, 122 bp, Homo sapiens
cccggagataatggcccagtaggaacactcaccatagcgtctgtcttggtagtctcttgccggacaccgcgaggataccacgcgtgtcggtttggacggtctgctgcccagcaccgcaagga

SEQ ID NO: 283221 - DNA, 122 bp, Homo sapiens
aaatgttgggagaggagtttatgcataaggagtttctgagaatggcttcaggaacttttccgtctgagagggttgcttagtatagaaatgataaactcagttacaggaatcaggtggtgaca

SEQ ID NO: 283222 - DNA, 122 bp, Homo sapiens
aagaaaaacacactttaagacaattttctttaacacatgtggacagggaaccgaacgcaacgggaggcggagtggcatgattccgtaaaagtggacgctgaatggtaaatttcccaaccccc

SEQ ID NO: 283223 - DNA, 122 bp, Homo sapiens
tgttagaaagaacaattgaccccagttctgtaaaggttccgagtcctggaggaggtgcagcgactgtgtgcacagcgccccctggtgatgagacactggcttttccgcatactgagagaaga

SEQ ID NO: 283224 - DNA, 122 bp, Homo sapiens
cccatattatagagggctgtgtgctttactccatcgaacaatttaaatgttaatctcacccgcattgaaacacccagaataatgtttgaccaaatacctgggcctcctgtggcccagccaag

SEQ ID NO: 283225 - DNA, 122 bp, Homo sapiens
tgctgattctccccaaggcctctggaattaacaggtctgctcgtacacccaccacccacgcgcactcactggcctgttcttgctggcataaaagaggggcagtcactcctccagccaggttc

SEQ ID NO: 283226 - DNA, 122 bp, Homo sapiens
ttctgaagcgaaggatcctagctgccgcggctaagggcgcagggggaggccgcgcgtcctcgccacaccggaaggagagggcatccggctcacacatcccaccctatgtcttagaccccgtc

SEQ ID NO: 283227 - DNA, 122 bp, Homo sapiens
caaacatctgttaagcatctgctggtgctgcctttactgaatgagctgcttcctgcagatcgaaggatgagctggactaggttctgacccagggcaagtctgctccatctgacttcttatag

SEQ ID NO: 283228 - DNA, 122 bp, Homo sapiens
agtctctcctcccccacgttggggacgcccctcccagagcccgggtcacctccgggcttccgaagccccctctaaggcggagtggagccttgggaacccctcggccaagcacagtggttcga

SEQ ID NO: 283229 - DNA, 122 bp, Homo sapiens
cagctgtaaaaagctggttccatagcataaattgcgaaatacttaggcaagaagattattcgagaagaattgtattgcttgttcagttatatattttgatctttatagctagtagttttttt

SEQ ID NO: 283230 - DNA, 122 bp, Homo sapiens
ctgccagatgctcctgccgggcctgagtctccccgacgagcgctgccccatgttccacggcgcccgatcccatccactgcccaaggtctgaggagtgccagcgcacggcgacggagtggcag

SEQ ID NO: 283231 - DNA, 122 bp, Homo sapiens
actgtgtggcatgaggccaacttgctcatcttcctttctgaacaagcctccccagatccacgggggaggctgggtgagtggggagccacttcctctgggtatcagatcaaaccatgaaatct

SEQ ID NO: 283232 - DNA, 122 bp, Homo sapiens
gccgcggcgcatcaccaggtatggagggtcttgggggggccggtggcgcagggctggggccgctgacccggatcagggacagagacctcggcccggggaccttctctgaggatccactgaac

SEQ ID NO: 283233 - DNA, 122 bp, Homo sapiens
aggtacattaaaaatgattgtattagacacccatttctaagacaccatgtttttattccacgttctccttttggaatgtaacctaaccccatattcttaagacacagggatgtttacttagt

SEQ ID NO: 283234 - DNA, 122 bp, Homo sapiens
tctgcttctcactgaagagtacccacagaactcaacctcttgaagaaagcccaccttggtcgagaccttcaccgacagcccaatggcagtggcagcagctctgaccggactccaagcagaag

SEQ ID NO: 283235 - DNA, 122 bp, Homo sapiens
gatttctcttgcactgttgctttaagaactgtcagagcggtgagatgacggcagcctgtgcgaatcggcctccagcctcctcggggtcctgcccactctgttcgccattcggtcccacacct

SEQ ID NO: 283236 - DNA, 122 bp, Homo sapiens
tccgcagccttcggagtgggtgggactacaggcctgcaccgccacgcccagccctccggacgattcttaagctcctgaagtctagaagccttagctagatcaggccataaacaaagggcttt

SEQ ID NO: 283237 - DNA, 122 bp, Homo sapiens
ccccaacactttctctgccagctgctggctgtcgcccccacacatcagctcccacctctccgccacctccaacccggccgccgcctcacccccagcccgcgggggaggctccgcgcgccaat

SEQ ID NO: 283238 - DNA, 122 bp, Homo sapiens
ggaattcccctttcaatcacgctgctctcctggagcccctggagcctctggctcaagcagcgcagtcggtctgtgcagtgtccctgacgtcatccagcgtatgcataagccctgctattgtc

SEQ ID NO: 283239 - DNA, 122 bp, Homo sapiens
tgacttcccgcagagagctggacccagacaagagaggcacgtggccctgctagagctgaacgctacagcccaagcttctgcccgcagtccctccactgtgcacagtgcgctgggagcggctg

SEQ ID NO: 283240 - DNA, 122 bp, Homo sapiens
gtggcttaattcctctatcaggagacgtgtgaagtcatggccctgaggctcctcacagctcgtgaggccaccttggtgacagcattccattcctgcacagcttttaccttgccaagttagca

SEQ ID NO: 283241 - DNA, 122 bp, Homo sapiens
agctcacacttctggggcagccgtgagcagcgggcacacgggcagccacgaaagcagcagcgagggtggtgcaaacacctcaaaactacaccgaatccagtagcgcctggcgcccccggcgc

SEQ ID NO: 283242 - DNA, 122 bp, Homo sapiens
tttattttttgaaagaggaagatccaggatgcaagagtcccgacaatcatactagatatgcgaaagagaaaaagccggaagaaaatacacaaaaatcataacactttgagggtgtggcttac

SEQ ID NO: 283243 - DNA, 122 bp, Homo sapiens
gtccagtgcgcaggtgcgaaagccatctttggttatataagggaggttcaggaagccattcgttctttcgcgtctgcggtgcccggagtgtggtacttctcctagttgcagtcaggcttcat

SEQ ID NO: 283244 - DNA, 122 bp, Homo sapiens
ttttcttcagtttcattttgttgaaaatgctggtcaggacccactgggttggaccagggccgagcaggctgctgcgccgtttctaatgtgtcttctctgtccaggtataccgctgggccgac

SEQ ID NO: 283245 - DNA, 122 bp, Homo sapiens
cagttctgccatttaaattatgtgacctagggcaagtcacttagcctttccagtggcaatcgtgacacccactctaaagggtagatggagaaaagcattggggaccttggatggaggtgctc

SEQ ID NO: 283246 - DNA, 122 bp, Homo sapiens
tcccaaggtctcccggcatagaccgttagcggcaccctccccttcagtctgagacagcgacgttgtcccgtcctgacacttaactctcctggtggggtccctgtccggcctccatcccagcc

SEQ ID NO: 283247 - DNA, 122 bp, Homo sapiens
accatgaaaatggatggcactgatgcattagaccctcagcagcctgcaattgcaaatctgcgaggtttcattcggcccataaagcaaacatttgaacttacacagaatgagcacttaaatac

SEQ ID NO: 283248 - DNA, 122 bp, Homo sapiens
gccggtatttcctgacccgctggaggagccggccccacaggcttgtggcctccccggagccggtgagtcaggaacttcctacttcaagaggcttccccagtgcagcagaaaacaaactagtc

SEQ ID NO: 283249 - DNA, 122 bp, Homo sapiens
agcagccagcaaatggcccaggccgagggggccatgctggggaactgagggcaccgctgccgcctgcctgcagagccgccctctggtcccgctggccgccggttgtagtttgctctgctgcc

SEQ ID NO: 283250 - DNA, 122 bp, Homo sapiens
agagggctgcgctctggcccctcggggctgcaaaatcctggagcaaaagttgggtggagccgctgggtgattttccccggcgttgcaggtgcagcctccgaatgccacccagcccttgcggc

SEQ ID NO: 283251 - DNA, 122 bp, Homo sapiens
tctggaatgacatgacttggcttctgtcccagctcttcctgcttatataggatgaccctgcgtggactccgaaaccttttgtgccttgggtgctcccaatgtaaataagcgatagtgttatc

SEQ ID NO: 283252 - DNA, 122 bp, Homo sapiens
ggctcgtgcccgcaacatctgtgtggccacctcggagaaagtgggccgtgccatgagccgcgcggcctttgagggtgtggtgcgagccctgctgcagaagcccagtgcccgcgtggctgtcc

SEQ ID NO: 283253 - DNA, 122 bp, Homo sapiens
tgtcggagctggagcagaggaaggcagccccgcagtgaggtcacagcgccaggagctgaccgcaaacccggtgcgctgtgcggccccgtggcccccggcaggccagccccttctgttgggcg

SEQ ID NO: 283254 - DNA, 122 bp, Homo sapiens
accggttgactttttaaagttaatataaaatttgtcaggttaaaaaggtataattttaatcgtttggttcaaatcatccacatttcatagttgagaagggtagaaataacacctcccataag

SEQ ID NO: 283255 - DNA, 122 bp, Homo sapiens
tggtttaatgggtacagtttctgtttgggatgatgaaaatgttctggaaatggatattggcggtggttacacaacattgtaaatgtgcttactgccaccaaattgtacactgaaaaaatggt

SEQ ID NO: 283256 - DNA, 122 bp, Homo sapiens
gcctgtgaaaggaaccagggttttaagcagataaccaaagttgggctgactttcaggacacgccagagacacttattctggaaaacacttaggctcacatcaagggagcagttttatctttc

SEQ ID NO: 283257 - DNA, 122 bp, Homo sapiens
cctacatgtggttgttgtctcagcatcattcaacctttttccatgtcattgcttggccaccgtaagttattatctgtagtggttgcacaatgcacagtgtttcatctggcgagactgcactg

SEQ ID NO: 283258 - DNA, 122 bp, Homo sapiens
aaaaaaaaaaaccttcccatgagaggttcctaccctatgccctgggggaagaaatgctgacgtcaaggaagcttctataaaaacccaagaggacagggttgggtgaactttctgatagctta

SEQ ID NO: 283259 - DNA, 122 bp, Homo sapiens
cagcgctttcacaaaagggaaagtcggtcggatattttctagtctaaccagatggtgaggcggcaggaggaggctctcaggagcggttggggtaaccagaatagatctcttcctctccgatc

SEQ ID NO: 283260 - DNA, 122 bp, Homo sapiens
tgctgggattacagacgtgagccaccgcgcccggcctttttatctttttatatatgcattcgaagagggatatctctgctgttaaacgtctgcataaacggaagcacttcttgagagcacca

SEQ ID NO: 283261 - DNA, 122 bp, Homo sapiens
ggccctccaccgccgaagctgctgctgctgctgctgctgctgcttattattattttgagacggagtctggctctgcctcccaggctggagtgcggtagcacgatctcggctcactgcaacct

SEQ ID NO: 283262 - DNA, 122 bp, Homo sapiens
ccccggcggggagctggagccagagcggctaccccgaaagctgcgggccgagcttgaggccgcgctggggaagaagcacaagggcggtgatagctccagtggcccccaacgcttggtttctt

SEQ ID NO: 283263 - DNA, 122 bp, Homo sapiens
cagtcgcgagcgaacgaccaagagggtgttcgactgctagagccgagcgaagcgtgagtgcgcgggaccccctacccctactcctcggggcccccaccctcccagccgggccgtgagctgcc

SEQ ID NO: 283264 - DNA, 122 bp, Homo sapiens
tcctgacctcgtgatccgcctggctcggcctcccaaagtgctaggattacaggcttgagccgccgtgccccagccaggcaatcttatagaagaagatggagggctggagaaaattaaacaac

SEQ ID NO: 283265 - DNA, 122 bp, Homo sapiens
gtggctcagccatgtaatcccagtgctctgagaggccaaggcaggaggatcgcttgagcccgggagttccagaccagcctgagcaacacagaaatttggaaatttactcatttctacaaaag

SEQ ID NO: 283266 - DNA, 122 bp, Homo sapiens
aggatgcatctgttggtaccatcttcctccccttccctcctccactcacacccccctccccgccaataactgcttcatgcagtagctcagatccctgtttggcttgacctattaaggtcaaa

SEQ ID NO: 283267 - DNA, 122 bp, Homo sapiens
tctagaaaacagtttcccgtgaaggaccagggactacagatttccggcttcggggccctacggcctccacccccgccatgcagctctgcagctgtagcctgaaagcagctgcagctgccgcg

SEQ ID NO: 283268 - DNA, 122 bp, Homo sapiens
cagacgccaatttattattttgagggcggggacataaagccaagggaccagcatttatcccgcctcttctaatggactcatgacatcaggtcttgattcagccaccagtctgcaggaaattt

SEQ ID NO: 283269 - DNA, 122 bp, Homo sapiens
aactggaatcttctgctacttccctaaccatccctgccaaagtaaaggagtgaggctgggcgatgatgacagcaacggtacgcaaacaagaagagtgagtgccttcttcttctccagccatc

SEQ ID NO: 283270 - DNA, 122 bp, Homo sapiens
gggagagcgggaagggagctgctgctggacaggaacagtttcagctgggaaggtggacagcgtcctggaggtgggaaggtggacagcgtcctggaggtgggaaggtggacagcgtcctggag

SEQ ID NO: 283271 - DNA, 122 bp, Homo sapiens
tgcggatgatcatatggtcaccgtcctgcacgatctctttgtctggcttcagcaagttggcgattttgcgcaaggccacattgacgtctgcggtgggggttgaacggggagagagagagcgc

SEQ ID NO: 283272 - DNA, 122 bp, Homo sapiens
tctggtgggggtggggggcttcagcctgaggggatgtttcacacattcacactgcaggggcggggcgaggggagctgctctccctctcacacagctctactgtcaaacatcatggcaccagt

SEQ ID NO: 283273 - DNA, 122 bp, Homo sapiens
gaccaatcattttcggtttcatggaaacaaaccataaatcaatgtaagaaacagccaagccgcagtttctgaacacagccaacgtttactgaccgtcctgcgtcttggaccagcctactttt

SEQ ID NO: 283274 - DNA, 122 bp, Homo sapiens
cagatttaaagaactcatctagttagtaagtagtagtttttaatattgttgttatgtatccgcttgaaactgtagagagaaataagacatagtaaaacttaaataagtaaatgtagtgattt

SEQ ID NO: 283275 - DNA, 122 bp, Homo sapiens
accgggaagtaaaaaagggtcttaatgccctcattcctgctcagtgctccctccaccacccgggaggggtcctgcaaaatggctctggggaaaggcaatctgctcaaagaacaagtatttgg

SEQ ID NO: 283276 - DNA, 122 bp, Homo sapiens
cggggcctcgtgcatgctaagcacgcgctctaccactgagctacaccccccaacgctcaacgtgggccaaaatatttctatgacctgttactattatcggtcgtgccaagaagcatattttg

SEQ ID NO: 283277 - DNA, 122 bp, Homo sapiens
gcggctgcgcggtgcttggcaggaagctgcggcgcccggaagagcccgcgccaccgccgccgccaccaccaacacgttgcaaggagtcattcgacgggccgcggccccacgtgggcggggca

SEQ ID NO: 283278 - DNA, 122 bp, Homo sapiens
gcattcaacgctcattcaagtcgaggacacccctccccacacagacctcaccgcgttgtacgcaaaatcagaagcaaaaaaggagaaatgaaaaggtgaacctacctaacgacgacggctcc

SEQ ID NO: 283279 - DNA, 122 bp, Homo sapiens
attatcaccacgatgttccacaaatcatttgttatcccaatctctaccatctattttgcacgtcatcacacaaaggtcatacagaggacagaacgcagtagtatagatacatttcctctcag

SEQ ID NO: 283280 - DNA, 122 bp, Homo sapiens
tcaaggggcgcccagtgaacggtggttgactcggaatctcagagcctcggcttcctcttccggcaagtgggggggaggggggaagggcaccaccggctctgcactgggcagggcggcgcgcc

SEQ ID NO: 283281 - DNA, 122 bp, Homo sapiens
cttcttggaagtaaataacaaaagccatagtgttttcatttgtcttttcttcaggatacacggtagaagtcagagaatctttgatacttttatttggtgcaataatcaaggccatgcaacaa

SEQ ID NO: 283282 - DNA, 122 bp, Homo sapiens
ccaggaacgccagccgttcacgcgttcggtcctccttggctgactcaccgccctggccgccgcaccatggacgcccccaggcaggtggtcaactttgggcctggtcccgccaagctgccgca

SEQ ID NO: 283283 - DNA, 122 bp, Homo sapiens
atgcctgtcagacagagaaggaaagcactggtgcaggaccacagagggctgcagggttggcgggcagtgcccagagacaccaccctgggctgtcctagccaggagatacaggtggggggtgc

SEQ ID NO: 283284 - DNA, 122 bp, Homo sapiens
atcgtctgagatgtgaggagcccctctgcccggcagccgccccgtctgggaagtgaggagcgtctccgcccagcagccgccccatccaggagagaggtggggggcagcccccgcccggccag

SEQ ID NO: 283285 - DNA, 122 bp, Homo sapiens
gcgtggttgcttgtagcggcagcggtggtgggggtgagaggggggcagggaggctgccgccgcttagccaagcaaaatctcagagcaagaggggaaaatggttcctgttctcgagagattac

SEQ ID NO: 283286 - DNA, 122 bp, Homo sapiens
ttctgatctgtaaaggaaactttctacaacgccacacataacagccagcacttctcgaggcggtgccgacaccctcacttgctggtggctagcatcattttgctcacctagagaaacgtttt

SEQ ID NO: 283287 - DNA, 122 bp, Homo sapiens
tcacttcgacaggcacaaaatgtaaaaccaggcataaactactagtgcttgcagttcttacgcaggcatgaagccaaaaccagtttacaaattaaccaccaagaaaaccggtagagcacaga

SEQ ID NO: 283288 - DNA, 122 bp, Homo sapiens
aacatggctaatagctgtcagcttatctctgctactcacagaaaaggtaaattatgacatcgatctaacctgtgccttgaaatgatcagcattaaaacccctgttattaggttctttcatga

SEQ ID NO: 283289 - DNA, 122 bp, Homo sapiens
cggcaacgctgtggtgcccaggacgccggcaggcacagcgccacgtccacgggcaccgcccgttcccaccctgcaggacgccacagcatcagacgagacggcccgtgtgaagcgccgagaac

SEQ ID NO: 283290 - DNA, 122 bp, Homo sapiens
ctgagatacagatgccggacgtcagctgggctcattcatgcagcaattggtttgctcttgcgcaccagccttaggtagcacaaatgtgtgtctcagcaaaattgctaaagactgcatgtcat

SEQ ID NO: 283291 - DNA, 122 bp, Homo sapiens
gctggccgcccgaagctccgcccccggcggaaaactggtctctggaccgcccgcccaggtcgggctcaaaatgcggcgtggatctgaaaggatcaaacacaacactaattcagcaagctatt

SEQ ID NO: 283292 - DNA, 122 bp, Homo sapiens
cttatacgtaattcacatataccatctgtatcttcgcagccaggcctgagtggcactgaacgaactgagggaaggcttatgcccgggtccccacagagccttaaggaggagagtgaggatga

SEQ ID NO: 283293 - DNA, 122 bp, Homo sapiens
ggtcatcgtcttggttgggggccgtcagatggtggggatgacccagcgctcgctggtggccgtcacctgctggaacccgcagaacaacaagtggtaccccttggcctcgctgcccttctatg

SEQ ID NO: 283294 - DNA, 122 bp, Homo sapiens
acctggttggcaaagatgagggacatcctggtcctgtcactggggtccttggtgatgtggcgaatgagctgcaacatgggtgtgatgcctggaacacagtgagcgagcagccagctttctcc

SEQ ID NO: 283295 - DNA, 122 bp, Homo sapiens
cccttggcgccgcgtggctctccgcccctctgggccgccagggtagcgccgcccgccgctcgcccccggctagcacagcaaatcgcagtcccctcgccccgggagagactcccacacgtcgc

SEQ ID NO: 283296 - DNA, 122 bp, Homo sapiens
cacagccgctgcgtcccgggcccgccccctgcactaatggctcctggccgcagctgagggcgagcacgccccaggcgcccttaaagtggccctgtcgccagttctggcgcgtgggggagcag

SEQ ID NO: 283297 - DNA, 122 bp, Homo sapiens
cctttcacacacggaggagagggatggggtccccagcaagcagggaacgtggtcttgagccggaaagagccgttttaactggagctcctctgggtcttggacttttcagtctgatcccagcc

SEQ ID NO: 283298 - DNA, 122 bp, Homo sapiens
tctccttttcttttctcttattcatcatacaatagtaatcaggactgattgcttgcagaccgagtaagtcttgtggtaagaaatcgacaggttaatggaaggaataggagatcagggagaga

SEQ ID NO: 283299 - DNA, 122 bp, Homo sapiens
ggctattggttcgcccggagttgtttgtgagtggccattggcgacgtcgaggcgccatgacgagccgattggctgggcgttggaatgcccgccagggcaagggtagggaggaggcggccgaa

SEQ ID NO: 283300 - DNA, 122 bp, Homo sapiens
cgagcagctggcgcaggagaccggcctcaacatgcgcgtcattcaggtcaggccccggcgcgcctctccatcccacagaggcccacactgccactttgggcacccaggccgagccaggagag

SEQ ID NO: 283301 - DNA, 122 bp, Homo sapiens
ataggacccgggggaagccgggaagccgttagggggcggggcaagcgggcgggcgtgcgtcggtcaagtttcccgggtcgcgtcaggcttctttctcagcaccgagcgagcgacgttcgtga

SEQ ID NO: 283302 - DNA, 122 bp, Homo sapiens
ccgacctttaacccccattgttcctgcctccacgtcgctgtgattggttctctaagcttccgtcagtttacaatccttgcaccaggcccgtcttgctctcgcgcgagtttttgtcgctgctg

SEQ ID NO: 283303 - DNA, 122 bp, Homo sapiens
cctggttgtgcctcaccctgagcacccccacatcctctgtgtgtgtggtgagcatgtagacgacacccctttgcgtggttctgctggggcagagcaacagctggcaggcttgggcccgagga

SEQ ID NO: 283304 - DNA, 122 bp, Homo sapiens
agtgtccgcctcctgagccaataaagctgtactggttttgaatcgcggcgcgtttcccgccgctggggtcaggggtcgaggttcgggtcgtggggcggagggaagagcgggcgggcgggagg

SEQ ID NO: 283305 - DNA, 122 bp, Homo sapiens
ctcaatgatgagtggagggaacaggtgtttaccaggagcttgcatgctttgtctcagggacgattagtgacacagccaggaaggcacgctatccccattttacagatgaggaaacggaggct

SEQ ID NO: 283306 - DNA, 122 bp, Homo sapiens
tgacctcgtgatctgcccgcctcggcctcccaaagtgctgggattacaggcgtgagccaccgcgcccggccttggacaatcttttttaaagtgtccttgcaggccgcactggaagcaagccc

SEQ ID NO: 283307 - DNA, 122 bp, Homo sapiens
tgcttttatcttgcagaagaatctttaaggggtccatctgttaaagcgttccttccctctcggtttctttcccacacataagccctcttggtttctgaagatacactcagcttatatctgac

SEQ ID NO: 283308 - DNA, 122 bp, Homo sapiens
ctcagacccaagacaagtgagggagccctgagactgcagccggcacattcccagggccctcggagcagtcctggggttccatgtcttttgaaggcagcagagcaaggaaaagactcttaaga

SEQ ID NO: 283309 - DNA, 122 bp, Homo sapiens
agacttatgaaaaatgaaaacagtagaaaaacaagaaaaatattattaaatatatgtgggcggtatagcgggagcatatcggatactctgggatgcagacacagagatgaagttaggaggtg

SEQ ID NO: 283310 - DNA, 122 bp, Homo sapiens
cctcaatagaacccaatctggcaggtctcttcttaataattgcacattgaaatgtctgttcgtcatctaggccagcggtttcttgtataaaggaaacaaaagtcatataattccttttacta

SEQ ID NO: 283311 - DNA, 122 bp, Homo sapiens
tgcgcttttggaggaaacagtcccacctcgtcctttgccgtccccattgctgagcatgaccgggccctgacacctggtgcagaagggtccctgggcacagcagaccccggggggacccgccg

SEQ ID NO: 283312 - DNA, 122 bp, Homo sapiens
aaaaatggactgcccacttccatgctgagtgatgctcagggaagtgatgcccgcagaaggcgtctgggcctaaggatccatggaagtcaggagcattaaatcccaaaccaaatcaactccag

SEQ ID NO: 283313 - DNA, 122 bp, Homo sapiens
aggccggtggaagtgctccgtttaattggtccctagtacgcccccgaaaggaaatggagacgatttccgtcaagttctcttagtatttctgtcatttacagaaaagcagtagctactcacat

SEQ ID NO: 283314 - DNA, 122 bp, Homo sapiens
ccgtttgctgcttgagtctcttcggagcccagtgttgactcccgctcttcgtggctgccccggctatctggccatgaggagctgaccacgcacctggccggactcacatccgctccgctagg

SEQ ID NO: 283315 - DNA, 122 bp, Homo sapiens
aggataaaacccagagtcctatgactattcttatggaaacacttttgacctgtggatctccggagggtgttgggggacccccagagaggcctgggcccagcttggagaactgcttttctcgg

SEQ ID NO: 283316 - DNA, 122 bp, Homo sapiens
cagtatttttcagattttagaaaggtaatacagtgcatacatatgtgcatacatccctggcgaggtctggtgtgtaccaaggaatccagcactgatatttctgcagcaaacatacaaataat

SEQ ID NO: 283317 - DNA, 122 bp, Homo sapiens
cccctcaccctatggtcctggggtgcagggaggaccatccagagcttcctcaccttgtaccggtatagggaggaggggccatggctgggcccgcctctgccacacatgtggtgtgcctgtgt

SEQ ID NO: 283318 - DNA, 122 bp, Homo sapiens
agcgcgattctcccttggaccagggaccccgtctggatcctgccgggctggcggcctctccggctgctcccaggcacagggcgcctccctggtggaaaacttgaccccaattttacccggca

SEQ ID NO: 283319 - DNA, 122 bp, Homo sapiens
gggagctacaattaacccagagggaaagctgtagttatttagggcaccactaaataacagcggaggcactagcggtagcggctgcaaccctcctctgcgtgtaaatatagatatctctacca

SEQ ID NO: 283320 - DNA, 122 bp, Homo sapiens
gagtgtgtgcaggagcgcacagcctcggaaactccgcgaaattttactcggttccagtgccgcactgaggatccaagaccccttttaggaacccttacctattcagggcgacctcttaacca

SEQ ID NO: 283321 - DNA, 122 bp, Homo sapiens
tagctgagtttctcagaggagtaagccccatgaatcttcccaagatagtcttggaagctccgttcctcttggctcattagttgctccttggacatctcatagctccaaggaggacgtcgagg

SEQ ID NO: 283322 - DNA, 122 bp, Homo sapiens
aaggtgtcttttaatccccacgagagcccaacaaggtagattgggctgctgaggctccagcgctggaaggccggcccgggtcctcccagtccgcacctgcatccatccatcactcccccact

SEQ ID NO: 283323 - DNA, 122 bp, Homo sapiens
ggaatcccgcacaaagatgcctttgtgtctggcatcttcccccagtgtagtttcagagtccgcccccaatgtcgcgggcatcggtgctgcattctcttagctgaacagcatccgtcctaggg

SEQ ID NO: 283324 - DNA, 122 bp, Homo sapiens
ggcagggcttcctggtcagcgtcctctactgcttcatcaacaaggaggtaggcagagacccggccgccgcccccgccctctggcggcagcgcggggtacggcgccgcctctgagcgccatcg

SEQ ID NO: 283325 - DNA, 122 bp, Homo sapiens
acccccacccaagcagggacctcaaaatcccctccctttcctgtttggggccttgacacacgctgggctcagggctagggagtctctcttcccacctctgacctctttcagcctctacactg

SEQ ID NO: 283326 - DNA, 122 bp, Homo sapiens
aattacttgactgtcagcctaggctgcactctggggcttttactcctttcaacacagctgcgctcccggctttgatgctgctgtccacgcagcttgtcccagccacagcctggctctcagta

SEQ ID NO: 283327 - DNA, 122 bp, Homo sapiens
catcgcatgtgtgggatgtaagaggcaagcagaggcggcggctcagagcatgggcctacacgccagaccgccggggcttgggcagctcggttatgcaccagcagtgtggactggtagggttc

SEQ ID NO: 283328 - DNA, 122 bp, Homo sapiens
ggcgttcgggcggaggggcgctggggcctgactcgcgggtgggtgagacgttgacggacccggaggaaagagggaaggcagatacgctgggaaacggatctggggaaggtgtgaatgcgaaa

SEQ ID NO: 283329 - DNA, 122 bp, Homo sapiens
tttattagggattgtaattacctcatggagtaatggcatttgcacagtttttgtctgcctcgataaaaacccttggctgtgtctgctaacttggtgaaaaatcgcagcaacagaggcagccc

SEQ ID NO: 283330 - DNA, 122 bp, Homo sapiens
tctccatgcttctcggtggctgcacacttagaatgggggcttggcaccaggcgagggtctcgcccctttgataccctttgaggttgatttactgccttgcgaatcccgactcccaactgggc

SEQ ID NO: 283331 - DNA, 122 bp, Homo sapiens
gaaaggggtgacagacgcacctggaaaatcgggtcactcccacccgaatattgcgcttttcggaccagcttaaaaaacggcgcaccacgagattatatcccacacatggctcggagggtcct

SEQ ID NO: 283332 - DNA, 122 bp, Homo sapiens
acgcggacacgcacacacaaacacaagcaacacgcggacatgcacacacacagagcaacacgtggacatgcgcacacacacagagcaacacgtggacatgcacacacacacagcaacacgtg

SEQ ID NO: 283333 - DNA, 122 bp, Homo sapiens
gtgtgggcctctatgcaacagttacctggccaagggccgcgtgctaattaccaattcattcgcgtgacaagttcatgaagcagctcccattgctatctccgctgcaggatggagaggctgaa

SEQ ID NO: 283334 - DNA, 122 bp, Homo sapiens
ccaaatatacatctattaaacatacaggaatgtatttgttgaccttctagggagaaggcacgtgtccaaagctgccccacttgctcacattgtggtggcttctgtattctgtattacagatt

SEQ ID NO: 283335 - DNA, 122 bp, Homo sapiens
gaggccgaggtgggtggatcacttgagccaaggagttcaagaccaacctgggcaaaatggcgaaaccctgtctctacaaaaaattagctgagtatggtaaagtgcacctgtagtcccagcta

SEQ ID NO: 283336 - DNA, 122 bp, Homo sapiens
gggacatgccacctggaagccacctgcaccggctctgtctggtgtctgacgtgggaaggacgtgctggaagcccatgggtgtgtgggaggcccgggcctcgagccatgtcttggtgcgtgtc

SEQ ID NO: 283337 - DNA, 122 bp, Homo sapiens
gtcaacagaccatttaatcatttttgttaacaaagcaggtgacaattgagccctaatttgcgttatcattagttgttacaggatcttgcttgttctcctgaggccacgccacgatttccgag

SEQ ID NO: 283338 - DNA, 122 bp, Homo sapiens
gaggctgatgagggtgaccagggtggtgtagtagtgagaggatggtccctgctccagcaccgccttcagccgcatggcgttggacatgaacagggccacgtccagcatgctctccgccacgc

SEQ ID NO: 283339 - DNA, 122 bp, Homo sapiens
caatcaaaagagacatacaccccagagctcagctgtgctccagaaaacaggatgtgctcccgatgcggtggtgaaattaaagattctgaacgaagtctgggttcgatggaaacccagacttc

SEQ ID NO: 283340 - DNA, 122 bp, Homo sapiens
cactcgctcaaccgggggaggtcagtcccgcagcagcaccagggcacagcgctgtgtgtccggcgctggggggactgaaagggggtgagcgggctgcggaacgcaagcctcccggcgggcag

SEQ ID NO: 283341 - DNA, 122 bp, Homo sapiens
acctcgtgatccgtccacctcagcctcccaaagtgctgggattacaggtgtgagccaccgcgcccggcatcccttgaattctttactgggtgaagccaaaaatcttcccaggctaagtccaa

SEQ ID NO: 283342 - DNA, 122 bp, Homo sapiens
ttgctgacagctgcacacccatccaactggccctctttagagggtgagtcaacaggctgccgggagtgtggatctatctgcaggaaggcagtttagcaataggtactagaacctaaaaaaaa

SEQ ID NO: 283343 - DNA, 122 bp, Homo sapiens
ttacagtcttaagagacccgggagatgaaggtgtaacctttttccagcgcagggctcccacgatcctccagacaggcccggagaagcggaccctcatggacaacagcgcccatctctggtca

SEQ ID NO: 283344 - DNA, 122 bp, Homo sapiens
tgttttataagcctgtccacatcaccagagcctcacggtgcacccatgaagttggctggacgggtgcactgtccacagttttaggaggcccataaatttgtcccttgtgtattagcaccggg

SEQ ID NO: 283345 - DNA, 122 bp, Homo sapiens
ctgggcaacatagcaaggtcctgtgtctactaaacataaaaatgaaacaaactggctgggcgcagtagctcatacctgtaatcccagtactttgggaggccggggcaggcggatcacttgag

SEQ ID NO: 283346 - DNA, 122 bp, Homo sapiens
aggtgaggaacccggggcttggcagagtctgaggatatgctcaggttcacatggcagccacggattccggtcggactccagagacagtttatcatgttctctggacgcagaaataaccagaa

SEQ ID NO: 283347 - DNA, 122 bp, Homo sapiens
atcgtactcagaggtaaagatttttaatcctcgcggttcgctcgtataaaggcatatttccggtcccttccaaggtccaacaatccggacacggcgggtctggggatgggcccaggaatccg

SEQ ID NO: 283348 - DNA, 122 bp, Homo sapiens
gctgaaagttgtgaaggagaaaaagggaatcataaatagaaattacctttagggagttaacgatctagaagtgggagttgaactacacctggataagaagaatgcaagggctaaagtgcaaa

SEQ ID NO: 283349 - DNA, 122 bp, Homo sapiens
aacagtgggtaatgactgcaaagagacgaaggagtgggtggaggaggggtctctggtgctcgtcctgtaggtggatcgatgtgaaagcagtccactgcaagctgagcagtgcacgtggggtg

SEQ ID NO: 283350 - DNA, 122 bp, Homo sapiens
caaaagggctggctcggcactggctccttgcagtcggcgaactgtctgggcgggaggagccgtgagcagtagctgcactcagctgcccgcgcggcaaagaggaaggcaagccaaacagagtg

SEQ ID NO: 283351 - DNA, 122 bp, Homo sapiens
tcctttaaccattcctcttccccggggtagccggttgtagctgatcctgcccaccctttccggtggtctctcagcctggccacaccttccacggctgggcccccctcacctgctcacagctg

SEQ ID NO: 283352 - DNA, 122 bp, Homo sapiens
gcacttttgaagaactcaagaaacatgaagattctgctattccccggaggctagaggtaacgttatatattgaactgttgtttaaaaagagtgctgcaaagaattatcagggctgtcctctt

SEQ ID NO: 283353 - DNA, 122 bp, Homo sapiens
tctgtcgggaggacaccccggcagtgtgtgcctggacagggtgacgctctcaccctctcacggcgtcctgccctcggcaatgctctgtgtttccagtccatgaagtggtgtgatgaagggat

SEQ ID NO: 283354 - DNA, 122 bp, Homo sapiens
ttagggaagcgggacccccaccctcagccccaaccaagaagggcgtcgtctgctccccatcgtcgtctgctctgtgctggatgatccagggccacaggccaggacagaacccctgagattgg

SEQ ID NO: 283355 - DNA, 122 bp, Homo sapiens
cgttttcacagcacgcctgtacgtgtccttagtctttgggagggcagggtccggcgagttcgggtggtttcgctatttggcttctgcgtccaaggcccatgtcaaggaagagaaaaatgtgt

SEQ ID NO: 283356 - DNA, 122 bp, Homo sapiens
ttcctgaaaagaggcttcagggctttgggccaaactgtgccttgaaatgaattttagaagcggccacagcaggcggtctctgttgtgaggggcccagctagtaacaggcacactcccccaag

SEQ ID NO: 283357 - DNA, 122 bp, Homo sapiens
tattgcactcagcttgctgggccccattcccagagtctgtgactcagtgggggctgagaacgtgtatgtctaagttcccaggtgatgctgttgccacggattccacttcgagaacatcttct

SEQ ID NO: 283358 - DNA, 122 bp, Homo sapiens
tctcacaggtgcggtgtgttcagttgcaagtaaagattacgaatgatgcttaaaaacaaacgtaaaattccaggtgatgttgctatggggagcagcattaggacaatctgagtggtttcagt

SEQ ID NO: 283359 - DNA, 122 bp, Homo sapiens
aacagttcatgactcaacagctacgtagtctatccacccattcatgtgacattgtgaaggcgacactgccacaagccacaaccaagccttctacagggatgaaggccaaggggactctatgc

SEQ ID NO: 283360 - DNA, 122 bp, Homo sapiens
acacactgtcctcaaagctccctggcctcagcagcattagcctgggtctcgggcggtcctcgagactctgaactgcgaagggacgcagaggcagggcttccactcacaggctggctgtccac

SEQ ID NO: 283361 - DNA, 122 bp, Homo sapiens
cagtgtttcctggcgcattgattaaagtggcgttctgactgctcagtactagaaatgctgcgaaaagggcttctggagtgggacggccctcgtttgcattatgtcccccgcttcttcctagg

SEQ ID NO: 283362 - DNA, 122 bp, Homo sapiens
ctagctactctggtggggacttggagaacctttgtgtggacactctgtatctagctaatccggtggggttgtggagaacgtttgtttctagctcagggattgtaaatgcaccaatcagtgcc

SEQ ID NO: 283363 - DNA, 122 bp, Homo sapiens
cccatgcgccgggcccagagctccctctgcctgcgggatgagaccttggcaggcgggcagcggcggaaactcagctcaaggttcccggtggggcgaagctctgagtcattcagccctgggga

SEQ ID NO: 283364 - DNA, 122 bp, Homo sapiens
tgtctcagtctggggcagcaagagggaaccacgtgaggcgggctggagacagggaaggcccggaagccagctcagatgcccagggcacagccagaatggctgagaggaagggcctgggagga

SEQ ID NO: 283365 - DNA, 122 bp, Homo sapiens
gctggactcggagaatgattgtaagtggtaatattaactagctagcttgataaaaagaagcgccaagatgagtgacttggacttcattgtcgtcctggtgtaacctttggcatcgtttgtct

SEQ ID NO: 283366 - DNA, 122 bp, Homo sapiens
gttaattcttgtatttttagtagaatttatctacagaggaagatcgtgcctttccttctccgggctgaacacaactgggaaggacataccagctggagcagctcagcacagtcaggaaagag

SEQ ID NO: 283367 - DNA, 122 bp, Homo sapiens
ccttttggctgaggcccatgggctcagcttcttgggcccacggagcctcagcttgcaccccgaatgctgatggtgctcagaattgatattgtgggtagttacaggccctgggtgtctcaaat

SEQ ID NO: 283368 - DNA, 122 bp, Homo sapiens
aatttgttatgtaaaatagttgctgttctacttgaaaaaatgtatagtggcactacgctacggtaaagacaggaagcattataatctgtaggcacctgagaagtggtcacttgttaggggta

SEQ ID NO: 283369 - DNA, 122 bp, Homo sapiens
cccacaccttttcctcttcttcttggctgggttggctccgccagctccccctgaggaggacgaggaggaggaggaatgattctgcgggcagtctgccagattggcaatttgaaacgcactgt

SEQ ID NO: 283370 - DNA, 122 bp, Homo sapiens
gcacagggttgtggtgagtgcctgagcagggcattttcagcttgtttgaagaactgtctgcggtagctgcagatgaaatgaaacctggatctctggtagagagaccttctctaggttctgac

SEQ ID NO: 283371 - DNA, 122 bp, Homo sapiens
ggtttcaccatgctggccaggctggtctcaaactcctaacctcaggcgatccacccacctcggcctcccacagtactaggattacaggtgtgaaccacagcacctagcctcaaggtttctaa

SEQ ID NO: 283372 - DNA, 122 bp, Homo sapiens
cctcagttgtgacaaaggagccgatcagcgtggccagaaggacgcctggtgcctgacacccggcaccaaagtgagatgttagtaatagggggaactgcgggtagggggcggatgtggaaact

SEQ ID NO: 283373 - DNA, 122 bp, Homo sapiens
cctaatttggcatctttctcttctggagctgcacaggcttcagaggctgtacagggtcttcgcctgggcctccattctcactgctcatccagggaaaaagggttcatctgtccccaagcccg

SEQ ID NO: 283374 - DNA, 122 bp, Homo sapiens
agttgcaggcttcagccccgaggctcagagcatcttcttcaggaccagattctgcacccccggcccgaggcttttcatccaggttctgtaccagcgatagcagctcggggttgggcgagttc

SEQ ID NO: 283375 - DNA, 122 bp, Homo sapiens
tgccgggccggagcagggaggtgcagccacagcctggcaggagcctctgcctggggcccacggtgccggccctccctcttgcagctggtgcagcgcatccccgaggccagcctcaacttcca

SEQ ID NO: 283376 - DNA, 122 bp, Homo sapiens
tcgccccgcccacctaccgcccccctcgggccttcgcccctccgccgtcgttgccccgcccgccttgcaccccgtcttcgtcccgccccgcgccgtggccccgcccacacgccgtcagcttc

SEQ ID NO: 283377 - DNA, 122 bp, Homo sapiens
tgcggccacgtggcctattttcctgtggatagactaagcaaacgcttttcttcaggggcccggatagctcagtcggtagagcatcagacttttaatctgagggtccggggttcaagtccctg

SEQ ID NO: 283378 - DNA, 122 bp, Homo sapiens
atcggcagtttctgataaccttgctccgggtcacacgttatcttcctgaagtggcagccacggaagctgcaattcaggcaccaatatcagaaaatgagtcattgccgggaacttcactgtgc

SEQ ID NO: 283379 - DNA, 122 bp, Homo sapiens
ctcttcttccccatccaattcccgattttccttccagtgtcatctcaagtggctttatctcggggtttgatgttttctgctcctcccaaacctcccaagccttctgactcttcataagagtt

SEQ ID NO: 283380 - DNA, 122 bp, Homo sapiens
tggcaggaagcccctctctctgtcagagtgacagggaacagaccctttgtcctcctcactcgtctgccctagcccccagcctgctcctgcaaaagtctctgtttctcctgaacttttcagct

SEQ ID NO: 283381 - DNA, 122 bp, Homo sapiens
ttgttacatgctcctttcactgtccaaacgtcaaccaaaggaacttttgtgacgctaagacgctcccggcgtcctcacccgttcacagccagagttgatcttagaaggcagggggctcgcac

SEQ ID NO: 283382 - DNA, 122 bp, Homo sapiens
cactcataggctattgggggagaggttaagaaacgtagaatttcgcagccagaatgggtacgtctcagcgatcctgaaagcagccttgacagccagaggcgagtcaagtggaaaggctggcc

SEQ ID NO: 283383 - DNA, 122 bp, Homo sapiens
gcgagctcatccctacagtcacaccctggagggatcactcatcttgtaccactcacgacccgtctgggaatagtcaaccctgtttgtggcctgctgaccaaaaccactgaagacggattgcc

SEQ ID NO: 283384 - DNA, 122 bp, Homo sapiens
ggaatcagggaggacacaataattcatattgtgaattaaaaggatcactaggccaggcaccgtggctcacacctgtaaccccagcactttgggaggttgaggcgggtggatcacctgaggtc

SEQ ID NO: 283385 - DNA, 122 bp, Homo sapiens
gttcacctgtacttcagtctccggtggccactcggtgttgaccaacaagtcatagagaatcgtctcctcctcaccctctgcagtgcctggactcaaagccggccctgactcgggggccgcca

SEQ ID NO: 283386 - DNA, 122 bp, Homo sapiens
ttcgactatgacatcgcgctgctggagctggagaaaccggcagagtacagctccatggtgcggcccatctgcctgccggacgcctcccatgtcttccctgccggcaaggccatctgggtcac

SEQ ID NO: 283387 - DNA, 122 bp, Homo sapiens
cgtgacgcagtccatccacagccccttgtacatggcctgggccgtgatgatgttgtcacccgcataggagctcatctgccactgcgggatggcggtgcaggccaccagacccacccagccca

SEQ ID NO: 283388 - DNA, 122 bp, Homo sapiens
tcctctttggtagcactacagttcataagatgaatgtaatttcttagattacagccttaacgggttattactctttcaatgttttctaatgtgatatagatgtcggacgtattcgctcaagt

SEQ ID NO: 283389 - DNA, 122 bp, Homo sapiens
ctcctgggccggtggtgtgtggtgcgatgctcccctgcgatgctcgcagaggcagtgagccgccgctcccagatcgccaccagccatacaaccatgaggggaacgacccatctccatagtgt

SEQ ID NO: 283390 - DNA, 122 bp, Homo sapiens
agaggaacgaggctatagtaccagttggggcatgggtggaacctgcctcaccaggtagttcggaaatcccagcatatgtgagtgtcagtttgatccaaatatggtggggttccccaccaccc

SEQ ID NO: 283391 - DNA, 122 bp, Homo sapiens
ggaaggaaattgctggggaggaggccacctggctgaggctgctcctgagactgaccagtgcgttccttgtggagcccgagcttcctgccagccccagcacggccatctctgcagctttgcag

SEQ ID NO: 283392 - DNA, 122 bp, Homo sapiens
ccgctctcttaccctcgggcctcagaagtcggtgccagtgaccggaggcgacagcggcagcgagtgggtccttgtgagctagaagaatcctgcaaaaatgtctctctatccatctcttgaag

SEQ ID NO: 283393 - DNA, 122 bp, Homo sapiens
tgacggaaataaaaacgactgttctggagtgtgactaggtgtgacagtttctgagtctatcgcctctccacctgctctctcctgagcttggtgccaacaccctgagtaaatgaagctgggct

SEQ ID NO: 283394 - DNA, 122 bp, Homo sapiens
gagacatacccattcgctcccttcgggggccctcgcacctacccacccgcaaaagattagcggtagtcgctaattacgccttggggatggaaagaaaccctgcagggaaagtagctttggag

SEQ ID NO: 283395 - DNA, 122 bp, Homo sapiens
cctttcaccgaagcaattcctaaaggggtgtgtcttatggtgcaagattgctgaaagtcccggaattgaattacacaaccatattctgagacagtcacaggattggttgttttttttttttt

SEQ ID NO: 283396 - DNA, 122 bp, Homo sapiens
agccagaggcacccggcctggcctcggcttcccggtgagggagcgggggtgggggggatgcgcaggcacctggaacaatcagggcaccgggagaagccggctcagctgatgccggtgatgag

SEQ ID NO: 283397 - DNA, 122 bp, Homo sapiens
acaccgccgcagacgcacgccccacaccccgccagcgcccttggcccgcacccgctcctgcgcgcacgcccaaactcagacccagccgcaggcaccctaactccggccagagttcccactcc

SEQ ID NO: 283398 - DNA, 122 bp, Homo sapiens
tctgtgaaagaatcagttcctcgcaggctgcggtctgcgccgcgcctcctttgtatgtcacgctcagagaggagcagtgcccttggagtgccctgctcttgctgagagccgcacgatagatg

SEQ ID NO: 283399 - DNA, 122 bp, Homo sapiens
atgacgttgatctcgcacataagcttctttgttacccaatcaagggcagccacatgacctcggcgccctccaaaagccaggtgtctgttggaggtgaggggcaggcagggtgttaaggcagg

SEQ ID NO: 283400 - DNA, 122 bp, Homo sapiens
agattctcctttagtttgaggcagtaattctccagctgccaggatgatattggctgctatcgtcccactccctgtccctgaacttgcttttcttctcttatctgaaatgccacatctgccca

SEQ ID NO: 283401 - DNA, 122 bp, Homo sapiens
ctgcgacctcttactctgtgccttgttccccagactgagcgggacgtgagcgtgcggcagcgggccgtggacctcctctacgccatgtgcgaccgcagcaacgccccacagatcgtggccga

SEQ ID NO: 283402 - DNA, 122 bp, Homo sapiens
cgcgcatcttcccaggctgagccgggaggctgcgttgactgcagataaacggtctcagggcgcggcaccgcgtgtagtcggccccgcctttcgcacgaacccgctgggcgacaccgcgcagg

SEQ ID NO: 283403 - DNA, 122 bp, Homo sapiens
aagacaaattgcaaattagattatcacacatttcaattactccaaaagaggcaggattagcgaatcaaagacctgcatatccatactgcgtaatggcttagaagacgcaggaatggagctag

SEQ ID NO: 283404 - DNA, 122 bp, Homo sapiens
gagcggaattagcccggatgacatcagcttcccagccccccggcgggcccagctcattggcgaggcagcccctccaggacacgcacattgttccccgcccccgcccccgccaccgctgccgc

SEQ ID NO: 283405 - DNA, 122 bp, Homo sapiens
cctccctcccgactcaacccggccgttgcttctgtatatagagaaataagttattggccgcgcgcctcccttcagtccacggtactacccgggcctcccctcgtccctcttctagtggtacc

SEQ ID NO: 283406 - DNA, 122 bp, Homo sapiens
ctttctgtcagacaagccggctcccctctcaagtcatgctcacagctcagtgcagtcatgcgacttggcctctgcatcagaagaacacagcccacctttggctctgagctggccaaagtgct

SEQ ID NO: 283407 - DNA, 122 bp, Homo sapiens
ggaggagaaaaaaaggacattttaatcattcttttgtttctgttgattctgttgctgcatcgttgccactgaaactggtcctgctgcctggtaatggttggcctttgacatcaagatgcgct

SEQ ID NO: 283408 - DNA, 122 bp, Homo sapiens
ttaaggaggtcgtatataaggaaacctctgcctatggcctctccccactaaatgtgtcaccgtagcttcaccttaaaggaacttgagacctcaagaagaacacagtgtcctttagtcccttt

SEQ ID NO: 283409 - DNA, 122 bp, Homo sapiens
cagaggaagtgagatagaaagtgtgcacagcccagagagcctgcccacatcatcctggggcgaccaggacaaggaggcgtcagcaatcttgccaagcacaagtatgagtgactttctggagc

SEQ ID NO: 283410 - DNA, 122 bp, Homo sapiens
cacatgtaccctagaacttaaagtataataataattaaaaagaaaaaagaaaaagagaaacgagggtcttgctctattgcccaggttggactcctgggctgaagtgatccctctccttctca

SEQ ID NO: 283411 - DNA, 122 bp, Homo sapiens
ctttacttttaaatgcgtttatgtctgtcttccccactagaatgtaagctgtatgagaatcgagaccttacctgcctttttaaccactgtgaccccaatatctagaacagcagggtgtctag

SEQ ID NO: 283412 - DNA, 122 bp, Homo sapiens
tcaaaggaggaagggaaagagactcgatcttgtaggaggaaggacgagatgtgtgaaaatcgtttactgattttttattgatagaggccgtttttgcaatgctgactgcccaatcagcaagc

SEQ ID NO: 283413 - DNA, 122 bp, Homo sapiens
ccccgccttcgtccgggtacggaggggacactcccatctagcgcccagtgaggctaaagccgctgacagccccactaggaacgatctggagtctggtctagggcacttctccctccgcgttc

SEQ ID NO: 283414 - DNA, 122 bp, Homo sapiens
tcttggcattcccagcacagcctccaagggagtctgtcccagagctgaggcaggccctctcgggttgcatgccattgacttctcagctttgttttaactgcagagtttccagtgctctgctc

SEQ ID NO: 283415 - DNA, 122 bp, Homo sapiens
cattgacagatctcagggatttcagaaagctgtataaggaccagctcttcaggctcccttcgctccccaggagaccggggagccggcgcgaggcgctacagtgtaattcttggccccttttc

SEQ ID NO: 283416 - DNA, 122 bp, Homo sapiens
tagaactacttatcgaaggagggcatgtagtaggaggagtagctttggggcttgtttgagcggatgaccttgttttcaagtttgcagagaaaatttagggcatgtgatgtaaaccaactgat

SEQ ID NO: 283417 - DNA, 122 bp, Homo sapiens
cccgcgcagctccgccgcggtctctgccacgtggggctcacagtaggggagggagtgagacgtgaattagaattaaatgtccactggcaggaactgacacgaagaacaataaagccggcgat

SEQ ID NO: 283418 - DNA, 122 bp, Homo sapiens
tgcttggggtgggtgcagggcgggttggcgtcatctgtgggctgcaggcgcgggcgtggccgggcgataggccaagtgcggggacgccgggggggccttcacgggaggcccgggctcttccg

SEQ ID NO: 283419 - DNA, 122 bp, Homo sapiens
ttattacaccaccggagccttaaccttgaggcaagcagcaatttgttcatgcgcagttaacgctccctaaactgccacttgctcagctccgcgcctaaggtgtctattagtacgcctgcgct

SEQ ID NO: 283420 - DNA, 122 bp, Homo sapiens
caagtatatagcatataggattatgtgtgggcacatgtattggcacatcacaggtgggctcgtgtgtatatagcatgtatgatattgtgtggtcgtgtatatagcatataggattatgtgtg

SEQ ID NO: 283421 - DNA, 122 bp, Homo sapiens
gtcacggttgaaaacatttccggtgcagtggctgactgtaatcccagcactttgggaggccgaggctggaagatcacttgaagccagaagccaagagttcaagacctgcctgggcaacacgg

SEQ ID NO: 283422 - DNA, 122 bp, Homo sapiens
gcttctctcgctggttctgtgccgctgctcctcccgatgcttgggggaccgcagggaggccgaatgacaaccggggagcctcggggccgcgcctgaggcccagagtctgggctgtgcagagc

SEQ ID NO: 283423 - DNA, 122 bp, Homo sapiens
cgctgccgtcgccgccgccgccgcagccgcctcccccgggctccccgtcctcctcgccgccgctgcccaccgcctcgtccaggttgtgcagctgagcgaagcccacccccacgccaccgcca

SEQ ID NO: 283424 - DNA, 122 bp, Homo sapiens
tctagctttccccggtttgctgcacttgacgctgcagggcgggcggggtaaagaagggagcgagcccttctcaagcttggaaagtttccagactgctgggccagcctcctccccagagggaa

SEQ ID NO: 283425 - DNA, 122 bp, Homo sapiens
ggatataaggtcggtgtagacttggtcgttcaagtgaggcggggtccacactcggtggcccggtgactgggttatcgagtggagccagggcagcccagagatgctggggtcccgcgagccta

SEQ ID NO: 283426 - DNA, 122 bp, Homo sapiens
ggaggctgaggttgcagagagccgagatcgcaccactgcactccagcctgggcgacaaagcgagactccgtgtcggcaaaaaatttaaaaagtttgaggaatgtaacatatacataagagac

SEQ ID NO: 283427 - DNA, 122 bp, Homo sapiens
gccgccgggcaggggtcctcggcgggggtctctgggaggcttgctttattgttctgcagccggagcgagcggcagtggcgacggcggcggcggcggcggcggcggcggcgggcggggggcgg

SEQ ID NO: 283428 - DNA, 122 bp, Homo sapiens
gacaggcaaagggatgcacatatggagagctgcgtggatggctgcttgggttttaccttgcgtaggttgccctggcaccgaagtccccggataccaaccagggcgggtgccccagcttccgg

SEQ ID NO: 283429 - DNA, 122 bp, Homo sapiens
cgccaagcccagccctggggagggggacccttggaggaggccctgaccttgcaaaggatgcggctgtggggcgtcccctccccaggcctgtttgcccacgtctcactcaagggcctggaaca

SEQ ID NO: 283430 - DNA, 122 bp, Homo sapiens
gacctacttctgcagaaagcacttgaattgcacgtggaatctgctctttttaagtttgaccgagtcatctgtgctccgtgagccaccgtggtggtctggcgctgttgctcagctctcggagg

SEQ ID NO: 283431 - DNA, 122 bp, Homo sapiens
agcagcaatacggggcggggtgcagctccgctttccccagagtgcgcaagtgcgctaaggcgcccgcccacgcagtgggcgggctacgggagctgcagaggccgccgccggctcgcctggac

SEQ ID NO: 283432 - DNA, 122 bp, Homo sapiens
ccccttctgctgcctacagcctggacaggacccggaatcaaaccgcaggccctgggtcaccgctgccggaaagagccagttcctgtccgtccatgcacccaccaccaaaacccaggccttcc

SEQ ID NO: 283433 - DNA, 122 bp, Homo sapiens
tcagtgatggcaagggtgtcctttccagatcactgttaatgatttgcctgtgggacgctccgtggatgaggctctgcggctggtccaggccttccagtacgcagaagagcacgcggaagttt

SEQ ID NO: 283434 - DNA, 122 bp, Homo sapiens
aagccctggaaactcatgtgaccctgccaatgagggcggccatgtgcattgcagcctggccgtcactcctcggtacgtgttttggacttaaacgctccggatgtttactgagtgcttgatta

SEQ ID NO: 283435 - DNA, 122 bp, Homo sapiens
gtgctagtccacgtgagccacccaaatgatgaaaacagacacagctaacaggagggctcccgctcctctaaggctgtaacgcacatgatctcactccatcctcacaaccacctgtaagcaga

SEQ ID NO: 283436 - DNA, 122 bp, Homo sapiens
tgcggcaggaaggcgtgaccgaatacgaagatggcggggccccggcgggagatggcgaggcgggcccccaacaggcgggtaggagccccgctccccaggccctgagctgggccctgtgcggg

SEQ ID NO: 283437 - DNA, 122 bp, Homo sapiens
tgactgcgcctctgctttctttccataaccttttctttcggactcgaatcacggctgctgcgaagggtctagttccggacactaggtgagcactctgtgccccaggccataagcgaggcggc

SEQ ID NO: 283438 - DNA, 122 bp, Homo sapiens
gttcttacaacaaatcgctgcgcaatagcggggcatgactcgggtgaggcccctggagaccggggccggcgacggatgcagggcggccctcctcactgaggatgcgccacaggtccaggcct

SEQ ID NO: 283439 - DNA, 122 bp, Homo sapiens
ggagcgatcgtccgccatggccaattataattgctctgagtggacatcagacgtgcccaacgggctttggattgggtgttcgggggacggggcgtgacgagaagtgccaggtgtacagaaag

SEQ ID NO: 283440 - DNA, 122 bp, Homo sapiens
ggagccccgcaactgcatttctcaaagcctcaggaggatcctcctggctttcatcctgaacgcgagttaacttaagttcagaagcggggcaggcagtggcctgggaactacattacccaaaa

SEQ ID NO: 283441 - DNA, 122 bp, Homo sapiens
ttcctgcctccagaactgagaacacacatctgttgttcaagtacccagtttgtggtcgttcgctgtggcagccctagcaggctaagatgtggggtggggggcccttcctgctgggcaaaggc

SEQ ID NO: 283442 - DNA, 122 bp, Homo sapiens
tataaaaataacattggtacgtctgtgagagggtgtgttccgggtagaggtggagagctacgctgaagaggacgcctcctgcctgctgcggctatgtcatcgcctgaggcctcgtcccatct

SEQ ID NO: 283443 - DNA, 122 bp, Homo sapiens
ggagaatgttaaagcccaaaggaaatttcagacttaaagtgtctgtgatgaaagggacctcgagggtcatctgcccaatgcgtttatggatgaggacactgaattgcagcagcgtgaagtgg

SEQ ID NO: 283444 - DNA, 122 bp, Homo sapiens
tgggtcgtgcacttgtggcttcccgtgcgtgtgtgaggcttgctgtgcccaaccccagcccgtgtggagcccacgccccatgcacccttgtccctgcccggcctggcctcgtgtggtggcgc

SEQ ID NO: 283445 - DNA, 122 bp, Homo sapiens
cctcctggggattggcccaggcctgcacggcctgagctgcagactgcctggagcagcttccgccgatggccgggacacggcctgcccctccccacagcggcgcttctgtccacagcagccgc

SEQ ID NO: 283446 - DNA, 122 bp, Homo sapiens
ttggggctcccgggcgaggccggccaggcgggatacctcaggagcccatggcggtggcggcgtctgcggacgatgcgcggcagccggactctgcgggcggggcgggcggcgccgcagccccg

SEQ ID NO: 283447 - DNA, 122 bp, Homo sapiens
tgatctgaatagcattttcttaatgccatgcatcatttttccagtgaatctttaacttatcgcagggagggggcagaagatgagaggaggaaggggcagaaagacaaggggctaagggagca

SEQ ID NO: 283448 - DNA, 122 bp, Homo sapiens
ttttcctccttagatgcctagaaatgggggttatgccttgggggatgaatgagagaaattcgtaattaatgaattcaacaaaggctgtctgagtgctgcctcagagttgaaaaccagtcacc

SEQ ID NO: 283449 - DNA, 122 bp, Homo sapiens
gaacacagcctgttcactggggcctgcagaccaccatgccccacctgctggaggctgctgcgttctcactctggtctgggccaggcagtgaggttctgtgcgggccgccggtggccaactgg

SEQ ID NO: 283450 - DNA, 122 bp, Homo sapiens
ttaaataatcgagggcagtaaataaaataaggtgaagaagaaagttgagagtttatcaaacgtggggaatggggagctaattcactaagatctcatgaaaatgtaccttaaatgtttttggc

SEQ ID NO: 283451 - DNA, 122 bp, Homo sapiens
gattctccataaagatagtctggtggctcttcattaatccccttctgggagcactgaggtcgtgtaactaggaaattgcttatgattaagggcccttcatttaaatcttgctgacctcacac

SEQ ID NO: 283452 - DNA, 122 bp, Homo sapiens
actgactgaaaagctgaaatctggtgagctgagggggaggagaaggtcaagtctggctgtcggtctacagaggtcaaggacctggcacagagcagggcctgctgcctctgccaccaacagcc

SEQ ID NO: 283453 - DNA, 122 bp, Homo sapiens
ggcagaactacacacggctcttcagcggcctgcgcaccacctccaccaagactggagaggcggtcaagaacatccaggccaccctgggggcctcctcacagcgcatcagccagaactcagag

SEQ ID NO: 283454 - DNA, 122 bp, Homo sapiens
ttacgtgtagaaaactgaggcccaagataagattagaatatcaagagtcaagatgtccctcgaaagccccagtccttcccttcttaccacggtcacatgggaagtttgctgtgcttagtaca

SEQ ID NO: 283455 - DNA, 122 bp, Homo sapiens
cggggggcggctacggagactggcagccgccaccgccaccgatgcccccgccacccgggccggccctcagctatcagaagcagcagcagtacaaacaccagatgctccaccaccaacgagac

SEQ ID NO: 283456 - DNA, 122 bp, Homo sapiens
catatgctgttttctttgtcactaattttcatcatagctcaagaatagatccagaaacaacgtttattggaatagaatgaaactagcatttattggactcattaactaaggactgcagtagg

SEQ ID NO: 283457 - DNA, 122 bp, Homo sapiens
gacgggccgttgtggttcgaggtctcagacagcaagggtggcaggcggaacctgcagccccggccctctgccttcaagcccctgagcaaaaatggagcggttgcttccttcgtgcccaggcc

SEQ ID NO: 283458 - DNA, 122 bp, Homo sapiens
atgggcacaggctcgcacctgccaccgcagacgccacacaggctgctgagcctttccaagcgaaatgccccacgtgcgccaacggccacctcggccgtcgccccacgcttggcccgcagcca

SEQ ID NO: 283459 - DNA, 122 bp, Homo sapiens
acgtctgtggtgacgtctcgtattgatttagggacacggggcggctgtggctgtggcccacggctcgtggggagcccgagtctgtgcgcagggaacgccgctgcgtggcctctctcgggcct

SEQ ID NO: 283460 - DNA, 122 bp, Homo sapiens
tcttaagccggactgggacccccaatagccccgcgacccccgtcccctcccccaatgccgcgtccacgaacctacaagcccgctgcagccgcaaaagacccagttgtccccgccctctccta

SEQ ID NO: 283461 - DNA, 122 bp, Homo sapiens
tgttggtctgtcctgagtcccaagctggtggcagacggcccacatggcctggccgtgcaccgtggctgccccacgcacaccctgatgagctcgctgtgtgtcccgctgcctgtgcaatccta

SEQ ID NO: 283462 - DNA, 122 bp, Homo sapiens
ttgaattgattattgatcagattatgagaaagaaactcaagctggagcttgtggaccccccgagggagagccaccgaatctaggaagattcttctttgcgacataagagaaagaacgggaaa

SEQ ID NO: 283463 - DNA, 122 bp, Homo sapiens
gggcgatctatgggcaagagcaagggccacgatgacagattacggcgaggagcagcgcaacgagctggaggccctggagtccatctaccctgactccttcacaggtgactcccgcggccgca

SEQ ID NO: 283464 - DNA, 122 bp, Homo sapiens
ggttgctctttttccagcagccttcaggggactcctggctgggcggagtctgtagaggcgcgcggagtcctgggagagcgtcagatgtatttcctttcccttttttcgctcgtgtcccgccg

SEQ ID NO: 283465 - DNA, 122 bp, Homo sapiens
aggagcaaagaggaggcctgagaggccgccaggcgaggaggtctcacagagcccagggcacggccacttcagagccttttggccttgctcctctcaaacgccctgggacttggggtggaggt

SEQ ID NO: 283466 - DNA, 122 bp, Homo sapiens
ccctccggccccgagcggtctctcagtgacaacacatcacagcacactaatgagcgctggcgcccaggcctgcaattagcctttcccgagttcagagggctgcttggctctgggcctgcaga

SEQ ID NO: 283467 - DNA, 122 bp, Homo sapiens
aggggcaagggcagggggttggaattgcattgatcccagcgtcttcatcaggaggatgggcggagcacccaccgcagagggttattgagaaagttaatgagatcattaagctaaatgcgtag

SEQ ID NO: 283468 - DNA, 122 bp, Homo sapiens
cctcatctcaaggtgctagaagttcccttcctttttcttgattctgtcattcttcctgaccgacggggaagaaaagtcacctcgttgtgataaaagaacctgaattttgctggttagagaca

SEQ ID NO: 283469 - DNA, 122 bp, Homo sapiens
gtggttctgagaaagcccatcttccctttcggagaaaccgcgatgccatagggcggaccccgcctccctgtccccgcgccctgggctgcactccctagggccccggactgcattttcccagg

SEQ ID NO: 283470 - DNA, 122 bp, Homo sapiens
gctgtgcactcaggaaagtggccacggtttaggacgacctcgacacgaccctgtataggacgcaactaactccagagaaaacgagcgagccccatgcaactcttcattcctgcagggagaac

SEQ ID NO: 283471 - DNA, 122 bp, Homo sapiens
cgaattcctgagctcaggctactggccttccttggcctcccaaagttgtgggattacaggcgtgagccacagtgcccagccaggagctacattttctagattttttgttcacatcctctaac

SEQ ID NO: 283472 - DNA, 122 bp, Homo sapiens
cgtaagtaacatgttttgaaatatgtatacattgtggaatggctaaatccagctagttaacgttacctaacatactgatcatttcgggggtgaggacacttaaaatctattatcttagcatt

SEQ ID NO: 283473 - DNA, 122 bp, Homo sapiens
accggcgttcccagagcggggcggacggggcggtgccattggccggtgcggagtgaggggcgtgctcggggcgggacggagagaccggggcggcacctttggccgtgccgggcgagaggcgg

SEQ ID NO: 283474 - DNA, 122 bp, Homo sapiens
actggcttcaggagtgaaggtgcagaccttcgcggtgagtgttacagctcataaaggcggcgcacacccagagagtgagcagcagcaagatttattgcaaacagttaaagaacaaagcttcc

SEQ ID NO: 283475 - DNA, 122 bp, Homo sapiens
tccagagtccctcttaaccgtgacgctctacactagcaaaccagatatagtctctgcacccgctggaactcagcctaatgtgggagacgggcgagaaaaaggcagacaacaaagaaatacga

SEQ ID NO: 283476 - DNA, 122 bp, Homo sapiens
gtgagaagacaccttcaggcgtggcctcgggcaggtgagaagacacctgaggcgtggcctcgggcaggtgagaagacacctgaggcgtggccgcgggcaggtgagaagacaccttcaggcgt

SEQ ID NO: 283477 - DNA, 122 bp, Homo sapiens
caacaggaaagagtgtctgcacagagggtggggacagctgggcgacacttccctgaggggcgggggggtggggtgtacttgtactcaaccagtcttgaccagcctacccagaacctcttagt

SEQ ID NO: 283478 - DNA, 122 bp, Homo sapiens
cacccctccgaggggtgagcggaaggcacactggcaccgcgtggggatggagctcattgccggcttctaaggagccttttccaccagcaagcggagcctggatggagctcatcgggcagagc

SEQ ID NO: 283479 - DNA, 122 bp, Homo sapiens
ggacagttggggctttttcctgcacagagattggccacttcctgcacatcaggagatccccgcggcctgcgggacccgccccgccctcctgcccaggcgcccgctaggtggtgcctggctgg

SEQ ID NO: 283480 - DNA, 122 bp, Homo sapiens
gctggatttataatcgccctataaagctccagaggcggtcaggcacctgcagaggagccccgccgctccgccgactagctgcccccgcgagcaacggcctcgtgatttccccgccgatccgg

SEQ ID NO: 283481 - DNA, 122 bp, Homo sapiens
aagcctagctcatgtgccatgctaggcactcaataaataattgctgaatggatgcatacacgtatgcttgcatgccagccattcaagctgagcacctggcagtgtgcagttacactccagga

SEQ ID NO: 283482 - DNA, 122 bp, Homo sapiens
attaccgtaagtgaggatgtagaggggcttcccgttggtgtccatggtggtcaggcagggcgccttgggcgagatggtgccccacctctgcagtgcggcctccagcgacggcggccagttcg

SEQ ID NO: 283483 - DNA, 122 bp, Homo sapiens
aaaaaaaaaaaaaaaaaaaccctccaaaagaagttgccacaaaattttcaactgaaaacacgtgtttattatctcttgttttctttggatcagaagtctgggcacagcttagctgggatctc

SEQ ID NO: 283484 - DNA, 122 bp, Homo sapiens
cgccctcctggcccagcccagggccctgcgagctattttgaaagtgaccctgggctggggcgccggggcgagcgcggcggcgcggaaccatgacagaagatgaccgaggcggcgctggtgga

SEQ ID NO: 283485 - DNA, 122 bp, Homo sapiens
taactgtcgttactcctctgtatctcgtcagcaggggctgcctgcggtgttagaattacacgcccctgccacctgggcacggagcccagtctcccggcccctcagtcagtccttgggtgtag

SEQ ID NO: 283486 - DNA, 122 bp, Homo sapiens
gcttaattgactcttctgtcatacaaataatcagctgaaggaaatggcatttaagagcatcgaacaataataaatgtttgattaaataaaaaccgtgacaagagagtagggaggagaaggtc

SEQ ID NO: 283487 - DNA, 122 bp, Homo sapiens
ggcccccagaaaaacgtggggaggagagttttccccataagacagactgtccttcagccccggccaccaaagaggagtaacccgggcctgctgttctctgggactgaatgcggctgcatcct

SEQ ID NO: 283488 - DNA, 122 bp, Homo sapiens
gtggcgggaagcggcggccgggcaggcgctggacgtgggctaggcgccaggtgcaggtggcggcggctgcgactccggttgctgtcgccacagttgcggctcagtagagctcctcctccgcc

SEQ ID NO: 283489 - DNA, 122 bp, Homo sapiens
ttagcccggccccccggcccggaggccacgtggctttgtttatgggctcggcttgttttccgaggcgcctgcggctcacgctcccctcccggttgcacaaccgcgccggtggaaacttgaag

SEQ ID NO: 283490 - DNA, 122 bp, Homo sapiens
ataatgtcaaggatggaaccaatatatgaaatgtgggttgttttggaagatcttaatgagcgttgaaaatagtagcatattttcagtagcaaagatttggagatgctggcttcttacagcca

SEQ ID NO: 283491 - DNA, 122 bp, Homo sapiens
tgggagctcgcgcgtccagccccgcgccaatggtggcaagggcggcccaggctggcgctgcggctccccaagccttattggcttgcggctgttcagccagccctctggctgccagggtgtgc

SEQ ID NO: 283492 - DNA, 122 bp, Homo sapiens
ttcatcgtcctccttttcttggcttctcattcctgcatattccctacagagactctacagcgaatccattctgaccaccatggtacaggtggctgggaaagttcaggaagtgctgaaggtac

SEQ ID NO: 283493 - DNA, 122 bp, Homo sapiens
agtggaactgcagcgtttcctcgaaagccattccgtccaggagttaaggtggccgctgcccgcccgggacactttctcagtccagcccatcggcctttaccccagccaacgacctgttgcct

SEQ ID NO: 283494 - DNA, 122 bp, Homo sapiens
gccgcgcccggacaaaacacaaacgtcacagaggcagcggcggccaatcagtggagggcgcgcgcggccgcgtgcccctcgcgctcctcgcctcccctcgcgcgccgcgtacgtgcagcaac

SEQ ID NO: 283495 - DNA, 122 bp, Homo sapiens
cgccaggcaggttcactgagctcaccaagagctgctcccctaactgcatgctttgcaaagcgcagacggcagctggctgcttcctctcctccggtggccttattataaaggcaggatggggg

SEQ ID NO: 283496 - DNA, 122 bp, Homo sapiens
gctcacttccggaccgcggatagcactggcgaccctagcgggtgagaggcccttcagggccgcggcgggtgagagcctcttcagggccgcagcgggtggcgggcgaagtggtaaacgggcgc

SEQ ID NO: 283497 - DNA, 122 bp, Homo sapiens
agggtcactttcttagtggccaaagagcagttgttgacattgatgtctaattattgaacacgaccagtcattttactgagctgcggtgaggaaacactgaccatagaagatcaagccaaatg

SEQ ID NO: 283498 - DNA, 122 bp, Homo sapiens
cgcccagcagcaccagtgggatgggctcctctcctaccaggtgtgtggtgcatccaggaccgcctcaggagggatgggcggttggaggaggcctgcctctgccaccctagacaggcctggga

SEQ ID NO: 283499 - DNA, 122 bp, Homo sapiens
aaccggccccgggggaggcgtggaaacgcggggcctgggactcgaccagcctctcccgtgcggatcgcaaaatctcggagctgaaacagcccgttgttcgcagcctccctctgacccgccac

SEQ ID NO: 283500 - DNA, 122 bp, Homo sapiens
actagtcacaaaggtatcacaggtatgacttacacctaacgggggccaaaagatgggttgcgaaacgaatgactgaattatccctaacaatcttgggaagaaaacaggattggccaggccca

SEQ ID NO: 283501 - DNA, 122 bp, Homo sapiens
ccaaaatttgctgcaaaacgaaggtggacttgcagcaaaccaaaacctagcaccatgcttcgagaggcagttatggccacctctgataaactgatgctggagcccccgtctgcatatcccat

SEQ ID NO: 283502 - DNA, 122 bp, Homo sapiens
gcctccactgtgtgtgaccaggacagacggcgcctccactgtgtgtgtgaccaggacagacgatgcctccactgcgtgagaccaggacagacgatgcctccattgtgtgtatgaccaggaca

SEQ ID NO: 283503 - DNA, 122 bp, Homo sapiens
ctgggactacgaacttcttctcctaggctggcgtgaggaggggaattcaaccatcgcaagcgttagcgcgaagcggggcctcctgacttcttcccttcgcggggcaggctggggcatgtagt

SEQ ID NO: 283504 - DNA, 122 bp, Homo sapiens
tccagtcggcctttgcaggcccggcctcctgcctctcgaaggtctgcatgggcccggcctcggcctcacagcggactctccacgcccagctagctctcgcctcactgcaccctccccagtcc

SEQ ID NO: 283505 - DNA, 122 bp, Homo sapiens
gcaccccagaggcagaagactgtcatccatggtacaggactgcggcgaacaagctgactgcgcagtcacgtggggctgacggtgggtcatgtgaccaggctctgcattaggcctgccgagag

SEQ ID NO: 283506 - DNA, 122 bp, Homo sapiens
cggcccggcgacgggggatcctgaggcccggtcagtctcttgctctggggtcttgggtggcgggcggcacctccgcttgcagtgccggagccgcggccccgctcggaaaagggctgccgtcg

SEQ ID NO: 283507 - DNA, 122 bp, Homo sapiens
gctcccagtgaccaaggctgaaataccgtgaatgaaccgaatccgcagagcactgggtcacggccgtgaagtaaaacagagaaggaagcaactgacacaaataacctactcgacgaggggca

SEQ ID NO: 283508 - DNA, 122 bp, Homo sapiens
cgcggaaggtacctggctccccggtggctgcagctccgggctcctcctcctgcgtcctcgcgtcgcgtactgcttgctgggattcgtagtctcgccttggccatcagttcgcccttcccaga

SEQ ID NO: 283509 - DNA, 122 bp, Homo sapiens
taaggctttgaagctgggtaatttgctactcttgcatgtcttcacattgacccacgggcacgggcatgtttccacttagttttagtctacgtgaggaaggggagggtgcacatcactagctg

SEQ ID NO: 283510 - DNA, 122 bp, Homo sapiens
ggccttctgggcagcaagggccctggcaggaccctgagggctgggccaaggagggcagttcgctccggggcacctgtcaggggccccacacggctgcttttaggccaggggtggcaaagacg

SEQ ID NO: 283511 - DNA, 122 bp, Homo sapiens
ggaggttttgtgacattgggcggcccagtcctgggggtggtgtgtgctagtggtggagggcggcctcctagaggagccgtcagccttccagggaaggcacctggccggtcggggagactccc

SEQ ID NO: 283512 - DNA, 122 bp, Homo sapiens
ttaaagtttttcttaaactttaatgacctgggaaatgaagccccgaaatgaaccctgctgcggtggtggcaccaaatcctaaaccctagatcatcagggtccagcatcctcttagacttgac

SEQ ID NO: 283513 - DNA, 122 bp, Homo sapiens
cactgatggacctttaaatatgcccttagaatccacgtgttggtggaaggtacaggtcctcgagatgttcttgtgtcccttagaatccacgtgttggtggaaggtacaggtcgtcgagatgt

SEQ ID NO: 283514 - DNA, 122 bp, Homo sapiens
atattgcattgtgaggtgtcagggtcacaaaaagcatcagaaagaaaatgaaaatgtgtccggcctcgtggcgcagggcttgcaggctcacttcccccggctcaggattcctagcaagggcc

SEQ ID NO: 283515 - DNA, 122 bp, Homo sapiens
actcccgggagatctttggtttcaggaagggtggcttggggtgctcctcagtagtgaacacgcacaggaggccccggagagcggtgggacgcacctcctgattgagcgggtgagagcgaggc

SEQ ID NO: 283516 - DNA, 122 bp, Homo sapiens
ttctgagtggagtagtgaatgcatttcattttaagaatttaggttattagtgcatagctgcgaagcatttttgaagcatttcatgtacactaaaaaacgggcccctgcatcctaatgcaaat

SEQ ID NO: 283517 - DNA, 122 bp, Homo sapiens
gagggtggctgagggaactggtcagggctgggaacgcctccagccctttgaggaatgattcgctgattaagagatgtttggccttgaaaattgcaagaatgaaatctcttggtgggaatgtg

SEQ ID NO: 283518 - DNA, 122 bp, Homo sapiens
ggccggccgggccgcgcttcccgctgccccgccggccgggctttgctcccgccacgctcacgtagctctggtggggaaggactctcctgggctggaccgcattcctgtgagtccggccacgc

SEQ ID NO: 283519 - DNA, 122 bp, Homo sapiens
ctagatcctcagccacttctgatgggaatgtaaactggctcagccactctggaaaaatagcgtggcagtttcataaaaaactaaacattcacttaccatacaacctagctatcatactcctg

SEQ ID NO: 283520 - DNA, 122 bp, Homo sapiens
cttcgagcctcccgcagggctgcctgcctctgagggtgcccggcttccctccctcccagccgcccgctgggctccttctgctccgtcagggagcactaccggctatggctcccagggggcgc

SEQ ID NO: 283521 - DNA, 122 bp, Homo sapiens
gaattaaactacctaatgcataaagtaaaatttgctaaagtttattgaccatttactctacgctaggttttagatgtgcctttatattcattatataagttaattccagccttaggagatag

SEQ ID NO: 283522 - DNA, 122 bp, Homo sapiens
ttcgcgacggtcgccaggggcgcctcccggcgcggcggggcgggtgcagtcacgacgccgcgactccccgcaccccggctgggccccccgactcccaggatctgggatcgattccaggagtc

SEQ ID NO: 283523 - DNA, 122 bp, Homo sapiens
ccaaagaagaggagggctggcaatactaatatcagaaaaattacttgtccaggccgggcacggtagctcacacctgtaatcctagcactttgggaggccgaggcgggtgcatcacctgaggt

SEQ ID NO: 283524 - DNA, 122 bp, Homo sapiens
catcatgttgaaactccgtctctactaaaactacaaacaatagctgggcatggtggtgcgcgcctgtaatcccagctatttgggaggctgaggcaggagaatcacttgaacctgggaggcag

SEQ ID NO: 283525 - DNA, 122 bp, Homo sapiens
taaccatggtgatgcttcttcccagcaaccttcttcacagctggcctttttggttctcatcgaattttgctccattcactggttcaggttgctaacaatgctgtaaaaattaacttatttat

SEQ ID NO: 283526 - DNA, 122 bp, Homo sapiens
gatggttcttgttcagaccaagcactagttctgcccgttggcatccgcactggtcaaggccggtctattagggtggctgatccgcttaccgcaccactctacctccacccccaaacagaggc

SEQ ID NO: 283527 - DNA, 122 bp, Homo sapiens
cccggtgggccgagtgcacagactgctgcgcaaagggaactacgcggagcgagtgggcgccggggcgccggtgtacctggcggcggtgttggagtaccttacggcggagatcctggagctgg

SEQ ID NO: 283528 - DNA, 122 bp, Homo sapiens
tccagctgcaaggcccctttttcaggggagctcctgaaaccaggagcaaacatgcccctgcgccgccctctgtgctccccggctatgggggggccacttacccggcttagccttgcattgct

SEQ ID NO: 283529 - DNA, 122 bp, Homo sapiens
tcagcgaattttaccctcgagactctgcaaagcattagctgctgcttctgcattgctccgcgctcttgtgaaatactggttctgttttctttattccttttgcactctcggttcccaccttt

SEQ ID NO: 283530 - DNA, 122 bp, Homo sapiens
ggaactgccaggaagggcagcaattctgactggggagctgggaaggtgtcactgcagagacgcgtgtgctgagcctgaaaggaggctcccattcctgcaggcagcagagctggggaagagca

SEQ ID NO: 283531 - DNA, 122 bp, Homo sapiens
cctctcagcaccgcggcggctgaacgcatgaaccttgtgggtcaggatgagatctggtaacgcctgggatcgggcaacgcggtgggctcctgttctcacctgaagtgtccacatctggggtc

SEQ ID NO: 283532 - DNA, 122 bp, Homo sapiens
ctggctgcaacctccgtcccgcagtccaattagcagccgcgacccggcgcccgcccacgccgcgtcacgagtcagccaaagatggctgcgcccaggtaatttgagcaaaggccacagtgaac

SEQ ID NO: 283533 - DNA, 122 bp, Homo sapiens
gtgagacaccagctgacgcccggagcctcacaacctctgcacacacattctcctgagggccggtgcctggaaacaaaggccacccccgccggccggaaacttctaggctggcaatggagatg

SEQ ID NO: 283534 - DNA, 122 bp, Homo sapiens
tcgaaggtgatgaagatgggtctgcgggtgagctccagcagccggcacaggccctccctgcggggcgggaccgtcaggggggtgggtgctacgctggggcccacccaaccccgcgcgggacc

SEQ ID NO: 283535 - DNA, 122 bp, Homo sapiens
cctgggctcaaacaatccatccacttaggcctcccaaagtgcatgagtcaccatgcctggcgaaatgtatttcttaaataatgagacttgaaagtctaaattactccttaaaccatggacta

SEQ ID NO: 283536 - DNA, 122 bp, Homo sapiens
gacagcgcccgctcgctccgcgcagggagggcagggctgcggggtcgctcggcaggagctcgggtcagggccctgaggttgagttcaagtgatttctgcacaggactcgcccttcgggacgg

SEQ ID NO: 283537 - DNA, 122 bp, Homo sapiens
atggtgaggaagggtgacacaatagccaggtggcagtcttaacttctagttcaagggaatcgttgtgtctgctggtggaaatgtagttcttttggaactaagccctccaggccagcaaccat

SEQ ID NO: 283538 - DNA, 122 bp, Homo sapiens
ggggtgttagacctggtattatgtctaaagacgattttcatttaaaggaggatcttcccccgggcagctcaaggtcacatcgtaaataccttatagtctaattcagtgtcccaaaacaggac

SEQ ID NO: 283539 - DNA, 122 bp, Homo sapiens
tttgcaaatcaatatgatgccataaaaacggggaaccggttctgggcagagaggtgctgtcgaaggatgattcaaagccttcccaaagcggagagtggggagttctgaggtcccttcaaaac

SEQ ID NO: 283540 - DNA, 122 bp, Homo sapiens
ctgcagccgcacccgggcctttgggtggtgagagctgggcctgggttcgacgcccgcgggcgcagggagaccggctcccctttgctgtgtgaaagtttagttctttgtagccagccgccctc

SEQ ID NO: 283541 - DNA, 122 bp, Homo sapiens
ggcggatctggacgtggtgagccggaccgggggcaggtggcaaacttcacggctgggggtcggggctcctgggcttccctgccacatccttccagccctctcctccggccgctggactgtcc

SEQ ID NO: 283542 - DNA, 122 bp, Homo sapiens
aatatcacagaagttgtgtacacttcctgcgatactgggagtaatagcattctcttcttccgtgaatattaggagcaatatcaccgggtggatgtacacccactgctatactgggagtaacg

SEQ ID NO: 283543 - DNA, 122 bp, Homo sapiens
gtgagaaccctaccgttccacgtgggaaccctaccgtccacgtgggaaccctactgtccacgtgggaaccctaccatccacgtgagaaccctaccgtccatgtgggaaccctaccgtccacg

SEQ ID NO: 283544 - DNA, 122 bp, Homo sapiens
gagaggctgatatcactccccacatcgcgagggaggggatgtacaccgcccgccgccacgcgaggtggttcgtaatatccagtgggggagagggtgatatcacacccacatcgcggggggtg

SEQ ID NO: 283545 - DNA, 122 bp, Homo sapiens
gctccggccagggcgcagaggccatttatgagcctgggggcagcgaggcggggcggccctcggcccaggttcctgcagagggcgcgagagaagcgttgggcgatgggcttggagcgggatgc

SEQ ID NO: 283546 - DNA, 122 bp, Homo sapiens
tccccctgtaaataatccacccgccgcctggggctggtgctgtgagctctgcttgccttccgagacaagttagaaggcaaacacaacttgccagtgtggaaatgagaaagggaaggagagtt

SEQ ID NO: 283547 - DNA, 122 bp, Homo sapiens
cagggcctttaggggaaattggctacagagatcagctatactaaaaggttcaggtccctccgctctctgctctgaggggctgattttccttctgacttttccttcctgtctctctggcttta

SEQ ID NO: 283548 - DNA, 122 bp, Homo sapiens
tgcctccccacaggggccttgggcacgctgtgtggacgctgcctgtgcgtgcttcctgagcgaccccatcagtaaagcgtcgccaccatgcaatgctgctggcagtccttgtactgagacaa

SEQ ID NO: 283549 - DNA, 122 bp, Homo sapiens
tggcccacaagcgctgcatgcagccccggttctgcccgtgcctctccctccacacctccccgcaagccaagggagccggctccggactcagccagcccagagaagggctcccacggtgcagc

SEQ ID NO: 283550 - DNA, 122 bp, Homo sapiens
aaaggattctttgtttatcacaacagatgttgaacgctttaaagagatgggcatcaccgccgaagcacctgtgtacattttcaaaatgtcctttgcaatgatctctcacactgcagtcccag

SEQ ID NO: 283551 - DNA, 122 bp, Homo sapiens
cttgcgggttgagaactgcgtctgcttagttacttcaggcttgtctgcttccctagtggtcgcgaggcgctcgtccccttccctcgactcagttgccacttttccggaggtcgcagtgttaa

SEQ ID NO: 283552 - DNA, 122 bp, Homo sapiens
gtggataaataaaaccattatttccaaatacatatcccaggcagcactaaatgcattctccgtatcacaggcgatactaaatttagaactggcagtttgagtcatatgctgattcctaaaga

SEQ ID NO: 283553 - DNA, 122 bp, Homo sapiens
agccgggcgccggcgagaaggcggcgccgctgccctggcagctggactgcactttgcccccgcccggcctcagctgccgcccgcccagacgccagcaagcccccctcccacgacagggctgc

SEQ ID NO: 283554 - DNA, 122 bp, Homo sapiens
ccccgatgcaacaggtttacattgaaggcctgccctgtgcagggtcgacacctgtgagagcggaaacggtgcttccttggatgtcgcgcgtttggtgcctcggtatttggcgcctctctcgc

SEQ ID NO: 283555 - DNA, 122 bp, Homo sapiens
acaaagagggttgagccactacgagtgggagttaccttggactaacagttgtatcttcagcgagcacatgtcctggaatctcccacgcccatccctttttttagcgccacaaatgcagcctc

SEQ ID NO: 283556 - DNA, 122 bp, Homo sapiens
cgtgtgcagctccggggaagggatgcgggctgaaggcgcaagcttccctcccactccccccgcaagtcggcgcggggaccacccaccccctggaaggattcctagcctagccccagcaccct

SEQ ID NO: 283557 - DNA, 122 bp, Homo sapiens
gggggtggcaggaccaaagcctcctgggcacccaagtccaccatgaggatccagaggggacggcgggggtccagatggaggggacggcgggggtccagatggaggggacggcgggagtccag

SEQ ID NO: 283558 - DNA, 122 bp, Homo sapiens
gaaggcgctggagttaagcgaccactatgccaaggagcgagacccccggaatctggataccgcctcggccagctacgtgaggtggacactgctgctcgcggatccggcgccagccaggcggg

SEQ ID NO: 283559 - DNA, 122 bp, Homo sapiens
ctgcgtttcctgtgtaggcttttctttacatttgctctacttctgcctaagtcataatttcggaagtatcctagattcattcattgagttttttgttggagaaataacagtgtgcttacagt

SEQ ID NO: 283560 - DNA, 122 bp, Homo sapiens
cacttggcacttgaagaccttgaggcccaaggtggaagccagatcactctaaccactcctcgatgtggagaacatacttttattctccaaggtcatgaatctttttttttttttaatacagg

SEQ ID NO: 283561 - DNA, 122 bp, Homo sapiens
gaggatgtcgagaaaccggaactctcattcattgctgatgggaatgtaaattggtacagccgtttcggaaaacagttttttacagtttcttaaaaagtaaatttaccatataacccagtaat

SEQ ID NO: 283562 - DNA, 122 bp, Homo sapiens
tcagccctcaaggggcattttatatcttttgttaccagatgaagggcatctccttgtttacgaccttgaggtcagtacagacagaatatacatgcatctgtattcctgtgttttcatgtgcg

SEQ ID NO: 283563 - DNA, 122 bp, Homo sapiens
ggaggcaaggtttttaaaaccacaccaaaaaattattttaaacaagataaatgtgaaatacgtaaattgcccttacctgcataatttgagtgttttaacgctttttgggtaaaatttcattt

SEQ ID NO: 283564 - DNA, 122 bp, Homo sapiens
gggcaccctcctgtgggagaggcccgttccgaggcaaggggtactcgtggcggccgagggcgttgcgtcccggtgtgctggcttcccggggcaaagtggccaggtccctgctggggatcagg

SEQ ID NO: 283565 - DNA, 122 bp, Homo sapiens
gtttcatcactcaagcaggacacttatgcatgtcttgtagtatgagtcataatacatgtacgcttaccctaagagaccctcaaacactttggaagtaacaactctatatgactttctggatt

SEQ ID NO: 283566 - DNA, 122 bp, Homo sapiens
caggtggttgacatttttcacctgaaaaatctggggatttgtcattgtgtgggtgtcgtccgccctctgccatcccttttcactctctgactcatctccaagtctctctttctattcctagc

SEQ ID NO: 283567 - DNA, 122 bp, Homo sapiens
cagccggagcaaagccgactcgaggccctgatgcgctgggtgcgccatgacccgcaggcccgggccgcccacctgcccgagctgctcagcctagtgcacctggacgccgtgcccaggccctg

SEQ ID NO: 283568 - DNA, 122 bp, Homo sapiens
tcctcgctccgcagccgcggcccatggagcccgccggcccggcccccggccgcctcgggccgctgctctgcctgctgctcgccgcgtcctgcgcctggtcaggtaagcacccccccgctccc

SEQ ID NO: 283569 - DNA, 122 bp, Homo sapiens
gtgtgactcctgaatgtagaggagctacacctggacatttgattgtgcctgttggcagagcgttcataatcaaaagttgggttcgcatctgctacccgcagggcattaatggatctaggtta

SEQ ID NO: 283570 - DNA, 122 bp, Homo sapiens
ggctgaaagtgctcaaccactctttggaatgccacattgtatatgggaagttccataatgcgctactaataagtaaagtttctcttgctgggttgtaagtatctgggcaagtcacaggaaat

SEQ ID NO: 283571 - DNA, 122 bp, Homo sapiens
cgcccggctgcagcaggaggaaggctggtcggagaggaaagagcattggacaacgacacgcgactagggctagagagattggctacatcctggctctggctggtgaccgaggactgtctccg

SEQ ID NO: 283572 - DNA, 122 bp, Homo sapiens
acagacgtgcctactagatcatcacaatgcaaggagaaaggtggaagggaggagacagggcgaggaaaaataagcgataaaaagcttcagatttcagttaggggctggcagtcccttttatc

SEQ ID NO: 283573 - DNA, 122 bp, Homo sapiens
atttccccgccgtctttctctaccaactgggaatgctaaaacgggactgatggacgtgtccgaactctgcatcccggaccccctcggctaccacaaccagtaggtgccctgcttctcggtct

SEQ ID NO: 283574 - DNA, 122 bp, Homo sapiens
tcggctcctcatgatgcatcgcataaagaagctatttggcttcattcccgggagtgaagacgtcaaacacatccgcattccttcttgtcaggactggaaagatatttcagtacccactcttt

SEQ ID NO: 283575 - DNA, 122 bp, Homo sapiens
ggccccctctgggcctggggttggcgagggcagctgggcgtctgcgctgcccagcccagccgcggatccatggggtttcgcgagctgaaagtaaaggcttgagggagtggggacacccacac

SEQ ID NO: 283576 - DNA, 122 bp, Homo sapiens
tatatttgaggcccttactgtgactactcactggcattttcacttgtgaattccttctgacgtctttaccccacgacacttgagtgctttctgcatgactgtactgtgaagtagttggccac

SEQ ID NO: 283577 - DNA, 122 bp, Homo sapiens
ggcctagtagtggagtctcggaaggctagggctccaagctagctctttggacccaccttccgtcgcccgccagagcctcctttggtcgagcacgcccacgcggggcggggcctggccaggct

SEQ ID NO: 283578 - DNA, 122 bp, Homo sapiens
gaagttgctgagagcacgagaagggctgagctgtctgtgtgttgccaggcttggacccaccgcagtcccacttccggcttcctgagcagtttcatcagagcttccttattagtcctgcctag

SEQ ID NO: 283579 - DNA, 122 bp, Homo sapiens
tgacgaggtaggcgcgttccctcggtaccgccgcacacgtctgaagcggtctcttctcctcgttgctacggcaacgcagtgggcctgttcctgtcgccccccgcctcccgccgcaatcgcta

SEQ ID NO: 283580 - DNA, 122 bp, Homo sapiens
gctcagcaggtccccggcttcgggaagttttgtgcgcggatcgctggtggggagggcgcgcgggccagtggctgagcttgcagcgaagtttccgtgaaggaaactgcatgtgcctttggagg

SEQ ID NO: 283581 - DNA, 122 bp, Homo sapiens
atagttatttcttactcttccgctgcctcctttgcttttaaagcctgttctgccaagtctcgctggagaaggaaacccctgaaactggtcctggtggtctcagaccgccgcgcgagcgaaga

SEQ ID NO: 283582 - DNA, 122 bp, Homo sapiens
gcagctgcactgtgattggggaaaacctgtcccccaacaaaataccctctcctgtgtgaccggaagagggagcctttggccctcgggcgtcgcaggcctccgcacctgaccctagggtggcc

SEQ ID NO: 283583 - DNA, 122 bp, Homo sapiens
gatgtaaacaatgagattcccatatgatgttttaattcttaggtggtaggaaagactgatcggaggagcaccagagggactgtaaatgaaccactgttagcgtttggtgtccggagttggtg

SEQ ID NO: 283584 - DNA, 122 bp, Homo sapiens
actggaataggaaccaagtcctctgcatctagacagggattattttctcttctggaattccgcctgatccatcccaacgcaacgaccggccaaccacgcctgcgcagccttggtctccgccc

SEQ ID NO: 283585 - DNA, 122 bp, Homo sapiens
gtggaaacggggagatggcaatttgtccaagaaaatcaaagccccggtctttctaatggccgggggtggcggggaatggggaagagggaaggggaggcaacaacagtaccggccaggagagg

SEQ ID NO: 283586 - DNA, 122 bp, Homo sapiens
tgtgtgcagatgattaaaagacagcaggatccggtgttctggggagggttttcaacttgtcgtgggcacacaggataaggagtgccttcacctgaaagtgtcagagaggacttcccatcctt

SEQ ID NO: 283587 - DNA, 122 bp, Homo sapiens
cgttgtgcatagtcgctgcttgatcgcttgcccttctggcgccggttacagaaccacactcggaccacctgcaagtgaatgacagaaaggagaatgacattagacaatgagctgagacgggc

SEQ ID NO: 283588 - DNA, 122 bp, Homo sapiens
caccctgggccacacctcctggcaggagcccggcccgtgcgctgaggcctgcccttacgccggcccggtgcgctggccttgcttttcacagtcgatctttgaccgctgcctcccacccccac

SEQ ID NO: 283589 - DNA, 122 bp, Homo sapiens
tgggcagcagctgtggctaatctaagtgacgggtgcttcgagagcacccacaggttaaaacgggcccaggccatgacactttaaaatggtggtttacagaacaatggcatctcagattaggg

SEQ ID NO: 283590 - DNA, 122 bp, Homo sapiens
acagggaccacgtctgtcctgctctctgtggaatcccagggcccagcccagtgcctgacacggaacagatgctccataaatactggttaaatgtgtgggagatctctaaaaagaagcatatc

SEQ ID NO: 283591 - DNA, 122 bp, Homo sapiens
cctagcggcggcgccgatgctcgagctgtagctgccaggcgaggatgtgtggagcgcaggcggcgcggggtaaatgagaggtctcgggccccaggacccccggggcccgggatgagttagcg

SEQ ID NO: 283592 - DNA, 122 bp, Homo sapiens
tcaccccccgccccgccacaagtcatccaccagtctcttccccactaacaggaaggcatgcgatggcgcttaataatcggcttggcaaaacataaacgtatgctggtgggaggtttgcgtga

SEQ ID NO: 283593 - DNA, 122 bp, Homo sapiens
ggctagggcggatttggggggtcgactttaggtcgtcgccctaagcgcaaagcgaaagagcggtgagagcaggggcgggcgacactccccggagcggtgcccctgcgcccagggcgcagcga

SEQ ID NO: 283594 - DNA, 122 bp, Homo sapiens
gcagcgcgtgggcggccgaggggtggtggctgcgcccggggcttgggggtggggtggctgcggccgcgccccttgctgccctctaacgtgtcgcctgtccccgcagcgcccgccgccgccgt

SEQ ID NO: 283595 - DNA, 122 bp, Homo sapiens
atccgtttgcaaagtcctaggaaaccattttcagcagttgtggggggggggaggcgtcgacgtcataatccccggaacgtaaacattgttgccgatcgcgctcggagcccgcggccgggcta

SEQ ID NO: 283596 - DNA, 122 bp, Homo sapiens
cacggggaaggccaggaggcagatggcctgcacccagtcgccgcgctccgctgcaggggccgccaggaggtacaggcgctccttggtctccaggaagaaggcactggtgtcccgggggctgc

SEQ ID NO: 283597 - DNA, 122 bp, Homo sapiens
cctcatccccatcgggctggcggggcccctcactctccgacagggaggtgtcctcctcgacggcagccttgcgctcccgcttccgcccccccatggatgggaccttaatgggagacaagtgc

SEQ ID NO: 283598 - DNA, 122 bp, Homo sapiens
ctactgccggttatcttcggacacgttgtgggccagccagttcactcggtttccagctctcgcggagggcttcgttaaacttcactcggaagtgcttcgttaaacttcactcggaagtgctt

SEQ ID NO: 283599 - DNA, 122 bp, Homo sapiens
ttgagttcttcaggttcagttccagcggcagcagcgttgctgcaaaaatcgcttgctattcgagatagccagcagagggaatcggaactttgcttgcagcaggggttgaagcagcctttttt

SEQ ID NO: 283600 - DNA, 122 bp, Homo sapiens
gcggagcctggtgggcggcgtgaagcgtgcactgcgcctgcctgcccggtcccagcctgccgcccagagctccccgaccaagccttgacagctctcggagcagcgagaagaagaagaggagg

SEQ ID NO: 283601 - DNA, 122 bp, Homo sapiens
ttgaagactgccagacttccccagccgaagcatcgcaccctggtgctcgaggtttggtaccggtcatcccaggagggatcctcccactggctctcaggaccacctttctctcacctgccggg

SEQ ID NO: 283602 - DNA, 122 bp, Homo sapiens
cgctctgcgccctcctccagcattccagaccacaaaccactctgggctaaaacgaggcatcgccagagcatcccacttcctcggaaagctgcggtctggggacgcgtcttggccctgaagag

SEQ ID NO: 283603 - DNA, 122 bp, Homo sapiens
ttcctgagctcgtcagccagcacgtatttaatgaatggccactgggtgctaggccttgcacgcaaccctttcgtcctcccccggggctgagccgagggtgacccaacactagtcggaacgag

SEQ ID NO: 283604 - DNA, 122 bp, Homo sapiens
tcattaaaactcttcattcatcatactgaaatgaggcagtatttgttattgcacgggtgccgttctagcacgaaagctattccaatactaagcagtaattcaagaaaggcagagtagcaggt

SEQ ID NO: 283605 - DNA, 122 bp, Homo sapiens
ggttgcgctggacaagggcagcgacccaggctgacccacctcctccgtctcccggctctgcggaacctcactcagtgcggatcccgggcgcgctcgcacacctcacccgcgtcggcttgaag

SEQ ID NO: 283606 - DNA, 122 bp, Homo sapiens
ccctctgcatcgcttcctctcgcgttaaagagacagaggcagcaaggtccgccgaggctccgagcacctcacagcccggatacaaaccgcctacccgccctcccgcctggtattgtgggacg

SEQ ID NO: 283607 - DNA, 122 bp, Homo sapiens
gagcactgcctgtcttcccgctctccagccctcgaggctccggcataggcctgagaaagccgtgccggagctgcccctgtgcctgctactaaatgaattgcggtgggtgaggtggcagctgg

SEQ ID NO: 283608 - DNA, 122 bp, Homo sapiens
ccacagcaccggctcccgcccacgcctctccctccacacctctctgcgagcagagggagccggctctggcctcggccagccccagagagaggcccccacagcgcagcagctggctgaagggc

SEQ ID NO: 283609 - DNA, 122 bp, Homo sapiens
cacaacaggaactgtgtagctgtttcttagaattcactgaagtgggaggcctgtgatgcacggatgccggtggttgaatctttcacatattttgcaatttggaagaagaagataatttgtac

SEQ ID NO: 283610 - DNA, 122 bp, Homo sapiens
cgcgtccggcagcggcggcggcggcgggagactgcctgcgcccagccccgcccgccgctccgccctcctcgtcagtggaaaactccggggctcactgcgctgacgcacgccgggcctccagc

SEQ ID NO: 283611 - DNA, 122 bp, Homo sapiens
ggactgctggaagagcttcagccgcaggcagcacctgcaggtgcaccggaggacgcacaccggggagaagccctacacctgcgagtgtggcaagagcttcagcaggaatgccaatctggcgg

SEQ ID NO: 283612 - DNA, 122 bp, Homo sapiens
tagctaaactaaaactttcccaagaaaaccatatatttaagcttgctagatcaagaacaccggctagatacccacatatgagtttatgatttcctacagaatataatgcatgagttttgtga

SEQ ID NO: 283613 - DNA, 122 bp, Homo sapiens
ttgtaaaacctaatttacactaaatgcttgttaatttatttaagttctggctgcagtcttcgcatttttgatgttttcagaaggctaaaatgggcccctattaagattaatcttaattcagt

SEQ ID NO: 283614 - DNA, 122 bp, Homo sapiens
agtaaaaaaaaaattggttctttattaatttctgttgtctttttttccaagctgggagggcggggggaaaaaaaaaagcactggtttgcccccagctcagtgctgttggtggctcggtcctg

SEQ ID NO: 283615 - DNA, 122 bp, Homo sapiens
tgtagacagctagcgtgatccatgtgatgtaggccttgggtccccagggctggatgaagacggcccagcagtcgaagacgccgtcagccacctcgcgcagagagaagatgtgcacctgcggc

SEQ ID NO: 283616 - DNA, 122 bp, Homo sapiens
gcctatccctaaggcatttcagccacccagagccccttcggaatctgctttcctttctcacggacttaccttttgaacatgcgtgtaccaaatggtattttataagtcgtagtcttctcgta

SEQ ID NO: 283617 - DNA, 122 bp, Homo sapiens
cgcgagggcctcctcaccacggcccgggatcaagtcccacgcgcgaggccggggtaggggcgtcatctgctccacacccagaggctgggcacgccccgcacgcgcggcttcctcctcctttg

SEQ ID NO: 283618 - DNA, 122 bp, Homo sapiens
cggcgctgggttgccacacttgggaaagcagcccggagctgggtgctggggaaggcggggcgcgtagcctcccgccgccctgcggttgggccggtggaggcccaggcgttgctaggattgca

SEQ ID NO: 283619 - DNA, 122 bp, Homo sapiens
ggcccaggtgccgtagagattgatcagtagcacaaggccaccacaagcacaaccgccacccggccatcccagctatttcctccagcattctagacatcatggcgtccgagggtgggtccaac

SEQ ID NO: 283620 - DNA, 122 bp, Homo sapiens
tgctgaggagcctggagcgccccagcccagcctcccctctggccctgtgggaagcggccccggccgtcaggggtcccagccctgctcagcccaccctgaacactgcccccaggagccgcgtc

SEQ ID NO: 283621 - DNA, 122 bp, Homo sapiens
tctcaggagtcatgaacctcaggagaagcaagtgtggtataaatagtctgactcaagagacggggagctctcagccctcctgagacatcacgttgagggttcatctgggccacagagttaaa

SEQ ID NO: 283622 - DNA, 122 bp, Homo sapiens
cgagcacccgcacgtggcgtgcgcccctagctcctcccggggcggcagctcaccagcccccgccttagtggctggcttccacccagccaaagccaggaaatgtctgtccttaagcctcgatt

SEQ ID NO: 283623 - DNA, 122 bp, Homo sapiens
attcttggcgctaagctgccgcttctcttttttatcaccacagagtaacgcagaccccaccgtttccttccattctgagccaaccactccagcagccaccggggcgccaggttatgctgggg

SEQ ID NO: 283624 - DNA, 122 bp, Homo sapiens
ccggggtcgtggaccccggccaggtcttagcagcatggaggcgcagggtgtagcggagggcgcggggccgggcgccgccagcggcgtgccccaccccgcggccctagccccggctgcggctc

SEQ ID NO: 283625 - DNA, 122 bp, Homo sapiens
agagagcagacactgtgctgtcctgtgtgtctcctatggggtctggtgccgggaagagctcgatgtgtagaaagtgccccagatgcgtgtgtcaggaatctgagtgaggagatgaactgtac

SEQ ID NO: 283626 - DNA, 122 bp, Homo sapiens
ttcctcagtcagtgttgtctctctggcatcaaacagttaacaatcacgtagacacacgggcgccattggggaccccaggggctcagaaataaatataagaggtctgccctacagtgagggca

SEQ ID NO: 283627 - DNA, 122 bp, Homo sapiens
ggggatcccatcatcttcgaatttttatgcagagcccatggaagcgcctggtcagagaagcgggaggaaaccgaacctaagaaaggggcttggagtcagcagtgaagaatctattgtttatt

SEQ ID NO: 283628 - DNA, 122 bp, Homo sapiens
tccccaaccctattattctttcccatcaacctccgttctcaccacctcccacacatcacccgtgtcccctgcagtccagttctccttagtggtgactgagactcagggcccgtggtcgcctg

SEQ ID NO: 283629 - DNA, 122 bp, Homo sapiens
gaccatcaacccaaccctgttctcacctgcagggcatgaagtgcagccccgaggcgctggcgagccagggtgtggtcaagggccctggctgccaccacggtctcccgcagagcccctaccag

SEQ ID NO: 283630 - DNA, 122 bp, Homo sapiens
gcgggcgcccgggttccccggaaaaccctcggccccaaggaatctcctggggcgggagagcgcggttctaaaaccgagaggataggaaggggaagggggagttgtgtttcaatttcggattc

SEQ ID NO: 283631 - DNA, 122 bp, Homo sapiens
gtgctgggattacaggtgtgagtcatcgtgtctggccaaaaaaaactttagattcacattcggtcagttaaaaatgtatgtcaaattgtaaatgatcacctcgattggaaacgggatatttt

SEQ ID NO: 283632 - DNA, 122 bp, Homo sapiens
ccgccagccaatgagctcaaggcttgtggccctcctccagccttggtagagcagggactgcggagatgttttcctgctgtgcgggtttaggggcttctcggtggtctggccccggcctcccc

SEQ ID NO: 283633 - DNA, 122 bp, Homo sapiens
gcaggaagcagatcgacgtggccatcaaggtgctgaagcagggcacggagaaggcagacacggaagagatgatgcgcgaggcgcagatcatgcaccagctggacaacccctacatcgtgcgg

SEQ ID NO: 283634 - DNA, 122 bp, Homo sapiens
ccacaggagctattttcataccccatataggtccatcctataacacagccaggacagagacgagagactcaggcctcctgacttggattctgctctttcacctccttgttcatccaattaga

SEQ ID NO: 283635 - DNA, 122 bp, Homo sapiens
tccccatgctgcatgtgggacagtccttttccaatttagaagtgtgtctaatgagctccacgcacctctccccctggcaactgcactgtgtgtgctgccagacacagcccccagcttggcgg

SEQ ID NO: 283636 - DNA, 122 bp, Homo sapiens
agatgggagtccttatgtgccaggttaaagggtttgggcattatctccaaacgatgggtacgagtgaaagatagtaagcaggcaagtgggatgaccatgtcagtactttagagaatttactc

SEQ ID NO: 283637 - DNA, 122 bp, Homo sapiens
cgggcccctgaccagatcaggcagcagccggagttagagcagaaggaaccccagggctgtcgcagtcagccacctggagggcacgggccctctttgggtctccatttgagcaaactaagagc

SEQ ID NO: 283638 - DNA, 122 bp, Homo sapiens
gggcctgttcttcctgcatcttttgctggtggctgtgatcttcggaagcaagtggataaacgggagcatgtgaaatgcgaatctccacgaggcgttatttgtagctaaatattctattcaat

SEQ ID NO: 283639 - DNA, 122 bp, Homo sapiens
gtttgctgcttgagaaaagccttttctcagctttccgtaggggtggaacctgttcctggtcgccaatggtggcgactcagaaggtgtctcatcctgggcattcgggccgaaggtacctgaag

SEQ ID NO: 283640 - DNA, 122 bp, Homo sapiens
aaatcatgtcaggggagcaaactgaacaggcagacagtgccaaggccaccaatttgaaggcgatccattttccaaattatcttccagccaacagaatccttttgccatttaacacatctata

SEQ ID NO: 283641 - DNA, 122 bp, Homo sapiens
cgctgcccggaccctcagtgaccccatccctgggcggggcccgtgggtggaccctgaattcgcctctcctcctgtcctctgggaggtggtagtttccatgggaatccgtgagggtagccggg

SEQ ID NO: 283642 - DNA, 122 bp, Homo sapiens
ctttatcaaaatatctcatgtaacccataaatatacacatctactatacacccagtccctcgcaggctggaacctcggcacacttcttgcccccgaccatggaacagaaagccatgatgttt

SEQ ID NO: 283643 - DNA, 122 bp, Homo sapiens
ggacccagttctcactcccattgggtgtcgggtttccagagaagccaatcagtgtcgtcgcggtcgctgttctaaagcccgcacgcacccaccgggactcagattctccccagacgccgagg

SEQ ID NO: 283644 - DNA, 122 bp, Homo sapiens
gaactgagtaattgccaatattcccatgctgcattttattctccagtctttattactgagcgatcctctacaatgtgggttgttaatacccttgtgttctcagcacaaaatatagtaggggg

SEQ ID NO: 283645 - DNA, 122 bp, Homo sapiens
ggtggtatctactgtactccaaggaatcattgctggctcacatcattaacaatcactgcacgtgaaataaacaatcaggtgtctttgctccccctccctttccccattttaggtttaattaa

SEQ ID NO: 283646 - DNA, 122 bp, Homo sapiens
gcgttccccgcagcgctgaggcgagcctgccgcgcgctccgctcagcgtggtctggcagccggagaccaggcctcactgcgcctccaacagccagggtcgagcccctggctccccgttcgtc

SEQ ID NO: 283647 - DNA, 122 bp, Homo sapiens
cgtggagcagggggcggtgctcatcggggaggctcgggctgcacaggaacccagggaggccggggaaggctcagccatggtgggctgcagtcccaaggactgccccacgggaaggcagctaa

SEQ ID NO: 283648 - DNA, 122 bp, Homo sapiens
cctcggctggggaaggcagctggccttgggggccccctgttggcgggaacaggtgctatccgcccggcgggcttcgaacccttggcttcgccagaagcgctttcagcgcgtggttaggagca

SEQ ID NO: 283649 - DNA, 122 bp, Homo sapiens
ggcaggggttacaggcgcccgcggccggcgcccccgcccgccccgccgccactcaccgcgcgcccggccccgcagcacaccctggacccgccgcaccgtcagctccagcacttcggcgttct

SEQ ID NO: 283650 - DNA, 122 bp, Homo sapiens
gaagataagtcaccctgacattcccaaaattcagaaattcactagacccaaatgacaccacgaaaatgtgatgaatcattcactccttagagattttacttatgcatggattgattgcctgt

SEQ ID NO: 283651 - DNA, 122 bp, Homo sapiens
agaccccagtgctgagcccacgtgatgcctagcgaggcagcgctcaggggactgcggctgcggggccatgcccaggcacggtctcggggggctgcggctgcggggccctgtccaggtgcggg

SEQ ID NO: 283652 - DNA, 122 bp, Homo sapiens
tggacgccccctcttcgaccccatcacacagccgcttgaggcttggaggcagtggatttccgagcctgggaaccccggcgtctgtccggtgtccccgcagcctcacccgtgctggcccagcc

SEQ ID NO: 283653 - DNA, 122 bp, Homo sapiens
accctagaccttggctttctctctctccattgctcttgtgagaaaagctgcctcgctctgcggcctctctcacgagcgtgccattgtcccggagagtccgggagttgaaacagcccctggat

SEQ ID NO: 283654 - DNA, 122 bp, Homo sapiens
gccggacgcagaccaccacagcggcacagcccagcagcagcatgaggacaaggatgaccccggcgcacacggccacccaggggaatggcccgccctggccctctagcttctcagtgaggtcc

SEQ ID NO: 283655 - DNA, 122 bp, Homo sapiens
ggagagtataggctctgtgtgtaagcttggagtggctcgccaagatcatctgtgtacaatcgtgtcatttttcataaactttttctgagtcctgaggaagaaacagccttgtggccaccatc

SEQ ID NO: 283656 - DNA, 122 bp, Homo sapiens
ttgttgctctcgggttttcgatacaacatcatgacacttctgtttcaagctcatgttttccgtctcccctccactcttagtaaaccttgatctgtacggagcggcctgtccgaggctacgcc

SEQ ID NO: 283657 - DNA, 122 bp, Homo sapiens
tcctgcggaccgcgtggagtttggggtgtctgacatcgttctccacgtggctattttcagcgttctcccggggaagtacttggaagagatcgccacacagatgcgcacgcacagcatcaacg

SEQ ID NO: 283658 - DNA, 122 bp, Homo sapiens
aaacattggttactgaaagaagctagtcatagtcacaaaaggccacatgttgtatgattccgtttatagaaaatgtcctgaatagggaaatccatagagattgaaagtagattagtggttcc

SEQ ID NO: 283659 - DNA, 122 bp, Homo sapiens
cccgggccaggctcacagaagctggcttctgggactgtcctgggcccaagtgggcacctgcgccagccccacctgtgcctgggctgtggccccttcctacagggcgctcaccatggccccgc

SEQ ID NO: 283660 - DNA, 122 bp, Homo sapiens
gctatgggtaccgcgggccggaagtgtagcgttgccatggcgagggccgggtgcggggcccgcccccgcagcgcctcagggagcgcggggcccactgacccgcggaagccagcggacccact

SEQ ID NO: 283661 - DNA, 122 bp, Homo sapiens
ctgctcacatgacttaaatctcttcccgactacctcttttttctcttcccctagcaaccacgggggtatgggaggctgaatctgtagctgatctcttagcattgccatcaggtgggctgggc

SEQ ID NO: 283662 - DNA, 122 bp, Homo sapiens
tgggaccctggccggctcaggggacgtagaacaggggcaggggcttcctctagtcgctcacggctcagttgccgccggaggagcaggtccagctgttctctagaagagtagcggctggctgg

SEQ ID NO: 283663 - DNA, 122 bp, Homo sapiens
ttcagcaaggtttaaaaggcaaaatgtaatcacttccctttaattaactcaaacaatgcacggcaggttatgttaatgtgcctgtagctgagatagaggcagtaggctgccactaatacctg

SEQ ID NO: 283664 - DNA, 122 bp, Homo sapiens
ggcgcttcccactatatatatatatataatatattatagaatattatattttcttggtgccgtaggatgaatggtcagagctggtcacagctgaaggtggctcctccagtggctctcacaaa

SEQ ID NO: 283665 - DNA, 122 bp, Homo sapiens
gaaaacctgctgcttcgacccggaagaggaaattaaattagctactaattggttaattggcgacaggctctgtaaggtggtaagggacaaattaagttggagcaagaagcatgcgctaggcc

SEQ ID NO: 283666 - DNA, 122 bp, Homo sapiens
caggaaggcgagcggcctctgcgtgtgtgcgcgcgggtgtgagtccgcggagtgtgtgtccgtgtgtgcgtgtgtgcgcgtgtgcgtgtgcgtgtctgtgcgctcccgccgccgtcgccgag

SEQ ID NO: 283667 - DNA, 122 bp, Homo sapiens
cctccaactctatccccaccaccatgaatttataagaacacacggtgtaaacagtatcttcgtcaaaaagccttccctaactcttttcctccccatcctgggttatgtgtccatcttctatc

SEQ ID NO: 283668 - DNA, 122 bp, Homo sapiens
tcttaccaagtttatgagtggaggaaataggaaggtgaggacagcagcaggatataactccgtattttaaagtaattactgactgggctgactgtaaattgtttaaaaatgaaatgcaaaac

SEQ ID NO: 283669 - DNA, 122 bp, Homo sapiens
ttgttcctcttctcctccccatgtggtatgagagcacctgtggcaggctcccagagaccacggacctcttcctctaggcgggctctgctcttctttaaggagtcccacagggcctggcccgc

SEQ ID NO: 283670 - DNA, 122 bp, Homo sapiens
tctcatcagcgaggccccgggccacgggagatgggctcgtcccagctcgggccaggcagccgccgatcgattgcgcgtgtgccgccccgatactccatctcattaggccttcgttttcatct

SEQ ID NO: 283671 - DNA, 122 bp, Homo sapiens
gctcccaaggtgctgggattacagcagcaccgcggatgtgacgtttggtgttcctgtgaacgtggggcggggcggggccgtttgcttgctcagtgcctagacgatggtggtggaaagacgct

SEQ ID NO: 283672 - DNA, 122 bp, Homo sapiens
cttcctgacacccaggggtgcgatgctattttgtaggaatcggcgacaccgccagagcctcgctttcaaattgctgtttccaaactaatgttgttggtgattctctcctttgtgctcttaga

SEQ ID NO: 283673 - DNA, 122 bp, Homo sapiens
gtcgttgtcatctgtgggtggagaccacggatgcggctcaacaccccacagtgcacaagacgtcccacggtgcacaggatgccccacagcaaagagccgtttaggcaaaaccatcagcagtg

SEQ ID NO: 283674 - DNA, 122 bp, Homo sapiens
cgccattgcactccagcctgggcaacaagagcgaaactccatctcaaaaaaaaaaagtttcgttctcagaggaaacacttcacgcctatcctgtgaagtggaagttcattgcttgtctccag

SEQ ID NO: 283675 - DNA, 122 bp, Homo sapiens
gcagggcgctgttgagtgcagcggggcggggccgggcgcgggggtggggcgagcggcgggcggggcggggcggccggccggggggtgggaggagaggggcggggcgggccggccgggggagg

SEQ ID NO: 283676 - DNA, 122 bp, Homo sapiens
gcgcgtttgcaccgggcgggtcaggggatggggtcagtccgggggcaagagccgtgggggcgaaaacccactcctggccaccccaggacccttggaacattggtcccaagtacttaggaaag

SEQ ID NO: 283677 - DNA, 122 bp, Homo sapiens
aaaaaaaaaaaaggtacactgagtactccggagaccgcctaaaggggtctcagagcagggcgttaggagggatttgtcaggttgaagttgctcaggtgataaattccgtggtgtgagaagcc

SEQ ID NO: 283678 - DNA, 122 bp, Homo sapiens
ccaacgtcgctgtcgaagcgcccgtactcctcgcggttatagatgtatctggccacaccgcgcacgcgctctgtcccgttggtgaagtagcacatgcccttaaactggaccaagaaatcctc

SEQ ID NO: 283679 - DNA, 122 bp, Homo sapiens
cgcccctgcatctgagcacgtcccagagggcgccggaatgtcaggccctagacatagcagcggtttgggggctagggggcaggtgaagagacgccgcagccttgaggttgtacctggtagcg

SEQ ID NO: 283680 - DNA, 122 bp, Homo sapiens
gatccctccgagcagcccccgcgaggacggcgtggacgggctgcccaaggaggcggtgggcgccgagcaaccgccctctcctgcatccaccagcagccaggaatccaaggtaccgagcacgc

SEQ ID NO: 283681 - DNA, 122 bp, Homo sapiens
ccatcctttccaggagatcatttcacttcattgttttgcaaatcttttctcccatctgagcgctgcttctttattgtcttaaatgagtgtttcacaaagagcacggattgggttttgtactt

SEQ ID NO: 283682 - DNA, 122 bp, Homo sapiens
gccccgtcttgaccaaattcctctgcttactcaccttgcgtatgactccagtggccttcccgacagcactgatagcaactggcttgtgtgtgtcttgatacacaatttgtgagggtctgatt

SEQ ID NO: 283683 - DNA, 122 bp, Homo sapiens
cgtgggcctgtgtgggcacctgcacccatgtggaccttctgaaaccgggaggctgtgccacgtctgtgggtagttcggtgcgcacacgctggatgggcacacgtgtgtgggcgcgtgcatgt

SEQ ID NO: 283684 - DNA, 122 bp, Homo sapiens
ggggctggggaaatgatccagatctggcattgccgcggagacccccatacgtagctgtaccgccacctctccacctgctcccatcctgacctgaaggaggcctcacctggagctccgcctgc

SEQ ID NO: 283685 - DNA, 122 bp, Homo sapiens
taggactctgtgttttctccaggatgggacggccacagaggagcccatcctcccgggtcacgaatccgagaagaggcgggcttggctggaaggggcagtggcggcggtggctggggaattcc

SEQ ID NO: 283686 - DNA, 122 bp, Homo sapiens
ttgatctcatgcacctttggattctaagtccatgcttgtgactgctaccctgtactgcttcgcacaagtatccgaaccagtcagagctggcttgagccatctgactttgccaccccatcctc

SEQ ID NO: 283687 - DNA, 122 bp, Homo sapiens
tggggttgaggcaatccaggggaggcacatttgggggacagtcagtgataccagctcccacgtgaaggacagggatgtaggaggcatcctgatgtccccggtcatcccctgccctcacttcc

SEQ ID NO: 283688 - DNA, 122 bp, Homo sapiens
ggtgtggcatcgcagggagctggctgaggcttgagcatatttacctactgggaggaacctcgctggcagcagcaaggaggggtagagaatgctttcggcaggcagtgagggcattaaaggag

SEQ ID NO: 283689 - DNA, 122 bp, Homo sapiens
tggggggcggagcctgatgcgggatgattggcgtccgagcgctgggctgttccgtggacccgcgcggccacgccagtgtgctgtgcacgggaaatgtggacgtgggagcacggaggcaccca

SEQ ID NO: 283690 - DNA, 122 bp, Homo sapiens
cccgactcgtagggcctggagccccggaacacctcatccttcatgcgaaagtacatgccgcgcatgtaggccatggacttacctaggaacaaaggggtcagaggcggggagatgcagcggcc

SEQ ID NO: 283691 - DNA, 122 bp, Homo sapiens
cgcctccccaaagccgtaaaccttcccgcccggctgactacgccggcccagccacgcacgcgcaccccgcatgccccgtggcctgtgaggttattcaagaagccaaggtcgggagtggggaa

SEQ ID NO: 283692 - DNA, 122 bp, Homo sapiens
gaaattgattaaagggctggaagccggcgatgggttggggggaagggtagggactcctagcgtaattaaagatctgagagtcgtggtcgttccttgtcggccctggccgcacgtggcctttg

SEQ ID NO: 283693 - DNA, 122 bp, Homo sapiens
tcccacgctagcaagttaatatccttatttacgagaacttgtgtttcacagtcttaaccacggaggttaagatgtctctgcctgaaattcctttgtttttaaagtttttccagcccatcttt

SEQ ID NO: 283694 - DNA, 122 bp, Homo sapiens
gcgctcttacctttgcgtcctgatctccaagcaagcacactgaccttcttcaggcaaatacgcactgttaattttccagaaagttctgtgagtaaggtttatacctctcgagtctgccacta

SEQ ID NO: 283695 - DNA, 122 bp, Homo sapiens
ggagtggcaggcggggtttcaggtggggaccgggtggccggcgaggcccggccgcaggagcgcgccccgcctgcccgcgctgaccttcccggagtcgccgggaagcgggagggctgcacccc

SEQ ID NO: 283696 - DNA, 122 bp, Homo sapiens
ttttcaacttggatgcacaaatggtcctagttttggctggagggagccctccaggaggttcgtgtgtccttcacggcgtccccgtcccgttctgatacctgcgtcctgaggcgtccccctca

SEQ ID NO: 283697 - DNA, 122 bp, Homo sapiens
aaggacccctgggcgcccccgctccggggccactgaggcagcagtagcgacctccggaagcggagactgtccccactgtttctatgctggtaaatgagatctggttgaaaggaacgacagga

SEQ ID NO: 283698 - DNA, 122 bp, Homo sapiens
ggcagaagtgctcaatgaccctgagaacatggagaagcgcaggagccgtgagagcctcaacgtggacgtggtcaagtacgagagtggccctgacggaggggaggaagtgagtatgagcgtag

SEQ ID NO: 283699 - DNA, 122 bp, Homo sapiens
cagtcccccgggcagcaccccatggtccgggcccgtcagctcgcaggtcggtaacgcagccggagttccccacgactgacggtggccagccatctggatggcagcttttatatcccctcacc

SEQ ID NO: 283700 - DNA, 122 bp, Homo sapiens
aggcgcgccgctagctccgacagcaccatgtctcccacttggaaccaggaggttgcggggcgtggcggacggcagtgcgcaggcgcggagcctgggaagtacccgaggcagcggcgcctgcg

SEQ ID NO: 283701 - DNA, 122 bp, Homo sapiens
tcttcccgcacgcaatctgcctcggagacgttgataacgatacggtaggtgcatgcgcaccgcaagagacagcctggatctgtgcagggacggggcaagggaagtggaagaggccgcccgag

SEQ ID NO: 283702 - DNA, 122 bp, Homo sapiens
cggcggcgccgggagccgggcggcggagctgtgaagaagcaagcggcggcacgggagcagcggcgacggacaggtggcgagccttcgcccgcgccgccaggggctgctgggccacccgcgga

SEQ ID NO: 283703 - DNA, 122 bp, Homo sapiens
gggacgaattcacgcccaggtgcccaggtactgcacaggtgcgctgggtgctggcacttacggtgtgtgtgagggcccattccctgaccacaggcagactggacaggcctggggggctcagg

SEQ ID NO: 283704 - DNA, 122 bp, Homo sapiens
tttctcagccctttggccactcttactccgtcttacattttcttggccacatccgtctcccggaactgctccttcaccatgatgaccgctgccgggacgcctccttggcactcgggaggcca

SEQ ID NO: 283705 - DNA, 122 bp, Homo sapiens
agcctcggagttgcgggtcgccgtagcgctgcgcaatggagatgagcctcccggggaacccggcccaagcctcaccctcacacaggaaagcagatgtgttctggccggaagttgagtggggc

SEQ ID NO: 283706 - DNA, 122 bp, Homo sapiens
acgctgaattggcttctggtacagtccatctggactctgtgtgggaaagctggctgccggcgactgatgctgagatatctgcaacctttgggatgtgtgcatggtggcaaggggctgactga

SEQ ID NO: 283707 - DNA, 122 bp, Homo sapiens
tcagcctctggatcatccggttcatctcagagatctcatgcttggtgttgcggaggtcatcgccatgccggccagctgtctgctgcagctcctcatactgatgcagccaggaaagaggaaag

SEQ ID NO: 283708 - DNA, 122 bp, Homo sapiens
ctctgggcgttgacttcttctctgtggtctgggaggagatgtcgaggcccccgagggaggcggtggtgaaatcttggcttgcagcctccagcccgcccagagccagagtcaggcacgaggct

SEQ ID NO: 283709 - DNA, 122 bp, Homo sapiens
taaatccagtgagggcacacggggctatgttttctgaggcacccccactgactagcgtgccggaccctgcaggtgttggaacaaggttcgtggtcgcggcggcctcacgtaaaatgaatccg

SEQ ID NO: 283710 - DNA, 122 bp, Homo sapiens
ggcgtaggaccctcagagccaggtgtgggatataatctcgtggttcgccgctttttaagccggtctgaaaagcgcaatattcgggtgggagtgacccgattttccaggtgcgtccgtcactc

SEQ ID NO: 283711 - DNA, 122 bp, Homo sapiens
gcggggcctccgagggcaaggtggggtttctctggctgccggctgtggaagccgctcatgcggaggcccagccgggaggctgcaggaggccgtggggagggcagagccagctgccttccctg

SEQ ID NO: 283712 - DNA, 122 bp, Homo sapiens
gaacgacggtgcccttgagcacgtggagaacggcggtgcccgtgagcacctggagaatggcggtgcccttgagcacgtggagaacggcggtgccctttagtacatggagaacggtggtgccc

SEQ ID NO: 283713 - DNA, 122 bp, Homo sapiens
cccccactaggccccacccacacgcaccgaggggagagggcggtcacgcggccgggggggcgtggcctgcccccggagcccaggcaggaggagggtcttccttaaggaactgctgccaggac

SEQ ID NO: 283714 - DNA, 122 bp, Homo sapiens
agtggggcgcggggcagtccctggaccggctctgctgtgctccgggcagtcgggggcttgcgggcgctccggggaggatgcgggcaccaccggctggacggtcgcagcctgcagggggccct

SEQ ID NO: 283715 - DNA, 122 bp, Homo sapiens
ccacagtgacagatggttttgcttaaagacaatccctctgagatagctcgtctgcccaggcggctgtgtgggcatgcttcgggcatgtagccagcgctcacatgctatccacatatttcaca

SEQ ID NO: 283716 - DNA, 122 bp, Homo sapiens
gtatttaaaacaatttcccctttggaaatgaaatgggtagccggccccttcttccccctgcgaaggtgctgcaggcttcatgcatctctgggtcccatttgtcctggagccatcttccaact

SEQ ID NO: 283717 - DNA, 122 bp, Homo sapiens
ttgggggattcgtagagttgccacagcagccggtgccatgacatcggcagagggcagcttcgccagcactgaaatattcatgccctgagcgcccggcggggctcggcgccgctcccgggggt

SEQ ID NO: 283718 - DNA, 122 bp, Homo sapiens
ttggtttgtggaccatttgctgcctgttagagctggaaggtagggaccccctctcaacagcgatgctacaaattatacccattggaggtcaaccaaaagacaaagcttattggctggacatg

SEQ ID NO: 283719 - DNA, 122 bp, Homo sapiens
ccattttcaaaaccaccctgatttgcatttaacttattaggcagggggcgagattctgtacgcctcttctttaataaaagagcccgaaaagccttattcctagtatggatttgtttatgctt

SEQ ID NO: 283720 - DNA, 122 bp, Homo sapiens
aaggactcaaaaagcagcagggggcagaggcacaacaggaaagagccagccacaggcaaccggcaaacaatgtctgcccccatctgggcagaaagatcaaacatcaaaaacacacacttcca

SEQ ID NO: 283721 - DNA, 122 bp, Homo sapiens
gctggaagccggaggaagtgcatagagggcagcttcaaaagccaaggctgcgctgctttgcgcggggcttcttccctcgcgtgcccgcgccgggtgccggagcagcctccgcaagctgcttt

SEQ ID NO: 283722 - DNA, 122 bp, Homo sapiens
cagtctccttcctggcatctctggggagtcctgtgatgaacagggtccgcctcacctgtccgggaaatacagcagggagagaagtcacccacaagccagtgtgccggtatgctcaggtttcc

SEQ ID NO: 283723 - DNA, 122 bp, Homo sapiens
ccaggtctgattgttagacttctaaatgtggacacccgagagtaagctcccaccactaggcgtccagctgtaacagcttgccggtattcctagctaaacaaggtgcagcccggggtcactcg

SEQ ID NO: 283724 - DNA, 122 bp, Homo sapiens
gctcttttagtacctccacttttacagacacgtaaactgaggcgcgggcgactaaatgaacggctcaagaccacaagaggataatattggatttaaagtgacgtctgggccgggcgaggtgg

SEQ ID NO: 283725 - DNA, 122 bp, Homo sapiens
ttacacttggatgtctcaaggtagcgctggagtagttattctgagctactggaatatcagcgagtgccacctccagagggagcttcccagagcccagccctgtaccatctctgagcttccag

SEQ ID NO: 283726 - DNA, 122 bp, Homo sapiens
agaatatttggagtctttgttatcaaagcacaaggaaagctggcattcattatcagacttcgctgctttacaatgatttcaaatcatttcatgatacaaataaagtgcctctgactggtggt

SEQ ID NO: 283727 - DNA, 122 bp, Homo sapiens
tcccctccaccagctcaccgaggatggcagcgcagagcgtgtgaggcagcagcggcagcccgttgtcgtaagcctccttgagtgtgtacacgggccggggtcttggccgcgcgtccagcagc

SEQ ID NO: 283728 - DNA, 122 bp, Homo sapiens
cggttaatgggggtgggccgggaatggaccagtcgagacaccaattccagggttcggttgcgcttccgtcgctgtttcctttcgtcactttgtggggaaaagtggtagcaatcatacctctt

SEQ ID NO: 283729 - DNA, 122 bp, Homo sapiens
cttaagtgactaataggcaggtagcatggatggaatgattcatgtcctgggcagatggagcgagatggtgagagatttcatcacactactcagaacgtcatgcaaactaaaacttacaaatt

SEQ ID NO: 283730 - DNA, 122 bp, Homo sapiens
cgccgcgccttgggaaagtccccgccctccaaagctctcgattgggatcaccttgggactcggcttccttgtgaaccgtttccagcgattcagccccatccttttctttgagaaggaccttc

SEQ ID NO: 283731 - DNA, 122 bp, Homo sapiens
ttgccagaaatggctccattatcttcagcagagacagcgggcactcgggggccagccctccgtgcctgtgtgcgtcctcttggggaggaaaagctggatgaaaagttaaaccttccaagcac

SEQ ID NO: 283732 - DNA, 122 bp, Homo sapiens
tggggcggggcgcggccaggaccggagcggaagtggcgatcggagcggaagtggagctaccgccaccgccgccgccgattccggagccggggtagtcgccgccgccgccgccgctgcagcca

SEQ ID NO: 283733 - DNA, 122 bp, Homo sapiens
atgatttgaggactctgtgactcagtttctccacctgtaaaatgagggagttgtacccaacgatctaggattcttcttgaatccacattccatgactctggtcatggtgaagacccagccca

SEQ ID NO: 283734 - DNA, 122 bp, Homo sapiens
cccgctagcgggaacgatctggcctcagacgtcaccagcatccctccacccccagtccaacgtctcctgtccccaacagcctagctacagggggccgggctatgggttagtctcgcccccgt

SEQ ID NO: 283735 - DNA, 122 bp, Homo sapiens
ctccaaggatcggaaggagcgagtgcaccagggcatggtcagagccgccaccgtgggctacggcatcctccgggagggcgggagcgccgtggatgccgtagagggagctgtcgtcgccctgg

SEQ ID NO: 283736 - DNA, 122 bp, Homo sapiens
gagccaggctgatgatgctcgcagggatcggatactgggagcccctgaacgcagccaacccggcgcgcaccggtgggggcgtctgcgctggcggagcggctccccgggaggacgctgggaac

SEQ ID NO: 283737 - DNA, 122 bp, Homo sapiens
acctcagcctctctggtagtggaagaagccgccggtccagatccctcctgcctgtgggaccgctgtttccctggcaaccagatgcgcgatgcttccggtctcgcgatagcggaaagggctgt

SEQ ID NO: 283738 - DNA, 122 bp, Homo sapiens
tccctcctctttgaaaattgctaataaaaactcgctggttttacggctcagggggcatcacggaacctgcggacatgtgatgtctcccctggacacccggctttaaaatgtctctcttttgt

SEQ ID NO: 283739 - DNA, 122 bp, Homo sapiens
ggaactcagcggcaccccggcctgcgcgggtgggtccaccaggctggggccgccgtacggcgtcggacagggaaatcagaagctcataataaactatctgatgtcggggtggtggggcgggg

SEQ ID NO: 283740 - DNA, 122 bp, Homo sapiens
atgcatggaatgttggatgacttcatagttataaaattatttcatttctcatgataattccggacttgccaagttagtgaattttaagaactctgagagcagattttaagataaatgtgaaa

SEQ ID NO: 283741 - DNA, 122 bp, Homo sapiens
cctccacgccggccgtgcacagccctgccgataccgtgggtgcagctggcgactgcactgcgaggctttgtccattttatacgttttgtttaaagagtaggagccacttttactgagcttta

SEQ ID NO: 283742 - DNA, 122 bp, Homo sapiens
ggaatattcacaggtaagctgcaaatataaaacaccttccacagagtgttattttgtaatcggggcttatctcaagtgcaagaacctccagcctacagctttagtaggtgcctcagacactg

SEQ ID NO: 283743 - DNA, 122 bp, Homo sapiens
aacacagtatctgtgacacagtaagtgctcaataaatatcagcttttatttttcaaggggcgaggaaggtgtattttgaaaaagcatatactatttatttttttaaaggcctacagaaagta

SEQ ID NO: 283744 - DNA, 122 bp, Homo sapiens
ccaacacataagtgtacacattcagccttccagaccccgagtgtgcgttctctgtgcagacgcctcctaacatgaacagccagtgggaggtcagtctttgaactcaaataacgaaggcatgc

SEQ ID NO: 283745 - DNA, 122 bp, Homo sapiens
actgtgggtgcggtgtcttcccagagagtggtgaagttaggaaggtacgaccccctaggccgaacagcctgtgggctagctggcgcctcctgccgcagtaaacacaaagtggggtacagaaa

SEQ ID NO: 283746 - DNA, 122 bp, Homo sapiens
acattccttactatccagaacctcgaaactaagctcagcacctaggcgggtgggtgacctcgcgatgtttctgtgcccaggcagcacatggcagagagcagccctgggcgggctggtacctc

SEQ ID NO: 283747 - DNA, 122 bp, Homo sapiens
gctactgcaccttcctgtcaagagttacagacctgaccgccgtatgatggacctgaccgccgtatgatggacctgaccgccgtatgatggacctgaccgctgtatgatggacctgaccgccg

SEQ ID NO: 283748 - DNA, 122 bp, Homo sapiens
cctcagtctttcccccaccctgtctcttccttgtccttctctggaaaatgccaaaatacacgatgtgaataaaagtacaacggctaaattgtgtcctgtttgataccttgggggagaggctt

SEQ ID NO: 283749 - DNA, 122 bp, Homo sapiens
ggagttgggcccggtgccgcctggccggccagtaggtggtgtctctggcctgctttccagcgcctggcctgcctttcccgctcgctggcctgccggcggccgcccgcacctccgcgcaagct

SEQ ID NO: 283750 - DNA, 122 bp, Homo sapiens
ccgcctcggccatggcctccctcacggcctcgcgggcccacagcctcggaggcctggacccggccttcaccagcacagaggacctaaactgcaaggagaacttggagcaggacctcggcgat

SEQ ID NO: 283751 - DNA, 122 bp, Homo sapiens
tgttctgccttccctcgggcatacgtgagtcagaatgtcagcaccattaaaggaccagagcgccaagtttcttaatacgggtatctcgacaaacacttcaaagtcactgcagaggaagtgtg

SEQ ID NO: 283752 - DNA, 122 bp, Homo sapiens
ccttctgggctcaagcgatcctcccacctcagcctccccagtagctgggacttacaggcacgtgccactgcacccagcacacccagctaggtttttgtatttttgtagagcaggggtctcac

SEQ ID NO: 283753 - DNA, 122 bp, Homo sapiens
tgatccccgcactaattaggctcatgaactaacaaatcgtttgcacaacttgtgaagaagcgaacacttccatggattgtccttggacttagggcgccctgcccgccttttgcagaggagaa

SEQ ID NO: 283754 - DNA, 122 bp, Homo sapiens
ttcggatgagacaagttgtgaaacaaaaccccatgcccaagtgaccccatttggagactccgcggcgcgcactggggaccccacacgctgcacacctctctgaagccgctggaagctggggc

SEQ ID NO: 283755 - DNA, 122 bp, Homo sapiens
gctgccccgggtggagcggcagcccaggctgcagcagtggggttgccacgccgagttttccgcatcggccgcccgcagggctcgcctgcttctccccattgtgttctcagagctgtgggacc

SEQ ID NO: 283756 - DNA, 122 bp, Homo sapiens
tgtgggaggtctgtctgttgtgcttcagctttttgacacctctctgggtcagcaggcctccggggaagcagctagaatggtcgctgtctggctgggtgcaggtgggctgacaggtttggata

SEQ ID NO: 283757 - DNA, 122 bp, Homo sapiens
tcaggaacgctttggagccctagctttccgagcgcaggtagagcagcccgggcccgcccacgcccctggctttgcgcggtgcagtttgaaccgcttcggaaacagctggcccggcgcgcgcg

SEQ ID NO: 283758 - DNA, 122 bp, Homo sapiens
gtgactatacatttaaatagctaaaacatctgttcagcaacatagtaaaacatatatactcggaacgcttgagagaagagcctgccaaacagggactttgctgagggagagcaccaagataa

SEQ ID NO: 283759 - DNA, 122 bp, Homo sapiens
ccccagcccacccagattactcccgtacacaaactcctattgcaattctattgtgtttcacgcaattatactcaccagagcatccagtaacaacatcacaagcacctgtgctgaaagctgta

SEQ ID NO: 283760 - DNA, 122 bp, Homo sapiens
tggatcccttcccccgttctcactttctgctccccttagggttccctggatcctagaccacgatccttccgtccgggctgggaagcagccacaaattgagcccaggttagccagccgatctt

SEQ ID NO: 283761 - DNA, 122 bp, Homo sapiens
agccgctgctgggagcatgcagctggggcacgggaaagtttcagtgaggcctggacttcacgtgcaggaactacctctggcactgctgttggccaagggcagtgaaagcttgtgaatgaaga

SEQ ID NO: 283762 - DNA, 122 bp, Homo sapiens
gggcgcgctttgcttggaaaggcacaggtaggaagcgcgggctgccgggtgcacgctcgccgccctgggaggagtctccctcccttggctctcctttctgggaactgccggctgtcccgtag

SEQ ID NO: 283763 - DNA, 122 bp, Homo sapiens
gctctcctgctcacgtgctgggcaccgagactcagtttactcacctacagaatgagaacacgaatacccacaagatatcataattgtgaaaactagcaaagtaaaagttacatgcaaacaac

SEQ ID NO: 283764 - DNA, 122 bp, Homo sapiens
tgcatgtgtgtgtgcagtgcctatgagcgtgcacgtgtcgtgtgtgcctgtgttgtgtggcgtgggcacatgtgcactcttgggttgtccctatctggaaaggcccttgctcctgacccagc

SEQ ID NO: 283765 - DNA, 122 bp, Homo sapiens
gccaagctgattctatctccaaacagagatcaaatctgtttagtcttattctgaccatgacggcttcagctgttttcacttggccttttgccaatactcccaagtagtcttctagaccattc

SEQ ID NO: 283766 - DNA, 122 bp, Homo sapiens
ccccgagcggctttacgattgtctgccaggcgggctcctgaagtgtgggcatttaacactcgtcacgtgagcgctggcgacgtcacctagcaacagccaatcagaagcaaacggccgcggag

SEQ ID NO: 283767 - DNA, 122 bp, Homo sapiens
ctcccagcatccagcacccccacctctcagctgggttaggaggcaggcggaggcttttcgcgggggctgtgcctggtgggcggttttcccagagcagggagcaaacaggactgagttggcgc

SEQ ID NO: 283768 - DNA, 122 bp, Homo sapiens
actgagtcaactctagctcctctcatgatgaaccaggtcatcgcctgcgtctgcctcctccgggtggccgcaggtcttagggccaccgcttcctgtcctgagtgtccactccccacgtggac

SEQ ID NO: 283769 - DNA, 122 bp, Homo sapiens
acctggggaagccagacttaatcaggaagtgtgggggctgtcagcaggggcaaggggccacgcagccaagccaattctggaatcttttggaaagaggaaacatccggctcctcctccctcac

SEQ ID NO: 283770 - DNA, 122 bp, Homo sapiens
cacactaaccatggtctagccctgatctctcacggccacagtcaccatggaaaattctgacgcgaggccatctctccccttaacaccagcaccgtcctcagctttctctgaaagcattttac

SEQ ID NO: 283771 - DNA, 122 bp, Homo sapiens
ccggtggaggaggctgagtagggcaggcaaggtctctgcctgcagccacaccaacccagccgctatcctcccagcggggctgggcagagcatcgggaggactgcccgggtcgcggaagggcg

SEQ ID NO: 283772 - DNA, 122 bp, Homo sapiens
cccggatctaaggaaggaattctacatgcagtttcaccccgatttgcctcacccctgccacggctccaacgcagccacgcggcacccccagacccgggcccacgtggccgctcctcacagtg

SEQ ID NO: 283773 - DNA, 122 bp, Homo sapiens
gccaggacagtgggatccatcttggccaggacaaaggcagtccagagaggccccgcggcgcggtgcggcgcgatcacgcccgagtctccttctcgttcccctcggcccttcctaaaacctgc

SEQ ID NO: 283774 - DNA, 122 bp, Homo sapiens
atcccgcgccacctgcagctagccatccgcaacgacgaggagctaaataagcttctaggtcgcgtgaccatcgcgcagggcggtgtcctgcccaacatccaggccgtattgctgcctaagaa

SEQ ID NO: 283775 - DNA, 122 bp, Homo sapiens
tcttggggtgttacttccccctccatccagtagggacgcgcctactctgccctagagagacgcaggccccgccccccgccccaccccgctcgcccgggagccttcgcgactccccggctcgc

SEQ ID NO: 283776 - DNA, 122 bp, Homo sapiens
tactcaggaagctgaaacaggagaatcacttgaactcgggaggtggaagtttcagtgagtcgagatggtgccactggactccaacctggtcaacagagtgagcctgactctgatgatagtaa

SEQ ID NO: 283777 - DNA, 122 bp, Homo sapiens
ggctcccggcgaggtgggcagggagacgtcccccgccactcgctggctggagtttgcctgcgcgtccggcctctcccccggggatcccctgggattaccgacggagctcaatttcgagagta

SEQ ID NO: 283778 - DNA, 122 bp, Homo sapiens
ttgtctggaaagtcagcatctccggctccggctgcaatgtgttcctggtgacattagcatcgggcagacccgccggaggaggggggtcgccaggttcccgtctgctttcggaggcggatcga

SEQ ID NO: 283779 - DNA, 122 bp, Homo sapiens
accacctccctagaccaggtacctggtcgcacttgatagtccggagctttcccaaggtagcgctttaccggggctgcccttttagctggtccagtgctgctaatctcagctcacccattttc

SEQ ID NO: 283780 - DNA, 122 bp, Homo sapiens
gacctgggagaggcccaggcgcctttacccggtttcattttcagtttaggccaaaacccccgcgggttggtcggggcagggcggggctcgggggaccgggctgaccgcgggggcggggccag

SEQ ID NO: 283781 - DNA, 122 bp, Homo sapiens
tttactttttgcttatttccagccaaatacacaaaagctccaaaacatttatcagcaaggcggacctgtgtgaaaccctgagccagtagatctcttgaaccctacagtggacttgaaatgcg

SEQ ID NO: 283782 - DNA, 122 bp, Homo sapiens
agcacagaaccaggtggagtttgtttaaccaacactcccgtgacactcatcgagctccagcgctcttccaggggctttccgctatcagtcacgtttggatacatcgcggttggccatatggt

SEQ ID NO: 283783 - DNA, 122 bp, Homo sapiens
gtgagttgaatgcacacatcacaaagtactttctgagaataattctgtctagtttttatacgaagatatttccttttctaccattagccccaaaccacttgaaatctccacttgcaaattcc

SEQ ID NO: 283784 - DNA, 122 bp, Homo sapiens
gtctgttccagtgtggtgcccactgtccatgcgcctgtgggtgtgagcctgcaccctgcacgaatgtgtggagcggggtcgtggctggctggggtcactgcctgtcccctccttttccgcag

SEQ ID NO: 283785 - DNA, 122 bp, Homo sapiens
tgaacccgggaggtggaggttgcagtgagccaagattgcgccactgcactccagcctgggcgacagagcgagactcagtctcaaaaataataagaaggccaggtgcagtggctcacacctgg

SEQ ID NO: 283786 - DNA, 122 bp, Homo sapiens
ggtgggggcagtccctccagcggctcgggtggcaaccccaccaatacatcgggtaccacacgccgctgtgccggccccagcaactccatgcagctggcctctcgcagtgctggggagctcgt

SEQ ID NO: 283787 - DNA, 122 bp, Homo sapiens
tgggatctttagacaatccccttattaactgtgcgcttgttccctctattgtctggcattcgtgaatgtggagcatcctttcttggatagctccaggaggtaaaatccccagggtcccctcc

SEQ ID NO: 283788 - DNA, 122 bp, Homo sapiens
tgcttctgaacaaatcatacgtcctgtaattgccgcttagctctaattactattgaggatcgtgtttgcaacttgattccagggagagggcagaaaaccttctgatgacacagaaccaaata

SEQ ID NO: 283789 - DNA, 122 bp, Homo sapiens
tttctcttctgacttcagcagctcttgtacctatctctaggattgagccttcaccttctccgaattgtgatacagtcagctgctcgcctcatagagtaattgggtgaggaacagaccatttg

SEQ ID NO: 283790 - DNA, 122 bp, Homo sapiens
gtctgacattgtcagagaaatacacacacatacacatataagcacacatccaggcagcagcggctgcatgaaggtgttaactttgaatgatccgccacgctttgccctaaaagggaagcttg

SEQ ID NO: 283791 - DNA, 122 bp, Homo sapiens
gaagtaatctgcacagggaagcagttaaccgaatacccccttgacatacccctgaacacccggaggctgttcctgaacgagaacagaatcactagtttgccagcaatgcatctaggactcct

SEQ ID NO: 283792 - DNA, 122 bp, Homo sapiens
gggccccctccctgctccggggtgcaggtggcaggctggggagcacagcccggttggaggcggtaggagcccgctcgccccccacccgtcactaacttgcagattgcagggcgagtgggcgt

SEQ ID NO: 283793 - DNA, 122 bp, Homo sapiens
agtctgctcccctgacagaccttgagctctctgaggccaggcactgtgtctcatgtgcctcggtccctggcaacccatacacttcatgacacacggtaggcccttagtgaatgttaactatt

SEQ ID NO: 283794 - DNA, 122 bp, Homo sapiens
ctgctctggacgccgaattagtgtttggcagcgcctggtggtcttcaatcccagcccctccggcccgccgcgccccccgggaccaaaacaagcggaggcgagcgcgggcgcgcggggcatgc

SEQ ID NO: 283795 - DNA, 122 bp, Homo sapiens
gtttagtgatataaactcatttgagaagccaaagggtgtcctggttgagtgcgtgggtctcgggggccagactagctgggtttttcatagtggtctctgcttactagctacatgaccctgag

SEQ ID NO: 283796 - DNA, 122 bp, Homo sapiens
cattttggtagcattcttgtttcattattttagaaaggggtcttcccattactgggatgtcggggccctgtcagagaactattattaaggctctgtgagggaactgttcagtctcacagcaa

SEQ ID NO: 283797 - DNA, 122 bp, Homo sapiens
atatttttattctttttagcatattacaacattatattcttaatgagttgtacttgtttacgctgcaatttttgacaatatcagttttatctgttagcattgggaattcccatttaaatttt

SEQ ID NO: 283798 - DNA, 122 bp, Homo sapiens
tgggataactgagtgtgagagttgagatggagtggttctgagtataaccacccagcatgccgctgtagaggtgaataccagaagtgaaaggaaaataaaggtcattagacttgacgaagaac

SEQ ID NO: 283799 - DNA, 122 bp, Homo sapiens
gaatgagagtctctcctttggattgcaatatttaaggataggcagttggtatgccctccccggcgtttccttccgccaccggaaggaagctcatgcgagaaggaagcctccagcctggaata

SEQ ID NO: 283800 - DNA, 122 bp, Homo sapiens
ggcctaatccttatatgtcctccctttggtcagggctataccaaacctggacctggttatcgataacgaggcttatctacaccaattaatgtagctgctagctattggcctcccaaaagact

SEQ ID NO: 283801 - DNA, 122 bp, Homo sapiens
acgggatctccctccccacaaggaggtggagaggctatgtgtcttgaacaactggggttgcgatccagtgtatgggcagtcccactcctggaactccagggtgggcactcgctccatttcca

SEQ ID NO: 283802 - DNA, 122 bp, Homo sapiens
agccccatcaggtggaacgtgcactgcctgcgtttcagaaggggcggcctggggaaggggcggcttgggcacgctgcccctcaccaccacgcgtgacccacccatgtgtctccctttcagag

SEQ ID NO: 283803 - DNA, 122 bp, Homo sapiens
gaaactctgccctggacccttctcaataagtccatgagaaatcaaactctttcctttatgcgacactggattttccacaaagtaaaatcaagatgagtaaagatgtggtttctagatagtgc

SEQ ID NO: 283804 - DNA, 122 bp, Homo sapiens
aacaccatgcgtggaggaagccctggagtggttccttctgcagctggtatgcgtgaccagcgtcttgcttggtctgattttttttccggagccccccactgctgcgctccagaaatagcctt

SEQ ID NO: 283805 - DNA, 122 bp, Homo sapiens
gtacatagggtgctttattctccacagagtgatacatgctaaggtgggttgggcttggaccgatgtccccatatgtacagaactgaataaagtgggtctctgagaagtctgatgtgccttga

SEQ ID NO: 283806 - DNA, 122 bp, Homo sapiens
gccgcccaaggaggcggacctggcgcagcccaggcgtccggcccctccccgcggctggcccggcctccggggaagcccccttggtcccacccagggccagggcccgcccccagcttcgccgg

SEQ ID NO: 283807 - DNA, 122 bp, Homo sapiens
ggaaagagtgtctgatcccacaggttgagggctcagtcagattaagagatacatacgcgacgtctggaagatcccgagcacaggaccttccgtcctgataggataagttcttcttcaccttc

SEQ ID NO: 283808 - DNA, 122 bp, Homo sapiens
acccccactttgagaaggttctgtccctggagcctggactgatagaagccacatcagcttcgcttatcacgctactgttctgacttctgattggccagatggagttcactaactgccctgat

SEQ ID NO: 283809 - DNA, 122 bp, Homo sapiens
cagtgcctacatcattacatgcctgcaaagaaattcattttccatctcctctcatcttcacgttccctgtaaaggaagaaaaggagaatgtcaagggcttgcagagtataagactggatgga

SEQ ID NO: 283810 - DNA, 122 bp, Homo sapiens
gttgtctggcctgcaagccggccagcacctggggccttgtaaagtccagctctgtctatccgggaaggaagccaccaatccctatacctccccaggaactaaatagcagggacagggaaccc

SEQ ID NO: 283811 - DNA, 122 bp, Homo sapiens
cgcgcccggccggcataggcccattttctgagagcaggatacatatgtacacacacctgtcgtcgggtggacacagaggtgaacccacagacattcattctcactggccagacgatgaggag

SEQ ID NO: 283812 - DNA, 122 bp, Homo sapiens
ttttacagccaccatcttgacctccgggccctgcagtgtggtacgagccgtctcactccgcggatcgatttttccggcgctatttccaaacctgtgagaccttccgcacctgagataaacgc

SEQ ID NO: 283813 - DNA, 122 bp, Homo sapiens
ctatgatattactcatgtcagcagcaattttctgcagtgcagaggtatttacccgtggctcgtttttcagtgacatgttaactttggacagagtaaaagcaaaggggctaggaaagaagaaa

SEQ ID NO: 283814 - DNA, 122 bp, Homo sapiens
ctagatcctggagtctggtctctggctggccccaacagcaggtctgagacttagccccttcgggatagaaactcccaagagcagagtcacctcctctattgatggtcattactgtctgcatc

SEQ ID NO: 283815 - DNA, 122 bp, Homo sapiens
agaaacgcctggcttccggtggtccctggagtgggcccgtgggctcggaagggggcacagcgtgcctgacaggctgagagtcaccggacagcaccacgtgtggggcttccaagtgggcccag

SEQ ID NO: 283816 - DNA, 122 bp, Homo sapiens
gttaattcaaataataattaatattggtctctgtcagtacagggtggtaatgaaatctttcgttatttgatgactttgactttagatgttgagcgaggaatagaaatggtgttattcctctt

SEQ ID NO: 283817 - DNA, 122 bp, Homo sapiens
cactagaacctccttaagttgcgtcgcgccacagctgtctgcgaacactgagctgcctggcgccgtcttgatactttcagaaagaatgcattccctgtaaaaaaaaaaaaaaaatactgaga

SEQ ID NO: 283818 - DNA, 122 bp, Homo sapiens
ctctgagcaaaacaccagctgggctggcaggtcagaaggcagcttccccaggtcactacccgccaggaagcacccagcgacccacgcaccactcactttgtcgcccctccgctgccctcgtc

SEQ ID NO: 283819 - DNA, 122 bp, Homo sapiens
gaggaggcgacaccatgtcggaccgggtcacatggggcggcgcgggccgagccctgggcacgcccctcacacctgcagccttggagccacttcggggtgcgggctggggccggggcgctgac

SEQ ID NO: 283820 - DNA, 122 bp, Homo sapiens
tttggctggtgtagcttggagtgaggccccctggcgtggagtcttgaggcctgctgagggcgtgagctggcatgaggcgaagagagggccatggcaccgactccgagatgggtcaaggaccc

SEQ ID NO: 283821 - DNA, 122 bp, Homo sapiens
gaaaggggtgacggacacacctggaaaatcgggtcactcccacccgaatattgtgcttttcggaccgggttaaaaaacggcacaccacgagattatatccctcacctggctcagagggtcct

SEQ ID NO: 283822 - DNA, 122 bp, Homo sapiens
cgaaaaccaattgccagtacccgtggcaattgtgagcgccgccattgctgcggcaccgcacgcttcccaccaacttgatccacatccgggatcccgcgcatgcggagaaagccctctgaagc

SEQ ID NO: 283823 - DNA, 122 bp, Homo sapiens
aaatgcgcccattctgccggcttggatatggggtgtcgccgcgccccagtcaccccttctcgtggtctccccaggctgcgtgtggcctgccggccttcctagttgtcccctactgcagagcc

SEQ ID NO: 283824 - DNA, 122 bp, Homo sapiens
accttcaaggtaggagggctggcagggaggaagggtggatgaggccaggggcattcccagcgagctgtccagcagttagaatcattctgtgttccagctccccttgtggtcctgctgggatc

SEQ ID NO: 283825 - DNA, 122 bp, Homo sapiens
gtttccaggttgaattacatctgtataaggcttctctaccatttggagccttaagtttcccggtgaggctaagaatcccatttctgactctaaatccgggactcggcctccctagatctggt

SEQ ID NO: 283826 - DNA, 122 bp, Homo sapiens
ggtgagcgcggtgggggcgggcagtaggttggggtcgcggggcgcgggtcctgcgggaggcgcgcggcgctcgtcactgcgcgtccttgcgctcagccggtccgcccgcgggagcccgcgcc

SEQ ID NO: 283827 - DNA, 122 bp, Homo sapiens
acgaaatgggcttgacctcccagcagcagccgccccggtggctgcaggtacccccgaggccggccccagacactgaaagggaagcagccagcctgaccagggaggaaccggtgtcaacgcgc

SEQ ID NO: 283828 - DNA, 122 bp, Homo sapiens
tgagctgcccttgcgttcagttggaagccacgcaaaatgaactgaaccaggagtgagcttcgtgtacattatctattagaaaatgaagtaccttctggttcagctagtccctgtgcgttgag

SEQ ID NO: 283829 - DNA, 122 bp, Homo sapiens
tcagtcccgcctccataccctgatagcgctctggtattggtggagatgccagggagacctcggtgggcagaaaggaaccgggttgtcttgggccgggcagggcgggtaagttgtcgtagggg

SEQ ID NO: 283830 - DNA, 122 bp, Homo sapiens
ccctgaagtctctgctcagttaggtgaggttggatagaggtttgcatcaatgccttgagccggtaagtctctcctcagtgcggagggctttgtgtgtgtggtgcactcctgcccctgccgca

SEQ ID NO: 283831 - DNA, 122 bp, Homo sapiens
tccctgaacgaggacctgcgctcctggaccgcggcggacaccgtggctcagatcacccagcgcttctatgaggcagaggaatatgcagaggagttcaggacctacctggagggcgagtgcct

SEQ ID NO: 283832 - DNA, 122 bp, Homo sapiens
gggaaaattcactgtccaagtctctgaaatgtacggtattttcatctgcattggatcagacgcccccgtgtccttgtgaggtggcgctcccggaacaggagacagggtgggtctcattccag

SEQ ID NO: 283833 - DNA, 122 bp, Homo sapiens
agcctctctcctcctgctttgggacctcatgtgcacaaacccttttgtttgtttttgagacggtgctttgttccaaatctggggctgagacaagctgcagggacaggtgtacacatctgaca

SEQ ID NO: 283834 - DNA, 122 bp, Homo sapiens
tcatgtataaaatgaaaggctttagttatttctagaggagtcccatccaacactatttggcgactgttaatatgttataattattagacagtggaaaagcctttattgactaattgatttaa

SEQ ID NO: 283835 - DNA, 122 bp, Homo sapiens
gcttcaacacataaatagaatattcatgccagctggaagacaatggctctggcaggcccacgtgtcatccttctggaacatctccttaccctgtaggtccttgctaaggctccagtactgta

SEQ ID NO: 283836 - DNA, 122 bp, Homo sapiens
acttagcttgcttccaagtttccttatccatggtttgctggaacctctgggtccaacccacgcagctcaggaaagcagagtgagaaacaaaccctggccctcctggtgctccacatgcaggc

SEQ ID NO: 283837 - DNA, 122 bp, Homo sapiens
agtccaggtgagtcctggggacctgaaaggatggacccagagagataaacgacttcaaaccggcacggcagtgaagtgactgacccgcgagtgccctgcaccgaggctgacatttgacttcc

SEQ ID NO: 283838 - DNA, 122 bp, Homo sapiens
ggggctcctgatatgggcatcctagaacaaaactgcagccatttgcatcttagtttgaaacgaggctggagatggaagcagggagccacaacgggtctcagaaatgtcagatagcatgggca

SEQ ID NO: 283839 - DNA, 122 bp, Homo sapiens
gcgcccacgtctgtgtctgggaggagggagatttcagggcatagatctgcggccagggtgcgagaggtgaagggacgaactagcactcgcagaccccagagagaccagtctcatcagccaac

SEQ ID NO: 283840 - DNA, 122 bp, Homo sapiens
cagacacaactccagtgatccacaaaggctgcggccagggtgcagcagggcggctcagcacgtgcaggcgaggaagctgccagaggcccagaaagatccccgtggggctggagggaagatcc

SEQ ID NO: 283841 - DNA, 122 bp, Homo sapiens
atcaccaaccaggcgggcaaacagtgtcggcagtcacaagcaccacagcacgggaacgagcggccgccttgtgcagccgtgagcacgagcccactcacagcgctgagcgaagcagccacaca

SEQ ID NO: 283842 - DNA, 122 bp, Homo sapiens
ttagaaggcaagagcagcagggtcaggaggaagagcaggggtgtggcgcctcgttccttccgccaggagctcatggggcttcgttggacccaatcccgttgcctttgttgacgtagaatggc

SEQ ID NO: 283843 - DNA, 122 bp, Homo sapiens
cgcctgcaggagcgcaagacgctgcgggagagcctggccaagtgctgcaggtagcggccgcgcgggcctgcgtagagagaagcggagcggggcgtccacgccttggggagggaagggcgtcc

SEQ ID NO: 283844 - DNA, 122 bp, Homo sapiens
ggaggttgaggcacctgcgtggtgtggaaggaaaaaaaacatgtcggcagaggtccccaacgggagaatgtgcctcccaaccgctcattcgcgggacccaggggatcctatgtgtccctgtt

SEQ ID NO: 283845 - DNA, 122 bp, Homo sapiens
ttgtttatattgataatcatcccttaaactcagatccaggggcgtcaagagacctgagcccggccccggtgtgccgcgcactggccatgtgtccggagagggctgtgattgcggctgtcagc

SEQ ID NO: 283846 - DNA, 122 bp, Homo sapiens
gacaaaagccgtataacaactggctgctcagaaccattgctccccagcggcaccgcgttgcgcaaggcaaggcctgagcactgagtggctggtgaaacagaggcagatgtcctcctccccag

SEQ ID NO: 283847 - DNA, 122 bp, Homo sapiens
ccgtcagtgggctgcagggccgggggtaaggggtctaactcctactgcttcccaaccctccgcgtcagacagcacccccttctccaaacaaccccggctttgtcccctggagccctaaataa

SEQ ID NO: 283848 - DNA, 122 bp, Homo sapiens
gagtgcccaggcccatctgtggcaccaaatggttccgagtggctgcagctcttgcacacgcgctttccacttggggcagaagaggccctggcatatttgtggtggtctctgatcaggcttcc

SEQ ID NO: 283849 - DNA, 122 bp, Homo sapiens
aaagaagataagcacagatgcagggtcaagttagcctgtacactgtgctcatcagaaaaacgtgcccactttattcaggagacacagccctgagtcagagcacagcttacgtagtgagtgaa

SEQ ID NO: 283850 - DNA, 122 bp, Homo sapiens
taatgtttgcctagaactgagcacgagttttccactcttgcagcgcgagaagagaaaagacgcagataaactagcagagcaaagggcagaagaaaagagactaaaaaggagaaactagaatt

SEQ ID NO: 283851 - DNA, 122 bp, Homo sapiens
caggggcaggactgcgccttagtctgtctgcagcccgactccaagttctttacaccacaccgcctccctcaggtgtctggaccatactggcttctcttgcatggaggtcactgcagtgggag

SEQ ID NO: 283852 - DNA, 122 bp, Homo sapiens
tccaggggtcctgggtggtggctgaaaacccggctcggaaccctcctgcctctaaaaaaccgttgttgtgcttcgcagcggttcttctctgttcggccccgtggccggtggccgtggtgctt

SEQ ID NO: 283853 - DNA, 122 bp, Homo sapiens
agcagcgagctattctttgtttttgttactctttgtttaccattaacctagtaatcacctcggctggaggctggagattgaagcaggggagtgggggaggaggacctgaaggagcagagggt

SEQ ID NO: 283854 - DNA, 122 bp, Homo sapiens
taacaagtgtgccacaaggacccagaatcaattcatctgtccactcttaaattataatagcgggagttgtcatcacgagtgcctaaggcttatggcaaaaaaatcccgagaatcctcaatat

SEQ ID NO: 283855 - DNA, 122 bp, Homo sapiens
agaggcgggtgtcaggcaaattgcttggcaacgcgcagagaaaactccatccaagccccacgtccaggccgcctctgggcgctgtccagcgggcagagcgcctgaggccaagctggggtcct

SEQ ID NO: 283856 - DNA, 122 bp, Homo sapiens
ttctcctaatgatcttgcttctctcgcgaaaactgcagatttcttcatcctccggttgaacgttcttggggagccgcggccgacgcgcctcgcactgatggccaccagggggagccccgcgc

SEQ ID NO: 283857 - DNA, 122 bp, Homo sapiens
tccctcctctctcctggaccacagcgcccgctctgacagcagggggcgccctcgggccggcggagcctccgcttacccacaatcagggccttggtgcgcagcccgccctggagctctggctg

SEQ ID NO: 283858 - DNA, 122 bp, Homo sapiens
tcttttctttctttcctttttagagacagggtctctgtcacacaggctggaatgcagtggcgcaaccatagtttactgcactgtaatctggaactcctgggctcaagcaatcctcccagctc

SEQ ID NO: 283859 - DNA, 122 bp, Homo sapiens
cctgctctccagagtcattggattttattcttggaaagaaactgcgggcgggggagtggccgggaggcaaggcgagcacaaaggcctctcagctgctactgctgcctcagctctggactttt

SEQ ID NO: 283860 - DNA, 122 bp, Homo sapiens
ttaacacctacacaactttgtcactagagcattattaaaactataacaactcccggctggcgcacggtggctcacgcctgtactcccagcactttgggaggctgacgcgggcggatcatgag

SEQ ID NO: 283861 - DNA, 122 bp, Homo sapiens
acaacacaacacgtagtgataacagtgaagcacagatggcgtttgttcaggtttgttttccgttctgcaggagcagcagcactggcctgtcgacagtgcaggtggctggcaatggccttgct

SEQ ID NO: 283862 - DNA, 122 bp, Homo sapiens
ttatggctttgtgtatatagacattgtcctgtagtccaaaggatgtgactctgtggcagacgggaacctagaacattggacatttattatattacattaactaccttgcttgcttccaggtt

SEQ ID NO: 283863 - DNA, 122 bp, Homo sapiens
tgtaagctctccaagaaagcgatgcatgaagatttcctgatgctaccttcttactcttgccgtgttccctgtcttgtccagttgattagttttggaaagctgacattgggtttagaatctta

SEQ ID NO: 283864 - DNA, 122 bp, Homo sapiens
gactcagcagcggcgcctcgccccggaacaggccccacccggagaggggctgacactgatcgtgccccctgggggctggggcgcattcaaggtaaccttgaaacctcacaggcacatggaga

SEQ ID NO: 283865 - DNA, 122 bp, Homo sapiens
ccagccaatgctttgtccccagaacacaggcgagaactaccgatgcaaatgcaggaggaacgactgtcccttaacttgcagctagggctgtcccagacctgcagcttgtggcttaacaccct

SEQ ID NO: 283866 - DNA, 122 bp, Homo sapiens
gaaactcattgcaacctgacaaagttgcagcgttgtagcgcggggtcagcaacaggaattcgggttgggtggagtcggactcagggagtggtcgcttgtgcgcagaactgcgtagactcgag

SEQ ID NO: 283867 - DNA, 122 bp, Homo sapiens
tatcatgttaaagcagaaaattatcatctaaatcccagattgtataattgccttatttaccgtgaggggaaaataaaggcctggggagagccactggtccaatgtccacagtttaatggatg

SEQ ID NO: 283868 - DNA, 122 bp, Homo sapiens
aaaagggaaagagctcttttaccaaggacccgccaacatgtgccgcgtttgcaccaaaaccgtgaagaaggcggcccgggtcatcatagaaaagtactacacacgcctgggcaacgacttcc

SEQ ID NO: 283869 - DNA, 122 bp, Homo sapiens
gctgtgtaacatgctggggatttggtgaacagtgtcttccctcagatttacatcagagtgcgaaagacaccgaaacaactattcagatttagcagctgtgaaaagttgctatgaaaagaata

SEQ ID NO: 283870 - DNA, 122 bp, Homo sapiens
gtcctacactgcctctccttgcttcggtattttcacagagtcttgctctgtcacttagaccggagtgcagtggtgtgattgatcttggcttactgcaacctctgcctcctgggttcaagcga

SEQ ID NO: 283871 - DNA, 122 bp, Homo sapiens
ccccgcctccgacccgcccagacctaggccccgcctccctgcccctccctctgcggcccgcgcccgcggcccagccccgcccgcaggcgcccccaagactctcccgcaaagcccaagcccac

SEQ ID NO: 283872 - DNA, 122 bp, Homo sapiens
gagctgtagggcagagtctaaatgctgtgatttacacgagaaaaccgtgggaccaggccacggtggtgaatgttgtttaaaaatgctaccatgaggccaggtgcagtggctaacacctgtaa

SEQ ID NO: 283873 - DNA, 122 bp, Homo sapiens
gaccctctaccttgtggcaaggacagagggctttctctatcctggggtttcttgtcttggcgtaccggaagaatcggctcacgcgtgggctcggagaatgagttcaaggttttattgagtgg

SEQ ID NO: 283874 - DNA, 122 bp, Homo sapiens
aacaagtctacgtatccttcagcgaccagatatacaggctttagcattctctttggccatcgtaggccttaggctgcagatggatgtgatgttcgctcttctgtggaccacaaccatcaagg

SEQ ID NO: 283875 - DNA, 122 bp, Homo sapiens
gcgggcgggtggcggcctagggcgcggagggcggaccgggaatggcgcgccgtgcgccgccggcgtaactgcggcgcttgcgtgcccgcggcggggaaccggacggggtcggggaggcgggc

SEQ ID NO: 283876 - DNA, 122 bp, Homo sapiens
gcagatcgcatcagctactactaagccgctgttgtcaggcacagagaagacactcagcatcggatgagagaataaagccgtgtgcggtgtggcttcatgtctctcacaatagcgctcccgag

SEQ ID NO: 283877 - DNA, 122 bp, Homo sapiens
caaaacatgaaacccaatacaactgaagccacaaatgctagcaaatgtagtgacatcctacgagccaaactattaacatgcatctcacagatggggataaaaggactcacaaagcaagcagg

SEQ ID NO: 283878 - DNA, 122 bp, Homo sapiens
gtacaggagtgagtcatagcttgtgccctgtgccctgcaggggaatttggggaagtgtgccgtggtcgactgaaacagcctggccgccgagaggtgtttgtggccatcaagacgctgaaggt

SEQ ID NO: 283879 - DNA, 122 bp, Homo sapiens
tctgacataccactctctttccccttccaccatcattggaagcttccaaaagcagaggctcgctctttccttgcctaacgcagccatggcttgtggtcccaagaagcatctgaagtgagtag

SEQ ID NO: 283880 - DNA, 122 bp, Homo sapiens
aatgcagacatgccgaagtgcatctgtctgggtagttaacatgatctaaacatccctcttcgttccgctaactccggctcttcttcgggctcctcggcagcgctccgggccagccggcccgt

SEQ ID NO: 283881 - DNA, 122 bp, Homo sapiens
tgccggctttctccctgcctcccaggacaggattgtctttggtggtctgaggatgccacgcgtgcattctgaagggagtgtgggatgaggccgagggtatctgaatcccagagcaaggagga

SEQ ID NO: 283882 - DNA, 122 bp, Homo sapiens
accctcgcccggggaaatgcctgtcttctccatttagaaagtgacagctgacggcaggcccgaggcagccaggtagggaggctgcctgtgtgcaacccgctgtggaggctgctggtggctgc

SEQ ID NO: 283883 - DNA, 122 bp, Homo sapiens
cagttcgggcggaggccgggccaggcggggctgtagggctggggcaggcggcgggctgcccggcgggacagctgcggcagccggcggggggcgtcctgagttggcggtcgagggcgctgcca

SEQ ID NO: 283884 - DNA, 122 bp, Homo sapiens
aatgtgtccttcggcagttttgttggcgagcatcatagtgtgtacttacacaaacctagccggtatagcctactacacaccttagactctaagctgtagcctaatgcttctaggctacaaac

SEQ ID NO: 283885 - DNA, 122 bp, Homo sapiens
ttctgcctgtgactgagctgcttatcccagcaccatctatcggacagggagtcctttccccgcggcttgttttcgttggtcttgtcaaagaccagacgggtgtatgtgtgcagcttcatgtc

SEQ ID NO: 283886 - DNA, 122 bp, Homo sapiens
tccagggtggccaaggaggagattgcagggccagagcagagagagcggtcacagggcaagcgtactggtgctagtggtgcacccatgactgctgctgtcagctcattcccacgccctgccag

SEQ ID NO: 283887 - DNA, 122 bp, Homo sapiens
acggccttgcccttgagttgccagcggctgcctggtggggatggatggagggttgagcctcgttccctgagagaatgggtggatgcattcgaaccccaggacctcgcccaggagccagggag

SEQ ID NO: 283888 - DNA, 122 bp, Homo sapiens
tggctgaggttgaggccacaagttactggggaagttaattgttgacaggagcttcgtactcggctcacagccacgcacagtgggcttcctcccagtacccgcccttgcccctgggcctaacc

SEQ ID NO: 283889 - DNA, 122 bp, Homo sapiens
accccacccctggttgggaagggggaggcaggtagaagaggtattttgttgcctgagtgtcgcctgaaagtcccccattcaagcatctctcactgaggctatgcattgccagtcctcttggc

SEQ ID NO: 283890 - DNA, 122 bp, Homo sapiens
cgtatggagaaaaataagcagggagaggtgagaaggagtgctgtctggggagaggaaggtcgttattttaaagagagtggtcagggaaggcttctctgagaaaagaatgtttgagcaaagac

SEQ ID NO: 283891 - DNA, 122 bp, Homo sapiens
ggtccagtctcttccccgtccaccccaagtctgacttctctcaggagggactcatgaacacgtgccctgagcacccccaaaatgacatcacacaagggcagaaaggagctgaagggggaacg

SEQ ID NO: 283892 - DNA, 122 bp, Homo sapiens
cttcgcgatttttgcagaggggagccaggtcagaggtgcagcctggtcccctcgcgctcacgtttttacccaggtcagttcgaagttaagtggaaatgatgattaatcctgacaagtcagat

SEQ ID NO: 283893 - DNA, 122 bp, Homo sapiens
gagccgccctcctccagctcactgtggctcaggttcaacgcgctccggctgcagtctgtgcgcagcccccggaaggcgccatgcaggttcccgggcctggtgtcagtattcgcgggctctgg

SEQ ID NO: 283894 - DNA, 122 bp, Homo sapiens
gccccgccctgggtggaacgaagctgagctccaccctagaggggcggggccctttagctccgccccactcaggagaaccccacccctccctccccgttctcattggctgggactgcagggat

SEQ ID NO: 283895 - DNA, 122 bp, Homo sapiens
ttctgctctgtaccccaaccctgcatccccaactctgtatgcgaagcctccagcctgcaccgcgagcccccacccaggcctccaagcctgcgccgcgacccccccacccacgcctccagcct

SEQ ID NO: 283896 - DNA, 122 bp, Homo sapiens
gcctcatatcctggctacagtgttgttccttcagggtggagcctaccatgggatccctttcggaccccacgcagggcctaatacaatgctttggatatagtagcaccaagtaaatatttgct

SEQ ID NO: 283897 - DNA, 122 bp, Homo sapiens
tcagccttggaaggaaggaggttctgataccacaagcgacccggaggatgtcacgcagagcgacattagcctcagaaagaccagcagggtagagctcactcccatgagccacggggagtggc

SEQ ID NO: 283898 - DNA, 122 bp, Homo sapiens
tgtgtgctgagtcatatggaggtgggggcaggggatgacgctggctccttgccagacacacgtactgcccaggttgatgaacgagcctccaaaggcactacaacaggattataatttcacta

SEQ ID NO: 283899 - DNA, 122 bp, Homo sapiens
tgcccgggctggggtgattcacggggattcgtagtggccccaaaggagcacgcagaacctcggctgctgtgcatttatcacctcttttgttcccggaggccgcaccccaggtccagtttaca

SEQ ID NO: 283900 - DNA, 122 bp, Homo sapiens
tgggcctggagaggccgactggaggaagtccagggcctggagcccatgcaaaggagcaaacgccaggctgggagaggctgccctgacgcatgagcttggcctccggagggccgtgaggcagg

SEQ ID NO: 283901 - DNA, 122 bp, Homo sapiens
tagcagcaactatgtatgtattagtaaggattgtttttttaaaatcacagcctgtaataacgtacaaggtgttgacagattccgtttagcttttcatatgtgacatgttaaaattgtccgaa

SEQ ID NO: 283902 - DNA, 122 bp, Homo sapiens
acggcaggcttccccgttcggtggtttccagtgggaaatcactccggaaagggaacccttcggtatcgatttattgtttttgtcttccaaaccattatctctttgaccgaaatactgtctga

SEQ ID NO: 283903 - DNA, 122 bp, Homo sapiens
agcggagttcttcagccctgaacaaaggacacagcagaaaggaaacacagctgagcaaatcgatggaacaaaggaagcattcaactcacaccttgcgtcatacacgcacaaaacttcagcta

SEQ ID NO: 283904 - DNA, 122 bp, Homo sapiens
aacttgtgcccacgcatgtggcctttagtatgactgcaaagttttcatgcaggagcctcccgcatcagcctgctaaccagagcggcggggagtgagggttgttaccgtcctaaatgatggcg

SEQ ID NO: 283905 - DNA, 122 bp, Homo sapiens
agatcttgaaggccaaggtgagtccatcgcccaggggcaggaggctgatgtagaccctgacgtcccgccggatgcgttcgtttaggtttcgcacacactcggccgccacgtcccctttcgga

SEQ ID NO: 283906 - DNA, 122 bp, Homo sapiens
aatgaaatcagcgtgtccgatcatcaattctcatcatgatcgtgacgtcacaaaagacagcggccaatgggagcctgcgatcagctcaggacagtccctggcctcagcccagaacccaagag

SEQ ID NO: 283907 - DNA, 122 bp, Homo sapiens
ccacaggcaccaccactccaagcccgtatatggtttttaaataagacaaattgcaaaaaacgttgccagacagcgttcgctggtttgggccgtcactgggtatggctcgtgtccgtctagat

SEQ ID NO: 283908 - DNA, 122 bp, Homo sapiens
aggttgagcacgaaccgctccacggtgtccttgtcgctgttgtacatgtaggcataggggcgccgcaccaccacgaagcgcctggcccagcctgacgtgtgcggctccaggaagtgcaggta

SEQ ID NO: 283909 - DNA, 122 bp, Homo sapiens
gcccttttctggaacagctttaagaatgaggtcatgaacaggcctttttattattgatcacgaaagaagactggtaaacattaaaaatgttcaacctcactaatagtcaaaataatgcaaat

SEQ ID NO: 283910 - DNA, 122 bp, Homo sapiens
ggccgcgcacggagcgcggtaaaggccggcggagctagacgccccgaggtcggagtgaagcgccgggaccgagccccgtctcccagggagtccggggcgcacggcaccgaggagagcgcggg

SEQ ID NO: 283911 - DNA, 122 bp, Homo sapiens
gaagcggtcccactgggggcggggctgagcgcgaccgcgccctcaactccccctattgcccgccccggggtggggcataaccacccaacaggctccttactcaagctcgggttcttctccta

SEQ ID NO: 283912 - DNA, 122 bp, Homo sapiens
tctcggtttacccagttacagaatggggtcacaggtgcagagcctggccgcctgtcaccccgcaggcagtgatctgagaggtaaatgctccggccctgaccactgctgagtcctgaggggct

SEQ ID NO: 283913 - DNA, 122 bp, Homo sapiens
gagactcgttttaggatactcttttccctttcccagcggcaacaaatgtgactgcagaggcgtgccgggatggaagggtgggaaagaactagacaagcggaggtggtccagccccgcccaaa

SEQ ID NO: 283914 - DNA, 122 bp, Homo sapiens
ctcaagcaatcctcctgccttggcctcccaaagtgctggcattacaggcgtgagccactgcgcctggcccgtattaatgtttagaacacgaattccaggaggcaggctaagtctgttcagct

SEQ ID NO: 283915 - DNA, 122 bp, Homo sapiens
ctctgccacctctatgaattgacaggaaaacatctgtgacctctcttgctgaccgagtcacgggtactgctaatactgccacgttcataatggaaggaaatttccagtgtctgttcgaggtt

SEQ ID NO: 283916 - DNA, 122 bp, Homo sapiens
atttttttttgaagagggaaatcttgactgggtttccaatttagcctttgtgactctagccgtattgaagaggaatcaccaataggtggcagcagaatctcaagcatgtttcttgggaaaaa

SEQ ID NO: 283917 - DNA, 122 bp, Homo sapiens
cttggggggcccacgagacctctgagacaggaactgcgaaatgctcacgagattaggacacgcgccaaggcgggggcagggagctgcgagcgctggggacgcagccgggcggccgcagaagc

SEQ ID NO: 283918 - DNA, 122 bp, Homo sapiens
caatatattagcagctttcctctgtagaggacaaccactgggagagaagccaaacagttacgtgtaataagccttctttggtacttaccgaatttaggatttgtactgggttgaatagtgtt

SEQ ID NO: 283919 - DNA, 122 bp, Homo sapiens
cgctccacagaagctcagcacatcttcatttggtgggcgctggtgccctttccctgtgggcggcgccagctcctttctcggctgcctgcccagctgctgggctggagctccgcgtgctgggt

SEQ ID NO: 283920 - DNA, 122 bp, Homo sapiens
cgttgcagtaggattgggatggaactgctgaggtagcaagcaggacttgactccagaggccgggtcagacactcgaccaaattgaggactaactaaaacagagccaggtggaagcagctttc

SEQ ID NO: 283921 - DNA, 122 bp, Homo sapiens
tgtcacagttcttaaaggcggcgtgtccagagtttcttccttctggtgggttgacggtctcgctggcttcaggagtgaagctgcaggcctttgccatgagtgttacagctcttaaggcagca

SEQ ID NO: 283922 - DNA, 122 bp, Homo sapiens
gtcacctgcaatccatgttaggaaccaggtttgtcggtcaatagtctaggactcatagatcgatctgtgcctctgcaaccagggaatctgacatggtaccaaaatgtttatttatttcccag

SEQ ID NO: 283923 - DNA, 122 bp, Homo sapiens
aagaaaaagatctgtgttattagagattctttacagatgtaaattttcccccataaggtacgactttgcagggccatttcaaaatatggcaaagtggccgggtgcggtggcttactcctgta

SEQ ID NO: 283924 - DNA, 122 bp, Homo sapiens
agggtttggatatgtcccattatactgtcctccctttggaattcaggtataactgaccagcgtcgacgttaaaacagacaacttaaggctgaccaaacggtctgtagcattaagatacatca

SEQ ID NO: 283925 - DNA, 122 bp, Homo sapiens
taacagaaggacggccctggccacgggccacagccagcaacgcttaagcaccagggccggcgagtgccctgccgtggcacggctccagcgtcgcgctctcgaattcatttgctttccttaac

SEQ ID NO: 283926 - DNA, 122 bp, Homo sapiens
tgggctggcctagggcaggagctccacttctctctgcctctggctatgggaaggagcaggcggttggaaatcctgtgacagcagagatcttctggatttttgcctggacccttctgcaagcc

SEQ ID NO: 283927 - DNA, 122 bp, Homo sapiens
tccgctgtacttctgacggcccataggtggcactgtagggacaggtaagtgcacagggagcgccacccggagaggctgataggaggcggagcttcaatgcgacacaacgtggcgggaggagc

SEQ ID NO: 283928 - DNA, 122 bp, Homo sapiens
ctgatgtccgtgaaaacaacttgcggggaagtcgagctgacaaacgcccattaaaggcggcgcataatgaaggggaccgcggagggcggcggcagggaggctccggggcgcgggcacgcgtg

SEQ ID NO: 283929 - DNA, 122 bp, Homo sapiens
caaggaagggatgcttcagccacggtccaaatgccttcagggacaagcagggcagaggcccgggaggtgtcaaggctggatggggatggaggcgggtcctggggagggtgtcaggtgagagc

SEQ ID NO: 283930 - DNA, 122 bp, Homo sapiens
aggcagaggagttgccacacacttttaaatgaccagatatcatgagaacacactcgtgatcgtgaggacagcaccaagaggatggtgctaaaccattcatgagaaatccgcccccatcatcc

SEQ ID NO: 283931 - DNA, 122 bp, Homo sapiens
gatcgaacaatcggcttaataaatgccaggcatttgtgaagccgtggagtggaatacattcgcagaaagttctctccctccctatcctccctgctcatgcatgattataagggtttcttgag

SEQ ID NO: 283932 - DNA, 122 bp, Homo sapiens
taggccaggctgagcagcccaggcctggcgggcgagcaccgttcccacataaatcaccagcgccagagtctcgggaaaaggcgcatttttcattgctggctgcagggcgactccagaccgcg

SEQ ID NO: 283933 - DNA, 122 bp, Homo sapiens
ttgtgcactgggctgttattcctggatctttacaattgaagtggagaaagaaaacacctccgaaaaaataatttaagaggcatggctggttggttgtctcagatttgatcccaggagtcctg

SEQ ID NO: 283934 - DNA, 122 bp, Homo sapiens
gattatttccaggaaaacttcgatttccattttgcttgtaataaatccaaacgtggagaacgacaaactgcttagactcacacaggccctggagttgactgcgcccaggggcgaagagaccg

SEQ ID NO: 283935 - DNA, 122 bp, Homo sapiens
gggcctcgggctggggctggggctggcgctcggggtgaagctggcaggtgggctgaggggcgcggccccggcgcagtcccccgcggcccccgaccctgaggcgtcgcctctggccgagccgc

SEQ ID NO: 283936 - DNA, 122 bp, Homo sapiens
aaggtgaacgccggacatcgagacatggaatcctagaccggcccggaagtgcctctgctccgtccgccttcgaggagaggtcggcatctttgttccctgcccggccattgttcgtgccgcgc

SEQ ID NO: 283937 - DNA, 122 bp, Homo sapiens
aacctttgccaatgggaagggggtgtcacagcgcctcattccctcccagcttgcgctcctcggaataatctccaacagcgtgcctagaagcacagctgcttttgtttcgggcgtcggtgctt

SEQ ID NO: 283938 - DNA, 122 bp, Homo sapiens
catcgccgcccctgcttctccctccttttccactgctgccgagatggcgcgttttttagtcgtcacttccttggccttcttccccggtatcatctgagaccccaagccccctgcgccacagg

SEQ ID NO: 283939 - DNA, 122 bp, Homo sapiens
agcacatgtgtgcatggagcagactgctcaaatgagtcaagctgaatggaaaatactggtcgctctgtggtaagtcagaaagggctgaatgttgtcccagcggaactcacccccagagggca

SEQ ID NO: 283940 - DNA, 122 bp, Homo sapiens
gggccaccaccagctgagatctcccactcccgcagcctttgggtctctctccagtcgccccgtctgcctcccaggagggtgtcaggaaggccacgagaagacgtattgaccagaacagcctc

SEQ ID NO: 283941 - DNA, 122 bp, Homo sapiens
gaactttaagactgaggttaagaatgaacgcggagcccctggccggccgggaacgcagttcgccgctgcagtggcgagtgcgagctggacgtgttagggggctagccggcgtccagggcttg

SEQ ID NO: 283942 - DNA, 122 bp, Homo sapiens
tggcttaccattggaatatgaagagctagtggtacctatgtaacagggatagaaggggtgcgttagttagtaggtactaagaaattctacagaatagcaaaactccctacttttatcttcta

SEQ ID NO: 283943 - DNA, 122 bp, Homo sapiens
gtcactgtgcagggaattcgccacagagcactgccccctttgccagcaacactgagctcacggaatggcagataaacctagataagctgagccagtctttcaagcccaggcagcacttctcc

SEQ ID NO: 283944 - DNA, 122 bp, Homo sapiens
tgaagcaattttaaagttagagtgttactcattaacccaggtatgactgccagtgattaacgacacacagaaatagctaaagcttgatggtttcaaaaatatgattccactactcacatctt

SEQ ID NO: 283945 - DNA, 122 bp, Homo sapiens
ccaccggcacacacagcacagaggggacaacaggcaccaggacccctcggtggggagagccggggacacggtggggagttgtgctgggtgcactaatgatcaaagcgatggttccccacgtg

SEQ ID NO: 283946 - DNA, 122 bp, Homo sapiens
tgagaagaaaaggtctgcatgtgtctccttagccttaacccccttgcctaggacagaaagcggctgaaggagggctctgcctcaagtgtttcttaatcattcccttcagcaatggtgctgct

SEQ ID NO: 283947 - DNA, 122 bp, Homo sapiens
tgtttttttctactctctgctgtaacagaactccaggggggaaatacttcaaccttctgacgtcctaacaatacaaaatccagggagtatagcctaaaaattcaagttatgtggttctcatg

SEQ ID NO: 283948 - DNA, 122 bp, Homo sapiens
gtgcttcctccccccaccgctttcttatagcttcatgctttctctgatgcctatagtccacggcataacttactggcaggcagaattaaataccagtgtaacatgattttaaagagtgcagg

SEQ ID NO: 283949 - DNA, 122 bp, Homo sapiens
agctgccctggaagatcacctgtctgatagcttgcaatctgaggtgtgtgtgcgcgcccgcgtgagagagagggagcggaacgtgcctgagcatggggggaattgggccatgccccaggact

SEQ ID NO: 283950 - DNA, 122 bp, Homo sapiens
tggatcttttgttctgaaaccagattttcacctgagttggggaacaaaggcacacgttaccgggacactcagaggtcgcccgcgccttccccggggcggcgactggaggcatcttcggacct

SEQ ID NO: 283951 - DNA, 122 bp, Homo sapiens
actgttctggtttcctccaaatacccgcaagtgctgcattgcatagccccatatatgatgcgctggcaggcagatgggcagcagtggggagagcttgttgtatctgaattttaattacatat

SEQ ID NO: 283952 - DNA, 122 bp, Homo sapiens
ttattatgctgtggatttgttttgcactgatgggtgggaaaagaccggtgaagcaataatcgtgtaagtgaaagcaatgactctctggtgtcctctacaaatttcccacagtctttgctaag

SEQ ID NO: 283953 - DNA, 122 bp, Homo sapiens
aaattataatccctcttcccataacatatgcaccatgccagaagggacaaccaaagtaaacgatctagccgtgagtaatgaatactttgggctggttggaatccagttagttgaggaaagag

SEQ ID NO: 283954 - DNA, 122 bp, Homo sapiens
gtttttaaaagaaaaggtttttatggctgatgaaatgtgagggcaacagggatagccaatcgaactagagagcaagtactgctttaattatttggcagagtgcccagcaaaggtcctttata

SEQ ID NO: 283955 - DNA, 122 bp, Homo sapiens
ccttggctgagtttctacctacagtctgacccttttgaacagaaagtgttaaggacttcccgttagggctcgtgcttaagcctcaggttgaacctacttgatccttaagaaaagcaaacaaa

SEQ ID NO: 283956 - DNA, 122 bp, Homo sapiens
ggaaaaataagtaacttctttgttccccggtgacctcgggcacgcggatctgaggagcaccgtgcagttgctgctccttcgagatcccctgcgaggccctgggcctcagttcaaaaagctgt

SEQ ID NO: 283957 - DNA, 122 bp, Homo sapiens
agagtagtgttctcgtcctggtaaagtgaacaccttagaactttgaaagaaacatctgaccgagatctcatcagcatcacacattcacacagaatggtttaagatggttccatctctggtcc

SEQ ID NO: 283958 - DNA, 122 bp, Homo sapiens
acgaattttaaaaatcaaactttaaaaaactttttgtttttttttttaaaaaaacggcagcgtaatacaatatttggacacgctatactatgggctttgaagaacgcctgtccagaacaccc

SEQ ID NO: 283959 - DNA, 122 bp, Homo sapiens
aaatttctagtatctgttgaaaattactcacacattcctttccctgtagaaaaaaactaccgctagaattttgtctttcctatttttgttctttcattacattatcttgacgttatagattt

SEQ ID NO: 283960 - DNA, 122 bp, Homo sapiens
acaccagcagcttcagcatcacctggatgcctgtcaagctccattgcagacccactgaatcggaatctgcatttcaacatgaccccagatgattgtgagacagagtcaagtttgagatacac

SEQ ID NO: 283961 - DNA, 122 bp, Homo sapiens
ggcagaggggagaggtgaaaagcccgggactttctcattagaaggcgggacctgccactccgggatggcaatgtcagtagagcaccttctcctggggccaaacacatgtaggatggtcccca

SEQ ID NO: 283962 - DNA, 122 bp, Homo sapiens
cagcagctgctgtgctcaatttctcaccgggccttagctgccttcccgcggcgcagggctcgggacctgcagccctccatgcctaagcctaccccctgcctccgtgggctcctgtgccgccc

SEQ ID NO: 283963 - DNA, 122 bp, Homo sapiens
caggcgcagtgcagccggcccctggggagtcaaggaccttgatcgccgataacaagttgccgttggcgggcgccgagggtgacccgcgagcgcggcacccgcctccccgcccctagcaggac

SEQ ID NO: 283964 - DNA, 122 bp, Homo sapiens
ctctctggttaggccctcctgcataaggcacccccgcaggcagcaggggcagctgctgaccgagttgcatctcattgttgggagaagcaggcattctctccaagaaccccagctcctttgac

SEQ ID NO: 283965 - DNA, 122 bp, Homo sapiens
gtatgtgcacatggggctaaagcagtgggtaggaccccgatcaacctgtggggagaggagcgcgtgtcctgaccttctgagggctgtgctgagggacaactgcactgtccccgaaacaagac

SEQ ID NO: 283966 - DNA, 122 bp, Homo sapiens
tcctcgaccctcttacattagttccgcaccctgtcggagtcccagagcataatcccgggacgatgatagcaggaagccgattcgccctatatgcaaccactttattcaaaagcctattgaca

SEQ ID NO: 283967 - DNA, 122 bp, Homo sapiens
agaccccaagaatctcaccttttcaagctgtgagagacacatcagagccctgggcactgtcgctgcctggagtagaacaaaaacaggacctggtcagagcccgcaggagacgtgggacagga

SEQ ID NO: 283968 - DNA, 122 bp, Homo sapiens
gctaattcaatcatccttgccgcttttttgctcctccaggctgtagagggcgacaaaaaccgcggaggcgcattggggtggggggtgtctactgaaggccgctcccgacgtgcgcgtcttta

SEQ ID NO: 283969 - DNA, 122 bp, Homo sapiens
ggacatttgatcttagaggaatagattctttcactggggaggaaggggctcagatgcatgcgtagataaattacagtgcaaggaatacctgttggagtgctgctagacgagctgtgcaaaca

SEQ ID NO: 283970 - DNA, 122 bp, Homo sapiens
ttagccggccagcccccggtttcccaatccacagtgggaattgaggtaagtgtgtgggggcggggagtgggagtgtcacagccccacacagagccttgctcctgaggtccgtctgcgctcag

SEQ ID NO: 283971 - DNA, 122 bp, Homo sapiens
gggcgatcctgcccgaaggcgcccgaactgcggcgcgcggccgggtcctggcgggcgggtcgagtctccccaaggcggccatcccaagcagctccccggatgtccctcagacccgcgcgcta

SEQ ID NO: 283972 - DNA, 122 bp, Homo sapiens
cccctccccccagtccctgtggggcggaatctggggactggagtccaccagagcagtaggcggcacccgcggggagacaagtgtcggcgcagcccaggaggctcaggtgctacctttcccag

SEQ ID NO: 283973 - DNA, 122 bp, Homo sapiens
gagttgctgcgtggggtctcagagatagcgcctgggctggggaaatcattgtggggtctccgtggtaaggttagcggggtggggacggcctgcgtcttcggcaggtcgtcgcagtctggcac

SEQ ID NO: 283974 - DNA, 122 bp, Homo sapiens
ggccccttccccgtcggggtccccccaaccctttccccgcccgcttccccgccccggggccgcttagcctccagctcagcgggaggtatccccgcccacggccaggattggaggatggaggc

SEQ ID NO: 283975 - DNA, 122 bp, Homo sapiens
ggtggaggtgcccctggtggtggaggtgcccgtggtggtggaggtgctcgtggtggtggacgtgctcgtggtggtggtgctcgtggtggtggaggtgcccgtggtggtggaggtgcccgtgg

SEQ ID NO: 283976 - DNA, 122 bp, Homo sapiens
gtgtgcggcgattatccgtgcaggcggtgcggggagtgggtctgggagagcggccctttgcgcgtgttcctcaggccctttctgccctggtttcccagccagtggacaggaagcttcattca

SEQ ID NO: 283977 - DNA, 122 bp, Homo sapiens
gaggtcgtgcggcgggtccctccctcagccccaccccgggccgccgacctggtccggctccgattcatagtcgtcgtcctcggcgctcacggacatggccatggctcatggtgggcccaggc

SEQ ID NO: 283978 - DNA, 122 bp, Homo sapiens
ctgcgcccgccctcagcccaagatttctagggcattggccgcgctgctgggtgatccctccgggctcaagttgcaagggggcgggccgggccggaggtggagtctcccgccaattgaagcct

SEQ ID NO: 283979 - DNA, 122 bp, Homo sapiens
gcagcgggatcatagctgctatggggctgagatccaggaatctgtgtcgggactgcggggcgctgggttacatcagaggccaggactggcacctggcgcctttcacttccctaaacttgcct

SEQ ID NO: 283980 - DNA, 122 bp, Homo sapiens
gaccggtcacacgctggcggtctacacacacgctcacacacatactcacatacacacactcgctcgcacacgcagcttgtagacacaatcattagcaaagcttttgtgcggccctcccaggc

SEQ ID NO: 283981 - DNA, 122 bp, Homo sapiens
ggtcaacatggtgaaaccccatctctactaaaaatacaaaaaattagctgggcttggtggcgtgcacctataattgcagctacatgtaaggctgaggcaggagaatcgcttgaacctgggag

SEQ ID NO: 283982 - DNA, 122 bp, Homo sapiens
tgcctggtcatagcacagtgtgtacttaggtgaccttgaacaagatgtttctgttatttacgtggctgctcaagctttgtcctgtggactatatattcctaatgacttctttctgtacagtc

SEQ ID NO: 283983 - DNA, 122 bp, Homo sapiens
ctttctcagaccaatcccggcaaagaggagacaaggtagggatgctcacttttatctttccggctcctgtgaaatccaagctgagaatctttgttgagtcccatcccccagactttcgtaac

SEQ ID NO: 283984 - DNA, 122 bp, Homo sapiens
atccgggtaggagatactgcatcatttgggtggtatttaaggctgtgagactgttgagatcgccaagggaatatgcataggtagaagtaagagggctgcagactgagagaggggtcaagtca

SEQ ID NO: 283985 - DNA, 122 bp, Homo sapiens
taccagggtaggtgaccaaggattctgtcgcccaagagatgacagaaggctctagataaacgcacactccgttgccattcacaaggcgttttgtttttacttctcaaaagcggcagagattt

SEQ ID NO: 283986 - DNA, 122 bp, Homo sapiens
tgtggcagacatggcctccctcagagcaacacccctccctgcccactgcccccacactcacgtgatctcgttgttcatgtcagtaatgtctattctgtccaggaaccagcctgctctgttgc

SEQ ID NO: 283987 - DNA, 122 bp, Homo sapiens
caagtttttctttactttttaaagagtaaattctctcacctcaggtagctcagagagctgcgctggaggagaaaagccagtaagtgaacaactggaataaactctgcaggggtggcagtggg

SEQ ID NO: 283988 - DNA, 122 bp, Homo sapiens
ttctctgagctcacgatatccatgtcttcagcctcagtccccaagtggcacacccagtgccgtggcacagctgagactctttccttcccacgactgctcataagcaccgtggctcctccgaa

SEQ ID NO: 283989 - DNA, 122 bp, Homo sapiens
ttgaaaaacctagtcaaagtagcatattcgtttcctagagcccccgctccttcccatcaccgtaatacaagccagagataatatcctcccaaataggtttactgaagtcaacccattacaag

SEQ ID NO: 283990 - DNA, 122 bp, Homo sapiens
ttttcttccaaggttgggagggacagttcattccccaagaggcctctccaggggcggaggcgggtgctggggctggcctgtctgcagctccctggccctacccagtggggatcgcgtgtcag

SEQ ID NO: 283991 - DNA, 122 bp, Homo sapiens
taggagcgtggaacagcttcctcgggttgctccagcagtcgtcaggagagcctcgggtgccgaggtgaagctggtctgccaccgccccggatccatgtggaaccagagctggatcatgtggg

SEQ ID NO: 283992 - DNA, 122 bp, Homo sapiens
cgcggtcgccgctcctctcccgcctttgttctcgggtcgcccctctcgctggtggcgctccgagagagcagcggagccacctgcccaggccacgcttccccgagcatccgcagctgcacccg

SEQ ID NO: 283993 - DNA, 122 bp, Homo sapiens
cgcggggccggactctgaacgcctcgcccgccaattcaaagggttggccctaactttgaacgccccacccaccacgtggaatgttccaaacgccccgccccccgcactgtcactcaccgcaa

SEQ ID NO: 283994 - DNA, 122 bp, Homo sapiens
accgttgtggcgagcgctacacgaggcaaacgacttctcccttctttgaactggaccccgcgagcaccagagtcggcgtaactatcgcctgacagggtatctgaagtaaaagggggtaggtt

SEQ ID NO: 283995 - DNA, 122 bp, Homo sapiens
gcgggttcgagccccgcccctgccaggccttgcccatgccccattttacagaagaggaaacggaggcgcagagagaagaaataacttgctgagggtccgaaccaggctcagaacccaggttt

SEQ ID NO: 283996 - DNA, 122 bp, Homo sapiens
tttctatttgtaaaaaattcctcagccgaaagactttaaatcaacatttcaaatcaagttcgtcataaaattacaagccagttttaaatccctagaaacactgggcattactaattaccttt

SEQ ID NO: 283997 - DNA, 122 bp, Homo sapiens
aagctgggaggggaattcccagcttgcatttttatctgagtgggactggaacgggatgaacgaggaagaggaatagctttgtgtacttatttttagttacatgaaaggaccaacgctggtaa

SEQ ID NO: 283998 - DNA, 122 bp, Homo sapiens
agcctcccccctcatcatcctcttcgtcctcctcctcctcatctgcctcctcctcgtccgcgcagctcacccaccggcccccgacgccctcactgcccctgcctttgtccacccacagcttt

SEQ ID NO: 283999 - DNA, 122 bp, Homo sapiens
cttctttcaaaacccacttttttctattaaccaatctttatgcatttaaataaatctttccgaacgctagtgaaaggcatcgagtatttttctaaaaacagctttattcagatataatccaa

SEQ ID NO: 284000 - DNA, 122 bp, Homo sapiens
cggggcaattttacccgataaaccaaattctgggaatatgttttctcccctccaaaagctcgattttaatgagtttccgcacctgaattgatgagcccgatggctgtttatttttgatctgg

SEQ ID NO: 284001 - DNA, 122 bp, Homo sapiens
ccgcctccacacgcctccggattggcccgctgcggagcctccggcccacaacgcaaaccgcggacactgtggagtccagagctttgggcagatggagggccttttattcgcgagggtcgggg

SEQ ID NO: 284002 - DNA, 122 bp, Homo sapiens
ggcgacccatcccgctagaatccgtccagtctctgctcgcgcaccgtgacttctaaggggcgcggatttcagccgagctgttttcgcctctcagttgcagcagagaagcccctggcacccga

SEQ ID NO: 284003 - DNA, 122 bp, Homo sapiens
gcaggagttcccatgggggctcagaggggctgacatccatccccacgtccagggagctgccgtcaaactaaataagggaggatacaagagggcaggagtgtgagaaaggatgagaaagtagg

SEQ ID NO: 284004 - DNA, 122 bp, Homo sapiens
cagtggcacagtgaggagacctttgaggcctcagtgaccatccttggacttcacctctcacggctttcaggcagagaggccctcccatgcccacaacaggctgagcccagccttcctcgggg

SEQ ID NO: 284005 - DNA, 122 bp, Homo sapiens
agcctctttcctctagccaggacaagacctgccttcaaaagctgtctggcccctggcagccgcgacagcctgcagccctgggagccacagccctggcgccgagatgggagcgagcacatacg

SEQ ID NO: 284006 - DNA, 122 bp, Homo sapiens
accaagatatctgcaggctgtgagacaaaaagctcagtgacagagttaaccatcagcaaccgtgaggcacaggtttcaatactgagaaggacagggtcagacatccaacttctcagctaccc

SEQ ID NO: 284007 - DNA, 122 bp, Homo sapiens
tgttgaacccacagtgaccagcaccaccatcacacaaacatgcctgcatgtgtgcacgcacgtgcagtgtgcaaacctgatgtcagcctcactccctggctcttctgtccacaaacgctgtt

SEQ ID NO: 284008 - DNA, 122 bp, Homo sapiens
tgctttctcctcatcctcatgccccctttgccacaatggtatgatggcttggtagcccctcgaggcagatgcacctgacttgctgctattaaaaagccgtgtgccttctaccaattgtggcc

SEQ ID NO: 284009 - DNA, 122 bp, Homo sapiens
atttttatccaggcctccctggatggatgttgggagagtttacgcgtggccttgtgggatcgctgtggcggactctcagctatcagagggctccatcactccatcgtaaggaggcagctggt

SEQ ID NO: 284010 - DNA, 122 bp, Homo sapiens
gttgctcttccgtttgcaacggcatgttctttatcactctgagcaacctttcttctccctcgattccctagcgaggcttgggaatcgcgtggaagacacttctctcaccttgcccggttccg

SEQ ID NO: 284011 - DNA, 122 bp, Homo sapiens
ttccagcaaatagaaaacaaccgagagcctgaattcactgtcagctttgaacactgaacgcgaggactgttaactgtttctggcaaacatgaagtcaggcctctggtatttctttctcttct

SEQ ID NO: 284012 - DNA, 122 bp, Homo sapiens
tgatggactctgtttccgacatttcagctcatttgcttagtgctaggtcactctacctctcgtttaaaagaatatagctatgctcacatctgtgactctgaatttatcaagcatttgacttt

SEQ ID NO: 284013 - DNA, 122 bp, Homo sapiens
agatggctattgcacaaatatggtccattgcataaatatatctcttctcctgttgatgaacgtctgggctctttccagtttggagctattatgaataaagctgctgtatattgggagacaat

SEQ ID NO: 284014 - DNA, 122 bp, Homo sapiens
gcagcctcttagcaacccctgtcccgggaaggtttgaaagcagcggtgccctagtgacgccggaaaagatggagcggttgtcatggcgacgcggagcacacctcggaaataaataaataagc

SEQ ID NO: 284015 - DNA, 122 bp, Homo sapiens
cggaggttggtaactggtgaccatagggggtcctggggaggttagatgctgaattttctgcgtcagtttactctgttaaaaaaaaaatgcacaaaacgctttccgtttcctacccaagttcc

SEQ ID NO: 284016 - DNA, 122 bp, Homo sapiens
cccaaatcgtaatttcagttcacagctttttatctataatagctttatcaactctttttccgatgctctgcaccagatctcttaaaatataaaattaccttgcaaggtattgtttggaatac

SEQ ID NO: 284017 - DNA, 122 bp, Homo sapiens
acatcccttgactgaaccgccactgaacacccacactgcacaatcgaggcgcagccctcccgagaggaagccccaacgacctccacctacaaggcctctaagtgtaactgtcctgggcgagg

SEQ ID NO: 284018 - DNA, 122 bp, Homo sapiens
ttctagactattaataagcaatttgtcccgctgaaatttacattgcaaagcggagggcgccggcagccgtggcggcgggcctggcgcgggctccgggggtgcgtcggcgcgggggcgggggg

SEQ ID NO: 284019 - DNA, 122 bp, Homo sapiens
caagggctgggcggggcgctcagcgcgagttccgggtgggcgcgggcttggcatgccccgcgctcggagcaaccggccggcgccaccggccctgcacagttaagaacttagcaccccggaca

SEQ ID NO: 284020 - DNA, 122 bp, Homo sapiens
agatggttacagtcatcctcattttacagaaaacagggactctaagagttactaagttaacgtgtttttctggcacacacctaatttcctggaggctaaatcaggagcagcattaccatttc

SEQ ID NO: 284021 - DNA, 122 bp, Homo sapiens
cagcagtttccacatctctgcttgcaacgaaacggaatgcagatgtaatcaacagtcagccgaaacatcatcaaaaattttgataaaagatcactgcatgacgttgggtttataaaccaaaa

SEQ ID NO: 284022 - DNA, 122 bp, Homo sapiens
gctcaacactttaaataaatgacttcacttaatccctacaataatcttacaaagctgatacgatcttgattttgcaggtgagagaattgacatttgggcttaagaaattttgttaaaagctg

SEQ ID NO: 284023 - DNA, 122 bp, Homo sapiens
tgggcatggagagacgggtggcgagtgggcacagagacgggtggcgagtgggcacagagacgaggggtggcgagtgggcacggagagacgagggatggcgagtgggcacagacgaggggtgg

SEQ ID NO: 284024 - DNA, 122 bp, Homo sapiens
catcgccccacacgtcctccgccgcggcccccagcaccaagatgcggaagatgaacagcacggtcagccaaaccttgccgatgaccgtggagtgctcctgtgcattttctaagagtcttccc

SEQ ID NO: 284025 - DNA, 122 bp, Homo sapiens
taactctctagataatttaacaggacaaaggtacagaacaatctggcccttacaagccggcggagacgggtacgaattaccatgacaacagcgcgcgcctcgacattgtcggctcgcgcgtt

SEQ ID NO: 284026 - DNA, 122 bp, Homo sapiens
tggattgcggaggagctgggggccagagcggccgcccgcccccgccccgcacgctccgcacgcccgggctgctcgcctcctctgcaaatctgttttccaagtcacagattgcagcacgcccc

SEQ ID NO: 284027 - DNA, 122 bp, Homo sapiens
ggtcataaagagcaagatgatgcccaggcagatcagggattctcttatctacagagcgtccgcctaccagctccttcacagcagcggattttgctgcaagagaagaggcagcaggccaggcc

SEQ ID NO: 284028 - DNA, 122 bp, Homo sapiens
aggtgggagtaggaggacgtcgcattgacgattgggcagggtcctgcgtaagggagcacacgaccctggaagtagcgagcaaccggattggcggtttccttcgcaaacgtcttgccttctgg

SEQ ID NO: 284029 - DNA, 122 bp, Homo sapiens
cccggatggcaggccggccatgtctgtcctggatctgggagagagctggcgtgtgtaccacgcagactggaagtgcgactccggctgcgtcgacaactgcacccagtgcgacgctgccactg

SEQ ID NO: 284030 - DNA, 122 bp, Homo sapiens
aaaaggccccgctcgcctcctttgtcccaacactagtttccgctgccccattctggaaggcgctacaaaatataggagtgttttcgttttgggacacaggagggacatttacaaactgcacc

SEQ ID NO: 284031 - DNA, 122 bp, Homo sapiens
cctgttcgcaccaactttccgtctgaagttgcctttttctgcctcctcctcctcttctttcgctcgctcagttcgcccgtccgctgccttttttttttattgcctcctttctctcttcctcc

SEQ ID NO: 284032 - DNA, 122 bp, Homo sapiens
cagaggggtttgtaggcacggtgacctccgtgctcctgctctgaaagggcctgaaaggagcggtttatggtgcattaccagtcaagggctcaggtaccagcgccttgtgtcgggaacccggg

SEQ ID NO: 284033 - DNA, 122 bp, Homo sapiens
gcacagccaatgggaagggccggggcaccaaagccaatgggaagggccgggagcgcgcggcgcgggagatttaaaggctgctggagtgaggggtcgcccgtgcaccctgtcccagccgtcct

SEQ ID NO: 284034 - DNA, 122 bp, Homo sapiens
cgcccacccggaggtgccctcctttaactccggctggatctatccgcgaggtggggtgggcgccggaataactctctaagggatatgactgagtctgtttttgcccggccacatagacctgc

SEQ ID NO: 284035 - DNA, 122 bp, Homo sapiens
gcttcgactaccagggcaagacggagaagcacgagtcacagagaggtggggcggaccccacggtctgtaatcacgcgtttgctccagaaacacccacgagggcattttctctctgcacacgt

SEQ ID NO: 284036 - DNA, 122 bp, Homo sapiens
ccaaggcgttctaagcacctgagacccacacttgtctaactctcccctgtccggccctgacgtttacattatgtgcagttcagctcaagtgtgtctcaccgcctcatggtggatgctctctg

SEQ ID NO: 284037 - DNA, 122 bp, Homo sapiens
ataaaaggaggggaacaggaactttactatgaggaagctgggtgtggcacatagctcaggcgcctgtggccatcttaccacagcataattaacagtcaacctgatatgtgaagagggcatgc

SEQ ID NO: 284038 - DNA, 122 bp, Homo sapiens
aaactttactagttggttcgccaggtacaaacctatgcggaaaaggcggggtacaggcctcggaggccggacccaaccagtcagggaaagaaagagggcagaagccgcaggctgcacagcct

SEQ ID NO: 284039 - DNA, 122 bp, Homo sapiens
ctggaaggcaggctcacagctcagaaaatacctttcagtcacacattgatcagactggggcggtattcaactcatcactggtgagcagcaattcatcactggtggttcaggagatcaaagac

SEQ ID NO: 284040 - DNA, 122 bp, Homo sapiens
ctccggttacaaagagttcttcctgacggcacagaagtggcacgcacagtaggtgggccccggcttccgctggcggtgccgaggcagggtcgcaggttcacctgggttttccgttgacagcc

SEQ ID NO: 284041 - DNA, 122 bp, Homo sapiens
cgcgcccggacaaaacacaaacgtcacagaggcagcggcggccaatcagtggagggcgcgcgcggccgcgtgcccctcgcgctcctcgcctcccctcgcgcgccgcgtacgtgcagcaaccg

SEQ ID NO: 284042 - DNA, 122 bp, Homo sapiens
ggtgcgcgagacggaggccctgatcccgcccgaggtgcctccccgccaatgcccagcacacgaggctgtcggaaaggttcattggctaatttgccacagttggttttcaatatgtccatccc

SEQ ID NO: 284043 - DNA, 122 bp, Homo sapiens
aagtaattgagatccacagtggctcaggagtgttgaccggtgcagggtgtggtagaagcccgttaatgggtaggggagccagatacggaggctcagctgggctgggggcaggtctgcaagaa

SEQ ID NO: 284044 - DNA, 122 bp, Homo sapiens
aacgcaggtttgtgtgggaggaggaggggagagagcggatggcagggactccacccagggcgggacagctccagccctaccagcagggagaggttatttggtgcattgtggcccttggggca

SEQ ID NO: 284045 - DNA, 122 bp, Homo sapiens
tctgtcttggctgaaccgccccttctgtccctctctacagcttcctggaagcgtcaggcacgtgcatgaacagcttaacacagcagtgttttcaagcaggtaacaatactactggaaaaaaa

SEQ ID NO: 284046 - DNA, 122 bp, Homo sapiens
agcagggtctcaggccagccgtggagaaggcggctgcctctgcggggatgggcaccgcagcgtggtgggcagatatgaggaaggcaaggactttcccattgaccatgcaaaaccttcacgaa

SEQ ID NO: 284047 - DNA, 122 bp, Homo sapiens
ggccgtcgcttaaccgtttagttgctgggatggggcggcgttgggggtgcggccctgaaccggagggatttagagactggagacgcggcctctaagagaggttgaaactgtgtgtgtgtggg

SEQ ID NO: 284048 - DNA, 122 bp, Homo sapiens
gccctgcagttcccggagaagcccctcaagaacatcccgttcctgggggcgtagaggggccgggccggggacgaggcctcctgcggacaccagctcctctctccgccgtcaccggggaggcc

SEQ ID NO: 284049 - DNA, 122 bp, Homo sapiens
ttatctggccccacccacatcctgttgattggtagagcctagaggcctgttttgacagggcgctgattggtgcgtttacaatccctgagctagatacaaaggttctccacgtccccatcaga

SEQ ID NO: 284050 - DNA, 122 bp, Homo sapiens
gtgtgctcagcctcccagttagagtgcagtgccaagtggctcgggcgtttgctctttggtcggatatcatacccccgctccttgcttttcttttaagactcttcagaccctgggtatcttgt

SEQ ID NO: 284051 - DNA, 122 bp, Homo sapiens
gccggagacaagaagcctgatgccaagtagctccagggaacgcatgtggatcctagacagcgccttatctatgattgagtgtccgtgtaaataaattcctacttagacttaccactttgtgt

SEQ ID NO: 284052 - DNA, 122 bp, Homo sapiens
tgtactcatcaggctccttgcttagacatgacttttgactgcaaaacggagctggcctatcggcagagagagtttgaagcttctcatggtgtttacattagtttgtctaaacagacccagaa

SEQ ID NO: 284053 - DNA, 122 bp, Homo sapiens
gccagccagccgtggaagtgtcctgggctctgtcccggagacgacgaacttggctccccacgagggcggcctattccccacagtgtcccccgggggccacacctgcacccaccttgctgaag

SEQ ID NO: 284054 - DNA, 122 bp, Homo sapiens
tgatggagcaaaaactgttacttggctatgtcaagagaaagcaatgcaacaagtacaaagcgtgctgattaatgcaccttgtctatctctatcagacagagagctagatattgatagagact

SEQ ID NO: 284055 - DNA, 122 bp, Homo sapiens
ttcttccagaaaacacaaacatcaaggctaggacacacaggaagtagccatgagaaatatcgaggcccacaatggaaactttatgatttaaatgacctgagacatacaggaagtggcttatt

SEQ ID NO: 284056 - DNA, 122 bp, Homo sapiens
ccgtagccccccaccctccacgatgattgctttctgtccatcttgagctgggtgtcacttcgtttagatttacatcaagtagtaaattaaaataatcactcagcaaacactctgagctcagt

SEQ ID NO: 284057 - DNA, 122 bp, Homo sapiens
gtctgtctggtttccccatcagaggtggtggcttgtgaactaggagcgctcgagtcccagcgccgtggcccagtcaccagacggtgggtggggagccgggctgggccctcgccctggccaca

SEQ ID NO: 284058 - DNA, 122 bp, Homo sapiens
cgcgctccccggcccggcctcgccccctccccggcatggcgggagcgcgtcgcgcgtgcccgccgctcgggctgactcaggcttcagctgctgcatttgtgagtcatcgcgcgctctggggc

SEQ ID NO: 284059 - DNA, 122 bp, Homo sapiens
cccacccacagtcacggggacaggaatgagaaccacttcctacagcgggtgaccgggctgcgctgtggtgaagtacctgacagaggaagatcctgggccctcctggagatcagagtccacca

SEQ ID NO: 284060 - DNA, 122 bp, Homo sapiens
aagtgggtcacgtggctcagacgggggcggtagctgtgggggcgtggccgtcacacggcgcgatccgtctgggcagcggctcttcgggggccacgccctccgggccctgggggcctagcgcg

SEQ ID NO: 284061 - DNA, 122 bp, Homo sapiens
aagaagttggaatacaagaaaacgatatggtggcttggaataaaatagcaaaggaagcggcggtgaaaagttcataacaaaaactttataaacttggcgcctggcccatgaactcttggtca

SEQ ID NO: 284062 - DNA, 122 bp, Homo sapiens
tgtcaactctgacactggtagaaggaagaaaaaaaattcctgagaatttaaaccacaagccggttcatgtggatttgcagtctgactcataccattggtgtggtccaaaaccctcaagcata

SEQ ID NO: 284063 - DNA, 122 bp, Homo sapiens
gtcctccagcagggcggcgaaggcgctgtgcagctggcgcacctcgtggcgggcctcggccgcggccgccttcagcgcgcccacctcgtcatccagcgcctgcacttggctccggagccgcg

SEQ ID NO: 284064 - DNA, 122 bp, Homo sapiens
tacctgcttccccgcggcagcagccagggacttctgcagaaactgacggagtctggggtccgagggagcgccggtgacacagcccagggccaggacgatggacagcgcagccagcgcgcact

SEQ ID NO: 284065 - DNA, 122 bp, Homo sapiens
ttgcctgtttctaatctgccccgggagccgcggctcagaggtctgctcagaggcaggactcgcactggtggtggcctagagggcaacagtccggaagctcgggcgggggaatccgaggaggg

SEQ ID NO: 284066 - DNA, 122 bp, Homo sapiens
acagaggtgtgggggacagaaagacatgaagagagagtgtcagtgccaccgaagaggagacgagaatgcaaagacaaggtgcccactggtgtggaaagggcattaggtgtctgcgagagggc

SEQ ID NO: 284067 - DNA, 122 bp, Homo sapiens
cgcacggtgcctggaggggccggagcaagggtgttcaccttgaaaacctgtagcgtttctcgtggaggcgggtataaccagcagaagcacctgtgtgctttttcatactgtttaacccttgg

SEQ ID NO: 284068 - DNA, 122 bp, Homo sapiens
cagatcccgctcatcttccggccgacgccgctggtgcggagcaggctgcccgcccctgggcgcggagcctgaagcccagagcccgccgcttgctccacccgccccgctccgccggctgtggg

SEQ ID NO: 284069 - DNA, 122 bp, Homo sapiens
ttccaggtgccgtctgtcacccctttctttgactaggaaagggaactccctgaccccttgcgcttgccaagtgaggcaatgcctcgccctgcttcacctcgcgcatggtgcgcgcacccact

SEQ ID NO: 284070 - DNA, 122 bp, Homo sapiens
aaaagtttatttggaaatttttttacaagattattcttcctatattttgaagtaatatgtcgtgacatttgtgacagtagccttgaaaatggatttactaacccaatattttccatagtata

SEQ ID NO: 284071 - DNA, 122 bp, Homo sapiens
gcgcctaccggtgggcgggggggtaagccaaggctgtggctgctcaagtcctggcacagccggaacgaagtaaagccactgtcttcttgaagagggagggccgtgggctggcccctgagagc

SEQ ID NO: 284072 - DNA, 122 bp, Homo sapiens
cgcctcctcccacctcatcctccccagacatcttgtctgatggggccgctccctactcaacgcctccccaggcctttgaggacccagggccctcagggatcaggcccctccaccttcccatt

SEQ ID NO: 284073 - DNA, 122 bp, Homo sapiens
tgttggaatgtgcctaccaaacacagcaaggggcgacactcacccgaaggttgaaacatgcggaactccgatgactcctagtgctgttagcaatcataaatcctcatcctggcacagagcac

SEQ ID NO: 284074 - DNA, 122 bp, Homo sapiens
gcagcgttcggtggaggtccgggaggccgggacccagcgttcggtggaagtccaggaggtcgggacacagggttctccggtggaggtgcaggaggccgggacccagcagtctctccaggctg

SEQ ID NO: 284075 - DNA, 122 bp, Homo sapiens
agaaagaccgcgtttcggtgcggggggaatttattactcagcccgagtccaagatggcagcgagcgctgacgtcaccagatctcgtgagagcagaagggcgcgatttggaggctcccgcgct

SEQ ID NO: 284076 - DNA, 122 bp, Homo sapiens
ccgcgtgttctgtgctgcgcgtctgctgggctgctgggctccacgtgctcatctgcacatcgctgtgctcctgtgtgtctgtgcacacctgtctgtgtgtaagagagagagatagcttgcgt

SEQ ID NO: 284077 - DNA, 122 bp, Homo sapiens
ggctttcctggacggggcggggcccccgaggagggggctggcgaagcctccgggtggggacgggcctcctgggggcggggccacagctggccacctgctcacctgtggcaaactcctcccac

SEQ ID NO: 284078 - DNA, 122 bp, Homo sapiens
aatttctctgaggaacggggtactatagcccccttttgtggctttccctccataacaaaccgtggtctagacaggatctggctagaaattcccttattaccaccccggccagactccattta

SEQ ID NO: 284079 - DNA, 122 bp, Homo sapiens
caacaggaaatgcgcgcccggcctggggtggggtcctttgtgtggtcccgtggggcgtctcgcggaagcccgggggcgcccgggccgtgggggacgactctgcacccgacgccaggagcggg

SEQ ID NO: 284080 - DNA, 122 bp, Homo sapiens
aagctaaccatgaccaaccattaaactgtggaatagtctctccacgtgaagaaagcccatcgtttgagaccattaaaactggattcttcatagccctggagcatgactgtagggatgacctc

SEQ ID NO: 284081 - DNA, 122 bp, Homo sapiens
accctcgagggcggtgccgtggacctctccagatctcaaaaggcagattcctacttcttacgccccccacatcacccgcctcgagacctcaagggtagaggtgggcacccccgcctccgcac

SEQ ID NO: 284082 - DNA, 122 bp, Homo sapiens
gtacacaggtgcctttgtcacttctcctttgacctggctggcacatcttaccggtttctgcgctaacaatgagttgaaggaaatcttgaacgcgcgttcattttatatcggtatcagagtct

SEQ ID NO: 284083 - DNA, 122 bp, Homo sapiens
cggcgtctgcgggaagctgtgtgtctccgcagtgacgtgggcgggccgaggactcggtgacgtcagagggctgtgtgtagcgatgtgtgtggggttcggagccgcgccggcacagccgaagg

SEQ ID NO: 284084 - DNA, 122 bp, Homo sapiens
aaggggtgcgtggcatctgagatgcaggaacatctgttcccaggcccttggggagccctccgtatgctatgatgctatctgggattctccgtctgcttccccgtgaagggctcctgcgtgtc

SEQ ID NO: 284085 - DNA, 122 bp, Homo sapiens
tgttccccttcagagaatttctggagttcccattgttctcccgacccccccgccctaccccgccctcattgggtccccattgctatctgctttagcaaagagcaggagtttattctcgctgt

SEQ ID NO: 284086 - DNA, 122 bp, Homo sapiens
caccacccaatcctcgcctcccttctgctccaccttctctctctgccctcacctctcccccgaaaaccccctatttagccaaaggaaggaggtcaggggaacgctctcccctccccttccaa

SEQ ID NO: 284087 - DNA, 122 bp, Homo sapiens
gcggggcaagcaggaaggagcctgttacagtcaaggtgacgcatccttgccgggccagcccgaacagcagctgggtcggcaagcgacaggagcacgggtcatcttttccccagaggcgtcgg

SEQ ID NO: 284088 - DNA, 122 bp, Homo sapiens
ctgctggtgctgcgggtccctttagtctcggaggccccggggacggggaccaggggacctcgttcatttcagcacttcctggggccaccgcgcagggctgagcctcccacccacacagagca

SEQ ID NO: 284089 - DNA, 122 bp, Homo sapiens
ccaaggagaggctcctcagtgtgcacctcccccacatccgtcctctctgccggccccgggcgtctgagcagtcattccatgccagcacctctgcagcctgctgggcctcaggttctctgtga

SEQ ID NO: 284090 - DNA, 122 bp, Homo sapiens
tcatctgtccccaggaagtcatcagagacggtggctgaggagacaggcactgggggcctccgtggacccgctattggagtgaagtggcctggatggaattgggtggacagggtgctgcctca

SEQ ID NO: 284091 - DNA, 122 bp, Homo sapiens
gtagtcacctacctgttccatgaagtggaggaactttggactcatcccttctagcttgctcggtctgtgttacggcctgagattctgaattgcaactaccccatttctggtgtcccaggctc

SEQ ID NO: 284092 - DNA, 122 bp, Homo sapiens
agccattctcctgcctcgccttcccaaagtgctggaattacaggcaggagccactgcgcccggccagtgctggagaatgtaatggagatgatcctgcctatccctgagttccagtctagttt

SEQ ID NO: 284093 - DNA, 122 bp, Homo sapiens
gtaattctgaaatttcttcacatctagaatctgattcttccaactcagcttttgacttggcgttggtgccaggtatgagatagggaagtctgggaagagccagtgttgggatttgaacatgt

SEQ ID NO: 284094 - DNA, 122 bp, Homo sapiens
ttttcaagaaaaagacttcttgtaaaattgaggggctatttatacacagttcatcttatgcggccacaacctggatatcacttttgaattttagaaaactggatgtagttatgcaggagaga

SEQ ID NO: 284095 - DNA, 122 bp, Homo sapiens
atacattgagagggaaaaatactctcgcctcttgtagatttcctgggtgtggcctggaagcggcctgaaacggcgggagccgccgcgtgtcttttcccttggcctcgcgcgccctgtggcct

SEQ ID NO: 284096 - DNA, 122 bp, Homo sapiens
ttcccgacgcgtgagttaggccgtaatgccttggctgctctcagcccccaagctggttcccgctgtagcaaacgtccgcggcctctcaggttagactcttctcccacggtctcctcccatgg

SEQ ID NO: 284097 - DNA, 122 bp, Homo sapiens
tttagttactcaatttaaaaactttatcttgtaagcaaactttaacatcatccagagcatcgcacttatatatgaaagaaaaagttctttatcacaccttcagaaattacaactacaaattc

SEQ ID NO: 284098 - DNA, 122 bp, Homo sapiens
ccagcacttctcctgcagagccagccgctcgctgctggccatgcctggaggtggcgaggacgggcttttccatcactctcggtgggggcacctgctccaggggcagctccatgggcgcttgg

SEQ ID NO: 284099 - DNA, 122 bp, Homo sapiens
tctttggtatatcaggccctttgctagatgccaaagacacaaagatgagttggtctcctgcgtcaccccctacaaggcctaatgagggagacaaaggcatattagcaggtgaatcacattac

SEQ ID NO: 284100 - DNA, 122 bp, Homo sapiens
gataggtgggcggtgatatcggtcctctgataggtgggtggtcctctgataggataggcacgctccgagatggccccgtctattggcttttgaatatgcacattagcagagggttcgtccca

SEQ ID NO: 284101 - DNA, 122 bp, Homo sapiens
attagggaccttcttgccttgctcttgctactctgctctgggtggtcattgtgaaaagcccgcaccaaccatgccagtggcagccagacgaggacacagcctggctctgggtcccagcagga

SEQ ID NO: 284102 - DNA, 122 bp, Homo sapiens
ctcttctttctgctttcagactgcctccctgaaacccatcagcctggatggttgcgtacccgagaatgccacctaaggggaaggaacggtagatgtgatgtctgtttttacacccttgattc

SEQ ID NO: 284103 - DNA, 122 bp, Homo sapiens
atccaccgcccaaagccaagacagcttcctcctgggaggcgcctggcacccagctcgtcacgctcagccggcaggcagcgggcaggaacccctcacctgtgatcatttattgcagttcctgg

SEQ ID NO: 284104 - DNA, 122 bp, Homo sapiens
taatgttgatgccactttagaacttatcactgcctcattcccaagctgctattgtagtttcgaaggtgagagggttgtggtggcattttcaattacagatgctcctttacttacaatgagat

SEQ ID NO: 284105 - DNA, 122 bp, Homo sapiens
tgggaagggcagcgggatgagctggcaaacactggggactccagctcccctaagggcctccgaactgctgccacagccgctactgctaggtgcactctgacatcagctccaagccggggaga

SEQ ID NO: 284106 - DNA, 122 bp, Homo sapiens
gggctgcccgagggctgagtgggagcgccggacccattgaacagatgaaaagactgaggccggccacaagagagccgaagaaagttgagcctggtagtcacaaagaaacacgcacagggcca

SEQ ID NO: 284107 - DNA, 122 bp, Homo sapiens
cccacctggcgtagtcccgcccatagagccaagtctaaggagcaaggtgcagtgaaaaagcgaagccccacccatagagcgaggttcggaagtccagtctcattagcatcccttgtcttccg

SEQ ID NO: 284108 - DNA, 122 bp, Homo sapiens
gccaagcagctcccaacggctgggtgcctgagccaagcagctcccaacggctgcgtgccccgaggccgggcagacgcaggtgtcccaggaccaaaatagcagtcagatgatcataaggcccc

SEQ ID NO: 284109 - DNA, 122 bp, Homo sapiens
ccaccctctttaccccctccatctatcccaaaactattttcctcttcttaccgctcccgccgcactgccatctcggtcgcggtcaccaccagttgcagcgaggcgaaccacagtggagcggc

SEQ ID NO: 284110 - DNA, 122 bp, Homo sapiens
agtaaatcagtttctataaacctgcagcaaccccctccctgagtacaataaaactgttgtcgcaatcaataaatctctggtttggggcaatgaaaattagataactgttctctctctctttc

SEQ ID NO: 284111 - DNA, 122 bp, Homo sapiens
attttccctcacattgccaattacattctacaaaccagtcatcaataaaataaattctaacggtagaaacaaattctactgttatacagtgagcatagcctaggtcgtcatgagagaggatt

SEQ ID NO: 284112 - DNA, 122 bp, Homo sapiens
aagtgattaaaaaagccacctttatctatgggagcgcgtgctattttacatgagtagaaacgaaaatgattttcattgactatttctgaagttcagcctgtggcaaacagtgaagagctgtg

SEQ ID NO: 284113 - DNA, 122 bp, Homo sapiens
ccaccttttcgacaatccttagacttcttttgcctgttggaattacaccttggatcgtggcgaagtctatagaggtcagattaagaagaaccaaagcagaataaacgtagaacccgatgctg

SEQ ID NO: 284114 - DNA, 122 bp, Homo sapiens
gctgttggtttcaaactatttagagcttggaagttccaagaaagacacagattcgtcccccgctaagccagcacttttacgggatcgctgtggggccggatggcttctagacttccgggtga

SEQ ID NO: 284115 - DNA, 122 bp, Homo sapiens
tgacaaaattctggggacgctgggaacactgaatcaacatgggcaatgagaacagcacctcggacaaccaggtgggtgtcaggaagcttctctctcgagctacgtggtgctcttggcagacc

SEQ ID NO: 284116 - DNA, 122 bp, Homo sapiens
gatgagggctggcaccacgctggtggagtgcaagagtggatatggcctcgacctggagaccgagctcaagatgctgcgcgtgattgagcgcgcccggcgggagctggacatcggcatctcgg

SEQ ID NO: 284117 - DNA, 122 bp, Homo sapiens
gccaccccgtctgggatgtcagctgccccgactgggaggtgaggagcgcctctgcccggccgccccgcctgggaggtggggagcacctctgcccagccgcccttcatctgggaggtggggag

SEQ ID NO: 284118 - DNA, 122 bp, Homo sapiens
gagcatgcccagtgcaagccgctagtttggctccagtctaggtttccagtaagtggcatgcgggactccggagggatcccaatgagctgagccgagagcctttgtgtgcagagggaggagga

SEQ ID NO: 284119 - DNA, 122 bp, Homo sapiens
ggtgcactgaacctagaactgacaaaagtcaaactccaaccagcacatctggcttgcaggcgttccccacagcctcagagatgcggcctcgcatgggaatggagacttttgtcctgcggcct

SEQ ID NO: 284120 - DNA, 122 bp, Homo sapiens
ttgaaagaacatacctcaaaatagtaagatccatctgagtctgctctgacttgcggcagccgcccccttctgcacagtcatgccaagtcagcgcctgggcctggaacccggccacagcccct

SEQ ID NO: 284121 - DNA, 122 bp, Homo sapiens
agactcaactgggctaacataggggcaaagttggtatcccaagcttctcagctatctatccgcccaaagttgctcttctgccaagctcattgtttaccaagctgccagcccagcccagggat

SEQ ID NO: 284122 - DNA, 122 bp, Homo sapiens
agcagcaaagcaggtggcacagcagcgtggctaggcaggagggctgtctaccacgggcttcgggacttggggcagcttcctgagctctctgagctgcagttccttcaaccacaaaatgagga

SEQ ID NO: 284123 - DNA, 122 bp, Homo sapiens
accgcgtaagcttcctgcacctgggccacaaacagcgagtctaaaatggcgcccagggctcgcggccgcgcgcttccctggcgcgtccccgcccaagggggcgggaagggggcggggggggg

SEQ ID NO: 284124 - DNA, 122 bp, Homo sapiens
gcgctgtggaacgtgcgagctcctgagccctgtctcttgcaggacaagcactccactggacgtgatgcctaattaaggcaacagcaacaacaaaatcacttccaacagctgaggaacaggaa

SEQ ID NO: 284125 - DNA, 122 bp, Homo sapiens
atcatagtgcccgagaattcgtgggtgctcaagaggatgggtgtggcctggcagcgcaggcgcactagaggcctgtagggtcggggcgcctgcgcagtcgctcttcctcaggcggcggccat

SEQ ID NO: 284126 - DNA, 122 bp, Homo sapiens
agcacaagagatttccgtaacccttcagccagcttctctaaatattgacattgtatataacgccagtgcagtgatcaaacacagggcactcgcactgggataatgcgattagctaatctaca

SEQ ID NO: 284127 - DNA, 122 bp, Homo sapiens
tgtgtgcgtgtgtgtgtgtgtgtgtgtgtgtgtaggggggaggaggtagggaggggcaagcgccatgtgctggcatattttaaggatgcgatgatggaattaattatatagcactggaagca

SEQ ID NO: 284128 - DNA, 122 bp, Homo sapiens
ggccgcacgggagcccggatcccgcaggcatctgtgttcgcaggttctgccgtttgctttcgggaaggcgagcattgttttcctctggatgcaagcttttgctgacccacaccccccttccc

SEQ ID NO: 284129 - DNA, 122 bp, Homo sapiens
acattgaaccacctctgtcctgcccccttccttctccaaagcagatggaaatgaggtggccgactgggaaggttgccatggtgcactggctacagggattcaattgtaatcaaaagaggctc

SEQ ID NO: 284130 - DNA, 122 bp, Homo sapiens
agccccgctcctctcctgctcgctccggagaaccccagtccggcctgacctcggccctcgcggtcaggcgctccaaccagagcgactccagctcgaacagcgctgggtaaactgaggctgaa

SEQ ID NO: 284131 - DNA, 122 bp, Homo sapiens
agcaggtgcacgcctgtgcctactcgctaccacgcgtcttctgggaggaagtgaatgagccggttatcttctcagggagggttagtgctggccactgtgcactgccgctgccagcacgcccg

SEQ ID NO: 284132 - DNA, 122 bp, Homo sapiens
aagccactgttccttaggtgtctgtggcctgcagctgaacttgactccgattcgtaggcccgcaactggagggcctctacctcgagggagtggggtgtagatttttcctggaggtgaaggtt

SEQ ID NO: 284133 - DNA, 122 bp, Homo sapiens
tatttgcggaccaggcgctgagggtcacgtgagcagcttggggccgggaggatcccctagcgccaccccggccccgcccggcgcgtagcgacgcccacgcgcccgggccggaagagaggttg

SEQ ID NO: 284134 - DNA, 122 bp, Homo sapiens
gtctgacggcgctggcgcaagccctggcgacactcttggcttctttcatcctgcgtccctcgtttcctaaagagcatgtataaagtcgatttcctagtgtcgacatgagattcaactgggta

SEQ ID NO: 284135 - DNA, 122 bp, Homo sapiens
taatcatagctcactgaagcccccatcccctgggttcaagcaatcctcccacctcaagtgcgagctggcacacctggctcagagtaacagcttgagtgtctggaatctggatgaagtcagta

SEQ ID NO: 284136 - DNA, 122 bp, Homo sapiens
cgtgaggatttccgctgtttgctgccagccaatagcagtgggtgtgacggaggcagccttcggcatctgagccctcagcatccattagacgggctcgggtcccgtcgctgccgcagtgggcg

SEQ ID NO: 284137 - DNA, 122 bp, Homo sapiens
gtttgtattgcagacagctttggaagatcaagcgtctccctctggagcaaagggcaagcacgcttgcttcccattgtaaaagatccaggttccctaagctcagggttcctctcctgtaatgc

SEQ ID NO: 284138 - DNA, 122 bp, Homo sapiens
ggctttccccacaccgcgcgtcacctccctctgcccaggcagaggtaacaagtaagagtgcgccagtctctccccatccggcggcgcgcagcctaagtccggggtaggggttgccggcgagc

SEQ ID NO: 284139 - DNA, 122 bp, Homo sapiens
ttcccaacaccaccacatgaccactacatttcagccaggatccctcgttagcagtgaacacggacaagcagatggagaataagagaccaaacaaaatagcatgatgtttcctagaaggcaca

SEQ ID NO: 284140 - DNA, 122 bp, Homo sapiens
tgtagtggtgggggttgcagcccaggagtcaacggaggggacctggctgtgtcctcagggcggcccccaggccaggccctttgggtacgagatggtggtgcccgggggaggctcagcatggc

SEQ ID NO: 284141 - DNA, 122 bp, Homo sapiens
gaagcactcacgttttgagaacacctgtcaggtaacagggaaccactgaaagtttttggacggtggaggaatgcgatataaatgactgttgattcactggcattaaagtgcctaactaccga

SEQ ID NO: 284142 - DNA, 122 bp, Homo sapiens
aactaatacgtacagggcttctatgccccatgaaattgactggcattaggccgtgaaatccgaggtgatgataaacacttgaaaggtggaaagttcttaagtgtatgactaaatgactcact

SEQ ID NO: 284143 - DNA, 122 bp, Homo sapiens
agtgaacgagtggtcacttaggtggctggagtcttgaagactgagagtcctcaaggaggacgttgaatccttcgggctgcttgacttcggaggcctatgaagtctgatgtttttatcctgcg

SEQ ID NO: 284144 - DNA, 122 bp, Homo sapiens
actgtaattggtgacaatgtcacataatgaatgctattgaaaaggttaacagatacagctcggagttgtgagcactctactgcaagacttaaatagttcagtataaattgtcgtttttttct

SEQ ID NO: 284145 - DNA, 122 bp, Homo sapiens
ttcttcccctgcccaccctgccgcactctgggccactccccgcccattccactccgctcccgccatgcgtctgccttgctctgcgccacatcaagtgcattcccaccccagggcctttgcac

SEQ ID NO: 284146 - DNA, 122 bp, Homo sapiens
gggtgagtcacaaatagctggcaggctggcagcagaccccaccctcccagccctggccttcgcctagactagcccaggttatagcctcagggttgggatggacctggaggaaaaaaaatgga

SEQ ID NO: 284147 - DNA, 122 bp, Homo sapiens
atgccttcctcagtgaagcggaagatctgtcggtcaatcaggggcccaatctgacggtagcggatggtgcaggtgaagccctcattctgtaggttgatggtcttcagcatgcctgccgtctc

SEQ ID NO: 284148 - DNA, 122 bp, Homo sapiens
aagttcccggggacggaagaagatggcagtcacctggtgtgcccagcatgtttgaccccccgagcagcttatgtttcaacacctctctctatataagataggattacttgctatggtgatta

SEQ ID NO: 284149 - DNA, 122 bp, Homo sapiens
atcgcatttcaagtgctggatcctttttgtcccctactgcgtgcggtggcagcttccttgcggaagtggtgaccgtgagagaagaagatggcggcccctgtagtggcgccgcctggtgtggt

SEQ ID NO: 284150 - DNA, 122 bp, Homo sapiens
atatatatatatatatactcaagaaacttctgtaaaatgcatgttttccatctctccatccgtgatcacagcgttgtaaggcttacaatgactcaggccctacagagttcacagacatggca

SEQ ID NO: 284151 - DNA, 122 bp, Homo sapiens
ctcaggtggtctgcccgcctcagcctcccaaagtgctgggattacaggtgtgagccactgcgcccggccacatttttattgtagttttgcacagcacatggaactacatattgtggatgagg

SEQ ID NO: 284152 - DNA, 122 bp, Homo sapiens
tcctctaagcggggaatctcattcctagttttctgccccagggtcctgtcagttcatccccggcctaaagtcccctcgggagacgaaaaaaacgccaagtatccccgcagagatcggggtaa

SEQ ID NO: 284153 - DNA, 122 bp, Homo sapiens
ggcggccgccgtggactttgcgcacaagttctgccgtttcctgcgggacaacccagcttacgacacgcccgacgccggcgcctccttctcccgccacttcgccgccaacttcctggacgtct

SEQ ID NO: 284154 - DNA, 122 bp, Homo sapiens
cctcccctcttccctctcccctcctttgtcttcccagtattcgatttcctatttgagaaccgttccagcctgtgccactgctgaaatcccatcctcggtaaccagtgaaggctgttttaagc

SEQ ID NO: 284155 - DNA, 122 bp, Homo sapiens
cccgtcgccgcaaccgtggggccggccctgccttgccagtactaggggacttcctctgcgcgccggcttcctgcccagctggcatttaaaccaccgcctggggctgcaggatgctgctgcgg

SEQ ID NO: 284156 - DNA, 122 bp, Homo sapiens
agagcatctagggaaggggtctggtctaggtggagaggcagacggcgctggcttagcccccgctttggggaggcggtgcagaaatgaggaatttttcccagggcaaagccagctgagacccg

SEQ ID NO: 284157 - DNA, 122 bp, Homo sapiens
cgggggaggggagcgtccacctctacgcatgcgcccccagcttccgcgggagggagggggcggaaaaaggaggaggaagaggggcgggcaaacttggaactaaccaatgatagcggcgctag

SEQ ID NO: 284158 - DNA, 122 bp, Homo sapiens
agatagtgagttggggctccagtagtcgatcgaggtagacacttagaggtagttaagagccgcggtcgccgagacgccttggggacggtgggccttcggcctaggtgaggggccgccgaggg

SEQ ID NO: 284159 - DNA, 122 bp, Homo sapiens
tgattcttatgtgcaaataggtttggtattctactgccacgcacagtcctgtactctgcccgcctcagctaactcctgcttcaagcaaagcccactgcctgtctgcactttattcagggcac

SEQ ID NO: 284160 - DNA, 122 bp, Homo sapiens
ctggcccaggcaccacgaattccagaacatgctggggacacggctaaccccgccccctcgcggtggcgattggctgaacccttcctgagtgcaaagcgctgattaatgaaggcagttgtctc

SEQ ID NO: 284161 - DNA, 122 bp, Homo sapiens
caagtggaccaaattgacccctactgtgctgggctgaacattatctgtggttttgcaagtcggctttcctggccccgcctctcctttctggctgccacccaccttcaccccagcccctatcc

SEQ ID NO: 284162 - DNA, 122 bp, Homo sapiens
tggacgtcgcgccctctgttggccgggaggtttctcagtgatgtcgccacgtgttttctgcgtggaaaaagtgaaagatcatccagtcatttttttcaactgatgtttattaggcgtcttct

SEQ ID NO: 284163 - DNA, 122 bp, Homo sapiens
ctcctgacgtcacctcacggggaggcggggctgtgggaaccgcagtgcagcgcagaggggcggggcctgcggcgcgagacctggtgcgggaggcccgggcagggagaagtgtgcggggccgg

SEQ ID NO: 284164 - DNA, 122 bp, Homo sapiens
tggagggaaaaagaggagctttgtctactctaaaccagatcgtagaggtcttttgtttgtcgcccttggggtttttcaccaagatgccctgggcctttgggatgagccggatgggcctttcc

SEQ ID NO: 284165 - DNA, 122 bp, Homo sapiens
gcatcctctgcggcatggcagcggtgaccaagcacagccaacgtcagctccgctccctgccgtctgagagctgaccacaggcagatgagatgcccactccctgttgccataacacaggaaag

SEQ ID NO: 284166 - DNA, 122 bp, Homo sapiens
cacagatctgatcacccccactggcccctgcccacagccacagagcccagggccaaaggtcgacctagaggccacagctcagctcagagctcgggtcagaagctagactcaggacaaagcct

SEQ ID NO: 284167 - DNA, 122 bp, Homo sapiens
gacgaaaatcaagatttaaaagcatactcttactgtggtttctctatcaaagcccatcaacgtgatacacaggctgcggcgctggagggaagcggcgaaacggggagaataaacgcaacaga

SEQ ID NO: 284168 - DNA, 122 bp, Homo sapiens
gcgccggcagctgtgggcctctgagaagtgaatttcggagctgccccttctgagagtttccggcgacctcgctgagagtgagaggaagtccctgcggtgggccctctggcaaaccacatact

SEQ ID NO: 284169 - DNA, 122 bp, Homo sapiens
tttcctcatcagtgttacaacgaagcaaggttggatgaaacaattcgaggacttgctgcccgtagcttccccagctacagctgttcagcagcgtctaagacgttttccaaatttgttctgtg

SEQ ID NO: 284170 - DNA, 122 bp, Homo sapiens
acggcggaggctgaccttgaaaatgggacgctaggtgaaaggaaacagacacgaaggccacgtggtgcatgattctcttcccacgaagggcccagagcagacagacccacagggacggaaag

SEQ ID NO: 284171 - DNA, 122 bp, Homo sapiens
gccgcggcaccccgggccccagaacgcacgcgcagttagcgccttgagtcccagcgcgcacgcgcaattagcgccaattcccagcgcgcacgcagttagcgcccaaaggaccagcgcgcacg

SEQ ID NO: 284172 - DNA, 122 bp, Homo sapiens
gcgcagcccctctcccaactcttgtttgctctttctggccagcgaccccagtgtggggcacgcgggagagccccacatttcttctagtcgcagtcccgccggcgtggggtggcccctgaccg

SEQ ID NO: 284173 - DNA, 122 bp, Homo sapiens
gtgtggggcgcccagaggaacgtgctaaatgcagccagatgctcagaggccagcccgccccgcgccgcctccgccttcccacccaacacgcacacgacagccctgccgggcagcactgcaca

SEQ ID NO: 284174 - DNA, 122 bp, Homo sapiens
ggagacacttgcacgggggtctgggcgccaggacgctggaggcgtgggatgatggcgattcgtctcccatcttcaaggccaacacagataggcggtccactgtcccagtgggacctgacgtg

SEQ ID NO: 284175 - DNA, 122 bp, Homo sapiens
atatgagcttcatgaaggcagggggactggcaatctttccaccctagacctagcaaattgcgtggcacaaaataaattctgatataagcttgcatgatctgtcatattttatacattactgt

SEQ ID NO: 284176 - DNA, 122 bp, Homo sapiens
ggtctcgggagaggttctccactctgagggcgtgtccagtccagagaaggggacgcgcggcgtgttccccagtggtctggaccctggggtcccgccccatccctgccctgcccaggccctgc

SEQ ID NO: 284177 - DNA, 122 bp, Homo sapiens
tatgtcctttttttttctttaatcctaaaagtatttgctgcctgttttcaatcagtttcacggtttatagccagtgctatgaatacagtactatggtaaagtatccgttgtcatttggacga

SEQ ID NO: 284178 - DNA, 122 bp, Homo sapiens
tccaagcggcggccagatccccgcttcgacccaccccagtggtggcgccctccgaagtcccggctggcttcccgcagcggctgtctccgctctcagccgcctaccaccaccatcacccgcaa

SEQ ID NO: 284179 - DNA, 122 bp, Homo sapiens
tgtatgatcttgggcaagttactcaaccactctgtgcttaagttttcacatctgctaaatcgagatagtaatacaatgcctgcctcagtgtggttacagagattacatgagcagtatttaac

SEQ ID NO: 284180 - DNA, 122 bp, Homo sapiens
cctgccagcagacctgccgctccctctccgaggccgacagccactgtctcgagggctttgcgcctgtggacggctgcggctgccctgaccacaccttcctggacgagaagggccgctgcgta

SEQ ID NO: 284181 - DNA, 122 bp, Homo sapiens
aactgcaaaattatcgctgtttatgataaggctttggcacaaaacaagcggcatacccagcgtgaataaataaaatatatacaggctgggtgcagtggctcacgcctgtaatcccagcactt

SEQ ID NO: 284182 - DNA, 122 bp, Homo sapiens
gtaacgcccagaacgagtgcttctcccggtggggtactgaggagcctgggctgcagctgccgagccgccacagccacgctgagcccggcctggcctgcacactggcgccaccgcctggcggg

SEQ ID NO: 284183 - DNA, 122 bp, Homo sapiens
cgcttcgaatcgtgcctggccggccccaaatgagcacgcagtaaggttagcagctgctgccgtcacttcctcacgttctgaatctgctccgtccccaacgccttcagcaagagccctctcac

SEQ ID NO: 284184 - DNA, 122 bp, Homo sapiens
ttgacagcttcattgtccacctccgggttctagaacgtggaaaacccgcgggtgtcggctcgtggcggacgcttgagggcagggggcgctcgggctgctgcctggtcggccggtcaaccgga

SEQ ID NO: 284185 - DNA, 122 bp, Homo sapiens
tcccacctgcttgctcctagaaagatcctagctcagattaaagggatgaagcgctaaggtcgacttgtccagaaaagagctcacggtgagttcaccaccccctataccaattcatcgagtgg

SEQ ID NO: 284186 - DNA, 122 bp, Homo sapiens
tccaagtcacagcctatgaatagatgctcttcctccctccgaaagagaagccagagtgcccggaacaccacaggggaagcttgaagacttgtacccctttggagtctttttattttaaaaga

SEQ ID NO: 284187 - DNA, 122 bp, Homo sapiens
accatgtttccctttctctgtgacccagctgcgccctgtgggtctgtgcactccagcacacgcgtgcctgctgcggcctccccggtctctctcacgccgtgggtgccatttccgctctgccg

SEQ ID NO: 284188 - DNA, 122 bp, Homo sapiens
tcatttggggccaagcttatctgatctgaaggacaggccccagggcttgcgttgttttttcgtcattgccaggcacctttgctgagtcatttggggttggcagacctggaaaagacagcggt

SEQ ID NO: 284189 - DNA, 122 bp, Homo sapiens
gccaagtcacttacaggtgcccgcgtggtacttgagggcgctcacgttgcgtctgtgggccgtgaacgtgcgcacacactcccctgtgtctgccagccagcacttgacggtcctgtccgcgc

SEQ ID NO: 284190 - DNA, 122 bp, Homo sapiens
ctgtcgttgaccctgtcaccagagaagcacagagacttgctcctttgctcttggtaggaacgctgtgcaggaagtgtacatcacctttgtttgaagttgtcacatgctctgaaattcactga

SEQ ID NO: 284191 - DNA, 122 bp, Homo sapiens
tttccctctcgtagaataagcaagttcactttcccaaagctcccaaaattcggccatgtgcgagaaagcatcattagtacttaatggagacgggtgtcatcatatacacaagtgtttaaaaa

SEQ ID NO: 284192 - DNA, 122 bp, Homo sapiens
ttgctggggagctggaggcccgggggaagggggactcccccaaggctgggggtccctgcccggtctcagccaccccatgaacaggacctgccgtggccactctgtggtgcatcgacaccctg

SEQ ID NO: 284193 - DNA, 122 bp, Homo sapiens
accttcgggattgtgggggcggggataggggagaggttggcaggggtgagggtcccctcgcgatatacccacagttccaaaattggtacgaggtcctgagcgctgatgtctgttctactcct

SEQ ID NO: 284194 - DNA, 122 bp, Homo sapiens
actggcactgagacaatgatggcactggtctgatgttgattccatgctgacggtacactccgctaggtctctggctgggacacaagggtcaatccgctgcagatgttgctcttcaagaattt

SEQ ID NO: 284195 - DNA, 122 bp, Homo sapiens
gtaccgttacagggcagactttttgtccaatcaacacctcaacactttgggtcacgtgaccgcagagtgcgaggggcggagctacagtctggcgcgaggaaccgttaagatagacaacaaat

SEQ ID NO: 284196 - DNA, 122 bp, Homo sapiens
cctccaatcccaccctcagctcctccctaacccccaacttgcgcccccaggtcacagtgacgtccaccctcaccatctcccaggaccaggatgagtttcctgagactgagcacctccttgaa

SEQ ID NO: 284197 - DNA, 122 bp, Homo sapiens
tgggtactagaggacacacaaacgtgtgatgatttgctgggtgttgctgtgtccaacccgcggactctgcggccgggctaaataagctcaatatgtggctcctttgggtgttcccgagcgtg

SEQ ID NO: 284198 - DNA, 122 bp, Homo sapiens
ccaggggccatctggaacagctctgggcaatggttcttatcctgggctacacttcagaatcgccttgggtgcttttccaaaatacatatctcccctgttttactggtgttttgaactgccac

SEQ ID NO: 284199 - DNA, 122 bp, Homo sapiens
atactgcgcttttccaacggtcttagcaaacggcacaccaggagaatatatcctgcgcctcgctcggagggtcccacgcccacggagcctcgctcattgctagcaaagcagtctgagatcca

SEQ ID NO: 284200 - DNA, 122 bp, Homo sapiens
aagtggatggaatgaagagatgccacttggcggccatggcagctgtagtatcggcgactccgggtcaaggcccggtcgagtgcagtaccatgggcagcaccgggtatagggcagagacagct

SEQ ID NO: 284201 - DNA, 122 bp, Homo sapiens
ccgggccgtgtggtgcgtgctggctcggctcagtagcgctgttacaggcttacgagctgacgtggctgggaactgggaagtctgttagaagccgttcctctgtagcctctgttttctaaact

SEQ ID NO: 284202 - DNA, 122 bp, Homo sapiens
tcctgtccttccctggcttaaagccatacagtggccctactgaccccatgatggaggtcacgttccctctcctgacactcagagccttctagcacccggcccccgagggcccgtttcctttg

SEQ ID NO: 284203 - DNA, 122 bp, Homo sapiens
tccattatttgctggtaataatggctgtcattagaaagtggagaattgccagtagcccttcggatgtgttgtttaatgagctttctcttgagcggttctcccagcttcagtggaaatgagaa

SEQ ID NO: 284204 - DNA, 122 bp, Homo sapiens
aggggacgcgggctccggagaggggcgcgcgagagagaggccgaggcggaggctctgagacggtgtttattggctccttagaaatcagagtcagtaacaactgtacagaggcccccatcttc

SEQ ID NO: 284205 - DNA, 122 bp, Homo sapiens
ctcatccactgatgactctgctcccaacacctctgtccactagggctacccggtgctggccgcgtgccaagctccagggatcatagtaaggcttgatcttccagctccagaaggcagcccag

SEQ ID NO: 284206 - DNA, 122 bp, Homo sapiens
ccaaatggctgagtgcaagaggtcggccggagatagggccgagtgcgctgccccaagctgcgatccctgccaagcactcacggacaatgcactggtttcctccagggagcgtcttccatcca

SEQ ID NO: 284207 - DNA, 122 bp, Homo sapiens
gctctcccagcatcctttgccttccggtatgtggccccgtctggctagtcctgtctagcgcgcccatttcgagcccaagtttccagctcgggtttccgggctcagaattttccaggagtggg

SEQ ID NO: 284208 - DNA, 122 bp, Homo sapiens
tgagaagggaccctccggagcccttgggcggctcccactggagtccgaagggcccctcatcgcttcccctggggacagcacacacttctggcagaatggggcagagaaaagtacccggagct

SEQ ID NO: 284209 - DNA, 122 bp, Homo sapiens
gggtcttcacaccgagcccgtgccacgcagggtgtgtgtgtcacctgccgggtcttccaccgagcccgtgctgcccaggatgtgtgtgtcacctgccgggtcttccaccgagcccgtgccac

SEQ ID NO: 284210 - DNA, 122 bp, Homo sapiens
ctcgttgggcgccgtgcagggccagaggaggcctcccggctgccgctaccaagccgcggacgagaagaaaagacaggaggccaaggaggcccagaaggccaaagggccaggcaggccaggcc

SEQ ID NO: 284211 - DNA, 122 bp, Homo sapiens
gctggggtgtttttttattgtctcacctgataaaccgtaagccccttgaagacagcaactcgtttttaagctctttataaccccagagcctcgcacagtacctggaccagattaaggggtac

SEQ ID NO: 284212 - DNA, 122 bp, Homo sapiens
ctgggagtggtagttttcttccttcaggttcattcctggctggccagtgcccaagactggcgagactacgattcccagacgcccaagcgagtcgccggtcacgtggccgcaaggacgctggg

SEQ ID NO: 284213 - DNA, 122 bp, Homo sapiens
acccctcccgccgctgggccacgtgctgagcctatgtccgtcccaggggccggccctgcgcgtccagctgcctgcagtgcccgtggctaacagaggagggcccggcctgttcgcggcccgcg

SEQ ID NO: 284214 - DNA, 122 bp, Homo sapiens
tcagggtcactttacagggattgtccaggcttggtttggccctccaggtttcaggggctgcgggatttttttacgtggctgtggtgaacccaggccgggattctgtccacctttacagctgt

SEQ ID NO: 284215 - DNA, 122 bp, Homo sapiens
ccatatgactgctaatcatcccaaattcaattccataccaaaaatgcagagatttgccttcgctaagaacagccaaaataacatgtggttggttctagcagcaatctgaaaggcaaaggtca

SEQ ID NO: 284216 - DNA, 122 bp, Homo sapiens
tggccgagcgcagccccaggcgacccgcgaggcaggcatacaaggccagggagctgtggccgcggtgcagggggcacgggagcatgacagctggcctcgctccctccctgtgctccggcagc

SEQ ID NO: 284217 - DNA, 122 bp, Homo sapiens
tcgctgcttggctgtgggttagcagcaccctgagcggagcggaagagctgcccgccgccgcgtaaccccgaggccgagactcctggcctggcctccttgggcccacgacgcctgccccgcgg

SEQ ID NO: 284218 - DNA, 122 bp, Homo sapiens
ccggtgagggtcgcggaggggccggaacgcccacgtgtggcgggtggggacgggaggtggcgcagctgcttggaaaacaatctggccatttgttgaaacataaaacgtgtggatatctgagc

SEQ ID NO: 284219 - DNA, 122 bp, Homo sapiens
tgttctcctttttttgggcacttggtatgtgtcaagccctgacatggtgtttttttcatacgttactgttaaccatggcaacaatacagagaggttggtattagcatacctatttcatagat

SEQ ID NO: 284220 - DNA, 122 bp, Homo sapiens
tattgtaaccaaagactcggaaaccaagttattgctatcagaggaagaaatagaaaaaggcgtagagatagaagagaagatagtggataatcttcagtctcgacacacagcttttataggtg

SEQ ID NO: 284221 - DNA, 122 bp, Homo sapiens
ggggcttgtagctctctttcgttctaaaagattttaaaacagcagaaactgcaagctacccgggtgagcttttccagtatgttcctaactccgtatcagtttaccctgtgactgaagtacag

SEQ ID NO: 284222 - DNA, 122 bp, Homo sapiens
gaaaccagtcattggcaaaggagaagaggggcccatgattgttttgcccaagctattttccggagctgtaggaggggctcacctacctgagcatccatgctccatgtctgaacacaatcaga

SEQ ID NO: 284223 - DNA, 122 bp, Homo sapiens
gcgccgcccttgacaacggtgtgggttggtaaaaggaaacagccgggagccctgcagcgccggtgccgccaccgtttagtctgactgtgcatttgactaagtcacaagaggccaggcctgtg

SEQ ID NO: 284224 - DNA, 122 bp, Homo sapiens
aattcctatcaagtaagatggcatgtagaaggtcaagcaaagaatcccgtggaggagagtcgcccagggcagactcctaggaaggtttctgtttcaacagacccggctggtccagactaaat

SEQ ID NO: 284225 - DNA, 122 bp, Homo sapiens
agagaatgtaatgccatttctataatatactgtctctgctattagacatgtttaaattatcgactcattctgaataagtagattgactaccccacttttggctctcctttacctcagtacct

SEQ ID NO: 284226 - DNA, 122 bp, Homo sapiens
tgttatgcaggctaggccagcagtagtagaggcagagagagtgagaacctggagtagggccgtctttgagacacagggagaagggagctgctgaatggttatggagcatccctgtttggagc

SEQ ID NO: 284227 - DNA, 122 bp, Homo sapiens
cgcgaagtcaccgccccgcgacccccagcattccagaggcacacgcccgcctctcccctacgccccaaccctgatgctccacaggggtcagcagcgcccctgccccgcctcccgtcaccgca

SEQ ID NO: 284228 - DNA, 122 bp, Homo sapiens
gctgaggagaggagcagtagcgaccaggcgagggtggcagcagggcgcgcagccatgttccgggccgaggcgggcggcggggaagtcctggcgcgagcgcccggctgggctgcctgagggcg

SEQ ID NO: 284229 - DNA, 122 bp, Homo sapiens
gggggagaggaggacacggaagcgtttgacatggctgcactgagaaacctcaacgtcatccgagacaccaagacccggagggatgtgactccagaaattcaattcctgagtcgaccagcttt

SEQ ID NO: 284230 - DNA, 122 bp, Homo sapiens
agtatctggattaactttttaaaaacaatgaaagcattttacagaaattacatttcagatcgtgctggaactgtgttcagaagatatcctcagagggaatctggcctgagcaccatcatgtt

SEQ ID NO: 284231 - DNA, 122 bp, Homo sapiens
ggcgccaaaggctgggagggcgcggggctgcgggccggaatggaggaggcccagcggcggcggcgcttctcacgtcagcccaacccgcccggccgcggccaccgcctcagcaccgttgcccc

SEQ ID NO: 284232 - DNA, 122 bp, Homo sapiens
catgaaaatatctttcatactggacaaatctgcaagcaatgatgctaagatcttgaatcacggtcttattattccaaataagtcttcttaagctgcataaatatgaactgtagattaataat

SEQ ID NO: 284233 - DNA, 122 bp, Homo sapiens
ctattcacgttgttaggagaattttttggaagtcatttatgttgcctgaccctaacaatccgttcatgtgttgtggctccatgccacccatgctgcccatcggaccgtccaagctgggaccc

SEQ ID NO: 284234 - DNA, 122 bp, Homo sapiens
agggaccttccttggacactcggctccctgggcctgacggtggactcatcctttacaaggcggctggagacgacctgattcttccatccctttcccctgtgtgcaggttttactgggctgcg

SEQ ID NO: 284235 - DNA, 122 bp, Homo sapiens
accacgcctggctaaatttttgtactgttagtagagacaggagtttcaccatcttggtctcgaactcctgacctcgagtgatctgcccgccttggcctccataagtgctgggattacaggca

SEQ ID NO: 284236 - DNA, 122 bp, Homo sapiens
agtcagtgtctgatatgagtctggtggtcataatccctcctccccaggggactgaggaagcgatgctccagtccatgtgctagcctaggtctctggcagtggccaggttctgcctttcttcc

SEQ ID NO: 284237 - DNA, 122 bp, Homo sapiens
tccaacccccctgaaaaaaacaaactgatcctatgcagcaagatctttgccagtgagtcacggagcggaggcaccaggctggagcttgaaggatgctgccaagatgctttgaccgtaaaaat

SEQ ID NO: 284238 - DNA, 122 bp, Homo sapiens
ggtgtgaagtctgctgggtggctttgtcacattgcagatggtgccagatgagccgggccccgcccaggaagccagactgccagggagttcagactcagccaacaaacagacccacagggcct

SEQ ID NO: 284239 - DNA, 122 bp, Homo sapiens
cgacgacctcgtctcccgcccaggctgggctgccggcggcgggcatcccggcgcctgccccggggctggaagagaaagtaaaatgaagcgcctttccccagtcaacacctacccgttcccag

SEQ ID NO: 284240 - DNA, 122 bp, Homo sapiens
tacttctttaggcatcacttcctgggtagaacgggtttcctaagggagtaaggcacagaacgaggcaatgggccgcctggtctctccgcgcgtcagtaggactcggggaaccagactccgcc

SEQ ID NO: 284241 - DNA, 122 bp, Homo sapiens
caggtggaaacctggagtttgagtatgcttgaaagggaaagtgtggaacgaaggggcggccgggtggggaatcagagaagcccccaaggaaatgattcatcattgtgattgaccttgacttt

SEQ ID NO: 284242 - DNA, 122 bp, Homo sapiens
cacggaccccggctctgggcggcggaggcggctccgtggagctcgcagcagatttccacgcgatcctgtgccccgcaaacagactgaccgaccgcggggacgcgtccccccctcccaccccc

SEQ ID NO: 284243 - DNA, 122 bp, Homo sapiens
gcttcagaccccacttcctgcccagaaggaggcccagagggtttctcagcttgtgcagtgcgtggcattgtagtatcctggatttcttctcccgtcacagtgcaagagaagtgaggactcgg

SEQ ID NO: 284244 - DNA, 122 bp, Homo sapiens
ttaggaaacaaaacaaaagaaattagcacagagatgtttcaccatggctttggaaatgggcgattgctgttgacaggattatttaagccactcagtggtggtaataatagcctttgtgcgtc

SEQ ID NO: 284245 - DNA, 122 bp, Homo sapiens
gcggctgtgcactacgatggctctggccgcagcttaggatcagcagacatgcgctttgagcggaaggcacacgccctgaaggccatgaagcagtactacggcacccctctggctggccgccc

SEQ ID NO: 284246 - DNA, 122 bp, Homo sapiens
atctcattaaagccaaccttatactctgctttacctcccgagtacaaaagatacatgtagcgtgtgaggttgtggcctctcacagtaccttaggaacgcacgttttccccttcatggacaaa

SEQ ID NO: 284247 - DNA, 122 bp, Homo sapiens
tggaggccggtgtgagagcggcggcggggcctacctgtgcgtctgcccagagagcttcttcggctaccactgcgagacaggtagggcggcaggcctgcctgctccccgccctctgcccgcct

SEQ ID NO: 284248 - DNA, 122 bp, Homo sapiens
aggcccaggccagggaacgcggttcaggctggccatgaagccgcgtgtgtttgtccagctcggacgtgtggccctgccgggtgtaggggggacacccatgcctccaacacgcataagggggt

SEQ ID NO: 284249 - DNA, 122 bp, Homo sapiens
tctgtctgcctgccctgggccgggctgtggagacctccatggagtgagacttggggctgacgctggtgctcagcgtggtgctgctgcggatggcacaggccagcacggctcagcttcatgtg

SEQ ID NO: 284250 - DNA, 122 bp, Homo sapiens
ggggaaagggagataggtgtctccagctgctgtggctgtttggggcgggtcggcttcatccgcgtctcaggagcaagtagagaattagcgggcggcagcaatgctccgcaaggtgagaagct

SEQ ID NO: 284251 - DNA, 122 bp, Homo sapiens
ctgacttcaagaatgaagccttggaccctcacggtgagtgttacaagtcttaaggtggcgcgtctggagtttgttccttctgacgttcggatgtgttcggagtttcttccttctggtgggtt

SEQ ID NO: 284252 - DNA, 122 bp, Homo sapiens
tgcaggctggccctgtggccgggggctggggtttgagtggggtccgctggagggggcctgcgttccacagcgaggttggagctaacagcttctgtcttgcggcccctcctctagccggccgc

SEQ ID NO: 284253 - DNA, 122 bp, Homo sapiens
ggaactggccgcgagaggcgcccggattctttccaaagggaacaaacagtatttgcagctcgaacggaagagtgggaatttgctcctaaaagaaaaattggaccgggaagagttgtgcggtg

SEQ ID NO: 284254 - DNA, 122 bp, Homo sapiens
tttctggattgtaatcaacaagggccaggaagggtggagtctttgcggggtgagaggatgcgtgtggacagtgataacagcagctagcctacgtatgacacccactgaaaaccagcgctata

SEQ ID NO: 284255 - DNA, 122 bp, Homo sapiens
gaaggctgattattacaatcaaagtttctggcatcaagctattagagacggctttgtgttcgaacctgagtctgggactccgtgtcagagtgggaacaggcatagggaggatctagaagggg

SEQ ID NO: 284256 - DNA, 122 bp, Homo sapiens
acagcctcatggtggcttattcggctgtgagctcagctttcacaatgagtgatttggattcgactccaggagcctgtgtagtcatggaggccagggctatttgtacctagggagcctggctg

SEQ ID NO: 284257 - DNA, 122 bp, Homo sapiens
ccccggaagtccctcctgtctctgcagcttgttcccggaagttttgctgctagtcgcggacgcaatggcttcaaggttacttcgcggagctggaacgctggccgcgcaggccctgagggctc

SEQ ID NO: 284258 - DNA, 122 bp, Homo sapiens
ccagctgcctgacactcccgacgcctggccagtccaaggctcccaactcttacctactgccgggacacagctgttggggcccgacactccggcagaaaccaacagtgcatgtgtttctccaa

SEQ ID NO: 284259 - DNA, 122 bp, Homo sapiens
ggttgtgatggaaatctggggttccaggtcccgctcctggtagccttttttggcgaggagcgcccacctgggaaggagaagatgggcagtgtggtgtccccccagcgtgtagtgacggggca

SEQ ID NO: 284260 - DNA, 122 bp, Homo sapiens
gagtcagccaaacagcctactcggggttcttgggtagcctttggggtgaggggacttgggcggccttggtctgtaagctctgcgttcccgggcgtggaagagactggccgcgcacatgcgtt

SEQ ID NO: 284261 - DNA, 122 bp, Homo sapiens
tatatgatctctttggctttagggaattactccataccagctctgagatttccagctcagcgatgcccccaggtccctgggagagctgcttctgggtggggggcctcattttgtggctcagc

SEQ ID NO: 284262 - DNA, 122 bp, Homo sapiens
gggaagggtcagggctgggagagtggtcacagtgggggtggccttgtgctgagtgggatccgggaagttggagaggagcagggtgggtcatggggggtgggacaggggagttgtgggaggct

SEQ ID NO: 284263 - DNA, 122 bp, Homo sapiens
agttacatggtggtgggactttgggctggactcagccgttgtttgtggaatttaacacagcgttgctcttgtttttctagatggatgtctgtgctgcaaaatagcaaagaagaagctttaaa

SEQ ID NO: 284264 - DNA, 122 bp, Homo sapiens
taagggccagaagcacggaaaacaaccaccagagttctggcaccctctctggattccatccggaccacctctgaggcacaaattattccctgggcaaatctcacacccatcttcatcccagg

SEQ ID NO: 284265 - DNA, 122 bp, Homo sapiens
agaaagagaggaggtacctccctgaaggccatgctagtaaggggaggagtcaggacaccccgcccaggcactctggctccccagcaaaaggatgtgggtttctcaggtgtggctgtttccac

SEQ ID NO: 284266 - DNA, 122 bp, Homo sapiens
ccacttctaagaaccccagttctaagaatcaacagagctcaattctcggaatttgagcttcggactttaccactgctacgtggcaggggaggacttggtgtcagctctccgagatttttact

SEQ ID NO: 284267 - DNA, 122 bp, Homo sapiens
ggggaaactgaaagaagatccagaaggacgcgccctagctatggaggctttggtggcatccgaaaggggagggggtggcgacctgcattaggccccctcctctccaaacacctgctgctggt

SEQ ID NO: 284268 - DNA, 122 bp, Homo sapiens
cctgggcccctctcccgctgcccgggatctcttctgtccaggtcaccccaggctggtcaccgtccgcccctgtctgtgcccattctcaaggcctcgtgtctgccctccccgcgcggaggtga

SEQ ID NO: 284269 - DNA, 122 bp, Homo sapiens
gaaatcagtgaagtctggccacactcagtcacctggaatcaggagttgcatttctccatccgtggcttatctgtccctgagtaaggccatggggagaagtcagatgaaaacagggagccagg

SEQ ID NO: 284270 - DNA, 122 bp, Homo sapiens
aggtagacagtggccacgtgactgctaaaccggttgccagaggcgcggccatttttggggcgggcacccaatctctcgccctgtaaactgcggggtgacgggacgctgttactaggactcaa

SEQ ID NO: 284271 - DNA, 122 bp, Homo sapiens
aatgctttccttggggcacttgctacgcaagcgacacgtgagcttgctggcttcctgtcccgcctcctgtcccgcctcctgtcccgcctcctgtcgcgcctcctgtcccgcctcctgtccca

SEQ ID NO: 284272 - DNA, 122 bp, Homo sapiens
ccgcgcgccccactgtgtcaatggcggacccgcactcaccctgctgcaccggggagtaggcgttggtcaggaagcggaagtgtcctttgttgtaccagcagatcaaggacatgttccccttc

SEQ ID NO: 284273 - DNA, 122 bp, Homo sapiens
ccggccggaggggggcgcaggagggcggcgcgggggcaggtgcggggcggggcacgggggcgggaccacacagggccgcggcagccgcgcccgctgggccacagaggccgctgaggccgcgg

SEQ ID NO: 284274 - DNA, 122 bp, Homo sapiens
gtgaaaatcaccaggaatacgtactccacctgctcctgggggtgggaccggggggcgggtcgggaagtcggggagttatttgaaggcgaggtttgacgggggcgtggggagcatagtcagga

SEQ ID NO: 284275 - DNA, 122 bp, Homo sapiens
cagacagaaggagccactgagggcccagctggcagaccgcagcctggggggtgggggcagcggggcggcgggggcaatggctctgagggtgggcgaggaccaagtgccgccaaggagcgata

SEQ ID NO: 284276 - DNA, 122 bp, Homo sapiens
aagcagtagaccggctttggggtctaagccgccgtggtcagaggtcccgaagccagtcctcgtctgctgcccggctcccgcccgtgttcgaggcagtagttaggctcgtagggcgcttgagt

SEQ ID NO: 284277 - DNA, 122 bp, Homo sapiens
ccgccggtgactaagcgaccccacccctctccctcgggctttcctctgccaccgccgtctcgcaactcccgccgtccgaagctggactgagcccgttaggtccctcgacagaacctcccctc

SEQ ID NO: 284278 - DNA, 122 bp, Homo sapiens
cattcagccccaccgaggctttcagagttcaggtctctcattcagggtttgagaccccaccgggctcagagacacctgcagcctgcagcggtcccagatcacagcctcagggatgggaccag

SEQ ID NO: 284279 - DNA, 122 bp, Homo sapiens
ctgcaactgggcggccgtggagctcaaggcctttggggtcaggggcctggggcaggctgtcgccaggagaagccgagggaagcaatggcggtggcgggcgttcagggtggcagcgagctgcc

SEQ ID NO: 284280 - DNA, 122 bp, Homo sapiens
agtgcggtgacagcggggcagatagctgcggaaagtcttggtggggaggcaggcagggcccggaccggggtcacagctgggcatgacgggctggaggacaatgccctggtgggctggagggg

SEQ ID NO: 284281 - DNA, 122 bp, Homo sapiens
aaaaaaatatagagagtgtcggtgggcatacccggtctggagaaaaataaagcgtgggtgcggggcatgcttgttattttctatggggtggccaggcagggcctcactagtgaagtggcatt

SEQ ID NO: 284282 - DNA, 122 bp, Homo sapiens
tgccgggactccgtgagccgaaagggcgagttgactccactccctgagactggctactggcgggtgcggctatggaatggggacaaatatgcagccaccaccacaccttttacccctttgca

SEQ ID NO: 284283 - DNA, 122 bp, Homo sapiens
tgtgaacagcattggagtgaagtggccacggctcgggtactctgtagatgattgctagtgcgccagcggagttggcggccttcccctgggggttaccccgcagtccagtctccggggtcccc

SEQ ID NO: 284284 - DNA, 122 bp, Homo sapiens
ctgtcgtgaccccttgtctaggaagatcccatcgcgaaggcctcatgagtcccacgtgaccggcacgcctgtgaggcaggaagctcagagtccaggccccgtgcccctctttgggggctaga

SEQ ID NO: 284285 - DNA, 122 bp, Homo sapiens
aaccactttttacacacagttgctcatgttgcaccacagctttcttccaggaaggccggccggtgattaggtgcctgtttccactgaagtgtaaatctaagccagaggcttgtccaggatag

SEQ ID NO: 284286 - DNA, 122 bp, Homo sapiens
gtgcccagccacaccctagcaaaataccgtgggtcacacaccacctgcatttctgagttccggttaccatctcactctctctccacgttattttacgttttctgtaaatgaatatttcctct

SEQ ID NO: 284287 - DNA, 122 bp, Homo sapiens
ggccaaaatctccgcaggttgctaggggccgggccagggctcggtgggcggggctgaccgcgggaactgggccagggtatcacatcctccagggaatgtttggctgcgacctggggcccgac

SEQ ID NO: 284288 - DNA, 122 bp, Homo sapiens
aatcttgacgccttaaaccctgtctagcctacttgattccgggggtggggctgtgggaatcgctgcccacccggaatcccgcctgccccgagcatggccaagccccagccccgccccgccga

SEQ ID NO: 284289 - DNA, 122 bp, Homo sapiens
acccagagtcacacagctaacagtgacacagctgaggctgctagaacctgggtctactgtcgtccagccacgaactggcttgagatcccggataagtctctctgagcctcggtttccccttc

SEQ ID NO: 284290 - DNA, 122 bp, Homo sapiens
aaaaagcctatgcaaagctttcatctaattatcatcctaggtcggctcggtctttttacacgttgtagacagaggcagcataacagataacaaggacgctgacgtcagcctacctgtgatcg

SEQ ID NO: 284291 - DNA, 122 bp, Homo sapiens
accactgtactgttagagacactgagaatggatcgctgtctctctttttctctaagaatccgtttgatgggaagcatgaatcttagttactatgaatactgttttcatcccagcctacctca

SEQ ID NO: 284292 - DNA, 122 bp, Homo sapiens
cggtcacatgctgtacaggtttggtagctaggagcaataggctacaccatatagcttgggcgtgtagttggctatactagctaggtttgtgtaacttacactccatgttgcttgcacaagga

SEQ ID NO: 284293 - DNA, 122 bp, Homo sapiens
ccttctgcaccacaagattccaaaacttttcattagctctgcagctccacagtgtgccctcggggacccaaatggccaggccagccctagcctctgcagacagctactgtggcaggcctggc

SEQ ID NO: 284294 - DNA, 122 bp, Homo sapiens
gcgttctccaaccaggcctaaatgtccagtacagccacagtcaagagagaattcactctccgaaggtttcaccatccatgtcagcactacactggtagatgtataacaaccagtttgtgggg

SEQ ID NO: 284295 - DNA, 122 bp, Homo sapiens
cgctcacctactggagcgtcttcttcagcttcggcctgtgcatcgccttcctggggcccacgctgctggacctgcgctgtcagacgcacagctcgctgccccagatctcctgggtcttcttc

SEQ ID NO: 284296 - DNA, 122 bp, Homo sapiens
ggagactggcttctaccgacaggaaggtcccttgcccccaacaaagagggcgtccaatgacgtaaaccaatccgattgctctgtgccagggccgggattcgctggcgtagccagtcagtgct

SEQ ID NO: 284297 - DNA, 122 bp, Homo sapiens
gctgcggggcgcccgctggggctccgggcggcacggggcgcgggtgggccggctggtgagcgccatcgtgcttgccttcggcttgctctgggccccctaccacgcagtcaaccttctgcagg

SEQ ID NO: 284298 - DNA, 122 bp, Homo sapiens
aatttcctttgtctttccgtttcatcatttgtaccatcaaaaggaatgtcttctcgatggcgaattaaaattctcttccagtttaattttctgagtctgaaaagaaatttccaaagtaaaca

SEQ ID NO: 284299 - DNA, 122 bp, Homo sapiens
aaggaaagagcggaggtgcccgtagaggtccgggcggccgctgctgttaacgtccatcatcgcgccgccgtgtgccgctgcccatggagccggcgccccggccacgcgcctccggctgccgg

SEQ ID NO: 284300 - DNA, 122 bp, Homo sapiens
aggtgagtttggtgtagaaaacaaatctttcttcagttggtgagctagggtagcgcactacggttcactcttgctttctttgcttcacaggattggagaaggtttgtgttcccgacgccttg

SEQ ID NO: 284301 - DNA, 122 bp, Homo sapiens
ccatggaatgacgactgtacttattttacaaagatgctgtaatatgtggtggctgcctgccgtcagatatgacctaccctggcttatggaatcaggctttgattatgtgtattcttttgatt

SEQ ID NO: 284302 - DNA, 122 bp, Homo sapiens
ttctccatgcccttctgtctctgagaagcagcgtggcgtgttcggattgtgccctcctgccgaccccggtggctcaggcaaagggcttgccagatggtcggtgttctttgccaaatgggacc

SEQ ID NO: 284303 - DNA, 122 bp, Homo sapiens
cccagaaatgaacacccacaatctagtgtgtaaatttcaggtttccaagtgttccaaagccgcgcacaaatttcggaaccagaccaagaatcctggactctagacgttgcctgggggccgat

SEQ ID NO: 284304 - DNA, 122 bp, Homo sapiens
ccgcacgtacctgcgggtacaagggaaccaagctagccggccgggcggagagacggcctccggaccaccacccaccctgggccccaagagccagggtctcccgtctccggacactccagcct

SEQ ID NO: 284305 - DNA, 122 bp, Homo sapiens
ccggctgcaggcgtcattcttggtcgcctgtgtgtccagagccccagcgcaggaagggagcgcaattcccaccgcgcccgctgggtggcgctagcgccgcaccgtgtcccgggatgagggga

SEQ ID NO: 284306 - DNA, 122 bp, Homo sapiens
gtttatggctgttgtcattggcacatcgcaggcagtcagtaaggattgttgagtgaatagcgtctgagctttaccgggtcaaggatgtgtgtgtttccccgctgcttgtatcctcagtgcct

SEQ ID NO: 284307 - DNA, 122 bp, Homo sapiens
agagcagtggaagggcagagcagcccttgccgagaccaagggacagcagggctgaatgaccgcaatgcagcacccgcttcgctttgcaaataaaatgcggactgcgcgagaaagcctggctt

SEQ ID NO: 284308 - DNA, 122 bp, Homo sapiens
ggattccccggccggtgcccgcccccgggctaaagtgcggcgcgggtggggctggtcacgcgcctggcttcctgcagtgcgaacctgggaaatccaggcgacttcgcagttgccgaagggat

SEQ ID NO: 284309 - DNA, 122 bp, Homo sapiens
tgacactgggcccgcgattccttggagcgggttgatgacgtcagcgttcgaattccatggcggcgcggcggcgacggagcaccggcggcggcagggcgagaggttcggagctcaatatcgcg

SEQ ID NO: 284310 - DNA, 122 bp, Homo sapiens
cggcaagggaaaggtaatttttccctgaagcacacagaacgtagtttatggttgctgcagcgtgcgcttcgagaaactctaaattactgtgcttgccgagacctgcgtgcatgaataatgga

SEQ ID NO: 284311 - DNA, 122 bp, Homo sapiens
ttgtgccactgcgcttcagcctgggtgacagagtaagaccccatctttaaaaaaaaaaagcgaagaaaagctaattgtaagtgctgtgcaatgaaggaggctcattgaccagtggacctcgc

SEQ ID NO: 284312 - DNA, 122 bp, Homo sapiens
aacacttactgcaaagatgtgcagtttcactcctgaagtcagtgagaccacgaagccacccgccgggagaaaggaacaattgtggatgtgcaacctttaagagctgtaacactcaccgtgaa

SEQ ID NO: 284313 - DNA, 122 bp, Homo sapiens
actggccagtactaggggagacaagcttaaatcgttgttagaccccgagctagggttccccgagctagggttctcccttctgaggcgtgttttccccatctgcaaaacgaagggttaggcgg

SEQ ID NO: 284314 - DNA, 122 bp, Homo sapiens
acctggtcagtctggactctttcagatgtgtgactggccggctttactaagggagcgtggcggtggggtaccacaagtcacagggtcttggtttgaggcaagtgtgagtgtgtgtacacgcg

SEQ ID NO: 284315 - DNA, 122 bp, Homo sapiens
atggaaagtccaagaatagaaccacatgagagtggagacttggtatgagaaggtgtatcccggggtgtacagcatggccaagcctgtggaaaagatggcattttcaaaaggcaggacgattg

SEQ ID NO: 284316 - DNA, 122 bp, Homo sapiens
ccgcccctctttgccagcaattcagtaaccacggtttgcccaatgcaaaggcagttacagcgcgattaattattatccttaaatactggcgcagacctagaaggacccgaggacgccgtgct

SEQ ID NO: 284317 - DNA, 122 bp, Homo sapiens
tttatttactgaattaacttttaacggaccctccactttgttcttcagagttggcttccacgacttgcgcctgtttagccaggattcctcttgcctttgtgaccgccccccctccccgccaa

SEQ ID NO: 284318 - DNA, 122 bp, Homo sapiens
ggagcaggatggacgcagagccgcgcacatgctctgccctcccagagcttccacagggagcgcccccgtcaagcctaggagagagcagcacagccccttgccgccctcccatccccctctca

SEQ ID NO: 284319 - DNA, 122 bp, Homo sapiens
ctccacctgaacttgggtgcatgagggatctctctctctcacacacacacacccccccaccgcgtaagataaatttctgtttgtgagctgcctacattaaatgctttgctcctgaccttctg

SEQ ID NO: 284320 - DNA, 122 bp, Homo sapiens
taggattcagatgggcaaagacaactaacaaagactttcctcccaaattgagggaaatagcgttggcaaaggtgtcaaggaaaacaaaccgaatttagagtactttaggtatttgatagatc

SEQ ID NO: 284321 - DNA, 122 bp, Homo sapiens
cctcagtcacctagcaaccatctagggctttgctggctcctcctcctcatgacagtcatgcgcagagcttgtcctgcttctttctccaaagaacaggttttggctcctctcttccctccctt

SEQ ID NO: 284322 - DNA, 122 bp, Homo sapiens
atgggcttcatcgctgcctccaagaacaacaggacgaccgcaggtttcgcctcacagaaacggaaccgctggaaaggcctctcttgacattcccgaaaggaaaataaaaattcctctgaagt

SEQ ID NO: 284323 - DNA, 122 bp, Homo sapiens
acacccagcctttgagggtgggtgcagccatcagctgctggccctgcccgggtgcccacccgatgtcgacctcatctaaaggcaaggccccatctcaggagaatgcacacagtttacttctc

SEQ ID NO: 284324 - DNA, 122 bp, Homo sapiens
agcactgactaatcaacaaggtgcgagcaacgcctgcgcagctctgggagacaccgcctccgcctcccaggcgccgcccgctccgcccccagctcggcctccgcctcccgcagctcccgcgg

SEQ ID NO: 284325 - DNA, 122 bp, Homo sapiens
ctgagagatccggaaggcggggagcactggactccacacgggagtcagtactgagagatccggaagactccacaccgggagtcagtactgagagacccggaaggcggggagcactgaagact

SEQ ID NO: 284326 - DNA, 122 bp, Homo sapiens
gattggtgcaagcgacgtgggatgaggtaatctctcccccacccctttttctctagcatccgtagactgtttgcatcctttagacaaagagaccgtgcagaagcagtcggccgagcatccat

SEQ ID NO: 284327 - DNA, 122 bp, Homo sapiens
tttcccacctcttctggctgccccggctccgtcccgtccttctccacgggcagttccatgcgatgcatttttattgcaccgacgccgcggcgctccggtgccagccctcctcccctcgcacc

SEQ ID NO: 284328 - DNA, 122 bp, Homo sapiens
tcccctccataggctgtgtgcatctcaggaccaggagtggggttctgtctccctgggggccgcctggacctctctggtctgtaagagcattaggacaatccctagtagcatcaagaggccac

SEQ ID NO: 284329 - DNA, 122 bp, Homo sapiens
gtgtatgcggaagatttgattgagtggtggctcctggtgggatgggtactggaaagcagacggtgaaagagggtcatctttccctgaagccgcaccatctgaagttagctgcgtctatctgt

SEQ ID NO: 284330 - DNA, 122 bp, Homo sapiens
agatccttggtgagtggtcatgacagtgcagtgcggagggaagggacgcacgcatgcactcgctgagtcatgccaaccctgggactctatctatcgcatggtggggctccaggtcacatccg

SEQ ID NO: 284331 - DNA, 122 bp, Homo sapiens
ctggggaagccctggtggcagagctcttctcccaaggaagcctctttaactctccatgatcgcagcaaggggacacaaagtgaagaagggctttggggacccctgcgtctttcccctctttg

SEQ ID NO: 284332 - DNA, 122 bp, Homo sapiens
ttcctagaacctagaacaaagatccatccaggcaaagacaatatttaaatccaagaaaagcgggcacggtggctcacacctgtagtcccagcactttgggaggccaaagtgggaggatcgct

SEQ ID NO: 284333 - DNA, 122 bp, Homo sapiens
gggacctagcacagtggtgaaaaactccagcataccttctgggaacttgccctgcagatacggtcatctgtgtgcaaaatggtgtatgtgtgtacaaggttattcactgaggcattgtttgc

SEQ ID NO: 284334 - DNA, 122 bp, Homo sapiens
ggtgttcgtgacacaatcggagcaattagaattgaagcaacttcaggagatttagcaacccgcgaaaatttagcaacgttcagacgtcaacagttttctttctttgagtggtcaacgaaaac

SEQ ID NO: 284335 - DNA, 122 bp, Homo sapiens
gtctgccaccaatccgcgcagggcagcgaggaggagccacagggctgagctcggttgcggcgcagccccgccgcagtgcgcaaagccatattcgcgaagtctctgaggctgagccagtggcg

SEQ ID NO: 284336 - DNA, 122 bp, Homo sapiens
gaaggggtgaagggtgaggtgtgattgcccccacctccttgcctcccgcagcatctgctccgggaccatgaacaatagctgacagctccatggcccttgctgtccccatctcagcttccctg

SEQ ID NO: 284337 - DNA, 122 bp, Homo sapiens
gtgtgcctactgtgtgggggcttctgtgggagaggaccctgtcctccgcacgtcagctgccggagagtcagctggtgccagatggccggccggcctgcctgcctctgggaggcctcagtgcc

SEQ ID NO: 284338 - DNA, 122 bp, Homo sapiens
tgcagcgggtagcttcgacggcacaaggccatggcctagcaataactaaaatgtgatgaacgctaacagtgtgctaaatatgagctcactcactctctcaacaaccgttaacacatcgctat

SEQ ID NO: 284339 - DNA, 122 bp, Homo sapiens
cagctcggtcaccggccctactgtctcagagggcggacccagctcgggctggtagtggggcgggggtcgcagggcgcgggccgggccctcagcgcgcatgcgcgacaagggggcggggccag

SEQ ID NO: 284340 - DNA, 122 bp, Homo sapiens
ttttaaaaaaatgtttctcagaacatttaacaaaggcttaactatataccatagtagggacgtttggtttttgtataaaaaggagatcactgggcctcactcaagatttcctgaattataat

SEQ ID NO: 284341 - DNA, 122 bp, Homo sapiens
agatgaaaacagtctagtcattatcagttaaactgtaactgcgtgcggcagcgtgctgagcgagacaatcagcggagcccgtgaaatgttgctggttttccagatagcccgtttagttttgt

SEQ ID NO: 284342 - DNA, 122 bp, Homo sapiens
ctcccgtgaagacaggtcccagaaacatgtctgcctattcttttattcatctgcctctgacgagttgaggtttcaggtgaaacttcagagggccaaaggcaaagtgctccctctgcccccac

SEQ ID NO: 284343 - DNA, 122 bp, Homo sapiens
gaggtgatgaaagccccactccttatagcgatgacatctggaagaagacacaattgtcaccgtgagcttttcaattactcctggagactaagtgtgagacgcagtagtgcaggatgattgga

SEQ ID NO: 284344 - DNA, 122 bp, Homo sapiens
tggacgactgtacccagtctcggacgctttggaggtgctctggcactggaaggcctagaccgtggtacggcgcagagtagggggttcagctcttttcagcccgaggtgggctctgtttggct

SEQ ID NO: 284345 - DNA, 122 bp, Homo sapiens
cagtgttgaaacaatgtattcaaggtttgcttgccctgagactaacccaagtctgtgtcacggatgctgattgcctcagcctagaaattcttcctaacctaataatgacctattctcttctc

SEQ ID NO: 284346 - DNA, 122 bp, Homo sapiens
actagcgtgttccgggcggtgccggcagcaccgccccctccctggccctgcccctagccccgccccgattcaccgctcaggcccaagcccagccccttgggctcgctgccttatgcagtcac

SEQ ID NO: 284347 - DNA, 122 bp, Homo sapiens
tagcgctgcatggcgcacgggggctggccgggggcccggggaagcgtgtctagttggcggcggcacctccggctctcgcggctcgctagtggctcccccgcctttccccgccccgcgtccgt

SEQ ID NO: 284348 - DNA, 122 bp, Homo sapiens
cccggggcgcgcgaggagcggcccctgcctgggacgggggggtgtctgggggtcccgagacgctcccggagggggctggggaggggtcccagcgccggggtcgaggacgggcgaagcccctg

SEQ ID NO: 284349 - DNA, 122 bp, Homo sapiens
cctcttgctggagtcggccgggtgcgggggtggggtgtggtggggagcgggatggggatgcgctgtacagatgtgctcaggtgtatgggcttgtgggagagataagtagtataaccattgtg

SEQ ID NO: 284350 - DNA, 122 bp, Homo sapiens
gcacgagcccagtctctggacgcctccgggagaactgggccaagcacagggtggtcgcggcgcagggagagcatctgcaaacgttggtccctgtagtgctttgaatttccccgaagagctct

SEQ ID NO: 284351 - DNA, 122 bp, Homo sapiens
tgctggatgaagaaaaggaaggggtggtcggcgcagaagcgggggacgaatctggcacaccgcatcatcatgatggcagctgtggcggctgcagcctccgtgccttcctcattgacctccac

SEQ ID NO: 284352 - DNA, 122 bp, Homo sapiens
atgccgcatgtccgtgctcacattgatagtaaacagagtaaatatcattcccatgacaatcggaataaagatgaaattgagggtggtgacctgcagtaggcagcagtcctggtctggattgg

SEQ ID NO: 284353 - DNA, 122 bp, Homo sapiens
tggagaataatgcctttaagataatcatggcccactggggcagcaccacctccctgaccccgttgggtggaggacccattaaaagtggcagcatgacccccacaggcagggaaggcactgcc

SEQ ID NO: 284354 - DNA, 122 bp, Homo sapiens
cggattcgctgggcacgtcgggaacccgcgagttaatagaggtgaccgaggacgtggacccgggggagtcggttatcagctgggctcgggtcaagcgcttgccggtcctgttgggcgtctgt

SEQ ID NO: 284355 - DNA, 122 bp, Homo sapiens
ctgccctgttagcacagaaagtgaacgtgagcagtgcgagaaggctcagagtggactttccggggcaaacaactgagggccttttgggcgtcacagatttggtttagttcggatcgaggtaa

SEQ ID NO: 284356 - DNA, 122 bp, Homo sapiens
ctattctagtacaggtcggatgtgtttttggggtagtaagtcctcaaccgaaaacaaaagcgaaaaacctgtcgtcttcaacgtaagcattatctaggtttttgtggggccaggcttgcatt

SEQ ID NO: 284357 - DNA, 122 bp, Homo sapiens
caatgggtccccgcctgaagtccagccccctgcctcatggcgtttcctttagacactagccgatgccatggcaactctggcctttcggttttttagatatgtctcttcatgtggagggcaag

SEQ ID NO: 284358 - DNA, 122 bp, Homo sapiens
gagcccccttccggaggggaggccccggcccgcccagaagccacagccgcgtcccgccgccgctggaggagtcaggctttgcaacagacaggcctgacctgcccccaggcaggagcgcggcg

SEQ ID NO: 284359 - DNA, 122 bp, Homo sapiens
ccatctgcctcccctttcaggctgctcctgtctggatctgttagtcctcttcctggagggcgggctccttcgaaagtggggattgggcttcagtcgtctctgagacctttgcctagctagaa

SEQ ID NO: 284360 - DNA, 122 bp, Homo sapiens
ccgccccggaggaggtgggacaacggcggttgtgccagtccgggcgctgcacccccttcccggaactctaatcgtatccccaaatagagggatgggaacacatttgctttcgcagtaaaacg

SEQ ID NO: 284361 - DNA, 122 bp, Homo sapiens
tttcggcgggcttcacgcccacggacagcgaggccatggcggtgaccgtctcggcttcttcgttctcgcaagtctgagcctcgatcagagaacgccccgctgtggaggttgtgcgctgcagg

SEQ ID NO: 284362 - DNA, 122 bp, Homo sapiens
acgaagaggggggcggcctgggggtggctgctccaggaagagctgcagggtgacgttgagcgctgcctcctcagttaggtcttggtgggtgatggagccaggggcagccagcaggctccaga

SEQ ID NO: 284363 - DNA, 122 bp, Homo sapiens
gcggggaggggtccgcagggcgggggagcggggagcccagcgccgggatgcctgctcccgcgtcctgccctgggccatcgggatgaattgggcagtccccagggccccttttaacagccctg

SEQ ID NO: 284364 - DNA, 122 bp, Homo sapiens
ctcaaaggaagacatcccctggagctcttcttactaatcatagttaacatttattgagcacgtatcacattatctcatttatcatcacaaaaaccctacgaaatctatttgttacagatgag

SEQ ID NO: 284365 - DNA, 122 bp, Homo sapiens
tcttgcatggtggtgctgacaggatcgctcacctccaggctctcagcagtgatcctgtgacgcaagggctggccctgcactggggttgatcttcccacttccaggcccccttttcaggcctc

SEQ ID NO: 284366 - DNA, 122 bp, Homo sapiens
ccggcactccccagagcagcaagtgagggcaggaggcccccagggaggtgttctggaccacggtttatctgctcccaggctggggcgctgcctcccagagatggaactatcttgactaagcc

SEQ ID NO: 284367 - DNA, 122 bp, Homo sapiens
atccttttgaaaggcattttgagtgccctccgcttggtgccagtttttgctggctgagtgcgccacagaggaagaacagcaacaaaactcccaagttctctcctgagtctctagtttcccac

SEQ ID NO: 284368 - DNA, 122 bp, Homo sapiens
gcattcctgggggagggcatgaccaggccagtgagctctgagagcaggagggagagaaggcggcaggcttcctccagtgagagctaggcataccccctcaaggctaagctgtccatttcacc

SEQ ID NO: 284369 - DNA, 122 bp, Homo sapiens
cctgccgcaggacaatatgttggcagcatgctaattgctttaacctagtttcagacccaccgaggggttccccgcgcgccgcgggtgccatggacctcgtccaagagcaattaaagcgaggc

SEQ ID NO: 284370 - DNA, 122 bp, Homo sapiens
gtgtgtgctagatcagaagttataaactggtggccccatagtccgtatccagctaatagacggtattattcccccttattaattagatgccaacagctaagaagaacgtttcaattaacaat

SEQ ID NO: 284371 - DNA, 122 bp, Homo sapiens
ccagatcaggtgccgactttggagaaatgcaggtgcaactgtccgaacaaatcaagtccccgctactggacggggctggcagctcagctggggccggagagaaaagtcacgagcaagaaagt

SEQ ID NO: 284372 - DNA, 122 bp, Homo sapiens
ggctcagctggggtggttccattgtctggagtggtaagtggggaagtgatgactgctggacgttccctggggaggtgtccttgtggctgctgaagccacagagcttgcctgtgtgttggttt

SEQ ID NO: 284373 - DNA, 122 bp, Homo sapiens
cgtgagggagacctgacctttcagcctcataggaagtagaccggagtaatccccacggggcgtggagcatagggttgtctgtgactgtgaccctggccaaggtcactgtgtcagtgtgttgg

SEQ ID NO: 284374 - DNA, 122 bp, Homo sapiens
gccccagcctagcccccatgtccggtcccctcctgcccctgtactaaccctgaagctgctcgataagcgtccatgccatccgagagccgctggcatcaaacaccacatggccctgagggaag

SEQ ID NO: 284375 - DNA, 122 bp, Homo sapiens
taatgtctctagcacagcccctgaccatagcaggagctccacacagaatactgtctcatgcggtgctcggtaactgtgcatccgatgcaggcctcactgtgtcatgttcattcattcaggtt

SEQ ID NO: 284376 - DNA, 122 bp, Homo sapiens
tcatttttagagagtccagcctatttttctgtgtatgtggactggagtttgagggtagcacgccttttgcagacagcataatggtggctggagcaattcaagtgaaagaagttacaaaggac

SEQ ID NO: 284377 - DNA, 122 bp, Homo sapiens
cagcaggaaccacaataaggaacaagactcaggttaaagcaaacacagcgacagctcctgcgccgcatctcctggttccagtggcggcactgaactcgcggcaatttgtcccgcctctttcg

SEQ ID NO: 284378 - DNA, 122 bp, Homo sapiens
cgccacgcgaggcggggactgagagccagccccccttccccccgggcttaggacccccatcgcggttcctaagatccttaggacccacctggaggactgtgggtatggggtgtccaagaaga

SEQ ID NO: 284379 - DNA, 122 bp, Homo sapiens
caatcttttcctgcgcagttggaattccgcatccaagctcgtttgaggcaaaacggcgaccgcgggctccagtgtcctgagtatgtttggtcaatgcaggcgattttctccgtgtttacaat

SEQ ID NO: 284380 - DNA, 122 bp, Homo sapiens
ctagtataaagtgaaacacctttaaaacacctcttaaaaagaacctaggagcagcgcgggcggcaccgggaggcagctgacaggcgtttgcggcttcgcttcatggccgctctcccgccccg

SEQ ID NO: 284381 - DNA, 122 bp, Homo sapiens
tgtgtgtcgtgatttgcctttcttgtcagcctaagctcaggaaggtgtctgtgagaacttcgctcagcccaagatccctttcccttcccgtcacatctgttagcgcacaagatttcttcgtc

SEQ ID NO: 284382 - DNA, 122 bp, Homo sapiens
acaacctccctgtgaggtatagattattctccacactctgtagatgaggaaatgaaggctcggaaatatagttgcccaaagacacccagctcctagggataaaaccaggagtgaaaattaat

SEQ ID NO: 284383 - DNA, 122 bp, Homo sapiens
acccttctgcaggcccttccccctgcactctctcagtgcctcaagaactcctgcagctcccgcaaactctctgcccgcaacaagggcacctgccaactgatggagacactgacagtgcacgg

SEQ ID NO: 284384 - DNA, 122 bp, Homo sapiens
ccccgtcctcccatagcgcttattgcctcaccctcaccccctaggggccggatccaaaggcgctgcactccccaagccttggggcatcagccaggaaggtttcctacctcctaattcagggg

SEQ ID NO: 284385 - DNA, 122 bp, Homo sapiens
cttaatttttctccagaactttccagcatggtctgtccttttcttacatattttgttgtccgcctcctaaactccatgagggcagagttcattgtctgtcttgctcacttagaaatctctag

SEQ ID NO: 284386 - DNA, 122 bp, Homo sapiens
gctcctacacttctgcttttcagccagttttgcctcttgcactttgtccctgcctgtccccgtccccgtctccctctctgctccggccgccttggcgcagccctaactcgggcatccgaagc

SEQ ID NO: 284387 - DNA, 122 bp, Homo sapiens
tctgccaccacaaaggtcattgttcagtcactggtttgacatcactcatcactggtttgtcgattccaacagacctgtccctgcccccacaaggtattttgggtgtcagatagattcatatt

SEQ ID NO: 284388 - DNA, 122 bp, Homo sapiens
tgtctactccacaatcacatgagcagtagccgcccccactgagtgctagctcagcacacccgggtgtctgattgccagtgattcttatagtaacactgccaggtctacagtcacattaaagg

SEQ ID NO: 284389 - DNA, 122 bp, Homo sapiens
ggccaaataaggccggacggcagccgagggcccccgcaccccgcccgcggccccgccccgcgcacattcttctgccttgtaaggcccggccgccacgccccgcccccgcctggagtccagac

SEQ ID NO: 284390 - DNA, 122 bp, Homo sapiens
aggcgggcacggggcagctcatggcggcggcggctcggactcgggatcgggatccggctccggctctctggtctcccgctcggccccgccccctgccccgaccccggtcacgtgcgcgccag

SEQ ID NO: 284391 - DNA, 122 bp, Homo sapiens
gagaggacaacgccaagacggctgggaagccccaggccagcagcggaagtccactcggcccgccctgcgactttgaaaccggtgccccggaccactccttggagacggtggcgcctcttgcg

SEQ ID NO: 284392 - DNA, 122 bp, Homo sapiens
aggaagccgtggctcctcggggcgtctgcaggcctcccagcatccgtcgtgcagacctgacgccacctgccacccgcagacgctgagacccggagcccctctgcccctgggctggccgcgga

SEQ ID NO: 284393 - DNA, 122 bp, Homo sapiens
cgcggggctgaggctggcgttccgtcattgcttcctgagctgccccactgagagacacgccggggattcccacggcctctcacctctggcaagacaggacaggttcactatttgattatctc

SEQ ID NO: 284394 - DNA, 122 bp, Homo sapiens
gctttgttactttccagtcactctctcccgtaacacagcaccttggcacagaaagcagagcgacaaaacccagaatgaggacagttaaaattcaactcaagctacagccatcccaacggtcc

SEQ ID NO: 284395 - DNA, 122 bp, Homo sapiens
atcgaggtggggggggtgtaggctgggggagccaagaatgtcagcctctaggtctatctccggtccttgtttatcagtagaggggacctgcctttagacaaccgcccactcccacaccaccc

SEQ ID NO: 284396 - DNA, 122 bp, Homo sapiens
gatcacttgaggttagaagttcgagatcagcctggccaacatggtgaaaccctatctctacgaaaaatacaaaaattagccaggtgtgatagtgcccgcctgtaatctgagctgttcaggag

SEQ ID NO: 284397 - DNA, 122 bp, Homo sapiens
actaaaacataagcagagaaagttatgtacaggtttttgctttagaaaaatctctctcatcgctgtatggaggaatggtttggagaacgcaggactggccctaagaaatcaatcagataatt

SEQ ID NO: 284398 - DNA, 122 bp, Homo sapiens
tgcaccgccttgggagcgcgcaagcatctcggggaaaatggtgcaagagattctttaacacgtgaaacagacagctgtgacattaactcagatctgtctgccagccaggaaggatcctttcc

SEQ ID NO: 284399 - DNA, 122 bp, Homo sapiens
ggtgagttggccaaggactggaacggctgatgccgatggaaatccatgctttctctgtgacgtgctcacaccccactgcttttctcccggtcttagaaacccccttcaaccgtggccttggc

SEQ ID NO: 284400 - DNA, 122 bp, Homo sapiens
ccgtttccccaaacccctgcggagctgacacatcaacaaagatggcggcgacactgaagccggcccggttacagctgagggggcgggggctccctggaggaaccaatcagcgcagcgcgggc

SEQ ID NO: 284401 - DNA, 122 bp, Homo sapiens
gggccctcctcacattggctgaagtcgccaagcccttccatccaatgatagggcaaagcccggaagggaggcagggccagagcgtcggccgaccgcgcggggcttctgaggggcggggggac

SEQ ID NO: 284402 - DNA, 122 bp, Homo sapiens
ccaatactggaaggtttctggggtaggccggggtgcctgggaacaatacatgctttagagcggatttggagagggggctctggcgtctagggactgcaacccactgtggacttccttttctt

SEQ ID NO: 284403 - DNA, 122 bp, Homo sapiens
tgctgggtagtgtactccttttcctagcttcacaaacaaaacccggatgtgacttggaaacggaaaaaaaaaaaggagcgggggtgcgcggagaacacaaagtaaaacttctgctgttccca

SEQ ID NO: 284404 - DNA, 122 bp, Homo sapiens
aatttcttagaggcttaaataatcatttcaacagctgcttatttttagttattttcctgccggttgctaataagggatggccggggtgactattgcggaaggtggccagccacggagaggtg

SEQ ID NO: 284405 - DNA, 122 bp, Homo sapiens
gcccgtggaggcccaggatgtccatgtgtcccgtgattggggcggtgttgtgtgctcagacggccaaggaggcgtccggatttccccaggagaaggtgcctctcctcttggtaatcagtggg

SEQ ID NO: 284406 - DNA, 122 bp, Homo sapiens
tgcggtgcaaaggtccttggaggctagccccgggctggctgtgaggggagagccaggtgccgcagctctccctggtacagacttcagctgcctccaggacccggggcctgaaggaggcagaa

SEQ ID NO: 284407 - DNA, 122 bp, Homo sapiens
gctgtgcaccgcgccccgcgccccgcgcctgcctccccggcccggcccggcccggccgggcgccgtccacccgagggagcccgcgccctgcgactgcccgaccctccacccgccccacgagc

SEQ ID NO: 284408 - DNA, 122 bp, Homo sapiens
tctgggtcatcgcttccaaggtacgtgccacgtcgcggaactgcagcgcgccgctcccgccgcatccttcactgcccccggcctgctccgggtgggcgcttggcaaggcctgggcggaggtt

SEQ ID NO: 284409 - DNA, 122 bp, Homo sapiens
caatccagaacaaattttgtcagagaccaatgcttgaactcatcactctcttacactctgcgaatatcaaaagtttcccagttactctatggttcacaggaggtctaagttcaattctgtgg

SEQ ID NO: 284410 - DNA, 122 bp, Homo sapiens
gccagctgttggccaggtttttggtggatcgtgggcgggaggagtggaggttcctcttcgcgaggttttccgaatccaaatacacaggtttagtgcagtgtggaccccaggcaaaatgtgga

SEQ ID NO: 284411 - DNA, 122 bp, Homo sapiens
ccagccctaaggcggtttttccctatctcagtagacggaacatacaatcgggttttataccgagacattccattgcccagggacaggcaggagacagatgccttcctcttgtctcaactgca

SEQ ID NO: 284412 - DNA, 122 bp, Homo sapiens
ctcctcactttccagactgggcagccaggcagaggggctccgcacatcccagacgatgggcggccaggcagagacactcctcacttcccagacggggtggcggccgggcagaggctgcaatc

SEQ ID NO: 284413 - DNA, 122 bp, Homo sapiens
tgtccaatattcctgcctgggcccctgtttttctgggtgctgctttctttcttgctgatacgaatttcagggagaacttcttatagagcatttcgctctcctgggcagaaagaggagcctcc

SEQ ID NO: 284414 - DNA, 122 bp, Homo sapiens
gtgggggtggggtctggggccgcagcgggtcggggctgctcactgtttgttgagcttgagcgtgagccggctgctgaagacttgcgaacagttcggagccagcgagagcgcgccagagagag

SEQ ID NO: 284415 - DNA, 122 bp, Homo sapiens
agggcggagggagagagagagagagggagggggagaggaggaaggaaaaagttggcaggccgacagcacagccgtgtctgcatccatccagaggaggtctgtgtggtgtggggcgggccagg

SEQ ID NO: 284416 - DNA, 122 bp, Homo sapiens
cccctcgtaccgtgttctgcagcccggcgtggttttcctctagtcccacacgatctaatacggtagccaccagctgcaggtggctatttaagtgcaaactgattgtgatggaataaaatgaa

SEQ ID NO: 284417 - DNA, 122 bp, Homo sapiens
atctaagtatttccatggtctccaggagctaaatcacagcacctggcttcttgctctgcacgtggctgggcctggctcccaggactctctgtcctccatggactggttgtgaaagccacaca

SEQ ID NO: 284418 - DNA, 122 bp, Homo sapiens
ctgaataaatctcttcaaatattttacagagtttgactcttttcatcgagaataatctggcgcccaaacacatggagcctcagagaagaatcaggaccccagaggagttgcttgaaatggga

SEQ ID NO: 284419 - DNA, 122 bp, Homo sapiens
ataactggggggtggagaggttgagaaacaacgcttcactcagcaacttcctgctccctccgaggaagaagaaaggggtgtctgtgctagagccactcccttgccagcagcccagcagaaca

SEQ ID NO: 284420 - DNA, 122 bp, Homo sapiens
ggggaagggcgccacaggccgggaagacctcctccctttgtgtccagtagtggggtccaccggagggcggcccgtgggccgggcctcaccgcggcgctccgggactgtggggtcaggctgcg

SEQ ID NO: 284421 - DNA, 122 bp, Homo sapiens
cccggcaggctcccaccccagtgccccgtgtccacccggcaggctcccaccccggtgccccgcgtccacccggcaggctcctacctcggtgctgggttccagcccctcccctgtctcctgag

SEQ ID NO: 284422 - DNA, 122 bp, Homo sapiens
tgacaggtttcatttgtaaaatctttaccagagttttcttctttaatccaggctttatctcgtgagcaagaaatcatgagatctaaagtccttctggcaagaccaggctctaactctctcca

SEQ ID NO: 284423 - DNA, 122 bp, Homo sapiens
taagtttcccccagtttattaccattagctcataccctttctgtgtgtaatattttcccacgactattcacttttcatcgaacctactagaaaaatcactcaggtttaactgtttttttgga

SEQ ID NO: 284424 - DNA, 122 bp, Homo sapiens
ccgtgagaggggtgacagggaaactctgtcgccactcccgtcaggaggttgccgtgcacacgcagtgagagcggtcgtgatgctgctgcgtgatgctatgacgcagatttggagcacaggag

SEQ ID NO: 284425 - DNA, 122 bp, Homo sapiens
agagccagaagaggagcaggtagagtgtcagcaggggcatcttctcttcagacaggtccccgttcccctcagtggagcctggcagcaggaacaaactacagactcccagccttctgctggta

SEQ ID NO: 284426 - DNA, 122 bp, Homo sapiens
gcaggcttgagcccaggtcttgggacgacagtaggcccctctgtgtactcattggtgtttcggatggctctgatctgatccagagacaagacatgtacctgctgggtgagggcgtctctggg

SEQ ID NO: 284427 - DNA, 122 bp, Homo sapiens
aaatacctttcaaagtttcatcccgcctcatgtcgcaggactgctgtgtttgtgaaagcgcgtttgtttccacaagacaagctccgtgtagtcgccagcgggtgcctggcccaggagctgcc

SEQ ID NO: 284428 - DNA, 122 bp, Homo sapiens
gagaggagggcagagccctgactgacacaaggctgcttggccctgggtgttcggcctgagcgaggagacttgctgggcaggctggttgctttaccacacctggtcttcctctccttggattc

SEQ ID NO: 284429 - DNA, 122 bp, Homo sapiens
atgcgcggccccagtcagcgcacggtgaggggcgttaacaccagacctccccctccagggcgagcctggcctggggagagtcgcagtaaagccaccgtcaaaactccttccaagttcattat

SEQ ID NO: 284430 - DNA, 122 bp, Homo sapiens
cgtgctctgaagcgatgctggatgctcgcagtactatgggtgggccgctccccaggggcgcggctgccttggaaagaagcgtgatgtttccttttaaagcccagacagccctgtcagaaatc

SEQ ID NO: 284431 - DNA, 122 bp, Homo sapiens
tctgcgggggcctcagcgaccaccgggagatcacgaaaggtaccgcgggcctcgcgcgggcgccctctggtggccgccggtcagaaggcgcagaggcttaggcttctccaaggagtgcgtgt

SEQ ID NO: 284432 - DNA, 122 bp, Homo sapiens
ggaaggccacgaaccgggagacgggcagggcagggctggagcccaggctcatacctggctcggcctctctcagtgcagaccatctccaaacctcggttttctcatgcataaaattgggttat

SEQ ID NO: 284433 - DNA, 122 bp, Homo sapiens
ccctattgagcatgttgagtccagtgcctggactcacaggacctaaagtctggctgagatcgtggaacatgatctccctagagagagctacatacaggaggattcaacatcaaatgtgtata

SEQ ID NO: 284434 - DNA, 122 bp, Homo sapiens
aggacgggaggagggccaaggaagaatggcggttagagagggaaagaattaatggttttgcggcaaacatggacttggccaggaaaacaattccttatttctagaaagaagaggagctttta

SEQ ID NO: 284435 - DNA, 122 bp, Homo sapiens
tgaagggactacagtgttcttttgatttggatgcactttgaagggacagccagagagccacgtcccactcacttcccccttcctcgctggactaacagtggagaggacctggggtctcactg

SEQ ID NO: 284436 - DNA, 122 bp, Homo sapiens
tgcccagctggcccctcaagggtgatttccggcactctcatcaccagtcaccctcccacccgcttctcatgtgatcatgccactctgcgctcctccctgggccgctctgtcgtgtggggtct

SEQ ID NO: 284437 - DNA, 122 bp, Homo sapiens
cgacctccgcgcgttgggaggtgtagcgcggctctgaacgcgctgagggccgttgagtgtcgcaggcggcgagggcgcgagtgaggagcagacccaggcatcgcgcgccgagaaggccgggc

SEQ ID NO: 284438 - DNA, 122 bp, Homo sapiens
tgcgagatcataccgggtgcccttgtgggggaaatattcctttgatagaatttagcaagccggggcaggggggcggggggcgcgagtgcagtggctcacgcccgcaatcccagctactcagg

SEQ ID NO: 284439 - DNA, 122 bp, Homo sapiens
gtcatctgagacacgtgtgtgttcctcacacagtaaccagtgtcgcagtcatctgagacacgtgtgttcctcacatggtaaccagtgtcgcagtcatctaagatgagcttctgcttttctac

SEQ ID NO: 284440 - DNA, 122 bp, Homo sapiens
acacgactgtggtccaccgtccgaggtgagagactcagtgcaaaccttttggtgcctgatcgaatctgtgagcatcagcttatcgaagttgtgcaggcaccaacatcttcgccgttcagtat

SEQ ID NO: 284441 - DNA, 122 bp, Homo sapiens
agttttctgtgtttagatctgatggcatctgcatgacttctgtgtttatttttctcattacgacttcagagttagcaagacgatggcctctttatcttttctcactgccatattttccaggc

SEQ ID NO: 284442 - DNA, 122 bp, Homo sapiens
cctgaagccacacactttctaagatcttggcttttccctttgagaatttgctgagatgatcgactctcttctccagaaacacaagtctgccaccagcccctcttcccagtaattctgcatgt

SEQ ID NO: 284443 - DNA, 122 bp, Homo sapiens
cgagcctttaagcgctcctctaggctcacatgacccagacccacagggcaaaaagtgcgtcgtcgtgtcccaacctcctggtcccagaaacctggccgcatcaagtcagcgcttcccatgct

SEQ ID NO: 284444 - DNA, 122 bp, Homo sapiens
ttatgatgtccacgtgatccacggggacgtgtgggcacgttatgttgtccacgtgatccacggggacgtgtaggcaggtctttttggaggcatggccatgcattttccacttctatatttca

SEQ ID NO: 284445 - DNA, 122 bp, Homo sapiens
gcgggagaaaaagggcggagaggaagaggaggagagaaggagcagcgctgcagggaagagcgagccgcttggtaagtactgccattgccctgagcccgttgcctgagcttactggttccgca

SEQ ID NO: 284446 - DNA, 122 bp, Homo sapiens
tactatgccggtgtctgtgtgcctgcctgcccgcccaacacctacaggtttgagggctggcgctgtgtggaccgtgacttctgcgccaacatcctcagcgccgagagcagcgactccgaggg

SEQ ID NO: 284447 - DNA, 122 bp, Homo sapiens
cagaggttggtacagcggtcactcccagggcagagggtgggccaagccggcctctgtccacgtggccttcgcgctccgtgggtcccacctttggttttggagatggttttctcgatgggggc

SEQ ID NO: 284448 - DNA, 122 bp, Homo sapiens
gaagcacctcccagaacgggggtcgctcgcgggagatgggggtgcagccgcttcctctcacgtgtgtggccttgtgtgtctggcagatgtgaacgagtgtgcagacggtgcccaccccccct

SEQ ID NO: 284449 - DNA, 122 bp, Homo sapiens
atctcaggtgatcagccagcctccacctcccaaagagctgtgattacaggcgtgagcctccgtgcctggcttaacagaatttgtttataacctgtcttccctatgatgagttttatgagggc

SEQ ID NO: 284450 - DNA, 122 bp, Homo sapiens
agtgagcaagcgggacagttctgcggaaagtttccgcccccaatcccccagccctgcgcccggactgaagcggcggcccccacctccagcatcctcgagcgatggtttctcccacaactacc

SEQ ID NO: 284451 - DNA, 122 bp, Homo sapiens
cgggccccggccgtgtccggtcgcactcggtagcccgcatggctgcctagcggtcagcaccgcatgtctgcgagcctaattcgcgcttagagggcacacaatggggtgcaggctaacgcggg

SEQ ID NO: 284452 - DNA, 122 bp, Homo sapiens
ctttgatgaggttcactatatcaacgatgtcgaggtaagggccatgggctccccagaacccggcagtcctctcctttgggaccagttgagcgtctcccttattccacacactcagggcccct

SEQ ID NO: 284453 - DNA, 122 bp, Homo sapiens
gcttttcagagacaagtcttggtctttgtgctggacggaggcaatgctgctaatgggaggcggagcccacctgctcctcagccaggccgcagggagaggcaggcagcggtgaaagccgctga

SEQ ID NO: 284454 - DNA, 122 bp, Homo sapiens
agccagaggaggtggtgccagtctgaaatgtcccagactgttatgggtttggcccccacacgcccttttaaaacaggctttaggcttgcctgggaagtgaatgttgaaactgtcctgcagtg

SEQ ID NO: 284455 - DNA, 122 bp, Homo sapiens
aagagaaggaatttattttattcactgttctttccccagtgcctagaacagcatctggcacgtggtggcattcaatatttgttgattgagtgaatgacagaagctgactgggatggtagttt

SEQ ID NO: 284456 - DNA, 122 bp, Homo sapiens
cctgtggagcccaaatatgaatctaaggcaatgggtggattctggattaactgcgtttcacgctgggaagtgactgcggggagtttgggtcctgtgtggtggtgaccgacgattctgtccta

SEQ ID NO: 284457 - DNA, 122 bp, Homo sapiens
gggattatctgcttaatggacggagtgacctaaaaaatgtattaagggtattttcgatgtcgttatctggtgtcagatgaggcagagtgatgcatgtgtagtgaaacaaactgccatcatgc

SEQ ID NO: 284458 - DNA, 122 bp, Homo sapiens
tgctccgatagactcggagagggctggacacagagtggaccccactctcttggcttctctcgcggatctgggtttgcaacaatggctcgtcggaactgtgtagagcgttcaggtttatttta

SEQ ID NO: 284459 - DNA, 122 bp, Homo sapiens
acttacataccattgaaaaccttcaagtcagttactgtttttctttctcaaccctaacatcgtcactgatcattcaaaatataagtacctctagtcaaatctcttcttttaatacttgtcat

SEQ ID NO: 284460 - DNA, 122 bp, Homo sapiens
tgcgggtgcctttgaaaatcaacgacaacttgagcacaggtaaggcctgggagccgggcccgcggcgcccacccctcccccgccccggaaagttagtgcaactcgcgcggggccgcggccag

SEQ ID NO: 284461 - DNA, 122 bp, Homo sapiens
ggccgctctacccagatcatcactccttaagaatctttggttctttaaagacaccggccccgaagctcacacctcgagacaccagcattcggcgttagacacacgcagaggggaccaagact

SEQ ID NO: 284462 - DNA, 122 bp, Homo sapiens
tgggtccgggcctggccatccacctgcacactctgaggctcccctgaaaacattggggatcgagggttacccagggaaccccagggcagctggagggtgggcagagtgcaggggggagagga

SEQ ID NO: 284463 - DNA, 122 bp, Homo sapiens
caggagccccggggcgggaggggtgcagggcggaggagcgggcgggatcccagcgccccgcgccccgcggccgccgccctccggggcgcccagccccacccacgtggaaccgccccgccccc

SEQ ID NO: 284464 - DNA, 122 bp, Homo sapiens
ccggactcaagggaccctccagcctcagcctcctgagtagctgggaccgcaggcacgtaccgttacacctagctaagtgtgtgtaagttgtgtgtgtgtctgtgtgtgtgtgtgtggagacc

SEQ ID NO: 284465 - DNA, 122 bp, Homo sapiens
aagagctctcagacacgggcgctgaccccacacacagacctcctgggcatgggcaccgaccgccacgctgataccccacccagggcttggcgtgcagggcctggaccgtcaggcgagtcgcc

SEQ ID NO: 284466 - DNA, 122 bp, Homo sapiens
ggcccacggtcatctgtgagtctgaatgttcacaacctaagaaggtgacttgttggcagacggggcaataacatttcaacttcagaggactgttgtgagagtaaatgaggtaattggcctgt

SEQ ID NO: 284467 - DNA, 122 bp, Homo sapiens
acgaggctaaaactactaatcccagaggcctgagcgcgcaggcgacggcggctagctgcgcgtagagcaccatgggaatggtagtccacgcctggggcccaccagccgacgacgcgctggct

SEQ ID NO: 284468 - DNA, 122 bp, Homo sapiens
acatttgtgaatattaatatcttgatttcacactgtcacttgcagacctccttctaaattcgtactcatgtttgctgggatagttgttctgggtaacaattggagcttaatgcagacgggcc

SEQ ID NO: 284469 - DNA, 122 bp, Homo sapiens
cctcccacaggaatgtatttctattttcaaggtgttaattagttccagttttggttttgtcgttttccccatgtccgatgcttatattggatgatttctgataaaccctgactattccaata

SEQ ID NO: 284470 - DNA, 122 bp, Homo sapiens
ccattttgactcctagacggagcaggaggggctcggttcggcgtggccctggggcgcctgcgcggcgctgcggagccggccggagcccccgccctcccctgccgtcgtcccgctcagggtca

SEQ ID NO: 284471 - DNA, 122 bp, Homo sapiens
agtgttttcacctattttatattccttttgagctttgtctagagagattacatgtgctaccgactggtataagaggtggtgtgaagcaatgtatgccttttaacaacagttttgccaaaagg

SEQ ID NO: 284472 - DNA, 122 bp, Homo sapiens
ctgaagtattttatcaagtctccagactggctatagttggcaaaggcagaccagcaccaccggtctcacctctgccagctaaaacttgcaccggatgcagatacgagttcgccatcatcgaa

SEQ ID NO: 284473 - DNA, 122 bp, Homo sapiens
ctgggccggttgtgtccatccctcgaccccttccctagttaggtgtccttttctgtttttcgaacgaccgggtgatgggtgagcggaaagccgcttccaggagaccaaaagaaaggggtgcc

SEQ ID NO: 284474 - DNA, 122 bp, Homo sapiens
cgtcaagcctttggcatcattatcctcatcactaaatcctacagagtacagggcggaaaacggtgcacaccattcacagaactggagaactccaaggggcgaaagttaaagggaaagatccc

SEQ ID NO: 284475 - DNA, 122 bp, Homo sapiens
cctttctctcgagctgattctctttcattgctatgacctcattggggtttaggaggttgacggaggaggaaaaagcctaatgtatttgtagatccaggaccagtactcttggctggcctttg

SEQ ID NO: 284476 - DNA, 122 bp, Homo sapiens
ctggcggcccagcaaagtccttatcaaattcttggaggtgatcctgaagcgctcagaccgcgcgcggggcgagcgagcggggcgcggcgaggggcaagggcggggagggccccggcgctcag

SEQ ID NO: 284477 - DNA, 122 bp, Homo sapiens
ctgaggcgggagcggacaggctggtgggcgagcgagaggcggcggaatggtggactaccacgcggcgaaccagtcgtaccagtacggccccagcagcgcgggcaatggcgctggcggcgggg

SEQ ID NO: 284478 - DNA, 122 bp, Homo sapiens
ggcttaagcgatcctcctgccttggcctcccaagtagctgggactacaggcgtgtgctaccgcacctagctaagttgtgtattttctaattttttagacaggggtctcagtattgctgaggc

SEQ ID NO: 284479 - DNA, 122 bp, Homo sapiens
gctatcaccacaggtagctatagatcaacctaatagtgcctcaccagacactgtaacccacgctttatagcttaacaatgtatagccaatcaaatcaatgttatttatgtaaaccaatgaga

SEQ ID NO: 284480 - DNA, 122 bp, Homo sapiens
cggactgtgcctggcatacacaggtactcaatgagcatctggagcacgagcttcctcccccgcctctcccaagccttggctcctgctaccctgagaactgccggaagggcaaaagcgcgtcc

SEQ ID NO: 284481 - DNA, 122 bp, Homo sapiens
ccggggctcacactcgtagtaggtcccgtgggacatggccggcccgccccctcggctccccgcccccacctgctcttgaggcaccccttggggtgctccggctgccctctctctacctcctc

SEQ ID NO: 284482 - DNA, 122 bp, Homo sapiens
atttctatgtcttctctaagtaatgccatgagtgactgcaggggctttggagaaacatttcgcgttcccagccatacccatctctagatagatatgactcgctccacaccattacagagtcg

SEQ ID NO: 284483 - DNA, 122 bp, Homo sapiens
atgaatcactgcagtgccaatttcctcgtggtcccaaagtgcgggagggagggcaggaggcggcaagcatgggtgctgggtccacctcacccacttggggcaaagccatctctcactttatt

SEQ ID NO: 284484 - DNA, 122 bp, Homo sapiens
ccacgaggagagccccgggcctggttctaccgactcccccacgttgaaccgcccaggggccggggaaagtttcgctctccggaaccaggttccccgtcctgggctttcaggacgtcggatcc

SEQ ID NO: 284485 - DNA, 122 bp, Homo sapiens
tcatggcttttcatggcatagacgtcaacagaggggtcgaattccccaggaccaaagaaccgaggaaagctgaggaggttgccagggctgtccggaggtgtgccataggagcagagtaggtt

SEQ ID NO: 284486 - DNA, 122 bp, Homo sapiens
tgagggctcggcagcaaggatggagaggagaacacggtacaagagaccccacgcaggcgccgctggcagaacttagggaccgactggcaaggagtcctgagaaagcaaagtagggggtgatg

SEQ ID NO: 284487 - DNA, 122 bp, Homo sapiens
attgaggctattaatgatggtttctttttcttcttcttttcctaaataagactttttctccgtgttttttctgtatttttctttttttgtttttgtctctttctttttagaaactttcctcc

SEQ ID NO: 284488 - DNA, 122 bp, Homo sapiens
ttgtagtatttgctgatttctatggtgcagatactcccactgtggctggttccaagctaccgatgtgatgtcactgcaggcagcattggggtagatgggatgattaccagctccagcacacc

SEQ ID NO: 284489 - DNA, 122 bp, Homo sapiens
gtgtggcagcgcctttgaatgtcgccacagtgcagcctgcacaggtcagggtggcaggcacgtgtgtatcccatgtgagtggttggttggcacctccggaggtgtggccacagggcttggtg

SEQ ID NO: 284490 - DNA, 122 bp, Homo sapiens
gccctggaaaacacaggtgcctgggaaaggagaggagcggaagcggcttccagaggtgggcgggaggactcaccaaacatctgaatgtgccctttggtgatgggattgaagctgccgcaggc

SEQ ID NO: 284491 - DNA, 122 bp, Homo sapiens
tgaagcaatctccgttcattgcacaacttctaaataaggaatcaaatagtgaacagtttacggtgcttaccctaccttataaaacttagatttattgagaaagtgtgccaagctctgtgtag

SEQ ID NO: 284492 - DNA, 122 bp, Homo sapiens
tcgttcccttcagtcctcacttcgagaacagcaagcaagttcatctgcttactgtccacacgaaacagaattttgttttctcctttgcacgtggggcacgcctggtgaccgtgatgggggcc

SEQ ID NO: 284493 - DNA, 122 bp, Homo sapiens
agggcctggtttgtggtggagggcgtccaccgggaatacctgctccctgaacaccaccaccgaggtccaccattctgcggccaggttcttccgcaactctacgcccaagggtccgaagccgg

SEQ ID NO: 284494 - DNA, 122 bp, Homo sapiens
aggcgcgggctcctgagggagcgaccgcccggccgggtcctggcgcccggagttcgcagccgctccggccaacccagcgcagtgcccgcggcctttgtccccgagccttccccgcccccagc

SEQ ID NO: 284495 - DNA, 122 bp, Homo sapiens
atcctcttccataactgcctccacttcctcctcgacctccaaggccaatttttccagctccggaggattcactaagaaagaaagaaaacaagagagttaaaatgagcggcccccatacacat

SEQ ID NO: 284496 - DNA, 122 bp, Homo sapiens
gaaagtgagcgcgtggcacagggctcgctgctggaaccctgccagggcatgcagacgcaccgggctaggtgtccctgccccgggctcctccagctgtctgctcggcatacctaaggaaaagc

SEQ ID NO: 284497 - DNA, 122 bp, Homo sapiens
ttcggaaaaaaattttcctgtgaaagtgctcttccttgccctctgcaggaagaattacgccgagctggttggcaggcttatccaccagcaactgtaggagctgcaggcagcagataaagtgt

SEQ ID NO: 284498 - DNA, 122 bp, Homo sapiens
ggcattaattccttaacctattccaaaactttagctcatatttgccaagaaaacagaatgcgaatgggaagccgtgtttctgcttgaggcagtaggaagcaggagaccaaaaagtcgtctta

SEQ ID NO: 284499 - DNA, 122 bp, Homo sapiens
cccagtcacctgagaaatgaagaaacgggtcagaggactcgacagggatgggtgggccagcggtgcccccagctctgcaccgcgtgatggagcctcttttgcatttgcagctccctcccccg

SEQ ID NO: 284500 - DNA, 122 bp, Homo sapiens
gcccaggacccccggccccctcagtcgacagcctctccggacaggggcaacccagtagctcggacaccgagtcggatttctatgaagaaatcgaggtgagctgcaccccggactgcgccacc

SEQ ID NO: 284501 - DNA, 122 bp, Homo sapiens
cacccactccccctgcccccaggctccacacccacccggtctgtgcggcctgcccgtccgcgggtgccacgtgttcagcctgccagccccgcccaaacgcacccctcagcctggccgccagc

SEQ ID NO: 284502 - DNA, 122 bp, Homo sapiens
cattttgtatctggctttgtaaattcagcataatgcagatgagtttcatccctgttgttacgtttaccaatagtttgttcctttttattccataggaatattatagtggtctgtaagcttca

SEQ ID NO: 284503 - DNA, 122 bp, Homo sapiens
ccactcggcgcccccccacccgagcccgggctgctgggcggccgccgccgctgcgcccgccgcactcgcgcctgcctgacatcagcactcgcgcccgcagcccggctctggccaatgaataa

SEQ ID NO: 284504 - DNA, 122 bp, Homo sapiens
ttgtatagaaatgcactgtgaaaatccctttcctgttttgttcccacgtaattaccggtgcgtgcagcccccagtcacgtaccccctgcttgctcaattgatcacgaccctctcacacgcac

SEQ ID NO: 284505 - DNA, 122 bp, Homo sapiens
atgaaacgttatcatgttggaaaggtgtggcggcgagagagcccaaccatagtccaaggccgttatagggagttctgccagtgtgtaagtgacctgatgggagcagcacagtttgatagttc

SEQ ID NO: 284506 - DNA, 122 bp, Homo sapiens
gcggaaagccccccgaaaccaacaaagctgagccgagagaaacaaacaaaacaaacacaccgggccagacaagccatcgacaaaactttgcaaaagcaaaaacaaaaaaggaaaaactaacc

SEQ ID NO: 284507 - DNA, 122 bp, Homo sapiens
atctttctcacacagcaaagagcaggaggatgggggattgatctcccaagggaggtcccccgatccgagtcacggcaccaaatttcatgcgcggccgtgtgaagaaaccaccaaacaggctg

SEQ ID NO: 284508 - DNA, 122 bp, Homo sapiens
ccagactccaggcaggttctcgttgctatggtgatcgccggtgcaagctggatgcttggacgcgccgctgccagtccaacgcagaccccgcccacgacgtcgacgattcgtgtagcccgcag

SEQ ID NO: 284509 - DNA, 122 bp, Homo sapiens
aggctcgccgcagaggatggcaaaactcagactgaaagcagatcagttctgagacacccacgccaggctcccgaagaggggagaaagccacggagggcagagtctgctccaggcaccgctgt

SEQ ID NO: 284510 - DNA, 122 bp, Homo sapiens
caattctcctacaattctcctacctcagcctcccaagtagctgggattacaggcgtgtgccgccacaaccaactaattttagcagagactatttttagtacagacagggtttcaccatgttg

SEQ ID NO: 284511 - DNA, 122 bp, Homo sapiens
cacagcctcgtggggaccccttccctcccacccagccacatggacaccattcctccccggcgggacctccccgccaatggcagcgcttctgcccgtttccaggagaggaaactgaggcccag

SEQ ID NO: 284512 - DNA, 122 bp, Homo sapiens
caaccccatgaccatatatgaaatcccaattacctgtacttatccatcgctagttcacttcgctgcagtccttcgtaaaccaaagagcaggtagaacgagttcaccctgaacacagcatccc

SEQ ID NO: 284513 - DNA, 122 bp, Homo sapiens
ccaggaagtcatgcctttactgtaaaacacgaaaaacaaatggaaggaaaaaatgggggacggaaggagggtgactgaaaagatgaacaagaacgtcaacaactgccaccacgcaggtgttt

SEQ ID NO: 284514 - DNA, 122 bp, Homo sapiens
catgatgagcgctcgggctccaggcgctcggcggcagcgccaccttcctgccttgcctcccgcagccccgtgactggctgcagtttccgctgcgtttcagctgagctgccgcaggcggccac

SEQ ID NO: 284515 - DNA, 122 bp, Homo sapiens
agtttattgttatctctatcaagcggtgcaccccccaccccccacccatcatttcttaagcgctccagtcccagctcactaagggaagagatgtcctttatacatcatttgaaccttgactg

SEQ ID NO: 284516 - DNA, 122 bp, Homo sapiens
agcgtggagctcggcaagtgacagcccctcttcacctctgctctcctccaggctcctttccgggccaggttccccaaagctgtgctctccaggcgcacagggggtctctgaatccgcggcca

SEQ ID NO: 284517 - DNA, 122 bp, Homo sapiens
acccttagcccattctacaaagccagcagaactgaggctcagagaagcagggtgaagaatcgaaacctaggtctctcaccagcgctctatgttgtcaaccacagtgctgagaaagttaaaca

SEQ ID NO: 284518 - DNA, 122 bp, Homo sapiens
tgtctgaccacacggtctctgaccacgaggccgggaagttcttcctcgtgtctgaccacacggtctctggctttaacttaaagttgccatgttcccaggttcactcaagccaggccactggg

SEQ ID NO: 284519 - DNA, 122 bp, Homo sapiens
tcctctgaacaccaccaaatgctgatgtcatagtccccgtggggggcatcagaatcctgccgcccaacaatggcctttcccaggagagcccatgcgcagggcatggatgaaagcaagctgga

SEQ ID NO: 284520 - DNA, 122 bp, Homo sapiens
aatggtgacaatgcactaatttaagtacaattggcccagcatctctcattgtgacagaggcgtttccaccgaggaaagtggcaagggtactctgagattgtgggcttgtccagggctgagtt

SEQ ID NO: 284521 - DNA, 122 bp, Homo sapiens
atccattataatgggactggcagtgttagtctcattaacagagggacctttctttccacacgccagctggaataataaaggcagctatgtgacatttaaaatgcaattgctctgctatctgt

SEQ ID NO: 284522 - DNA, 122 bp, Homo sapiens
ggaggagccgccgaaggagcgagcctctctcgcgcacaaagttgtggagtcgtttttcctcggagcagggaagcgggcagcagcagccggccgcgggctttctcccgccgaggggcgaggag

SEQ ID NO: 284523 - DNA, 122 bp, Homo sapiens
tgttagtgttgtgctggtgcctgcaactttacctcttgccaaggccagaaaattctgccacgtttccctaaacacctataacttggccctcttgtgtacaggcagtattccatattattaca

SEQ ID NO: 284524 - DNA, 122 bp, Homo sapiens
cagccgaccctgccagcgagcgagcccgaccccaggcgtccatggagcgtcgcctccgcccggtccctgccccgacccccgcctgcggcgcgctcctgccttgaccaggacttgggactttg

SEQ ID NO: 284525 - DNA, 122 bp, Homo sapiens
gcggccacctgggcagccgcgagcggggagggcggaggggacggcggggcgtccaggggtcggcaggaggaggagaagtcgtcaaaataataaagaggatgataaatgccttgtccggctcc

SEQ ID NO: 284526 - DNA, 122 bp, Homo sapiens
gacatgggcgcgccgagcacgtccgtaccgcaagatggctgctcggacggggacagagctcgcctctgccgcctcgacaactgctcctgggtcctctaagaggaggaagcgccacccatggc

SEQ ID NO: 284527 - DNA, 122 bp, Homo sapiens
caacccaccaggtggaatgaccaactccagacacgctgccttaagagctgtaacactaaccgcgaaggtctgcagcttcactcccgagccagcgagaccacgaaccccaccagaaggaagaa

SEQ ID NO: 284528 - DNA, 122 bp, Homo sapiens
ttgaaactcctttttttttgagaccaactctttttttatttttccagagtctcgctctctcgcccaggctggagtgcagtggcgtgatctcagctcactgcaagctccgcctcccgggttca

SEQ ID NO: 284529 - DNA, 122 bp, Homo sapiens
tggcgatactccgataaacttgcttgcaactctgcaccaggagagagaacacaagtgggacgagtcaccctttaaagggtgctgcacaaaagactctttctctgcaagggtggggaggatgt

SEQ ID NO: 284530 - DNA, 122 bp, Homo sapiens
gggctctgtcctttccacccccaaggtcacaggaaacaagacagccaacttccagccaggcgtccaagagctgaggttcagggctgcaagtggtcacttgagtggagccctccccacaggcc

SEQ ID NO: 284531 - DNA, 122 bp, Homo sapiens
atatatattttatagtttcatggaaccaagtctgcatcctctgccattctgtactctggacgaattttcttttgcagcttccttgtccatacatagtgtggttctagtgttccatgcctgaa

SEQ ID NO: 284532 - DNA, 122 bp, Homo sapiens
ccttcctagactcaaccgagactggcccccactagaaaatgcactctcctccccaaaacccgccccctcacaggaggcagggtttttcttttgggcaaacctgctcctggggagaggagtgg

SEQ ID NO: 284533 - DNA, 122 bp, Homo sapiens
ttcctgaaaggcccaatgtatttgacaggagaggtaactggggtcccgggcctagcgaggcggggcggggaggcgcaggtgtcaccgcgggcgcccagctgcttacgtcacaacccgcggaa

SEQ ID NO: 284534 - DNA, 122 bp, Homo sapiens
gccggtcacaggggagggtggccagaggcaagtgatgctgatcagcatgggcttggaagccgcctaagaaccaaccacagcgacttttccagtgggatgaggaggacggggaggagaaaaaa

SEQ ID NO: 284535 - DNA, 122 bp, Homo sapiens
tgtggagtgaggacactgggggcagtgaggacgctgtggacagtgagggcgctgtgggggcggtgaggacgctgtaggggcggtgaggacgctgtgggggcggtgaaggcgctgtggggatg

SEQ ID NO: 284536 - DNA, 122 bp, Homo sapiens
tcagcagaggctgcagtgtgcagcggcggaggctgcgcgcggatttctcaatcagggccgcgcgctgaggtcttaaaggcaccggcgccagccgagcggagggcgtgtccgcgaggaggcga

SEQ ID NO: 284537 - DNA, 122 bp, Homo sapiens
tcgtgtggggcgggtccgaccgcgcacaatgggccatggagttcccgttcgatgtggacgcgctgttcccggagcggatcacggtgctggaccagcacctgaggcccccagcccgccgaccc

SEQ ID NO: 284538 - DNA, 122 bp, Homo sapiens
agcaccaccagggctgcgcgagaggcgcgcacacaggccctgagccagcagggccgggagcgggcggcctgtctccatgtgaaaggctgacccatcaggtgacagaagccctgtgcttaggg

SEQ ID NO: 284539 - DNA, 122 bp, Homo sapiens
cacacaaaaaagtccaagaggcacaaggacagaatgtagtcggagctcctcctccttctacggccagctaccgactgaaggctgctggccctggccgttgcctagtaaccacaaaacctcct

SEQ ID NO: 284540 - DNA, 122 bp, Homo sapiens
tatgaccacttgcacccgggtctacatgggccagcatgcctccaccaggatgaagagcctcgtctgtcataggaattaaattatcatctcaggcttaattaccagtggcattttctccctga

SEQ ID NO: 284541 - DNA, 122 bp, Homo sapiens
tgatccttgtgcatgtgagtgcatgttgtcctggtgtatatctgcaaaaactcagaagtccgcgtgggcatttcactcactcactcaacaggtatttattttgggttcgcacttaacccatg

SEQ ID NO: 284542 - DNA, 122 bp, Homo sapiens
ctttcaaaggcaagctgcagggctccttggttttgtcacattcctcattctggggctttgcggttttgtcttgggaatctcgaggctctcccaaggttcctttctatgtttatatcatttag

SEQ ID NO: 284543 - DNA, 122 bp, Homo sapiens
atactgataaattaacagggtcaggcaaccacaagtatgcaagacagtcttaagcttcttcgcaaaaagaagctggaagatgactttttcattttgtacagtaggtatgtatccaggaaacc

SEQ ID NO: 284544 - DNA, 122 bp, Homo sapiens
gtgctgggattacaggcatgagccactgcgcccggccacattggttaatttggttgagagcgggctcgatgtgattttattgatgataatgtcttcaatttgccttgccctcagtacaaagc

SEQ ID NO: 284545 - DNA, 122 bp, Homo sapiens
tagctatataccctcacaccctacaaaacaaaacaaaacaaaattagccaggcgtggtggcgcatgcctgtaatcccagctatttgggaggctgaggcaggagaatcacttgaacctggggg

SEQ ID NO: 284546 - DNA, 122 bp, Homo sapiens
tatatttagctggggacgaagaaggaacaaggaaggaacaggcagatggcatagcacgaacgccgggtggaaagtggaactgctcgctcctgtcgtgtgtgtctcttctccatcaaaaaaga

SEQ ID NO: 284547 - DNA, 122 bp, Homo sapiens
gttatttcgtcttcagcgacagatgatccccgacttaccgtggttcagcgtttgagttttcgagctttatgatggtgcagaagcagcctacgtgcagtagaaactgtaccacaagtgcccgt

SEQ ID NO: 284548 - DNA, 122 bp, Homo sapiens
ccagtgtcccacttgcatcaagctgggcatccagggctcgtacttctgctcgcaggtaggcgcccgctgccccgcggatatgccgccgctgcgggacccctcctcgcttctcccctgctggc

SEQ ID NO: 284549 - DNA, 122 bp, Homo sapiens
ctcgatctcctgacctcatgatctgcccaccttggcctgccaaagtgctgggattacaggcgtgagccactgcactgggcccagagacatttctggtctagcagaaaagccctggctcttag

SEQ ID NO: 284550 - DNA, 122 bp, Homo sapiens
gcagcctgggccccgccgccagccgctgctcggagggagcgagcgagaaaggggagccggcgcagctcgctgccctgttccagaactcagaatttgagaggcgagagttcggtaagccgtgc

SEQ ID NO: 284551 - DNA, 122 bp, Homo sapiens
tttgtcaaaagacaaaattacaactaatttagtttaaagagcataattggcttttagttgcgattgtagaattgtgcaacacctcattttataaaatcgaatgagtgttcctatgagttgag

SEQ ID NO: 284552 - DNA, 122 bp, Homo sapiens
ctgcgtgccgcggctccgtttggttccgcttcgctggcgcccgccgggctcttcccccgccgaggcctgtggtttgtggagtcgaatttccctgccaccagtgcccggttagcaggggcgcc

SEQ ID NO: 284553 - DNA, 122 bp, Homo sapiens
aggatccagcgcagtctacagggaagctgctttgctttcgatgctgccagcacggccaggcgcctcattcccagctctcgctcccacctctctgagccacagaccccgtgtgggtgaggcgg

SEQ ID NO: 284554 - DNA, 122 bp, Homo sapiens
actggcggccacactggattcctggggacattggcaatgcctgcagccatgggtgtattgcgtgtgtgtgtgtggcggggcggcagagggtgaccggcatctaggggtggaggccggggatg

SEQ ID NO: 284555 - DNA, 122 bp, Homo sapiens
ccgcttgccggagcgcaggatctccgagagcgcccagatatagttcttggctaggcgcagcgtctcgatcttggacagcttctgcgtcttggagtagcagggcaccaccttgcgcaggttgt

SEQ ID NO: 284556 - DNA, 122 bp, Homo sapiens
tgaattcacgaggagatccttggagaagctcttgctcctctcaggctgtctcagggcaggcgcttaaggctaatgaggctgcctggtctccgaatcctgagcccctgacccctcctcatggt

SEQ ID NO: 284557 - DNA, 122 bp, Homo sapiens
cgcagtatgtatttcacaaccagcttttccaaactaggtcccaggaagcactggtttcggcgagtgttaccagatctcctgcaggggagaaacggtcacgaaacatgaactggtctgccctg

SEQ ID NO: 284558 - DNA, 122 bp, Homo sapiens
gagacacccaaaagaccaggcttacatgattttgaggggctatttgtctcatttaatgatcgctcagaggtgaggcagtcagggcctcaccatggctacaacgccatcaggggttcaggctc

SEQ ID NO: 284559 - DNA, 122 bp, Homo sapiens
ttaggcatcccgttgccggggttactaggacaaaaggattctccagctggtactcctcaccggctggagcactagcccgagaaggtgggaggagtccagaccaaacagttcctgaaaaggac

SEQ ID NO: 284560 - DNA, 122 bp, Homo sapiens
ggcgtctgaatcttcggggaggtgttaggacacttggggcggagttagcctcgctcagggcgcggctaaggcgcccagatggcctgcgggcgccaccacgtccctggtcccagctcgggagc

SEQ ID NO: 284561 - DNA, 122 bp, Homo sapiens
gcagggttcagccgtgtttcagttgccctctgacctgaccccgggcgcacaaaggcctcccgggtgcgccgccatggcccagtcttccagtcgctgccaaattaatgagcccacgtcaggtt

SEQ ID NO: 284562 - DNA, 122 bp, Homo sapiens
ccatcataaaggggcttcccccttggtcgtgactacactgcaggtgattctttgaatcagcgtgagtgtctcgttctccagccgtactttgcccggcgtctcagcgtccgttggtgattctc

SEQ ID NO: 284563 - DNA, 122 bp, Homo sapiens
ctctaggtttgggtcagaggtaggaggacttgaaacaaaggccaagctcctcctgttccccgctgccccctacacctccagaagagaggctgcagcccaggggaacagactacacggccacc

SEQ ID NO: 284564 - DNA, 122 bp, Homo sapiens
gttcccgtcccctttccctgctgggtaaatcgcattctgtctctttaaggagtgtttggccgcgacgagttggaaagcccggatgcgtccttcggttgggcggggtgtctcagtgacgtcac

SEQ ID NO: 284565 - DNA, 122 bp, Homo sapiens
ataacaactaattatgcctgcttaaagacaaacaacttatgagcgcagggcttggaaggccgagggtgtgaactgcggtccccatgccatcacttgtatggcatgtatgccatcatcaaaat

SEQ ID NO: 284566 - DNA, 122 bp, Homo sapiens
acgaagatcagcgcagtctcacagctccgtggccttcaccctcccagctctgcaatggctcgtgctgccttacctagagtctccggccaggtcagcttgacgttcctttcccagttcaaact

SEQ ID NO: 284567 - DNA, 122 bp, Homo sapiens
tcctgtgagggggagtcgtcctggaatgcgatggtgaagtgctccagaccggccataggccggaaagagtgaggaagaagagaatgcaggaggcctgcgatttctaaggcgcgcgcgcacag

SEQ ID NO: 284568 - DNA, 122 bp, Homo sapiens
ctgcggggcggcgaccaggttcctccgaggggctgaagttcccttgggggtggctgagagcggccgcatctctggcagcatcctccctcccgaaaacgcgccctaaaagtagcggctgcggg

SEQ ID NO: 284569 - DNA, 122 bp, Homo sapiens
ccaatcatcactcggacattctccacatggatagtgttctgtgtccaatcattacagggacgttctccacgtggatagcgctttctgttcaatcatcacttggacgttctccacgtggatag

SEQ ID NO: 284570 - DNA, 122 bp, Homo sapiens
ccagtatacaaggaactgctacaagtgagcagggagaggaaggtattggtctgaggtccccgaacagagagctccagacacttcctaaaagttaagcatagcatgatcggagcctgggtatt

SEQ ID NO: 284571 - DNA, 122 bp, Homo sapiens
gtgttagccaatagcgtaagatagcgcacgcgcagtgctttccagtgcggtgaatatttgcgtttagctttattcttgtgcttgttttaaagaaaaaagctgtcgtggtgcaattttgtgtg

SEQ ID NO: 284572 - DNA, 122 bp, Homo sapiens
ctattgctatatttgagctacaaggacagactcgagtagttacacagaccagatggcccacgcagcctaaaatacagtcagttctcactattcacagtagttatggtctataaacttgctac

SEQ ID NO: 284573 - DNA, 122 bp, Homo sapiens
acctgattcacggaggcagccaaggctgggtagcgactgctggtaactggcccccggagtcgccccaggggaaaaggccaaagggggatctggagacccccggccggggagcgggctccgag

SEQ ID NO: 284574 - DNA, 122 bp, Homo sapiens
gggcaaggtgcatccctgggccatggataggaaaatcagcatcctactttctcttcagttcgatctgttaatccaccaacccaaatccctcccacccgcacctgtcatccaaggaagagaaa

SEQ ID NO: 284575 - DNA, 122 bp, Homo sapiens
cgtccaatccaggtccctgattgtcccagtcacaaggtggggcccatggatggcactgtccgatcgggtcacatgaggctgcagcgcgcgggatgcagcgccccctgcaggcgcagggccgg

SEQ ID NO: 284576 - DNA, 122 bp, Homo sapiens
ggtatttagagacttccctttaggtagtagggggtgccttgagggaaggctggcgctcctcgatttgataagtgatttcttcagggttgccaggctgagctggctctcgggaggagcgcttc

SEQ ID NO: 284577 - DNA, 122 bp, Homo sapiens
cctcacctgtgtgcactcgcagatgcactttgaggtgatgtgctgagcggaaagattttccgcagaaaggacaatccttgccggtggcgccccggcccccttcaggccgggtccctccaacc

SEQ ID NO: 284578 - DNA, 122 bp, Homo sapiens
gcttcccctcagaagcggcacgtgctggtccgggccgccctccgcacaaaccaccggccgcgggtgggatgcgcttcagactgcagaccttctcgcaccgtgtgaccgatgtagtttttgtt

SEQ ID NO: 284579 - DNA, 122 bp, Homo sapiens
cctacacaaagccatgcccctcacatgatgttggccttgtggacagcagtgaccttgccccgccccttcttggtggcatagtcaaaggcgaactttgcaatccgctgagacttggctcgtgt

SEQ ID NO: 284580 - DNA, 122 bp, Homo sapiens
cctcggaaccggaagtagagcctggtgcctgggagcggctggcgcggcggaatccagggccgacccgggccggaccgaccccaggcggcggtgagcgagcgcggcgtccgcccggggtgcag

SEQ ID NO: 284581 - DNA, 122 bp, Homo sapiens
cttccagcacagccggggctcggtccgtctggccatgtatttggcaaccagtgtgtgctccggcccaccctcaactaatgggtgtttgcatgggtgtgcgtttgtgcatgtgtgttcaccgc

SEQ ID NO: 284582 - DNA, 122 bp, Homo sapiens
tccttcccctccctcccaaggtgggagcttcaggctctgccaaagcattactaagcccggcggtgacgtcaccctccctggtcccaccccgcccccggccggcttacccttcacccctggct

SEQ ID NO: 284583 - DNA, 122 bp, Homo sapiens
tgagtagagaagctaggccccgagccgggcgggactagggtggtggttgtgttctgccctcgcccgtcgccaacgctgggctgactgaaaacctggccctttgggtcgcgcgtcttcgacct

SEQ ID NO: 284584 - DNA, 122 bp, Homo sapiens
cgaggtcgtagcccactacgttgcgggtaggcacctggcgcgagtcccgccacttgaggccgcccagcagcaacgctgtctcctcgaccacggccagcccatagcagaagcggtcgtagggc

SEQ ID NO: 284585 - DNA, 122 bp, Homo sapiens
gacagggttctgccatgctggccaggctggtcttgaattactggcctcaactgatccatccgcctcagcctcccaaagtgctgggattacaggtgtacaccctgcccagccacaagccgatt

SEQ ID NO: 284586 - DNA, 122 bp, Homo sapiens
cagggcaagatccacacgatccaagatttcagtcctgctgctgaggccaagaggctcccccgagcagggcatgggttctcaacaggactgtgggggctggggagagtcacagttggaaaaaa

SEQ ID NO: 284587 - DNA, 122 bp, Homo sapiens
gcgtaagtgctaggaatgccgctggcctcgcggggaaacgcattctttctatctatagctcgctctgtacatcttctgtctacggcagctattccagaggcaacaactgcttccctctgttc

SEQ ID NO: 284588 - DNA, 122 bp, Homo sapiens
ctgtgccgcgtgagggctgaaagtcctgttttctccctagcttcagtgaagaaagcctgacggctcccccgcgtccaacaaagacaacgctcttccggtcttcgtgacccaccccgtgagca

SEQ ID NO: 284589 - DNA, 122 bp, Homo sapiens
tttctcacattttctctggctcacagtccatcaagatatcccttctcttttcatttcctgcgagacctccagaacaatctaatcatacccctactagagaatcagagttatattgcaagaga

SEQ ID NO: 284590 - DNA, 122 bp, Homo sapiens
gggagaagggggctacatcctgccaagtctgtatggttgggccgccggcgccctagagtccgcgctgggggctgggagcgactggagagccccgaggtatgggtggggaagggcgcagcgac

SEQ ID NO: 284591 - DNA, 122 bp, Homo sapiens
ttagagaattttaagtgctttagagcggtgtgattctactgtgctcagcctagtcaatttcgcattaaactgattatcagctgagtatcaataatgtaatagtgacttcttttatttttttt

SEQ ID NO: 284592 - DNA, 122 bp, Homo sapiens
agactgggaagtggggcaaaggtgaggctattccccggggaccttcgagtaagcccgggccgcggagcggcagagacaaagctggccacccgctgatgaccgagctcagactgtactgtctc

SEQ ID NO: 284593 - DNA, 122 bp, Homo sapiens
gccaggtgagtgggtagccactgaccaggactgagagatcatctagcttgaagatgtcatcggggactccggaattcttcagactgttggctcgggccacgatggcctgggaataaaccata

SEQ ID NO: 284594 - DNA, 122 bp, Homo sapiens
ctttgggggctggaggagaggacagagcgcctgttagccctgtccggcccatgcccccgccgaccctgccggcccccgccggcctctaccctgtacctctgggtgtctgtgggcagggaggg

SEQ ID NO: 284595 - DNA, 122 bp, Homo sapiens
ccgctggattcccggttgtgttactatttccatagatggtgggttaatgacggagaggggcgctcttagccaagggatacacagggcagcgcggcactacgctgcagttttccggctgcaga

SEQ ID NO: 284596 - DNA, 122 bp, Homo sapiens
tcatttttctgaggatccagcaagatggcagaggtagagcagaagaagaagcggaccttccgcaagttcacctgctgcggcgtggacctcgagcagctagctgctggacatgtcctacgagc

SEQ ID NO: 284597 - DNA, 122 bp, Homo sapiens
tattgcaacgtatgctaagaaggggttattcatctggtgacagtggcatacatcctgccacggtctcctctggcagctgcccagagcacacagcagtccaggagatgcgctttgaatgctgt

SEQ ID NO: 284598 - DNA, 122 bp, Homo sapiens
tactctagggctcctgctgacttggtttctggaagccgtcagccctcccagatggactctcgctgtgtgggatggagtagggtccctccagaagcagcgtctgagcagtgaagctgcactga

SEQ ID NO: 284599 - DNA, 122 bp, Homo sapiens
tcccggttcctggtggagagcccggcaggctgtttgttctcggacgtgtgcaaccgctgccggcggggctgtgggcgccgcagcgtggaaggaaggggtgggaaggggtgcattctggaccc

SEQ ID NO: 284600 - DNA, 122 bp, Homo sapiens
ctctgccctggggaaggcaggaagaaggtagtgaaaatgattaagtcctcttattgcaggcgccaaaatggggcagaaaccctgcaggaaggccaggcctctgagcccagttccacccccgt

SEQ ID NO: 284601 - DNA, 122 bp, Homo sapiens
gaaaaggtatctatctgccatttgatcatttttctatgtgtgaaatatgacataccatctcggttatgctgaacagcaggtgcgcagagcttcaaaggcctaactcacaggtttgcatttcc

SEQ ID NO: 284602 - DNA, 122 bp, Homo sapiens
gcccagcgagcccagcactcagcggaacctgtagaagcgtcgggggttgccccgcttctgcgaaccgccctgggatgcgaggttcagcgtcactatctcatcctgggaaaggatgagatccg

SEQ ID NO: 284603 - DNA, 122 bp, Homo sapiens
tactactgactttcccggtaactattccggttatgatgatgcctgggaccaggaccgcttcgagaaggtaagtggggccggagttgtctggggagggttatgaaggccagaccttgtggtct

SEQ ID NO: 284604 - DNA, 122 bp, Homo sapiens
gaacagaggagaaaattgcctgcatgtctggacttcttcctttcaggctcccacgagctccgccgagaagaggctgccaatagtgtataaaggtctgcccttggctgcaaataactatgcta

SEQ ID NO: 284605 - DNA, 122 bp, Homo sapiens
tgcctccctcgtcgcccggcaagggcaggggcgggggtggcgtcggggggtcgctgtggccggaatccagggaggtgcggcggggcgagcgcagcagcgccgcctgatggtagggcacactc

SEQ ID NO: 284606 - DNA, 122 bp, Homo sapiens
tttcgtccgtaccttacatggttttgtaattatctgtggtgcctctggctgaaatcaaaacgggagccagacccaaaaagtcaaggaagggaagcgccttccaggccactcctgagaagaaa

SEQ ID NO: 284607 - DNA, 122 bp, Homo sapiens
aactgtggcttcccctattttaataatgcattgtaacaattgttaacagtgattaagtttcgcaaaagcacgtgctgaatcagttaagaaaaacttaggatgcaagctgaacaagagactcc

SEQ ID NO: 284608 - DNA, 122 bp, Homo sapiens
ctgcctggcccagatacttcggtgggtcaaattcttgaactgatgttggaccacagtcctcgtaggaacttaaaaggttgcactgtatccagcatatccagggaattgtatgtgagtgggtg

SEQ ID NO: 284609 - DNA, 122 bp, Homo sapiens
ggggctgaagtttgtgaggtgagtagtggccccgggcccacagagggtaattccagtccgcgccactgtggccggggactcagtccaaggggaggaccgaagcgggagggttcagcgggaag

SEQ ID NO: 284610 - DNA, 122 bp, Homo sapiens
cccgtgacgtcgctgcccatatatggactgaggaacagggctgggccaggcggcttttgccgtcacatggctgatttgcatacacgggctcggccgcgcggactccgccgggctcgcgactt

SEQ ID NO: 284611 - DNA, 122 bp, Homo sapiens
ggaagttctgggtttccccctcgcccgcgtggcccttggcgggcacccgaggcccgggagcggaggctcctcgcccagccgcttcctcggcgcatccgcccacccgccctggccgcggacgc

SEQ ID NO: 284612 - DNA, 122 bp, Homo sapiens
gacttagtatataatccggaacaagtgccacgttactaccaaaatgcctacctgcacctgcgacccttctacagcacaacccgcagcttccttggcatccaccggctaaacggccccttgaa

SEQ ID NO: 284613 - DNA, 122 bp, Homo sapiens
ccactgcatgttttggatctgtccgggatccctccttgttaggccaggtcagcgtgaggccgcctactgtgcctccttcccagtgtcacgttgctgcgtccacgagcctggcttccgcttcc

SEQ ID NO: 284614 - DNA, 122 bp, Homo sapiens
ccgcgagtgaggccgcgggagatggggggagtgggaggcccacaccggagccacccctgccgccatcacaaccagaagcggcagtggccaccccacccgggcaaaaggggccccgggcccca

SEQ ID NO: 284615 - DNA, 122 bp, Homo sapiens
aggccagcaagtactacctggatttgaactcggactcagacccctatccacccccacccacgccccacagccagtacctgtcggcggaggacagctgcccgccctcgcccgccaccgagagg

SEQ ID NO: 284616 - DNA, 122 bp, Homo sapiens
ccgcgacttgggacgagctggaggagcttcccccgggctccggacgcccgcgccgaaaaccgggccatgggtaccaaacccgactctaggcggtcattcactttgtccccacccaaactctg

SEQ ID NO: 284617 - DNA, 122 bp, Homo sapiens
ctgctctgtagccaatcagagcaggtactcagcagcaccgaactggaggaggtgcttgggcgccaagcgctaggaggccttccccccaggtagacggagggggtgggtaccggagcatttat

SEQ ID NO: 284618 - DNA, 122 bp, Homo sapiens
taggggatccatagctgctgcccaccggtcctcccagaaggaggggctgtcactcacctgcgactggagggaacgcaatcccctacttggcgttggccgtacaccaggagaccgaactgcaa

SEQ ID NO: 284619 - DNA, 122 bp, Homo sapiens
tgcttgcaggccagtgcgagtaccaggtgggcgtgggctcggcaggccccacacttggagcggcctgccggccccgccggcccccggcagtgaggggcttagcacctgggccagcagctgct

SEQ ID NO: 284620 - DNA, 122 bp, Homo sapiens
tttgagatcaaaagcctgaaatgttgagtgacctgaactgtctttctaattgttgtgccacgattggaatggcactgacatccctgtgtattctttaaataaatattccttgtttggtttgc

SEQ ID NO: 284621 - DNA, 122 bp, Homo sapiens
ctggcgtctgtgcaatgctggtgtctgatgaatgtgtcgcgctggtgtctgacgtccatgcggggctggtatctgacaggcagcagtgccgcttgctgagttgtgtctcagcttcaaatcct

SEQ ID NO: 284622 - DNA, 122 bp, Homo sapiens
actttttgtcttgaggtggggaggggagaaatgggaagaggtggagtagcggttttagcccgctctgcggctgcgaggtttagatccgagattaacctctcccgcgataggtgaagccctac

SEQ ID NO: 284623 - DNA, 122 bp, Homo sapiens
ttacttcaaggtcgtggggcagcgttacttcaaggtcgtggggcagccttacttcaaggtcgtggggcagccttacttcaaggtcgtggggcagccttacttcaaggtcgtggggcagcctt

SEQ ID NO: 284624 - DNA, 122 bp, Homo sapiens
ccgcggagcaggaggtctcttttccaagcgcactcacattattcatgcaaagttaatccccgccgcgtcacggccgcccgcccgaggatgtgcgccttccttggccaagccccgcagtctcc

SEQ ID NO: 284625 - DNA, 122 bp, Homo sapiens
cagggagaggagccctctgctcttgagagcacccctcataggtagcacagccggtgacgtcgggtgttacagggccaccgacgctcctgcccatgtccccgcaaaggtgcacctccgagctg

SEQ ID NO: 284626 - DNA, 122 bp, Homo sapiens
gatctcagctcactgcagccacgacctcctcaggctcaagcaatcctcctgcctcagccccgaggggagctaggactacaggtgcatatcagcacgcctggctaattttttttttttttgta

SEQ ID NO: 284627 - DNA, 122 bp, Homo sapiens
aacacaccccacagcactgcccacctccaccctgtagcaattccatagtggaaaatgggccgtcactggggagtaagtgttactgctttaaactgggctgagcattgttcatgagctacctt

SEQ ID NO: 284628 - DNA, 122 bp, Homo sapiens
atgcccagccctgcagtcctactctgccaccccaaggggcttgggcttcagtgggggcagcgtgcggggcgtggagagggagacgtgtaaagccctgagaggctctgcagccacagtcccgc

SEQ ID NO: 284629 - DNA, 122 bp, Homo sapiens
cccacggggcagtgggcgtcagggagggccgcgtgcagtggatctccatggctttcgagtcggtgagcccaggcagcctcactgggtgccatgctgcgtacttgcccggggtgtgccacctc

SEQ ID NO: 284630 - DNA, 122 bp, Homo sapiens
atggcgacagtctctaggcagcgtgggctgagctctccgtaggaataaagggtgggccgccgctggaccctgcgcgcgcccgccaccaactttccctccagatccgagaggggcggcgcgct

SEQ ID NO: 284631 - DNA, 122 bp, Homo sapiens
caccggggcacgaatactcacagccgcagcccattgcagaatgaggaccgcaccggggcacgaatactcacagccgcagcccattgcagaatgaggaccgcaccagggcatgaatactcaca

SEQ ID NO: 284632 - DNA, 122 bp, Homo sapiens
catgggcatgcaggcaagaggtattcagctgaggactccacactaatgttttggacttaacgttatgctttaacttttcatctgttttgtagaatgtagaatttggcttaatgactatgttt

SEQ ID NO: 284633 - DNA, 122 bp, Homo sapiens
agcaggatgaagagcagcagcgtggccagcacgtagcccagctgctggaagaagtgggctcggctctcggggacgatgacattgatgacgttgtggccgcgcgccagtgtggggtctgcggg

SEQ ID NO: 284634 - DNA, 122 bp, Homo sapiens
agagcacttcctccgcgcggcggtcgcggggcttcgcagcgccccctcccgccgccgccccgcaactcaccccggcggccccgaagtctcagcctcggccacccgatccccgcctccccgcg

SEQ ID NO: 284635 - DNA, 122 bp, Homo sapiens
gaggagagaggcaagcgcccagggtctggagaagcggaggcgctactggaaccgagcctgcggaagctggaagtgaagccagcttctacccctttttctgggccctgatagggaggagaccc

SEQ ID NO: 284636 - DNA, 122 bp, Homo sapiens
agggctctcaaacgacctgtagcacccctggattgagagaagcagccccaatctgcatagcgccctggggctgcctgggcatcagacaaaccccaaaaccccagggccttccaggggcagag

SEQ ID NO: 284637 - DNA, 122 bp, Homo sapiens
ccctccaggatggtctctgccactccctcgacaggggcatctctgggaagggggaaggcacggagaagtcctcccaggccaaggagcttctccgatgtgaaaagttagacagcaagctggcc

SEQ ID NO: 284638 - DNA, 122 bp, Homo sapiens
atgctgagttccttctgttgccttccgcagcccacagctaagtcactctgaagagcatctcgctggcctgcgcttctgcttcccgttgccttctaggcggttctgaccgtgacatccctttg

SEQ ID NO: 284639 - DNA, 122 bp, Homo sapiens
tcccccgctgccggggctttttgcatctttttgccccccgctgctgtggctttttgccaccgtggctttttgccgccgcggctttttgccccagcctttgctgctttttgatatcgcggctt

SEQ ID NO: 284640 - DNA, 122 bp, Homo sapiens
cgctggaatggtagcttgcgaatcagtagctcagtcgatttctgatagcggcggatttcacggagggcgacagtaccaggcctgtagcggtggggcttcttcacgccaccggtggctggcgc

SEQ ID NO: 284641 - DNA, 122 bp, Homo sapiens
tgggagctgccgcggtcaggcgcgggtggggacctggggagctctttaagtctccctgtgcgccccgccctccctggccgaggggcccgccccgtggagccacctaggcgggcagatgaagc

SEQ ID NO: 284642 - DNA, 122 bp, Homo sapiens
agtttgtataaaaggatttgttcaggcgccattccagcttgcttgtctttcacagttttccgctgctttcataggtcgctatttgcggacgtggaaaatggagctaaagcaaaaacttgttc

SEQ ID NO: 284643 - DNA, 122 bp, Homo sapiens
gcagcaggacggagaaaccatgccggcgaccgggccgctctgtcctccgggcgcagagtgcgtcagtgctctgcaagtcaccgcgtcacggagaaactacaatccccagaatgcttcgcggc

SEQ ID NO: 284644 - DNA, 122 bp, Homo sapiens
actgcactccagcctgggcaacagaacaagaccctgtctaaaaaaaaaaaaaaaaggggccgggcacagtcactcatgcccataatcccagtgatttgggagggcgaggcaggctgatcacc

SEQ ID NO: 284645 - DNA, 122 bp, Homo sapiens
ctcccatcttggtttaaatatgagaaattctagtagatagtggggatagagctaaataaacgaaaacgtaaggaagttagagaacggggacaaagacttaaagatttttcaacgtaagcact

SEQ ID NO: 284646 - DNA, 122 bp, Homo sapiens
ttcagaatgggaatcacccatgtccgtttcctgctctgtagaatgttaatcacatgtgtccgtttcctgctctgtagaatgagaatcatgtgtgtccgtttcctgctctgtagaatgggaat

SEQ ID NO: 284647 - DNA, 122 bp, Homo sapiens
gccaccgctcctctctattggccagtgctctgaacgctcacgcattcaaatgagagcgcgcgctgggcgcagccattcagcttcctacaccctgcggctgaaccctgagacgtcatccggca

SEQ ID NO: 284648 - DNA, 122 bp, Homo sapiens
cccacacacctcactgaggtggtggaagtctcctgagccaggctcagaggcggacagtcacggcaggggatgggttcagcggcagcgcattacgctgccacgagagggcgccagcgtcccgc

SEQ ID NO: 284649 - DNA, 122 bp, Homo sapiens
agcaaagtcagtttcataactcagatgtgtctccactaaaacattatgagaaacaaagtccggcgctctctaggcaaccgtgagggcttgagcactaactagatctgctcaagggcaagaga

SEQ ID NO: 284650 - DNA, 122 bp, Homo sapiens
acatggccctttttaagccagagtaaactcttgtgagcttgccactaactcccattttaacgaaattattcattttaggaaaccgcaaggttttttttttgtttttctttaatttttttaat

SEQ ID NO: 284651 - DNA, 122 bp, Homo sapiens
ttgatgagcgggagggtgtggacgagtacaatgagatgcccatgcctgtgtagccgccaccgagggacagccgagggaccgatggacgaggggacaggctggtgggatggggttccccctcc

SEQ ID NO: 284652 - DNA, 122 bp, Homo sapiens
tggaattggtgttaaaaatgttcggcttcaccctgggctactctcagaataagagaagctcgagtgagctgggatagtgctgtcgtaatttcctgccaggtggactgagtatctggaaagcc

SEQ ID NO: 284653 - DNA, 122 bp, Homo sapiens
ttaagctttccggagctccctttccaagtatttgttgtacctgtaggaggacacctagtccggctcagttctctgtaaaggacagtggggtgcagtggggagggggaggggaggcctataag

SEQ ID NO: 284654 - DNA, 122 bp, Homo sapiens
gtagagttccagataggccttggctggcattcctccctgcttctgtttccctttggacagcgtctgtgatggctaactcaccattcagggacattcataattctttctcttcttagggcatt

SEQ ID NO: 284655 - DNA, 122 bp, Homo sapiens
ccacgcgccagcgctagcactggcttcccgcggtctagagccccgccgcagcgccccaggcgccgctcctgcccccttagtccagtccggcctccgcgtgtgactcctgcatcctcccctca

SEQ ID NO: 284656 - DNA, 122 bp, Homo sapiens
tgcccagcagtgccctggatgtgtcttgctttccccgggagccaatccatgtgggtgccccggagcaagtggccggctgcgaaccagtttctgccaccgtcctgccgcagcttagcgccggg

SEQ ID NO: 284657 - DNA, 122 bp, Homo sapiens
tcgagaccccgcgagcccgccccttcggccgctagggagcgacgaactacttccggcgtccgcggaccaactctcgcgacagccagctcaaagcaggcaagaaccggaaggggcggggacgt

SEQ ID NO: 284658 - DNA, 122 bp, Homo sapiens
ccccaggcctgggaattcacttaaatgacacgtcgccgccctacaactcccaggaggcatcgcggcgcaagtggccgcgggagtcgtcggaggcgtggggaaggagcgcgccttggcgcgca

SEQ ID NO: 284659 - DNA, 122 bp, Homo sapiens
tggaagtgagtggaatctagccatgcctctcctgattattagtgcctggtgcttctgcaccgggcgtccctgcatctgactgctggaagaagaaccagactgaggaaaagaggctcttcaac

SEQ ID NO: 284660 - DNA, 122 bp, Homo sapiens
tatatcctgaaagacaggttccaggaagcaatcaggagcccagcctctgggaggtggggtcgtttctgcctcctcaaaagtgacctcgttctggactgggtcaggggtggtcccagccttgg

SEQ ID NO: 284661 - DNA, 122 bp, Homo sapiens
aagctggcgacgccaaagggagcccagagctacgcccaggggtgaggcgagggccgcctgcgccgctggatggagagggtagcagagcgcgcggcaaggaggccgggtccggaggtgcccac

SEQ ID NO: 284662 - DNA, 122 bp, Homo sapiens
cactgggtccccggccccccgagctgaggaggcttcgcaaggccggctgctacaaagtgccgagcttggctgcatagattttaatgagagcgtcaggcagagctgtgctgttgctctccggg

SEQ ID NO: 284663 - DNA, 122 bp, Homo sapiens
cacccacagccagcctcgttaggaggaaccaggagacatcacgcggcccaggtgtctgtgcgctgtgctgggtgggaagccacctctcaggtgtgtttcccgtctccacatcagcattttgt

SEQ ID NO: 284664 - DNA, 122 bp, Homo sapiens
ctaggtttgaaccctggctttgcctttttccagctgtgcagtaccgctcttgtgggctcccgccacaccctggagtcactcccatcacagccagagtaaaccagtgtgtgttttctggcttc

SEQ ID NO: 284665 - DNA, 122 bp, Homo sapiens
ctggagtatgccacacttccgagtaccccagtgttcattcacaagctggtatcgcgttatcgacaagccacgcccctcgcatcaatcaaaaataaaccccaaggcggatccctgagtgccac

SEQ ID NO: 284666 - DNA, 122 bp, Homo sapiens
acactcggtcagtaccgtgtagatatcagtgcacggttagtgctgcctcacgccgatgctcggtcagtaccatgtagatatcagtgcagttagtgctgtgcgacactgacgctcagtcagta

SEQ ID NO: 284667 - DNA, 122 bp, Homo sapiens
tgcctttatcacccacagagaccaccagtctagtgcaatcatctaccctctcatagagaccgtgatacctgtaatcagtaactcagcacagcgaccaggttttacaactaactccatgaacc

SEQ ID NO: 284668 - DNA, 122 bp, Homo sapiens
gcccataggaattttctacttaggggaccgcaaagtcccaaagggctacagggagttgaacgagaagagtgcccgacagattgcaggttgtggggaggtgtcaggcatttatttctggagca

SEQ ID NO: 284669 - DNA, 122 bp, Homo sapiens
gggaagtggggagaggaggagggacctagaaatggcactgcaacgatcctggaataaaaacgaggggccacagtcagaaatgacaaacgcctccaccttgaaacgcaacccctagcccattt

SEQ ID NO: 284670 - DNA, 122 bp, Homo sapiens
ggagcagcctgagatcaggttaaccctcacagcgctagatggcgggagtccacccaggtccggcacggccctggtacggattgaagttgtggacatcaatgacaacgtcccagagtttgcaa

SEQ ID NO: 284671 - DNA, 122 bp, Homo sapiens
accacctgggctcaggttatcttcccaccttagcatcccaagtagttgggaccacaggctcgcaccaccacaccgagctaatttttgtattttttgtagagatggtgtttcgccatgttgcc

SEQ ID NO: 284672 - DNA, 122 bp, Homo sapiens
ggccgacgagtccggaggggctgccgcgggaggtgagtccggcgacgccgcaagcggccccgacgcccccgacgcccccgacgcctggccccgagcccctcctcggcctcccccgggccact

SEQ ID NO: 284673 - DNA, 122 bp, Homo sapiens
gtatgactcagtcttttcttcatcaaatgattattctcttcagagagacaggcataaaaacgattcctcaaaggcatggatagccctaatcacaactgcacttatcatttgtcattcacaga

SEQ ID NO: 284674 - DNA, 122 bp, Homo sapiens
ttaccccatcggccgctggagggcgccgcgggcgcttgccccgcccgcccccaacttccccggactcccaactgctccccggtggcaccttccagaaggagggggcttggcactcgtgggcg

SEQ ID NO: 284675 - DNA, 122 bp, Homo sapiens
aatacagcacactttttaaaatctaaagccgccgcgtcccagtagactgcaggatggggacggtcctatttaaaagtgggctccctcctcacctcatcacatcagattccagacccgcagtt

SEQ ID NO: 284676 - DNA, 122 bp, Homo sapiens
tcttctgcagaaaatcagtaaccactcctttttacacataaatacccccaaatgaatctccgatgactgatctgatactagtctgcaattctagttttagcattaggctcactcctcatatt

SEQ ID NO: 284677 - DNA, 122 bp, Homo sapiens
ccgagggaactttgggcgggcctgggctagggcgggtgccgcgcgggcctggggacaggccggggttcccaaggcctggaagagccgcccgctccggctctcttgggtctggggaaataaac

SEQ ID NO: 284678 - DNA, 122 bp, Homo sapiens
cccctaagcagcagtgtcgggccacgccccctcggtgggaggtcggcctgcgctggtggccgcagatggcctaaggctggcgggcctttgattggccccggctttgcccttgccacgcccct

SEQ ID NO: 284679 - DNA, 122 bp, Homo sapiens
gtggccttggccttgatctcagtgctcttcctcgtggccatgattctggccattgccttgcgcctgcgacgctcctccagccccgcctcctggagctgcttccagcctggtctctgtgttaa

SEQ ID NO: 284680 - DNA, 122 bp, Homo sapiens
gctttttgccaactagctgtttctccacagcggagatctgagacgagtatgtggctgattcgggcaaaacaaaacaaaataaaaccaaacgaaaccaaaacagacttactattaccaaatct

SEQ ID NO: 284681 - DNA, 122 bp, Homo sapiens
atgcccctgagagagcagcggtatgctgtgatagaggaggatggtcacgtggtgcagacgcgtgtttttgggaaccagcccttcacctgtgtcgaccttctcaactggaaaaacaatacacc

SEQ ID NO: 284682 - DNA, 122 bp, Homo sapiens
gtccatgtcaaggctggccgtgtctattggaccaactggcacacgggcaccatctcctaccgcagcctgccacctgctgcgcctcctaccacttccaaccgccaccggcgacagattgaccg

SEQ ID NO: 284683 - DNA, 122 bp, Homo sapiens
tgcagtattctctatgagtaaatagttctgtgcttcctctcactggcacctgacgcaaggcgcagccaaggactattacacctctggctgctcggacgcatcttcgcactgcgccccctcgc

SEQ ID NO: 284684 - DNA, 122 bp, Homo sapiens
cagaaagttgatctttgaaattgagagatgcatgagagtgattccttttttcaagggaaacgttgaaaatcacattgctgggtgtctaagagtgtgattcttgacctagagaagttaaactc

SEQ ID NO: 284685 - DNA, 122 bp, Homo sapiens
ggggcggggcgcagagataccaaggccggacaggcgcacagagacaggaagccagatggacggaaagagggagaaaatgagggagacacagagacagacacgcgcgggtgttattaacctcg

SEQ ID NO: 284686 - DNA, 122 bp, Homo sapiens
ttggttcgcccctcaaaagcggcgcgcggggccacccagggagcagctgcaggggcggctcgtagccccaccatttaaagagacagcagcgagaccgggagccttactgcggcggaggcttc

SEQ ID NO: 284687 - DNA, 122 bp, Homo sapiens
gagctaggcggagggctaggcaggggcgggtctggtaggttgataggctgggagtgtagacggcaggaagaggtgtttctgagatagaggcaggtcttaaactaacgccgcttctgggaggt

SEQ ID NO: 284688 - DNA, 122 bp, Homo sapiens
tccgaggtcaacaaggggcagtgaaatcggacaggcagaggtgagcgctgcctgagccaccgctccgtcccggatttgcaggcagctggagcccgcgggaccggccaaccccgcccacgccg

SEQ ID NO: 284689 - DNA, 122 bp, Homo sapiens
attgtcagccatagatttttattgaattcctatacggaaaccttcatctgcttagccacacgagaggagcattgcctctcatatgctcttctcagtgttgttgacgggttatctgatggaag

SEQ ID NO: 284690 - DNA, 122 bp, Homo sapiens
tggtcaaatcatattccgggcttttgaaatagtgggcgctagagcaccgcctttggcgtccgccagccgggcgcagaggagggagaccccgagccggggaggggcggaggagggggcgcggg

SEQ ID NO: 284691 - DNA, 122 bp, Homo sapiens
cctccaggcgcactcactcaggggccgcggggcggggcagagcgtcgtgaacctccctcgcgagtccgcccacacaacggcccaggcgaggggatccctgcgggaccacagcgcttcagcct

SEQ ID NO: 284692 - DNA, 122 bp, Homo sapiens
ggttttggcccccgcaaaaaaaattttttttgaagggcagtcactgttgccagttggatccgtggccactgcccagatccccacaccatgctgtcagagaagaccttcaagcagtgctgcac

SEQ ID NO: 284693 - DNA, 122 bp, Homo sapiens
ctttccctcttggcccattcgatcatatcttcttcagagggatactgccatttaaaagatcgatgaacaaacgaataaataaatgagtaaagcaagtaaaaagaaggaaaaatagtttttac

SEQ ID NO: 284694 - DNA, 122 bp, Homo sapiens
ctgccctcccgagaggagccttcaccccaaggggggaaccatggggggctgtcaaggaggcggcaagatcgcgctgaattggcagtcattttaggtgaaaatgagaggatttccttcctcgc

SEQ ID NO: 284695 - DNA, 122 bp, Homo sapiens
gcgcaaagctacacagcctctggctccaaggcagggctctctcccctgcctgtgccctctcgccaccgcagcccctgttctccagctgggggaccacccagaggaccacctggaccctgctg

SEQ ID NO: 284696 - DNA, 122 bp, Homo sapiens
gtctctgcagcctgagctttgtgacttctgtatccagagcacagttaatttccaaaagcccgcctgcaccacgtgttttaagtcttggtgtgtgtgtaaagtctatatcactatcataaaac

SEQ ID NO: 284697 - DNA, 122 bp, Homo sapiens
gcaggacgccgggctcccggcggtcgggagaggcggtctgtgcagcctcaggcctggggtcgccgccgcggcccgtctcctcgcgcccggcctggaggcggcctcggcccctgctgcggggc

SEQ ID NO: 284698 - DNA, 122 bp, Homo sapiens
catggttaccagcaaaagaaagaaaaccctttcatatggttggagttatttacaaaagtacgacaagcgatgaaagacttgagccatattttgggtttgaggctgcaggagaggatgctaac

SEQ ID NO: 284699 - DNA, 122 bp, Homo sapiens
gaacatgcttgtcaaatcagaccggcaggcaggaggccagtgtggccagagggcactggccgagggtgagaggaggcgagcgagagggcagaggggtgaagggctgggtcatgagggccctg

SEQ ID NO: 284700 - DNA, 122 bp, Homo sapiens
agcccgggacgggtgcgtggggggcgggggtgcgggggcacgccgtgagctccagcgacccgccgccgggcgacgccgccccccgagatgagctcaccgccggcgagggccgccaggccctg

SEQ ID NO: 284701 - DNA, 122 bp, Homo sapiens
cgcgcgtgtcgcggagccccgcggcagttgtggttgggtggcttctgtggtgagcgtctgcgcttggtgaccaaaggtttgagggaaagtggaagagacagggtcaggcctcctgtgctcca

SEQ ID NO: 284702 - DNA, 122 bp, Homo sapiens
gagttggtgggaggaggcgagcagaggcgcggagcaaagctgtcaaactgcgcgcggagccgggcgcggggcgggggaagggagaggagggagggaggggcaggcgggagccgggagggagc

SEQ ID NO: 284703 - DNA, 122 bp, Homo sapiens
ccccactgtgatatggtccttaatattccaaggcggagaggatgatcttactcccaataccgcagaaagtgtacaccaccccagtgatatggttcccataatcctggagagaagaggatgat

SEQ ID NO: 284704 - DNA, 122 bp, Homo sapiens
aggcaaggactctagcttgaggttctttgaggcagagcagaaattagcccctaggtgtgccgtccgtggcgcgagtcacggaactccaggtaccccggggtcgtgtccgcacctttgtcctc

SEQ ID NO: 284705 - DNA, 122 bp, Homo sapiens
agtaacttccttcccgtcaatggaatgcctggctggagtgcggtgggctcgctttggcaccgtgaccctgtgctgcgtcgtctgactctgacttcttctatggcctctgtcagccaggaggg

SEQ ID NO: 284706 - DNA, 122 bp, Homo sapiens
tctccttgttttgtgcttccctatcaccacctgaatagctgctcgtctgtcgtggagtcccggcaccagccctcctggcggcctggggaaagagtaggtggttggagggtgcacccttgaga

SEQ ID NO: 284707 - DNA, 122 bp, Homo sapiens
tcagttgctggtcggaagcctgcattccttctacgctgaggctgacgcttttgggagggccgccccctcctctctccctcctgtgtgttaggaatagtcgctgactaaacccgctttgttcc

SEQ ID NO: 284708 - DNA, 122 bp, Homo sapiens
ccggttcgcccagcaccagcaccatgcgcctggacctccagttccaggccatcaaggtagcgccccttcctccagcccccaatgcccaggggtttaatcgagacacggttccctaattatct

SEQ ID NO: 284709 - DNA, 122 bp, Homo sapiens
tgagaagcgtaattcaacatattggaagatctcgctcctccatttcaagatgactcaggccggtgactttctttctgttcccctggagccaacagggtggcaaagttgggaagaaagacact

SEQ ID NO: 284710 - DNA, 122 bp, Homo sapiens
agcgttcattcagtgctactttgtttcatagtcgtatccctggagttacttagagttggtcgctttcgcctctggtatcgtgcatatgatggaaaagttttaatctcctgacacttgtgatg

SEQ ID NO: 284711 - DNA, 122 bp, Homo sapiens
gagcagttccccggagacattaccaagacttctcacctgacagtccagagcactcccaggcgtgggtaggcctcaacctgtccaactggcttttggaggtggaccggagccggggagcccct

SEQ ID NO: 284712 - DNA, 122 bp, Homo sapiens
aagaaagctagagggagccggagcggagctgcacttcacgccgaagtttccccttcgaatcgtctggagttgtaagtggtttctgattgaacacagctgtctagctgctggccacggggtgc

SEQ ID NO: 284713 - DNA, 122 bp, Homo sapiens
ctaaaaggatacagagtttttcactccacaataataaatgagactggttgagcatatacccggagggaagcaacacggtttacaatgtaaattcacagcagcagaggcattctagaatccaa

SEQ ID NO: 284714 - DNA, 122 bp, Homo sapiens
gagccggttatcttctcagggagggttagtgctggccactgtgcactgccgctgccagcacgcccggtcacagccagtgtctatgggcgactggcgcggctgcgaggctgtctagaggactc

SEQ ID NO: 284715 - DNA, 122 bp, Homo sapiens
aacaaacactcccaggtggttctgaggctggtagtctaaggatcacagtgtcagaaactccgcactaggtcatgttctgagataactaagaaaggatgtaggaagtaatcataaagggtttc

SEQ ID NO: 284716 - DNA, 122 bp, Homo sapiens
tccccgcgcttagagaacacgcgatgaccacgtggagcctccggcggaggccggcccgcacgctgggactcctgctgctggtcgtcttgggcttcctggtgctccgcaggtgagagagagct

SEQ ID NO: 284717 - DNA, 122 bp, Homo sapiens
tggcccaaatatgatgagtcacctcataatctgaaagtaaagaacaaaaacttactgttgcgctgggaaaatagggcgatggacaatgcactagaaaaaagaagggaccatggtaggcgcct

SEQ ID NO: 284718 - DNA, 122 bp, Homo sapiens
aaacatggagaatttaagtcatttcccccaaatcacaaagtcaggaagaaacagacctcacggagctcgctctctgtcattgcatcacacttcctgcccttacaaggcaaattggataaatg

SEQ ID NO: 284719 - DNA, 122 bp, Homo sapiens
gtcattgcctccctcctggcctccggcaccagagcctgcatcctgcctgccccaggtaaccggagccctgagtgtgcacaaagcaccactatgccagagtgatgttatcaggcaggctggcc

SEQ ID NO: 284720 - DNA, 122 bp, Homo sapiens
tttcaagctgaagctctgtatggttaaaaaccttgctcacaaccatactgttgaagcccacgacccccaacattttaggaaatccagcatccctctacttgttccaattatttatctggtag

SEQ ID NO: 284721 - DNA, 122 bp, Homo sapiens
ccagtggccacattctgtatagatcacttttctcactaattagagtatgaatggtgcctccggaatgagttggcctctgaaaacgttgatgcctaaatgaatggattattacacaggaatgc

SEQ ID NO: 284722 - DNA, 122 bp, Homo sapiens
gcgccgggcgacgcggtccggggggtggagcgttggcgtcgtgcgaggggtcgtcactggcgcggagacgccccctctcccccctcggctcagccgggctgctgcccgagcccggggggtgg

SEQ ID NO: 284723 - DNA, 122 bp, Homo sapiens
gagaatctcaaattgaatgcatctgtaacctgaactgagcaaatttaaagccggaagtgacgcggccatctttaaatggcatgtttttaacatcagggcaaatgagggtttgtgagtgaggt

SEQ ID NO: 284724 - DNA, 122 bp, Homo sapiens
agaacgatgtcttacatcccccacaatgcctagtaagggtgcaagtacttagtaggtactcgataaattgattggatgagctgtcccattgaggggaggggagaagtggataatgatttaaa

SEQ ID NO: 284725 - DNA, 122 bp, Homo sapiens
tgctgtccctggggtaggcttgcccctcctctgttcacacccctctttgggtggtcacctcgcttcccatggacacaagcaccacgttcagccagatgacctctcacctgcctcctcagggg

SEQ ID NO: 284726 - DNA, 122 bp, Homo sapiens
cagtgagatataggatataagtaggtgtctgcttatatcctatgaaggggtggagaattccggaaaatgtttactttcctgataaaaggagacacacgttttaaccattttttccttctctc

SEQ ID NO: 284727 - DNA, 122 bp, Homo sapiens
aaagtgctgggattacaggcgtgagccaccatgcccggccgagaatgtctgttttttagtcggaaggtgaacttcatgaatgatcctatcttgttcactgccctgttctcatttcccagtat

SEQ ID NO: 284728 - DNA, 122 bp, Homo sapiens
gggaggggggcgggacaggctcgctctcctcctacttagcgagctcccggggaaaagcaacggtgtcctcctaagcctgaggccaccgcgaccgagccgagccaggctaagggaccagtgtc

SEQ ID NO: 284729 - DNA, 122 bp, Homo sapiens
ccacaagaagacagtggtgcccaaggtgaacccaactttcagccagtcaggtttggcattcggcggctctcgcacgtagaactttgatcgcactgaagctgaaaggggaagagggtctgtaa

SEQ ID NO: 284730 - DNA, 122 bp, Homo sapiens
acactgtaacagtaagaggaagaaacaaaacttcatttagtgattaatgtaaaccagtcacgaataatgttccagtaaaagcctaggggaagagcctattcaaattgcaatgtgcttttggt

SEQ ID NO: 284731 - DNA, 122 bp, Homo sapiens
accagcctgaccaacatggagaaactccgtctctacttaaaatacaaaattagccagtcgcggtggcgtatgcctgtaatcccagctactcaggaggctgaagcgggagaatcgcttgaacc

SEQ ID NO: 284732 - DNA, 122 bp, Homo sapiens
actcctcgggctccggagacgccattttcccccttgatatctctctccataaatcggtggcgcggcggaggcggcagagtcgggcgggaagcgcggggccggccggggcgcccgccgctcgc

SEQ ID NO: 284733 - DNA, 122 bp, Homo sapiens
gagacgcagagaagagaacgaaaccgacgagtcaggtgaactgtaatacaacgttctacccgaatgtaagtcatctgattggcttttggactcttctaggccacccattgtgatacgacatt

SEQ ID NO: 284734 - DNA, 122 bp, Homo sapiens
gggcgtcggccctaccctggagctttcagcgcgacaggtcccccgccagaccccgctggccgagtggggctctgcgctctcgtagaccgccctctgcggtgaatcaaaataattgctaacat

SEQ ID NO: 284735 - DNA, 122 bp, Homo sapiens
aaatatatactaaccaaaaataaaagaatgtacaaactaaggctatgtggcacttggggccgtctcacatgagaatgtgacatggtgacaagatttcatccaaaaacatgctttggcagagg

SEQ ID NO: 284736 - DNA, 122 bp, Homo sapiens
agttccctgccctaatcagaggcattgacctggaggccctgtgtaggagtccccatctttcggaattagtgatgtggttagagtagcaacgtgactctctgtggacggaagaaggtaggtcg

SEQ ID NO: 284737 - DNA, 122 bp, Homo sapiens
taattctttccttctccctcttcaaacactcatggtctgcttcattcagtcacctcctcccgaggtcagctcctaaacagcagatggtgtgcttgtgtgcagcagctggcttcattcctctc

SEQ ID NO: 284738 - DNA, 122 bp, Homo sapiens
tacccgttaaaagagagctaggagtgatatctacttggtacctccctcaaagctcccgctcgccacctggatgcctgtatgcacacaggaattggctgggggccggggagagcatgggtggg

SEQ ID NO: 284739 - DNA, 122 bp, Homo sapiens
ctctttagggctcaagcagcttccactcaggctgagcctgggcgcccctcctctgtgctccggcacaggtcacactggtaagatgaacgcatgcagcctttccagagcactgcctcctccca

SEQ ID NO: 284740 - DNA, 122 bp, Homo sapiens
agctccctggctgaggcgagtggagaggccggagcctaaaagtccctgggctgcccggggcggcgcgctcgagccccagagccgccgcagcacccccgaggcaggagcggcgggcgaggcgg

SEQ ID NO: 284741 - DNA, 122 bp, Homo sapiens
ttatcaaagtctcttgtcagaagcagcacccgggcaacacaccatcatccccctcagacacgggcctctaaaacatgagctctgccttctgggatcagtgcacatagaccaggtgtcaatat

SEQ ID NO: 284742 - DNA, 122 bp, Homo sapiens
ataagtgtcagcctcccaggtgggtaagaagcgtgtgcatgtggacctatggctgtttaccgtggcctatggggatcatctggaacactctggaacactctgtagtgttgcaggaaaccctg

SEQ ID NO: 284743 - DNA, 122 bp, Homo sapiens
gcggcctagggcgcggagggcggaccgggaatggcgcgccgtgcgccgccggcgtaactgcggcgcttgcgtgcccgcggcggggaaccggacggggtcggggaggcgggccctgtgggacg

SEQ ID NO: 284744 - DNA, 122 bp, Homo sapiens
ggattatgagggacccagcctggagagaagtcttgaaaatatgtgaaggattttcttgatcggtacggcagtaggaaatcactgaaacagtttaagcagaacaatgacacaatgaggcttgt

SEQ ID NO: 284745 - DNA, 122 bp, Homo sapiens
ggagactcccctcccctaccccaggcggggcgtcccaaaggcggcggggctcagttgtggcggcgcctccagtgtcctgtccggtcccgtcccgttccgtcctgtcccgtccgggcggcccc

SEQ ID NO: 284746 - DNA, 122 bp, Homo sapiens
aactaatatgagggcattattttattattattacttcaaagagcttagtacagacccacccggagccagtggactgaaccaataacccagaacttgaaggtttgggacttggaagtctggga

SEQ ID NO: 284747 - DNA, 122 bp, Homo sapiens
cgggataccggcccgccggccaatcggcgctgctggtagctaggtgggcggggcctgcgccgtggtagttattaggagagctgtcaaagcccagaggtcactcccttttgtagagcccgaga

SEQ ID NO: 284748 - DNA, 122 bp, Homo sapiens
gtaaaagttttgttagaaaacactggcatttgactttagacatacacagtgttagatttccggtttcacacagtggttatgaattgctattatgttaggctttagatgggaaaataaatctt

SEQ ID NO: 284749 - DNA, 122 bp, Homo sapiens
caggcctgggcagtagctgtgttacttcaggagctgcctgccatgcccccctctcaagatcgtgctgtgatggggtttgggggaaagataaaggtgcaatcagggaagcgcctgtgttggga

SEQ ID NO: 284750 - DNA, 122 bp, Homo sapiens
ctcttccaggctggccttggaggtgccaagtgaccctgcctgacagtgtcagctgtcctccgcagcgcgccccctccactgcaaccttctaagagccctggctcaagtctcctgctgggaca

SEQ ID NO: 284751 - DNA, 122 bp, Homo sapiens
gaatctgtccccaccatgcaacctcgggccagctcaggctctgccaccagctccccacatcgtcgtccctcaagaggcctagggtgggttccccctgcttggtgtctctggcccctgctctc

SEQ ID NO: 284752 - DNA, 122 bp, Homo sapiens
gccaggagctcaggcctgcagcccagcccaagcagcaaccacaccactcccagactccaccgcagagggtctgtctccgggccccctcctgacactgagacgttgctcttccttctcctgcc

SEQ ID NO: 284753 - DNA, 122 bp, Homo sapiens
gggcgcagtgccagctctaccggggaggtgcacaggaggggtgcgcagtgccagctctaccggggaggtgcacgggaggggggcgcagtgccagctctaccggggaggtgcacgggaggggg

SEQ ID NO: 284754 - DNA, 122 bp, Homo sapiens
gagattgaatggggtggctcgggcaatgacgtgcgtggtaggacatggggaatcctgagccggtaactctgagaagggcccttttctttcctcttttttttaatttaaatttttaaaatatt

SEQ ID NO: 284755 - DNA, 122 bp, Homo sapiens
ccagcaccagggagcatgtcccgagcaggtgaacaccatctgcccggctgacaagatgcccgtcttagtgcctgctgctgccagcaggccgtgtggacctcggggaggcgcagccaacctca

SEQ ID NO: 284756 - DNA, 122 bp, Homo sapiens
gccaaaagcgatctgcacatgcgatccgactgacctcagctcagtcagagtaagggacatcgatctctaaggtcccaccagattgtatctgtaacgggcgtacaggcgatgttgctatgttc

SEQ ID NO: 284757 - DNA, 122 bp, Homo sapiens
ccgacagacacgtggctaccgcaggctgagccgaacttgggaggacttagttctgcttaccgcgagagggcgccggcggttcctcactgctaaaatctcatttcccataaagcccccgagtc

SEQ ID NO: 284758 - DNA, 122 bp, Homo sapiens
tcccctcccgcgggctaggggcgtggggagagccttcctccaacctctgacccgaccaaccgattcctcccgaaactctgggaacttacacaacaggatcgccaatatgaagaggcacaaca

SEQ ID NO: 284759 - DNA, 122 bp, Homo sapiens
gacaaaggcaggcatgggtttaaatcacaggccacttgcctccttagcatttcctccagccgacatccaagggctatgcatcactctgctggtgcaggggctgggaggagacaattgaccct

SEQ ID NO: 284760 - DNA, 122 bp, Homo sapiens
gaagttctaaactcagggatcgtggcggtgtggctggaggacaggaacaggctcagaggccggccccaggtaggaggggcgagggagcgatccgggcgccgcccctcccctcgcctgcgcct

SEQ ID NO: 284761 - DNA, 122 bp, Homo sapiens
tctatccccaaggggtgggggccacgggacagccaccagccgcctctctcttgcctgggccgagatctctgccatgagctcagcttcaaggatttgcacgttggcttcctcgacttggagaa

SEQ ID NO: 284762 - DNA, 122 bp, Homo sapiens
cctatggcttgcgcgtgcggcggctgggcaccgccattttggccggtggccgtgagaacacgctgtgtggctgaaaagtgaaggcaagagctgatttggcctctgtgctcccctccgcaagg

SEQ ID NO: 284763 - DNA, 122 bp, Homo sapiens
cctcctggtcggctgtttagagctgagcaaggccaagtgggtgcagctgccccaaccctccggatcctcgtctcccggaggcctgcagacccgttggctttccctgtaacccaaaacaagga

SEQ ID NO: 284764 - DNA, 122 bp, Homo sapiens
cctcagcaccctggaaatccggaatgagacgagtggctcggaagtgctcacgagcgtgagcgaccccaaggccaccatgtactcctatgacagcgccagcatccagtaccgcaagcccctga

SEQ ID NO: 284765 - DNA, 122 bp, Homo sapiens
gggagcaagaggcctgcccccggaacgtaccgttctctggacattcatgggaccaatccccgttaggagcccgtggtcttgtcaggaaaacctggctcagatgaagtgagagacaaactcgg

SEQ ID NO: 284766 - DNA, 122 bp, Homo sapiens
ttgcattagttgcggccatgtgactaagttttcacttatagcaggtgagaggaagtgatgcgcgtgacttttagatcatgaaattaaagtgaggagtgatgttcttcttctaccacttctga

SEQ ID NO: 284767 - DNA, 122 bp, Homo sapiens
cccacggcagtgtaccgcccggaagacccttaacttccggggaggggctgccgcagaacgcgcctggcttgctctccgccggctgccaaaggcgcatgcgcagcttcctccctctggccatc

SEQ ID NO: 284768 - DNA, 122 bp, Homo sapiens
caccaagaagactatcccagcagggttttcctggagctttcacctccagccatgtggggccgggcaggggtgggagacgccccgcattaaagaaggagacaggctgctctcctcatcctgtc

SEQ ID NO: 284769 - DNA, 122 bp, Homo sapiens
gaccccaggagcctcactacctgtccccatagagctcctaaccagatgcaacagtgactgcgtcaccattccccacttttcccaactacgcagtgacaaacctaccagctttaccccacttc

SEQ ID NO: 284770 - DNA, 122 bp, Homo sapiens
agccaccgcctgccactccccacgccctgcacaaacttttctgtgctgcagagacagcagcgctccccctggaatgtcaaccccgtggcctgaggaccgctcccgtgccccgaaacgcacag

SEQ ID NO: 284771 - DNA, 122 bp, Homo sapiens
cccgcgcccgtccccgcccccggctccctgacgcccccggcctggagacgcaacccgacgcgcacaaccccagaccctgcgcgggagtcgggggtccttccagttcccagagcgagagcgaa

SEQ ID NO: 284772 - DNA, 122 bp, Homo sapiens
tcttccagccagcaccttccagcttcaatgcccacacgcgagtgtgatcgccagaactgacgggatatcactgtcccacaggagccgtgcttggcttcctgagcaccaagactatgtcaccc

SEQ ID NO: 284773 - DNA, 122 bp, Homo sapiens
ctccctagcgccccgggccatttaaagaagtgcaactggcagggggcggggcagcgactccggggtggagggcggccggtccaacagaaccgcttccttccactcagctacagtcctcgctc

SEQ ID NO: 284774 - DNA, 122 bp, Homo sapiens
cgctggtgtgcgagcggctgcgggtgccctcgctggtgtgggagcggcttcgggtgccctcgctggtgtgggagcggctgcgggtgccatccagagaagtgacgctggaaccagaggctgtg

SEQ ID NO: 284775 - DNA, 122 bp, Homo sapiens
catacagagaacatgttaaaaccacagactgctgggctccagccctagtgtttctgatcccgtagttctacggtggcccaagattccaggtttcttttttgtttgttttttcagacagggtc

SEQ ID NO: 284776 - DNA, 122 bp, Homo sapiens
agccctggagtattgcagtatgtgtgtccactcctgctgcctgcccaggattggtttgggcgaagtaaaactgggagttttaagtataaacggcaacaacagctctttgagagcattttaga

SEQ ID NO: 284777 - DNA, 122 bp, Homo sapiens
aaccctggctcccgccaccagatgtcttgctggcttgtctgctcatggtaaggagcttggcgaagagaagagtgtaagttaagcagggacactgagagtcagaggaagagggatgggaaatg

SEQ ID NO: 284778 - DNA, 122 bp, Homo sapiens
ggaagccgtcagcagttttggcgctgggagtgacagaccatccagactgaacacttgaagcggtgcggagaactgaaaggcagggagactcgttagaagctgctgtagtaatccaggcaaga

SEQ ID NO: 284779 - DNA, 122 bp, Homo sapiens
gcttgggtgggggagtgaggcaaggggagggttgagggtacacctactaataccctacaccgaagcacaactgataagtgatgctggaaggttccaaaagaaatcagagagcaaaagtaaaa

SEQ ID NO: 284780 - DNA, 122 bp, Homo sapiens
gcacgttcacatggtgtgttcacacatgtgctgtttcagacacagggaccttgaatgagccgtacccacaccccctgcctggggcactaacaatggaaggcttcggctaatcccaccacatt

SEQ ID NO: 284781 - DNA, 122 bp, Homo sapiens
agcctcaagcagttgtcctgcctcagtctcctaaagtgctgggattacaggagtgaaccacggagcccagccttcaagctgctttcaaaatttactgcagctgtgctttgggtggggttgag

SEQ ID NO: 284782 - DNA, 122 bp, Homo sapiens
ctcacagaggtgcccggctgcaaactgaactgtttgttactctttttaaaaatctgtcaccggaatgtaaatcaactactggaatgagttcagcactgtgtgtttttttttttttttttttt

SEQ ID NO: 284783 - DNA, 122 bp, Homo sapiens
gaggagagaggatcagggcgggaaacacagctcaaatcctacctgcatggccgagctcaccggggtgcgtctaagtagctcgcctttgcggcccacccaaaatatctggataatggttaccc

SEQ ID NO: 284784 - DNA, 122 bp, Homo sapiens
cggcgaggtcttgcgggctggcctttctgctgctggtaggaggatcatgtgctgctatttcggaggctcctgccagttggcccctgcccaccttttctgttcatactgaagcagccaggaac

SEQ ID NO: 284785 - DNA, 122 bp, Homo sapiens
aacggattcactgcgtaagcaacccatgctgccatccccactgggaccgtccctgactcccgacacctgcagaggcaagcagcacttgacgcaggggctgagggccaccaagtctccttgga

SEQ ID NO: 284786 - DNA, 122 bp, Homo sapiens
caagcctgtttttctgtgaaaaagctagatggcaggctgcctcagtaagttcttcttaagcgacagagagcattttcaatgaagaaaaattctcccattatctaagctaatgtgactgctac

SEQ ID NO: 284787 - DNA, 122 bp, Homo sapiens
gtgaaggaaggcctcccccttttactgggaggcacctgggtgagtggtggcactgtagaccgagactggagttcaggaggaggaggagctggtctaatgggaaggctgagaagtttaatttc

SEQ ID NO: 284788 - DNA, 122 bp, Homo sapiens
ctcattaacccccaatcagttcacctaataccaggtcgaaatctgagcgcagcgggagggcgtggctgcgcctgccgctaggctccagccggctccgggggcggtaccccacagtcgaggtg

SEQ ID NO: 284789 - DNA, 122 bp, Homo sapiens
tttgttctctaaccaatcagagaccagcctgaagatgctagcaaattaatttcaggcgcacgagacaggcggtcggtgctcatgaggatcctggctgaggaaatcacattttagtcccaact

SEQ ID NO: 284790 - DNA, 122 bp, Homo sapiens
ttcggcttcgcctccgggccttctcaagcccctttgcccgtgtaccccagaactctcctgcgactgtgagccgagcttactgccttcagctgggctgcctggtcttccacttccggcgcgaa

SEQ ID NO: 284791 - DNA, 122 bp, Homo sapiens
tggggcagttatgggagatgtggttacctagcaacaggctgcctggttctgtggccggcacgtggagtccaggcgctgccctctgccccctgccccctgcccccattggtcctccccttgct

SEQ ID NO: 284792 - DNA, 122 bp, Homo sapiens
gtggtaaatgcaggaggtaattaacaggatcttcacaaacttggagccagcccactgagtcgttaaaaaaacacccgcaaagaaaacacacgagccttaacactccagagagttccgaaaca

SEQ ID NO: 284793 - DNA, 122 bp, Homo sapiens
ccaacacctattctgatttttcggtcaccctgaagtttatattctcatcctaccaggcttcggaataatctcccatattgtaacttactactccgggaaaaaaagaaccatttggatacata

SEQ ID NO: 284794 - DNA, 122 bp, Homo sapiens
cccccttagggggcggggcctcagagctcagtgctcgaactggctccagagccgtgagttcggcatgcaagagcggaagaaacgcggctggtaccccggaagcagtcgctgcaacttccggg

SEQ ID NO: 284795 - DNA, 122 bp, Homo sapiens
tgtatgtttctaataacacagcactaaagtaaaataaacctgcttgtccaaatacggttgcgtttcagtcaaagttttgcttaatgttttgagaagcgctttggtgaagataaatattctca

SEQ ID NO: 284796 - DNA, 122 bp, Homo sapiens
cagctgaactggcagagcacttcaaaggcctacgggtcattcatcatccccatgacgctccggcaaatgctcagcttcagccccgcgccagggatttgttatgacttgcgagccgcctgaca

SEQ ID NO: 284797 - DNA, 122 bp, Homo sapiens
tctccacttaaccaactcatcattagaaactacaagtcccaggatgcactacacgatgaacgtcggatcgaggacctcgtgtctctgaagtggttgccctcgccttatttgaatgggaataa

SEQ ID NO: 284798 - DNA, 122 bp, Homo sapiens
cctagagatagcgacacgtgggtgggatgggggcagggtgctcgggggcctggaggcttccggaaggagcgctggtgctcaccttccagagccgattcctgagtcaggtagtgcagtggttg

SEQ ID NO: 284799 - DNA, 122 bp, Homo sapiens
tgtacaagtaaaaaatacccactatacaaataacaaatccaagatcagtgaaattgagtacgatgacaattaaaatggtttgcataaatgtcctataacacatggaacacatgattcatcct

SEQ ID NO: 284800 - DNA, 122 bp, Homo sapiens
agcaggctgacacgtcagagcaggaggcggtggaggcgtacacagacatgggcatgctctcgacagcgggcgcctcgaagtgtctttgataccctggcgggtaaggggcatggggttctcta

SEQ ID NO: 284801 - DNA, 122 bp, Homo sapiens
gtccgaggagagggagcgccaggagagcatcttccaggctgagatgtcggagcacctggccggcttcaagcgcgaggaggaggagaagctcgccgccatcctgggagccaggggtctggaga

SEQ ID NO: 284802 - DNA, 122 bp, Homo sapiens
cgcgcgttttcaagcctgcggcccggagttcactgcgaggactgagatcacccgttaccccgccctggtctacaagtgtttgctgatatagaaacggaataacggcgctgtgggctggggag

SEQ ID NO: 284803 - DNA, 122 bp, Homo sapiens
cgcgtcctgaaattccgcttccagggccaagctttcttttctgatactgtttgtccctcgcgaggcaccgttgggtcgcgcagtaggcgtgactaggggcgggaagtggggcgggagcaggg

SEQ ID NO: 284804 - DNA, 122 bp, Homo sapiens
ctcgctcccatcccagttccatcaaaacgaacccgggccagcgcaaggatctccgagttgcgagtgtgctgaggctgggactgtcactcattctccgatcagcgcgtgaacgcagctcggct

SEQ ID NO: 284805 - DNA, 122 bp, Homo sapiens
tggtgacagtgtgagttatggctctgctggctgccagtggagccagtcgctctgcgcagccgtgcaagggtgttttgaaaagtggctcagccggccaggagtgactgggtgtaaatattgct

SEQ ID NO: 284806 - DNA, 122 bp, Homo sapiens
ttcccacccccccccggcctctggaattccttgtttctcttctttcaatcccacataggtcgttctgccttgtattccctttgtctgcactaagctgcaactttgaatgcacatggggtggc

SEQ ID NO: 284807 - DNA, 122 bp, Homo sapiens
tcagaggtacagcgactctcctggttccctaagatagtctcgacttttcctttccctttgcggccctctcacttgactactgcagccaaccatacccctgattagggggtgcagcacatcag

SEQ ID NO: 284808 - DNA, 122 bp, Homo sapiens
ggttataaaaatgagggctttcttgagaattacttatagtttccgagttgaatggcagagcgcacgtagacacatctgaaggtggatggctgtatctcccagtactggaccgggttgctgaa

SEQ ID NO: 284809 - DNA, 122 bp, Homo sapiens
gactgaaacgaacctcccatcttggcctcccaaagtgctgggattacaggcgtgagacaccgtgccctgcctcatatagtaattctgtgttatagttattgagggagcactcatataatctt

SEQ ID NO: 284810 - DNA, 122 bp, Homo sapiens
gcggcggcgggccaaggtcctgactagagggcagaaagcgtcagctgcaacccgggaccacgccgcctctcgcctctctcctctcacctctctgcctccatttccctcttccccctccaagg

SEQ ID NO: 284811 - DNA, 122 bp, Homo sapiens
aaggaaaaaaaaaaaaaaaagacagagagcttgtgcttgaggagatcactgtctagtaggcgatggtatgtgctctatagggttcagcaacaacatggtgcaatcagagtgcagggaggggt

SEQ ID NO: 284812 - DNA, 122 bp, Homo sapiens
ctcgtaggattggcgcaaagtgagcccgctccgcccgccggtctacgcatgccggggagccggtgttcggacgaccgtctcccgctcctgcacccccttgtaaagtgcaggggccaccctgc

SEQ ID NO: 284813 - DNA, 122 bp, Homo sapiens
ggagggggagcggctggtcagctgcgccctgcgggtcgagaatgtcatcagcagggatggcggcgctttgagtgctgagcgcggccccgaccgggaccccctacccttgacccaccctcgca

SEQ ID NO: 284814 - DNA, 122 bp, Homo sapiens
aactgcggagatgtttcagcccttccactgtacttttatagtacttgctgccaattttaccgactcattttcattgagaacttcacttaatctcacttgtgtgtttacctgttaatctttcc

SEQ ID NO: 284815 - DNA, 122 bp, Homo sapiens
gtagaaaagatggcggggagaagtcagaagctcatattatttatccagggaatgccatatcgggtgcaccagttatcagagggactaggcagttgccaaaaccccaatcgtgattggtatta

SEQ ID NO: 284816 - DNA, 122 bp, Homo sapiens
gccacagaggccgggggtagccattgtgaagtcatggcctgggggaaagttgccaaacttcgtgtcaggtgctgtgtgtaagtggagaacttggggatagaggaggaagctccttgtggccc

SEQ ID NO: 284817 - DNA, 122 bp, Homo sapiens
cctttagggctagcctcccccccagctcctgcctgaaaaatgacatttcgccggtgtctccggagggggctgaatttcactttgtaactttctgcggaacccgagcccgggtggcagctcgg

SEQ ID NO: 284818 - DNA, 122 bp, Homo sapiens
tcccttgacagatggactaacccagaaactcacccaacttcaacgcctgaatacgcagagcgctcagcctggcgggctgacaccactccagggctactcgctattatcaagaggaagcctgg

SEQ ID NO: 284819 - DNA, 122 bp, Homo sapiens
gtggccgtggcggctggtgtggggttgagtcagttgtgggacccggagctgctgacccagcgggtggcccaccgaaccggtgacacagcggcaggcgttagggctcgggagccgcgagcctg

SEQ ID NO: 284820 - DNA, 122 bp, Homo sapiens
tgccctacctcggcccggaggtacccttccccacgcccccccacatccccgctccagacgcgagccccaaccccggcacagaccgggacattgcccagaaccggcccaaaatggggcctggc

SEQ ID NO: 284821 - DNA, 122 bp, Homo sapiens
ggggacgcacgagaatccctgcctggagatgaaggcgcggctgcctgtgtgggggccgctcgcgggcgccggagcccccggtgtttgtgtttggggtttttcaaagtggttaagctcctgtg

SEQ ID NO: 284822 - DNA, 122 bp, Homo sapiens
ggaggtaaagtcaagacaatatgattatcatctttctgtctaaggcatctgatttgctggcgtttacgtttatcgccagctggaggtgggcatctaccgtttttgagggctcttgacatctc

SEQ ID NO: 284823 - DNA, 122 bp, Homo sapiens
atgggcggccgggcagagatgctcctcacttcctagacggggatggcggccgggaagaggcgctcctcgcttcctagatgggatggcggccgggcagagaagctcctcactttccagactgg

SEQ ID NO: 284824 - DNA, 122 bp, Homo sapiens
gtacctgtgttctgtcgcaggtgcacacctcccatcgtccccagcgcggacttggagagccggcctcggtctggacagagcagctggagggcttcctggtctttacctgaacagtttaaacc

SEQ ID NO: 284825 - DNA, 122 bp, Homo sapiens
tcctgccaccgcctggtgaacgctggatattcgacttgaggtgggggagaatcccagccccgtcattttggaaagagttgggccacaaggtgtcttgtcttagcattgaggacacccaagca

SEQ ID NO: 284826 - DNA, 122 bp, Homo sapiens
agatctggttccagaaccgccgcaacaagtggaagcggcagctggcggcggagctggaggcggccaacctgagccatgccgcggcgcagcgcatcgtgcgggtgcccatcctctaccacgag

SEQ ID NO: 284827 - DNA, 122 bp, Homo sapiens
ctgtggcaggtggggtttactcttggactaggtagtcatggcagaggaacacacaatatccgagaatgcgcacagcacattgtgttctacagatttgaccgactggtggtgaggtctcctca

SEQ ID NO: 284828 - DNA, 122 bp, Homo sapiens
agaggttcgcgtcctgcagcgggttgggcttcacctcctggtacacgggcagcatcttgccgggcggggcgggcgcgggccggggtcgcgctgatcaggcggcggtggccgcgggctccgct

SEQ ID NO: 284829 - DNA, 122 bp, Homo sapiens
catctgctcagtcgcccagggcagcccatccattctgctgtctccagagacaaaagcaatcgaagatgcttgtggtttgaggtgtgtgtgtgtttctaccctccccccaaccctgccacttt

SEQ ID NO: 284830 - DNA, 122 bp, Homo sapiens
agctggcgaagatgggcgacccggatctcctggaagtgttggcggaggaaggtaggaccgcgccaagaggcgtcaagggagagccaggctggctgcctgcacccctccacccgcggcgcaga

SEQ ID NO: 284831 - DNA, 122 bp, Homo sapiens
tgggaggatattgtggtgccttgtgttaaaagtcctgggttatggcatatgtgaaacagccgcgaaggacagaagactatttttacgtaattaattgcctgggaactagttgtttaaaggag

SEQ ID NO: 284832 - DNA, 122 bp, Homo sapiens
tcgttcagggcgatgtaatccttgccgtcgtaggcggactggtcatacccgcggaggaggcgcccgtcgggccccaggtcgcagccagacatcctctggagggtgtgagaccctggccccgc

SEQ ID NO: 284833 - DNA, 122 bp, Homo sapiens
accggtcaacccaggcccggccacaaaaggcttccgtggaggggcagccctgcacgcctgcgggatcgaggccttggctccctgcctcaccttgatgttcctgccccccagcatcaccgagt

SEQ ID NO: 284834 - DNA, 122 bp, Homo sapiens
tcttacttacaatgcttgcaatttttggttaaggtgtccgtcagcttctgcagtttcttgcggttcatgtctggcgctcagagaatcgggccgcggcgggggtctctgggcgcgcggctacc

SEQ ID NO: 284835 - DNA, 122 bp, Homo sapiens
acaaaacctgagtctggagggaagctaaggaagcattctgctctggagtagacatgagtgcgtgtgaagcttctgatctcccatgagagcaatggggacatggggcagaatctaaaacccat

SEQ ID NO: 284836 - DNA, 122 bp, Homo sapiens
gcggtctctgtccggatcccccatggcccccaggtcccgctttctgttcccggccccggacgcccgcggccagttctccgcgaccctgagaatcaagagccaagcatcgggtaggagctgct

SEQ ID NO: 284837 - DNA, 122 bp, Homo sapiens
gctcagaactggatgcctgaggtgggcctctcaacaggcatcggctggaaggggtctgaacgcccagctctgccgccaaggtcaaggggaccggcatcaacgccaccgttcttccatgtctt

SEQ ID NO: 284838 - DNA, 122 bp, Homo sapiens
gctgcggaaagttggggcaacctgttgctagtctggtcgttggtgacagcgaggcttccgcgctcgctgctggtgagcagccccggcgtgccccgcgggctggaagaggcggcggcgtgatg

SEQ ID NO: 284839 - DNA, 122 bp, Homo sapiens
tacatggtcctaaggcagaaaggcagggagcaaggaacagcctcagagagatttttaaaccgaaagggaagcaattatcagacttacttggggcgaaggggctgttgctggtattttaaggt

SEQ ID NO: 284840 - DNA, 122 bp, Homo sapiens
ctgactcgggctgccgatctctgtgcctcaagatcctcaaggccatatgcaagtccaccccggctctgggccacctcactgccagccagctaaccaatgtcatcctccacttggcccaggag

SEQ ID NO: 284841 - DNA, 122 bp, Homo sapiens
cccataacccagctggagtaaaaagttcacgttcccgtgtggagtagataccaaaagtgacgtctctttctttctttaggtttggctgcgtaattggaaaaccaagctgcccgccaccttgc

SEQ ID NO: 284842 - DNA, 122 bp, Homo sapiens
aggccgcgcggccaacagttcccgccgccacgcgacggaggaggaggcagaagacggggccgtgccagactagccgggtagcctggaaccacttcgccaacctgcaaaggcgtagcacttct

SEQ ID NO: 284843 - DNA, 122 bp, Homo sapiens
ggaggaacgggggagggaggaggggacccttgctgccctgccagccatccacctgggccacgcagcttccgccatcgtggctcgttcacagttctcctccataggctgcgagccgcagagcc

SEQ ID NO: 284844 - DNA, 122 bp, Homo sapiens
ctcaggtgatccactcgccttgccctctcaaagtgcgaggattacaggtgtgagccaccacgctcggccaccttttggttttttgacagtcgccatcctaatgggtatgacatgctgtgtct

SEQ ID NO: 284845 - DNA, 122 bp, Homo sapiens
caagggaggcagtgctctcccaggactggagtgagcatttcttagcggcctcctctaaaacgcttgttttagaatctgtgccctgcattgctgtaagcagctcacaaacagtggtgcattta

SEQ ID NO: 284846 - DNA, 122 bp, Homo sapiens
tgcccgtcaaacagcgaccaatagtggcaggaaacaccctcggattcctgtgggagaggacgacagggaggagtgagaacggctgtggactttgcctcagggtcatacagattgtgggacat

SEQ ID NO: 284847 - DNA, 122 bp, Homo sapiens
tgaggggcttagcacccgggcctgcagctgcggagggtgcaccaggtcccccagcagtgccggcccgccggtgccgcactggaattctagccgggcctcagctgcctccccacggggcaggg

SEQ ID NO: 284848 - DNA, 122 bp, Homo sapiens
cccacctcagcgctcacctgggcggggctggcgctatccggtgcccacttggcctctgcccggccgcccaggatccctgccttccaccaggcctttgtgcgctcacccggtggagcacaaag

SEQ ID NO: 284849 - DNA, 122 bp, Homo sapiens
tggccccgcccaggccgcgcggggcccgctgggagttggagtcccttgcccacctcgccacgtcaccgactgcaaaccttcagctgtctcaggctcgggtgcaatccgtaccctcagtgggt

SEQ ID NO: 284850 - DNA, 122 bp, Homo sapiens
aggtgcccagacacttcctcttgttcagcctgcatatgcagctgtgtttctatttatgctcgggagccacaggctgctagagaagctggcacatactcactagggcatatctgaaccaacct

SEQ ID NO: 284851 - DNA, 122 bp, Homo sapiens
cctgtcccctcctgttccagatgtggtcactgaggtgtggggggacttgcctgagccccacgctggtgattgaagtgctgggctggagccaggtccctaatgcctggcaataacaccatgat

SEQ ID NO: 284852 - DNA, 122 bp, Homo sapiens
ggggtcaggccgaaccaccggtggccgggggtgggaggcggtgctccggcgagggccgggcgctgggtgcgagggggtcgccgggggccaccgttcggcactgggccgcagaccgttctgca

SEQ ID NO: 284853 - DNA, 122 bp, Homo sapiens
gtcagcaatcaagggtcccaccgagggctgcagatagttcttgaccttcacatgggaaggcgtcattgagttctgacactctggcaatcctctaggactcaactttctgataagctaataaa

SEQ ID NO: 284854 - DNA, 122 bp, Homo sapiens
cttaccctataaaatctctatgttccagtaactgtctctcttgcaaatgaggaattccttcgtccatgttcaactgctgttcgtttcctctgtttcgatttttggggctctgtacaataatc

SEQ ID NO: 284855 - DNA, 122 bp, Homo sapiens
tgctcagtgcgatgggaaactcgggctgggtctctgtggccaatgactcctgagcctcgccggcacgttttattcccggctgtccttccagtccggaagcctgaagtggacaccgaggaact

SEQ ID NO: 284856 - DNA, 122 bp, Homo sapiens
tcccctagtctgcaggcctggtgcccttgaattcacccgcttctgttgcgttgcggaccgcgagctgcactgcttcctgcccaagcccaagctcctcgcagcagtaggtcagtcttgctaga

SEQ ID NO: 284857 - DNA, 122 bp, Homo sapiens
gattgtatcccagcagacgcctgattcagcttccagtctgcgcaaaagcttaggagcaaccgttttctcctatcccaaccaagttgttacacctgggaagctgtgctgtgccgactgcaagg

SEQ ID NO: 284858 - DNA, 122 bp, Homo sapiens
aagcttgtaatcctagctgcttgggaagctgaggcacgagaatcacttgaacccgggaggcggacgttgcaaggagctgaaattgcgccactgcactccagactgggtgacagaccgagact

SEQ ID NO: 284859 - DNA, 122 bp, Homo sapiens
ttcattatacagggtttttactggggcttcagttcttaggtatgattgattgattgtccacgtgtttgaaatcagtcctaggttgactattaccttgtgacccaaagtcctgatcctaaaca

SEQ ID NO: 284860 - DNA, 122 bp, Homo sapiens
gggcaggcctgtcaggggccttccttgttccaatttttcagaggcccagcgctctccttccgcatcctgcccacctgcccagctgcaggcagcatggggagggggatggggtggggagaggg

SEQ ID NO: 284861 - DNA, 122 bp, Homo sapiens
cagacaatcctggctaacacagtgaaaccctgtctctactaaaaatacaaaaaaattagccgggtgcctgtagtccagtttaaatatgttttaaactggaggctgaggcaggagaatggcgt

SEQ ID NO: 284862 - DNA, 122 bp, Homo sapiens
ccagggacgcaaaggggtttgcgtccgtgcgtgggagcggcccaagggcagtgcccagcgcggcggcctggcctgtgagtgtagcggcgggtgaggggaagggaaaaatcgcttaggaagca

SEQ ID NO: 284863 - DNA, 122 bp, Homo sapiens
actattctagtttacaagtgtgtgtgtgtgtgtgtgtgtgtgtgtgtgcgcgcgcgcgcgcgcgccagatagaaagagagagattggaatagaataggtactactgcctctgtctgaaaact

SEQ ID NO: 284864 - DNA, 122 bp, Homo sapiens
tatgaaattatcccgattgttctgctcattggaacactgtttctgctttatagaatgagacgttgcccaattctagaatagcaggtaaaagttaattaagatctttaaactaaatttgttgt

SEQ ID NO: 284865 - DNA, 122 bp, Homo sapiens
cgcccaaggtcagcggccttgctgggcccaaagagactcgtgccagcgaatggagagggacgcacccagttcttctgagctgtgtgattggggtcaggcaaactggggagagaactccaggg

SEQ ID NO: 284866 - DNA, 122 bp, Homo sapiens
ctcttctgcaaccccaaatgactaatatgggtcattctggcgaccacgctgagatctgggcgttggtcctcccgtgttccctttcctgctcctcctgtgttcccttctctagggtgctcctc

SEQ ID NO: 284867 - DNA, 122 bp, Homo sapiens
gcaccgttgcacgccccacctcctcccaggggcgttgcactccagcccctcccgcacatgcgcactgggccttccaccgccccccgcccccagcaaagccccccgctcggagcatgcgcggg

SEQ ID NO: 284868 - DNA, 122 bp, Homo sapiens
cagcgggccgctcgcgcaccgcgccacgtgttttctcctcccgccaatgggcggaagcgccgcctgagcctgctcccgccccccaggctcgcctgagccaatcggaaggggcggggtgtgtg

SEQ ID NO: 284869 - DNA, 122 bp, Homo sapiens
caaaagatcaggacgactcgatctgggctggactccttctgcctgagcatctgatccgagcgtcggccgggctgggaggagccggcccccgggaaagatttcggactgggggacaggaaaac

SEQ ID NO: 284870 - DNA, 122 bp, Homo sapiens
tccacccgacccagccccaggaggaccagagcagggcccactgcagcagattcaggtggacggggcagaagtgagcagtgctgttggctgggagcgctgggggacagagaaagactcccgac

SEQ ID NO: 284871 - DNA, 122 bp, Homo sapiens
ttcccggctccttccagttggaaggccgcccccagtcctgagcggcgccgacaggtgcagcgcccgcctccagccctgcgctcgcgcgagcaacccgacgccctcccgccccgccggccgcg

SEQ ID NO: 284872 - DNA, 122 bp, Homo sapiens
attcttctgtctcagcctcaggtcaggctgatctcgaactcgagacctcaagtgatctgccgcctcaggtcaggctggtctcggactctcgacctcacatgatctgccgccttggcctccca

SEQ ID NO: 284873 - DNA, 122 bp, Homo sapiens
acgggggggttttagatcccctccctccactcctttcttcatttaagttaacaaaagaaacgtgggcttcctcagagccagcactcagctgggcaagtcccattagcagcaaatgttcaacc

SEQ ID NO: 284874 - DNA, 122 bp, Homo sapiens
ctctggcggggatgctgctgccgctgccattcctcgcagaatggcaggtcccggcggctccggaggcaactgtcctcagggggccccagctgactgagcaggtctgctaggtctgggaggca

SEQ ID NO: 284875 - DNA, 122 bp, Homo sapiens
ttacaggcgtgacccgccgcgcccggcctcagaatggtctctcgtcttctctagtttttccgcctaccaaaacagagggatcctttaaaacctggccgggcgcggtggctcacgcctatact

SEQ ID NO: 284876 - DNA, 122 bp, Homo sapiens
cgcgcggtatccccgcgtactgctcagtgcccaactccgacgggctctcaagtgccgcaacgccccgccccttgccacctccacacgtctcattggccagagcctgcgtccgcctcggctcc

SEQ ID NO: 284877 - DNA, 122 bp, Homo sapiens
aattcccctaggcttgctggaagatgggcctcaggactgtggcctcacactctgggactccggctttgatgctgaggagagggttgtcaggggtgggctcctgggtcgtggggctaggaggt

SEQ ID NO: 284878 - DNA, 122 bp, Homo sapiens
ttaaagagtttgtcgggggagggtgcggtcagctgaaagtttcagaggaactgggacacacgagctctgcgtgtcctttgcctgctgcccccctgacctctgggcgaatggaaagtggcgat

SEQ ID NO: 284879 - DNA, 122 bp, Homo sapiens
gtggcagcccgggacacaggctgctctgtgagctccccctcgcttccaggagttggtggtcgacacgctccggtcagtctgcttagaacagtttcttgcattgaatcggctggggctctttg

SEQ ID NO: 284880 - DNA, 122 bp, Homo sapiens
cgtcccgctgacctgtcagtccacctcacggcgggagccggcgggggctgagccgggactcgtcagcaccgctgcccctctcaggcccgggagcccgcgtacctggcagtcagtctttccgc

SEQ ID NO: 284881 - DNA, 122 bp, Homo sapiens
atatctttgatgactctttttccaaataaggtctcaattagaggttcctggaataagacacggactcatctccctgggggccaccattcagcctgatccggaaggaaggccatgatttcagc

SEQ ID NO: 284882 - DNA, 122 bp, Homo sapiens
tggttctcgcacctgccttaatggttttcctgtctcctctgttactgggcaatcagctgccgcttttttcagtgtgtgttttcttctcctagccttctccctctttccaatttgccatctgg

SEQ ID NO: 284883 - DNA, 122 bp, Homo sapiens
ccaccacaaggcgaagggcaagtaactatctgtactagtttgtggcagctcaagtaaaatcgagtccaaaccaacggctcttttcagggccacccacgtcttctctaaaagaacttaacatt

SEQ ID NO: 284884 - DNA, 122 bp, Homo sapiens
tcggtggcgcctgggcctttgaagattgctgggtgggggctggagagaggcagttgtccccgctaagaaagccccgactcgggcggtcgtcctgctggcataacctcttgggatagaccctg

SEQ ID NO: 284885 - DNA, 122 bp, Homo sapiens
agctacatgggaggctggcctgaggcaggagaatcacttcaacccgggaggtggaggttgcggtgagctgagatggcgcaattgcactccagcctaagcaacaagagcgaaactctgtctca

SEQ ID NO: 284886 - DNA, 122 bp, Homo sapiens
ttgacactggttgcctggaaggtaggggacgggcaggtatgggtttggtgtcccgtacagcgatcgctttgtgggtttagtacttggtgctgacaaataatggagtgagatccgaacataaa

SEQ ID NO: 284887 - DNA, 122 bp, Homo sapiens
gcaggtggccccatcccggatggtacctgtgtgtgaccatcacatgcgctctgagccccgcgcggtgcagcgggcagggaggtcacagggtgcctggctgattcccggggaggctgtgggcc

SEQ ID NO: 284888 - DNA, 122 bp, Homo sapiens
gtgtgtaaagtgcattggaaatgagggattgtcggcagtttctcctcctgttcctctgcccggctctttcgtctccctccagcgcaaagcaggggacaggcgagaagagggttaaagagcct

SEQ ID NO: 284889 - DNA, 122 bp, Homo sapiens
ttaattcagataatgaaaatatataacatattcggaaactccactggcagacttggcaggcgtttcatatttacttggacttaacatgaattggatttggttctctgatttccctgcctcca

SEQ ID NO: 284890 - DNA, 122 bp, Homo sapiens
cccaggaaagggccttaggagacactagtaggggtttctctggcagcaagagacacaccacgctgggtgtgtacttggaattcattcatggctgagctggggctgttttttccaggctctag

SEQ ID NO: 284891 - DNA, 122 bp, Homo sapiens
ttaaaactcccaaattttaatctcaaaacagacaattctctggttgggcatggtggctcacgcctgtaatcccagcattctgggagactgaggctggtggatcaattgaggttaggagttcc

SEQ ID NO: 284892 - DNA, 122 bp, Homo sapiens
agctggatctcgagtctgatgccggacagaagctgtcttaccttagaaacccaaagaagccggtggctgctcgctccttaggtggaggtgagttgtgctgcaggggtgggacaattcgccct

SEQ ID NO: 284893 - DNA, 122 bp, Homo sapiens
tcaccaactcgcatttttgaaaaagtgtcatgcggcagaacacttgttgccctactttaacgatccattccagtgacctgagggaactgatctcttcctcgactaaaatcttgttgtgcaat

SEQ ID NO: 284894 - DNA, 122 bp, Homo sapiens
tggctcacatctgttaatcccagcactttgggaggccgaggcgggcggatcacttgaggtcgagagttcgagaccagcctgaccgatatggagaaaccgcatctctactaaaaatacaaaaa

SEQ ID NO: 284895 - DNA, 122 bp, Homo sapiens
gggaagtctctgaagctgagcacagggtggactctgcccccaccgccgacccgccctccccgaccccgagtgaatggagaatagaaagggagaggatttctgttctgtcctgtgggccctca

SEQ ID NO: 284896 - DNA, 122 bp, Homo sapiens
tatctgacctccatgttagaatctggcctctgtaagcctatttcttcatctgtgaaaagccgcctacctcagtgtcagtgtaaagaacaaatcaaaaatactcagtgaaatgtagtgttata

SEQ ID NO: 284897 - DNA, 122 bp, Homo sapiens
agctcagccttcatggagacaatgtgcgtgcgcgcatgtgtgtgtcagagagagagagagcgagagatgcaggtgaggagagagtagacagataaataaacaagtagctattcgtgctatga

SEQ ID NO: 284898 - DNA, 122 bp, Homo sapiens
tctgatttgcacatgactggtaactgcaaaatctgagtgaccttttcatctccaatgaaacgccctgggaaaattgttttccttgcgctcatttcaaaacagtaactgctctacttcattta

SEQ ID NO: 284899 - DNA, 122 bp, Homo sapiens
gtctgtctgccctcccctagcttcaagtttctggagcccctcccttaactttcatgtctccgagatttctcatttcgaattctcaggctcgtctgacacatttccacttctttattcctact

SEQ ID NO: 284900 - DNA, 122 bp, Homo sapiens
gagggagggcgacgggggtgagaaaggggaggccgcctctgagcgggacgccgggactcccgccgctgctaaatatatccgtaggaatggagagggaccggatctcaggtacgcagacagcc

SEQ ID NO: 284901 - DNA, 122 bp, Homo sapiens
cgcatgattccatcaccaaacaatcagcagtactcattttttagtcctgtgcccctgaaacgatccttgaaaatctctaacccctgatccactggggaggctgatttgagtaataataaaca

SEQ ID NO: 284902 - DNA, 122 bp, Homo sapiens
ttaccttttttaggcaatatttatttattacatttatgactttggtagctaaaagttatacggtgctatttgggtgagatattatttaagagtttgatatatattatacacatattagcctg

SEQ ID NO: 284903 - DNA, 122 bp, Homo sapiens
acaggcagcttttagtcctttttcaattaaatgattgcattttgaggatcaaattccaaccgcaggcggaggcgccgagccccggacggtctctgggttcttggtgcactcggggctcctgc

SEQ ID NO: 284904 - DNA, 122 bp, Homo sapiens
ttactccttgtttcttcataattcctagtggagctgggtcaatttcaggcacagcccagccgagtcaggcgaggtccagaaaggcctgactcgcctggcagcctcaacggacttgtccccgc

SEQ ID NO: 284905 - DNA, 122 bp, Homo sapiens
agcagcattggacgatttttgctccttttccacagcctagtttcaaatggattgcaggcgcgtgcatgtggggagaagggttagtttgagaagaaagaaaagacacctagacaatctaagaa

SEQ ID NO: 284906 - DNA, 122 bp, Homo sapiens
ctcactgacttcaagcatgaagccgcagaccctcacagtgagggttacagttcttaaaggcggcgtgtccggagtttgttccttctaacgttcagatgtgttcggagttttttccttctggt

SEQ ID NO: 284907 - DNA, 122 bp, Homo sapiens
gtggatggcccagtaggggtaaaatcctagctttgttttacagttcttgccgtcatgaggcgagttgcttctctttgagggtaccagagggctccatccagtcaggcactgtttcccaagca

SEQ ID NO: 284908 - DNA, 122 bp, Homo sapiens
catcggcacgcgtccacctgcggaacctgtgtttcctggcgcaggagatggacagggccacgacagggctctgagaggctcatccctcagtggcaacagaaacaggcacaactggaagactt

SEQ ID NO: 284909 - DNA, 122 bp, Homo sapiens
accacgaggtatgaggagacacttgcggacgagggtcacagggccctggtgccctctatgcgctatttttcctttctaccgtctcccgccagtaaacctgccttgtccatttcaggacaatt

SEQ ID NO: 284910 - DNA, 122 bp, Homo sapiens
gactaggctgccaggcgcagcgacaccgggtcgcggtgcgagcggcgccccggctctcgccgagaggctcctgacagaaaaacgtgcgtggttgtccccacccctgggaggggttgccggtg

SEQ ID NO: 284911 - DNA, 122 bp, Homo sapiens
gggagagagagagagaagggaaaagagactagatggagatggagaggctgagaaaaagggcgtgagtgacagaaaatgcattcatcctgtctgctgtagcagaggccagaagtagcagccgg

SEQ ID NO: 284912 - DNA, 122 bp, Homo sapiens
tcacatccctgtcctctctcagcatccctcgcatgtagggtgctcaaaggttggggtcaccgccgggagcccaaatccgctgctgcctccctcgggctccctccactctggtcattcccctc

SEQ ID NO: 284913 - DNA, 122 bp, Homo sapiens
gagcgtgacccacgcctgttgcagaaggaagcctggagcggagggggtgggactaggatccgattccgggtcaagagctgccggcagccacttcctttgacgagtgactgtcaggccgttcc

SEQ ID NO: 284914 - DNA, 122 bp, Homo sapiens
gctgagcccctgtgggcctggctggaggcctcgggtaggatgctgaggcaagagccacagcggtccgagtccaagaaccacgtccagactcagcttaaggttccgaggtgaaaggcctggcc

SEQ ID NO: 284915 - DNA, 122 bp, Homo sapiens
tgctttggaagtgatgaaaatatcttggaactagacgctggtgatgtttgcacaacactgcgagtgcactaaaggctactgaactggatactttaaaatacttaattttatgttatatgaat

SEQ ID NO: 284916 - DNA, 122 bp, Homo sapiens
ccctaggagatgggacaaccaccttcttatcactcacttggactcttgactctggaacaccgatttctttagcaagttcttctctggaatcaatcccaggatatgggtttttcataaatgcc

SEQ ID NO: 284917 - DNA, 122 bp, Homo sapiens
atgttagcagtctaagatctgttctgagtaaagatgttccatccagagaaacactgatggcgagtaaaccacatgtccttaacatgcagtccaagagaactaaatcttctcctgccctgttt

SEQ ID NO: 284918 - DNA, 122 bp, Homo sapiens
ccctcagcggcggtggagcgtggactccggcgcctggcggggtaaggcccgcggcaagggcgctgcatccggacatcgctgcgtggtgcccagacgctggctcccgagaacgggcacgagcc

SEQ ID NO: 284919 - DNA, 122 bp, Homo sapiens
tcggagggccggagcgcggggcgaggattccatttacctccggggtctccgtgcagcaggcgttggagatcatcaaaggagcggatcgagtggtcactcagcatctcataaagctcctcggg

SEQ ID NO: 284920 - DNA, 122 bp, Homo sapiens
gtgcatccaccgcgatctcaggccccggcgtttgtggcagctctcggttaccatgggaaccgcactccgcagcctccctgggccccatctaatctgcgtgtgtgcgtggcggagaattctaa

SEQ ID NO: 284921 - DNA, 122 bp, Homo sapiens
ccataccaccgagtggtgaaatcatcagagctccctagtagatttcgttcttgaacttctcggccttggaatcagacgcccgggtcattgcgcagcggggccacaccccttagctccgggtt

SEQ ID NO: 284922 - DNA, 122 bp, Homo sapiens
caccagagacgccccgatgatgtgccaggcggaaggggtgagaccctgcccggccctggacggcaggatggtctggtgactccaccatcagcccctggagaaatccaggcacagctgacctg

SEQ ID NO: 284923 - DNA, 122 bp, Homo sapiens
caagccaacgtctcctgcaggcctcggacggccagggctctggctggcccccagagtcaccgtcctgtgatgaggcactccacaaaaggaaataccaacctcatgaagacagcggggactcc

SEQ ID NO: 284924 - DNA, 122 bp, Homo sapiens
tctcttctctctccaacccacatcactttcaccccccgccggccaaggctgcgtttccctcgcccccaccccagtcccccgcgttggtagtgggatcggtttggtattctgaggcttctctc

SEQ ID NO: 284925 - DNA, 122 bp, Homo sapiens
ccagctgtcgtctgcatggtggtttccacacagggcagtcggtgcttgtggaaggcgcagcgagttgtggcggcgccactgaaaccttgagacgtggcggcccctggttgccccttttcttg

SEQ ID NO: 284926 - DNA, 122 bp, Homo sapiens
ggagaaggggagacaatggtctgactcgtatatacagttttctggtccacaaatatcattcgctcaacaagacttttagtacagaatcaaaagcaatggtagaaaactatgatggtttttct

SEQ ID NO: 284927 - DNA, 122 bp, Homo sapiens
ctaccacagagtctcaatgaagccaaattaacgaaactttatgtatattatccccaaatgcggtgagggagtatttaaatgtaagacattcaaaatattgcccattttagtaacattcttca

SEQ ID NO: 284928 - DNA, 122 bp, Homo sapiens
ggaggcggtctcctttcttgcagccccgtctgggctgtgaggttcagaaccaggagggcccgagcacgaggcctcaccctgaggacagtggacggctcggagctgccaccccgacgcacatg

SEQ ID NO: 284929 - DNA, 122 bp, Homo sapiens
agggggcgccggcctggagaggacaatgtacagtctgttctaacacccacccactccaaacgcacacttcccaccccgtctcttgtccctcccagccccggggctagaccctgagggctcgg

SEQ ID NO: 284930 - DNA, 122 bp, Homo sapiens
agtgaggacgtagcctgctctgctgggaggtggctgcagggatgtggggaggatggagggcggggctgcgccagctcatctcgcctccacctgggctgagcctagtaggggtgagagggctc

SEQ ID NO: 284931 - DNA, 122 bp, Homo sapiens
ggcgcggggttacagcagtggacagacaggccagtccctgtcctcgaggagcccatgatccgcggggagacaggcatttaacgacgactcacacgatcacttaaatacaactgtggtgaacc

SEQ ID NO: 284932 - DNA, 122 bp, Homo sapiens
cggctttacattcacctcccgcttaggctgtccttccatgacttgttcctcaactattagcgtctgatgcgcatacttctggaactaagacacgggaagaaaaccccacggggacgattcag

SEQ ID NO: 284933 - DNA, 122 bp, Homo sapiens
ccgcaggaccctcggtctccacgctgaccccacacacccccgcaggaccctcggtctccacgctgaccccacacacccccacaggaccctcggtctccacgctgaccccacacatccccgca

SEQ ID NO: 284934 - DNA, 122 bp, Homo sapiens
gcctccgcctcccgcggtgactcaggcggcggtgacggcagcggagggggcgatgacgggcgcgcgggcgtccgcggcggagcagcgcagggcggggcgcagcgggcaggcaagggcggccg

SEQ ID NO: 284935 - DNA, 122 bp, Homo sapiens
cgcactctcccccggcttcctgcccggcgctcgctccagctggagcgctggccccgcccccgcggctttgtactcgacactcgcctctcgctgctctttgtactctagactctcaatggacc

SEQ ID NO: 284936 - DNA, 122 bp, Homo sapiens
tgtctggagacagccggctaaaaatgagagcagagctgggtgaatacatcagaagaatcacgaccgtgcctctgcccactgcgcccaacatacccattatcgattatgaggtgagcatgcag

SEQ ID NO: 284937 - DNA, 122 bp, Homo sapiens
cttatctcactacatgaaccactgctgtgggatttggggtctggttagggaagattaaagcggtgggtggtgcagcattctttgcttaaaacctaaaatacaactccttctgcattaaatac

SEQ ID NO: 284938 - DNA, 122 bp, Homo sapiens
cgggactcagcctcccgcctgcggcgtgcacgctcacagcaggtctcgtctttcccacgccgtgtgctctgcatggagcaggcagtgctggctgagctacagaccctgggccagtccgcctg

SEQ ID NO: 284939 - DNA, 122 bp, Homo sapiens
catggggctacattccagtgcctgactatagggaggcactcctgattccatggagcagcccggactttgagaatgggctctggtttgcggggggcaggcgtaccagactgcaagacccccca

SEQ ID NO: 284940 - DNA, 122 bp, Homo sapiens
cataactttcatcagattctcaaaaagagtctgtgtggaaacaatagacactggggactccgaaaggagggagggggcgaggacggcaaagcctgggaaacttcctactgggaactgtgttc

SEQ ID NO: 284941 - DNA, 122 bp, Homo sapiens
ctacaccctttgcttttctgccatttcatctgccgttgttgtgttggcagaaggatgaaacggccgagtgcagagaacaaagggatcaattctttgcttttgagtttcaaaactgtaggcct

SEQ ID NO: 284942 - DNA, 122 bp, Homo sapiens
atttacccagaggcatccagcagagtcccatgtatttccagatgtttctggttagaagttcgtataactttcagagaaaatgccctgccctcctggattctggcccagtttgaagagcaccc

SEQ ID NO: 284943 - DNA, 122 bp, Homo sapiens
aactacgaaaactcaggaccagccttggcaaaaggcaacatgtgtagccctaaattaccccggtactctagtgctcagccccacattgacaattgcacagaatttaagtgttctgagtttgt

SEQ ID NO: 284944 - DNA, 122 bp, Homo sapiens
tggccaaaagctccttgtgagtcacctttcttcagaggattttggcattcttcccctgctcgttcacaggtattagctgttcattcacatagccctgtaactttggagtgtgtgtttagtgg

SEQ ID NO: 284945 - DNA, 122 bp, Homo sapiens
gtctcctaaccctgtggcagcagcagcattccctgaatggatcgaaggctgccatggtgtcgtccgctgaattgctataggagtcagcccagggctgctcatgtgcacctcaggttgctgat

SEQ ID NO: 284946 - DNA, 122 bp, Homo sapiens
gataggaccctgtggaaatgaagcccgaagtggaagccagcaactgagcgcagtgacatccgccagtttctgctacgtggtaagggcagtatataaagataaagctcctccctgagaaaatc

SEQ ID NO: 284947 - DNA, 122 bp, Homo sapiens
ccttacagtgaggggagaaaaatgtcacttcctggcggacctgacaaccttagaacttttcggggagaagcttggcagggaggggacctggcagctgctcctgggcaggaaccagagggcaa

SEQ ID NO: 284948 - DNA, 122 bp, Homo sapiens
actctccggttaggaaaaacagctgacctgtttccgcccgggatcgaaccggggacctttcgcgtgtgaggcgaatgtgataaccgctacactacggaaaccggtaggcgtcagggttcttt

SEQ ID NO: 284949 - DNA, 122 bp, Homo sapiens
cattctaattattatgctcctgtcagctccaccactgggggtgcacaatcctagagtaatcggttccaaaaacaataccaccaccaccaacaaaaaaaccaaacaaaccaacaaacccaggg

SEQ ID NO: 284950 - DNA, 122 bp, Homo sapiens
ctcaatgtgggtggctccctattcctttacgctccccctatccctaccccacaagcctttcgattataaaatactaccaatcttgttataagattactgtggagtagtcaagtactccccgg

SEQ ID NO: 284951 - DNA, 122 bp, Homo sapiens
gttgaggcttaaggatgagtgctagaaatgacaaggcaagtaattgattccagttaaccgcgagagagcccaaaacccaggagagagctccgctccgggccggccagagccaccaccaagcg

SEQ ID NO: 284952 - DNA, 122 bp, Homo sapiens
cagaatggagtgctgtttagtgtgacctgttaccagcatgggctttctaatttgcaaggccgcgggcaaaacggacatgcagaaccttttgatcaaaaattttgaagaatttcagggtggtg

SEQ ID NO: 284953 - DNA, 122 bp, Homo sapiens
ccgaaccctccagaaccaggagagttccccgcaaggacctcgcgcaggaacgcccgggaccgcccaccgaagtcccaggctccccaggcagcagggcaggagaacaccacccccggcccgga

SEQ ID NO: 284954 - DNA, 122 bp, Homo sapiens
aggtggggcctttgtgagttgattatgtcatgaaggtgaagccctcatgaatggaattagcgtccttataagagacccctgggagatttctaactcctgccacatgagaacacagcgagagg

SEQ ID NO: 284955 - DNA, 122 bp, Homo sapiens
aatgtgatttttaaaatttaaatgaatctcaacttatatcacttgccattactattagtgcgataatcattgttcattctctcaggtttttctcaccagggcaaaaatggtgtaacaagatc

SEQ ID NO: 284956 - DNA, 122 bp, Homo sapiens
tttttttttttttctgttatatgtcctggttcttccataactgataaacttgatttataccgaggaggtgggaaagtgggcggggcagggtggactgacccgggatggggaagctcctctcg

SEQ ID NO: 284957 - DNA, 122 bp, Homo sapiens
gattcttcatattatgctcacatcctgatgtgtgtgccatctcacggtggttttctgttgcgtttccccagtgttgatggtgctaaacacctttccacgtgcttatttgccattcgcatatc

SEQ ID NO: 284958 - DNA, 122 bp, Homo sapiens
cacttgggaggggagtgtgcacactgtgtatactggagttgtacccatgctcactggaggcgttcttcccttaccagtccggtgtccttcgagggtcacatgtcagttaaactccgcaattt

SEQ ID NO: 284959 - DNA, 122 bp, Homo sapiens
cgcggtccccactcctggcacccaccgctttgctgaagttgacgtggatgaggttgctagcggcgtcccgcagaatcagcggctgccccaggttaaagtggcagtcctggtccacgcccgcc

SEQ ID NO: 284960 - DNA, 122 bp, Homo sapiens
gcactgccgctgggcgttctatctcaggtggtgtcccgtctacgctctcaagggtggccgcgcctgaacctttactcgtgaagagtgacacacaaaccaaggccaaactaaaaaacaaaata

SEQ ID NO: 284961 - DNA, 122 bp, Homo sapiens
gcaattcccctcgcctccagccgcgaggagctccccggcgccgcaggcagcgtcctcctccgaagcagctgcacctgcaactgggcagcctggaccctcgtgccctgttcccgggacctcgc

SEQ ID NO: 284962 - DNA, 122 bp, Homo sapiens
gtcctgaagggctcatcaaataagggaatcttgtttgctgggagtctttccagagaaatccgacagaggtcagtggatcctttgacgcttcccattgactttcctcagtgaagcgaaggaga

SEQ ID NO: 284963 - DNA, 122 bp, Homo sapiens
ctgtcagtagtgaaaaatagctggaaatcagacaaacaactttattgctgagattgtttccgggctaaaagttcttccaacagctgtttgttttggccattaacatgtccattctttttatt

SEQ ID NO: 284964 - DNA, 122 bp, Homo sapiens
gcttcctgtgttccatctgtctttctgccagtgcattcaccctccaggtttgaaagtagtcgggcaagaaagtactaaacatagagaaagggcaattccaaaagaacaaatgattgcttaat

SEQ ID NO: 284965 - DNA, 122 bp, Homo sapiens
tattttaagtatttctgacactaagtcttcgccacttgggcatatgtcacaggtagggtacgtctcagttcagactctggcccctggcaaccacgctggacagcacaggtcaccggtagcac

SEQ ID NO: 284966 - DNA, 122 bp, Homo sapiens
ttccgggtcatttaggcagctgcggagatcatagagatgaaggactccagaggatcgctccggtccgcctggcgtcacctcgcggacaggcggaggcgggacaggtgctgtgtctcttcgca

SEQ ID NO: 284967 - DNA, 122 bp, Homo sapiens
ttcactcgaccaatggcaaatcggaagtgggcgggacttcacaagtccggaccaaagaaacgcgagcttagccctgggtagcgcggccaatggccgtggagcagcccctgtaaactggctcg

SEQ ID NO: 284968 - DNA, 122 bp, Homo sapiens
cggcttccaggcctcgggctgggatctcagcccctgcctgtaggtgcggcccagagggtgcgacacgcgtcggagcggggcagcggaggaggggacagggacgcggcagccacacccgcatc

SEQ ID NO: 284969 - DNA, 122 bp, Homo sapiens
aaatccgaccgccaggctgcctcacacccctagtccgcctgctggaaagtgctgcagcgccggtcctgcccccagcggtgcagcgaggactcctgagcaccacccaggacttcggttacatt

SEQ ID NO: 284970 - DNA, 122 bp, Homo sapiens
gggtgggaggccggcggtgaagagcacttccggttggagcatagagcagctccgcggcgccgcgcccagaagggctccctcgggctcgtctaccagagagaggctccgcttggggccagagc

SEQ ID NO: 284971 - DNA, 122 bp, Homo sapiens
ctagaactttccgtggctgagcccaaggcccgggtgaaatgcttgacccgagagccctttcgatgggaaaccactgaagtggatcaaacaaaagaattcagagaaaagtagcttggactctt

SEQ ID NO: 284972 - DNA, 122 bp, Homo sapiens
aagctgtctctttctcccctcagacttcaagccccattgaggtggcccgccgggctggtgcggttcacacactcctgcagaaagcgcctggggtaggtgttagtgggcgcccgtccccaccc

SEQ ID NO: 284973 - DNA, 122 bp, Homo sapiens
agatgcgtcgtttataaggggagctgtgacaatcttcttgccagccctcttcctcccactcggctcctcttacggagtcctcattccaccccccttgtttccgcattcatcctgagtggctg

SEQ ID NO: 284974 - DNA, 122 bp, Homo sapiens
ttggtttgacccaagctattgcttttaagtttgtaacagcctacagttccccaaaagacacgtaataccacggaacaggtttatttcaccctggccactatatatcggcaaaacaactatat

SEQ ID NO: 284975 - DNA, 122 bp, Homo sapiens
atgataaaaagagcaaataaaataggagctggtccgctttcctgagacagtacagccccacgatttgggatgacaaaaccacgtcacagtctcagggagggccacaggagctccagcaccac

SEQ ID NO: 284976 - DNA, 122 bp, Homo sapiens
tggctaggtggggcgggacggagccgcggcggaggatggggcggggtttcatggggtaagcggggccgaaatagagcctgttatttactctggttcacaggcagcatgtctttggttttctg

SEQ ID NO: 284977 - DNA, 122 bp, Homo sapiens
gtattgaatgcacaggaaactcttacaggctacttatcaaacggagaaaaaaaatgagatcgggggaaagcggcatgtttttatgtattacttgtataattagttttttttttcttcgtgaa

SEQ ID NO: 284978 - DNA, 122 bp, Homo sapiens
cccaccaccctcggactatttgttcagccaatcagagcagccagccaccgggaagtgcctcggagactccgccccagaccagcgctgccgcttgccagccccccagttgaccccatagagca

SEQ ID NO: 284979 - DNA, 122 bp, Homo sapiens
tccccgggctgccagaagaggccaccactcggctggcagccgcgagcggcggccgaacctcggccccagactcgggcccccggcacgctcgcccgggagataccccttccccctcttgcgca

SEQ ID NO: 284980 - DNA, 122 bp, Homo sapiens
aggtgagatgattcttttcacatgggcctagtcatagtcatgatcccgaagtgctaaatgcgtattttatttatttattttgagatggagtctcactctgttacccaggctggagtgcagtg

SEQ ID NO: 284981 - DNA, 122 bp, Homo sapiens
tcgagagagcgccggcctagaggctcattatctatttattttaccaaacgcgaattgagacggactttgacaaaacacgaaatggtaatgtgaagctaagagcagagagtgaccaacagtaa

SEQ ID NO: 284982 - DNA, 122 bp, Homo sapiens
gggtgagaaggctcagaagccaccacagaggatggcggaggtgggagaggcctcgcaccgcggggctccaggagccaggtgaaggacaggcatttctgtatggcacccagttctgggtgggt

SEQ ID NO: 284983 - DNA, 122 bp, Homo sapiens
ccaggttggggctgggcacgaggccacagcaggggctggcaggtggtgacctctgctcctcgacctgggatgctccaggttgagacgtagggtagctgcagtcccagcaatgacaagctctg

SEQ ID NO: 284984 - DNA, 122 bp, Homo sapiens
aagccgggggcggctgtcgggggtggtgggtcccatgcaggagccctgctgctggtccagcgtggaggatgggggacaggaggtgcagtccctcggggagccgccgcggcaggtgtagcagg

SEQ ID NO: 284985 - DNA, 122 bp, Homo sapiens
ccgccgcgtccttgctctgcccgcgccgccaccgccgccgtctcccggggcccccgcgcacgctcctccgcgtgctctcgcctaccgctgccgaggaaactgacggagcccgagcgcggcgg

SEQ ID NO: 284986 - DNA, 122 bp, Homo sapiens
ggcaggaagggagggaggaaggtaggaaaagaggaagggagggaggaaagaaggcaagcacgcaggcagatgcctaaataaagaatacataggggcctggacaaataaattgctttatggac

SEQ ID NO: 284987 - DNA, 122 bp, Homo sapiens
cacaagatgggtgtgagcagcctgaaggtggcccggagggacctgtggttttcagaggcccggccattcccgagggtgtgacggtcagacctccaatccatcccaaacccaagcaaacacag

SEQ ID NO: 284988 - DNA, 122 bp, Homo sapiens
gcggcttcttccggtcggggcggagttgcgggcggggacggggcggggccaatctaggggcgtgttcggggcggagatgggggcgggccgagggcgtgccccgggcggggatgtgggagggg

SEQ ID NO: 284989 - DNA, 122 bp, Homo sapiens
ttgttctctcaaccccaccctccatgcctgaaggtgaccctgtggcaaatgcccttatggcgaggtggcagctttgccagaaacaccagaaaactctgggcctttgcagggcacccagagga

SEQ ID NO: 284990 - DNA, 122 bp, Homo sapiens
gagtatgcatagtgtagatggacatttgccacaacacactgcccgcagaaatggacttaccgtgaagccaataaagttcaagcttcagggatctctcttgcacgggccttgccaaggcccag

SEQ ID NO: 284991 - DNA, 122 bp, Homo sapiens
ggaacggccttggcgagggagcccgggccctccaggccacacctacggggctcctaaggccgggttctcgcccacagcagagaccctggccacgcatggccacctggcctccgggatgcgtc

SEQ ID NO: 284992 - DNA, 122 bp, Homo sapiens
gtaccacaatggagaattagtatctgcatcccagatcaagggcgggaggtagaacaagcgcgggggagaccaaggtttcactgaagtgccatggcaggaggaaaaagtagagtggggcttct

SEQ ID NO: 284993 - DNA, 122 bp, Homo sapiens
caccccgcctcctgccgcgcctgacactccgcagggcccgggggtgggtgggcaggggtgcgagggggcgtggggctgggcgcgccggcctggggggaaagccccgcctcccggatgtcgtc

SEQ ID NO: 284994 - DNA, 122 bp, Homo sapiens
tgtccaggagcaccccgccggccgccagcgcgtccaggtgcggcgtgcggatgcgggagccgtggaagccgacgtcgttccagcctaggtcgtctgccagcaagaagaccaggtggggcggc

SEQ ID NO: 284995 - DNA, 122 bp, Homo sapiens
gggctcagggaaccagcgctgcttctctccgaggctcgcggcctgagaaaccttccgctccgaatgcgggctggcctctccgggaagccttgaaactcaactcctgggtgggccaggaaggt

SEQ ID NO: 284996 - DNA, 122 bp, Homo sapiens
tcctggccttctgcctggcaggcttcagcttcgtcagggggcaggtaagtgtgagccagtcgcaggggcacacggcgtctgggccctgccggccagcggtgggaacagggagggactgacat

SEQ ID NO: 284997 - DNA, 122 bp, Homo sapiens
cttggtttccatggcaatttataaaagatggtggtttggtttcttcattggaacagatgacgtagtttgggtgttcaagtggccgcaagcaaactccgataagcctgtgtaacatgtaagcc

SEQ ID NO: 284998 - DNA, 122 bp, Homo sapiens
ctatccagaaatagaaaaattctttcccttcaatcctctaggtagtatcttttgcaattgcgaaaagtgcttttggcctttagtttcttagtattcagctcagctgtaacttgttatgaata

SEQ ID NO: 284999 - DNA, 122 bp, Homo sapiens
ccctgcccctccatgtcccccttcagcgagcagatcagccggcggcagtctcaggtggaccgcctgtacgtggcgctcaaggagctgggtgaggagcgccgggtggctctggaacagcagta

SEQ ID NO: 285000 - DNA, 122 bp, Homo sapiens
agagaggataatgttactcttcatatctcagggaatatacatgcaactgcgatatcggggcggggtggagagagagatattactccccatatcgaaggaagtgtacgcacccctgcgatatt

SEQ ID NO: 285001 - DNA, 122 bp, Homo sapiens
agtttcacacatggggaaaaaaatgatagccaagaatcgtcattaagtatcaaattaaagcgtgtggtaaattggaatagtgattgctatgtgctaagcaagcattgtcatatgtatcacaa

SEQ ID NO: 285002 - DNA, 122 bp, Homo sapiens
ctatttgttgttggtgtggtttctaggtgaccctaatgaaaatgtccaggaaattacatgcgatattcctgacagttccaagtctaacagctgcttattaggatagacatctgactttatct

SEQ ID NO: 285003 - DNA, 122 bp, Homo sapiens
cgtgcaagtgccaccgtaactggtgagagccgctggcaacccacccggagttgacaaccgcggagagacgcagacacccactgacctccaggaagctgagcgtggtggatggaactctacga

SEQ ID NO: 285004 - DNA, 122 bp, Homo sapiens
ttattctcactacactgtcatctctagctgcttgttttcactttccactgtcctttttttcgaagaagtcaaagcagtcagtagggaggggctggatggcacagcagcctttataattgctt

SEQ ID NO: 285005 - DNA, 122 bp, Homo sapiens
gtgatacaacttaacaggaatcatcgattcatccataaataatataaggaaaaacttatgcggtagcctgcattagggctttttgatacttgcagattgggggaaaacaacaaatgtcttga

SEQ ID NO: 285006 - DNA, 122 bp, Homo sapiens
tgagattcaaggaggtcatccctttagcagttgctctagccctggtatctacttgatattcgttggccaaacttactaagcattcattactgagctatcctgggtgtttaactctttgttag

SEQ ID NO: 285007 - DNA, 122 bp, Homo sapiens
tctcagctccccatccactgcttgttttcactgatcatacctcatatttgtttaatgcttcgatgatgttaatgataaccctgtaatatttgagtctaattttacagattaaaaaaaaaaaa

SEQ ID NO: 285008 - DNA, 122 bp, Homo sapiens
actgcgcaggcgcggaccaaagcgatctcttctgaggatccggcaagatggtgagtgttgcgatttggcgcgtctctgccgggcctatccggctccatccaacctctgaccgtctcgcgggg

SEQ ID NO: 285009 - DNA, 122 bp, Homo sapiens
gttggtatgggtgctaatacttaatacctgccgcatatgtaaggtttccttccacagttccgtctttcattatctttttagaaccaggacagttgttatgatcccctttttagaatgaggga

SEQ ID NO: 285010 - DNA, 122 bp, Homo sapiens
aactcctgagctcgagccatctgcctgcctcagcctcccagaatgctgggattacaggcacgagtgaccacaccaggctggaaatgtgttttaatcctggctattagcgcttcctgcaactt

SEQ ID NO: 285011 - DNA, 122 bp, Homo sapiens
tgtcccccatgtccctccgtgtccctccgtgtccccgtgtcccggggagccctacctgtacgggagagggcagcacgcaccctccgtgtcccccatgtccctctgtgtccctccgtgtccct

SEQ ID NO: 285012 - DNA, 122 bp, Homo sapiens
tgcagagttgcccccgccggcaggagacacttggctacttatcccccacctgccgtcagtcgctgtcaaggggctcccagggaccctgactgcccagcatgtctggcctggctggagggagt

SEQ ID NO: 285013 - DNA, 122 bp, Homo sapiens
cagcaaaaccccctcctgcacatccagggtacagggccttctgctggatttcacctgccccggcagccgactgcaccagcatcacagcctcctgccgacgatccctctgctgggaggctggg

SEQ ID NO: 285014 - DNA, 122 bp, Homo sapiens
aaaaagaattagtgtatctggacacaacacccagcatgtgctaggcagaaactaagtgtgcgaagcggatcccgatgtacaaaggggaaaacagcggctgggaaagcctgagccacgggctc

SEQ ID NO: 285015 - DNA, 122 bp, Homo sapiens
aagggatgttagtctcgagcccagtaattatttccgcagcacagaggttggtaacaaaaacggagggcggagttgcgcgtctttctttcagcactagaacgaaaggtacatttcccatccct

SEQ ID NO: 285016 - DNA, 122 bp, Homo sapiens
gtctgtcttccccagcctgtctgactccagagctcatgttcctaactgctctgactggcacgtcagtcagagctggagcgctgttgcttgctggcagagtggccagagtgtcagagtgtact

SEQ ID NO: 285017 - DNA, 122 bp, Homo sapiens
tttaggaggagaccaggcaggcatcttatctcagttggtctagacagtcaccaccttgtacgtgagtaattggcccataagctcttgtctgatgaggtgagatgttatcctgataatttaaa

SEQ ID NO: 285018 - DNA, 122 bp, Homo sapiens
ccctcttgctgcctggatctcgccggggcatttgagaagccctgtgttgggtcggagccccgggtctcgaggagggaggcgcgctgcggcgtgggggcccgcgactcggggtcctgggcttg

SEQ ID NO: 285019 - DNA, 122 bp, Homo sapiens
cccgtctccgatcgctccgcaaactccagagcgaggcacgcgcctttaaaggcaggtccgcggctctcccacgtcctggcgcccggttttccgcacccagtgtccccacagctgtgcccggg

SEQ ID NO: 285020 - DNA, 122 bp, Homo sapiens
ggggtgggagtgggggcggagccgggcagggggcggattccgcagcagcaactccccggacgcgcgcaggcctcaaagccccccagcttcagtgccccctcgaccctgaaacttggagcagg

SEQ ID NO: 285021 - DNA, 122 bp, Homo sapiens
atctcccccaagactcaaaggggcaggtctgcacagaggccaccctccgggttaagggaacgggctgagtggctctgagtggtcagatggggtcaaaatccccagcgaatctgggggcagcg

SEQ ID NO: 285022 - DNA, 122 bp, Homo sapiens
agagcaagactctgtcgcaaagaaaaaaaaaaaaaaagatcctgagttctggattctctccgtgggacatcctcttcagaggccatctaactcagtgctgctcagctgaactttctgcagtg

SEQ ID NO: 285023 - DNA, 122 bp, Homo sapiens
gacggtttccacaccaaatccagtgcggggttgggctggactagcacttcctctcagcctcgcagctcggctcgtgggtttgcgcccaggactttgcctctgggcctgttcacaaagcgttt

SEQ ID NO: 285024 - DNA, 122 bp, Homo sapiens
gacactcggaaactctcttctaacacttgcaaggtaccccttttacctataaaaggctctcgggccgcgagatcgccgtcagagcaaagccaggctactaccgcaggtaccaagacagtggc

SEQ ID NO: 285025 - DNA, 122 bp, Homo sapiens
ggtcaggatgaaatgggaccccgagcaggagatcccctccgcctgagttttgggattcagcgaggtgtggcgggggaaggggagacaaaatagagaaaacaggcagcaaatgagatgagact

SEQ ID NO: 285026 - DNA, 122 bp, Homo sapiens
gcccgcgcccatcctggagaactgcatctgcgcaggcccagagcgtcctcctggagcaggcgagccaggatggcgcctcctcgctcccagcaggcgcccccacgcggcccgtgcggaaccca

SEQ ID NO: 285027 - DNA, 122 bp, Homo sapiens
gtctctgctgtattaggggttgttcctgggtgcaaattaatatactgtcttttacatttccggaggttgttgacctggccttgaagatcagccaacagtttagaaaataagttgtgcaaatt

SEQ ID NO: 285028 - DNA, 122 bp, Homo sapiens
acacgccgaatcgcggttccgggaatttatctccgttgcaaccacacagcggccatttcccgactcaagaacgcgaggaaaaccatagagctaccttcgacgcgctagcacgtctccgtcac

SEQ ID NO: 285029 - DNA, 122 bp, Homo sapiens
ggagctgaaggagcagcaggccaggaaaggccctgctggaaagccactggagctgtgctgcgctggaaaggccattggaggtgctagaacgcaaaggggttgcagtggggacagacctgctc

SEQ ID NO: 285030 - DNA, 122 bp, Homo sapiens
gccttcggtgggcagcgcccgctccagcgtttccagcctcggctcccggggctcggccggcgcctacgctgacttcctcccgcccggcgcctgccccgcgcccgctcgctccccggagcctg

SEQ ID NO: 285031 - DNA, 122 bp, Homo sapiens
gccaacgggaggccccggtcggggagcgccccgggacaggcccctgtgcctcccgctttgcggagtgacgcaggccctgggctacagcaaccttaccagcccctccagcttagaggtggcag

SEQ ID NO: 285032 - DNA, 122 bp, Homo sapiens
gcctttgacacattctaacgtcctctgacacagcgtaaattattgtgctcaatagcttaacgtaaaaattgggtgttattattgaaggtcatgagaggatgaaatgggaggatgaacttttg

SEQ ID NO: 285033 - DNA, 122 bp, Homo sapiens
aaaaacagcgagattcaaaatcccccggcctcccggggccgcggtcctgcggggccacagcgccagcttccgcttcttgatggcttcggccccacccccaccatgggtaaactgaggcccgg

SEQ ID NO: 285034 - DNA, 122 bp, Homo sapiens
cggtcccggcggcggtccccttctctttggtgggcggattggtcaaagcttgcccgactccgggaattcaaaggggagctgcgggaggagggggacatcccttcttcaacccccgcctccaa

SEQ ID NO: 285035 - DNA, 122 bp, Homo sapiens
ccagaagtccaccgagctgctgatcagaaagctgccttttcagcgtctggtgcgtgagatcgcgcaggacttcaagaccgacttgcgcttccagagctccgcggtgatggcgctgcaagagg

SEQ ID NO: 285036 - DNA, 122 bp, Homo sapiens
gtgttccactgttggcctcctgcacttcctgagttctttctgacctttggatttttgaggcggcagcctgagctttcacaagagaggcagtgctttaaggcagccatttccaatagaaagaa

SEQ ID NO: 285037 - DNA, 122 bp, Homo sapiens
gaagggggacaagggggacttcggcctccctgcgggcgggagctaggccgctggaaagtccgctcgcctctcgccggcaagggatgacgccctgggccttttgtaccactcgccacggaaaa

SEQ ID NO: 285038 - DNA, 122 bp, Homo sapiens
tattgagggacgtaaaaacaagctacttgcccacgaccgaggtcgctcttttgccttgcccgctctcaccctggctctctgcagacagagcccgggagcgactttttggggggagtgggggt

SEQ ID NO: 285039 - DNA, 122 bp, Homo sapiens
aatgatttgatttattctttctgcacctctttttctttgttccttaacacctgagacaaccgtgaccacagcctccatgtaaattctaatccattgcccgtctagcggctgggtgacgccac

SEQ ID NO: 285040 - DNA, 122 bp, Homo sapiens
gtggccgggagctccggggctccaggagcctcatccctggcctcgtgccacctggtctggcgaggtttctcccagccgttcctgccggagcctctcgtcagtgccagtctggagcctgagaa

SEQ ID NO: 285041 - DNA, 122 bp, Homo sapiens
gcgggtaaaagccgggcccgtcgcggcacagcagcgtggtgctgcccgccttggaggcatcggccaccacgaagcagggttgcccttccagccacaggagctcggcgtcattgggccgcagc

SEQ ID NO: 285042 - DNA, 122 bp, Homo sapiens
cccggtgttgaaagctgcatgccgctgacaaagtagataaaaagctgggagtgtggaggacggttcgtctcactaaatgcctgtcagatccaaagcattctgtgaaccccaaattcgttccg

SEQ ID NO: 285043 - DNA, 122 bp, Homo sapiens
acaaggctgagtggtgcctggagtgtggatccacagggtatgaagacgcctccacagccacgcccgggcccagggcaaaaccagcacgttttgggcagtgcacagaatgcctgtgtcgtccc

SEQ ID NO: 285044 - DNA, 122 bp, Homo sapiens
gcctatccacatgctcccacccgtgcgggggcttggcgctggagggagtggcgtcagctccgcttctgagaagcacctcacatgcacagcatctgtgccagaagggctggcccggcaactcc

SEQ ID NO: 285045 - DNA, 122 bp, Homo sapiens
gtcccacagccaaccactaccggttcctctttcgtcagccaccggcgccggcaggacccgcgaatcccgatctccaggagcctgtaaggaggccgcccattggctcagccgcactgctgggc

SEQ ID NO: 285046 - DNA, 122 bp, Homo sapiens
cctcctggaccggaaagaaaggtacccgagccaggaggatgaggacctgcccccccggaacgagataggtatgggtccaggggtggcctccagcccggcctgcactgccccaccggggtccg

SEQ ID NO: 285047 - DNA, 122 bp, Homo sapiens
gcagcatcttctctgtctctgctgtgctgatgaccatccagttgaatcctgcgaggtggacggtggttgtgattctccacagtgtaggagaccacggtccgtgaggagcacagacctgccat

SEQ ID NO: 285048 - DNA, 122 bp, Homo sapiens
ggcagaagaatttgcagagcagatcagggcctacctggagggcacgtgcgtggagaggctcgcagacacctggagaacgggaaggagacgctgcagctcacgggtaccagggaacacaagac

SEQ ID NO: 285049 - DNA, 122 bp, Homo sapiens
taagcccctcactgcccagggctggtggggcccactgagtctgcgcccacctagaactcacgctggccagcccgggttcctgcccctctctctccctccacacctccccgcaagcagaggga

SEQ ID NO: 285050 - DNA, 122 bp, Homo sapiens
aggggaaaataaacacaccacaaacatgaacctcaaccccccgacatctgctcttcagatcgagggcaaaggcagccatattatggctagaaatgtaagctgctttctagtcaggcacaccc

SEQ ID NO: 285051 - DNA, 122 bp, Homo sapiens
cggccagggcgtggaagcggattctgaggcggctttctcctactgccctccgcttgccaacgcgggacccggagcccaacggcagcggcggtccttgggcctgtggagaggggttctctgtg

SEQ ID NO: 285052 - DNA, 122 bp, Homo sapiens
atgctttcttgtggtgtattagaacgtgcttggaaacagttctgatcccagacacgcaagcgtgagcccctccctcctgccttcctggcctgattttgcctggatgtgagaaaagtgatttc

SEQ ID NO: 285053 - DNA, 122 bp, Homo sapiens
catccggcccgtgacctactggctgcaggggacgtggacggggacgtgttcgtgtgagagcggggcagggccggggcgccgggtctggaagcttcccgggggtggacctgggaacaggagag

SEQ ID NO: 285054 - DNA, 122 bp, Homo sapiens
tagttctcaaattgcagtaagcatcaaactcgcctggggagtttgtttggacagctcaaacgcctggatctctcttttctgagtcaacaattcctgggtagaagcctggcatctacatttct

SEQ ID NO: 285055 - DNA, 122 bp, Homo sapiens
tggcatttagggatccctcctataaagaccaacttctgaccctggatgaggcttgagcaccgacctctgtctcttaagactgcatgacactctctcccttttctgggctgttccaactgttt

SEQ ID NO: 285056 - DNA, 122 bp, Homo sapiens
atgaaaagggctgctgccctggggcgtggatgctgggcctatggtgacaggcctgtgtgacggagggtggtgattcaacagggtcattcatgatgcctcttgtttagagggcaatgcgtgct

SEQ ID NO: 285057 - DNA, 122 bp, Homo sapiens
tactgatcaatcccctccccggctgatttgcgcatcaggtagtcgccgctctactctcaacggtggcgagctgcagttgccaagtgccccgtccccgttgccataacagcagtacacaaccc

SEQ ID NO: 285058 - DNA, 122 bp, Homo sapiens
tcacacagcatttcagcaaggatcctctctgctaaacttggactcaaagacattgaacaacggacccaaggtcatgcagaaaagtcagtactgagcctggaggatccttgagctcttcatct

SEQ ID NO: 285059 - DNA, 122 bp, Homo sapiens
ggaagttacacctggtgcagccctcggctctgatgcaaaagcagcttttgcccctggctgcgggacagcgctgtgactactcgcaacgggagagctgctgccagtcgccacaccgtgcggaa

SEQ ID NO: 285060 - DNA, 122 bp, Homo sapiens
cgtcgatccacataagctgggagcgcatagtcatcgctcttcacaacatttccgtgtgctcgtacagacaccaaggtggaaattgctcgcttgccaactaggctaactaccctggtagccaa

SEQ ID NO: 285061 - DNA, 122 bp, Homo sapiens
gccgctcggggtcctgggtggtgctattgtccacatggcccaagaaggctccctgcctttcggcgtaccctgccctgcccaccctgcccacatgaaggaagggaagcaaaaaggaagcatct

SEQ ID NO: 285062 - DNA, 122 bp, Homo sapiens
ggtcgggagctcacgcgcccactcacccgctcattcattcattgcgtggtcgggaggtcacgcgcccactcacccgctcattcattcattgcgtggtcgggagctcacaggcccactcacct

SEQ ID NO: 285063 - DNA, 122 bp, Homo sapiens
gtcggcctgattttggtgagcctctttctgcatcgctgcctggctcatgtggccggctgtcgatcgttttcaccgccgcggatccgctttgggtgtgtgaaggcctcgacggcgtgaggaga

SEQ ID NO: 285064 - DNA, 122 bp, Homo sapiens
gaagggacgcggtgcgcatgcgcgtgagggctgccgcgggtgggtggtatcgaggcctgtcgggtcagggcggttcgcgggtgctgtcagagctgggccggggcccctaggcagggtagccg

SEQ ID NO: 285065 - DNA, 122 bp, Homo sapiens
acaaagatttgaagctatgtgtgtatgtagtgggcggggggaaaggagggatggggaatgcggctaacgaattaagctccaaaccaccaaagggtagatgcaaatctcccacactccttccg

SEQ ID NO: 285066 - DNA, 122 bp, Homo sapiens
agtggtgatggaagcctctgatcattttctcttcttgtcctgtacaagacctgcgtgtgtcggggtacctgaatctggctgctgacttggcacacaacttcactgatggtctggccattggg

SEQ ID NO: 285067 - DNA, 122 bp, Homo sapiens
tccccgttttctgaatattgggagatattccacaccctggtcacactccctaacccagctcgctccaggcgtcccacgctcagcgttcagggtcacctccctgcaccctggccggccccgcc

SEQ ID NO: 285068 - DNA, 122 bp, Homo sapiens
ggagcggagacagtaccttcggagataatcctttctcctgccgcagtggagaggagcggccggagcgagacacttcgccgaggcacagcagccggcaggatggcgaccgtggtggtggaagc

SEQ ID NO: 285069 - DNA, 122 bp, Homo sapiens
ttcaaatcaaaacagaagagtttgtcctcattaagcgacagggcgcagccagtaggcagccgcgggaggggtgtcctcgtgtctggcacggtggagcggagcattgcatccgctcataaaca

SEQ ID NO: 285070 - DNA, 122 bp, Homo sapiens
tgggctcccctctgggcgtgagagtgagcacctgccatgtggtgggctcccctctgggtgcgggtgcttgccgcttctgggatcctctccagccgaaggaaccaggagcggggagagcctgg

SEQ ID NO: 285071 - DNA, 122 bp, Homo sapiens
ctggaggaggtgggctgagatctaggacctcccagtaggactcgtcagtgtagacagaagcgagcagggcagaccaggcaggcagcatttggtaggcaaagatgtaggggtgggaatggggt

SEQ ID NO: 285072 - DNA, 122 bp, Homo sapiens
ggcggcggctgggctgacctggagcctggagccccggggccgagggagctggcctgccagcggggcggaggaaagctagtgccagccctaccaggttccgcccccgcgcctgcccccctcct

SEQ ID NO: 285073 - DNA, 122 bp, Homo sapiens
gtgggaatttggaaagttccccaactagggacacacgtgacctccttcggaaagtagttccgactgtggcccgtgtatccttccacctccttttgaaccctcctaggtctcctcgccccgcc

SEQ ID NO: 285074 - DNA, 122 bp, Homo sapiens
ctcaagtcgtcctgcctggacgagcagaggcgggagctgggctgcctcgatgcctaccgccgccatgacctgtccctcatgagccatggctctcagtatggaatgcacccagatcaaagact

SEQ ID NO: 285075 - DNA, 122 bp, Homo sapiens
caataccaacagcacacacagtcacaaagggagccacgaggagctttatttatacatgaacgaaggtagatttccctcacatattacaaaatacacacaaacacacacacacacacacacac

SEQ ID NO: 285076 - DNA, 122 bp, Homo sapiens
gagagggataggcaggccccttgctgcgtgattctcgaaaacaaccaggatcccgcgatccgcttctcctatggctccagtccaaaggctggaatgggggcgtcacctgcaccaggcaactt

SEQ ID NO: 285077 - DNA, 122 bp, Homo sapiens
ttgctggagatgctgggagcaggcaggtccaacagaggtaacctggcttcctcctcgcagcgagaacacagcccaaataaagccagaatctgaccacctgacctccggcctgaccagagcca

SEQ ID NO: 285078 - DNA, 122 bp, Homo sapiens
tgtggcttgtagcagctgtcataccttagttcctcaggtaaaacttcaattttaacctcccgttgcattaataataaatcaacatgtgcacgtgacctttcagagcccaaaatgtgatcata

SEQ ID NO: 285079 - DNA, 122 bp, Homo sapiens
agcagtggctactttctgtgtctccctcaactgcccgctttgcagaggggatgatgcgggcgcgtacacccgagtgtggctgggaagaggacgcccgttgtgacgcgtgtagcggggtcata

SEQ ID NO: 285080 - DNA, 122 bp, Homo sapiens
taaagggaccacaggcacaagcttatccacatgagataatgtggtcctgcgtggtgaagccgaggttaaggtagctcagggcttagtgccattcccagtgcctgctgggaaggcccacaaat

SEQ ID NO: 285081 - DNA, 122 bp, Homo sapiens
tcaaaaattgtagagcacccagctatggtttgtagtttatggtctatggaagggatttgacggaaagatttttttaaggtgcacaatgaagaaaaccaaattcagtaattggttatgtacag

SEQ ID NO: 285082 - DNA, 122 bp, Homo sapiens
tttatgtattcaggggtggttgaggaccaggttctgtgccgaccgtcgagtggtggaagccgatgttgcatagggagttacaacccagtgtgggcgtctcctggaggaggttcaggggccac

SEQ ID NO: 285083 - DNA, 122 bp, Homo sapiens
cgacggaaacccgcccgctgcccagccgtaggcgcccgggcactacctcctttgtccacacgaccactgccaccaggaccccttgtgcggggcctgtgggagcttccctactcaggaggtct

SEQ ID NO: 285084 - DNA, 122 bp, Homo sapiens
tcctaactgaactgtgaagggccgaccttgaaagacagattttcaaagcacagggcagagcgaggactccctttttctgtttgtggagttacaatgacttggagccccatttcttcctttga

SEQ ID NO: 285085 - DNA, 122 bp, Homo sapiens
gatggaggcaacagtaaagacagacgtactcacaatacggattaattccactcttagtaacgtgtcctcctaaggaatgaacagtcactacaaattcattcattttggggatcaaatattta

SEQ ID NO: 285086 - DNA, 122 bp, Homo sapiens
ggctggtgtgtctgacccagctgtggtttttccaggcctgaaggccccggagtgcaccagcggcatgtacaaagagaccgtctactccgccttcaatctgctcatgcattacccacccccct

SEQ ID NO: 285087 - DNA, 122 bp, Homo sapiens
cgcagcggccggggggtgcgggcgccctcgccgcccggctacctaccgccgcctgggcgccgccgctgcctcccttccccgcttctaccctccagcagacgcccgccggagcgacccctccc

SEQ ID NO: 285088 - DNA, 122 bp, Homo sapiens
atgtttaaaattacactagattaaataatatgaaagtctggttttctcactgtccttgaacgcagtctgcttaagttgttaaaaaccatccagcaaaagctgtaggtgaagaagtgctactg

SEQ ID NO: 285089 - DNA, 122 bp, Homo sapiens
gcaggcaaggggattgagatcaatacattggatttcattttatagtttcctaggttttaacgaatgtatttggtacacaaagccctacttttaaagctatttccagtgtttaaggttttacc

SEQ ID NO: 285090 - DNA, 122 bp, Homo sapiens
tcacaaaaacttagaggcagagggtatgttaacctagattaagaatctctaggccgagtgcggtggctcactcctgtaatcgcagcactttgggaggccgaggtgggtggatcacctgaggt

SEQ ID NO: 285091 - DNA, 122 bp, Homo sapiens
tgtataataagttatgggaaacaaagagaaaatctaaaaatcaccatacctctttatgaacgttaattcccacgtgtgcaagattcagggtagctgtggtatattcttttattgtactattc

SEQ ID NO: 285092 - DNA, 122 bp, Homo sapiens
atgccgatcatcagagcagactgcatgcatgactcattcactcacaggctactactgcaccgcaacactcccctgagcgtgtgtgcagattaaagcgccccgagtgtcaggaactgcaacaa

SEQ ID NO: 285093 - DNA, 122 bp, Homo sapiens
acacacacactgcctgcccctatcaagggcacacagcaggtggcccagtgactagttgaacgcctactgcaagccaggcgctattacgcgatccactcgggaatcttggcacatactccact

SEQ ID NO: 285094 - DNA, 122 bp, Homo sapiens
tttaaggtggctttaaaatatctacatttgccatgaaagtgtgagcaagcaaactcccaccgggaaataatgctattcctagtcttgtggcccccggaagacttggagccaagggaggcagg

SEQ ID NO: 285095 - DNA, 122 bp, Homo sapiens
tcttgccctggcacccctccagctggggctcaaatgtcaccacctgggtgaggtctgccccgcctccccagccggaggcactgctggctcttcctctctttctccatcacagttatcacgcc

SEQ ID NO: 285096 - DNA, 122 bp, Homo sapiens
ggggggggggggcgacattccctaatgggaaaaaagacacaccttaaacgcagtagagggcgacattctctactagggaaaatgcggaagaacacagttgtaatcaacggtagcgtggccga

SEQ ID NO: 285097 - DNA, 122 bp, Homo sapiens
ggggagtgctgggcgctgatggcccccggcccgtgtctgccaaggcactgggacatcccacgctcctgcattctgtggcgcagacacaggatgtgggtggttcagcctgccgcccccacctt

SEQ ID NO: 285098 - DNA, 122 bp, Homo sapiens
accaggcctaatcacgccggccgaggctcaggggcgataaagcctcgcacctggtggccccgcccccggccaggccccgcccccggcccgggccaggaccctgagtccatgccccgccgccc

SEQ ID NO: 285099 - DNA, 122 bp, Homo sapiens
caggtgcgccgaggggcgcctccacggggagtgtgctccgcagagaaccccttgctggggcggctctgggcctcctgactcactcctggattttcccaagctgagtctggccccgcggtgat

SEQ ID NO: 285100 - DNA, 122 bp, Homo sapiens
gcacccgcaggggtgcccaggccgcacgccaaacgcgggcccgcgccggttacctggctgcgcgctcccgctctgcctcgcgattctccggaatcgtacctcttcgtgggctcgcgccagcg

SEQ ID NO: 285101 - DNA, 122 bp, Homo sapiens
gggccttgccgctgcctcccgggctggggcacgagtggctgcggagtgtgggtggttgggcgtgaggggccgacgggctcgcgcgcgcgccgtctgctgaggtccctcgggaaggaggagag

SEQ ID NO: 285102 - DNA, 122 bp, Homo sapiens
taatgtacttaaagcacataacacacttggcacattgagtgaccagaaatctaattgttacgatttagcacacactctgatagctgctgatatttagaggccagggattttacccacagctg

SEQ ID NO: 285103 - DNA, 122 bp, Homo sapiens
aaaatcacccttcaaatctttacctaaaagatcctgattagtaactaacgtggttcagcccgaaaaatgatcaactgattacttagcatttggaaccaactgtccacagttatagattgtac

SEQ ID NO: 285104 - DNA, 122 bp, Homo sapiens
gaaatattatcctcaaagccctaacactacagatgggccccgtgtctctgggtcctgccccgtatgcttggagaggggtttggcgactcagccatgccccagggggaggcttgccggcctgc

SEQ ID NO: 285105 - DNA, 122 bp, Homo sapiens
tacagtcccacagaaccgtcctcccaggaagctgaattcagcaagaacaatggaggccagcgggaagctcatttgcagacaaaggcaagtccttttttcctttctccttttgggcttatctc

SEQ ID NO: 285106 - DNA, 122 bp, Homo sapiens
aggtttgttttctgaccaggccgtgggtctaacaggagccccgaacctctgggtgggctccgtgtcgcttgcgtgcctcactcatctggcaccgtgaccgcgctccggccctgagccccact

SEQ ID NO: 285107 - DNA, 122 bp, Homo sapiens
ctgggctatggccccctcctctccgggggatcgtcgccttggtcccccgaccctaggagtcgggcagggcagaaccaggctaaagaaacgtccagcgtagcttcaaggatgcaccgcgtgat

SEQ ID NO: 285108 - DNA, 122 bp, Homo sapiens
gcccagtctttgccatccttgcccagccggtgtggtgcttgtgtgtcacagccttgtagccgggagtcgctgccgagtgggcgctcagttttcgggtcgtcatggctggctacgaatacgtg

SEQ ID NO: 285109 - DNA, 122 bp, Homo sapiens
tgagaatgaggaactgtccctgttttgttttcttttacccagtcaagtgtgtctcagctacgagtttgagcatatctgcttacagggaagcttgttgagtgtgtcagatatttttgggcctc

SEQ ID NO: 285110 - DNA, 122 bp, Homo sapiens
gtgaggtgtgctgagaaggaacaagttgtccgctttaacttgacaaggcacggcttcccccgcctcctacttgaagtattctagttgctgaaataaatgttcaggtgttttgggttttgtct

SEQ ID NO: 285111 - DNA, 122 bp, Homo sapiens
ctctggccccaaactccgccaccctgaccgtctccatgcctccggccccaggtgttctcccggcccggctgctcagccatacgcctccgaaatcatctgtgctttggtcattgctcctctct

SEQ ID NO: 285112 - DNA, 122 bp, Homo sapiens
cggagcgcagcggaggggagcgctggggggcggggagcgctcgggcagccaccctgtccccgtctggagccccgcgctgcgtctaggagggcgcaacacgcagtccccgcgggggccagagc

SEQ ID NO: 285113 - DNA, 122 bp, Homo sapiens
gcccgggaggaaggagagccgcagaggctgctggagaccgggagggcttctcctgcgacacgcagggtaggggtgtcgagggtggaaactgactccacacatcacagaacaccccgtgtcat

SEQ ID NO: 285114 - DNA, 122 bp, Homo sapiens
gccggcctcggtgtccgctcccgcccgccggcctgcgcgcaacttctgcccctcctgccccgagtccttaatggaagttgggtgagaaccgactcctgttcattcatgccctgcgtgacgtc

SEQ ID NO: 285115 - DNA, 122 bp, Homo sapiens
tttctgtgtgtgtcaccatgtctttgtgcttctgggtgcttctgtgtttgtttctggccgcgtttctgtgttggacaggggtgactttgtgccggatggcttctgtgtgagagcgcgcgcga

SEQ ID NO: 285116 - DNA, 122 bp, Homo sapiens
tctcgggtgggattggaggggacccgcggctgaggcgctgggctgcgacagggacatcaccgttctcctcctcagggagatggtgctcgtcgtgcacggcttcccgtcctccgtggccgccc

SEQ ID NO: 285117 - DNA, 122 bp, Homo sapiens
gacccatcgccattcttccctttagttcctggctttccttaagggcatcccctatccctgcggacacatctcagatgtgggtaaagagacaaggcgacccctgaaaggccctgacattgctt

SEQ ID NO: 285118 - DNA, 122 bp, Homo sapiens
tcaaaaaaaagttccgcagacatttgcgtcagtaaagcaaagagactgggcctggctccgcgggactcagtggtgcccgctggccctgccagctctgctgagtctgtgaggactggaaggct

SEQ ID NO: 285119 - DNA, 122 bp, Homo sapiens
agaagcgcgtgccctcagccgggggtcccccggtgctagccgagaaagcccgagttcccacggtgccccccaggccaggcagcagtctcagtagcagcatcgaaaacttggagtcggaggcc

SEQ ID NO: 285120 - DNA, 122 bp, Homo sapiens
taaaattttcactggaggaaccaaacatgagtcaacaggaaagacgcggcagcctgtgaccgtcagtactcagggacctgtggatcgtaaggagatatacacatgtcccagaagttgaagac

SEQ ID NO: 285121 - DNA, 122 bp, Homo sapiens
gaggagctgtccacccgtctgggttctgggtaaggcgggtcaggcctcattggtttccggcggccccaagggcgaggtagccagccaccaagccgtcgcaggaacatggctggggtgtgtaa

SEQ ID NO: 285122 - DNA, 122 bp, Homo sapiens
caccaggtgaccccgtgaagtgtgtgcttctgagagcaggggtcccccaagtgaagtgggcgatggcctccaccaccttgagagctcgtcatccactgtttttaacactgccttctgttttg

SEQ ID NO: 285123 - DNA, 122 bp, Homo sapiens
cggagcccggcgggcgtggggcgaggccaggcgtgcaggcgggagcagcgtgcagagcagcggccgggttttgctcccgcctcggagcccctggcccgggggagggggagaggccgctagcc

SEQ ID NO: 285124 - DNA, 122 bp, Homo sapiens
gtgggaggccggatccctgaccattgcccaaccactgtgagtaactcgggaggcactcgacgggggaggtgtctggggagggacttgcactgcacagacctcgtggagcttgggaaccagga

SEQ ID NO: 285125 - DNA, 122 bp, Homo sapiens
tggcgaatcacagagtggtggaatctattgcctttgtctgacaagtcatccatctcccggcgcggggagggggaggaggtctggagggggctttgcagcttttagagagacacacaccggga

SEQ ID NO: 285126 - DNA, 122 bp, Homo sapiens
tatcatttatgaattctttattgctattaaaaatggatgattggaaataattttcagctacggtatgcagttgtggactgttaagatgatagatataaaagtcctgagcatttataaagtgg

SEQ ID NO: 285127 - DNA, 122 bp, Homo sapiens
ggcttctgaagacgcagcgggtgtctctgatcccctaatccatttatccagagtcccgagcgcaatggctggtgcggggacacaacggcaggaggtggcgggggtggagggagaccgggcac

SEQ ID NO: 285128 - DNA, 122 bp, Homo sapiens
cctgcccatgggcatcctgcagagcccacccggtgctccacccccagcaccctggccattcgacattgcctgcggcgggagctgccagctttttggaattcctaatcgctcctggccccggt

SEQ ID NO: 285129 - DNA, 122 bp, Homo sapiens
ccaaagctcacctgggaggtagcaacctccttctcacctgccctctctcacccagaaccacgccggtacacctcacaggtgccaggaaggacccagttacacctggagcagcatgaaaaagc

SEQ ID NO: 285130 - DNA, 122 bp, Homo sapiens
ggggcgtaagggccccggtggtcctagggaccccatggccatggttgagcggccgaggcccgagtgggcctcgtatcacaactgcaacagcaacagctgccaggacctgggcaactctgtcc

SEQ ID NO: 285131 - DNA, 122 bp, Homo sapiens
gggtcgggcagcccccacgcagcactgagctatgaggtcaaagatgaggaggtgagtccacggggcagaatcagccgaagaacttaagcagaaaaggctggagcaaccagcgggcaatgaga

SEQ ID NO: 285132 - DNA, 122 bp, Homo sapiens
aaaggggaggaagagaagtcaatggttttaataagaaataaagcctatttctggttttctcgcatctacagaccaagagggcgctcttctcaagattacagtgaattccattccagaggatg

SEQ ID NO: 285133 - DNA, 122 bp, Homo sapiens
ccagcagccccgcagatccatttgtttattttcacagtggcattgcctgtctgtactacacgaaggagggagactcccttgcccctctgctctgcatgtgtaggccacttgctgctcaccac

SEQ ID NO: 285134 - DNA, 122 bp, Homo sapiens
ctgggttaccagagctccgccccacgcccttgcgtatatccggcgagcccagtgcgcaggcgcctcccaaagcctatctcgggtcctgagtctaagggagagaggttcctctgcaaggttca

SEQ ID NO: 285135 - DNA, 122 bp, Homo sapiens
cgtcctcatgatagactgcagcagataactttcctcgggtttctaaacaatgtctgttgtcgcaaataatgcaaattcacaaatattgaaattagtagtttaaatctatcaagactaagtga

SEQ ID NO: 285136 - DNA, 122 bp, Homo sapiens
cagatgctttgactctggatttggctcagaaaacaaaaacaacgaccaaaacgaaatgcccggggggcgggggggggcttttctgcctttcttcttctcagcctttccttctctttaatcat

SEQ ID NO: 285137 - DNA, 122 bp, Homo sapiens
actgctctgaatctctttgctttccaaagtaacaacatacacagaaacccatatgggggccgtggcggcgtcgggctggacgcattacagcgctccccaccaccggatcgcttccagggcgg

SEQ ID NO: 285138 - DNA, 122 bp, Homo sapiens
gcagccggatgtcggagccggagctgctccccacccggcctcgcccgcgggcgacaaaaccgtccctctggccacgggagagcatcgccttgccaaaatcaactcgcattttcatgtattca

SEQ ID NO: 285139 - DNA, 122 bp, Homo sapiens
gttaaacttggagagtctttttttccagtgctccagctccgctcgtggcccaacgtcatccgcttccttcagcagctgattgttttcagcaagaacctgcaaatgcgcggggaaaaacacga

SEQ ID NO: 285140 - DNA, 122 bp, Homo sapiens
gggaagcactacggggtctacgcctgcgacggctgctcaggttttttcaaacggagcatccgaaggaataggacctatgtctgcaaatctggaaaccaggtaccttagccagggctgcactg

SEQ ID NO: 285141 - DNA, 122 bp, Homo sapiens
tctttcagaaacataaacttattttctcgtgcttacccctgacgtgtgcttccaggaaagcgtgacaggccacaggcaaagtgcagtcacaacggggctttgcgccgagcaggaaaagtctg

SEQ ID NO: 285142 - DNA, 122 bp, Homo sapiens
gcatccccccatccttggctctggggtaggcccagggaggagacacccccaacccctatccggtctgtcctggagaaaagagactgcccttccatgcccctgagtgaggggcctggggccca

SEQ ID NO: 285143 - DNA, 122 bp, Homo sapiens
gccatgaactgactggaaactctgtgtgtgtatccgtgagtgcaagatacttagggaaagcgaagaagagcatgctgctacacaccactctggcttacgcttccagctaacagcggtttgtc

SEQ ID NO: 285144 - DNA, 122 bp, Homo sapiens
caaaaatgtgccagcctaagcaagtctattagatacccatgctcagcattatgaaagaaacgaaacagtacatcagccacttagttcttgaaacaatgcaacttaaagaaatgacagtatag

SEQ ID NO: 285145 - DNA, 122 bp, Homo sapiens
gtcagagtagatcaagcactccaattcctccttaacagatgggaaaactgagatccaaagcggtgacgtcttgtacttggcaaacgtagaattagaacccacttctgtgttggtcattcctg

SEQ ID NO: 285146 - DNA, 122 bp, Homo sapiens
aataaagtcaactggaagatgtggccaagtgggcaggctcacactttccccagacatccccgcctggttgctggcacagctgaacaacacaggcttctcagcaaaggcagggtcataggaag

SEQ ID NO: 285147 - DNA, 122 bp, Homo sapiens
caagcgcgtctccaccagcgggcacctccctcagcacggacccaccccttcgtcctagagcgcaggcatcacccaggggttggcgcccactccgtggctgctcagagggaaaaacttgggag

SEQ ID NO: 285148 - DNA, 122 bp, Homo sapiens
tgaaaggagaagctggcttttgccaggaatttaatactcacttaacctctttctttgcctcggtttatttttatgcctcactctattaatgaaaaagcatacttacaatctcccagctcttt

SEQ ID NO: 285149 - DNA, 122 bp, Homo sapiens
tagctgcttagtgttatttctgcgtctaactggatacggtagtcttctctcccaaattcccgggctacggaagagacgtaaaaaaatggaaaaaagagcacctagccgcgacttcttaagtc

SEQ ID NO: 285150 - DNA, 122 bp, Homo sapiens
taaaaacatgaggcaaaccaacagcattgtgctatctaagcctaaggaggatgctgtaagcgcaggtgcagaggaaaagaaccatggatgctgacaagaggaaatggcagattccgctaagg

SEQ ID NO: 285151 - DNA, 122 bp, Homo sapiens
atcctgcatgactgggtataaacgcctgtccgctgtgtgctggacagccccagacaccctcggcagcctgctgtgtttgtgtgagacatgctgtgttagggatttaagcatctccctactcg

SEQ ID NO: 285152 - DNA, 122 bp, Homo sapiens
cgccccggcggggactggggatgcacgtacacggagaagtcctggctgccaggccagcagcgctgctctgctccggagaaagcccgggctggcccgggccgcaggctcccggtggcttcaag

SEQ ID NO: 285153 - DNA, 122 bp, Homo sapiens
atgaggcgccttctctctggggctcccgcggtgtcctgggcctatctgtgcgtctctgcgcgctcaccccaggagatcacgcgtttcggttcatttctccgcacgggagctttgttgtgtta

SEQ ID NO: 285154 - DNA, 122 bp, Homo sapiens
tgggagcggctagtcgtgcgcgtgagccagcccaggtgggctaggaccttcaaaacggtgcgctgccggccagcgagcagtccaggtttcaatacacaggaaactacatctcccaggaagca

SEQ ID NO: 285155 - DNA, 122 bp, Homo sapiens
tcaacgaaaggaatagggcgagatcgattagtgaaaggagaccctttaatcccttagaggcggactctcccacttggctccagttcattggctccggagtttatcctcctggaagaacgtgg

SEQ ID NO: 285156 - DNA, 122 bp, Homo sapiens
cgacgcttcctgctccgcccctaagtcgggaaggttccttgcggttcgcggcgtgccggacgtgacaaacggaagccgcacgtctcactagtaccctcgcagacggacagcgccagggagca

SEQ ID NO: 285157 - DNA, 122 bp, Homo sapiens
ggggccgggacgtggttggggctgggactggggttggggctgggactggggcctggctggcgtccgccccctcccactcgttgctctccggccagcagcttgagcctgatcgagtgcggccc

SEQ ID NO: 285158 - DNA, 122 bp, Homo sapiens
ggtgtgggaaacggggaggggtttgaggaggggatcggaatgtggctcaagttcgggaggcgttacctgcggagggtttgaggcaggcccaagagcgagcccatggtcttccgacgcggggc

SEQ ID NO: 285159 - DNA, 122 bp, Homo sapiens
aggggaagtgctggagcaactcagataggaagttacatcctaagtttaagaccatgtcaccgtgtaacccagcaaatatgaaaaatacatataggagaactcttgagaaatatctaaaatat

SEQ ID NO: 285160 - DNA, 122 bp, Homo sapiens
accctaagaggagatcctgggcaggatgtgagaaatctgagcatcctctgtttggatggccgaagctgctggcatcaaactctggtctggaagaatcagtctgggggagagacagggatgga

SEQ ID NO: 285161 - DNA, 122 bp, Homo sapiens
acccatgtgccttaaagtggtaaagggactgggaaggctatggatggagaattcaaaacacggagtagaggttcatcagtttttaataaacccacgtgtcttattgcccaggtgggcactga

SEQ ID NO: 285162 - DNA, 122 bp, Homo sapiens
actcagagtctagtgggagagaagaatctataaagagttacaaaataatgtaatgaatgacgtaagagctgaatttacaagagattcattctttctgtttgatggtgctggagaaggttacc

SEQ ID NO: 285163 - DNA, 122 bp, Homo sapiens
tgctctctatagctgactgggaggttggaagcctgggctctagcccttgccttgatcctccggatctcattttcctcatctgcctaacaggacagaggggttggaaactgatgagattagct

SEQ ID NO: 285164 - DNA, 122 bp, Homo sapiens
aggctgctgctgcaggtgggtcccggcgcccgcgccgccccgcgcctccggcggtcgccccgcccctgcccgcccgctccgctccgctcgcattggcgctgcctgctgtctgtccccgcgcg

SEQ ID NO: 285165 - DNA, 122 bp, Homo sapiens
attttcccccttcttcgggaatttagccggtgaaatatagctgccagtgtcccaggtctgcgcgcgcgctcctgcaatatgctctcgatcaatcagatttgcataactaaactgtctgcgag

SEQ ID NO: 285166 - DNA, 122 bp, Homo sapiens
caggcagcagtgccgcaggcaggaatgctaggagtgtgcggggcttggagccagcacgcccgcccggcctccaggctcaggactccactcttggggcccagtctctgctctggcaagctgtt

SEQ ID NO: 285167 - DNA, 122 bp, Homo sapiens
atattttttaaacaaaacttcaactatttggcgtctgagcctctgtatcaggttggaatacgaatggggagagaggctgctgctagaagcaaccaacggagagcaacaagtaatagacaccg

SEQ ID NO: 285168 - DNA, 122 bp, Homo sapiens
tgctccgcgccacagccaggtccttgccgcgccctcaacccgccgcccgccgcccgccgccggcagactgtcctcacctgacagccacccgcacggagctctcgtccggggcgcccaacatg

SEQ ID NO: 285169 - DNA, 122 bp, Homo sapiens
gcaggccaaggttgagggcaaactaggggttgaggacgaacatcagacacaggccagggtcgggctcgggcgcggggcagggggcaggggcctcaccaggcgatcggcgcaggagaagtctt

SEQ ID NO: 285170 - DNA, 122 bp, Homo sapiens
tgctctgccttgctctgttggggctggggctggggctggggctggggccggggcagggaccgtggccggagctgaggctggggctcgggctggggccgcgctgcgggagctctggggagccg

SEQ ID NO: 285171 - DNA, 122 bp, Homo sapiens
caggccgccacagcgtgtctttgcatctctggatcccagccactagttgtgtctgatatccggcaggtttggggccacccagcaggagcctgcttgtggcagaaggcccaggcatctgtctc

SEQ ID NO: 285172 - DNA, 122 bp, Homo sapiens
tcagaaacaggagctgacaacctgctgggcacccgaagaccaagccccctgccagctcaccgtgcccagcctcctgcatcccctcgaagagcctggccagagagggaagacacagatgatga

SEQ ID NO: 285173 - DNA, 122 bp, Homo sapiens
gagagaaagaaccctcctgtgctgaaccacagggtgccgggtgaggggacctgcgcccgccgcagactaagccagtatttgaaaccgctatcatctgggtcctgtgcagcacttcctctctc

SEQ ID NO: 285174 - DNA, 122 bp, Homo sapiens
taaaatggaaatgattagtacctgtctcataaaacttgttgtgggatgggaagataaaggcgggtacaacgccccggacatcacctgacacagagttgaccctcggtaaatactgcttccct

SEQ ID NO: 285175 - DNA, 122 bp, Homo sapiens
gaaaaactgaagatacggaaacctgccccactcacacccatctgatggaggaactttaaacgctgttttctcagagcaagctatgcacctgggagttccttctcaaagatggagaatgattt

SEQ ID NO: 285176 - DNA, 122 bp, Homo sapiens
gcccagttatctgagaaaccccacagcctgtcccccgtccaggaagtctcagcgagctcacgccgcgcagtcgcagttttaatttatctgtaattcccgcgcttttccgttgccacggaaac

SEQ ID NO: 285177 - DNA, 122 bp, Homo sapiens
gatggccccgggccctggcgggaaggccgggccagagcctgggggcgggatgcggacgtccgcagggtcgccgcttcggttccagaggccacacggccgggcggggcgtgagggacagcccg

SEQ ID NO: 285178 - DNA, 122 bp, Homo sapiens
gggagaggcagccgcaccgctcagccgccgcggggtcaccgggcactggagctggccggacgcccatgctgggtgggcccctcaatggtctcctgagtctgtaccaggcagggtgaggaggg

SEQ ID NO: 285179 - DNA, 122 bp, Homo sapiens
aaacttttgctataaaggtcaacatagtaaatatttaggctttgtgggtcacatggtctccgttacaacctcactttgccattgtacaggacagcagccatagacaatacatgaaggaatga

SEQ ID NO: 285180 - DNA, 122 bp, Homo sapiens
cccccggccccggccccggccccgccccgtgcttgcagtttcctataagtagccggctctcggtgccagcctcagcctgacttcagcgctcccactctcggccgacacccctcatggccaac

SEQ ID NO: 285181 - DNA, 122 bp, Homo sapiens
gggacttcagttcagaggagcgggaggaatcagatggaactcctcttggattcgggtatacggcagtcactggggggcgaaccccggatttcctgtattagaagccgcctctagaatcgcgt

SEQ ID NO: 285182 - DNA, 122 bp, Homo sapiens
acgcggagggcgggggccagcccgggaagctcggggtgcggaggacgggctggggccgcacgggagcgcagggcagcaggggccgggctgcctcaggacgcctccctccctccctccctccc

SEQ ID NO: 285183 - DNA, 122 bp, Homo sapiens
cggcagaatggtacgctctgaaaactggatggttctaacgtaagcaagaaaaacggtgcgcgctgcagctctttaactggaacagcctctgctcggtctacctcgcccccaacagctgcgca

SEQ ID NO: 285184 - DNA, 122 bp, Homo sapiens
accaaatgtgacaagaaagttttttgtccaaggcagtttggaagagaagttggtgaccgtcgggataccacagccgccccaggacggcctggttgagacattcactggagggtctgggtgca

SEQ ID NO: 285185 - DNA, 122 bp, Homo sapiens
catccaaccgcagaagacgctccttggcaaccgcaccgtagggtaatgatgcaggaggaacgttgtccaaaacgtcagattttgaacaaaatgaccgtgaataatgtattcccaggcactgc

SEQ ID NO: 285186 - DNA, 122 bp, Homo sapiens
accttcgctccgggtcgtgggcggctgaggagcgaccgccgcaaggatcgcgagaagaggcggctccgacggagactcccgccccgcggactcggtggccccgcccctgcagaggctgattg

SEQ ID NO: 285187 - DNA, 122 bp, Homo sapiens
aaaccgtatccaatcagacacgcagaactgggaaccgtccaattaggcacacatttggagcggcgaggacggcttccgggatgtggctgggccattgtttctctctgctgccggagctccag

SEQ ID NO: 285188 - DNA, 122 bp, Homo sapiens
gatgctacaaaaaaacccaacccctccccaccgaaagacggcaatactcaggctaggagccgctgcactaggtgctagggacccactgaattttcaccagagcagtggcttggtcagatctc

SEQ ID NO: 285189 - DNA, 122 bp, Homo sapiens
gtttgagaggagtgccaaaggcatcaccacactccagtttgtttcctcttgttctgtcttcgtgagtgagccctctcaatgcatattcaacttcttttccattcaggaaactcttcttaaga

SEQ ID NO: 285190 - DNA, 122 bp, Homo sapiens
gtggatgcgcacgggccgcccacgccctcgctgccctcccggagcgtgggcgagtgattccgattgtgcagcagaaacccagggtctcacgggaacgaggaaacccgcccacgcccagcctc

SEQ ID NO: 285191 - DNA, 122 bp, Homo sapiens
cccaggctggattttgcagttcacgaactcttgagccatgcagatgggctgcgatctccccgggaagaatcctcagttgcaggtactgcttggggtattgagccacgataattactttaaat

SEQ ID NO: 285192 - DNA, 122 bp, Homo sapiens
gttgtcacctcccagcgccacgaaagattcaaacacattgtacagaacctgcagggaaaacgggcagggcgttgggtggtccttggttagtgccaccccctctccggggcccgggcctcgct

SEQ ID NO: 285193 - DNA, 122 bp, Homo sapiens
tggagaggggggtctggccacacggacgaaaggactgctgcccagatggggtcaaagaggcgtctgcctttgatggaagcccaggctccatctgaggcccagccccctctggctgtcctgag

SEQ ID NO: 285194 - DNA, 122 bp, Homo sapiens
cagggcgagtcaccacggtgactgaggccgcgcggggggcagggaaagggaggtgagggccgcaagacaggcccggatggggccgagacccccgctgtccctgtacataaagagaccgatgg

SEQ ID NO: 285195 - DNA, 122 bp, Homo sapiens
agtggccgtgaccgggagggggtcagtgccggcctcactgccggggatgggctccatctccggctcggcctcgccggcgcccccctccccgggggacgctgcagtcgctgccgcctctgcag

SEQ ID NO: 285196 - DNA, 122 bp, Homo sapiens
acaacccgatctttcgctaggagagattcgatccaggtctgcgccgcgaggcccccagctcgcctcttcctgcgaccctaaacttgggctttgattccccgccggtcgcggtggtccgggcc

SEQ ID NO: 285197 - DNA, 122 bp, Homo sapiens
accctaccaggaagagcgctcttttcctttttgaaaatgactctactcctttaaactgttcggattattgcctctaaaaggctggcctggcaccctgcctggcagcatctggagtctgaact

SEQ ID NO: 285198 - DNA, 122 bp, Homo sapiens
ggacgcagccaatccggtagcggaaagccggtggcctggagatttctggagccgccaatccggaggcgggggtgggcggtgcgaaggcggggacagcggggcttgcagggtccgcccggcgg

SEQ ID NO: 285199 - DNA, 122 bp, Homo sapiens
gccagcagccctatggagtgactggcaatagatataataagaatagattacatattattacgtacaataaacttttacggcttttacagattgaatagtccacatgttgcagaaatttaggt

SEQ ID NO: 285200 - DNA, 122 bp, Homo sapiens
taatttatgaaacaattttttttaagctttaggacttaagaacaattgttgtgtctcagccgtggcagttctgtcctatacgtctggcctaaactgtcttttcacagcttcctagctggggg

SEQ ID NO: 285201 - DNA, 122 bp, Homo sapiens
gtggggtgcccaggcaccccaccccggcccggggcgctcagacggcagcagactgctgggcggcgcggggactactttccaccgccccctcgcgccccgccccttgtcctcgcgcggcggaa

SEQ ID NO: 285202 - DNA, 122 bp, Homo sapiens
tctgcaggagtagccagaataaggtggcattccttggccgtcacaagtcccaggtcaaaacgtctccattcttcaatgttctaacaaaggtttctggccctgcagctcatgtctgtgtgatt

SEQ ID NO: 285203 - DNA, 122 bp, Homo sapiens
gagggcgggcggtcggtgcgggcgggcgcctcccggctgaggaggagcggcgcgggcgggcggggcgggctagtgtgtgtctctgtcagtctgatcttccagaggatgagtcagccacgcac

SEQ ID NO: 285204 - DNA, 122 bp, Homo sapiens
gagggcgaggggctagggcgatggaagggggagatcaagagtggcgcggcagggggagagcgccctgagcctcgctggagcccatcccggcatggctgctgggaccgacaggccgatcgcgg

SEQ ID NO: 285205 - DNA, 122 bp, Homo sapiens
cagccccagccaggcaggggttgcagccctgccggccagccccactgtcacgggcattcccggccgctggctgccgacggtcagccccagctgtcccgtcactcctccctgagctattttgg

SEQ ID NO: 285206 - DNA, 122 bp, Homo sapiens
gggacaattaaaactgggaaactatgaaacatggaacattttatcctacctgaaagtaaacgagtaattgtgaagcataagacactgaggctaatacaactctgtcttcatgtgttgactgc

SEQ ID NO: 285207 - DNA, 122 bp, Homo sapiens
gctggctcctggggccatcttttcaccctcctggcggggcgggggcgggggtatatctcccgaacgcaggtgaggggatcgcccgggcacttgccgccctctccagtgggaacactgggccg

SEQ ID NO: 285208 - DNA, 122 bp, Homo sapiens
actgcggtgcgactaggagtgaataatttaaaggggccgtgcctgcggagccgggcggaacgctagcggtgttggcgcggagtggaccccggctgcggcccctgggtgagtctgggtttccg

SEQ ID NO: 285209 - DNA, 122 bp, Homo sapiens
cctgtgtgccctgcagttctgcccgaggctcaactctcaagggcctgggaggggtgctgccggccaagagggtccaggacctcactggactgtgccccacagggagatcccgaagagcctgt

SEQ ID NO: 285210 - DNA, 122 bp, Homo sapiens
gggtggggcggcttcttgggcagcgccacacggcggcgcagtgatggatgttaacagcagcggccacccggacctctacgggcgcctctgctctttcctcctgccggaggtggggggcaggc

SEQ ID NO: 285211 - DNA, 122 bp, Homo sapiens
cccttagaagcccatgtgtagccccgtaaggacacccgctccccagccgctgctgggacacgtttaagagaagagacggcgggtgtgcgccaccaccttcaccacgtcgtgtctcgatcctg

SEQ ID NO: 285212 - DNA, 122 bp, Homo sapiens
ctcaattgctaccagctggcttcaagccactgttagctcttatcttactgtagtagcctccgagctggtctcctgtttctgacccagaccgggacaggatattgtcaacacagcagcccaca

SEQ ID NO: 285213 - DNA, 122 bp, Homo sapiens
cgcattgcgctctccccgccaccaggatgccagtgaccaagaaggatctggcggaggacgcgccgtggaagaagatccagcagaagacgttcacaagctggtgccacgagcacctcaagtgc

SEQ ID NO: 285214 - DNA, 122 bp, Homo sapiens
ggagtgataggaggtactctaccgacctgccttgaactccatactttaaaaaatatatgacgtttatcatttcctcttttactccacaatttatactcactgtagaaaatattaaaaatata

SEQ ID NO: 285215 - DNA, 122 bp, Homo sapiens
gaggccggggagagggtgttctctgccgggagccgaggcgaggctgctgggtactgtgtccggcttttatggctctgcagctcctaggatcgtggctcatgcaggtgttgtggattaatcta

SEQ ID NO: 285216 - DNA, 122 bp, Homo sapiens
ttccattttctctatgtgcttttcagcccatccttggagttgctctgtaagaaggactttcggagtgaaactccacagtgcggttcaaagacacgcttaggatgccccgggatggagagagg

SEQ ID NO: 285217 - DNA, 122 bp, Homo sapiens
cattttccaaaacaaaacccctcagagacagcggtgccgtcctacagtcgtggcaccctccgggcaggcccagcaggacagctggactcacacctgctgctggcgcaggccttgttctgccc

SEQ ID NO: 285218 - DNA, 122 bp, Homo sapiens
ggtaccgggaggaatcggcttgaaaggcgggaagggaggagtcacagaaactacgacttccgtcatgcaaggcgcgcgattccgagttccgggttggaatttaaatccccctacacagcttg

SEQ ID NO: 285219 - DNA, 122 bp, Homo sapiens
gtaagcaaggtggggtagcagggctggtgacttccttttttcagggaaattcataaatatcgttatttgagctgatttgagatggtgaacaaaatggacttaggtccattttggggctgttt

SEQ ID NO: 285220 - DNA, 122 bp, Homo sapiens
attccttccagtccaaaatactcaaatgcttttttctgcttttctttttgaactgccccacgaaccccaccagctgggtgtgtgggctccaggtgggagctcaagggggcctggtgtggtgg

SEQ ID NO: 285221 - DNA, 122 bp, Homo sapiens
gatgttcttaaagccccgcaggtgactcaggtgagcagcaaggttgagaacagcaagagccgatgctgggctttgcaggtgggtggctgctgatagtcttgcttcgttgtggttccccatga

SEQ ID NO: 285222 - DNA, 122 bp, Homo sapiens
tgtgacattcagtcaggcactgtcgtggagaagaattgggccctttctgttgaccgatgccggctgcagacattgcagtttttgatgcatctcattgatttgccgaacatacttctcagatg

SEQ ID NO: 285223 - DNA, 122 bp, Homo sapiens
tcttgcccatgtaccattcgggccctggtacagaggacacacaaagcctcactcagacggcggcctctccaccacgtggagaaacccccatgccagtgggtaccctgggactaaagtgcctg

SEQ ID NO: 285224 - DNA, 122 bp, Homo sapiens
acccacgaacttctgaaactggaagaccgttttttagcaaaggagaatactccagggccccgcccatttcatccttgactccaccttctccatgctgagtcccgccccgcttcctgtttatt

SEQ ID NO: 285225 - DNA, 122 bp, Homo sapiens
tgcttgtgtttccctcctcccacctgctttgactgaatgcctctggccccggagcctgcccggatggaatgagaatgccatggagccaccaccaatgaccaagtctgaaccggtttggaact

SEQ ID NO: 285226 - DNA, 122 bp, Homo sapiens
taaccccgctaggagagcttccccctacaccaggcacaacccgattctaaagaaatgctgcgcccgcgcctgcagatttcgccttctctctccagatccctctttgccttcctgccagccag

SEQ ID NO: 285227 - DNA, 122 bp, Homo sapiens
tccctccagctggcgagagttctttgcagtgaacctgatgcagagctggtcccctcccgccgtggcctgagtatttcttgacatctcagcccggtgtgggtcccctcaggcatgtctgtcct

SEQ ID NO: 285228 - DNA, 122 bp, Homo sapiens
caccctgcacgaccacgtgcgggaggaggcccagaagttcctgcggggcctgcaggtgaacgggagccggccgggcacctttgtaggggtccatgttcgccgaggggactatgtccatgtca

SEQ ID NO: 285229 - DNA, 122 bp, Homo sapiens
gcagcatgataaagcaagaggtggccatagctaactgtgaggctgagtgagtgcccacagcgagtcacagggtgaagcatcctgttgtcatgtttgcactgttgtcaagtgatcagtgatca

SEQ ID NO: 285230 - DNA, 122 bp, Homo sapiens
gaggatggctgctttcggttcctttatttccaggctcggggagcgaaataaaccagataacgtgtaaaagaaagcaaacaaacaaatgaaagaacggtgagggatccccaaaaggggaaacc

SEQ ID NO: 285231 - DNA, 122 bp, Homo sapiens
gaggtgctatgaagccaactgacaaagatgcatcacgtgtcttaggctgatgccactacccgatttgtttatttgcaatttgagccatttaaagaccaataaacttccttttttaaaatgtt

SEQ ID NO: 285232 - DNA, 122 bp, Homo sapiens
cggacagggcgatggcaggttcgccgggtgtgaggcttcacagcggtccggtgaccaagtcgaggtaagggtgatgtcggctcgcggatagcagaggagttccgggtgatcttgcctaacga

SEQ ID NO: 285233 - DNA, 122 bp, Homo sapiens
agggtggcggggaggggggcccggcatggctctgggtgaggaagtgggctggctgctccacgcacacgcactggcagcccgccgcccacgcggcccctccgcccgcccggtgtctcacagta

SEQ ID NO: 285234 - DNA, 122 bp, Homo sapiens
tcggttctccgtggaaaatcaaccagacccaaaacagaggtcccgggtttggggataccacgccgcgcgcctgagcatccgggctccatttctccaggcgacatctgcgggaagggagacct

SEQ ID NO: 285235 - DNA, 122 bp, Homo sapiens
tgggggccctccgggagttggggtaagggcctgatgctggccgcgaagccccatctccatcgggactgcttggtggagccgccttcttcaccgacgtcgctgttcctcggatctgggagcca

SEQ ID NO: 285236 - DNA, 122 bp, Homo sapiens
atctttgtcccaattcactaccctctgccaataagatctcaggatccttcttggtagtctcgacccccaaaattcttcccaagaactctacaaccagattctctatagtccagctctgaacc

SEQ ID NO: 285237 - DNA, 122 bp, Homo sapiens
ccacggagcgtgaaacggcatgtgaatgctgagtaattccgaggcctctgcgggacgtcacgtttccaaaagcgcgcgagccctgcccctccggcaagaggcaccatagaaatgtgtgctaa

SEQ ID NO: 285238 - DNA, 122 bp, Homo sapiens
acctgggcctacttccacttccggggtcaccagggaagagacgggaaggaaaagaaatagcggttggctgagaggcaagccaatccagctagggctgcgtcgactccaaggaggcggtccta

SEQ ID NO: 285239 - DNA, 122 bp, Homo sapiens
cacggtggggagtcactgtcattattcattgaactcaagcgctcctattttgggttttctcgttcggatttctgcgcgagcgagtgaggaagaactggacacccgggcggtgccctgcggct

SEQ ID NO: 285240 - DNA, 122 bp, Homo sapiens
tgtactaggctggcaaaagaatctggtgtcagttctagtggaattcagccctgcctctcacgggcccatgttgaagtaattggctctgcatggttgagaggctggctgtatgcccctgagct

SEQ ID NO: 285241 - DNA, 122 bp, Homo sapiens
ccttgccctcccaaagtgctgggattacagtcatgagccaccgcacctgtccggagcctgcgtttcttctaatatacagtggaggagagtaatttttgcattacctactttgcaggctctgg

SEQ ID NO: 285242 - DNA, 122 bp, Homo sapiens
gggtgaagagctgggcatggcggggaccgaagcctggcacggtgggcacgtggggcggtgcgtgaagagctgggcatggcggggaccaaagcctggcatggtgggcacgtggggcggtaggg

SEQ ID NO: 285243 - DNA, 122 bp, Homo sapiens
ccgtcgctaggaggtccgcgggccctgcggcaaccctcgctacagacgctgggcgggcggcgacacctggctcatggcccccgcggcggctccgtcctccttggccgtcagggcctcaagcc

SEQ ID NO: 285244 - DNA, 122 bp, Homo sapiens
acctatatgaccaaaagttcagagttgtcactattaaataaagcaaaagtcctaactttgcggaagaaacagccactgccaaacttcagtattacaaagttgttgggagttgtttttaaaat

SEQ ID NO: 285245 - DNA, 122 bp, Homo sapiens
ctggactaccaggtggggttatctcattcagggcacaggctctacgtctccagtgctgagcgatctgcactggggtggcagtccgagatccagcggtatcaccgggtgggagcagggtgggg

SEQ ID NO: 285246 - DNA, 122 bp, Homo sapiens
atagtacatgttcagttaatgtctactgaagaaattactgagttatcacctgcctgctttcggtgggcaataaattgatggcactaccatggtccaagccctattgtatgtcatgtttattt

SEQ ID NO: 285247 - DNA, 122 bp, Homo sapiens
aattaactctgccactgtagcatgaaagcacccatagagagcatgtaaatgggccgggtgcggtggctcatgcctgtaatcccagcactttgggaggccaaggcgggcaaatcacgaggtca

SEQ ID NO: 285248 - DNA, 122 bp, Homo sapiens
aaggagagggggtggggcaaggcttggttgtcatggagacagcggacgaccctggcgggccgttctagcacccatgtctctttggccgtcgcctctccggtccggttgcctctctatggtcg

SEQ ID NO: 285249 - DNA, 122 bp, Homo sapiens
gataggaaaaaacaaatcaaaacctgaaaatctgactacatgttaacacaggtaaaatctcgatgatacatgggtgtcatctttattatttatagattattctattactctccgaacctctc

SEQ ID NO: 285250 - DNA, 122 bp, Homo sapiens
tagcatggtccgctggcttagtgcaggcaaacgggtctgggtcaaagtgcaaggcttccacgcggagttaacacagctgcatccaagtgactcaacctctctgagcctcagtttcttcatct

SEQ ID NO: 285251 - DNA, 122 bp, Homo sapiens
gggcctcggcgcccacacaagatttccccggagagaaatgtgtcctgtaccttgttgactcgcacgtccaagtcgagtccctggttttaaaagtgccgtcctgtaccatgttggtaagccag

SEQ ID NO: 285252 - DNA, 122 bp, Homo sapiens
agaactcacagacaagtaaaccagccagcggagtacagatgctgatgaaggtcagaagagcggcacccagtgcagcatggcagggtgtgaggggccactcagggaagaccctcagagaaggt

SEQ ID NO: 285253 - DNA, 122 bp, Homo sapiens
agtcctgcctgtgcctctgctgccttgggaagagaaggggtcccggaggaactcacagagcggtggaaggcatcaaagaacctcagctcctcaaacacagtgcccgctgcctccctgcttcc

SEQ ID NO: 285254 - DNA, 122 bp, Homo sapiens
ccggccgcttgtctgcctgagcttaaattccagtttcacaaatgttccagctgggaaggacgtatccaccgcgccgtccacaccgttctcccggaaggcccatgccggggagggtgcattcc

SEQ ID NO: 285255 - DNA, 122 bp, Homo sapiens
tgagacccccttccgttccctggcactccctgccccgcacccgggccccgcacctgctgccgcagcagctcccgcacgtcctgcagcgccgcgttggtttcctgcagttcccgaagcatctg

SEQ ID NO: 285256 - DNA, 122 bp, Homo sapiens
catcactaagaaccaaagcccagattgcagatagtcaggcacacctgactccaggctagacgagggggcttggatgatcctttggtaacatcactgtctggttctcatggtcttgattttcc

SEQ ID NO: 285257 - DNA, 122 bp, Homo sapiens
gtatccttcaatatgtaaatgtggtcatttcttatgtaaatgtggtcatgtgcgcacgcacgcacacacacacacacacacacacacacacacacagagttttgacttcaatgtaatgcaaa

SEQ ID NO: 285258 - DNA, 122 bp, Homo sapiens
tcatccgtctgaaccatcagctcgctgtatgactcccacagaacaggggcccagaacatccgggctgtggctccttggcccccgctgtgccctggcttagagcagcgcctggcacagaggtg

SEQ ID NO: 285259 - DNA, 122 bp, Homo sapiens
tgttttaagcaaaaaaagaaaaaataatctatatatctctaggtgtacttgccaaagcaccgtaataattctggtaagataggcaagaaattggtgatggtaacccgaggagaaaaacagta

SEQ ID NO: 285260 - DNA, 122 bp, Homo sapiens
gatcatggttggcagcggaggcgttggcaagtcagccctgacgcttcagttcatgtatgacgaggtaagccctgctaggcacagaccaccttcctttggcattggccgtagcagtgtccctg

SEQ ID NO: 285261 - DNA, 122 bp, Homo sapiens
ttttgcctccctcctgtaactacaggatgtacggacgtaaatatccacacatgtacataccgcatacacaacatgtatttttaaaattctctcaggttttccacttcagtacctactttgta

SEQ ID NO: 285262 - DNA, 122 bp, Homo sapiens
ggcttctacacagcagccggagatcagctttgctgcatttggtccaggttggagcatctccgcagcagctgcaacagccgcacgaaggtagctccgggcggggagcgaggcgctgtcctcgg

SEQ ID NO: 285263 - DNA, 122 bp, Homo sapiens
gtgctgggaagtggccagctcctcctcctggggcagccaggccttccggatctgtgggggcggggccggccctttccccccacccctagtgacacaggcccggaggaatgtcctagcctcaa

SEQ ID NO: 285264 - DNA, 122 bp, Homo sapiens
gattcttagtcaaggggagattttacattcaaagaaaatggaaaatccccctgctttgctcggagggaagaactgcacttaaaagtttgatgtgtattggtgtcgtcttctaggcatttctt

SEQ ID NO: 285265 - DNA, 122 bp, Homo sapiens
tcactggtcccagagacagctgatcagtccatccagcctggcctggtgtcctggtccacacggggtacagacctccaaggctgccgggggcaggtgtatggctctgtgttcccacgtcccaa

SEQ ID NO: 285266 - DNA, 122 bp, Homo sapiens
ctcaggtgatctgcccacctcggcctcccaaagtgctgggattacaggtgtgggccaccacgcctggcccgaagcaactttctatgacacgcctaccagtgtgccatgtcagtttgccattg

SEQ ID NO: 285267 - DNA, 122 bp, Homo sapiens
gcgtggtgacgagcggagtcctttgaggtatggcaggaggaggacatgcgttcgaattcgcgagaaaacttatttaaaagaaaaagaaacaagttttccgggccctgctgcagacttacctc

SEQ ID NO: 285268 - DNA, 122 bp, Homo sapiens
gacgtactacattgccgtcatctgggaagacgacgtgtagaaggtgtgattgcgggaacccgggcagaaaagaggtgctcttcctcggaggccgtgactgggccggccaacatttttcctcc

SEQ ID NO: 285269 - DNA, 122 bp, Homo sapiens
ctttggggactttaagctctaagcaatagtaccttattgttaaccagtttaaagaagatccgaaaagtagtgccaaagggcaaccaaataattttagtgaatatttgcatagtgcattaatt

SEQ ID NO: 285270 - DNA, 122 bp, Homo sapiens
gcagttactggagtaggaagaggcctcggagaatccctggaagcatctacctaaaagacgcgaggaaacccccaaaggccacaggcacctgcaccaaaccctgagtgccgcaggaagctcgc

SEQ ID NO: 285271 - DNA, 122 bp, Homo sapiens
aggagttctgagaagcattgctcaggacagcggtaaatcacttcttggaggtgccctgcacgccggtcctgggagcaggcggcctcccgggggtgcgggagccccactcctccgtggtgtgt

SEQ ID NO: 285272 - DNA, 122 bp, Homo sapiens
atgtgcaccagaaatgcaaagtctgagccctctccgggctctgcacacctttccgccttgcgccattggcaccggaaatgctaagtctgagccctctccgggctctgcacaccttcccaccc

SEQ ID NO: 285273 - DNA, 122 bp, Homo sapiens
tcagagttcagccacatgaatgccataggaaaagcagttaataacaaccatgacaccagccggcatttgtagaaggcaccttctgttccaggctgtgctaagtgcttttatgggctccaggt

SEQ ID NO: 285274 - DNA, 122 bp, Homo sapiens
gcttggggccagctgttacccgcgctcgccctggcatgcagccctctggtgtctcagctgcgctgatgggtgcccaccccgcggtgcttctccaggccccaggcgtttcctttggtctctgt

SEQ ID NO: 285275 - DNA, 122 bp, Homo sapiens
gccgctctccctccctccacacccgccagtgtgctggcagagtggggtttactgccatggcggggagaccgggcctccgcccccagggctgggtgggcttcgcgccgctatcacgcggtaga

SEQ ID NO: 285276 - DNA, 122 bp, Homo sapiens
gtcctgtgccaaagtaaccagagcagaggccagccttggtgctcccttccgctcccgttccggagggctggctggctgatagctgaatccctcagatgaagtcatctgttttggtgccaggg

SEQ ID NO: 285277 - DNA, 122 bp, Homo sapiens
cagacggggtggctgggcaaaggtgctcctcacttcccagacggggcggccggacagaggcgctcctcacatcccatacggggcggctgggcagagacactcctcacttcccagacggggcg

SEQ ID NO: 285278 - DNA, 122 bp, Homo sapiens
gcggggccgtgatgcgaagggctctcctgctgggtgaagtctcctcgtggcgttggcggtcgggcagttactccgccatcagccccagaggctcggcagagtctcctgagctcccggaaggg

SEQ ID NO: 285279 - DNA, 122 bp, Homo sapiens
ctggtctttggcagagatgcctctgtgccctctgtcttccggggacgctctcacacctaccgctttggctgggactataagatgggcagctgttgaggcccactaggggtgctgtggggcag

SEQ ID NO: 285280 - DNA, 122 bp, Homo sapiens
gacagcgtccctggtactggagctgaggtctgggcttaaggctgccgcaaaagcggcagccgcatctttcccattcctgccagcctgcggtgagaaaggggcgcaggctgtcctgactcctc

SEQ ID NO: 285281 - DNA, 122 bp, Homo sapiens
cagcaacgccctttctatacaagccgcagctgcacaaaggcaagtcccacctcctctaaccgcccttgggctacctgcccttggggtgggacttggactccactgagggctgtgctgtgagg

SEQ ID NO: 285282 - DNA, 122 bp, Homo sapiens
aggctcagctcaaaccctgagagtctggctccaaacagctccaggcaagaaaatgaagctcggaggggaactcaggagggaaggattggggttgggaaggtggtgcgactggggagggaggg

SEQ ID NO: 285283 - DNA, 122 bp, Homo sapiens
aggggaagtaatgatcagagacagggccagctgctcagcccctgcatgctcaggtgcatgcgtatataccctcacatagggcagggtggggtgggaagcccaccttggccgtgacgctcagc

SEQ ID NO: 285284 - DNA, 122 bp, Homo sapiens
ccgggctccggctgcttggcggcggcgcccagggcaacaaccgggccgcccgcgccggggcgcactgcaccagcggcttcggcttggtggatgtgtatgcatgagttctgcaccgaatgggc

SEQ ID NO: 285285 - DNA, 122 bp, Homo sapiens
aacccctcagattcctccgtggaagaactgtggctccaccagatcccaaaaagcaaggcccgtttcctacaacccccgaaggagggtcgtcctcactccgccgccaacctactagcaccatc

SEQ ID NO: 285286 - DNA, 122 bp, Homo sapiens
tactcgggaggctgagggatgagaatcacttgaacccagaaggtggaagttgcagtgagccgagatcgcgtcaaaaaaaaagagtgcatacaaattgacaagaaatgcactcctccctccca

SEQ ID NO: 285287 - DNA, 122 bp, Homo sapiens
gcttgcagttcctccagcaggttaccagttagcctggcttctcgtgcaggtcaccgccgccggctcgttcctcaggtttccgcgatacaaaaaggacgagatggtctcgaagtcttagctcc

SEQ ID NO: 285288 - DNA, 122 bp, Homo sapiens
cattttccggacaagcttggaactgttgaaatgtaactatgtaattggagacaccggggtcgtgtctgggagattctgagctcatctacactcttgctaaactgcggggaacccagccctgg

SEQ ID NO: 285289 - DNA, 122 bp, Homo sapiens
ggctcctgggtaaggactgtccaggtgacctcgagtccctccttgcagtacctggagatgcgcttcagccgcgcagtgcggctctgcgggactttgcagtacattgtagccacggtgagtgg

SEQ ID NO: 285290 - DNA, 122 bp, Homo sapiens
agccggaagccccgcccccggggaggggccgtcctgcaggtgagggcgcaggggttcgggcgcggatattggcttgcaggctgaatgccagaatcaccccgagggagatcggttgtggtccg

SEQ ID NO: 285291 - DNA, 122 bp, Homo sapiens
ctggtccccccggcgggcggcggcgcgggcaggggcaagggctccgggctcctgcggctgcgttggctgctcaggccaccataatccagctcgcggctcgcagctcccgggcgggctgggga

SEQ ID NO: 285292 - DNA, 122 bp, Homo sapiens
gattggtcctagaacttccaaaggctgcttgtcatagaagccattgcatctataaagcaacggctcctgttaaatggtatctcctttctgaggctcctactaaaagtcatttgttacctaaa

SEQ ID NO: 285293 - DNA, 122 bp, Homo sapiens
gcctcaaggattatttatataaccattgcttattggctgctggcaaacactcgctcttctcgttggctgaaactgtcgggagaagttctgcgaaggctgctccttgcggcgttgggactgag

SEQ ID NO: 285294 - DNA, 122 bp, Homo sapiens
ggctgaggaggaggaggaggaggaggaggaggaggatgatctccagatacactcggaaggcggtgccacagagcttggagctgtgagtggactgctcagccaccccagccggggcgggcggc

SEQ ID NO: 285295 - DNA, 122 bp, Homo sapiens
cacgctacccgacagccccgcgcccactcgccgcgttccacccgcggggcggcggattcccgcaggggccacactgccacctactgtcccatctccagagctggagccacgggcgctctccc

SEQ ID NO: 285296 - DNA, 122 bp, Homo sapiens
tagcagctcggtttccaaggactgtaacgccttcaaccgcccgccgcgatagagtgcccacgaccctgcctcgggaatcccgctctgcaccgccccaccagacccggactcggagccgcgag

SEQ ID NO: 285297 - DNA, 122 bp, Homo sapiens
caaaacctgcgaggtgagaaagcagtcttacagaagcagaacaaaggcagttaatcataccgtgacaggttttacaacaggatttgcaacatgagcctaccttacttaaacatgtcttgtga

SEQ ID NO: 285298 - DNA, 122 bp, Homo sapiens
ggcagcgctggccacgccgtgggctgggactggcccggaacgcgggtggcggttcggcctcggagacccgcgcagccgtcggagcatctccgtgcctcgctcaccaccttcttttcctccgc

SEQ ID NO: 285299 - DNA, 122 bp, Homo sapiens
ctgctgccgcggccgccgcagccgccgaggacgagccgccgttcctggaggccccggacacgccgaagcttgagagactggaacccactacgttgcagctggcggaagaagaggacgaggag

SEQ ID NO: 285300 - DNA, 122 bp, Homo sapiens
taatacttccgtaaaattctaagctgaattcaaagacgataccctttaagtgaaacttcacgagagcctgagcacaaggaggtgaagtggatgccatcaagattctgggtcagggtcgggac

SEQ ID NO: 285301 - DNA, 122 bp, Homo sapiens
ggctcgtcatctgggggaggtgctgaccgagccccggtggctccagaactcacacaaccgcgctgtcctaatcctttcttccgaggaactggagaacagagatccaaactccttccagactt

SEQ ID NO: 285302 - DNA, 122 bp, Homo sapiens
gaggagcgcctctgcccggttgcgaccccgtctgggaggtgaggagcgtctctgcccagccgccccatctgagaagggaggagaccctccacctggcaaccaccccgtctgagaagtgagga

SEQ ID NO: 285303 - DNA, 122 bp, Homo sapiens
aaatctgcacaggggtctcctggagccgtgggaggggttccccttcttctccttcaagagcgtttttatgttgccctctttatggatggaaaacagaggcatggacgggcggtgtaacttgg

SEQ ID NO: 285304 - DNA, 122 bp, Homo sapiens
caccccgcccatagcaggtcttttatccgctggagccgcctggacagtcctcgcggggcacgcccgaggctccccggaggaactacaagtcccatgaagtcccggggcgcgggcggtgatga

SEQ ID NO: 285305 - DNA, 122 bp, Homo sapiens
cttctgtcctcagggaccccttcagaccttccccaccctccgaagcctcaacccgccctgcgcctcccggtggcacagcgaccttggcggctttggcccctgagccgctaggctgccaaggc

SEQ ID NO: 285306 - DNA, 122 bp, Homo sapiens
gcatccaccagagaaccacacgccccacagcggcaataaccggcatccaccagagaaccacgtgccccacagcggcaataaccggcatccaccagagaaccacacaccccacagcggcaata

SEQ ID NO: 285307 - DNA, 122 bp, Homo sapiens
tgcaggacccctcctctaagttactaggttttagtaagtccaatctcttcccttttttcccgtagccctagtggtggcagttgcttcttgctacctccttgataccttagagtaatatgttt

SEQ ID NO: 285308 - DNA, 122 bp, Homo sapiens
ccccatacctgagctggtccctcttcactaagtcaggctaccagcatcttcctgctcctccggctgggcccctggaggaggaagctttccaaagctctgtctagcccatgtatccctccagc

SEQ ID NO: 285309 - DNA, 122 bp, Homo sapiens
acctagcaatagtaataataatattactagtgccatctattgagtgcttactacgagccccgtgccaagagctttacacacatgatctcatgtattccatttataaaatgttttttgttgct

SEQ ID NO: 285310 - DNA, 122 bp, Homo sapiens
cgaagggggagaaggaggcgaggacgagatccagtttctgaggactgtgagtctccgcggcgggggcgaggccgtgggcaggtggggaggagcgcggagcgcggcgaggaggggctggctgc

SEQ ID NO: 285311 - DNA, 122 bp, Homo sapiens
gagagcctggggtcattcagtgtgagttggagaaaaatgggtctgtagagaggacttgtgcgtgcccacatgcacacacatggctgacatcagagtcccctgattgagatctggaacagata

SEQ ID NO: 285312 - DNA, 122 bp, Homo sapiens
ctctgcacagggagttcgggatcaggcggttctgcggctgtggcttggcacctgctggggcgccccgggaggtggggcagttcctccgcgtggcctgtagagagcgacagaggacaggctga

SEQ ID NO: 285313 - DNA, 122 bp, Homo sapiens
aattttgcagtgtcctcccaccacaggcatagtgacaaccttgcactagggctctgagttcgatcatgtaatttgctttgatgaacagaaaattactacactttacatcgaaatttgagatg

SEQ ID NO: 285314 - DNA, 122 bp, Homo sapiens
tccctgctgggaagaagaaaagccagtgatgctggcttgaggctgtagtgggaggcccagcggattgtgagaagccaggtattccaatgtcgggctctcgctgggggcttctggtgcttctt

SEQ ID NO: 285315 - DNA, 122 bp, Homo sapiens
attctaatggacatgtgcagaaaatgtgatacagaaacctgcagagcagccagttcccagcggacgtcagagatcagctcttacctcaaggatcttgctcaccaaactctctttgcttatca

SEQ ID NO: 285316 - DNA, 122 bp, Homo sapiens
cttcatccccgtccactgaggaaatccaccgaagccctttgtgtggggttcggaggagagcgggttgcagggacttgccttctgggtgtgaccttggtgcaggtgcataagggttagcgact

SEQ ID NO: 285317 - DNA, 122 bp, Homo sapiens
tagaattcgaaggcattaggagagggcggggatagcaaacatcgcgcgaattttgagaggcgctgggactacgtaatcccgcgatcttatgactaaacgaacgcgatttagggagaagtaac

SEQ ID NO: 285318 - DNA, 122 bp, Homo sapiens
gtaccggaataaaaatatggagacaaggggaaaatattttacgaagctctgtgttctcaacgccctcatgaacttttcagtaggctgtctggtttatgtgtggtcaacttgaaaaactaatt

SEQ ID NO: 285319 - DNA, 122 bp, Homo sapiens
tggctatgagaaccccacctacaaatacctggagcagatgcagatttaggtggcagggagcgcggcagccctggcggagggatgcaggtgggccggaagatcccacgattccgatcgactgc

SEQ ID NO: 285320 - DNA, 122 bp, Homo sapiens
aatttcacagtaaatttgatctgtttctcatggggcaagactttaattctgctgattattcgatatgggaaagcactctgtcactataatatctgctatgtgatccatgtataacagaatga

SEQ ID NO: 285321 - DNA, 122 bp, Homo sapiens
ccatcccgggacgcagtgcaaacaatggtctctgagcccacgtaaccacgcagagcgggacgttccgggatcagtggggagagtcagctccttcccgagccaagcagcagctgcgtggggga

SEQ ID NO: 285322 - DNA, 122 bp, Homo sapiens
tcatggggcaaaaaggggcctgtatctcggccgtgtggcgacgttatttgcctcaaaaaacgcctaggccggaacccctgcatttcaggctcctgtggaattttgagagaagacagtacttt

SEQ ID NO: 285323 - DNA, 122 bp, Homo sapiens
gagactcgtcatgttttattttatttccagaagaggactgtcagaaggacgtagaaggcacggttttactgtgaggagcaaagattctttacctacgcattttacaagaaatgtgcagaaag

SEQ ID NO: 285324 - DNA, 122 bp, Homo sapiens
gctgctgggtggtgctactgttctgagagcatttgagctattttcagcattaacagcagccggggttgtctgcaaagggatgaaaatgccttgcccagatcgccaccccccactccaggggg

SEQ ID NO: 285325 - DNA, 122 bp, Homo sapiens
ggtcttgggggcggggccggtagtatcggggagcctctgatggaggggcctggccgggggcgggatccagaaggattgaggggtcgccggaggcgggatttatgcagggggtgtttctccgc

SEQ ID NO: 285326 - DNA, 122 bp, Homo sapiens
actgacagatttcggcaggccatcgactggtggaacaatgcagagtttggctggggtggtcggagaagagcccagctgcccggaagcccgattgcaggggaaaaccaccttcccactccagc

SEQ ID NO: 285327 - DNA, 122 bp, Homo sapiens
ggagggccggccggagttcgtggggctgtggctgggcctggccaaggcgggcatggaggccgcgctgctcaacgtgaacctgcggcgcgagcccctggccttctgcctgggcacctcgggcg

SEQ ID NO: 285328 - DNA, 122 bp, Homo sapiens
gccacctcagagggccagtgtcttgctgaggggccggagcagtcctgtgcctgcagcctccggagccatgggaacagggctgcgaagtcagtccttgcgagagccccgaccctcctatggaa

SEQ ID NO: 285329 - DNA, 122 bp, Homo sapiens
ggcaagattgagatacatgttactcggcggagttcgtacggtatgttgatgtgatgtggccggggctgtccaattccggagagtgacactcataaattaagacctaattaagactccctagc

SEQ ID NO: 285330 - DNA, 122 bp, Homo sapiens
caggaccaggacctggctctgtgtgactgggcgaaagacactgcccctcatctgtaaaaacggggatgggagagaacgttctcttggtttcctgccaaatactgtggaatgggtggctatga

SEQ ID NO: 285331 - DNA, 122 bp, Homo sapiens
atccgggtggatgggccacgtctctgcacgtgcagcctctcctgggtcccctctcacatccggctctggctgggccatttcccacgctgtggcttccaaccgctcagcccgactgcatctgc

SEQ ID NO: 285332 - DNA, 122 bp, Homo sapiens
ttctttcaaaacgaaaaatgtatgtatctatacatctggatctgcttcccccatgcaccacgcaagggttaagattgcacaagggaagagttcttgcgccatctactggccgtctccgagcc

SEQ ID NO: 285333 - DNA, 122 bp, Homo sapiens
actgtctccgagatcctgcgcagcggctacactcgcatcccagtgtacgagggtgaccagcggcacaacattgtggacattttatttgtcaaggacttggccttcgtggaccccgacgactg

SEQ ID NO: 285334 - DNA, 122 bp, Homo sapiens
tggccctttgcagaaaaagtttgctgacccttccaaaaaaccctagaacattggggtagacgcggaactcccagccaccctgctccctgccccaatagtacagagaggggaaaggcctgctg

SEQ ID NO: 285335 - DNA, 122 bp, Homo sapiens
tctgggaggcgacggccggcaccgccaggacctgtcgccgcgggccttggggctcgggctcgcagagcccccggaagccccaaaatgaggaacagagggaaacttttctcctgttctttaca

SEQ ID NO: 285336 - DNA, 122 bp, Homo sapiens
ggcagtggggatggggctgagggtgtgcccttccaacaagctcccagctgatgcagatgccgcagtcccatggacctcaccttgcgctgcaaggtctcaggagacttaatcaagatataaat

SEQ ID NO: 285337 - DNA, 122 bp, Homo sapiens
cctgccctgtctcttccccactcccgcttcctgggatcacatcccagataaatcatcacccgagtccttggctccaaggatgcttatgtgtcaagcatggaacagtgcccagttctctgctg

SEQ ID NO: 285338 - DNA, 122 bp, Homo sapiens
gagtatgacaaacatggcatgggcctctttgagccatgacactcttatagatctaggatacgatgtgataaatgatgtaattgaacataatggagagaggaattaatttttgttaagaggtt

SEQ ID NO: 285339 - DNA, 122 bp, Homo sapiens
gccggaaccccttcggggccagagtttgaagccgtggatgtgcctgcctggtggcttgtccgatttgcacggtgacttgattacactctctcattcatggtcacttccgaagcgctttagtg

SEQ ID NO: 285340 - DNA, 122 bp, Homo sapiens
ttcaggtttgggtcccccacaggcaaccgccctcaggtcagcgtatccgaggtggagccgcgcccccgagccgggtcatctcgtgctccgttcctcagtgcccacctgaccgatcacactct

SEQ ID NO: 285341 - DNA, 122 bp, Homo sapiens
aaggcccttcccagccctctccagagcgtgatgtggccccgtctggctaagagcaccagacggcggtggctggagcaccccgtgccactgcaaacgtgaccaggaacatgggtctgacagct

SEQ ID NO: 285342 - DNA, 122 bp, Homo sapiens
ggccaggccttcttctggaggtgagccgatggagatttattccccagacatgtctgaggtcgccgccgagaggtcctccagcccctccactcagctgagtgcagacccatctcttgatgggc

SEQ ID NO: 285343 - DNA, 122 bp, Homo sapiens
aaccctgggcgcggaatccgggctgccgggtgacagtgaccagctgactctggagcctaccggaggcgcggcatcggaggccgtgcggaccactgccgaacagccgctggagacccgcagag

SEQ ID NO: 285344 - DNA, 122 bp, Homo sapiens
aagatttttcctcttgccttacacatggaggttccaggaaacctcttgcagaacttcacacgtgattcttcaagccacacccacctgaaatcaaaccaaaggagtgctgtggctccccttgc

SEQ ID NO: 285345 - DNA, 122 bp, Homo sapiens
cgcgagtgacaggcccggggcggagggcggggccgccggcggggatgaggtcatgccgagcgaaaaaagcccctgacgtcacctgcagccaatcagcgcgcgcggctcgggggcaggtgacg

SEQ ID NO: 285346 - DNA, 122 bp, Homo sapiens
acctctgcaagggtgtgccaggagcaggtggaccagccaccaacctcactcacagctggtcggtgtacatcacttcttctacccaagaggtagagccccaatgccatctgcttttcctcagg

SEQ ID NO: 285347 - DNA, 122 bp, Homo sapiens
agtgctgtgcccgtccacctcgggaactaccgagaagatggtggctgagccaggagaggccggcggcgccatctttgatgtagtttttcttgctgcggagtttcctcagagaagaatctcag

SEQ ID NO: 285348 - DNA, 122 bp, Homo sapiens
ggcgaaattagagtgccgaagtggcttgagaagcacagtgaatggtggcgaagcccgagccgggtcgcaagacgcccgctggcactgccggcgccatggcggccgccttcggccacggcgga

SEQ ID NO: 285349 - DNA, 122 bp, Homo sapiens
gggcctgcatagaaacggaagctcacagtcggggctgtgtgtctggcttctgtcccccatcgccattctccaggctcaccccctgcagccgtgcgggcctcattcttttcctggtggaatcc

SEQ ID NO: 285350 - DNA, 122 bp, Homo sapiens
ttacattgttaagcccaaaaaaatgcttaaggtatgacattttgatcatgccatttttcacggctggtgttaagagtagtttgtgaacaaatgcaaacggaaccgtctctaagatttttaat

SEQ ID NO: 285351 - DNA, 122 bp, Homo sapiens
ttcagcaatataacattgatatggctttgtgtccccacccaaatcttgaattgcaatccccgtaattcccacatgtcaagggagagacctagtgggaggtgattggatcatgggggcagtgt

SEQ ID NO: 285352 - DNA, 122 bp, Homo sapiens
agaaagccgccaggaccctgtagttctaagatctacggggaaacaggcacccaacggctgcgtctcaggtttccgcgggtcactaaagaataacggacatcctcccaacggtggccctgggg

SEQ ID NO: 285353 - DNA, 122 bp, Homo sapiens
gagctcagagccatcagaagactgccctgcaggggtggggtggctaccacttactgcttccggctgcaaggagcaggaaacccctacttgaggaacgaaataataataacagtgtgacagct

SEQ ID NO: 285354 - DNA, 122 bp, Homo sapiens
ggcggcccctccgctgctcctttttggaatgcgagctcccaccagaagaaggttccggcacgaatcccatccccacgtctgggccgagaaagcagcccgggtccggaaggtgtagagagtcc

SEQ ID NO: 285355 - DNA, 122 bp, Homo sapiens
aggggcatgtgttgtgactcttaacaaaagatctaacattcagctgggtgtggtggcccacgcctgtaatcccactttgggaggcccaagcaggtggatcacctgaggtcaggagttcaaga

SEQ ID NO: 285356 - DNA, 122 bp, Homo sapiens
agacagtgagattcgactccgtctcaaaaaaaaaaaaaaaaaaaaaaaaaaaaaagcaggcggttagattgcacaggccctgaaccccatcctaaagcctccagcactttcaagtgagggat

SEQ ID NO: 285357 - DNA, 122 bp, Homo sapiens
ccctccgctggcgggcacggtacctgggcttggcagggtcctctgccaggcgtgtcagcacgtattcctcggggatgatgcccttgcgggacagcatggctccggtgacccccagggagggg

SEQ ID NO: 285358 - DNA, 122 bp, Homo sapiens
gcttgtgtgtggaagaaaccaacagggttcacgctggtgcccatttctggaaatgccaatcgcgcccgactgcgggagccaggatcaggtccccagggcgcccttgcagacagcaccctgag

SEQ ID NO: 285359 - DNA, 122 bp, Homo sapiens
cagacaaagcagtttcttctcttatgcctcagtttcctcatagatggaaacgggactgaccgtatctacctcctaaggctattccatgcagtaatgcttgcagatgcccacacccagcaagt

SEQ ID NO: 285360 - DNA, 122 bp, Homo sapiens
cgggggcggggcgtctgttgtggtcgggttctgaggtggtctggtctttctgaggtacagcgtagttttgtcctccgcgaagtccctcaggctcagagcacagccgtgtaattgtctgcgtc

SEQ ID NO: 285361 - DNA, 122 bp, Homo sapiens
cacctcccacgtgaccctgtggaaggcaatggcagtaccccccgccgaggccccgccccacggtgttgctgctggatcctcctccaccaatcagcaggagccctcggctcgcgctggggcgg

SEQ ID NO: 285362 - DNA, 122 bp, Homo sapiens
gggacgccgagcctgaggagctgcccaatgccgccgccgccatgcttgagcgccagcgggcgccgccgccgcccctcgctctccgcgtcccacactgagcaggcgcctcagcgcgcagcagc

SEQ ID NO: 285363 - DNA, 122 bp, Homo sapiens
gagttcgtttttctgccacctcactttggggctgggctggttctccaccctcgcagggtgcgtttctcaatccagacgctggggggcgctagtacctcgcgagctccgcgaggatcattccc

SEQ ID NO: 285364 - DNA, 122 bp, Homo sapiens
cgcagtcccaggagccgagctccagcactagagccagctgcgagcggagggcaccaactccgcagaactggcttttcaatgggacacctgtggctcctgggtatttggggcctctgtgggct

SEQ ID NO: 285365 - DNA, 122 bp, Homo sapiens
gcgtttggcctctctgctcgactgcctctggttttcttcccaggtctaagtcagtcttgacgcctaatcgtcaaacccctggagtcccgtcccccaggaccattctatttcaccacctccct

SEQ ID NO: 285366 - DNA, 122 bp, Homo sapiens
caagggtgctcacattctccaggaaactcccttaagggttagcaaccgccgagtaggtttcggtcccaagatagaaaggtaaagcggggaattcagggggtttctccgaaaagtacgttgat

SEQ ID NO: 285367 - DNA, 122 bp, Homo sapiens
caaatcctcgcatccctgagtgttccattattttcatatttatttggcaggtggaacattcgaggctgggagcccttacatgccccgcgagaggtcacgcagttaggaagtgacaggagcga

SEQ ID NO: 285368 - DNA, 122 bp, Homo sapiens
actgggattgttggcctgcagacatcccacgcataagagcctaggccagaccgcccgctccgttgaagtcttgtgattggacaagacacagtgtggagacagccctaagcctaacagagatg

SEQ ID NO: 285369 - DNA, 122 bp, Homo sapiens
aagatgagtctggtcttttagggcaccctgtacctccttcccccacagagacattgttctcgttcaaatgtttttttggggagatgagccattcattaattcaacaattatttatcgaggac

SEQ ID NO: 285370 - DNA, 122 bp, Homo sapiens
cagaggaaactgggggtgcaggagctgcaggagccccggcggcctgcaggggcggtggcgcggcgctgggcgcgcggccgctagatggcagcgcagccccggcccggcccgcgggaggcggc

SEQ ID NO: 285371 - DNA, 122 bp, Homo sapiens
tctccagttgggcgttccgagaccacctatgtagggtattcggctagcgctcaattaaaccgaaacaccgtcgcagcgaccacaggtgcagaccaccaagtccacaccgccagccgcccggg

SEQ ID NO: 285372 - DNA, 122 bp, Homo sapiens
gatcagcacccgcccgcggggaggtggccacgtttctctcctgaacaccagttgatggcccgccttcctaaaaggccgtgtggcgtctccagtggctacaacggggcgcgccaatggctcgt

SEQ ID NO: 285373 - DNA, 122 bp, Homo sapiens
cgcgttgctatttacaatagttgtgttactatttccgttgctatgactcatagtcacgcccggatgccatcctctaaatggcccctaaactttatttttttctcccccttttccagcccaga

SEQ ID NO: 285374 - DNA, 122 bp, Homo sapiens
tgtgaaaatgcgtggtgcatcgagttttggagatcaaataccagctttgcaaacaggatacggccaggtcagcgggagcccggttcaggggatcggccctgctctgaagagctctagggaca

SEQ ID NO: 285375 - DNA, 122 bp, Homo sapiens
gtgtaggcatcgggaaagatctgaggcttgaagccctgcaggatggagtccaccagcaggcgtgcgcggtcctcgtcacggtggctgcagcggatgccctgcaccaggccgctgtcctctac

SEQ ID NO: 285376 - DNA, 122 bp, Homo sapiens
gggcagggcctctgcggggcggggccgcggtatgctgctagctgttactcccgccttccccgcagccctgtgaatgctcagccttgtgaatgctcatcccgccgctgttcgctctcccgcgg

SEQ ID NO: 285377 - DNA, 122 bp, Homo sapiens
cccccactccagcctcagcggggccccagcgatgttttcttgttgtacaagaaccaggtccgagtgttgcctcctcttccttccggaagccaaactgctcctttattttttagagctgctga

SEQ ID NO: 285378 - DNA, 122 bp, Homo sapiens
cctctgcgctcgtgcattcactccattttacagatgagaaactggtgtgactcccatgtacgtggcccaggctcactaattctctcttcttaatgctctcacgcctgggccagcccttcctc

SEQ ID NO: 285379 - DNA, 122 bp, Homo sapiens
cgaaggggcggcgcgggggcgcgcgcgcgcgcacactacacatggggtgtcgcgtggacgcgctccaggacctgccacacacgcgcgtgcacaaacaccccaaactccgcacgcactgtgca

SEQ ID NO: 285380 - DNA, 122 bp, Homo sapiens
agcacgtggaacttgggtcccgcagtcgcaggctgcgctctaggccgacggaagcagttccgcctgtattcagaaaacagttctcagccccaaagacacaggttggaaagaacactttaaaa

SEQ ID NO: 285381 - DNA, 122 bp, Homo sapiens
atatatatacaaggtcattcattctagcattgtttgcaagagtgaaagagtggaaacacccgaagtgtccatcagtaagggacaggctagattgattacggatgtaattgctgtccatccat

SEQ ID NO: 285382 - DNA, 122 bp, Homo sapiens
tgccgtcatcaaggctcgcttgaatgtcggctttgctttttttctggcgcccagtgatgacgcagtactccctgattggctctgcactggaggcagtgattttggggcagagaattttgcaa

SEQ ID NO: 285383 - DNA, 122 bp, Homo sapiens
cccgcgggcgggagggagccacgcacatcgccgccgcggccgtctccgcggggcggtaaccgagcctgcctcggagccgccgaacgcccacgccagcgaccctgactctatggccccggggg

SEQ ID NO: 285384 - DNA, 122 bp, Homo sapiens
tggtttctttttggtaacagcgacacggagatccgcatttgtcgcagtttccaccgcgggcgggaagtgtaaacacaagaaatacaaacatagcgcaacggctaaaggagtgtcacagcgcc

SEQ ID NO: 285385 - DNA, 122 bp, Homo sapiens
tggcttctttcccttctgggggatttatgtgcttaaatcagggcccacaaactcaaagcacgcatttgggctaaaggaagcttggctaagagtaaaaggagagccaacagggaaagggcctt

SEQ ID NO: 285386 - DNA, 122 bp, Homo sapiens
gccctgccgtgctctgattggcggagctgcacgcccccgctgcagtctgattggcggatccgcctcgctttagaaggtcggcgcccagttccggcactcgtgcgcctaccagacagtggcgg

SEQ ID NO: 285387 - DNA, 122 bp, Homo sapiens
accaacgcgtccggtgattggcctaacatgatgatgtcagatccccggccttattttcttcgcctattggttcctctgcgtcggagggggcggggagatggggcggggccgactgactatgg

SEQ ID NO: 285388 - DNA, 122 bp, Homo sapiens
accgcattaaaaccacaaaactgtctccctgtagagcgaggctccctcctgcgggagtggcgagatacttgggcattctcgggcaggcttcctggtgaggggggagtctccctcatttttgg

SEQ ID NO: 285389 - DNA, 122 bp, Homo sapiens
ctgggccggccaggtgttccttgccctcattccggtaaacccacaaccacaaccttccagcgtgggcattatggccatcatgaacatttcacggtgctacagagattttgtttatggccggt

SEQ ID NO: 285390 - DNA, 122 bp, Homo sapiens
gcagagaaccctgaccgcaccctcatgtgttttctcccccaggaggcgcttggaaaccaccgtgaattggaccacactgggaaacacagatgaggaaagtcaacaacgctttgtccttcagt

SEQ ID NO: 285391 - DNA, 122 bp, Homo sapiens
cctgacctaaaataagagaaaacaggaaggaagcttccaggctagatcaacagaaaagctcgagtatccgagcatggtacattactacggactatcatagaagcaggagggatggaattgaa

SEQ ID NO: 285392 - DNA, 122 bp, Homo sapiens
atgatatttcatattcagttcatactccagtttccccaattgtcctaaactattacagcgcggaagggcatggggtctggagaaggagagcagtgggaggatgcctgccttaccttccccct

SEQ ID NO: 285393 - DNA, 122 bp, Homo sapiens
ccccatgtggggctgaagaatcgtgtatctccatttcagacaatgcatttcaattcttgtcgtgtgcctttgtccatttgtataaagcaaagagctctgagtgacagccccagttagcctgc

SEQ ID NO: 285394 - DNA, 122 bp, Homo sapiens
tctctcgccagcgggaccctgcacagagagaacactacagtcacggggaggccgaggagacgaggggctgagggtgtctccccttttctgctccccagatctccccatcagggacactcaca

SEQ ID NO: 285395 - DNA, 122 bp, Homo sapiens
ctcctgctcgccctcggcggagagttgaaacagatgtgggattcgcccaggagctggaaacgagggagggaagcgagccagagccttgtgtgcacgtgtgtgtgcgtaacacacaaaccagg

SEQ ID NO: 285396 - DNA, 122 bp, Homo sapiens
aatacccaaataagtggacgaaatgcccatgacgtagtcctattctctgctgcttctcctcggggcacagtctgaccccagtccaggacagggagagggaaaacgccatccccgtttcagca

SEQ ID NO: 285397 - DNA, 122 bp, Homo sapiens
ggcaaaaccccgtctctaacgctacccaaaatacaaaaattagccgggtgtggtggcatgcgcctgtagttccagctatctgggaggctgaggtgggaggatcacttgagccagggaggtgg

SEQ ID NO: 285398 - DNA, 122 bp, Homo sapiens
actcctcctatgactacttggaagagatggaagcttgtgaggacggaggctgccaagggccgcttaaatcgctgtcccccaagtcctgccgtgctaccaaaggccaggctggcgacggaccc

SEQ ID NO: 285399 - DNA, 122 bp, Homo sapiens
ttacagatgaggaaactgaggctcagggagatctggaaaccattcccggcagctgggctccgaacccaggcctgcgagcacaaggctggctcccgcccccggctgtggtccctcctcctccg

SEQ ID NO: 285400 - DNA, 122 bp, Homo sapiens
ccggccgcggagggggcgccggagtgctggctgcccagtaaggccatgctcgctggtgggcggggcggctgcggctcctccatggggcccagtggcggccgcggatctcctcatcccgcacc

SEQ ID NO: 285401 - DNA, 122 bp, Homo sapiens
cctggctgagaggcccctccaccctggctcccacccaccccccagccctgggcctccacacgcccagccccatggtcctggagagtcccccgctccagccctggaccctccagcgcctgcag

SEQ ID NO: 285402 - DNA, 122 bp, Homo sapiens
agctagagaagctgccggaggagcaggtggctgaggaggagctggagtgctccgcactggcggtgtcaagccctggaatggtcttaatgcagcgggccaagttgtacctggagcattgcatc

SEQ ID NO: 285403 - DNA, 122 bp, Homo sapiens
aggcctcagccgactggaaggagcttctgggaaaggacgagcagagtgagtggacagaagcgctggcgccaaagcctgggagcttttggcccattagatctctggcaaaccctccctggggc

SEQ ID NO: 285404 - DNA, 122 bp, Homo sapiens
ggggggatgttcccagtacccactcccctcctcttcctcagtccttaccacttccctccacgaccccaggtggccccgttattcgtccaggtgcccagggaggaggacccgcctgcagcatg

SEQ ID NO: 285405 - DNA, 122 bp, Homo sapiens
tgtcaagtgttgcccctaccagggaatattacaactttgggtggcaggggtgggggtgtacggtaaatgagcagtcagtcccagggctatggtaggagctgataggcacatggttttaacat

SEQ ID NO: 285406 - DNA, 122 bp, Homo sapiens
gtgtgtgtatgtgtgtgtcacgtgtccccatgcatggcaggcatcgtcgcgtgtcccccacgcgtggcaggcattgttgtgtggccactatgcatggcaggcattgtcgtgtgtcccccgtg

SEQ ID NO: 285407 - DNA, 122 bp, Homo sapiens
ctgctcccgccccaggcctgaagccggccccctgccccaaaccagcctgaccagcggcaccgtggaaacccaccgggatctctgccacccacaggaggctggggcatctctcaccccctctg

SEQ ID NO: 285408 - DNA, 122 bp, Homo sapiens
ccggaagaggaaagagcttgagctgcagatcctgacggaagccatccggaactgggagggcgatgacattaaaactctgggcaacgtcacttacatgtcccaggtcctgattcagtgtgccg

SEQ ID NO: 285409 - DNA, 122 bp, Homo sapiens
aaaccgcccgaattctgggtttctgcacatccaggctggctccaggtctcttgtgcccaccgtgcaagccggcgggatgccagcaggtggcatcctctccagcgtttcttcgccaggcgtgg

SEQ ID NO: 285410 - DNA, 122 bp, Homo sapiens
agtttaaagatagtatttctttatatttgtgtagttacaaggctttgagtatgatcaaaacgtttaaccaaaactaaagtatgtgcatactttatggtgttgaaagcaatgctactaaaaat

SEQ ID NO: 285411 - DNA, 122 bp, Homo sapiens
agaagaagggagcatgggtcttaggagacaattgccagtttctgccatgttgtcaattcacgaagtttcctcatttttggtggtaatgacagttacatctgttttatacaaacctctgttgt

SEQ ID NO: 285412 - DNA, 122 bp, Homo sapiens
atacccctatgcaatgcccttcagggggtggtttttggaatagttcgttgagcatcacctcggctatttgtttaaaatgcagatcctgtgctcctccatcaacctactgaatcaggacctca

SEQ ID NO: 285413 - DNA, 122 bp, Homo sapiens
gcacacagggtggaggggttaccacagtcctgtttccgtcgtggttttacttaaattcagcgttacctatgtggtgtccctggacactcccagcagcgagagtcctggtggatggcatctct

SEQ ID NO: 285414 - DNA, 122 bp, Homo sapiens
gcgatgctccgggtgggaccacgcagggtggggctccggtggcccccaggccttggctgccgcagtgaccccccagacgtgggcaccacctctggggccggacctccaggctggcagtgtgg

SEQ ID NO: 285415 - DNA, 122 bp, Homo sapiens
ttcagggccgctctctacctgtaaagcagtgtagctaaggggaagctgagccccgcaaggcgttttcaggcagggcaccccttgtcattcgaatggttctggggtgagcccgggtgccgctg

SEQ ID NO: 285416 - DNA, 122 bp, Homo sapiens
cagccaaacagcgggaaggcagattggtacgagtaggtacaaggccctggaattctcgcccggttgccacacactgcacggagcataattgggggaggttgtgcaactgcccgggaagccgg

SEQ ID NO: 285417 - DNA, 122 bp, Homo sapiens
gagagagggtccttacctcgatggggctgaccggcgtggaaggcaggggctgcaggtactcggggtgcaaaatgtggccagttcgtgccgtcagcatcttcagcaccttgattggcaggcgg

SEQ ID NO: 285418 - DNA, 122 bp, Homo sapiens
tagtagaaaactctgccccttagaaaacacagcagtgttacagcccacctgggttagggtcgaagccccactccccacagaaggttttcctaaaggagatggagccagggccctaacccagt

SEQ ID NO: 285419 - DNA, 122 bp, Homo sapiens
ggtagtagtgactcaagaccttgggatggtggggcttggcagtatccagactctgtgagtcgaggtgcagtagcagcaagtacctcagaatggcagaacacagctgtggtttgggccccagg

SEQ ID NO: 285420 - DNA, 122 bp, Homo sapiens
attcgctccgcaacctcaaacaaacgacctcagtttcatctatgaaaagctggtaaccatcgtcagttgccaggccatgaagagagtcaacggaaataagtttttattctagggcacccgct

SEQ ID NO: 285421 - DNA, 122 bp, Homo sapiens
gccccgcggcggggctgggggcggggctaggtgtctcgcgcagggggcggggcgcggtgacgtcgcgggcgcctgggccgtgctgtggcggcggcggcggcggtagtggcggcggcggcggt

SEQ ID NO: 285422 - DNA, 122 bp, Homo sapiens
aacactgtacctcggggaacaaaaccgtgaaggctaattaggacaagtcggagcagggaacggggacgccgggaggggagagcgcgctccgagttgggcagaacctggaacggtcacaggaa

SEQ ID NO: 285423 - DNA, 122 bp, Homo sapiens
gcgggtccaaggcgcagaaagacacatgtgttactcaatcccaatctacctggctcctggcgctcagtcccctccttccccggaagccgtccgcaacctgctccgccgggttggccaatcct

SEQ ID NO: 285424 - DNA, 122 bp, Homo sapiens
ctggaagtttcagcccattggctgctttctgttctccctgtttcttctgggaagcttctccgtctccctggcaacgcgacctgccaccaattgcagctaaggattggtggtcacatggcctc

SEQ ID NO: 285425 - DNA, 122 bp, Homo sapiens
ctccatgcatcctgtgggcctcccacaacgctggtgccagcaaagcccgatctcctctcccgaggccgcctgcattccccctgtgcgtgcatcgtaacctgtgtccctgactcacagggatc

SEQ ID NO: 285426 - DNA, 122 bp, Homo sapiens
gagtagtattaattttccaagaccccattgctcataaagggtacagcagggacccaagctcgacactctcaccctcaaacatttatacaattgtggaccaatggctctcaactggggtggtt

SEQ ID NO: 285427 - DNA, 122 bp, Homo sapiens
ggaggccggctccaggctgtgagctcagtcggctggcgggggtagagctggctgcaggcccggcccctctcagctgctgccctctccaggtccgctctgcagtgtgtgcgtgaaccgctttg

SEQ ID NO: 285428 - DNA, 122 bp, Homo sapiens
tgttacattgctacatattacacctagttttatgtgtctagatgctctgtatctagtatacgcttgagagccctccaaatattaatatttcttttttttttttttgagatcaggtgcagtgg

SEQ ID NO: 285429 - DNA, 122 bp, Homo sapiens
cttttaccctcattggaaccctataaaggaactactctcatcagccctttttacagatgacgtaaaagaaatagccacctagcctatggccacctgagagcaaggaattaatctgttgctgt

SEQ ID NO: 285430 - DNA, 122 bp, Homo sapiens
cccttgggaggggagcatgcgcagtgtgtttactgaaatttttcgcatgctcacgtgaggcgttaccagttgcgcattcccggaggaaggtcatgtaccagttaaacgccaccattttgcct

SEQ ID NO: 285431 - DNA, 122 bp, Homo sapiens
caggtgaagcgtgggcagctgacgccacggtgatgtgtgcagatccggtggggactctgacgcagccccagggcaaaaccaacctgctttctaccttcaatccagcaggatgcccgtcatgg

SEQ ID NO: 285432 - DNA, 122 bp, Homo sapiens
acctggaggagcggctgcaggcctggccagcggagctgcctgatgagttctttgagctgacggtggacgacgtgagaagacgcttggcccagctcaagagtgagcggtgggtgccccctcag

SEQ ID NO: 285433 - DNA, 122 bp, Homo sapiens
cccggataaacgtcgcttttgtaagctgcattatctcttccatgggccctttcgcccgcccgttcccaagcacatactgctgaatttttgttcttggtccatcttgctgtccccttccctgc

SEQ ID NO: 285434 - DNA, 122 bp, Homo sapiens
agcagcctgcgcagtgccttctgggaacggaatccccagggctgcccctggcccccatggcgcatgcgcgggaggccgctcggtgatccgcggcggcggcagcggcgcttcctgctaggacc

SEQ ID NO: 285435 - DNA, 122 bp, Homo sapiens
gggagaccagcgtcgctctgtgactggcactaggaaagcccaatcacgaagaggagagtgcggagccaaaccagtcagagcacagaagggagggcaactccgccccgctgccattcaaagac

SEQ ID NO: 285436 - DNA, 122 bp, Homo sapiens
agactcaaaaggaccatataatatttcaaaggtgctgggttgcagattggtcttgggagccgctcttacttggaggaacgctagaggcaatcactttaataaggactcagaagtctcttgcc

SEQ ID NO: 285437 - DNA, 122 bp, Homo sapiens
ctgtctcaagtctcagagcatgtactcacagacacataccgcccagaagcagaaaatccacgtcaactgggattaaacagtttgctatcagtcacccgcaatcagtataatcaccatggagt

SEQ ID NO: 285438 - DNA, 122 bp, Homo sapiens
tgttccagctgctgggcagtgctctgcctgtgtgctgcgcctgcaggctgcgtgtgctgccgtggatctcctgcatcccttgacccctcccgccatcagaggaaaggctgctccccgaggca

SEQ ID NO: 285439 - DNA, 122 bp, Homo sapiens
cctggcagggcactgccagccattccccacgtacgtgcaccgtgtatctgggcatggctccgctgcagcctgaggtcctcagctggtcacaggaggggagagctttatgcaggagtggctac

SEQ ID NO: 285440 - DNA, 122 bp, Homo sapiens
cagtctggagtgcaatggcacagtcatggctcaatgtaacctcagactcctgggctcaagcggtcctcccacgtgagcctcccaagactacaggtgcacaccatcatacacgggacagggtc

SEQ ID NO: 285441 - DNA, 122 bp, Homo sapiens
gtgctgtgattacaggtgtgagacaccacacccggaacatttttgtacttttagtagaggcgaggtttcaccatgttggccaggctggtctcaaactcctgacctcaagtgatccgcccacc

SEQ ID NO: 285442 - DNA, 122 bp, Homo sapiens
cagcccttctgatgcctgaagcagtcagggcttgtctgacctctgcacagaagcttccagcgtcagctcagtgctcacctccagagcctgacctgcctcttgctaggtccactctgggatcc

SEQ ID NO: 285443 - DNA, 122 bp, Homo sapiens
ttgtatcagcagaaaggtttctaggtcaagtgaacaaaagtctgacttgaatcataaaaacggagagtcacaacccctcattcaattccaggatttgagccagtttacagtcccagaacccc

SEQ ID NO: 285444 - DNA, 122 bp, Homo sapiens
tgagatgtaattcacatgctgtgcaattcacccatttaaagtatacaattcaggctaggccgatggctcactgtaatcccagcactttgggaggccgaggtggatcacctgaggatcaggag

SEQ ID NO: 285445 - DNA, 122 bp, Homo sapiens
tacgatctcctgacctcatgctccgcccgcctcggcctcccaaagtactgggattacaagcgtgagccaccaacgcccggcctgaatgttttaagtttcaaggaaaagaccaatttggcagc

SEQ ID NO: 285446 - DNA, 122 bp, Homo sapiens
ggggctgtgatggatgaagattgtctgttcatgggccagtggtcttcagtccaccagccccggagaaactctgttctactccttgcttgagctctgggctttcaaggtcttgtctgtcaagg

SEQ ID NO: 285447 - DNA, 122 bp, Homo sapiens
tcccagctgcattcccacgggtggccctggagctggtgagctttgtctgggcgttgtcttcggctggcattgctcctcccagctctggcccctctgctccctcaggaagcagtcccctcgtc

SEQ ID NO: 285448 - DNA, 122 bp, Homo sapiens
atcatgaaggttgcaggaggacttgaacttggagctgctgctctgctctcagcatcaccacgtgcgtcgacagcctcttagagttacctatgaggaaaccgaccctcagccttggtaccatg

SEQ ID NO: 285449 - DNA, 122 bp, Homo sapiens
ggccaggagggtctcgatctcttgacctcatgatccgcccgcctccgcctcccaaagtgccgggattacaggcgtcagccactgcgcgcggccacaaagctcccaacttttccgttaagcac

SEQ ID NO: 285450 - DNA, 122 bp, Homo sapiens
ccccaggtctggcctcagaggggacacgcaagccccactggcagcagacctccggtgtcccgtcccctgtctgggctggcgaaagtgcaggtagctccttggtcgcctgacccagtgccttg

SEQ ID NO: 285451 - DNA, 122 bp, Homo sapiens
ggtccgggtggggcgcgcgtggactatgggcccgggaggtcccttactgtccccgagccgcgggttcctcttgtgcaaaacggggtggcactccaatcgcctgcttggtgattgtggccccc

SEQ ID NO: 285452 - DNA, 122 bp, Homo sapiens
cattccccgatgccctgagattcccagaccccacgtctgacaatgaggtttcggggagcacgtttattcggagaaataaatatagctcgtggaaaggggttggaaggcagggggaggtacac

SEQ ID NO: 285453 - DNA, 122 bp, Homo sapiens
gaagaggaaaggctcggttggagctggcagtttccaactccctggaggtcatctggagttcgggtgagcagccgcggacgcgaggaaaccggggcgtgcgcagagggacgaactcacgccgt

SEQ ID NO: 285454 - DNA, 122 bp, Homo sapiens
gaaaagaatttcctgtaattctctctctacaaaggagagagaggcttttgttaagtcatgcgttgcaggtgaactcagagcaatggttgaaagctgtgattccaaaccatgccaccaccagc

SEQ ID NO: 285455 - DNA, 122 bp, Homo sapiens
tttgatctagcattgcatttgtgactatcaaggtgcccatgggtttgtctccatgggcgccgccctcttcctaggagagtaggtggggagtttctgtgccccctcccccaccacgggaaact

SEQ ID NO: 285456 - DNA, 122 bp, Homo sapiens
tggcgcaaaaggcaaaagccgcgccagatcccggatgccgccccctcctctccggctgcgcgcctgattgggcagttctcaatccagcgctctgattggataagataccaagctccccacgc

SEQ ID NO: 285457 - DNA, 122 bp, Homo sapiens
cggctgttcgagaggatggaatccacagaaagaaatgccttcttagtcgaataggtacttcgacttttataggtataaaagtcgaatttcggatcctgagaggacgtatattgaggtggaaa

SEQ ID NO: 285458 - DNA, 122 bp, Homo sapiens
cacggcccccgacttctttctccctcccaggcgcgctacccacaaccacctgcgccaaagcgcgcgaaaatctgcagctgcgggacgtgttgtcatccaccgtctgcctccgcttttctcct

SEQ ID NO: 285459 - DNA, 122 bp, Homo sapiens
ccctatccggcgagatctggcttaccacgagggtcagcagcagatgcaggcagacggctccgcgcacggagcgccggggcccagcggcggccatcgggatgccgggcagggccaggagaacg

SEQ ID NO: 285460 - DNA, 122 bp, Homo sapiens
gacagaccaggataagtcttctgggagcctggagttctctttcaagggatgagcagcagtcggggacccatggattcaggttggtattttagaaagagcctgctggtaccagggtggaggtg

SEQ ID NO: 285461 - DNA, 122 bp, Homo sapiens
tgaagatgcatcaggcattgatcggctctgcagactagtttttacaatatctaatggtaccgaatgtatgagcctgtcattcaccccagagatgaatctcgacaaaacaaaaggaaaaaaaa

SEQ ID NO: 285462 - DNA, 122 bp, Homo sapiens
catggctgctgctctacgcgtgagctgttagttgatttaataatagcctcctccacctagcgctgggacgaaatgtcaccttccatttattcccactgtttgtagcatctgggatgccactc

SEQ ID NO: 285463 - DNA, 122 bp, Homo sapiens
ttggtctttaatgttgcttgcgaatgcatgggggtagaactctaataacaatgatggacacgatgtccttgcacataaacatttggctcctcacagcatgagatgtctggtcagccacagag

SEQ ID NO: 285464 - DNA, 122 bp, Homo sapiens
cacagaaaaacaataactaaaaagcggtctccatccctgaagccaagctgggagagtagccgaaggtcgcgcttcctggccgccaaaaccgaggtggaggaaacttggtagtcagcgagcta

SEQ ID NO: 285465 - DNA, 122 bp, Homo sapiens
gccggagccgggcctggaggccggccggggccaggcgtgcgcagtggttcttgggagtggcgaagcgggtcctgccccgctgtcagctgcggcccccggcgccgggcgggggtggccgcgac

SEQ ID NO: 285466 - DNA, 122 bp, Homo sapiens
ggtcctctgtgcaggttggaggatggttggttgtggcgagcgaggctgaaggagccgggacgcggggctctgggcctcgggaactgagccggtactcacctccgccccttctccccgtcgct

SEQ ID NO: 285467 - DNA, 122 bp, Homo sapiens
taatgagagtcacctctgaatgaatgagcaagtctggggaagcaaacccaagcactgaaacgtttagtgaatggaaagggcctatgcatgcccttcacaaagttagaattgtggactaaaat

SEQ ID NO: 285468 - DNA, 122 bp, Homo sapiens
cgtgagcgctgggcgggccgggttgtgttcatgttggtgaacccgcttcgttcttgcccgcgtggatggtccgtggactccgggaaaaccttctcgtggctcaaagtccaccccctccctag

SEQ ID NO: 285469 - DNA, 122 bp, Homo sapiens
gcatatgttcattataagttactcttgtgtgatcttatagacatttcttaatggttacctcgaaaacgccaactctgaccctacctaaaaatgcataccctccctattctttgtcacagcct

SEQ ID NO: 285470 - DNA, 122 bp, Homo sapiens
cacagcccaccatgactggtggaggtctaggttctgggccctccctgaactggttaaatccgggcgtgtgagtatcggaggagccaccggctctccaactggcgcccctgactttagccatc

SEQ ID NO: 285471 - DNA, 122 bp, Homo sapiens
agtggtggggccgcctcagctggggagttatggtaaggataaacagaagggctctggggccgcccagagtgcataccccccagggtgcagacgggggaacagcaattgtctctgagggggat

SEQ ID NO: 285472 - DNA, 122 bp, Homo sapiens
taggcctgcccttccgcctggcaggcccagagtggattccctgggccgcagtggcctggacgatggccgggtctgatagcggcaggcggccgcgatgatttgcgggattctcggcatggcac

SEQ ID NO: 285473 - DNA, 122 bp, Homo sapiens
aagcagggtgccacggcctgacagtaacaatcaaacaggagggttttccaatgccatgaacgtaaatcgaggtgtgcatgataacaaggagtaggaaccggagggacggccactgagggtgg

SEQ ID NO: 285474 - DNA, 122 bp, Homo sapiens
gaagcgactctgccacttttaaagggcaccctaaaaacggatgtcaaagtctgattgcgccggccactcagttagcccaggcccgtcacccacctctccgcggctgccaggttaccagccac

SEQ ID NO: 285475 - DNA, 122 bp, Homo sapiens
agcagtagacaatgtcaggttccttgttggaatacattctgcatttcaataggcaaggctcgagttgtatttcccagcactgaccaccaggggcagtagacattttatgttttttgggaatg

SEQ ID NO: 285476 - DNA, 122 bp, Homo sapiens
acaagggccacccactgaggaaagggagggccgggcacataccccagttcagctcaagggcgggtcagtcagctagatcctgcctgtgtggtattggagagttaagttgtcagtggtttagg

SEQ ID NO: 285477 - DNA, 122 bp, Homo sapiens
cagtggaaggtctccggtgcctgttcagggcttcacgtggatctgagcatcatgcggacacggtggcgtctgccctcagggacactgcacatccatcctcgtaccacggtagggacggtcac

SEQ ID NO: 285478 - DNA, 122 bp, Homo sapiens
gtccaggaggaggtcccgattgcatccgagccccgccttcccgcgcccctagctggcggccgcgactctgcgcctgcctgggagacagaccaaactgcagctccctgcagaactggctcctg

SEQ ID NO: 285479 - DNA, 122 bp, Homo sapiens
acaagaaaaccaaggctcagagaggttgagtgacataaccaaggtcacaaaagtagtaagcgggagggctggaaccagaacccacctcttctggccctgagttccacacgcatggtatatct

SEQ ID NO: 285480 - DNA, 122 bp, Homo sapiens
aggggcgggagaaagggcctggttggtaggcgggctcagcggttcgcgcccagttagccccgagcttcggagacccgagagaccagaggatggctgacacgaaggggcacccgagacagcgc

SEQ ID NO: 285481 - DNA, 122 bp, Homo sapiens
gatacatactgagatattaggctgaatcacatgacattgtctcttgcgtaggtcaagtatcggcaatatttaaggacgaaaggttatgacgttcacaacaaactctcaaaataatgaacaag

SEQ ID NO: 285482 - DNA, 122 bp, Homo sapiens
ggttcgtggtcttaagctgcagaccttctgcagtgagtgttacagctcttaaaggtagtgcggacccaaagagtgggcagcagcaagatttatatgtgcatgtatacataaatatgtataga

SEQ ID NO: 285483 - DNA, 122 bp, Homo sapiens
gttgggtggcagggttgatacctggggtctctgacaccaccaagtggtccggcatcccaccgctgggccactcaccatcccgtctttagtcgaaaccgaaagaccccggctgcagacagagg

SEQ ID NO: 285484 - DNA, 122 bp, Homo sapiens
tggccttcgagggcgaggccgcctgccgggccttcctagagcccctgggcctggcctacacgggcccggacaactccagcatcgactgccgcctcagcctggcgcagctgtcagccttctga

SEQ ID NO: 285485 - DNA, 122 bp, Homo sapiens
aggggccccaaccgagagtggcagcagcgggcattgcagcagacttgatggcctgttgggcgtccaggatttacggccacgttatttttaccatctccttttgccatgagacccggcagagc

SEQ ID NO: 285486 - DNA, 122 bp, Homo sapiens
ccgaagccgctttgttctccagatgtgaatagctccactataccagcctcgtcttccttccgggggacaacgtgggtcagggcacagagagatatttaatgtcaccctcttggggctttcat

SEQ ID NO: 285487 - DNA, 122 bp, Homo sapiens
tgtccatcagcggagaatggtctccgtggcaggccaaggtgcctcagattgaagtggagacgcacaaggtggcagcccctgatgtcgtcgtgccaacgctggacacagtccgccacgaagcc

SEQ ID NO: 285488 - DNA, 122 bp, Homo sapiens
gcgctgcgcacctcctcgcctcgccggtgcccgcgagggtcgctcgggcacgggaggccgcgggtcccggcctgtcaccttcagggccgcctgcccacccgcccgccgcaagcccttcagca

SEQ ID NO: 285489 - DNA, 122 bp, Homo sapiens
tgcccctcactggtgtggatggaaatctgcctttcgtgggaccaaacaggactccttggacgattagttcaggttgggtttggttttcttcttaaagagtttagttttcctctccagaggga

SEQ ID NO: 285490 - DNA, 122 bp, Homo sapiens
gcgcagttcctggggtctccacagctgaggcaggttggtcagatcattagggttcctgctcggatggcggcgacgctgatcctggagcctgcgggccgctgctgctgggacgaaccggtgcg

SEQ ID NO: 285491 - DNA, 122 bp, Homo sapiens
tgggctttgaggaaggggagagagtagtttcttctgagactggatagtgactcagggacccggggctggggcctcaaaagtgcctttgttggcctgggctcaggaatccagagaaactggtc

SEQ ID NO: 285492 - DNA, 122 bp, Homo sapiens
catccctgcctcggggcttgccagtggcttcggagctgcgggaagggctggccatggctccgggggctctgcctacacttgcggaagaagaaggagcctgcgcaagcggcctctcggcggag

SEQ ID NO: 285493 - DNA, 122 bp, Homo sapiens
ctgggtttccaaaggctcatccagccaagcgaagtatctatgacctcgtcgtgttcagcgcgcttagggaaggattctatggactgcacttttaccctggtgtcctgcattcttgctccaag

SEQ ID NO: 285494 - DNA, 122 bp, Homo sapiens
cgcacaaggccagcgccatatcctgcactggccctccctcattgtcctcgccgagggaaacggaatgtgtcagtctgagtaatgcgccttcaatgcttctcaggagccgctggctcggccgg

SEQ ID NO: 285495 - DNA, 122 bp, Homo sapiens
agactagctgttttttgaccccctcctctcatttttttggtgttaaagatgtaaggctgtcgtatcaggtcctcggatgtccccccacatacccccaaggtagtttgattctcaggtgttgc

SEQ ID NO: 285496 - DNA, 122 bp, Homo sapiens
aagccctacacctgcgagtgtggcaagagcttcagcaggaatgccaatctggcggtgcaccggcgtgcccacactggcgagaagccatatgggtgccaggtgtgcgggaagcggttcagcaa

SEQ ID NO: 285497 - DNA, 122 bp, Homo sapiens
cagcagagccgcgacaccagcagagccgggacaccaccagagccgtgacaccagcagagccgggacaccaccagagctgcgagaccaccagggccgggacaccaccagggccgggacaccac

SEQ ID NO: 285498 - DNA, 122 bp, Homo sapiens
gcacgggcgggaaccggggctgcgcgctgcgcttgtgggtcagctagagttccgggtgggcgtgggcttggcgggccctgcactcggacaggcccgccggccccaggcagtgaggggcttag

SEQ ID NO: 285499 - DNA, 122 bp, Homo sapiens
cggcccctggccccggaggcctccagctgccaggatagctcggctgtgaggccgggcctgcggctgtaccagccctggctgcctgggtcaacaagagtgccagcccccggtgctcaaccggg

SEQ ID NO: 285500 - DNA, 122 bp, Homo sapiens
ttcagcaggaactggtcccgcaggaagggtgagcaggcggccaagatgaccttgtggcctcgaaacttgaggctgtcggccacaatggtcacgtcgcagaaccgctcctctgcccggagctg

SEQ ID NO: 285501 - DNA, 122 bp, Homo sapiens
ctgaagtagttgctgctgctgggagattgattctcactggcccggctggaggcatgggagcgcgcagagcccatggtagcaggggccacagtgcccccactcccggatggcaccccagcacc

SEQ ID NO: 285502 - DNA, 122 bp, Homo sapiens
ggggcccagccggagcgcacggagggggaggccgcgggggagggggaaggggagaggaagcgagcgaggacaatcagacctaaaaggctggggcagacctcgggatgcagcgggggtcgtgc

SEQ ID NO: 285503 - DNA, 122 bp, Homo sapiens
tcaggggagtggcctcggtgggcaggctgcacacctgtacttctgggggctgttagaggccgctgggcagttgctgcagctgaaccagacatgagagaggctttcactggtcaaaggcttgg

SEQ ID NO: 285504 - DNA, 122 bp, Homo sapiens
gtcctgaaaggattactttatctataaccttcctgaacactagccttttcctgttgagttcgcatggaaagtttttccacttaaaatggggcagcaaggctgggaactagtaggagtagcgt

SEQ ID NO: 285505 - DNA, 122 bp, Homo sapiens
gaatcctgcccagccggagtcgtgcagaggcttatggggactcgtagtcccgctcgccggcgttgtccgcaattcctgcaatcggaagactacacttcccggcaggccatgcgggggatcct

SEQ ID NO: 285506 - DNA, 122 bp, Homo sapiens
gtaggaccctccaggacaggtgcaggatataatctcgtggtgcaccgtttttaagcccctcggaaaagcgcagtattcgggtgggagtgacccgattttccaggtgccatccgtcacccctt

SEQ ID NO: 285507 - DNA, 122 bp, Homo sapiens
gaatcatgagatctttagaacaataaacaaacccctccttcttgctgaggatcagctactcgctatttaagaagagaaagcaaatttatagaaggggagagacagcctctggcagctggctg

SEQ ID NO: 285508 - DNA, 122 bp, Homo sapiens
cactcggctacctctggaaacgctcggctgtctcgggggcaccctctagtccaccagtcccgcgggattacgttcggctacttccggaaacactcgggtgcccccttacctcaggctccgcc

SEQ ID NO: 285509 - DNA, 122 bp, Homo sapiens
ctaataggacagtacttcccaaataattctccaagtgaagacagaacttccaagttgacacgaccaactttcagtgataccttattaatgtgaccctatctttaatctacagccatgataaa

SEQ ID NO: 285510 - DNA, 122 bp, Homo sapiens
ggcagggggtggagggggcggtaaatcagtaacccgcagtgcacacagggccttttgtcccgctccgtccaaagagcaccccggccgcggagctggttactcattgcccaccgaggcggggg

SEQ ID NO: 285511 - DNA, 122 bp, Homo sapiens
tgcatttctgggtctgtcacccaggcatcaggatttttcaaaattacccctctgttgagccggggagagcaggttaactcttgcagggagaactgggcttgcagggtccagccagctgccag

SEQ ID NO: 285512 - DNA, 122 bp, Homo sapiens
agcatggtctgtagaaggaaggacaggtgtctgacagagagggcagggttccccatccttcgggaggcgtagaccaattcatggagcaaacgcatctggaccgcagcccagcctctgtgcgt

SEQ ID NO: 285513 - DNA, 122 bp, Homo sapiens
agcagatcacattatgaaaagcagactccaaagtattcactctgtggtatcccccacactcggcaaatgtttttgtgcattttcttatgtcagcctcaaaacaaccatatgggatctgcaca

SEQ ID NO: 285514 - DNA, 122 bp, Homo sapiens
ctgcctagtgtggtcatgtcattctcctttctcaccttcctcttgacccctgctctattccgtcccaggcttggtatcgttctctcacctgcctgtagttggcagactgtcaggtcaactgc

SEQ ID NO: 285515 - DNA, 122 bp, Homo sapiens
caggcaaggttcaccacccctccttccagcagcctctagaaggtggaacgggcaaggaaacggattctacgctagagcctcccgaggagaacacagctggccggcacctggattttagccca

SEQ ID NO: 285516 - DNA, 122 bp, Homo sapiens
gggcccaaggggtggggctgacgctgcagctggcgcagctcaggattagagcagcggagccgcctagcagccaccttcccccgccagtccgcgcgcccgggccggggctaggccccccaccg

SEQ ID NO: 285517 - DNA, 122 bp, Homo sapiens
tagagaggaattgtcccctgggaactgtacttaaaagatttcagccagaagcctcatctgcgcctggacctggtttagatgatgaaattttgaactttgagcttgatgctataatgaatgac

SEQ ID NO: 285518 - DNA, 122 bp, Homo sapiens
caatgttcctaatgggttcgtttcagaagtgcctcactgttctcgtgacctggagttaaccggaacagcgtcttcattcatttctgttgggaccagacgcggagcctgggtgcgcgagccgc

SEQ ID NO: 285519 - DNA, 122 bp, Homo sapiens
gtgggggtggtgtaggtggatcggatccgagccaagccgggggcaactaggccaggcctgcggttcccctggctctcgctctcccacgctccggttagctgcgggcggcgggctagggcgcg

SEQ ID NO: 285520 - DNA, 122 bp, Homo sapiens
gcgacggcagaggagtaagtgacgcgggcgtgggggtccgggggtgcgcggtaggggcggcgggaggctcagtggccggccccgggttgaagttggtaactgagcggcaactccggcgggcg

SEQ ID NO: 285521 - DNA, 122 bp, Homo sapiens
tgtgtgattatttctgtagttattcctgttaaaaaaacatccaagtttgttaaaaattgtcgggaagaagctcaggaaagggacagcatatttcactgagagccatcagaactttattcttt

SEQ ID NO: 285522 - DNA, 122 bp, Homo sapiens
aattgccctgggatttttcccagctgatgagctttgttttgaccctcagcataacgtctacgccctttcttcatcttttctttaactcctttcatctgattcctttgacactttaccatgca

SEQ ID NO: 285523 - DNA, 122 bp, Homo sapiens
cctctagcactgggaatctgtcaccgtgctgtccttgtggagtcttgtggcccaacaagacgaaggtctcccctgacactgcccctccaaagtgtgccacctccagtgagcctccctgtcat

SEQ ID NO: 285524 - DNA, 122 bp, Homo sapiens
acccttgcagagagtagcccaggttcattctgaatttggagagaccaagaaatttcagtccgtgtcagagaaactgatccttggttgggcctgacttgggctggggaagggatggcaagtag

SEQ ID NO: 285525 - DNA, 122 bp, Homo sapiens
ctcgagtggtcataggattgcgctgaacaccaggcgcagtgcaagctgccaggagggggccgagggggcgtggccatgcccaggcctgggtgtgaagccaatggccgtcagccgacgtcagt

SEQ ID NO: 285526 - DNA, 122 bp, Homo sapiens
gagcgcaggctagaaacagggctctccttctctagctgaggctccccggtggtgatggcgcggcctccttactcccgtcgtggcccacaggcgtactccgcgagggacagtgctcagaggga

SEQ ID NO: 285527 - DNA, 122 bp, Homo sapiens
atttcactgaaagcgcctgagaaccagtaagagacctgcaacagctttgtgctccactggcgaatgcttcctcccctaatacacattatgtgtgcttggagacacaaggagtaagatacagc

SEQ ID NO: 285528 - DNA, 122 bp, Homo sapiens
tatgacatttgagcacttaatgaagacctttaggagagaattggagagtgagtgcacactcgttctatcactggaacgacatgagattgtaatctatcatcctggtccacacacaggggtgt

SEQ ID NO: 285529 - DNA, 122 bp, Homo sapiens
taacggagaactttgagtgggactgagaaacctctgcctccccttttactaatacaatgccgcgcacaaagaagggaggcggcgacccagttccagcctccgggggtagatctgcggcgcac

SEQ ID NO: 285530 - DNA, 122 bp, Homo sapiens
cagcatgcgagaaggaaccggaggatggagagaagcgcttacttcgaaaatgctctgaagcgtaataatagacatcctcatagccctcgtggtaatcctcttctggtcggtactttttcccc

SEQ ID NO: 285531 - DNA, 122 bp, Homo sapiens
aggccatccctgaagttacttattaggggcaacacacctgtatgctgtgtttgtcacattcgcatcttggctgggcaccttgaactggaggctttctggtgttgtttgccattctgatgaag

SEQ ID NO: 285532 - DNA, 122 bp, Homo sapiens
cacacgtgcacacacactcccacgcccacacatgcccacatgcccacaagcccacttccccgagacggtagccatgggttcatctggagcccattcctcaatcaccatccggtctcacagcc

SEQ ID NO: 285533 - DNA, 122 bp, Homo sapiens
gaaatcaggaactagtggcatgacattttgagaaagatatttaaataagctggagagactcggtgtctccagctttaaaacagaaatcagtctctgccacttcataggtgctagaacaaaag

SEQ ID NO: 285534 - DNA, 122 bp, Homo sapiens
gtatcatggctttagcacagggtataacaaatcaaggttcttttgtttttttaattatggcgaagatgcaatgagaattacgatttgactaagttggactgtgactgctacaaccattacat

SEQ ID NO: 285535 - DNA, 122 bp, Homo sapiens
tcgcgtctccgcaggacttcatctgcgtgtcgtacctggagcccgagcagcaggcgcggacgctggcgtcgcgggcggacacccaggcccaggcgctgtgcgcgcagtgcgcggagaagttc

SEQ ID NO: 285536 - DNA, 122 bp, Homo sapiens
accagatggtgaatgctggaaacgcatcggtgtttttgaaagtgaaaacagacaaatcaccgcaaataaaggaatcagtgtcagctctctagctgggaaccaccaaggttacaaagctaacg

SEQ ID NO: 285537 - DNA, 122 bp, Homo sapiens
aatatctgtaagtcacatatgttataatacatttgcattcttaaacaaatagaactcagacgaacaatttaaaaatgattatttatgccctaagaagctgtgttaccctgaagtgccatcga

SEQ ID NO: 285538 - DNA, 122 bp, Homo sapiens
ccttggtaacagggaattgcagcacgagaaacaaagtcatgtccctaaccccacttggtacgaatcagtcattctgtgtttttaattaattacacaaaacttctttccactagacgtaatca

SEQ ID NO: 285539 - DNA, 122 bp, Homo sapiens
tgggagactgggggcgtgaggcggctggcacaagacaggcggcctttcccagcgcgtccccgcccccactacgaaaggtcatggcgccctggccctgcagctgggtccctccagggctgccc

SEQ ID NO: 285540 - DNA, 122 bp, Homo sapiens
agacctggggtgggggtgggggccccaaggctgctagctgataagcggcaccttcctgggcgttttctggagccctcaggggagaccctggggccagctgggaggccgagcctgagtctccg

SEQ ID NO: 285541 - DNA, 122 bp, Homo sapiens
gccgttgggcggggctccaagcgggggcggggcttccggcgggggcggggccaaagcaggcggcggaagagacgagaagcggggcgtgcgcggggcggggccgaggccctcctcccctcccg

SEQ ID NO: 285542 - DNA, 122 bp, Homo sapiens
tgagaactacataaaagagcataacaaacatatgggataagatgaaaaaggtctgtcatacgcataacaggcaacctgagagagaagggaaaatgcagcaaaatgggtacttagacagaatc

SEQ ID NO: 285543 - DNA, 122 bp, Homo sapiens
ctcccgttccgtggccaccacgaagtccaatggctcggcctcagcctcaggccccgatcccgacctgggctcggcctccacctcctgtggccgggtttcagagcttggctctgcatctcggg

SEQ ID NO: 285544 - DNA, 122 bp, Homo sapiens
aattccacggtcctaggggtgttaaaagtccctgcaactttccatcatagagacttgggtcggcatctccttctcccaagcgttatttggggtaaggcaaataagcaacgagtagagaacta

SEQ ID NO: 285545 - DNA, 122 bp, Homo sapiens
agccactgtattctttttccattattttttacatcccgttctcatttgacctaatggtatcgattttagttatactttcccttatcttatttttgctactaatttacttctccatgctacta

SEQ ID NO: 285546 - DNA, 122 bp, Homo sapiens
aaaacccagtaagagatgtggggtttacgagttttcaatgtaaatgctcattgaaacccccgggtaacctaagcttatttttttcttttcgttaaattagatccctgaaaggctgcatggtt

SEQ ID NO: 285547 - DNA, 122 bp, Homo sapiens
gacagatacaagtgtgtgatctccatgagaaataagtgagctacattacttataatgctccgaacatgcgtagttcagttcttgtcacctgttaatactaaacacatagaaaggattttaaa

SEQ ID NO: 285548 - DNA, 122 bp, Homo sapiens
acggcctcactccccatctggggatggctgctgggaggtgaccgagcctccctaggcagccggggccctcctcagccctcgtgcttgccttccaaagagctgtggctgttttctccgctccc

SEQ ID NO: 285549 - DNA, 122 bp, Homo sapiens
aacacagggtgagagtgagaaagtgctctatgaacgtccagcgtcaggctgggcattggccgcttctcagccctggcagtgctgggggtgagccgcgggctccggcctccactttctctgac

SEQ ID NO: 285550 - DNA, 122 bp, Homo sapiens
tttaaataattttctcttcccgccaaaatgtccgtagtagtagcagcagcagcaggtccacggggagcctgccctcggtcctgcttgtcacatccctaatcgcgtcccatctggtgtctggc

SEQ ID NO: 285551 - DNA, 122 bp, Homo sapiens
ccgggaggggggagggggccgggggcgggggccgggtggcggacgggggggcccgggagtcgggggagcggctactcacgagccccgggcgggcggcggcggagcgggcggcggcggcggcg

SEQ ID NO: 285552 - DNA, 122 bp, Homo sapiens
aaccccaggcagccttttttctttttcttcgtatttcggttcacgtctgaaaggctttcacggtccatccattttagagcattcggctggttgccccatgtgcccttccctgtggacttgag

SEQ ID NO: 285553 - DNA, 122 bp, Homo sapiens
gcactacgaggaagagcccgggttcgcgtttatatatgcggccgctgcgctttgcgcatgcgtcatctcgttgttctgcgcggcacaaaggagctgggcggaaacagccaagaaacgacgcg

SEQ ID NO: 285554 - DNA, 122 bp, Homo sapiens
ccctcccggacggcgaaaagtctcagggcaccctccgtttcattggccacagctgagccacgtgactcaccagagccaatcacctgccagcagggtaggaggctgctgattggcctggactg

SEQ ID NO: 285555 - DNA, 122 bp, Homo sapiens
ggcaacaaagtgagaccttatctattaaagaaaaaaatcagtttgagcaaagaccccaggcggccgggaaaggtgttcgcttaagggcgaaagctaagaacctgcaaccttcccgtctcttt

SEQ ID NO: 285556 - DNA, 122 bp, Homo sapiens
gcatttactgtcctgaggtccactgtagctttcccctcatactttcaggcttctccttgccgaactatgtgaggtcttggtcttgggttctattaatttctggaggttggtaaccgctccaa

SEQ ID NO: 285557 - DNA, 122 bp, Homo sapiens
ccaccctgcagagccccaccatccccccggtgtctgctcagccctcgccctgcacccacacgcccctgaagcctgggcgggctgccgcctgttggatttgtttcaaggtgcaaaggagctgc

SEQ ID NO: 285558 - DNA, 122 bp, Homo sapiens
ctgtctcccgggacgctagagcaggcggttcctgggctgctccggtaggtttggcgtgcgcgggtttctgcagatctagggcgagcttgcacgttacatcaccgatgcatctcttcttgctt

SEQ ID NO: 285559 - DNA, 122 bp, Homo sapiens
aatgcaatcgggcgcggccactgcctccctcggagctccgcgagaggccctccaaaaagacgctggcacggaactcgcggctctcctgcccgttggatcccgaagcaccagtcggggcccca

SEQ ID NO: 285560 - DNA, 122 bp, Homo sapiens
gccacggtgcctgtctgcccgagaggttttaaagttcttctttacactttgcggagcggccggatttttaccacgaagccaccgagtagtccgcaccacataggttcagtatcctccgccca

SEQ ID NO: 285561 - DNA, 122 bp, Homo sapiens
accgcccaaccccaccgcctccgacccccctgcctggaagctgctgtcctttgagggcttcggagatgagaacaggaaacaggcccctccagtgccccctaacccagagaggcagaggctgt

SEQ ID NO: 285562 - DNA, 122 bp, Homo sapiens
gagatttaggatcttactgccctagtttaatcttggtttgcagatgagaggccgaggccccggggtcctgagccacgtgagctgggcttccaccctggactccatgccgcgcctcctcgcca

SEQ ID NO: 285563 - DNA, 122 bp, Homo sapiens
tcctttctgcctctgagaatgaagatcctgtgttctttattcaagagcccattccagggtcgagatcctctgctggctggagtcctcctcttccaggcaccctctgggctggattggggttt

SEQ ID NO: 285564 - DNA, 122 bp, Homo sapiens
aggtaaatcccaatacgcctggcactggggttctggacagacttggtctaaatacagccacgtgctcggggctgctgtgctccagctgtgcgtttcggagcggtttgcgcgcacgcgcacgt

SEQ ID NO: 285565 - DNA, 122 bp, Homo sapiens
aataaaaaaatattttttcaacataaatgtaaaatcaacaaaagtggaagaaaaaaagatcgagaatacaatattggtagctggaaagctggtggacaagtggtaacttagaagaggcaaga

SEQ ID NO: 285566 - DNA, 122 bp, Homo sapiens
gcttcagataaacagaaagaaaaggtaaacaacatgcgccactcttaggaaactacctcccggtcaagttgggaaagccagcaaaggactgctgaaacacccaagtacttccgaaccaactc

SEQ ID NO: 285567 - DNA, 122 bp, Homo sapiens
cgcgcgcccgagtcagggggcaggtcgtgcatggcctggatcagcagataataggcctctcgcaactgggtccgcagcctgcctgtctccaggcggccgccctccgcccccagggaggagcc

SEQ ID NO: 285568 - DNA, 122 bp, Homo sapiens
aacattattattctagtgctggtctgcttcccttctttctcttaaataatctgctttaagcgttcaaagggtctactcatctcaggacatgactatagctaatttgctgagagcctctgaac

SEQ ID NO: 285569 - DNA, 122 bp, Homo sapiens
ttttgcagctgctggtcatccaggtaatccaggtatttgcctcgcagggccggggggtggcgacactgcacgaagacagtgaggagccggccctgcgagtgccagtcgcccatccagcgctt

SEQ ID NO: 285570 - DNA, 122 bp, Homo sapiens
ggcgccttcccgtagccccggccctgtcattaattaatgctggggctccattcggtgcagcgcagtcccagggatgcaaccgcaacttttgcgcacaataggctctcgatctgtaatccagc

SEQ ID NO: 285571 - DNA, 122 bp, Homo sapiens
cgctgtccgcccgcctcggcctcccaaagtgctgggattacaggcatgagccaccacacccggccatgactagattttcaaaggctattggtatcaggagtgtcttatgaaagataagttta

SEQ ID NO: 285572 - DNA, 122 bp, Homo sapiens
cctccgaaggacaccctgctgccgtggccccagcaccagaacgccaacgggctgaggcggcgcaaacgggactgggtcatcccgcccatcaacgtgcccgagaactcgcgcgggcccttccc

SEQ ID NO: 285573 - DNA, 122 bp, Homo sapiens
cccgccgctgcgctgcctccgtggccggaccggaccggacaggcgcgggcggccgggctacgactggaccgccgctgctacagcggccgccacagcagcgcgacttcctcttccggccccgc

SEQ ID NO: 285574 - DNA, 122 bp, Homo sapiens
ttctctgctgttgcttcattttatagtctcaggaaatctcatcataggtaagtagtacctcgaaaacttagccacattcctttgcaaagaataacagaaagcaaaaaaatacaaactgcttc

SEQ ID NO: 285575 - DNA, 122 bp, Homo sapiens
ggagagccccagggctgagtgtacacaggggcccatggactgatgggtgtgacttgtgcacgtctccctaggaaccggggatgggagtgagcttgtccttgtcgattttgtgtggtttaaca

SEQ ID NO: 285576 - DNA, 122 bp, Homo sapiens
ctgaatcgcgtcgtgacctcgggcagccgtgaaggccctgactgcccccttccgggcacacgagctcactcacagaccccggccccatttagctcggaggaatacctcgcaggtctcgcttt

SEQ ID NO: 285577 - DNA, 122 bp, Homo sapiens
cctggccgccgagtgcgcgcgcccgtcccgcctgccttctgctcaccgctactctgtctgcgcctgcgtgctttggctccctggatctggtaggccgagttctgttctggggcctgagtttg

SEQ ID NO: 285578 - DNA, 122 bp, Homo sapiens
gctgcaagaggcagctgcggagggagcgcgcggcgggcctgggggagcgctgggcgggggcgggcggtgcgggcagggctatacccgagctgggcgggctccgggcgccgcgggccctgccc

SEQ ID NO: 285579 - DNA, 122 bp, Homo sapiens
caagtgcattgaaccaccaccagagcctaatatcattaaatattcatgctatacagccctcggctcagtttcttttccttccttccttccttccttccttccttcttcctttctttttcttt

SEQ ID NO: 285580 - DNA, 122 bp, Homo sapiens
aggctccgtggggcggcggagacagcaccggacaggccagcggagtcgggtggctgtgttcgaggcccgtctctggataagctgctttctctgaggctcggctttctcattgtgtctgtaac

SEQ ID NO: 285581 - DNA, 122 bp, Homo sapiens
aggggcggcgacttgtccaaagtcccactccgtggaggaagcggctctgcagacctcaggcggcggctgctctaatccctgcagcctgtgttttgccctccagacggcagagggcgcgtgtt

SEQ ID NO: 285582 - DNA, 122 bp, Homo sapiens
gtagcgggaccccggaaatgtaaagcatgagcgggaacagtcgccagggcgagtgacaggcgagccctatgctttacttccgagggcggtgtcagcaaagctaggtaaggagacagggagga

SEQ ID NO: 285583 - DNA, 122 bp, Homo sapiens
atgcatgaataatggtagcatttacccaggcccgtgtatttcagaaaatgggtaggaaatcgttcctatagcaacaagaggctggcagttcaagtcagtcacttctgctggatcatagaatg

SEQ ID NO: 285584 - DNA, 122 bp, Homo sapiens
ttttttaatattaatttccaaagaggatccgcgccgttgggagagcgcagtgccccagcccgcccgcctcggccacctctcgcccctctctttcttaaaattctgaggtctccggctcccct

SEQ ID NO: 285585 - DNA, 122 bp, Homo sapiens
tcggaatcagcaaagctcacccactgcaccacctgggctgctgcctctggagtacttccccgcagctcctcattgctcactgcagaggcagaacacgaaggtcagaactctgggggaatgcc

SEQ ID NO: 285586 - DNA, 122 bp, Homo sapiens
ggcctcgtcgtggctgctgctgctgctgctgacacacatttgaaagcctgagaagccaggcgtggagcacacacgcacgtacacacgacagagagacaggcatcagtggccgccgggaaccg

SEQ ID NO: 285587 - DNA, 122 bp, Homo sapiens
gttttattccctgatttttgccgtttttattgactgttacgatgtctaagtgggggattacgaggaaggtgcagaaacatctcgaaaagatgagcaagagggtcagcttcgattttagctgg

SEQ ID NO: 285588 - DNA, 122 bp, Homo sapiens
ggagccacttccggcggctgtgggcggaaaacccaaaacttccgatgggaccaagccttccgtggcttcacacgcaccggaagggaatctgggtcagccctccctccaaaggagacagcacg

SEQ ID NO: 285589 - DNA, 122 bp, Homo sapiens
gtacaactgttcaaggcatgctatcttctttaaggcctcacacacaccctccaacacagtcgtggatagaaaggtgctgactcctacagaaggagacaatggtcagagtagaaaatggctta

SEQ ID NO: 285590 - DNA, 122 bp, Homo sapiens
gcctcaaaccctctccttcaggtccccccgggaggggcagtggtgaaagcgcctgcggagcggagggaggtctcttttaattagaagcttatcggacacgggtttgattagagcgcgctgtc

SEQ ID NO: 285591 - DNA, 122 bp, Homo sapiens
acccatcccgggggggaggccccccccccgcgaggcggggactgagagccagcccgtcttcgccccctgactcttaggacccccatcgcagtggggggatgcaccccccgcgaggcagagac

SEQ ID NO: 285592 - DNA, 122 bp, Homo sapiens
gagtcaggagaattgcttgagcccagtagttagagtctgcaggaagctgtgatggcgccacgaccctttggcttgtgtgacagggagacccagtctctacgagaaaataaaaagttaaaaat

SEQ ID NO: 285593 - DNA, 122 bp, Homo sapiens
tctttttcccccttgcctggctcctgtggtggcaggctgggcacgaggaccatgctgggccggagcctccgagaagtgagtggaattggcccgctgaggcccccgggagggcggaaagttta

SEQ ID NO: 285594 - DNA, 122 bp, Homo sapiens
ccccgcggctagcctgtgtggctactggcggcagctagcgggctgcgaaagcgagcccagcgtccttgacagcagcccacgcgtcggggcggggcttgagcccgctgctttaaaaggtccgc

SEQ ID NO: 285595 - DNA, 122 bp, Homo sapiens
tggaaccaaatgacatgtaaaagaggttctgtggtaaaggttcagaaaatggcaaactttcgacctgaaagaagattgatttgggacatctggtccttgtgtgtgaagcaaacagcactggc

SEQ ID NO: 285596 - DNA, 122 bp, Homo sapiens
agggggaagcatcaggctctgttcagtggatgggcagtgcctccctgccccacatgcagccgcaggcactgagctcgctgcctgtcctgggtccacgtcgctgggtgctactgaccacctcc

SEQ ID NO: 285597 - DNA, 122 bp, Homo sapiens
aaggctgcagtgagccgcgctactgcactccagcctgggcaacagagtgagaccctgcctcgaaaaagccaaaacaaaaccggtaatactggcatcataccagcctgcactttgggacaggt

SEQ ID NO: 285598 - DNA, 122 bp, Homo sapiens
ataagtcagggccgagtggcgctggaggacgggaagatgtttgtcaccccgggggcgggccgcttcgtccctcggaaaacattcccggactttgtctacaagaggatcaaagctcgcaacag

SEQ ID NO: 285599 - DNA, 122 bp, Homo sapiens
catgtgaagacagaggcagagattggagttatgctgccacataactccaggggacaggggcggaagatgggagaacagtggggaatctagtgcaataaaatataaataaaagatgatggtgg

SEQ ID NO: 285600 - DNA, 122 bp, Homo sapiens
cttgtcctggcgctgtctcttgcatttgtagcgtcggttctggaaccagatcttgacctgcgtggacgtgagctgcagcgcgctggccaggtgctcgcgctcgggcgctgacaggtaccgct

SEQ ID NO: 285601 - DNA, 122 bp, Homo sapiens
taaattaaaattaaacaaattagatgcccaggaggatacaggagagcatttgccaccaggcggactccctgtacccacccggccacagggggcgatgttcctgggagacaggaaatgcccag

SEQ ID NO: 285602 - DNA, 122 bp, Homo sapiens
tagggaacaaggagaggtgggaatgccacaaaccaggctctcacctgcacgagcagctcccgactctgggaataattatcctcctcggagaaaatctggcagaggctggaaaagactctgag

SEQ ID NO: 285603 - DNA, 122 bp, Homo sapiens
gtcattacttatgtaacccactctgcatccacactgacatatatagctgaatgaagaaatcgctcaagcaaaatgttgcctccctttgaccttgtctgagtgccattcattgttgttatcag

SEQ ID NO: 285604 - DNA, 122 bp, Homo sapiens
aatggagtgctattcagccaaaaacaaaaaaacaacacaagatcttgttatccgcaacaacgcagatggaacaggaggtcattatgttaagtgaattaagccaggcacagaaagaaaaactt

SEQ ID NO: 285605 - DNA, 122 bp, Homo sapiens
gtctcctagggctgaagacaacttggattgcgaggctagggcttggggagtcgtgcatcccgttccgggcctccgcagcccaacatgggccccgggttccaaagtttgcgaagttgggcgcc

SEQ ID NO: 285606 - DNA, 122 bp, Homo sapiens
ctcagggacttgctttggagtcatggattaaagacctctctgggcagcgttgagaaccagcgaccctaaacttggctgcgtttccatggtgtcgatcgcggagccgtgggggcgggctcacg

SEQ ID NO: 285607 - DNA, 122 bp, Homo sapiens
gctatttggcgacggtggaattttcccgggacaggcccctccctcctgggctgggattctcggttcttccccctcctcccagagctgggctaccccgggagctgagggtcagatgtggaagg

SEQ ID NO: 285608 - DNA, 122 bp, Homo sapiens
agactgcggctgcagccagtggagcccgggcccagagcacagtcagctgatggccaatgacgtcaggccctgggcgcgttcgcggctccccgtggcgtcccatgaaagcccaaatgaccgcc

SEQ ID NO: 285609 - DNA, 122 bp, Homo sapiens
atcaacctgaggacttaggtggctggttatttctgagtaagtgaatatcactctcaaatacgacattccagcaaaggccatggttgcatagccactgtttttagttatgtcctggtaactag

SEQ ID NO: 285610 - DNA, 122 bp, Homo sapiens
cttaagctgctggtcctggtgcatctgctgactttcatgtagaagatagcagagctttggcgacattacaacataagaactgcagagaggtgtaatcccagtggaagactgaatcgagagac

SEQ ID NO: 285611 - DNA, 122 bp, Homo sapiens
gccgagtccctggcgccgcccgcacgcatggcggccgccccgggtaacccgcgcttgggacgccgcacgccttttaaatgttttttctaacctgcgttttatctttggaggattttccctat

SEQ ID NO: 285612 - DNA, 122 bp, Homo sapiens
aagtttcccttttaggtgccaaaatgctgaaaattacctttttaaagtgctctattgctgcgatttgtagcatacctttttttctcagcaaattgatgggtggaagctgagaaatgtatggt

SEQ ID NO: 285613 - DNA, 122 bp, Homo sapiens
ggcaaaagccaggcccacttcctgctcggctccgcccagagcagggggcgggcggataggcgattccctccaatcacagttccaaaaggagggggctgacaacatatcctccaatcacagct

SEQ ID NO: 285614 - DNA, 122 bp, Homo sapiens
gtctacttggttttcccaaatagatttgcgccagggtctcagccaatctccgatcggttacgtaacgcttaaagtctaagctggccttagacgccttccttggcggattcctgaaatccggt

SEQ ID NO: 285615 - DNA, 122 bp, Homo sapiens
tggcagtggccggagctccgtcgctggggcgtggagagggccgccccggcccgcagttcccgccctgacactgggataacttcccccgcggctgcccagcgccgccctgaccagaccctctg

SEQ ID NO: 285616 - DNA, 122 bp, Homo sapiens
cctgagcgtggcagctgctgccgggggtcctgggaccgcgggatgggaactcccacgcagcgtcccacaggctcctggccgccgcgagcccgcgcgactcgcacgagcatgtccacccgcag

SEQ ID NO: 285617 - DNA, 122 bp, Homo sapiens
caatgctctacaagcaactgcgtcaggcctgtgaagaccacgtccaggcacagatccttccgtttagagaatatcctttttttggttcataaagtttctattcattatctaagtcttttaaa

SEQ ID NO: 285618 - DNA, 122 bp, Homo sapiens
cgacattcccccatctccagaataatttggagtgcgtgagagaagggaggccctaaatcacgggggaagcagggcttgtcacctgccccatcgaacagcgtccttgcaagatgggggctctc

SEQ ID NO: 285619 - DNA, 122 bp, Homo sapiens
gccccagggaaaggccaggcactgtggagacgcttcccagccacactcgctgagccgcgccgggatagggtctctccacccaagctccttttaggaaagtggttcctgggaagatggataag

SEQ ID NO: 285620 - DNA, 122 bp, Homo sapiens
ccatcccagaaacatctgtgagatgaaacagagaaaggtcttatgaattcagctcgtactcggcctgtgctcccacccggagcaagcgagacatgaatcaccggcccaggggctcgggggcc

SEQ ID NO: 285621 - DNA, 122 bp, Homo sapiens
atccgtctgcctcggcctcccaaagtgctgggattacaggcgtgagccaccgcgcctggccgtgattttttttaatgaactttattttttggggcagtgttagattcacagcaaaatggagc

SEQ ID NO: 285622 - DNA, 122 bp, Homo sapiens
agcatgtgcacttttattctgagattaagtcagtaatgaagtctctactgtaaccacaaccgctggtcaactttcttctctgggcttcagcttctgtgaaattatttcatctaagtctatta

SEQ ID NO: 285623 - DNA, 122 bp, Homo sapiens
tttggttatttttctatttataccctcataacagttctctggccttctctatcttttggtcgcctgggaaagctaactttatgaactctcttacataaacttccttggcctttggcttctga

SEQ ID NO: 285624 - DNA, 122 bp, Homo sapiens
gggggtccctacccaggcccggaggaagcacctgcggttgtccactgggtgggcactgcccgcggggaacgggcgggaccgcaacttcggagcactttggcagcgtggggagggggctccta

SEQ ID NO: 285625 - DNA, 122 bp, Homo sapiens
ctcaaaagcttaagtcgggaagcccaacgtgactaaaaccaataggtgattgttcggggccgactgtgtgcgggtgtacacggtattcggcccgggtgtcatccgcggcgctggactgtttc

SEQ ID NO: 285626 - DNA, 122 bp, Homo sapiens
ttatatcttgtttccatctctatatccgtttcaagaggaggcattttctcgattatttagcgctgctccttttttctcaggggcggtattacgaccttggagacaataaacataatttaatt

SEQ ID NO: 285627 - DNA, 122 bp, Homo sapiens
gggcatggtattcctggccgcgggggcgggggggggggtccgggggccgggggagcgtcgcgctgacggcagccagagcctgcgatgacggggctgctataaataacttcttggaggctccc

SEQ ID NO: 285628 - DNA, 122 bp, Homo sapiens
cccaggctggtctggaactcctgggctctagcaatcctcccgcctcggacacaaagcgcccggcctggggaatcttttctacagaaataaaagtactacttcaaaaggatgtttatttttat

SEQ ID NO: 285629 - DNA, 122 bp, Homo sapiens
ttcccagtctgcacagaggacagggggacttgacagcatcaaatgctggtgactacaagacgcccatgtggggaatgcagacagaccatgcctctagcccttggcatccgggaccatttgtc

SEQ ID NO: 285630 - DNA, 122 bp, Homo sapiens
ggcagctcactcgtgcaaacgtgagtgcaaaatgcactccacggccaggaacaggcagtccgttcatgcgggcaaaatggaaagcgagctcctacccaggtttctcctcagagccatcacac

SEQ ID NO: 285631 - DNA, 122 bp, Homo sapiens
gtgcaggattgtggcttgaattgcagcattgccacttgtggtgtatgagtttgggaaagtcgttaacctctgaacaccctcatctgcaaaatgcagacaatgggtatgtgccactcaggtag

SEQ ID NO: 285632 - DNA, 122 bp, Homo sapiens
cctgcagccacctcagcctccaccttggctttcctggggggaggagcggcggcggccagccgggctgcctgagcctcttcggccacttctcgtacacgcagccgaggcagctggaggcgccg

SEQ ID NO: 285633 - DNA, 122 bp, Homo sapiens
tactcttggtatgttctccattttctacattcccataaaactgctctatgcttctcttaccggtagtatcactttctaccttgtattatacttaattacgtacattcttttttctcatcaat

SEQ ID NO: 285634 - DNA, 122 bp, Homo sapiens
ggcggcgggggcccgctggggacgacccgcccctctggcagcctcttgcagccggggagccgtgcccactgagcgcaaacagggagcacatctgagcacccggctgctgggggaagtgcaag

SEQ ID NO: 285635 - DNA, 122 bp, Homo sapiens
ttatgtactgcacagaaatgcatttgttatacttttataccacaagcaacgcagtagcttcgtttgcagcagcatcacgacaaacacgtccgtaattcattgtgctaccacgacactaggtg

SEQ ID NO: 285636 - DNA, 122 bp, Homo sapiens
ggcgggcgcttctcctaactttagttttggcgtttgaggcgagtttctgtctcagtcgggcgcagccgccgccagggaaaagaaagggaggaaggaaggaacaagaaaaggaaataaagaga

SEQ ID NO: 285637 - DNA, 122 bp, Homo sapiens
gctggctcaggagtgaaggtgcagaccttcgcgttgagcgttacagctcttatgactgcgcgcctggagttgttcgttcctcctggtgggttcgcggtgccgctggctttagcagggaagct

SEQ ID NO: 285638 - DNA, 122 bp, Homo sapiens
ctcacaacctccgcccggccccgcccacagcctccgccgcgcacgcgcagtcctcacgaacgagcgcgccaagcgcacagcgccgccttccggcagagccctcccaccagccctcaggtacc

SEQ ID NO: 285639 - DNA, 122 bp, Homo sapiens
caaccacagagggaaagctggaagctggaccacctcctcctttcaaggtaagcagtgatgcgcatccttacacaaccttatgggacctgtctgcccttgtggagatgggagcaggggaagac

SEQ ID NO: 285640 - DNA, 122 bp, Homo sapiens
atttcagatgcgtgacaggtgcccgtgtgtgtgtgtctgcagtttgggactgtggaagcacgagcttacataagtggttaggcaagctggcgtgtggacttgtgtgggatgggtgcaggtct

SEQ ID NO: 285641 - DNA, 122 bp, Homo sapiens
acagctgtacatatgtgcttttggggtgaatgtgaaacctgtatattcactgtttaccttcgaccctctactttgccagctttttgtccactttattccttattaattcttcctcccgggga

SEQ ID NO: 285642 - DNA, 122 bp, Homo sapiens
cttatcggggagacactcaaatatgacaccctgataaacaaacctacacaaacaaacacacgtacattcatcttggaacaaccctcccggctcagtgctcataaaacacacagatacccaag

SEQ ID NO: 285643 - DNA, 122 bp, Homo sapiens
gcgcagagctagcgcggggcaatgtggcgccctctgcggggagcccctgctgcctcgcgccggcactcaaacctccagtacacagtgcagtggagggcacaccagcagcagcacgcctgtct

SEQ ID NO: 285644 - DNA, 122 bp, Homo sapiens
ggcgcgtgcccttcgccttatgaacaggagccatgggtgacacgagcgcctcggctgggccgccggggtccgtctgaggtccatctgtctccaggtgtgtgctgggtctgtgggtgagatgc

SEQ ID NO: 285645 - DNA, 122 bp, Homo sapiens
tgacggtcagctgtgtgatgagctcctgcgagctcgtccgtgggcctctgccgccggtaccgccccgccccctggcctcctgaaccaccatttagtagggagagcaggaccactgtcctcct

SEQ ID NO: 285646 - DNA, 122 bp, Homo sapiens
ggtgctggtttccaatatggaaagcgaattgcacaatttaaggtcatgcaaccatgaacacgagaaacatgggaacctctttttgttggagagggcctggtctcttgtttttatttctctaa

SEQ ID NO: 285647 - DNA, 122 bp, Homo sapiens
gcacccgctagatggcgccgcagaccggcttgtacaggccgcgcgccctcccctccccggcggaggctcctggagcccctgcccggcctgactggctgcgtcctcaggccctgcgatttcca

SEQ ID NO: 285648 - DNA, 122 bp, Homo sapiens
gcctctgggcggctgcgggctagcggcgcggccagctacaaaggaccaggaggcggggatcgcggctggggcggggagggacggtgacgctcccgagccgcagcgcggagggcgggccgcgg

SEQ ID NO: 285649 - DNA, 122 bp, Homo sapiens
caaaataatccagctggagttgatgcccctttttggtcccctccagtctgcatttagtagcgaatagatgacaggaactagcataggtctgattgtcagtgccacaaacctatggaagataa

SEQ ID NO: 285650 - DNA, 122 bp, Homo sapiens
ggcttcaatagaatagatgttgaatagaatattttagtcttaagggagctagagatgagacgtgagattcctggggtgttcatggagtgtctattgttggactagatcactctgttgtgttt

SEQ ID NO: 285651 - DNA, 122 bp, Homo sapiens
aggtttaaaccaggacaccctgtgctaactctgctctttaccttgccagcaatcctcagtcgtcctggtaaacaacctctgagttaaataccttttcttttctggagaggttaccaacaaag

SEQ ID NO: 285652 - DNA, 122 bp, Homo sapiens
ccccaaaccaacaaaagctcagtcaagcacaagggaacttactgtgtgaataggtgtcttcggccatgctggaagagagtcctgaaggctgagccactgtctgggagacaagtcactctgcg

SEQ ID NO: 285653 - DNA, 122 bp, Homo sapiens
taatgggttagattcctgatcacctctaaccccttttgtgttgagagtttcttttgattacgaagtcatacatagtcattgttttaaaacttaaaatatggcaaaccatagtcaaagtcctc

SEQ ID NO: 285654 - DNA, 122 bp, Homo sapiens
ctacccggcccacctacctggcggccttcacaggcctttaatgccttctccaactcgtgccggatactttccgcctggtccagctgcctggctagggcctcctcccgctcggcagcctctgc

SEQ ID NO: 285655 - DNA, 122 bp, Homo sapiens
agagacagatccatccttcagcctctatggaaagtactttgtcatactattaataatgatcgctaagaaaaacgttattagtattgttaacaattcatgataatttatacagcactaaaact

SEQ ID NO: 285656 - DNA, 122 bp, Homo sapiens
caggccgaaggcagcgcagaccccgcccctcaccgccccaccctctcttctctcgggtctcgcccatccctggcctcagctgcgcgcggtttcctggaaacccggaagtgaatcatggggcg

SEQ ID NO: 285657 - DNA, 122 bp, Homo sapiens
gggcagcacaggggagaggtcgcctgaagccctggaaatccctgggagagtgaaccttcccgccgggccttggggagttggagaatattctgaaacaagtcacatcacagaggtaaagggtg

SEQ ID NO: 285658 - DNA, 122 bp, Homo sapiens
cttaacagcaaaactatcatggggcaggtcagaaatgcagttatgtgaaggcacccaaagcgagcttccccacctgactgctccaaatctgctctgtagtgctggagcaatgagcacacagt

SEQ ID NO: 285659 - DNA, 122 bp, Homo sapiens
cctgtggccaacttactggtgctgagtgtgctggtgagcctctctgtcagctggcttccccgggccagttgctcccggaagctctgtcccaggtagtagtcaatgtcattgctccttaggag

SEQ ID NO: 285660 - DNA, 122 bp, Homo sapiens
atattccagtctttctgaaaggaagctggttgggtgtttttcagtgttggagcagcccttcggaagcgaggcaggtgctggacccaccctgtccgtccctggtccccagccccatttcgccc

SEQ ID NO: 285661 - DNA, 122 bp, Homo sapiens
aatatgagtatccacaggaagaccaccagtggctatgcaggtgcgctgagctcggcctaccggagcgtcacaagccttgacctcagctaaggcctgggactccagctttggctctggccggg

SEQ ID NO: 285662 - DNA, 122 bp, Homo sapiens
ctgcaggcagtccgaacagtccgcttcctggaatattagccaggcaggatacgccctgggcgacagaaactccaactttcgccagcggcccccaagtactgcctgggcggtggcgggagtct

SEQ ID NO: 285663 - DNA, 122 bp, Homo sapiens
ggagtcctccctgggaggggccgccagtcacttcccagcgcggaagctgtgagttcaaggcggtgggcgcgcaggggagtgcatggccctgagcccccgggtgcccgggggtcccgatggtg

SEQ ID NO: 285664 - DNA, 122 bp, Homo sapiens
gagttccaccagcagcgggcagagaaggcccgggaggagttccaggagcaccgtgtgggccgctgggtgactgtgcgcacccaggacgtgtgccgcagtggctttggcgtgagccacgtggc

SEQ ID NO: 285665 - DNA, 122 bp, Homo sapiens
agaaattgcctaaatgtgctacctaacaatggaagaaactgatactcttcttctcaaattcgcccatcaaatatataggaattcttttccaggaatgggcactggagtcacaacagaaagca

SEQ ID NO: 285666 - DNA, 122 bp, Homo sapiens
gtgtctcttcttgtctcccggtgtggcgcggcgcaggtgaaggtgtggttccagaaccggcggatgaagtggcggcactccaaggaggcccaggcccaaaaggacaaggacaaggaggctgg

SEQ ID NO: 285667 - DNA, 122 bp, Homo sapiens
caacttgagcagcattcttgtcaattaatggcacatgtgcgagcatgacagcccgtgtgacgtggagatgcatgaatgtacacgcaagagtgtggagcctatagctatgggtattatgaata

SEQ ID NO: 285668 - DNA, 122 bp, Homo sapiens
tcagaaggggtggtacttggctaaatatttcttatcctgttaatatttgcattgtaagtacgcttcgtttcttcatttatgcgggcactcatagatatatgagtccctactttgtgtaaggc

SEQ ID NO: 285669 - DNA, 122 bp, Homo sapiens
caggagaccaggagagagaccaccaaatatgtggtctcaatccagtccgttagaatgtagcgggcagcttgtctgttaatttcttttctctgagcctgggtcacctcccacaaggtttacaa

SEQ ID NO: 285670 - DNA, 122 bp, Homo sapiens
tgtcccaaagagatgaatgacattgaacagatatgcagccaggcttcttgaccttcactgcggcccacatgcacctcaggttcaaaatgggtgtcttctggcagccctgcacgtgtgctttc

SEQ ID NO: 285671 - DNA, 122 bp, Homo sapiens
ccctccctgggcgggcgggtggcgcgtcgcccgccgccgatccgggcggggtgaggggggcgctgtaattgcagcgcagctcgggttcccacgctcctattgttggcgactttgtttccaat

SEQ ID NO: 285672 - DNA, 122 bp, Homo sapiens
ccagcaatgtcgggctgggcaggcctcccctcctgccgaggttgggtggcccggaggagacgggggcgcctcccaaggggggctgactccaatacgcccagttccttcttccccaacgtagt

SEQ ID NO: 285673 - DNA, 122 bp, Homo sapiens
cagaagagaggctgaccttctctttgtccccccgggaggcaggcggggctggtgaggggacgagggtttcaatccaggcacttgggcaaccctccccacgtagctggcgtttcttcccaagc

SEQ ID NO: 285674 - DNA, 122 bp, Homo sapiens
ccccagtagactcaggccagcagttgcggtgggtcagagcaagtgtcaggccagcagttgcggtgggtcagagcaagtgtcaggccagcagttgtggtgggtcagagcaagtgttaggcact

SEQ ID NO: 285675 - DNA, 122 bp, Homo sapiens
cgggccccggccctggatcctgcttggctttgcctggagcctcattctctccggctgtgccgggggaggctggaggcggcggcgagggggacaggagtgtcgcccggctcctccgcccgcgg

SEQ ID NO: 285676 - DNA, 122 bp, Homo sapiens
tgtatcataatttctgtcatatgctgttgggcaagtacagagccctctcagattcaagggcgggagactagaccctgctccttgatgggaaatgtgttaagagtctgtggctatcttttagt

SEQ ID NO: 285677 - DNA, 122 bp, Homo sapiens
tccatattgtgatgcagaaaagttaaggagctgaattaagtaggttctcaaactgaaccccggacttcgaagctggttccacggttttataagggccacaagaggccatctagcccaaaaca

SEQ ID NO: 285678 - DNA, 122 bp, Homo sapiens
ggacacccatgcttcgtcggtgggcagacgcgatagcggctgcgcaagcaggataggcgacgatctgggcgcgaagctgggggcgggcgcgtgcgcactccgcggggggcgagggggggcgg

SEQ ID NO: 285679 - DNA, 122 bp, Homo sapiens
tcaccctgtccctggacaccggggccgcactcaccctcatgcccagttctacgttctcgccgccatacacctccatgccggggtccagcagcccaatgtctccgaagtactcgcggtccact

SEQ ID NO: 285680 - DNA, 122 bp, Homo sapiens
acacactggcctcagcaagtaatcagattttacccttcataatctagggtttctgctgcccggcctttccccgcatcagagccctcaggcctccggccacattcgctgacctctagtcactg

SEQ ID NO: 285681 - DNA, 122 bp, Homo sapiens
tcccgtctaggaagtgaggagcgtctctgcccggccgcccatcgtctgggatgtggggagcgcctctgccccaccgccccgtctggggtgtgaggagcatctctgaccgaatgccctgtctg

SEQ ID NO: 285682 - DNA, 122 bp, Homo sapiens
gcccggggtggctgccaaggggccggcagcgtcgccacgtgtcggggctggcctgagttccgtgtccctggaatctacagcctgtgttccgtgaaggcagagcatgactgggcagcaggcag

SEQ ID NO: 285683 - DNA, 122 bp, Homo sapiens
gaagtctggaacaaccaggaaggactgtgtgaggtgagaagaaattagagacaagaacaacgccatggagaaccccagtctttaaggggtgtgtgatgaaatggcaccccagtgaaggaggt

SEQ ID NO: 285684 - DNA, 122 bp, Homo sapiens
aggtggcgagggagaggaagaggggtcgggtgtccgcggagctccaagagggaagacaatcgctttgccaaacacggcagggcatctggaaaggcctgggaacctcacccgccctcccaggc

SEQ ID NO: 285685 - DNA, 122 bp, Homo sapiens
acggtgcccaacagcatctcgtgccagctgagctgcggtgtgtggacccggggaatggaccgggctggacaacctctaagacttggctccagctcagcctgtgaaggaatcacctctctgat

SEQ ID NO: 285686 - DNA, 122 bp, Homo sapiens
agggagagacacagagatgcataaagagagggagtcagagatggagagagacagagataacggagccagagatagggagagtcagagacagagagaaagaaacacacagactgacacagata

SEQ ID NO: 285687 - DNA, 122 bp, Homo sapiens
atataagactttcttgtatttggacccaagaagtgttccacttctgtccacatacatgctcgtttggctttaagaaaataaaaacaaaaacaaaaaaaccccacaaagttagttaatttaac

SEQ ID NO: 285688 - DNA, 122 bp, Homo sapiens
aacggtctcctaacctgtagtcacccacaagagcgtgccctttctgcccgcccttcctagcgttgctccctgcttggctgagcactgcggagtttcacgcctctaaaccccgcctcttcttg

SEQ ID NO: 285689 - DNA, 122 bp, Homo sapiens
ctagggttgaatgacctccccagggaacgcaggcttgaagtggaggctgagaatgcaatccgagtacagccataggccggtcaaaggtatggaggcggtgtgtagcaggggtgagcggggta

SEQ ID NO: 285690 - DNA, 122 bp, Homo sapiens
aagtggcatgaatccctggactcggttgtgttatttgatgggttgcctctccctgttaaccgcatagtgatcatttgattgctctaatatcattcattttggctttaatatttcaaagaagc

SEQ ID NO: 285691 - DNA, 122 bp, Homo sapiens
gtgtgcttggcgcttttccaggtccgaggtcccggtgggttttgtgacaggtagcctggacgtgctgtgtgcttggcgcttttccaggtccgaggtcccggtgggttttgtgcctggtagcc

SEQ ID NO: 285692 - DNA, 122 bp, Homo sapiens
caggaaactaaaaaaccacaacacttaaaagacaacttcctgtgggatttttggtgtctgcggctcagaatgaaaaaagcattatgtgtgcaaaatctttacacattttagatagaactact

SEQ ID NO: 285693 - DNA, 122 bp, Homo sapiens
aaaggtgttccccaggcgatgaaaactttccagtaagttgtcttggaaaaggcaactccgcgtaatagagggacttggggaggtagccgctgcgggaaagggcgatgagtcctggggtgctg

SEQ ID NO: 285694 - DNA, 122 bp, Homo sapiens
gacgttgtaaggcgcaattcgtccccacgtttttgtagctctggactgagtcccaaagagcgtctgtggtcttcaaaaaagccagtcttatggacttattgccttgtaactagatctcccac

SEQ ID NO: 285695 - DNA, 122 bp, Homo sapiens
gtagacactggggctggcacacacagagggtccctaatcctttccagtaagctaggcgcgcgcgcacacactcacacacgcgcgcgcgcacacatacacactcagtcctccgcaagctccct

SEQ ID NO: 285696 - DNA, 122 bp, Homo sapiens
tgctctccccagatggccgagtccgtggagaaaccctgtagccgcgaggggctccctggccgggtgccacctctgagaaactctgccctgttttggctctcggtgtcgctgggggctcctct

SEQ ID NO: 285697 - DNA, 122 bp, Homo sapiens
ctttcactgatcctgcccctctccccctggaacgcatatcaacacctctcccaccttcgtcggatccatccatgatgctaacactgccctttggtaccaggaaaggtgacttcctgaagatc

SEQ ID NO: 285698 - DNA, 122 bp, Homo sapiens
agtcttattgcaccatgaagataaatttgattcatcgtagaggggattctaagaagaagacgagcagcagacataaaaagctgcatcttggattggatgtagaggcttcagagagagatgcc

SEQ ID NO: 285699 - DNA, 122 bp, Homo sapiens
gagaccccctggatccgtctgcctcttctccaaggtctgaattagcaattcacccatctccgccttcattctcccaggtgtcacaatccacctcctccctcgtggatacctctgtctccgcc

SEQ ID NO: 285700 - DNA, 122 bp, Homo sapiens
gcagggccgagcagcaagcaggatggaggaggaggcagagttccgtggacgccccggccacggccgaccgtctagctgatggccaggcacttggaggggcacgattacaaagttagagatga

SEQ ID NO: 285701 - DNA, 122 bp, Homo sapiens
atgccagattctggcgtggagagcgggggcagggccgccaagccaaacggcctgcaccttcgcagccagcctcgcctttgccagggggcggcacatgggccgggtgtgtgggcttggtttgg

SEQ ID NO: 285702 - DNA, 122 bp, Homo sapiens
agcagctggagttcgacagacttggcctcagctcggtttttgccatgtctgctgggtggccgtaaggaagttgctccagctctgagtcccagtttcctcctcttgcatgactgttctgatta

SEQ ID NO: 285703 - DNA, 122 bp, Homo sapiens
aattctggttagcctcagtcccactgatacaggcttttccctgcccctcccttccttcaccgccagtcctcctaagcacagtgcattaaagctgcttgcatcctactcttctatcttgtgta

SEQ ID NO: 285704 - DNA, 122 bp, Homo sapiens
gttgggaacagccaaggtgaggaattctgtgggtcacaccccctgaaaaccactggcctccgccgggcgcggtggctcacgcttgttatcccaacactttgggaggcccaggcgggtggatc

SEQ ID NO: 285705 - DNA, 122 bp, Homo sapiens
atgcctggccactgagaaacgaaatcggaggcagatatttctgacagcgagcctccctgccgggtgctttatcattctttatgttaaatacatcaccacatctaagcccttgcaagccgaga

SEQ ID NO: 285706 - DNA, 122 bp, Homo sapiens
aaagaggctggaaagagagaaaagatatgcattgatgtccaatctttattcaattccttccgctttgaatgtctggctacatcaccccttggagtggtgttcaggaatgtgagttttgatat

SEQ ID NO: 285707 - DNA, 122 bp, Homo sapiens
agcccgggggatgcagccaggtccagcggcggcttgctggagtaccacgtgcttaggaggcggtccacctgctcccggctggagattgcgcgcaggtgggccttcccacttccactatccag

SEQ ID NO: 285708 - DNA, 122 bp, Homo sapiens
cagcatgcgcgggggaccccgcggccaccatgtatgtgggctatgtgctggacaaggattcgcccgtgtaccccggcccagccaggccagccagcctcggcctgggcccgcaagcctacggc

SEQ ID NO: 285709 - DNA, 122 bp, Homo sapiens
cttggcctcagctccttagcattgtcctggccccgggcctcctgtatttcctcctgcagtcgcagtggttttaatgtatgggggaaagagaaccattgtacaggcctttgatgaggtcgcta

SEQ ID NO: 285710 - DNA, 122 bp, Homo sapiens
gtgcccgcccttgcccggggaggtggagctgagaggggatgcagggtgggcagccaggcccggccagccccgccctccactgcccagtgcccgtgtgggctgggcactggctccactccctg

SEQ ID NO: 285711 - DNA, 122 bp, Homo sapiens
ccctgagtgctggccaacatccaggaaacccccaagggccctgatcttggtcagaatgaccgagtggatcctaccttccttccctgtatctgagatcctccaggaagtcttccctggttaac

SEQ ID NO: 285712 - DNA, 122 bp, Homo sapiens
agccaggggcctccagccagtgcagtgtgacccaggcgcgccctcagagcctggcgtggccggactctggcttctcggttgcccctgggttgtccccggactgacatctctgggtctcttcc

SEQ ID NO: 285713 - DNA, 122 bp, Homo sapiens
cccaccaccgtggagtctcacacgagattaattacgctcaagcgccttaaatctgtaaatcgctatgcccactcggaccgtttctgtcccaagcctccacccgagatacaagaatccccaag

SEQ ID NO: 285714 - DNA, 122 bp, Homo sapiens
aaccaatcgctggtgctcactcgcagccccagtcccaagcgtactccagcgcccaagggtcgccctgactgaaagaagagaatcaggcctgtagtcatagggtgtagggatgcctcctagaa

SEQ ID NO: 285715 - DNA, 122 bp, Homo sapiens
gaggtggctcacaccgcaccgccgagagcgctttgccctcgcatcgctgaaatttaatcacggtcacaggttacaacgttaggggtcgctttagttcaaatatcttcaaggttttcgtttgc

SEQ ID NO: 285716 - DNA, 122 bp, Homo sapiens
cgaggtctacgacccatccgaccccaccggctccgactccagcgcccctggcagcagccccgagaggtctggccccggcctcctgccctctgagatcacacgaaccatctccatcaacagcc

SEQ ID NO: 285717 - DNA, 122 bp, Homo sapiens
tgcacgaaaggctgtaaggtaaggactggcttccgcagccacagcagccgccctgggcagcggcagcggccgcagtgggaccgggagaaaaaaggaagtctccctttctacccaccccacca

SEQ ID NO: 285718 - DNA, 122 bp, Homo sapiens
ggttccgccccggctctgaggcccttcgggctgcgttctggggtcctggagggactcatgcgtttacttaaacagccatagccgttgaacggaacacgatgccacaccacagtgggtcctca

SEQ ID NO: 285719 - DNA, 122 bp, Homo sapiens
ctaatgggcctcattgtagtttttagcactccccaaaattccgtgtagattgctctagtccgcttcccttgtgggacattttaaatcaaggtttataatttgatttgacctcaagactgtgg

SEQ ID NO: 285720 - DNA, 122 bp, Homo sapiens
cgggtgggagccgcaatctccgcgcggtcgatggggccctccgctgcgcactcggccctgcgccgagcaccctgcagcctcctcccgcgacacggcgctttgaactcggcggattgattttg

SEQ ID NO: 285721 - DNA, 122 bp, Homo sapiens
ggaaaggagagaatggagtttggggaactacaggtccgtgacacatttttcctaagaatacgtaatttattaatgaaaacaatactttcacacttttgaaaaacaggggtaaatacatgtgc

SEQ ID NO: 285722 - DNA, 122 bp, Homo sapiens
tcctagttcaggggcagggcccaagacatctttctccactgttaccacccggggttcacacgccgtccacactgtacccaaccccaccccttcaggtctgcctactcttgtctttggctttc

SEQ ID NO: 285723 - DNA, 122 bp, Homo sapiens
agctggctgccaggaaggcctggctcccctccacgccgggccgccacacagctcacctcccgcaggggctcgcttagctcgcccaggatgctctcctcgtcgaacatcttgccctggtagcg

SEQ ID NO: 285724 - DNA, 122 bp, Homo sapiens
agccactcgagttgactgcccagcttcgtacccagccaatagtcagcacagactccaagccgtgtgagcgaagcattgtccatggccagctcagctgagcctaaatgactgcagctgctgca

SEQ ID NO: 285725 - DNA, 122 bp, Homo sapiens
ggcgagctggaacgcaggcatgggaggtggggcccctctgtccccacccaaccccgcccgcgcaagagacaccacaacacggtgtaaacagaggagacttccccggcccccagggggaggcg

SEQ ID NO: 285726 - DNA, 122 bp, Homo sapiens
atttcaccagagggtccgtctgccttacgaaattgctgtcaaaagagcttaccaataatccgtagcagatcacaccagctcaacaggcctccacctccaggaagccctccaggggcgggccg

SEQ ID NO: 285727 - DNA, 122 bp, Homo sapiens
tcggggcagaagaatctggtggggctattttgcagagagatacaagtaccaggtgccaagcggatacctagcctcctaaacttaatgccaattccctcctgaaagaggaggaatgcagtgat

SEQ ID NO: 285728 - DNA, 122 bp, Homo sapiens
gggagtggtggagacgctggacaaagggatgattcacgtcctgggtgggaccgagcgggacggtgggagatttcatcaggctactcagaacagtgtgcaatttaaaacctgttgattgttta

SEQ ID NO: 285729 - DNA, 122 bp, Homo sapiens
ctttgccgtctccagaaagagctgtcgaggtttatttattcacggagaggctctgcatcacgagagtgctgcgttaacccaggtgcgggggatattatcctccccgtgagagcagctgcatg

SEQ ID NO: 285730 - DNA, 122 bp, Homo sapiens
agaccatggcttcctgcgcaccaagatgaaggtaatgccactcgcgctgtctccgagggccgggggcgtgcatgtagacctgcgtccagctcatgagacatggcacaaatgagatgtaggca

SEQ ID NO: 285731 - DNA, 122 bp, Homo sapiens
ccctggcccgcgtggcgctaaaccctgttaagatccctgcttggtctccgctgcctgcgccgcagcaactcagaccttacagttcgcaaccccggaccgagtaggctgaaagtggagaccac

SEQ ID NO: 285732 - DNA, 122 bp, Homo sapiens
actctccagcctggtgacaaagcaacaacctgtctggaaacaaaacacatgggccgggtgcggtgggctcatgcctgtgatcccagcactttgggaggctgaggcaggcagattacctgagg

SEQ ID NO: 285733 - DNA, 122 bp, Homo sapiens
tctctgagccttggcagcagagtggggcaatcctcttgccttcgcacgctgggtaacagtcgtgcaagtgtctgtcatggcatcttgtcaccctgtcctgtcactgagggcctgtctcctgc

SEQ ID NO: 285734 - DNA, 122 bp, Homo sapiens
tagctgcgcaactacaggcctcattttatcttgttttaaatagagtcccacttaaaaactcgcaatggagaaacaggaaaagggatttttaaaagcatataaactaggtgtatgtgaataaa

SEQ ID NO: 285735 - DNA, 122 bp, Homo sapiens
gaaatacttccttgttcgtgagcttactggaagcaaggtagcccagggcttgggagagtgcgctccagggtggggtggttgctgtgagaccagatgatgtcacggagacgctcgggatgttt

SEQ ID NO: 285736 - DNA, 122 bp, Homo sapiens
tgtgcagtgttaactaggtggcatatgggtggggggacattcctgcctgtccactgcagccggggggcgcgtctccatggagataagaagcgaaagtgctccgtggagcctaattggtatgc

SEQ ID NO: 285737 - DNA, 122 bp, Homo sapiens
cccatggttccagagtcgggggttgcccctctccatgtttgagggccgaagagcctgcatcgagcagagccaccaggctaaatcctctgaccttgactttggtttagggaccagagtctggt

SEQ ID NO: 285738 - DNA, 122 bp, Homo sapiens
ccttccaataactccattccacagctctcaaattcctgaacttggatctttaaaaaacaacgaatcgcaaaaagtaacatttaacaggccagaggcaggcgggggaggagggtctctcccgg

SEQ ID NO: 285739 - DNA, 122 bp, Homo sapiens
ggggtgggtttcttatgaatggtttagcatcatccccttgggactgtcttccccattgttcgcaagttcttgcaagttattgttgtttaaaagtgtgcggcagcccatccaagccaggggcc

SEQ ID NO: 285740 - DNA, 122 bp, Homo sapiens
gctgagttgccacaaagttgtcaagttacaatccttagacatcactgtattcttgagaggcgtagacctgagatgtgcttatttttagatttaaacttgatcagcacttgatactaaccgag

SEQ ID NO: 285741 - DNA, 122 bp, Homo sapiens
aacaggtggtagcaaatgtatctgtggggggtccctttttcaactttgtacccctccccccggtcatctcaaaagaaaagatccagtgttttgagaagggcacgtccactgagctgctcttt

SEQ ID NO: 285742 - DNA, 122 bp, Homo sapiens
cagggtccaccagctgttaagacagccatgaagctcaggtcttccggcagctacctggcacgacttacaggcatcagggatttcatgtgaacccctggcaataattacaattattccgtagt

SEQ ID NO: 285743 - DNA, 122 bp, Homo sapiens
gcagagagacccaaagacgggatttattgggggcccagtcatcacctggaagtcagaaggcgttgaagtatcgcggggatcttcatgatgagcaggaacagggctcatcatggcaggactgt

SEQ ID NO: 285744 - DNA, 122 bp, Homo sapiens
caatggtgatgcagaccttgatcagctaacataagtaagacctagctcctgcatagttaccgttgaaaattgtgtgggcttttgtttatgtgaaattagagggaagatggtggggttgtaag

SEQ ID NO: 285745 - DNA, 122 bp, Homo sapiens
ccaaactgaaatgtgagtgccagagtgcatcctttaagcgaggtctgccccacggacacccgctccctctgtgtccctgctttgacagatctatccatctggccatccatccgtgggggtct

SEQ ID NO: 285746 - DNA, 122 bp, Homo sapiens
cctcttggactcttgtgtagggaaactgagcacggggaacttgatgccagagagtgagctcgccctgggaatggaggtgtagagacaggggttttctctttaaacctggtgaagttttctct

SEQ ID NO: 285747 - DNA, 122 bp, Homo sapiens
ggcttgggctgcgcggtgaagtccatcctgggggacaacttttggttcacagtcctctaccggcctctatcggtcagaaaaccaaagttcagcgggaaaggggcgactttgtaacctctttt

SEQ ID NO: 285748 - DNA, 122 bp, Homo sapiens
tctgtgcttgcaaacaagctgtgttctctagtggcccggccccagggcccgagggtgagccgcaaaaatagcccccaggcagcagatgcgtccaaggcttttcattgggtcgtgaaaacaga

SEQ ID NO: 285749 - DNA, 122 bp, Homo sapiens
agaaaataattagaagtagacaaagattaatgaaagggatgttcatgacagcatcatatacgactgaaagaagaaaactagattttcaacattacagggttgaaatgaatgatgagctatcc

SEQ ID NO: 285750 - DNA, 122 bp, Homo sapiens
tgagccaggctcctacagtgataggccgaagcccagtgacctgaataagtcctggttttccgcgaaaatagaagggtggtctatggagggtggggttccaacaatagtactgagaacctata

SEQ ID NO: 285751 - DNA, 122 bp, Homo sapiens
gagatcgtgcaaagtagcagataaaacgggcagcatcactatttccgtgtgggatgagatcggaggtcttatacagccaggggatattattcggttgaccagagggtaggtgtgcaaaaaag

SEQ ID NO: 285752 - DNA, 122 bp, Homo sapiens
atcttcttcaccgcactgatggccaatggggttatgatcttcctgatccaaacagatttgcgccttcatacacccatgtacttcctcctcagccacctttccttaattgacatgatgtatat

SEQ ID NO: 285753 - DNA, 122 bp, Homo sapiens
ctcggcctcccaaagtgctggaattagaggcgtgaaccaccgcgcctggcgagaaagggacgtttaagcagagacctgaagtgaggaagggaaccatctggatatctaggggaagagagttc

SEQ ID NO: 285754 - DNA, 122 bp, Homo sapiens
cccagcaggagaggagtccagaattcgtgacctttgcagacaggcaaatctcaaagaggacgaagaggaggaattagtgagggggcagcaaggaaggcccggtgtattgtaaggaattctct

SEQ ID NO: 285755 - DNA, 122 bp, Homo sapiens
cagtggggcaaattatttgtattaagcaaacatttatgggaaacaacccgctcccgaaaacggagcccccaagtaaagcacaaccctgaaagattatgaactatgaattgtctctggtagag

SEQ ID NO: 285756 - DNA, 122 bp, Homo sapiens
tcactccacacccagtagctgtccccagctcagcttagaaaccctgcctgggggcagcgacgtggcctcttcctacagccccctcccctgttccgcagccgggactcgcgtctcctgtggac

SEQ ID NO: 285757 - DNA, 122 bp, Homo sapiens
actggtttccatggcactgtggcatccggcagagccacagtgacagagttggggctggcccggctcctgcacgtgcacccttagctgactctgtcactggggcctgtatccttccagtttct

SEQ ID NO: 285758 - DNA, 122 bp, Homo sapiens
ccgcacttgcacacggagtgtggggggccaggcctgggaccaggagctggggccgggcttcggcgcagaggcaggaagaggaagcggcacccgcttcggggacccagccggcggccaggcca

SEQ ID NO: 285759 - DNA, 122 bp, Homo sapiens
cttctgctgcttggcattagaagcctcccatttcttactaccaggcaatattgtatgtgccgagagtctcagcttctctcctgtgtccccatggtgacactcacgtcctcctcgtctgatgt

SEQ ID NO: 285760 - DNA, 122 bp, Homo sapiens
cctgcgtactgctcactccccagctccgcgccctgctccgttcctcccaaaactctgaatcgaagaactttccggaagtttctgagagcccagaccggcgggcacgcccccatccccaaccc

SEQ ID NO: 285761 - DNA, 122 bp, Homo sapiens
caccaccaccctcggcgtgggatgccggcccgcgaggaacctcggggacacacaaatggccgcacctgaatctggctgccattgtgactctgccgcgcacgcgcagctccatcccctttgag

SEQ ID NO: 285762 - DNA, 122 bp, Homo sapiens
accagcaagcagactgaggggtcagttcatggaaaattactaagaagtgatatcaagggtcggggatattcttgttaaagtgacttacaagattcttgctgaagacaggcggagatgatcaa

SEQ ID NO: 285763 - DNA, 122 bp, Homo sapiens
acacggagcaattccaagggtttcctttataaataacgtcgtatctccctaataggaagacgtctgagtaaggtcacttttggtgagacatttacagtctctcatctctaagctcactcaat

SEQ ID NO: 285764 - DNA, 122 bp, Homo sapiens
caaggaggcgggaggagggtggaggtgagggccgggggtggggcgcctccgcccgccagccgctcccgcattaaaatttcatgggcgctgcagcagctacaaagacgacgccggctgcgctc

SEQ ID NO: 285765 - DNA, 122 bp, Homo sapiens
ttcaatggccagtgctgttccctgccccactgcctgtattttggattgtgagagaatcaccgtaggtaccaacggtttcaattacttctggacacaggatataatacttttcagcctgacag

SEQ ID NO: 285766 - DNA, 122 bp, Homo sapiens
tactcaaaacaaaagagccaacagaacagaagaaaatgtttcagacggttccccaaatgccggttctgtggagcagacgcccaagaagcctggcctcagaagacgtcaaacgtaaacagctc

SEQ ID NO: 285767 - DNA, 122 bp, Homo sapiens
cggtgggcggacaggctgatcctcatgaccctccaacgatcgcctaagcgccctgtgcagcgcaggctggtccatattggttagctcggtagtgatgctggctgcaaagagcctagtcaggg

SEQ ID NO: 285768 - DNA, 122 bp, Homo sapiens
ctccacctctgcggagctctgacctgccctggcttggctgtgcctgggtttgggacagttcggtgtgtgttaaagaagcagagctttaactgcgttgagggtgtgttttccctcctgcctgc

SEQ ID NO: 285769 - DNA, 122 bp, Homo sapiens
ttgggtgttgaaggaagcacggcggtcccaacagtgcgggcagcgccaactacggcttcgcgctcgaactttgaggactctcatctggatgcacaaagaagaaatcattcagttcttctcag

SEQ ID NO: 285770 - DNA, 122 bp, Homo sapiens
ctcagtggctgccgcatctccacgccgcttaattcgtccgttgcccaaatgacccctccgcgctccagagcggagatcgcggccgtacattttagaagagtgccatcaataccctcagagtt

SEQ ID NO: 285771 - DNA, 122 bp, Homo sapiens
ttttcatcttctttagtctaaagaactgggacggaaaatcctcaatgtaagtaaaacccacgggctttgaaatcaacatgatcaagttagttgttttaataaggcctcacatatcttcaaag

SEQ ID NO: 285772 - DNA, 122 bp, Homo sapiens
agctgccgctttaaggccttctcctgggccagtcgcaggccgatgaggtcctgagggggccggggtgctggggccggggccaaggtcaggggctccagatcatcctggggatagggagggcc

SEQ ID NO: 285773 - DNA, 122 bp, Homo sapiens
ggtggcgatctggatgtccagggccagcttcacgttcatcagctcctggtactcacgcagcggccgcgccatgtcctgcttggcccgctcctgggcggcctccagctccgacagctcggcgt

SEQ ID NO: 285774 - DNA, 122 bp, Homo sapiens
caacctcaaagccttgggatcctcatctgtggtagtaaagatggttgagaagtttcaagacgataacagagagcctggcacatagcaagggctgaatagatgcaagttatgccactaatagt

SEQ ID NO: 285775 - DNA, 122 bp, Homo sapiens
ctcgccgctcctctagccttgagggaggcgctgtgggggacagcctggcagccacgcatgcgcaaaacaccgtcaggaaggggccggggaggggcgggctcccgaacccggaagcgagggac

SEQ ID NO: 285776 - DNA, 122 bp, Homo sapiens
atattgagtatatattgacagagaactcactagtacacatggtttcactaaagcagggtccggccattgtgaacttaaaggatttactgggctatttcttcttcttttcttccccttctgtt

SEQ ID NO: 285777 - DNA, 122 bp, Homo sapiens
gcgcagctcagcataaataaatgagattcacaattccccacctcggaccagcgccaaatccgcaagaggcccacggctaaatgttattcagggcttttggtcaaacacgtttaggtttgaga

SEQ ID NO: 285778 - DNA, 122 bp, Homo sapiens
acggccgagcaggcagcgacggcccagtggaaagaggacaaacccttgtgggccttagggcgaagacgtaactttgcttagtctcggtttattggccgatctcttgtcaagcggcggaatcg

SEQ ID NO: 285779 - DNA, 122 bp, Homo sapiens
cgtcccgtcccatccttatgggattacgctcctcaactgtgacggccactccatgaccctcggctggaaggtcccgaaattcagtggtggctcgcccatcctgggctactacctggacaagc

SEQ ID NO: 285780 - DNA, 122 bp, Homo sapiens
cacacgttgctgactctggctggaaggctggcctccctgcacacagtgagctccaccagccgtgtgtgctgaggagtggtggtggggatggggggcggtgcataggggtgtagggaggcagc

SEQ ID NO: 285781 - DNA, 122 bp, Homo sapiens
gccctaggaggagccggtcgcccgggcaatgcctccctgaggccggcctccccagcctcgcgttggctcaggagctgctgagagaagagggcaccccacagaggcccacactctccctttga

SEQ ID NO: 285782 - DNA, 122 bp, Homo sapiens
atacagtttaatttgacttttcacatttactggatgttcaccctggacaaggtgctttcacgttggttttattggctttttcccacatcaacgctatgaggtaagtgcataaccctcatggg

SEQ ID NO: 285783 - DNA, 122 bp, Homo sapiens
ccgacagcaccgtgcccaccccccggagatggtctcgccctggttcctcctcgtctccgccgctagtctccagctccaaaatggcggctgccactgtggggcttctgccggccggtagtccc

SEQ ID NO: 285784 - DNA, 122 bp, Homo sapiens
cctgactggtggaattaaaggtgggagtttctaatctgggttgtgtttcatggactaccccgtgtactttctacaggcagtgtgttgcttgttttggatagttgggagcagcttcgctcacc

SEQ ID NO: 285785 - DNA, 122 bp, Homo sapiens
ggggaggcgggggcggggtgttagttgcggtggcgcggggagggggcgcgaccctctggccgtccgcggccgagatgggtgtttgtggcggcgaagcaggcgacggccgcaggccggcctgg

SEQ ID NO: 285786 - DNA, 122 bp, Homo sapiens
tagggaaagactccagcctcctcttcggcttctccactttttttctcctgcctgcctcaacgtttccttgaaatcatacaagcctagtgtcctgccccgtcaccgggggggacttcttgccg

SEQ ID NO: 285787 - DNA, 122 bp, Homo sapiens
ggacgggacgggacggggcgggacggggcggggcagggcggggggatcacgcgcctatagcgcaaagctgcggtatggagaaaagcctagaacccacagccgccatgatgacgcaaacaaaa

SEQ ID NO: 285788 - DNA, 122 bp, Homo sapiens
ctgccagccaatcacagccagaataacgtatgatgtcaccagcagccaatcagagctcctcgtcagcatatgcagaattctgtcattttactagggtgatgaaattcccaagcaacaccatc

SEQ ID NO: 285789 - DNA, 122 bp, Homo sapiens
ttgaaaaaggggcaaagttaccccaagtcactcaaagtgccccccaaatattgccgactgcgggtttccgccaggccctttgggaagcgaccttcccccgggatgttttggtggaaaatgcg

SEQ ID NO: 285790 - DNA, 122 bp, Homo sapiens
tgtaggaccggcgaggaataggaatcatggcggctgcgctgttcgtgctgctgggattcgcgctgctgggcacccacggagcctccggggctggtgaggagcgggtagggggcgggggtgcg

SEQ ID NO: 285791 - DNA, 122 bp, Homo sapiens
gggcggagtccagctcccaggccccacctgctggccgcccctggctcccgcccccagggacgcgcccgggcctccacccgcgcctgcacaggctgccccagacctgaagctcccggagaggg

SEQ ID NO: 285792 - DNA, 122 bp, Homo sapiens
cgtgcagtgccctgtgtgcttgcttttcagaggccacagacacgccgatcgtcatacagccggcatccgccaccgagaccacccagctcacagccgactcccaccccagctaccacactgac

SEQ ID NO: 285793 - DNA, 122 bp, Homo sapiens
tcacgctggccgccatctaccgcttcatcaccgaacgctttgccttctaccgcgacagcccgcgcaagtggcagaacagcatccgccacaatctcacgctcaacgactgcttcgtcaaggtg

SEQ ID NO: 285794 - DNA, 122 bp, Homo sapiens
tgcctgttccttttattacaactttcaaaaagagttctctgtcccttttgatccatcccacgtactgctgcctgcctatctttctgaagcatggctgtattttgtcctttttttcctcaaaa

SEQ ID NO: 285795 - DNA, 122 bp, Homo sapiens
atttgcagcagggagtgaggagtcagattggaactgctgactgctgcctttcttagcagccggtgaactgcacatttcaatgaggtacatgctgagcatggcacgcgtatgtggaggggctt

SEQ ID NO: 285796 - DNA, 122 bp, Homo sapiens
agagccatagtattaacaaaattttccccaatgatgacaaaacatttcccagcactgatacgcgttcctcaggctgttgctacttccaactctcagatctatctctgggccactggaaagta

SEQ ID NO: 285797 - DNA, 122 bp, Homo sapiens
tcgtggccgctgaggctgttgtggccgttcgtctgggtcctcccagccttgctttcttcgcggagcctgcggagaagccccgtcactcccgtgaggctcgacttcctagtctgtaaaacgag

SEQ ID NO: 285798 - DNA, 122 bp, Homo sapiens
gtcatctgggcgggggtcccagatgagaaagtaatcacaattgtaaagtgggatcatctccgttagtgataggtgctttccaggaaataaatgtagcagctgtttttattttatttctctta

SEQ ID NO: 285799 - DNA, 122 bp, Homo sapiens
cagcatgtcctgtgacatgaatatcaaggaatgtccccaggcaacccgtgcctgctcagccgctgtaattgagacagaccccacctcttgcgacagagcctttctgggtctaaaagaagcag

SEQ ID NO: 285800 - DNA, 122 bp, Homo sapiens
ccccttctcccagcggatgatgatgggccgctcaccccgtgccgtgcagtttagctccttcgcatggcccttgatggcgatggtggtgttggggtgggaagtgatcatggccgggactgggg

SEQ ID NO: 285801 - DNA, 122 bp, Homo sapiens
agcagaagtgaatgagacagaattgtgatcttgtcagaaaaatcgtcttggaaaagccaacgtccaacagaaatggttagaacaggggtcgctggcttccatccagacagtatccctgaccc

SEQ ID NO: 285802 - DNA, 122 bp, Homo sapiens
ctagtaacttccttgtcatcgaccttcaggcctaggggcaataatagcttcccactgtagcgaaaccctggatacttcaacatcccttattggagtgattaaccctgcctgtacctctggaa

SEQ ID NO: 285803 - DNA, 122 bp, Homo sapiens
atcctgcccacccaggtcgccttccttctcgcagtcggctctcccttcttccccgcgccccgggagagtccacttgtatctcaggggtctcccgcagcatccccgtgccccggcggcgccag

SEQ ID NO: 285804 - DNA, 122 bp, Homo sapiens
ctgcgcagcttcctgctttaggttgacccccggagcaaaaacgtcggatatgaagcccttcggtgcattaaatgtctctcagtaagaattttggagaccctgccaagaagtgaccctggtca

SEQ ID NO: 285805 - DNA, 122 bp, Homo sapiens
agggagtggttcagctagagagtaaacctagctgagagctggcacttggctcctcaatgacgctttgttcttctcttcttctcttttcttattcttccctgatttgggatttcacagacttg

SEQ ID NO: 285806 - DNA, 122 bp, Homo sapiens
gtcatggccgccgacagtgacgatggcgcagtttcagctcccgcagcttccgacggtgagcggcttcccagaggtagccttcaaagcctctgcgctctgggagaggggaaggcctcgggctc

SEQ ID NO: 285807 - DNA, 122 bp, Homo sapiens
tggggagcggcgcggagacggactagacttcccctccgcccccaagaggctgccggtccccggttccctgggcttctccagctttatcatgaacctggcgcaaggttggctttaggaaaaat

SEQ ID NO: 285808 - DNA, 122 bp, Homo sapiens
cacaccggttccactcttttcccaggtacaacgtggactccaaaaccaacatctccaaaccggtgagcaaacgtttcctcgagggttggcggagcgcacaggaggcacttagatgtgttcaa

SEQ ID NO: 285809 - DNA, 122 bp, Homo sapiens
aggttcatagtgaatatttattgagcgcctgcctcgagtcccttgggtttcctgttgtctcgggacctgccgcgtcactatcaccctagaatttgttagaaatgcacgttttcggccccacc

SEQ ID NO: 285810 - DNA, 122 bp, Homo sapiens
agctccgggaagagaagggccagagctctttcaggcaatgatgtcatctgcaaggcgcgccgtacgcggttcctggcttcgcctcccagaccccatgccttccagttctcgctgtctatcct

SEQ ID NO: 285811 - DNA, 122 bp, Homo sapiens
ccacacccgaccgcaggctccagtgccccctcccacgggcatgcagcgaggcggtggcgacggccccaactcaggtcgcccgagttcctgtccgctgccccttccgggctccgcctctggag

SEQ ID NO: 285812 - DNA, 122 bp, Homo sapiens
atgttttaatttttggtagacatgaggcctccctctgtctccaagctggccacgcccggccgatgtttcaatttttggtagagatgaggcctccctctgtcgccaggctgactgcgcccggc

SEQ ID NO: 285813 - DNA, 122 bp, Homo sapiens
agaccagcctgaccaacatggagaaactccgtctctacttaaaatacaaaattagccagtcgcggtggcgtatgcctgtaatcccagctactcaggaggctgaagcgggagaatcgcttgaa

SEQ ID NO: 285814 - DNA, 122 bp, Homo sapiens
caagggacgcgaggtgggaaccaggcgaattcctagacctgcttgccgcagaagagtgcccgctcaagtggaacaaaagcgcagctagtaaccggctagtggcttctctggcaacggcggcc

SEQ ID NO: 285815 - DNA, 122 bp, Homo sapiens
gtcagacttactcaggtgacttgttttggccagtgacagataccactttctggcggaggccgtaagaccactgcaagctttgccatgctttcaccactgcccaaggcaacctgcaattctcc

SEQ ID NO: 285816 - DNA, 122 bp, Homo sapiens
atccaaacagaaatcccacctgtaaagacacattctctcacctacacagaacagctgctgcggaaacagacctataagaactacattcctgtttatcaagttaagtagtgtgaataccgcat

SEQ ID NO: 285817 - DNA, 122 bp, Homo sapiens
cacccctcacccgaggtgctctcggttccgtagaatgtccagtccacaggaacggcaacacggacttgtctttgggactacaaccagcaagagctcccgcctgccccatttcacctgcaccc

SEQ ID NO: 285818 - DNA, 122 bp, Homo sapiens
gccagggaaccccagcccccagcaccctggaaaggagaaggaatgactgtccgtgatgagcgaagtcacatcccattggctccatagtcacaggtaacgaaaaatacggtggcttcaaagcc

SEQ ID NO: 285819 - DNA, 122 bp, Homo sapiens
ctcctggttctgcgcgtctacaaacttttgagcagaacacgagcctcggcaaacgagtcccgcagctcctcctgctgctcccgctggttcctgcggcttctgctcagacaccaacgccagac

SEQ ID NO: 285820 - DNA, 122 bp, Homo sapiens
gcggggcctcaccggagaggcggggttttgaagaaaggggtggggctggttgtggagaggcgggacttgcagcccacccacagactgcagcttaaggagggggggtccccggaggaagggtg

SEQ ID NO: 285821 - DNA, 122 bp, Homo sapiens
taatacctgccaatgtaagcctcggtcctatcactgaaactcgctcaacagcttagaccccggctcttccctttgcgtaatagttgtaatcatgtcccatggtctcctaaggcgtcggagac

SEQ ID NO: 285822 - DNA, 122 bp, Homo sapiens
ggcatcccagctgacagccagcaccaactgccgggcatgtgagtgaactttcctagaatacgaccctccagctcccatcaatcaagactgaagatgatatagccctggacagtgcggcttga

SEQ ID NO: 285823 - DNA, 122 bp, Homo sapiens
tggcgggagggaggagcgcgagtgcgggaggggctgggctccctccagtgcgcccgtgggcgcgcaggcgcgagcgtgtgtgtgtgtgtgtgtgtgtgtgtgtgtgtgtgtgtgtgtgtgtg

SEQ ID NO: 285824 - DNA, 122 bp, Homo sapiens
ccttagtctttttaggtttcccttcctccttgctgggctcctccccagtggtagggtccgcgctcttggcccgggccgtggtgacttcggcagctttgggggcctcgccgccattagcaggg

SEQ ID NO: 285825 - DNA, 122 bp, Homo sapiens
attgagaggtgagagcgtgctggcagccctcgcagccctcgctcgctcttggcacctcctcgtcctcagcgcccactctggcggcgcttgaggagcccttcagcccactgctgcactgtggg

SEQ ID NO: 285826 - DNA, 122 bp, Homo sapiens
ttttgttcttctcagcctttacactgtcattaggtgatctcactcataaccatctaggaacgataaatccaaaatccatatattcagctcaaattgcttccctgacacccttatagccaaca

SEQ ID NO: 285827 - DNA, 122 bp, Homo sapiens
cgagaccttgaccacagctctggtcagagcagacagagccacagcaggagctgaccatggcgtcagagggtggaggttctgggtgggttcccaggagaatgaggttctggagtttagaagtc

SEQ ID NO: 285828 - DNA, 122 bp, Homo sapiens
ggttttcacattttgttttatattgcgtcaattcaagtgttttctcagggggcagcgcatcgggagctgtctgtggctggatacataagcttcgaggattcttttgcctgctcttttcaact

SEQ ID NO: 285829 - DNA, 122 bp, Homo sapiens
cagacccacaaacctggtcatctcactgcgttgctgaaaaccctcccagggctctgcttccgctcggatagaatccacatcgcatcattcagcctcggctcagttcctcaaacaaactaggc

SEQ ID NO: 285830 - DNA, 122 bp, Homo sapiens
ttagggggtgctttgtgccacttcccttggcagggtggggtcccctgggaaaccaacgctcgcctcacagtgagctcagagcgaagtcctggttccaggctgatgctctaggctcaaaataa

SEQ ID NO: 285831 - DNA, 122 bp, Homo sapiens
acgaggccacgcaggagatcaaggtactcactgcgttgggtgctgctgcgctgcagcccacgacgtcactggcaggcgctgcgtcgcgcggtatgacgtgttccatggcagggagaggcaag

SEQ ID NO: 285832 - DNA, 122 bp, Homo sapiens
caaagttattaatccaacacttctaagaaagccattgtgaaatgcagataccttccctgacgtcttaaactgtctcctgtattttttttctactaatcgtttgcatgtttactttttataga

SEQ ID NO: 285833 - DNA, 122 bp, Homo sapiens
aaaacttaaagtataataaaaaaaaaaagacattgctagtgagcacactgtatacgacatcgctaatgaggatgctatatatgacatcgctgatgaggacgttgtacacgacatcactaatg

SEQ ID NO: 285834 - DNA, 122 bp, Homo sapiens
atggctgctccgcggagcagcgcctagggctggaaggcggctgcggctcaggaagtcacccgagcaagcctccttcggggccggccgcacccgccgcggcgcgctccatgggggcgcgctcc

SEQ ID NO: 285835 - DNA, 122 bp, Homo sapiens
ctactttgttcaataatataaagcaccaccaccattattaagagtcaaaaagcactgaaccggagaaagcagttacatacaaattttgtcatttgatagaatcaaccaaatatataaacaag

SEQ ID NO: 285836 - DNA, 122 bp, Homo sapiens
tccggtcgtgcgagcggcggccgccatcgcgggccgcggcgggaaggagaagaggggccgcgccaggcgccactttacctgagaaaccagcgggagtagcgtctgctccaccgagcgagttt

SEQ ID NO: 285837 - DNA, 122 bp, Homo sapiens
atcttccaggtaatggttcaatttatccagcaggtcaaccgccccttcaaagtctctctgcgcaatgcagacatccaggtcttcaggtaactcctggatccattccatggagaggtccacct

SEQ ID NO: 285838 - DNA, 122 bp, Homo sapiens
tcacccaatgagctcgttaaatatttggcaactgagtcttgacccctgaagaggcactgacgacaatggaggtattttggccatttgatattcatgagactgggaaggtttaagatgagcag

SEQ ID NO: 285839 - DNA, 122 bp, Homo sapiens
cgggcccgccgcgaggacctgcccggaaacctgtcggaaaccgaaccgagatctcggcagcgacccgcctgatttcgctcagggcccgttagggcgtcctcttcctacaagcaccgtgtttc

SEQ ID NO: 285840 - DNA, 122 bp, Homo sapiens
ctcaagagtctagtcccaccttctagctcctcccgaggttataactccgccctctggttacgcctcgaggttataaccccgccctctggctccgcctcgaggttctagccccgctcctagct

SEQ ID NO: 285841 - DNA, 122 bp, Homo sapiens
taaaggtttataattctattggacttgctaggtgttactttcaacccagcataaaaactccgggtcccattctagttctgctgaattctttggaaacatactgtagttaattcaaacagcct

SEQ ID NO: 285842 - DNA, 122 bp, Homo sapiens
cgtaagagtcgtctacaattgggtaaatgtaatctgtagtttgaaccaaggaaagcccaccgtgtctcaaaggaatgacaagtatccattccaatgccaagccttggcataaaggctcccag

SEQ ID NO: 285843 - DNA, 122 bp, Homo sapiens
gtggcccttagcgacagtggcgctgggagcctggctccctgggggcggttcagagatgagcgagaaggagcggtgagctgggaacgcagtgccctccaggccagggagagctggggatgggg

SEQ ID NO: 285844 - DNA, 122 bp, Homo sapiens
agacctggaaaaagaaggggactctcttcagaatgtaaattttccccagtggccctgtaacgttgcagggctatttcaaaatatgtcaaataaatatattttagggtaaaatacttcagttt

SEQ ID NO: 285845 - DNA, 122 bp, Homo sapiens
ctgcatttggaaaagaggcgcccggtatccacaccaaccacagctctgagctcgcccgtgcgggcaacgcaggaggcctcaacagggcacccactgcccagctggccgtgagtgacgcctgc

SEQ ID NO: 285846 - DNA, 122 bp, Homo sapiens
cggagctctgagccactgcttccctgaaaccatcgttcccacgtcaccgatggcccccaccggccaaatcagagggcctggctggtcggcaccttccagggccttccacaacctcctgcccc

SEQ ID NO: 285847 - DNA, 122 bp, Homo sapiens
gagcttgcagtgagccgagattgcgccactgcagtccgcagtccggcctgggcgacagagcgagactccgtctcaaaaagaaggcatcccattggcagaacccttgtttccagcccagggat

SEQ ID NO: 285848 - DNA, 122 bp, Homo sapiens
tggccgggtcggggagcagaggcggaggtgacagccccgcgggacacggtctggttcctgcgctcctggcccgaggctcttttccgcgcgccccgccccggcgccccgcagccaatgggccc

SEQ ID NO: 285849 - DNA, 122 bp, Homo sapiens
gggaggaagctgatatttattcagagactggttatcattcactgcctacgtgacctcgggcggtaatgaaccatctctgagcctcagtttcttcctttgcagcttgttgtcacaaatcccac

SEQ ID NO: 285850 - DNA, 122 bp, Homo sapiens
atttttctctgtcctgtgaaatactattcccagcccattccaggcaagaacaattcatgtcgaaaaccacatagaaatttcttctaaaaccccacaaatgttcagggtgacataacccagag

SEQ ID NO: 285851 - DNA, 122 bp, Homo sapiens
aagccgcctggccgcacagaagtaagtaactaaccgggcaaccacctagcaccatcttcccgggcacaggagcggagacccggcctcaaccacaaccccaggccagcagcacagacccaaga

SEQ ID NO: 285852 - DNA, 122 bp, Homo sapiens
agggcttggttgtcagcagcagcaggaggaggcagagcacagcatcgtcgggaccagactcgtctcaggccagttgcagccttctcagccaaacgccgaccaaggtacagcttcagtttgct

SEQ ID NO: 285853 - DNA, 122 bp, Homo sapiens
agggtgagggggacgggggcggggtgggggcagccctttcccaggcggtagcgggggcggcgtcgctgttgcccttttaagccgcggggccgccgcctcctgccgctggagtcggttacaaa

SEQ ID NO: 285854 - DNA, 122 bp, Homo sapiens
aacaagggaacgaacagatgggcaaacccgagacgggcagagacccagacaacaagggaacgaacagacgggcaaacccgagacgggcagagacccagacaacaggggaacaaacagacaag

SEQ ID NO: 285855 - DNA, 122 bp, Homo sapiens
gcggggtcctggcagctcccgcgccaggactttgttgaatgaatgactgaactgagcgggcgccgcggggcggggcgtcccgaagcggacctcaaggcgggcggaggcgagagctccgcccc

SEQ ID NO: 285856 - DNA, 122 bp, Homo sapiens
aggatgagccccatgtgcgcgtgacctgtggcagaggggctgtgtcagagccccggctggcgagaggagcatcactgtgtccagaggacgcggtgcctttcagaccccttgagtaagagaca

SEQ ID NO: 285857 - DNA, 122 bp, Homo sapiens
gggccattgtgcggtgcattgtgggagccgcgcgagcgggcgctcgggtcgtggagggggcggtgccgcgggatctctatggtcccgcccgcccgcgggctagagcggccggggcggtgcgc

SEQ ID NO: 285858 - DNA, 122 bp, Homo sapiens
actggtgactcaggcctctgtcttcctctgccagtgggtcatgggatgagttgaagacaacgtttgatgaaaacaaaacttctggggatgtataagatgggtactgagagcaggtgggacca

SEQ ID NO: 285859 - DNA, 122 bp, Homo sapiens
tctcggccgccaggacgccgtggaggaccggctggacaggaacctgtggcccttcgtatccgaccccgcccccacggccagctcccaggccgctgtcaggtgaggccccggggccgcccccg

SEQ ID NO: 285860 - DNA, 122 bp, Homo sapiens
tttgctgctgtgaatcccacctgccaccagcctgcagcacaccccacagccaagtagaggcgaaagcagtggctcatcctacctgttaggagcaggtagggcttgtactcactttaatttga

SEQ ID NO: 285861 - DNA, 122 bp, Homo sapiens
tctcaaaatctcccacctgtcagcccaacttttggattccttgtcaccttccacactgcccgagctccggacatacagccctggtgcacaagggtcccattctttgcacaccaggggtataa

SEQ ID NO: 285862 - DNA, 122 bp, Homo sapiens
cccagcactgctgctgtgattagtaccttaactccagcctaggcaggtgcagtgcatcagcggctctcttctctagcttcttttacctcagcccaagccactctgtagaaatgggctccacc

SEQ ID NO: 285863 - DNA, 122 bp, Homo sapiens
tagacgcccgtccctggcgagaggtgtcgtacgctgtggtttcagcgccagggtctgcggcggcgcggggagggtgttgtgttttgcgagcgcggagccctggccttggttttgttgtggtc

SEQ ID NO: 285864 - DNA, 122 bp, Homo sapiens
cactcactggcagaccgcccgggtgcctggcgccgatgcccagtactttgtctacagcaacgagagcgtccggccctacacgccctttgaggtcaagatccgcagctacaaccgccgcgggg

SEQ ID NO: 285865 - DNA, 122 bp, Homo sapiens
tccatagttacccaccctagtttgcccttctctagaatctctctactctcatattgcatccggttctgtacctcctccccgcctccacccactgtacccaattgtcttcctgaccaaggagg

SEQ ID NO: 285866 - DNA, 122 bp, Homo sapiens
cagtcccttcgatcgtaccactttgcaaaagcaggctgcattgtgaatgcggcagggggacgggcgaacgggtgggcgggcggctgtctggcggcggctgctctccggtggggactccgcgt

SEQ ID NO: 285867 - DNA, 122 bp, Homo sapiens
ccacaacacaggtgcctcgacctccccattcaagacttcctgccaacttgggctggcctccgtgggccaaggttccccgtgggtgtgaaccagcgattcccagggtcccctgggccacatgc

SEQ ID NO: 285868 - DNA, 122 bp, Homo sapiens
tgggaccactagggagctgcagaagctgaagcagcaggcgatggagtactaccgggagaacgacgttccgcgcaggctggaagagctgctcaactccaccttctacctccagcctgccgacg

SEQ ID NO: 285869 - DNA, 122 bp, Homo sapiens
ccaggccggagggtgcgaggagccagaggaggctggagggggcggcggccacagctgggtcggagaaagttgccccctatgcagatggcaactgtgagtacccctgtgggggggagggtgca

SEQ ID NO: 285870 - DNA, 122 bp, Homo sapiens
gttccaaagactagtcttaccaagtttcagatgtccggactccaagtgccagttccttcccggtgttcagccactgtgttaatcctccacagggaactgctacacgctgctctggtgaggca

SEQ ID NO: 285871 - DNA, 122 bp, Homo sapiens
tcccgagccacgcgaatgactttctcccaccaagctgaactgggaagagcaggaacaaggcgtgtttgcctcccaccctcagccgggcactgcagacagacagccagagagcgggctgtggt

SEQ ID NO: 285872 - DNA, 122 bp, Homo sapiens
ctcctcactccctgcactcaaagggctggctctgcgctaacctggctgtgcctggagacccgacttgcctggagacccgagttccaaaaggagccacagggcacgctgtgtgacagatggat

SEQ ID NO: 285873 - DNA, 122 bp, Homo sapiens
gtgcagctgggtttggaaagttggtgcgggcgcggggacctcagggtctcaaggcgcctccgcagacccgagccaggcgggtcgtgggacggtgagcccggagcagcccctgagtgcgctcc

SEQ ID NO: 285874 - DNA, 122 bp, Homo sapiens
ccgcctatacccctccgggttcggccgctgtagcggagctcggaaagagtggcgcagggtcgcggggccccgccagggggcgcgcctgggggccgcgcctccttccccgcccagagatgctc

SEQ ID NO: 285875 - DNA, 122 bp, Homo sapiens
tttgagtgatgtcaggagaagcagtcacacaggtgtgcaatgcatgtttgccaagacagccgcataagccatcggcaggaatcaaggtacaggaagggcttcctggggtactcagttgggaa

SEQ ID NO: 285876 - DNA, 122 bp, Homo sapiens
cttgggacccccatcgtagggtgggaggcaccgcccgcaaggcgggaactgagtgccagccggtctccccacccccggctcttgggacccccatcacaggagcgggaggcaccccccgtgag

SEQ ID NO: 285877 - DNA, 122 bp, Homo sapiens
tctgggtaaggacgagaagagccaaggtccgcctactgccacagggtcaaaggaggttttcgatcagcccagaccagaggctctgagccctgaaccaaagtcccagagctgggctgggacgt

SEQ ID NO: 285878 - DNA, 122 bp, Homo sapiens
tcttggctagaaaagaagtctcttttctttcctaggaaagcagatcatgacatcagatgacgaatatggctgaggttcaaggcagatttttcttttcaaagtgacctcacctgttaatccaa

SEQ ID NO: 285879 - DNA, 122 bp, Homo sapiens
tgcgtctttcctgcctagcccacgttcccgggccggagctgacacgggggtgggaggagccgagtgcttgctcgtcttgggcagaggcgaaagcttcttaaggtggaacaggaatgttgggc

SEQ ID NO: 285880 - DNA, 122 bp, Homo sapiens
tgtggaagcccggcggggccagcgcagttgaggtctggggagcccggctggcatctgctccgggctgcggcgcgggccccgcggagcccaggaggcggcgggtgcttccggccaagggccct

SEQ ID NO: 285881 - DNA, 122 bp, Homo sapiens
tttccccactcttgtgcccttcggcgcctccctctccccctcctcctggccccctcagcgcgattctccctcagcgcccaggcccccgggagccgcggaacaaacttgtgcccggcgctgac

SEQ ID NO: 285882 - DNA, 122 bp, Homo sapiens
cgcggttccggcgtcgggcacgctcccgccggtgactgaccatggactccgtgcctgtctcgttgtccatcccgtcacggctgctggccacatttgggctgtgcaacaagagcagggtgggt

SEQ ID NO: 285883 - DNA, 122 bp, Homo sapiens
cttccgcccgatctcctggcaacgctgcggccccgcccacatcatgacgcccgaggagaacgcgggtaccaaactcttgctgcagggttttgagagccgcttcctagtggcgcgcacactgc

SEQ ID NO: 285884 - DNA, 122 bp, Homo sapiens
ttccctgaaccaacttgagtttggccggctcggccgcggccctgacgtcacgcacggtcacgtggccccgcctcccgctggatctttaagtagaaagtaatctatcaggccagtccttaaaa

SEQ ID NO: 285885 - DNA, 122 bp, Homo sapiens
taaatataggtgatccctttagacataagcagcagaagaccttggtgccaggggtggaggcgcggcagaaggggtggtatgtaccttagctgtgaggggggctgctgaaggcatggaggaca

SEQ ID NO: 285886 - DNA, 122 bp, Homo sapiens
tctatttgacaaatccagaaaaagttacagtacctgtatcctctagaataactttcatcccgacgagaatgaccataatcacggtatgcatggcctctagatggtggagcataatccctagt

SEQ ID NO: 285887 - DNA, 122 bp, Homo sapiens
aggggccggcgtgcgtgtgtgggtacgtagctcatcccggggagctgggatcctcttttccgcacttggggaagacgaatgccgaccattggctcagacaccataccacacaggcatttctg

SEQ ID NO: 285888 - DNA, 122 bp, Homo sapiens
agagtttgtaaacaagtaaaggaaactggtctacactgagataaagtctgcaatgttgaccgtattaaccattgcttcatagagtctataaaatgaccatataacgtatgtaacaaatattg

SEQ ID NO: 285889 - DNA, 122 bp, Homo sapiens
agaaaatgcctccagtgtgtgtctgcgcttcccccgggccgaggacggtggtcggggctgcgtattgcccggaccccgggtaggggaggcgcagagacccggccctaatggacttcgctcgg

SEQ ID NO: 285890 - DNA, 122 bp, Homo sapiens
ttggcctcgatctccggaacaacacgggcacacggccgtcccagccagcaacgagagccacgaaacaaatccacccgggctgactcccgaagccctcggactgttccgccccacggacctcc

SEQ ID NO: 285891 - DNA, 122 bp, Homo sapiens
cgccagggagctcagtgcgggacctgctcaatccatacggtcccctgacttgagggtgaccgtccttaaactgtcccccggagcttcgccagataaaatgtccaaaacacacactggagttc

SEQ ID NO: 285892 - DNA, 122 bp, Homo sapiens
tcatgaaatctgccttcccctccagcaaaaagccaactgtatagaacaccacatatagagcgctaagaatagcacagcgctccaagaacatagtgcacttggcctgcatacaagtgtgcagg

SEQ ID NO: 285893 - DNA, 122 bp, Homo sapiens
cgagtcagcgcgactgtgaatttccgtttccggcggtgtccatgctgacctgaggagtcgcggctgcgagcaggttcggtgctgcgggttggggtaggcggcggtggggtccctggttctgg

SEQ ID NO: 285894 - DNA, 122 bp, Homo sapiens
agacaccagcagaagttgtgttcagcccggccccgctgcgcctgtccgggccggggctggcgccggttgtgtttgtgtccaccttgccttctttgcagccaagcagtttttgtggagtggag

SEQ ID NO: 285895 - DNA, 122 bp, Homo sapiens
gaggtgtgctgtgtgagagtgggagtaggctttgtgtgcatgaaaagccaatgtacaaatcgagaagtagcttttatgcaaggtgtgaaatatttgtaatgcttatatatgatttctactga

SEQ ID NO: 285896 - DNA, 122 bp, Homo sapiens
gcactcggcctcagcaagcccctcctctgaggacccatcaccgggagatgctggggagaccggatcgctgggtgcagggcccctgagtgtcccctggtctctgacagcaccgacctagctgc

SEQ ID NO: 285897 - DNA, 122 bp, Homo sapiens
gtcactgtcaagcaaacaagtcgccaccccctcaggttgaagagcccaaatgagctcaaacgtgcactttaaggaaggaagattgcttgcatgggggcaaggagcccctgaatcctgtactc

SEQ ID NO: 285898 - DNA, 122 bp, Homo sapiens
gaagttatgactgcgtttgctctaatgggttatggcttcccaaatgtgagttaacagccccggtgcgcagctaggtcggaaggcgagccgcggagagcggagccgcgggccaaggcagggac

SEQ ID NO: 285899 - DNA, 122 bp, Homo sapiens
ggaaaggagggctcggctcgtgacggaacaaagccggaaggaccccggagcttcagtccccgcttgcctgtctgccaacgccgccacctgcggtggccctcgcccctgccgggggttggggg

SEQ ID NO: 285900 - DNA, 122 bp, Homo sapiens
tattctgcacacacacgtggggagcctgccacgtgcccactctgctttgcctggtggggtcgggggagaatagaacagagggagtttcactgagaaaaaatgctgtgtggaattggtgcgtg

SEQ ID NO: 285901 - DNA, 122 bp, Homo sapiens
acaaagtacatttccaaagcttacctcattacttcctttggtccagcttacattttcttccgtttcccattttcactttctagtcccagcagccatgcatttgcctatgcagataaaatgcc

SEQ ID NO: 285902 - DNA, 122 bp, Homo sapiens
gtgccaggagggggcaccgggaggaccctcaggcaggggtttcctaaatctgcagagccccggaggcatggcaaggcggagggtggccagtgtgcagagcccacacacagagacagggcccc

SEQ ID NO: 285903 - DNA, 122 bp, Homo sapiens
tggaagagctgtgcggtttgataggaatgggactaagttacttcttactccccaaccttgcgtcgtcctttaaattccgcatataacattctgagtagagaagaggtagaatgagatgcagc

SEQ ID NO: 285904 - DNA, 122 bp, Homo sapiens
gcatcacacctgcgatgcctgcacgagctgggtgcggtccgcgcagctgcagtaagggggcgacccggcgtctgttagtcggcggttcatctccttcgtgcctcgatgagctttaacgccat

SEQ ID NO: 285905 - DNA, 122 bp, Homo sapiens
actggaagcagccatcctcccccatctcctccatcctccaaggatgctccaaggagtaatcgaggttccacctctccgtggacgctctctccagacaccccatgggcacctcctccccaggc

SEQ ID NO: 285906 - DNA, 122 bp, Homo sapiens
aggctctcacagtggaagcccacgtcttcttgggctctattttgaaagctgttctttccacgacggctttgacaagaatcgatttgagtgagccggcgtgtcaatacaggccagcacaggac

SEQ ID NO: 285907 - DNA, 122 bp, Homo sapiens
cctccagcttttttccgtaaggtccgcgcgcccagcattgtgaggcgaggcaggcagcagcgtgggaactacattacccagaagacactgcgggcgacacaggcagcaacgtgagaactaca

SEQ ID NO: 285908 - DNA, 122 bp, Homo sapiens
ggggtaaatgctaagagagtcagtttacaggaactggattaagcatagaattctgcatcacggcatccgttagcctgcctttgtggtctgcacgctgggaaagcctgacacctactggaata

SEQ ID NO: 285909 - DNA, 122 bp, Homo sapiens
gaagcagaagccgtccttcttggagggccgctcgatgagctcgcagcagtgcagcagcaccgtgcccacccactggcccaccttgggcgtcttgtagatgagcagcacccccggcttcagca

SEQ ID NO: 285910 - DNA, 122 bp, Homo sapiens
cttctgcagcaggccttccaggcgcaccacgaaggcaaacagcccctcctggggcccctgcgtgcaggtcaggaacttcatccgcgaggtcatccatgtatcccggctcctaaacacctgcc

SEQ ID NO: 285911 - DNA, 122 bp, Homo sapiens
ccaaacttaaggctgtatgtacctcttgaccctgctaggactttaacatacagacagtcccgcaaaagtaacaatggacagacagagaagtcacgtctacgctcacagacacactcagtcag

SEQ ID NO: 285912 - DNA, 122 bp, Homo sapiens
aggtgatgaggctcaagcaatggcctgagagtatgtgagactggggactaggccaagctccgcccctcttcctcatcccctgatcttcccaccctgtgtctcctgggcaactaacactctag

SEQ ID NO: 285913 - DNA, 122 bp, Homo sapiens
aaggaaaggagcagggtctgaggtggaatttgggccccaccgctgaccagcggaaggattcgggcaattggtttaacttcgctgcatgttgggctcctctgttctatttgttttactgagaa

SEQ ID NO: 285914 - DNA, 122 bp, Homo sapiens
agtgagtcaggggatgatatgatggccatcattttattggaggccgtagggaagaagtcacgatcagactgggaaaccaatggagggtgtcttttgttgttgttgttgttgtttgtttttga

SEQ ID NO: 285915 - DNA, 122 bp, Homo sapiens
cccggcgcgagcggcctctcggcggagctggggcgtctgagcgagggctcggtgggtcagcgcggcgcggggctgggcatcccggcgggcgcgggctcctccgcgggccgctcctggctctc

SEQ ID NO: 285916 - DNA, 122 bp, Homo sapiens
aacgtggagaaaccccatctctactaaaaatacaaaaaattagccaggcatggtggtatacgcctggagcctcagctacttaggactgggaagtcaaggctgcagagaacaagatagtgaca

SEQ ID NO: 285917 - DNA, 122 bp, Homo sapiens
tctgggggtcaggggcaccccatctgggccagggcgctgctcaggcaggagagcaggggacgaaatccaagcgcagctggaatgctctggagacaacagctgcttttgggattccgttgccc

SEQ ID NO: 285918 - DNA, 122 bp, Homo sapiens
ccttaggatgaaagtagaggaaacgtgcttcagttaaggttttctccagggaaaagaaatcggcccagcaagatgcacagagcaccgttacgaccacgcacaccgaaggtcgcacacgaccc

SEQ ID NO: 285919 - DNA, 122 bp, Homo sapiens
aggggcgtgctccggcgcgcacccgagaagaccagctccgaatggcgcggagcaggaaggcgaaggaagaaacccaggcagtgctaaccaaggtcaggagcgccgctagcgctcgctgtgac

SEQ ID NO: 285920 - DNA, 122 bp, Homo sapiens
agcctgcgcctctgcgccctgcacccccatccgcaccctttctccggccaagtttccctgcgcccccgttcctggtacccgcgccggcctccgtggctcctccacggctctctcctggaatt

SEQ ID NO: 285921 - DNA, 122 bp, Homo sapiens
tgcttgggaggctgaagcaggagaatcactggaacctgggaggcggaggttgcagtgagccgatatcatgccaaaaccacaatatcagagatgataaattcgctggatgggattaacagcag

SEQ ID NO: 285922 - DNA, 122 bp, Homo sapiens
ttgctggtaataaaagcagaagtcacgtgctgaacgtgaaggtgagcagaggagaacttgcgatggcaaagttaaaaacaagaggagatgatggtcttggtgtggcacaggatgttaaaaaa

SEQ ID NO: 285923 - DNA, 122 bp, Homo sapiens
ctcctctgcactcagatccttctgataaactgagctccatgaattatgcttgtcttgtaccgtattttctatcttcattttgaagagctttcagctgccagcgaaagctcaatacaatgaaa

SEQ ID NO: 285924 - DNA, 122 bp, Homo sapiens
cctgttccaaatgcagcgcgctttacggcggcgcgtccttttaccgcggtgtggccggctcgcttgtcgctcgcacttttgccctattggctctgcggctccgctcgccgcactttacggca

SEQ ID NO: 285925 - DNA, 122 bp, Homo sapiens
tcgagcgcgccgggcagtggggccggtgtctccctggccggttctccgtggcccagagagcgtctcctccaaggacaggtcggggtggctggagctgcgcccggttgaagggagttgccaga

SEQ ID NO: 285926 - DNA, 122 bp, Homo sapiens
cagctgttcgcacctgttctaagatgacgacctgtacgtacaggggctgcgcgacccagtcgggaagacaaatgcacgtgtagcagaagcccacaggcctggtctctccaatccccatcagg

SEQ ID NO: 285927 - DNA, 122 bp, Homo sapiens
acccaaatctcccatttctacaggggggtgctccccttgtgctccctgtgcagttcaattcgtgacacccccatacctgtgctccgtgttgctctgcgctgccccaagctggcttccgctgc

SEQ ID NO: 285928 - DNA, 122 bp, Homo sapiens
tgaaagcaaatggtgtggccgaagctgcctctctggtggcatagctaagaccaagctgcacgcagtgaaaacacagtttgttttcactgacaacaaggcagaatgtgtaccagggatgtgac

SEQ ID NO: 285929 - DNA, 122 bp, Homo sapiens
actaggaggaaatggatttcctccgtggggcgggaggctctagtgctcgagggcaggaaacgccaggaggtggcccaaggaagaggccgcacacgacgccccgcccccggctcgagccccgg

SEQ ID NO: 285930 - DNA, 122 bp, Homo sapiens
acaagctccctgacctcagacagccaacagtccagtggaaagacacataaacaaacctaacgagaaaaattacaaaccagcataagtgctacagagaaaaagaaggggatgtttccaattta

SEQ ID NO: 285931 - DNA, 122 bp, Homo sapiens
ccccggccccatgctctgaggtcgcgcaggtgtccaaggccaggaggggcaccgaggagacgaagaagaaacagcacagcagctggggaggtgaggcccgcgcctgggatgtcatgcagcct

SEQ ID NO: 285932 - DNA, 122 bp, Homo sapiens
ttcaagcaatctgcccacctcagcttcccaaagtgctgggattacaggcgtgagccaccacgccggacctgtttaatatattttatatggtggtttagttattcctaggataagaaggcccc

SEQ ID NO: 285933 - DNA, 122 bp, Homo sapiens
catttaccctaatttaagaacagcggggactgaccctccgtgccgagggctgcatgctaccgcactaagtcaatacatgggctccccgattcgcagctgtcgtcttggcagcacttgtcacg

SEQ ID NO: 285934 - DNA, 122 bp, Homo sapiens
tcttcactgcatttcccgttacactccccaccggcatgaaccctggtcctgacctcctatcgctaagtgtcgtcccaaaagctcactgacattaaaaggaagagaggaagagagagagaaaa

SEQ ID NO: 285935 - DNA, 122 bp, Homo sapiens
ctgctatgagtcaggtgcttccaaactgtttcccagaggaaaaaaatcacctggggtagtcgaacgaggagcctgggaaagttgggtttaacaagtgcctcaggtgaattttatcatcatgg

SEQ ID NO: 285936 - DNA, 122 bp, Homo sapiens
acgcgctctccaagtatacgtggcaatgcgttgctgggttattttaatcattctaggcatcgttttcctccttatgcctctatcattcctccctatctacactaacatcccacgctctgaac

SEQ ID NO: 285937 - DNA, 122 bp, Homo sapiens
tccaacttttattcaggaagacatctttgtcttttttcagagcatgaggagcacagcagccgcaaggaaatggtcctggtggaggggctgtgctctgagcaggggcgccggggctgaacgct

SEQ ID NO: 285938 - DNA, 122 bp, Homo sapiens
cggggctgatggggggggctatgacagtttgagtgggggtggctgtgggccttccagacccgggaccctgcctgttacctggcaggtggactcactctgccttccttttttgtttttttttt

SEQ ID NO: 285939 - DNA, 122 bp, Homo sapiens
cttctctccagctggagccgaggggagccatcgagacccctaaacagcaaactctcctaccgtggaagctctctgctgggtagggtttcattttcattttgtgtttccttcctcttggagcc

SEQ ID NO: 285940 - DNA, 122 bp, Homo sapiens
gggataaaaaataatacccactagagccccgtgcctccggagagtggggcttcgcatttgcgcgtccgaggcccggcagggagagcttctgggtcctgggggcgcgcacatccggcgcgcgc

SEQ ID NO: 285941 - DNA, 122 bp, Homo sapiens
agccctcccgatggccgtcctgggggtgcttggcgtcacccgcgtggaggcagattgtcacgctcggcagctccccagctccgggggcttttacgactggcatcaggtcctgctaattacag

SEQ ID NO: 285942 - DNA, 122 bp, Homo sapiens
ataaaatccaccccacccttgtttccccttggtatttgatgacaaattcagcagaagacccggcttgctccagtgtagctttctacatcccacatcaggtatattagagcttatccgaactg

SEQ ID NO: 285943 - DNA, 122 bp, Homo sapiens
ggtgagacggaagcccgtggtgccgaagggcgcgcgtagctcgatgaggtctaggatggacgtgcccaggatcagcaccaccttgggagtgaaggcgatggagtagataagccaggccaggt

SEQ ID NO: 285944 - DNA, 122 bp, Homo sapiens
cacgtggcctggagatggccgctccagaaaggtgttcgcagtggagacggggctctcccgcgtgccttggaggatcagatgaggttgtggacgtgggagcactttgtgaactgggcatggga

SEQ ID NO: 285945 - DNA, 122 bp, Homo sapiens
ccaccccctcgcccggtgcacacccacgcggtccaacccctcgcccagtgcacgcccatgcggtcccccaacccctcgcccggtgcacacccatgcggtcccccaacccctcgcccggtgca

SEQ ID NO: 285946 - DNA, 122 bp, Homo sapiens
gccgtgtcacagtgagctgcaccttgctctgtcccccgcagagtagatgatgtggtgggccggcagggcaccccaaaccacgaccataaatagcctgggggaggagtggggtgagggacctt

SEQ ID NO: 285947 - DNA, 122 bp, Homo sapiens
cggggggacaagtggcttctctcagacgtttaaataatctccgccatatgtgtgtgggcccggccctccctcccgtgcggcgccagtccaggggcccggctgatctccagtgagcactgtgg

SEQ ID NO: 285948 - DNA, 122 bp, Homo sapiens
ggatgctttcaactggtgcgtccatcaaggatttcagggactccagtgagttattatcctcgaatgctcggttctgcctgacaacccagaaatctctgacaagatgcctggtcttggggaag

SEQ ID NO: 285949 - DNA, 122 bp, Homo sapiens
agcgccacttccggcagcgaagtcacttccgcggaggtcctgcctctccctgcggacgggcgctgattggcccgtttgaaatgcgccaggcgggagctcacctgggctcttagcgtcgccgc

SEQ ID NO: 285950 - DNA, 122 bp, Homo sapiens
tccctccaaggggtgacgacaactggcgggccggggaccgcgccgggctcggggccgacccggactccgcactcacctgcgctcatgccggctcctcgcgctcatcgccggccccggcgctg

SEQ ID NO: 285951 - DNA, 122 bp, Homo sapiens
cgcccacctcttgcctcgccgtggcctcctcgggccaggctcccgccttggggcggcccccgcaggcccagctcctgcctcacggccctccagaggccaagctcatgcgtcagggcggcctc

SEQ ID NO: 285952 - DNA, 122 bp, Homo sapiens
ggtgaagctgggggagaagcgggcgttccgcgagatccagttgtagctcccatcagaggccggagcctcgcctttcaataaaaagtcccttctagctaaaaaaaaaaaaaaaaaaaaagagg

SEQ ID NO: 285953 - DNA, 122 bp, Homo sapiens
taaaagcgccccagagatgcgggggacggtgaggctcctgcctcctgccgcagcaggcaccgaggctgcccttttatggtccggaaaagggaccaggagcggccccatgcctggtacaagag

SEQ ID NO: 285954 - DNA, 122 bp, Homo sapiens
gtgctgtgcgcggcctcggtgggtaggggctggtctccactcttcatggcattctgctggcggcagttaattacgggaggtttccactgtaattaacagtaatgaatacaaaaggatgggct

SEQ ID NO: 285955 - DNA, 122 bp, Homo sapiens
ggcacaccgggaaatggagtctgggctgggcagctttttcctaacctcctaggtggattgcgcaggggcggcgatgcacgtgaccggaaaagcaactaacacgccgctcaggaaagcagcaa

SEQ ID NO: 285956 - DNA, 122 bp, Homo sapiens
gaggcctgtccctgaactggctggcctcccactggcctctagtaatcctccagagaactccgttaacatggtttggaagagccaggcaccccaaataaagcagaaacccagaggggagcagg

SEQ ID NO: 285957 - DNA, 122 bp, Homo sapiens
agattttatttcaacagatttagcctggaactcaaaactctgcaattttaacaagcacctcgggtatctgtaattatatattttgtggatcattttgagaatgccttaaagagtaataatat

SEQ ID NO: 285958 - DNA, 122 bp, Homo sapiens
tacgcactgccagcttgtgcctgggaagagcccagctactaatgagggacgtgctgcaggcgacaaagccaagtgtcatcagatgcatgaggggccagaccacttggctccaaaaaaatgag

SEQ ID NO: 285959 - DNA, 122 bp, Homo sapiens
agctacaggtaacacctaaatcagcaagtacagccatgttcttaatacaacatcttaatacgttcttcaatacgactttatctaggagaacaggcgcaggttgccaacccctgccctacccc

SEQ ID NO: 285960 - DNA, 122 bp, Homo sapiens
tcagggatccgccagaagagacaataaacgtcccgtcggttttagggccaaatatgcaaacgcagagaccaaccagacacactagctgcttcaaagacagtctctgcgaagtccttgcttag

SEQ ID NO: 285961 - DNA, 122 bp, Homo sapiens
cggctggggaagccgtccctagtgagggagacgtcccgcatcacggtgctggaggcgctgcggcaccccatccaggtagcggcgcaggcctggccctccctgagtgcagttcctggctgagt

SEQ ID NO: 285962 - DNA, 122 bp, Homo sapiens
ctgggcctcgagccccgtctccgcacgctgtgccgaatctggctgcccatcagctccctgcgtacccagactgtgccctgccatgcccgtggctcttcccaggagtgccctgtggcctcccc

SEQ ID NO: 285963 - DNA, 122 bp, Homo sapiens
gtttttggacaaactttaacctgaagaatatctgaattgtatttcagcaggatgcaaccacgccacaactatctcattcccagggcttagatattaacttacaaaaggcaaagggctgggac

SEQ ID NO: 285964 - DNA, 122 bp, Homo sapiens
caagagcaaatccacgaggaaccctctccttaagtggacggtgggcgagggggccctcaacgagtttgctttctccccagatggcaagttcttagcgtgcgtgagccaggacgggtttctgc

SEQ ID NO: 285965 - DNA, 122 bp, Homo sapiens
agaagaagttatttcacattacagacctctccctggccccaaagcctaacatgtgcttaccgagtcaaaaaagagacacagttgattcacaagctgaaggttggaacttgaatagaacccta

SEQ ID NO: 285966 - DNA, 122 bp, Homo sapiens
tatttgacccacagagtaggagtggctgcctcttggtcagcccggcacagctgctggctgcgagcggcaggtttgcctgataattcttcttgtccatagtagaggcgggatgtggtaacaga

SEQ ID NO: 285967 - DNA, 122 bp, Homo sapiens
tgcaaagttgtatgcacgcctagttcccggaggttggggcgggggaaatggggcgggtttcgagatagtgccttccacccccagtatgctaaaaagatccttgttggagtccggggaagctg

SEQ ID NO: 285968 - DNA, 122 bp, Homo sapiens
ggccacagccgcgggcaggtcgggcagatgcctccagcgctcacctggcatcacaggtgacgcaggtgagtgcttcctgcccaggtcaggccttgggggcctcccgagagcccacgcccaga

SEQ ID NO: 285969 - DNA, 122 bp, Homo sapiens
tcgcgctcccccggcccgctccttcctcccacccggcgtctccgggccgctgacgttgcccgcgcctttacgccgtcccagcggtgctgcgcattctccaaccacggcccgggccgccgggg

SEQ ID NO: 285970 - DNA, 122 bp, Homo sapiens
actctaacctcggcctctcgatggccacattgatcaaggataggcctgtgtgcatttacacgtgcaaatgtctggctccacacacacccagggtgaaagagcccccataaactggagccttc

SEQ ID NO: 285971 - DNA, 122 bp, Homo sapiens
gaacttgggcaaatgacaaatctgaaggcgccgcgttgatgctgatggcgcagccagacccgccccgtgtgttgcagcccgtgtaatacccttctctccctacccacagttggggtcatctt

SEQ ID NO: 285972 - DNA, 122 bp, Homo sapiens
atagcatgaccctgtctctaccaaaaaagaaaaatttaattagccaggtgtggtggcatgcgcctatattcccagctactcgcggcgattgaggcgggatcccttaagcccaggagttcaag

SEQ ID NO: 285973 - DNA, 122 bp, Homo sapiens
gggcggcgcgtgcggccgggctgtgaatggggagcggcggccgcggcagctgagggcgagcgcgaccgcgacgtgcgggcgggcgcactttcttctcagcgccgggcgggggcggcggcggc

SEQ ID NO: 285974 - DNA, 122 bp, Homo sapiens
ctgggcgtcccgtgcctgtcgggtggcacttaggcagttcctctcagatgcttgctggcccgtgggggccactccagaccacagcaacgtgtgcagggcttccctctgtgcccctgaagcca

SEQ ID NO: 285975 - DNA, 122 bp, Homo sapiens
gctgcctcagccagaggggaagcatggatagcggccactggggtcatggccggctttgggcgggcagggggcaggggacacaaatagaaaaataaatggcctgagtttccgacgtttcctgg

SEQ ID NO: 285976 - DNA, 122 bp, Homo sapiens
gctgctgcctaacaaatgactccaaaactgagtggcttcaaacaacaaacgagtatttcacgcagcagcacactgctcccctccccatgctccctaagtgggccgaggaagctgttctttat

SEQ ID NO: 285977 - DNA, 122 bp, Homo sapiens
atcgacgaggccaagcggctgcgcgcgctgcacatgaaggagcacccggattacaagtaccggccgcgccgcaagaccaagacgctgctcaagaaggacaagtactcgctggccggcgggct

SEQ ID NO: 285978 - DNA, 122 bp, Homo sapiens
ttataagtttaaagtaacaagaaggaccctgagctcccacggagatgattctggaagcagcgatgcccccgggttggagcagaggagcagcgagggttttctgcgctcggcatcgcggcggg

SEQ ID NO: 285979 - DNA, 122 bp, Homo sapiens
tagcgggggacgctgaaaggcggcagggcgtgaaagcgccgttccagcagcggctccaggcgtgaagctgacgggtccgcggggtggaagaggttgtagacttgctggcaggccggccgcag

SEQ ID NO: 285980 - DNA, 122 bp, Homo sapiens
aagattttgtaacaaccttgatactctgtttctcactcagcagcacaacaagggcaaatacgttcctactcccgcagagactagtgtccaatagatacagggaatacatattttattcagtg

SEQ ID NO: 285981 - DNA, 122 bp, Homo sapiens
tgctatgaatatagagttcctacacaaaactatacaacttaccagatgtaattcctgttacgtaccatactcacaatcgtcttgaagaatatggagaaaaagtgctgagtgacaaaaacagg

SEQ ID NO: 285982 - DNA, 122 bp, Homo sapiens
caacagaatctcagtgacagattctcattttatcattacccacgtcacaagaatgtattgcgaggaggaggggccgggaaagtcggtgccttaatcacttacagaccacggaggccccagtc

SEQ ID NO: 285983 - DNA, 122 bp, Homo sapiens
cagtcagtggcaatgtcccttggatgcctccggtggtctggagtagctaatgcataaacacgttattaacaggaaaagaaaacggaacaacgaagccttttatgtgtggtgcttctgtgtga

SEQ ID NO: 285984 - DNA, 122 bp, Homo sapiens
ggtcatggagggaataaactggagagcgtttggtatgtgctcagtgtctgctccattgtgcgcactcagcctatggtcatttttaatttttaaatccagccccagggtgaggcttcccttgt

SEQ ID NO: 285985 - DNA, 122 bp, Homo sapiens
ctgtggctcgcttcgccgcgctccctccttccccgccttccatacctccccggctccgctcggttcctggccaccccgcagcccctgcccaggtgccatggccgcattgtaccgccctggcc

SEQ ID NO: 285986 - DNA, 122 bp, Homo sapiens
ttttgccccttttgaaatttggtcaaacgaagcgagaatgaatcaaacattggtttacaacgaccccaagaaggaagggagacccagcagcagagaagtcgcctcccagctgccatgggtgt

SEQ ID NO: 285987 - DNA, 122 bp, Homo sapiens
ttctcacctcctgcaggtctttgttcttgcaccaccttcccagggacgctctccttgcagcgactgaaaagtgcaacctcaccccaccctccatgccggcactcccctccctcggtggcatt

SEQ ID NO: 285988 - DNA, 122 bp, Homo sapiens
cccggcccgctgtcctggtggacacaaagcccaggggccgcccgcgcgggaccagcagcgcgaactttttgccgctcggccagcctggcaggggattttaaaatcggccaatcacagcgggc

SEQ ID NO: 285989 - DNA, 122 bp, Homo sapiens
ccgcatcgcgcaggttctacttcgtggctccggacaccgactgcgggctctgggtgcaggcggcagcccccggcgaccggatccgcttccagttccgcttcttcctggtctacagcctgacc

SEQ ID NO: 285990 - DNA, 122 bp, Homo sapiens
aactggggctcagagatattaaagagcttgctccaaatcatgcaaccttggttcggcagccgtacttgcatttgggcattcctaggtcagctcctgtgtgtccacagttagctgaaccctga

SEQ ID NO: 285991 - DNA, 122 bp, Homo sapiens
ggcgtcttttctatgaaccagtggccacaggagggtttgtgtgtctaatgtcctattccacgggtccccaggccacagaccggtacccatccatagactgttaggaacaggaccgtgcagca

SEQ ID NO: 285992 - DNA, 122 bp, Homo sapiens
gcaggggaccgcgcatcctggagaccaggtggagccagtgcgcccggaaggggcgtggcccgctgacagccgcccaggaggccgggggaggcctggagccgagggccgcgcgtggcaatgtg

SEQ ID NO: 285993 - DNA, 122 bp, Homo sapiens
tcccgctggggtggggagtagagtgaaccggcttgtgcaccacccctggctggtggtggccgaggccgtgtccctgaaccttagccagttggcctgcccttgccactgcctcggcagcctgc

SEQ ID NO: 285994 - DNA, 122 bp, Homo sapiens
cagaccggaaacctgggctggctctcactgggtttattggagcacctaggcttagaacctcggatttctagaaccccgaaacctccgcggttccccgaaccttaggatcctctcccacatgt

SEQ ID NO: 285995 - DNA, 122 bp, Homo sapiens
aatgcctggggaatgctgaagtacaagggagtgtaggcttgtgtctccgaggagcgtgagcggagggtgcaaggtgagcggctccccggtttcctcatcacccaccatctactcagatgaga

SEQ ID NO: 285996 - DNA, 122 bp, Homo sapiens
cttcccaaggggcagggctcgggacctgcagcccgccatgcctgagcctcccaccccctccgtgggcacctgtgccgcaggagcctccccagcaagcgccgcctcctgctccacagcgccca

SEQ ID NO: 285997 - DNA, 122 bp, Homo sapiens
tcaggagagatcacgctgctgccctcccgggacaacccccgtcgcctgcgcgtgctgctgcgctacaaagtgggagaccaggaggagaagaccaaagactttgccatggaggactgagcgtt

SEQ ID NO: 285998 - DNA, 122 bp, Homo sapiens
tgggagggccacatgggctcctcgtcccgaccacactccacctgccccctccatgcccctcgggagtcatggctaatgtcccccacacccaggctttaatgggaacccaccctctccggccc

SEQ ID NO: 285999 - DNA, 122 bp, Homo sapiens
ttattattcccgctttgcaggggagtaaacaacacctccaaaagatgatacagccaaatccgcagcgagaggctgggtcggaacacacacaggcgcacctcccagaggcccccgacactcca

SEQ ID NO: 286000 - DNA, 122 bp, Homo sapiens
cggcggccggagacgagtggcagagcggacgcgggtggcgcgcgggtggcagggcctggccgacctaattcaattagctgggccgccgccgcctccgtgcgactctgggcccgccgggactc

SEQ ID NO: 286001 - DNA, 122 bp, Homo sapiens
cctccgtgctcggcctacttggatagcatcttaaagtgagatgagatggtaggagcaatccgagagcctgggcatttttcctcagaaagaacaaatattgccagaaagagtctcttcaattg

SEQ ID NO: 286002 - DNA, 122 bp, Homo sapiens
gtccataggagggccctgggccccggtgtctctgtgtctgcgtgtctgtgtgtccaagcacgccaaacgtggcatctccagtgcccgggactttggacagtaaacagaggtggaaatggatt

SEQ ID NO: 286003 - DNA, 122 bp, Homo sapiens
atttagaaaatgctgcctacgatgtacccctctaggagatctgcaatgcacagtaacaagcgtgaagtaaagaaccctacttaactgtgttgaactcagcatcccaagtttgtttgactact

SEQ ID NO: 286004 - DNA, 122 bp, Homo sapiens
atctttttaagggtataaagaacgaacaacaacgattcatgacttgggaatcatgtgcagcgaggtatagcacaagtagaattttttgagatataaatttgagaagttttagaaaagaaata

SEQ ID NO: 286005 - DNA, 122 bp, Homo sapiens
caggaaggaattttaaaatgccttttatatgtggggaaatgctgctagtcttttctaaaacgggggccaattctgtacaatttctttaaaagtctgagtgcctagaatttcaccataagagt

SEQ ID NO: 286006 - DNA, 122 bp, Homo sapiens
aagccttacccaatgatccttatcctaggcggggcctaatgggaacgtatggccaatcagcggcggcgtttcttttgcggctccacgtcggcaccagctgcggggcaagatggaggcgctga

SEQ ID NO: 286007 - DNA, 122 bp, Homo sapiens
ttgggggcaacacaaagatctgggcatttgtcacaggatccaactacaactagacccggtcgttgtcaatctatgatctttggcacctctggatctctagaataaaacttggtccccaagtt

SEQ ID NO: 286008 - DNA, 122 bp, Homo sapiens
ggcaagtcctcaccaggctccgcccttgcagtgatcctggagaagcccatccggatcccccggttcctgtccgtcaaagcctcccatgttttaaaaggatttttaaataaggtacgtttctg

SEQ ID NO: 286009 - DNA, 122 bp, Homo sapiens
cccccaccacacgtcggccccccaccactgcccccagccgtgtgcccggacgtcggcccccggccccccagcagcctccaaagccctgtgactcacagccctgcttccacggggggacctgc

SEQ ID NO: 286010 - DNA, 122 bp, Homo sapiens
tgtccaaggtaacgagggtggcgggggcagggcccgtgggggccgagctagcgtgtgagtcgccatcctctgtccggccgcccgcctgccctcttgcctgccctttctctctctctgtgact

SEQ ID NO: 286011 - DNA, 122 bp, Homo sapiens
ctccactgctctctccctcactgtcttctgcttttgctttgacccggcagcagcatcaaacgcttcctacccagcctccgagtctttgcactctgttccctctgcctacgtcgcgttccgcc

SEQ ID NO: 286012 - DNA, 122 bp, Homo sapiens
ccccagagcctagaacagtgcctggctgaaaataaataggtgggtcaacagcctgaggagcgatctgggctagaggcatacatgtatgagtcatgtgcatagaggtgataactaaagccaat

SEQ ID NO: 286013 - DNA, 122 bp, Homo sapiens
gtgtcaacgtcctttgagaaagagtaagcacaggggtgtggaggagagccgggccagcctcggactcagcctccctggagcccgagacgtccacttctgtggggtcccgagggaagcggatg

SEQ ID NO: 286014 - DNA, 122 bp, Homo sapiens
ctacagaatacgccactggacaagtgcctaagcagcgacttctggtccagacacaccgcccggggagtaagtagttgcgtcgaagaacaactcattcagcagcagttaacaccgacgtttcc

SEQ ID NO: 286015 - DNA, 122 bp, Homo sapiens
aacccccatggctaccagcccctggggagccctcgcctctacccccaggacctccctgcccggctcagtagctctgggccagttcatttcgccacagcccggagcctctcggaaagcaaaga

SEQ ID NO: 286016 - DNA, 122 bp, Homo sapiens
acagaagacgcgtgatctcctctccgctgctcttggggtctccttgcagccctggccaggcggattcatcctcaggacctaaagttgcccaaggagctcctgctctgccagaggagggtgga

SEQ ID NO: 286017 - DNA, 122 bp, Homo sapiens
tgaggaaaccacctaaaaacacctacaaggacacagtcctctgacagtgacgagtccagacgtcccggtgcccataacaacatacgctttcaagataataagttatgcctcgatgtactcac

SEQ ID NO: 286018 - DNA, 122 bp, Homo sapiens
gggggagactttagcatagatgggtaagagggtcggtccaggctgggggagggggggggccgagattagagattcaccagcgattaagggggcctcggccctaggtttgggagttccccaga

SEQ ID NO: 286019 - DNA, 122 bp, Homo sapiens
tgcaagaaaaagaagcttagctggttgatttccctgaggacaggtcagtgttctgacccccgctatgttgtcccagaacttaagaggtgagttttccaacttaattattaattgaactgaga

SEQ ID NO: 286020 - DNA, 122 bp, Homo sapiens
atataatgcctgctcttttcaaatggcatccagtcttcacacacatgccaacaggtgtcacgggagccttggcatatgcctcatctaaagcatgcagttctactcagctcacgcatgggcat

SEQ ID NO: 286021 - DNA, 122 bp, Homo sapiens
cttttctttttgagacggagccttgctctgtcctcagggtggagtacaatggcgcaatctcggctcactgcaaccttcgcctcccgggttcaagcgattctccctcagcctcctgagtagct

SEQ ID NO: 286022 - DNA, 122 bp, Homo sapiens
gggaattgggttgtgcccccacaacacacctattccctggatatgacatcctggtaaaatcggactgtgtagcttccctgagcacatgattatttcttcgtttcctgattgctcagttggcc

SEQ ID NO: 286023 - DNA, 122 bp, Homo sapiens
gggagtggcctccgtgcttttgggtaagtactcccaaggctacgcccttgtttacattgacgaaaagatggaatggctgcttagggagggtaaagctaggacaggggcagttactaatagat

SEQ ID NO: 286024 - DNA, 122 bp, Homo sapiens
catcctcctagttgtcctcagactcctgggtctcctcagcgtcgccgtactcctcctcctcgctcttgaggtcatcgtataccactttgttaacggccgagggcctcggtggtgcacgccag

SEQ ID NO: 286025 - DNA, 122 bp, Homo sapiens
gacggggtggcttaaataacacatatttgttctcctataattctggaagttggaagtctgcgatcatgttggtttttggtgaggcctcttttcctgccttggaggcagcggccttctcactg

SEQ ID NO: 286026 - DNA, 122 bp, Homo sapiens
ccagccctgggcttggggccgtggtcactcacacaagggagcagcacgtcctgggacctgcgtccagccccaggctcggggccgcggtcactcacacaagggagcagcatgtcctgggacct

SEQ ID NO: 286027 - DNA, 122 bp, Homo sapiens
ttctaaactccttaggatttctatctgcctcagtaagaaagataccacagtcaaaacatgcgaattaactctacttgttatatatgtgtcactaaaaaaccgccccaggagttttcagctca

SEQ ID NO: 286028 - DNA, 122 bp, Homo sapiens
ggcacccccgcagcaggtcagagaaagtacaggtgagaaaaatgtcaaaaatggattttccggcaacatccctatggcagccagcacaaaaataggcacccgggaaccccatgccacttctc

SEQ ID NO: 286029 - DNA, 122 bp, Homo sapiens
gcctcagaccctcctggccctccggttctccctctggctggccctcagccctccctggcacggaccacgtcttccgaggatgccccggaagatgcaccgtggataaggccatgcgatcaata

SEQ ID NO: 286030 - DNA, 122 bp, Homo sapiens
gccggggctgcgggcaggggttgggggacgccaagatgcggctgcgggggtcgcgggggtcgcggggctcggccgggtcctgcgggggtcgcgggggtcctgcggggtctgacccgtgcctg

SEQ ID NO: 286031 - DNA, 122 bp, Homo sapiens
tctacctagcccctgatgcccaaatctcctccgaggcggctactgttcagcttctgctcacgtcaggagacagcccgttccattgacgtgtagctttgggctgcaatctgctccctctatct

SEQ ID NO: 286032 - DNA, 122 bp, Homo sapiens
gaagatgattttacaggtaaagccatgaccagcgccagggtctaagaaacattgttgcggcgaatgggcaggtgacatcacatggcgcaggcagcatgttccagatccagatctgagatggg

SEQ ID NO: 286033 - DNA, 122 bp, Homo sapiens
agacttaagtgagctgatactgtaaataaagtccactgcgtgggcctgggacatggtatgcgctcaataaatactggtccttttccctctctccgcctgccatcagacctttccgggatacc

SEQ ID NO: 286034 - DNA, 122 bp, Homo sapiens
cccaggagtagtctttaggtctggccgtgcacaaagccccatgctctcaagctgtaaccccgctatcaagaaagtggttatgcaagtgggcctgtgagctctcaacgtctaagccgtgcgca

SEQ ID NO: 286035 - DNA, 122 bp, Homo sapiens
gatagatctctaagacactgagagaaaaacaaggaacagaatgagttctcatcacaatgccgttcatatatgttaaaaacagacacaaaccatgtatcttttgaggctgtatacggtgcatg

SEQ ID NO: 286036 - DNA, 122 bp, Homo sapiens
cttcccaggcacctgtcgtaacgccaccttccccgggcgcctgtcctaacgccaccttcccgggcatacagagaatccgtgcccttttgtgccgtgtcgctttgtgggcttgccacacttac

SEQ ID NO: 286037 - DNA, 122 bp, Homo sapiens
gatttgcctaaagttagagaactaataagtgagaaagctagtcctgctgcgttttactaacgtgccaatcagctgcccaggaagataatgaaaacttgagtaagacaggcagccaaagccac

SEQ ID NO: 286038 - DNA, 122 bp, Homo sapiens
gcatcgcttctgccctgaatccttctctgaaacaaattcctatcgaaagtgtatcagattcgttccaaatatgggatatggatcaatattcccatgctacaaatattttttaaattgttttt

SEQ ID NO: 286039 - DNA, 122 bp, Homo sapiens
gtgcactggggtcacagggccggggcagggaccatgaagtcatcactgcccacttccgcccggagattctgcctgagcctctcgcccatgggtccgagcaccaggacgtggagggctcccag

SEQ ID NO: 286040 - DNA, 122 bp, Homo sapiens
ctgagaacaatgcaagagaagctgggctggtgtagacgccgtggagtcagatgccaaacacgacactggctgcctggggcatttacaatcagaaaagttttcctgaagactccccatcacac

SEQ ID NO: 286041 - DNA, 122 bp, Homo sapiens
aacagcacgtggggggcgtggcgtcccggcaggggctcagtagctgaggctgcggttccccgacgccacgcagctgcgcgcagctggttcccgctctgcagcgcaacgcctgaggcagtggg

SEQ ID NO: 286042 - DNA, 122 bp, Homo sapiens
aaagtgaccgtgtgcttcggcaggacgggcatcgtggtgccctgcaaggagggccagctgcgcgtcggcgagctcacccagcaggcgctgcagcggtacctgaagacccgggagaaggtgag

SEQ ID NO: 286043 - DNA, 122 bp, Homo sapiens
gtcatcgtggacaccaagatcacatggcccaatggcctgacgctggactatgtcactgagcgcatctactgggccgacgcccgcgaggactacattgaatttgccagcctggatggctccaa

SEQ ID NO: 286044 - DNA, 122 bp, Homo sapiens
ctttatattgtgataaatacatcaatgagatctccagaaatccatctgtcttcattttctcgatatgcagaaacaaacaacccctcaaatacaacttaaatgttacattttaaatctgaatg

SEQ ID NO: 286045 - DNA, 122 bp, Homo sapiens
agactgggtttcaccacgttggccaggctggtctcgaactcctgacctcaggtgatccaccgcctaggcctcccaaaaccattagggctcagaggaaggtatcccaatgaatatcaattaag

SEQ ID NO: 286046 - DNA, 122 bp, Homo sapiens
ggacgggcgaacgggtgggcgggcggctgtctggcggcggctgctctccggtggggactccgcgttttctccctggtcgccgctgcctcttctcgctcccctcaggcgacggcggcagctac

SEQ ID NO: 286047 - DNA, 122 bp, Homo sapiens
tagttatttttccaagttctgcccggtgcccatcatattgccctgaaaagcaaaagaggccgatgcaatttattccaatgggcggtttttaagaagctggcaatttgaaccggctgggtgtt

SEQ ID NO: 286048 - DNA, 122 bp, Homo sapiens
ggggtggtcttgttgggtcagtggtctgcgtatagtaggtgggatgggcaatgaggagcacggtctgaacataataggtgtggtcagcagggtggatggtctgcacacaggtcggggagggc

SEQ ID NO: 286049 - DNA, 122 bp, Homo sapiens
gacgcgcagggagctgtcgctgcaggtgggaaccgagagccaggaagcccagggagctgtcgctgcaggtgggaaccgcgagccgggacgggcagggcagggagctgaccctgcaggtggga

SEQ ID NO: 286050 - DNA, 122 bp, Homo sapiens
ggcggactagcacctcccagcactcgctccaggatatagccaattctcacgcggacaccccgaaggctaaccggaaaatgacccctggagctgagcaagacagaaaagtcatttccggtgtc

SEQ ID NO: 286051 - DNA, 122 bp, Homo sapiens
ggcctggtcaccaaggcgctagagcacgccttccagctggagcacatcatggacctaacacgcctgcgctgcctgggctcgctcttctccatgctgcaccaggcctgccgcaacgtggcgca

SEQ ID NO: 286052 - DNA, 122 bp, Homo sapiens
gccgctcagccccctgcccctcgccgcccgccgcctgcctgggccgggccgaggatgcggcgcagcgcctcggcggccaggcttgctcccctccggcacgcctgctaacttcccccgctacg

SEQ ID NO: 286053 - DNA, 122 bp, Homo sapiens
cacgcggcccacggggaactgcagccccgcgcgcgacgagcgcgacttagccttggcgcgcgccttgccaccctgcttaccacgaccggacatttccgagtcaaggaaaaaagacaacggca

SEQ ID NO: 286054 - DNA, 122 bp, Homo sapiens
acaggacccgctgcgccgcttcgatggctatgtcagcgagagcgccaccagcaagaagatcgcccacagcgtcttcagcaagggcgacagcgcctacctctcaggtgcgcagcctgctaggc

SEQ ID NO: 286055 - DNA, 122 bp, Homo sapiens
tcaaactcaggctcaagctgggactacaggaacatgtcactgtgcctagcttcaagaaaacgtttttaaaaatattcagaccttattaggtgtattacatcaaaatccctgtcaccttttca

SEQ ID NO: 286056 - DNA, 122 bp, Homo sapiens
ttagattagatttctggtggctgagtccacagatggtcacaatgtgtggctatggctatgcgttatagcatagaaggaatagccagatggttctaatgcctaaagcttccttttttgcttgt

SEQ ID NO: 286057 - DNA, 122 bp, Homo sapiens
ctgctctggcccctaaagtacagcagtaacactcagtggtgtccctgccttcctggaatgcgcgttaacaattctgattcttactcatggcaataacctacacaccacatagacgttaaatg

SEQ ID NO: 286058 - DNA, 122 bp, Homo sapiens
cccgccccgcccccggccggggtcacccacccgctgccggggctgacagagaccctggcccgcggtctgcagcctcctcagtcgtgcgtgcgttcattccgctcatagcttctgtcactcag

SEQ ID NO: 286059 - DNA, 122 bp, Homo sapiens
gcttggatgattggaggccaacctcttgtaggcaagaaagtcacagtgatggcagatcctcgcgaggagctcatactgggatactcaaaatgggggcgctttcctttttgtctgtactggga

SEQ ID NO: 286060 - DNA, 122 bp, Homo sapiens
tcggcccctacccctcacctcccacccaagcctgaggaccccggggagaggctggggccgcgcccagattcctgctcttaatgacgctgtaggttctgtccgggtcctggaggcacccccag

SEQ ID NO: 286061 - DNA, 122 bp, Homo sapiens
ctgcagcggcgctcccgcagcctgagcccctccccctccgccagcagccgggcctgtcaccgcagattaatggtctccctgacacccccgcccagccggtccagtgctgagccagccagagt

SEQ ID NO: 286062 - DNA, 122 bp, Homo sapiens
ccccacccaccaaccttcaggcttcatcggttatgcccccaacctcagcaaactggtggccgagtgggagggccaggacagcgacagcgatcagctgttttacaccaagatcttcttggacc

SEQ ID NO: 286063 - DNA, 122 bp, Homo sapiens
caagtcgaagtgatcccatctgaagaagacagcgcgaggaagcgagaccctgctgtgtgccggcccccggagggcgccccgggccctgtgggtcggagggtggggaagcacagagaaacacg

SEQ ID NO: 286064 - DNA, 122 bp, Homo sapiens
tctctcctgggttgacctccacagatcctctcagaagagcgttttccaggcgtgaatctccgcagagtggagataaaggctgaggccccaacgcacgcgcactcacgcgagtccgggcctat

SEQ ID NO: 286065 - DNA, 122 bp, Homo sapiens
ccatacccggctaattttgttttttgtatttttgtagagaaaaggtttcaccatgttggccgggctagtcttgaactcctggtctcaggtcatccgcgtgccttggcctcccaaagtgttgg

SEQ ID NO: 286066 - DNA, 122 bp, Homo sapiens
ccagcgacggccgcggcagctcctctgcagagacggggtgagagtccggggccgcgtgagcgtcttccgctcgctcgctcgctctgtttctccttctcctctgtctctcgctttctctgtgc

SEQ ID NO: 286067 - DNA, 122 bp, Homo sapiens
ctgctcagtgttccctgcaactccacaaggaaaactaaaaatggctctgacttcccttcacgctgagggacaagctagactgtcacctcccttaggctggcaaatgggacttcaaaacacag

SEQ ID NO: 286068 - DNA, 122 bp, Homo sapiens
tcatcggtgaggaccggacagggacgggggtggggccctcgggcagcccagcagcggaaccgttagccggagctgggcgagccggcgggcgcgcggccggtgggcaccgactccgcggcgcg

SEQ ID NO: 286069 - DNA, 122 bp, Homo sapiens
catattgcagacgggccgtataaccttgccatgatacgacgaaagctgacggcatgtgtacgcaagcaacagccactcaacaaacatctcctaagctatcacacaccagatgcaggggcggg

SEQ ID NO: 286070 - DNA, 122 bp, Homo sapiens
gtgccacctgcagcacgtttgcactccccgacccaggacagactggtggtgcccccttgccggcccctgcgcccctccacgcagggagatctgtgccctaggaacagctcccagccatggcc

SEQ ID NO: 286071 - DNA, 122 bp, Homo sapiens
ctcaggcacttagcaagcctgttaaggctcccaaacactgctggggactgacaacttatgcggacacggtcgcctcaagagagacggctcctgtaatggcgcctgcgtcagacactaacatg

SEQ ID NO: 286072 - DNA, 122 bp, Homo sapiens
ccaggaaagcgggaccagccgctggaaggggggtgagccccggagcatcaggagatgccccgaggagcacagacaggagaggtgcagctgctggcccagccaggagcccagggcctccctat

SEQ ID NO: 286073 - DNA, 122 bp, Homo sapiens
tctgtccagtctgtgcacttcacctccctggctcccgctctcccctgagcttacagtggacgcggggttcttccaaacccctcttgggaatactgaatggaaaagggggagcgtgcgcaagt

SEQ ID NO: 286074 - DNA, 122 bp, Homo sapiens
catggccccaggccaaagcctgggccacgccataataatgcggataccgtggggaagtggcgtggtcccccaacagtccctccagctctgggtggacgagctgaccctgttctttcctggag

SEQ ID NO: 286075 - DNA, 122 bp, Homo sapiens
acggggcaggcggggaggatgagcgcttccgcgtgcagcgggggctggagtgggtccgtccgagctggagtggtctccgaggggcggcggatgctcggagggggcggatcccttagggctgg

SEQ ID NO: 286076 - DNA, 122 bp, Homo sapiens
tagtaagaaaggagatttagagtgaaaactcattgacataaatttaaaacacaaataccacgcatctgttgagtacctctctctccaaggacacatgctgaatgcatcacactgggtggctg

SEQ ID NO: 286077 - DNA, 122 bp, Homo sapiens
aatgagtgagtgcattttgattgtcatatttcctggggtacactgctgtcgcatagtaggcggggcaaggatgcagaaagtccttcatggtcagagcagtccggaaaaataatttggtgcct

SEQ ID NO: 286078 - DNA, 122 bp, Homo sapiens
aggcgtgcaagccgagagccacaaatgggtttgaaacaatttatgatatccggcctccttcgacatgtattagcatatacctggtttctttaacatacactttgtttttccaaaaccacaaa

SEQ ID NO: 286079 - DNA, 122 bp, Homo sapiens
ttagcactaaagcggctgttgtccgagaaacgaagcgagaatgcagagctggccccggcgcgagcgaaatgtctctgcagcagcaccgcttgccttcgctagaggaagaagagacggccctg

SEQ ID NO: 286080 - DNA, 122 bp, Homo sapiens
ggcgggagcggggcctgcgcaaatcccctccctcccgccaaaccgccgagtgggcccaggcgtccgacccgcccccggcgccatagcaacgcagaaggcttcgactcccagggggccttgcg

SEQ ID NO: 286081 - DNA, 122 bp, Homo sapiens
tcagaaattgatatacacacacgtaaatataatcagaaagtgatataatcttatatacaacgttaaatacaaatgtccctcaggcagggccaggcccccaacacaaggagaaatcgctgcct

SEQ ID NO: 286082 - DNA, 122 bp, Homo sapiens
tcgatatttaatttactacagcagaacgtaaacatcttaagtctaaacgtattctggccacgtaaccaccatccagattaaaataaatattattaatttttaaaaaacaagcaaacaaaaag

SEQ ID NO: 286083 - DNA, 122 bp, Homo sapiens
ccgccctccagaccatttgcttattctcactattgttttaatttattgtgcagcctgttgcgccgcgggcccggctgagccatttggggccctctagatgccctgcagggcgcctgtctccg

SEQ ID NO: 286084 - DNA, 122 bp, Homo sapiens
gacttgcccaacgggttcctggcaggcatggacctgaaacctgaaaccaagaaaggactgcgagagaaagtggatgagtcccttttaacgccaccatttccgagtgcagttctttctaaacc

SEQ ID NO: 286085 - DNA, 122 bp, Homo sapiens
aacagccctgctgtcactcaagatggcgcctgcgcagtacacctctgctgcccccgccaccggccaacacacgtggtactaggatggacggggctcacgctcactcctacagcgcagctgtc

SEQ ID NO: 286086 - DNA, 122 bp, Homo sapiens
tcggctggaagcctttccgggtgagcgctcccctagggagaagcttgacatgactcgactcgtccccgctccgattgcccgccgctcgcccgctttgccctcttctcaggctttcagacccg

SEQ ID NO: 286087 - DNA, 122 bp, Homo sapiens
gtatcggagctgcacgctcagcacgaggagctggaggcccgcctggccaccctggaaagccgcttggatgcgctgggtgcctctctacaggccctgcctggcctcatcgcccaagccatacg

SEQ ID NO: 286088 - DNA, 122 bp, Homo sapiens
tgtgcgcatgtgcatgtgtgtgcacgtgtgcgtgtgtatgcatgtgtgtgcgtgtgcgtgcgttgatgtgtctgtgcccatgcatgcacatatgtgcataggcacaagagtatgagctgtag

SEQ ID NO: 286089 - DNA, 122 bp, Homo sapiens
aggcccgggtcagggcacccggggtccgggggtggaggcggggccgagcgttgtgggtggcgcgcgcctttgtctgcgcccaggtgcggaatcggccacccgggttcccggcgccgcgctca

SEQ ID NO: 286090 - DNA, 122 bp, Homo sapiens
gacagatctggctggggtggattcgaatgagtaataacagtagcagagacttgtgcttaccgtgtgcctatccctctgctaaggacttcatgcagaaatggaggcagagaggtgaatgaagt

SEQ ID NO: 286091 - DNA, 122 bp, Homo sapiens
agtaactccatattgagtgtgtgccaggcacagtcctaggcagtggggtccaggggacctcgctctcattgaagcgaggctggggaggggctggagctgggagtcacggagagatcagggac

SEQ ID NO: 286092 - DNA, 122 bp, Homo sapiens
cccagccagacacggcggctggcgctgctggacttctttattgatgaagttgatctcgtccgtagctcccggggttaggaatcggcctgctttaggtcctgaagtttctgttctgtgtgctc

SEQ ID NO: 286093 - DNA, 122 bp, Homo sapiens
agcctgggactacaggcacgcaccaccaggccaagctaattttcgcatttttagtggagacgggtttcaccgtgttgcccaggctggtttcaaattcctgtgctcaagcagtctgcctgcct

SEQ ID NO: 286094 - DNA, 122 bp, Homo sapiens
ccccccaccctcatcacaaggtcagggctgtgtcccaccatcctcatcactaggtacttccggccctttgctcagccccatgatgcttggcctgcagagatgggggctgaagggcttggggc

SEQ ID NO: 286095 - DNA, 122 bp, Homo sapiens
gtgccccgggccgaggccagctgggtcaggtgtacccctagcctggggttgagtgaggagcggcacccccagtatcctgtgtaccccaagttgcccaggaggccgagggggccttgggctcc

SEQ ID NO: 286096 - DNA, 122 bp, Homo sapiens
gctcattccttccgtgcatacgaagggcgccaatccttcctgtatccctcctacagataccgggtgactactgcttttgcgcccaaagcgcagtgctctggctcagctccctacagtagcga

SEQ ID NO: 286097 - DNA, 122 bp, Homo sapiens
cacccaaaattagcctggctataaatagaggggcaaaggagggaggggaacacacaagagcgtgctagaccagcctagtaaatttagacatgtagatttctctcaaggagaaatgagaccag

SEQ ID NO: 286098 - DNA, 122 bp, Homo sapiens
atggcttgcttacctttgtatagttactaactggtgctgctggtttatattctctccccacgcatgtatttcttcagtcactcatatttacctagtgctttaatgccaggcactgttttagg

SEQ ID NO: 286099 - DNA, 122 bp, Homo sapiens
catataaaatgcacagtaaaaataccatattataatcttatgggacgactgtcatttatgcggtccattcttgacaaatattatgcggtgcatgactgtgcatggaagatggaaaagacata

SEQ ID NO: 286100 - DNA, 122 bp, Homo sapiens
cctgaggatgcctaagcccctggtgtaggatgctgaagtctaagcccctgatgtagatgccgaagtctcagcccccgacgtaagatgccgaagtctcagcccccgacgtaggatggcgaagt

SEQ ID NO: 286101 - DNA, 122 bp, Homo sapiens
ccccccgtccccaacttgcctgtgtcttcactgctgaatcagctgagcccaagtcctcggcggctggaacagacccttccaaaaccgcgcaggcccaagccccacgccccagtgccagcgtc

SEQ ID NO: 286102 - DNA, 122 bp, Homo sapiens
tcgccgtccaggctggacagggctgcgaggggtgcgctcaggacgctcggctcccgcgcccgcccctccagcccgcagcgcggacccgcccgcccccgtgccccacctcgggggacgtcaga

SEQ ID NO: 286103 - DNA, 122 bp, Homo sapiens
catttaaagttctgagctgaaggggctcctttatttcgttaggtgctttcttcccgatcacgtccctgagaccacttctcgcctccctgtgcctctaagttagagttgagggtactgaggcc

SEQ ID NO: 286104 - DNA, 122 bp, Homo sapiens
aacttcctgcgctagctgggcgggggaggggcggcctgccctcatctcatttctattaaacgcctttgccagctatacggtgtttgttttttggcctcaggtcatggcaaagtgtgcagcat

SEQ ID NO: 286105 - DNA, 122 bp, Homo sapiens
gccacactagaaggctgctgaggaagtcggcccaggagcggggccagacacctaccccgacgcctgcccgcgggccgcagccaccgcatttccgcgtttttcgcggtaggcgggaggtgggg

SEQ ID NO: 286106 - DNA, 122 bp, Homo sapiens
cccgagtcctccacccccatgtccggacccccccgcctgcaccccaagccccacctgatgcggtcactggtcccgctgtagccccagcgactctccacctgctggaagcggttgatgctgca

SEQ ID NO: 286107 - DNA, 122 bp, Homo sapiens
agcagagaaacccccgccttctcctccctgagtcacttcccagcatctgcgcaaggctggcgctgccccatcccgcctgcggctgctcccatcacgtgatcataagaaaataaacctggttt

SEQ ID NO: 286108 - DNA, 122 bp, Homo sapiens
caacaaaagttgtatcctgtgtccttagtgctcctcattccctacttggggggtggtggtcgtggggtgtcctctgctgggactgcctcccaccccccatcctttagcctctgtcactttta

SEQ ID NO: 286109 - DNA, 122 bp, Homo sapiens
gcgccggttgctgggcagaagctcgagcagcttcgaggatgtcgggcctgggggcggggccgcgaggcagcgacgtcgcgcggggcgcggccctgacgcagcgtgacgcaccggcgccgcgg

SEQ ID NO: 286110 - DNA, 122 bp, Homo sapiens
gattagaaatgatctcaaaaccttttagaatttccaaaatcttcatattactgaaactgtcggaatatatgggtcttgaaattcagaagatgatagtcactcttcccatatttataggctat

SEQ ID NO: 286111 - DNA, 122 bp, Homo sapiens
ggggaatggaaagcctggcgctgggagagctgcgctcttgaccctcctttccctctaactcgcccagccatctagggaaatgcacttcgtttttgcgcttcaacctcttatctgtaaaacat

SEQ ID NO: 286112 - DNA, 122 bp, Homo sapiens
caggtggccatccatataggggaatagactagcttttttttaaaaaaaatatcctttcaacgaggttgtactgcaaactggaaaactggtttgaatatattctaaggttaaaacataaacat

SEQ ID NO: 286113 - DNA, 122 bp, Homo sapiens
gatgaaggagatgatggctttcctggtgagagacattaaggtccgggagaacagctgccccgtgggagcgcacatcgccatcctctcctataactcccacgccaggcaccttgtgcgcttct

SEQ ID NO: 286114 - DNA, 122 bp, Homo sapiens
ttctgtttccctggagatcaggttgcccttttttggtagtctctccaattccctccttcccggaagcatgtgacaatcaacaactttgtatacttaagttcagtggacctcaatttcctcat

SEQ ID NO: 286115 - DNA, 122 bp, Homo sapiens
tgcctcccgcccggtgcacttgaagcgctggtcctgggctccagggcttctctggctgagcgctgcctcatccccacggtctccggagggttctcgagagggctggagccgacctcccacga

SEQ ID NO: 286116 - DNA, 122 bp, Homo sapiens
ctcacctgcctgtccaagtcggccaaagtccagcctttgaggcgtggccacctgaggggacgtgtgcttggtctgtgtgtggcccgcttgcccctcctgctctcagggcacagtggccacct

SEQ ID NO: 286117 - DNA, 122 bp, Homo sapiens
gcaaacaataaagcaaacttgttgctcttttgtctcaaagttttgtgtgagttcccatctcgtaatcagtggggttgagggtgacggggagcagaagtaactaatatcattgtgttttctta

SEQ ID NO: 286118 - DNA, 122 bp, Homo sapiens
gtcctctcaagggagagataagaatttcaagcatctctgaatatgaaggaattttggggacgaagagaagacttttagctaaaggatcaattaacaagaacatacgcaaattggtctgagga

SEQ ID NO: 286119 - DNA, 122 bp, Homo sapiens
gcattttgtgaacacaagctttcagcacccagtgacatataccacatgcacatggattgtcgacaccctgtagggccacctaacatagaggtttatcatgggaataagtatgggttatgtcc

SEQ ID NO: 286120 - DNA, 122 bp, Homo sapiens
gagtaggaagggtgttgtggggaagttggaggtccttaactctgcatgaggtatggcctccggacaatgagagcttatcaagggtctctggactgagcctggatccggtgactgaaaggaga

SEQ ID NO: 286121 - DNA, 122 bp, Homo sapiens
ggacaagttgtagctcctggaatatactataactagccaacacgtccatgctgctgctgccgggcaaaacgggaggcgaaaccctcccccgaacacagttggggctgtttgtttgtcagtct

SEQ ID NO: 286122 - DNA, 122 bp, Homo sapiens
tcataatccagaaaaaaagtcctctttttcaagtaactcttgatatgcttcttggtaatccggatcagctgcagtgaaaggaacactatgaaacacaataactatgtgaatgaccactataa

SEQ ID NO: 286123 - DNA, 122 bp, Homo sapiens
taaacacagcactctcatgggcattctcactatgtccccatatggaaagttgactccttacgggctgctggttagatgcccttgcttggagacagattagacacacgattggatatgcacat

SEQ ID NO: 286124 - DNA, 122 bp, Homo sapiens
tgctgggatgacaggcgtgagccaccgtgcctggcctgatctatacattacaaaaattgccgtgtgcggtggctcattcctgtcatcccagcactttgggaggctgaggcaggtggatcacc

SEQ ID NO: 286125 - DNA, 122 bp, Homo sapiens
ggccgccgccaccggccccggagacgcggggggtggggagcgaagcccggggagcccgcgcgccgacactcacctgtctccgcgaggaaagacagcaaagtccaaggccgccgccgctcccc

SEQ ID NO: 286126 - DNA, 122 bp, Homo sapiens
tatccggcggacgcggcaagccagggccccgattacccagtaatgcaaccagcaaaatggcgaccacaacaaaccggcccccccacgccctggactccgcccccatccctccctctccgctc

SEQ ID NO: 286127 - DNA, 122 bp, Homo sapiens
cgccctcggccttgtcttttggcttcttggtgtcttcttcctgcagcgggatgtagatctcgtctttgaagaccccgccgtgggcgttgcaggccttgcggatggcgcctctgactacgccc

SEQ ID NO: 286128 - DNA, 122 bp, Homo sapiens
ggtagtttaattcaacagacgttggtttagggatggggaagccgggaggagatgcaaaaacgtcctgtttttcaggaatttacaatctaagtggcagttccgttcctggaacctatcttctt

SEQ ID NO: 286129 - DNA, 122 bp, Homo sapiens
gactccaatgcccaggccacaccaccctttgttataggaggcttctgcctagactttggccgggccatccctcatgcctgtgtggggcccctgcaggagaggggccggggcaggtggtcttc

SEQ ID NO: 286130 - DNA, 122 bp, Homo sapiens
atgcgtgacgacatccgcgtgatgacacaagtggtaaagaaggccgagacggagaggatccgggcagaaatcgagaagaaaaagcaggtattctgcaaactcgacacatgtttaatgatcac

SEQ ID NO: 286131 - DNA, 122 bp, Homo sapiens
gccttgccccgaacagacatgataaacaagtcagaactatctctaaacaaaacgattactcgctttccgcagccttttatataacggtagagtagacctttttgaaaactgaaagaccagga

SEQ ID NO: 286132 - DNA, 122 bp, Homo sapiens
ggagtgtccaggagcctggcctggcaggctggtgggagctgcagttgttggcgggatatgcgtgcccagcccccttacacagcctgtgcaggcgggtgggcgggcagcaggctcccttcctc

SEQ ID NO: 286133 - DNA, 122 bp, Homo sapiens
ccctgggatgttactgagatcactggtcctcatggaaatgccattacagggaccggtgagcgtgaagacccaggcgagggaggtgctggcatgtaagtggatttaaagcatgggatgggacc

SEQ ID NO: 286134 - DNA, 122 bp, Homo sapiens
tacctggctcccacgatgagctggttcccggaggggtccaaagccagctgggagaaatcccgggctccagggtaggtgaagttagagacccacggctgcaggtctggtggagggagaggcaa

SEQ ID NO: 286135 - DNA, 122 bp, Homo sapiens
gccaccgcgcccggcggtcggagacgctgcgaaaagctactagaagctgcagggcagttacgtcattggggagcgggggggccacgccgggcgacgtgagcttggacacacccacactgggc

SEQ ID NO: 286136 - DNA, 122 bp, Homo sapiens
ttctacaatccagccattccccaaccacactgggcactttccaggtatgtgcgcttggctcggactgtgccctccacctcgtacactcttctcaaccccgtctcatccttcaaagacccatt

SEQ ID NO: 286137 - DNA, 122 bp, Homo sapiens
gaggacgaggagggcaaggggcagaagcaggtcctgctctgtctgccccagaggccacctcgggtttcttctcactaaccaagcgacttcgtgtttacctcgcaggagacgcctcggcagtc

SEQ ID NO: 286138 - DNA, 122 bp, Homo sapiens
gtgttcagtggtgagcatagtacttgaagcaaccacatcaaacatagataaaaatcacaccgtggccttacagtaagtgtgacaaattgcagtcttggagctggtattttcttttctctttt

SEQ ID NO: 286139 - DNA, 122 bp, Homo sapiens
aaacgtgcatttctggcacctgattgtgtggcctgagattcctgtctgctacagtgacatcgctggtgacattattagtgccccactttgtcagcagcatgcagtagctggcctaagatgtc

SEQ ID NO: 286140 - DNA, 122 bp, Homo sapiens
tagtactgtgacccttctttgtcatccctaaacctttagtaaaagtctgccgtggagacacgaaggtgctgagaatgaagagagagggctgtgtctgtaatggaagccgcgtggaaaggagg

SEQ ID NO: 286141 - DNA, 122 bp, Homo sapiens
aagatgccaccctaagagaggttccagagttccctatagctcctccctctgttgtcctggcggtgagctactgggtaagggtgaaacccttagtctcttgtttatcggcagcaggtctgcag

SEQ ID NO: 286142 - DNA, 122 bp, Homo sapiens
gttcatcgagaaggtgcatcagctggagacgcagaaccgcgcgttggaggccgagctggccgcgctgcgacagcgccacgctgagccgtcgcgcgtcggcgagctcttccagcgcgagctgc

SEQ ID NO: 286143 - DNA, 122 bp, Homo sapiens
gcctggccctcccatagcctgctgtggacaatcaggaagccccaagcttgggggcagcctcgcccgcagccaccggggactcctgggtgtgtgttccgctcgcctctgccgcgtgtctgtcc

SEQ ID NO: 286144 - DNA, 122 bp, Homo sapiens
cctcatccctcaccagaacacttctccctccaaaagctggcgtgtgagaccccggctatccgccaccaagaggagttgcggtctttaggggcgttgtccccacctctgcaccccagagttct

SEQ ID NO: 286145 - DNA, 122 bp, Homo sapiens
cttgggccagaagcctccagggagcctaagtcaggggttgggtccctggctgcaggaggccgggaaccgacgctcagcgccaccctggaggctgcacgatgcccagcgccagggcccagctc

SEQ ID NO: 286146 - DNA, 122 bp, Homo sapiens
ggaggggttggaggtgtgcgcttgtcttgtccggaagccgggtgttgggacgcgtcctgacgacggcactgcccacatcctaatgggacacctgagggacatcggtggctgagtaaggggcc

SEQ ID NO: 286147 - DNA, 122 bp, Homo sapiens
acttgggtggttgagatgatgtaggcagttttgaggtagagcagaattggggggcgggtgcggggagtcaaggattcttccattccaggttgggaatctgcaatccctttgatgtaatagca

SEQ ID NO: 286148 - DNA, 122 bp, Homo sapiens
agagcagaggagtgggggcatcaaggaaagccgcggctgccttactggcctcgagttccgcgagcggggctgggcaccaagcctgaggctggggggacaggggcgcacgactgcactcccgg

SEQ ID NO: 286149 - DNA, 122 bp, Homo sapiens
agctactgtctgaacctcccctgggtgagaggacaagaattccccaaggaggagggattgcgagaccaatgctgccgctgtctggcaacagggtctcctcaaatgaattccacatcacccag

SEQ ID NO: 286150 - DNA, 122 bp, Homo sapiens
gctccgcccaccatgatgtctgctccgccccctcgtgttgctggtggtcctctggagctccgcccaccatgatgtctgctccgccccctcctcgtgttgctggtggtcctccggggctccgc

SEQ ID NO: 286151 - DNA, 122 bp, Homo sapiens
aacatgcctcatcatgtctctctccagccctgagggtagctacttcctaacttttaaaagcgtatatacagttttacctgtatgtgtattttctttgctcaaacaacctcttgtgtaaagtt

SEQ ID NO: 286152 - DNA, 122 bp, Homo sapiens
gcgtcgcccagcggcagatcgggctcctgggagcctctcccctggccgtttgctcggcctcggccccagctgccctggggcctagccactagctcccctggcgctagcctaccctgtcttga

SEQ ID NO: 286153 - DNA, 122 bp, Homo sapiens
gccgcgaggtatgggaaccggtccgccgggccaggcagcggtgctaggcagcaggggcagcgacgccgccgcctttcccttctcctgcccccgtccctgctccgccgcgtcctcgtcctcgc

SEQ ID NO: 286154 - DNA, 122 bp, Homo sapiens
ggcacggccagcgacaggctgctgcccagtccgtcgccgcccgcgtctccctccccctcccgctcgcgctcccgctcaccctgcagctgctccgtgggcaccgcatctccgagggtcccgac

SEQ ID NO: 286155 - DNA, 122 bp, Homo sapiens
atttattctcccagtgtgacctaaatgatcatttagacctgctccttctcaatccttcaacgtcactttcaccgtctttagcacacaactttgcttttcattttgttgagaaaacagatacc

SEQ ID NO: 286156 - DNA, 122 bp, Homo sapiens
atatttgagctttcttccccgaccaggcaccctcacttagtagaaacaagagcagtcacccgtgccgtgtccacgatgacaactgctgcctgctcccccagcagaagaattgccccctcctt

SEQ ID NO: 286157 - DNA, 122 bp, Homo sapiens
tccaaagagggggtagctgcctcccccagacagtgggcaacccctccccacccaccagcccggtggagtggtggcagcaagagccctcagcccagccccagctggtactgactgggcattgg

SEQ ID NO: 286158 - DNA, 122 bp, Homo sapiens
tctttaaaattcttccctagtacttataattgcctagcccctctttcattcagggttgtgcgggaaagccactctgtgtcctccaggaatgaagtgttcaataaataattttacagcactgt

SEQ ID NO: 286159 - DNA, 122 bp, Homo sapiens
tttctacttttgtcccagtggatcatcttgcccttgatgtatccagggccccaccacgtacggatgtgtggccagtgtatctgaactaggtatggatgttaagtaggattttaatagatgtt

SEQ ID NO: 286160 - DNA, 122 bp, Homo sapiens
agagaactcgaggggctgatgtcctgggtcaccagtccctggtgcctgtggggcttcctgcgcgcccacccccatccccctcccccctctcaggttcgacggattctcccggaggcttagga

SEQ ID NO: 286161 - DNA, 122 bp, Homo sapiens
ccagggaggaggaaaggcagtccagtgtgaggaagtggttagcagagccagatgcggtgccgtggagggttaaatatgatgatcacagaaaacgtctcttgaatgtagtacagaaggaggtc

SEQ ID NO: 286162 - DNA, 122 bp, Homo sapiens
gttcgggaggtgaaagttcagcagaaggacaaacccctgtttgcaaggaaacagaaaccccgccagccagcgaggggttttctcccctgtttctcggaatcaggagagtgtgaatgtgggac

SEQ ID NO: 286163 - DNA, 122 bp, Homo sapiens
cacgagttctctctaaaaggagtagactcagaagagaaagcagttggcctccgagtcctgcgtgagggaggtaatcatctctcagaaggccctgcatgcaagccagaaaaatctctgacttc

SEQ ID NO: 286164 - DNA, 122 bp, Homo sapiens
ggcgcggctggagggggcggaggtcgcagctgtcacgggcaccagctgggggctgctccccgccgggggaaatcgctgcagcagcgacttctctccgcctcttttccagttgccctagttag

SEQ ID NO: 286165 - DNA, 122 bp, Homo sapiens
tctcacttaccccagtgctgctgggcccggttctccaggaagggtctcatttggatgaggcgggtggcataaatgtgggcatactgccggctaaagctgcgctctcctagccggaagggttg

SEQ ID NO: 286166 - DNA, 122 bp, Homo sapiens
gcgtccaccaagaccttagcatactgttgatccatctcagtcactttttcccctgcaatgcgtcttgtgaaattgtgtagagtgtttgtgagctttttgttccctcattctgcattaataat

SEQ ID NO: 286167 - DNA, 122 bp, Homo sapiens
gatcacaccctttacggacgcggcacctgcgacagggatgcgcgaggagtcagggggcctcgccggatcgaacctaagctggggaagagtatttcttgtatttttaggagaaattctcagcc

SEQ ID NO: 286168 - DNA, 122 bp, Homo sapiens
cagggcaagggcgtgccgtcaaaggagattgaaccgtgtaaacgcacagctccccatcaacgcttcctgcgtcgggctcaagccagcgttgtggaaaaaaagcatagcatggttttttcacg

SEQ ID NO: 286169 - DNA, 122 bp, Homo sapiens
gcgctaacactcgggggctaactgaatagagcaaccttcttccagctagaggctggagggcgaggcaggcttgcggcacgaattgaggtcgcactgaggtttagaatagggcagggtcttgc

SEQ ID NO: 286170 - DNA, 122 bp, Homo sapiens
aaaaccaagaggcagcagttgtttatcacgacctcaactcagtaaggcctgagattctttcgaaaaggagctttgcttcccatgacgcagagggaagtgtcaactgggatatttctggtaaa

SEQ ID NO: 286171 - DNA, 122 bp, Homo sapiens
caaagtggtgagcgtcaacttcctgtccagattgcaagttaatggcctttacagctgactcgggctcctatgtcgtcattaataaatattaaagctgataaggaccaagaaagtgggcctgc

SEQ ID NO: 286172 - DNA, 122 bp, Homo sapiens
tgaggggagagactcattactgagtgcccaggagtccaggatcaaggggcgtcgtgaaaacgtgcctgcagggtcctaggatcctgagccggtgtccagggactcaccggctgcgaggagcc

SEQ ID NO: 286173 - DNA, 122 bp, Homo sapiens
cgtagtcaggccggggcatgaagaggatccgctcgtagacccggcacagaccccgcatctcggccagctgtggccgggaggttgtcccaatcagcatcacacggtctccgggagtcagcagc

SEQ ID NO: 286174 - DNA, 122 bp, Homo sapiens
tacgtaagtttacaaaccaaattaaaaatccaccagtgtttctctcagtacctttcttaccggacaattaacaaacaaaacctaggcaggtggatcctttgagtctaggagttcaagaccag

SEQ ID NO: 286175 - DNA, 122 bp, Homo sapiens
ttcggcttatggcagaggagcccgcctcattggctctcaggctccagagcagcaggtctccggcgcccaccccgcctcccccagctgccgacgtggggcgggcagccgccggcggctgggag

SEQ ID NO: 286176 - DNA, 122 bp, Homo sapiens
ctctttgtgaaaatttatcttttatttctttaatccaagaaaattaatattcaagggatccgtaaaaattcaggccccccgagatgtagagcgctgggatggaggaggcagggcggagctcg

SEQ ID NO: 286177 - DNA, 122 bp, Homo sapiens
tgttttccctcaaacaacttcacggagggaggaatgctccccacaggtttctggaaccatcgagtttcatgattactggtgaccaacgctgtttccacaggcctactctagtccccagtgag

SEQ ID NO: 286178 - DNA, 122 bp, Homo sapiens
ttcataggcttaatattttatagttcaaatttctatttcataaacaacaaacgggctgggcgtggtggctcatgcctgtaatcccagcactttgggaggctgacacgggcggatcatctgag

SEQ ID NO: 286179 - DNA, 122 bp, Homo sapiens
atgggcggatggcgtccctgcggccatcccctctcctgagtgcggaaggacagacaggagcggggacttatgggtgttcctggtgtcaggcagcttgacgtcgttgctcctcctagaagtcc

SEQ ID NO: 286180 - DNA, 122 bp, Homo sapiens
ggaacaggtgatgcccgcggcccacgcccaccccatcctgcgtcgctccggatccttcctcgctctcagcaccgatttaaaggagcccagtgaacgcccggctaaaaacagggaagaaacag

SEQ ID NO: 286181 - DNA, 122 bp, Homo sapiens
gcatactactcgtctagatcttccagccccctcccttgcagttaggtatggccatgtgaccgagttctaacacagtggttctcaaccaggacaattttgcctcccggggacatctagcaatg

SEQ ID NO: 286182 - DNA, 122 bp, Homo sapiens
caccccagctggtgctgggcttattccagtggccccaaacatccgcctctgaggagttgtcggagagtcgaactcagcccaggagtttggggattcatcagcctctgatggaaaggaagggc

SEQ ID NO: 286183 - DNA, 122 bp, Homo sapiens
ccaggtgaggaaatccaggcacagagaagttaggtgccttgctagggctacacagctgggcgtcaaatcaggagctgactccctaagaaagccacgcctctctcccgcatcaggcatcacag

SEQ ID NO: 286184 - DNA, 122 bp, Homo sapiens
tatgaaccaatcaatagcaccaagggtcaagcccagcggattttttccggaatggtcaagcggtatttgcatacaaatgaggatgcgtggagagaggcatcaagagcatacggtatttctgc

SEQ ID NO: 286185 - DNA, 122 bp, Homo sapiens
agtttcccaaagtgctgagatttataggcatgagccactgtacttggcctatgtttctaacgcagaagccaccaccgtatgccacacctgtgactctttcccatatttgttgtagtaaaagg

SEQ ID NO: 286186 - DNA, 122 bp, Homo sapiens
attggcagatttaacttcaatttctcttccagctctaaaagaacctgtgtgtgtctttcacgacacaactccctctcccattcttttttcttagaagaaaaagaaaaaaaaagaaaaaacat

SEQ ID NO: 286187 - DNA, 122 bp, Homo sapiens
gggcgctgcaaagattttggtcgccaaagatatcacggtgcgcgcgtctggaagcatttccgctctggagcattttcgttccgccgggtgccagcgttcctgtgacgcgtttcctgttggcc

SEQ ID NO: 286188 - DNA, 122 bp, Homo sapiens
cctttgatgaggtggccgccgctggctccctgggccccagcctggttcccgcgcgggccgcggctgccttccagacgcagggcatgcgacctgttggagtgtgaaattctaggggccgggtt

SEQ ID NO: 286189 - DNA, 122 bp, Homo sapiens
tctgtcacaaaggtacttaggctttgtacctcaaacaagatgttaagaagtactgttccccggaatagaatagacatatttagaccttatgcggggcagcacgaggtgggcggcacctttgg

SEQ ID NO: 286190 - DNA, 122 bp, Homo sapiens
gagcgcccccgcccggcggcccggcctccccgcgccgcggcgccccattggctcgggcaacgaggcccccggacggccccgcccacccgcgcccactccctcgcccacgcctctccccaacg

SEQ ID NO: 286191 - DNA, 122 bp, Homo sapiens
actctggcaaggcccgcgcagccgcagtagagggccagggggcggggcacgcgcacctgccgtagagtgctgaaggtcctgccaacggctctcttggcgtctcaacgttcggatcagcagct

SEQ ID NO: 286192 - DNA, 122 bp, Homo sapiens
ttcttggattggtccatctctgtgcctggttgcagattaagagaggctcctgcccattaccgtagctactctgacgtcattttgttaaccccttagctgctatatccactgtggacaagtct

SEQ ID NO: 286193 - DNA, 122 bp, Homo sapiens
tttctcccctctaagggagatgcagggaacaggactggtcctctctattgttctgactctcgctgaaacccacactgaccccagaccttctgcaaatcggtccttacctggggtccaattcc

SEQ ID NO: 286194 - DNA, 122 bp, Homo sapiens
gttgagagtacagggtgacttgtgtctgtgacaagccagtgttctgcatggatcccatcacgtggatccatggacggcaagcatccctgagccgccacaccccaccttctgcctccatggag

SEQ ID NO: 286195 - DNA, 122 bp, Homo sapiens
ataagctgggcaaacagtcctctataaaaggcgaggtagccttcttcctggaacaccaggcgcgccgtctggacaaaagacttgtacttggtgccctcttcccggagcctcgtccttataac

SEQ ID NO: 286196 - DNA, 122 bp, Homo sapiens
cgggggaccagtaagtcagcactgtgctgtttcccaggtgcctggtctctttgaaggagacgagtatgccaccttgatgacgcagtgcaaagagggggcacagaaggaaggcctgatgctgg

SEQ ID NO: 286197 - DNA, 122 bp, Homo sapiens
gcccttcaagatcatcgaggctgcgtcgaacttccgctggtacctgcccaaggtcgtctgcgccctcacgagttttggcttctacagcagcatctactgcagcacgtggctcctggcgggca

SEQ ID NO: 286198 - DNA, 122 bp, Homo sapiens
aatatattaggagcaactttcccatcccagcgagacttgggtgaattccccgggagctcacgctttctacattggtccttttcgttagattgtttaaggacacgcagcttgttaaagcagca

SEQ ID NO: 286199 - DNA, 122 bp, Homo sapiens
tgcaagatttgttcatgttatctgtcattatccttctgtctacctatctattcatctatccgtctatccatccatccattcctccatttattcatcccctcattcatttatttatttatgca

SEQ ID NO: 286200 - DNA, 122 bp, Homo sapiens
atcctcttcgtcgtcgggttgggctgctggagggttgggggcactggggacctcaggctccgggcccagctcctccagtaccgaactctcggaggggtattggtacgtggtctccagggctg

SEQ ID NO: 286201 - DNA, 122 bp, Homo sapiens
aaaccagtggctctgccttctctaaactgcaggcaccaaagaaacagggttgcccttgtacggggagtcacataactcccctctaaagggaaatcagtccaggaatcccacactgtgatcct

SEQ ID NO: 286202 - DNA, 122 bp, Homo sapiens
caagtttctggtgagggaaatggtagcttctaacgggaccctggcgggtctcaattaccccggacaggtctgagggaagtggagcccccgcccactcatggaacccaacatccggtttccat

SEQ ID NO: 286203 - DNA, 122 bp, Homo sapiens
cccaaaagcagcagagcctcctcacctcgtggctccttggcccgcggaggctcccgcttgcgccgtttccgagacggcttcacccatgggctgtcttttcgccatttcttcttggccttgcg

SEQ ID NO: 286204 - DNA, 122 bp, Homo sapiens
ctattagtgcagaatgacttccggcaagtcccagtcgtttagaatccccagcccaaagatcgcggggatccacgcgtcatccgggcctctgctcccggaagagaccacgcagccgctaaaga

SEQ ID NO: 286205 - DNA, 122 bp, Homo sapiens
ctctctctttttgctctttgtctggaccgtcagtaatccaggcgtggtaaaatctcccagcgttggggctggccaacggctgcaccccgcggtttttgctttttattgctttttgtatttag

SEQ ID NO: 286206 - DNA, 122 bp, Homo sapiens
tggtcttcctcaccaaagcgtccgctcccagagagtgtatctccgcgaacccaaccaagacgagcccaggaaataagtgcgggtgaccgaattcaatcctgcatccaacagttactggaccc

SEQ ID NO: 286207 - DNA, 122 bp, Homo sapiens
ccgaggtttgcagcaatgacgtttaatacttctggaatgattaggaatctgagaacagaccgtgggcggctatgctgaccagggctccggatgtggaagctgggccctgcctccttgcaggg

SEQ ID NO: 286208 - DNA, 122 bp, Homo sapiens
agagccagcaggatatgttttcttaaaaaaaaaaaaaatgcctaacatcttggctttcaccgaagggttggtatctgctttgtacactttggccttcttggcttttcactgaaacacacaca

SEQ ID NO: 286209 - DNA, 122 bp, Homo sapiens
gttttgagcggccagactctgctgttctcaagcctgggaggcacagagaagcaagacttccgcatcgggggaggatagggcttgagggccgccagcccagactcgcttcacaaatgtgagaa

SEQ ID NO: 286210 - DNA, 122 bp, Homo sapiens
aagggggcggcaccgctgacgtcatttccggggtcggggtatataagcggggcgcgagggcgctgctgctgccaccgctcctgccactgcagtgctcgagccccgtgcaggggagcttgcgg

SEQ ID NO: 286211 - DNA, 122 bp, Homo sapiens
gccgcagagagggcagcagtgaatgtgtcctcggtggttcctccagatggggcctttgtccgcagtgcacttgtctctgcctgggttgctatagtaacccacagatgcagagagacttggcc

SEQ ID NO: 286212 - DNA, 122 bp, Homo sapiens
gtggcgggctcctgtagtcccagctactccggaggctgaggcaggagaatggcgggaagccgggaggcagcgcttgcagtgaaccgagatcccgccatttgcactccagcctgggctacaga

SEQ ID NO: 286213 - DNA, 122 bp, Homo sapiens
gtgctaggcccctgctttcaagggaccaacagacaataacaataacaataataatagaagcggctaacccttccggagcacttagtttatgccaagcatatacaatatgttttatatgtatt

SEQ ID NO: 286214 - DNA, 122 bp, Homo sapiens
aacccactgagcactggggtataggttcctatttccccaggggagcaaataacaaagccgcgctttcccagagctgaagtgcccccaaaagtctggaccacacgtcccagaatcctctgtag

SEQ ID NO: 286215 - DNA, 122 bp, Homo sapiens
gaagcaaacaaaaagagagcaacccaaccaaaacaaatcacattcttgcacaaaagtgatcgttttcttccaaacaatgtgaatttaaaaggtcacacaaaagaagcaatcgggctccgcca

SEQ ID NO: 286216 - DNA, 122 bp, Homo sapiens
gcccccagatcccacccctcggcaggcacccaggtgcctggctccatgacgcagcagctgcggtctcctcttatcagggctcccctgtgggttggggtggctccatttgtttaagacttagt

SEQ ID NO: 286217 - DNA, 122 bp, Homo sapiens
ggggtcccggggggcgcgggaggcccctgtagaggcttggtcaacatggaggtggcgctgcgcagattgagcccactgaacccgctaagcccgcagggcgtggacgcccggggcagcgcagc

SEQ ID NO: 286218 - DNA, 122 bp, Homo sapiens
cgtctctactaaaaatacaaaaaactagctgggcatggtggtgtgcgcctgtaacaccagcgacttgggaagctgaggcaggagaatcgcttgaaaccagaaggcggaggttgcagtgagcc

SEQ ID NO: 286219 - DNA, 122 bp, Homo sapiens
ccgcccccattccccgccccccaggaccccgggtccctcccctccctcctccgtgttgtccgcctgcagtccttcgggtcactgttctcgggaggccgccccgccccacagtcaggctgtgc

SEQ ID NO: 286220 - DNA, 122 bp, Homo sapiens
acagctctgctgggagcgttctggcctgaaatgcagtgggagctctggtgcaggtgtagccgaggctcaggggctccacaccaggcaaataggcgaacggcgtctcccgcggctcccggtgg

SEQ ID NO: 286221 - DNA, 122 bp, Homo sapiens
cctgggaggcagagcttgcagagaggcagagcttgcaggcaggcagagcttgcagggagccgagatcatgccactgcactccagcctgggcaacagagcaagaccctgccttgaaaaaaaaa

SEQ ID NO: 286222 - DNA, 122 bp, Homo sapiens
gtccagtgctctagccccagggatgtcccaggaaacgagggccaggaagcgaagcgcaagcgcgcagcccagatgtagttctgggttcctcagctgcattgtcacggtgaccggacagcata

SEQ ID NO: 286223 - DNA, 122 bp, Homo sapiens
aaaattatcaaaacaaagaaacaaaacacgtggtggcacaaaagacaccagaagccaggtcgtttgcccctcaccattcagcccttcccagcaaaagatcctactgtgcagctcaacctagc

SEQ ID NO: 286224 - DNA, 122 bp, Homo sapiens
cacagtgtcctcgccctggactgccacggggactcggtaggctggagagccatcagggttcgtcacgaacacctgtgatgtggggtgcaggtgggggaagttcaggcaggctcagggctgtg

SEQ ID NO: 286225 - DNA, 122 bp, Homo sapiens
gagaggagcgctgggggagggacagggagacctgcccttccacactggagcagcagcacgcgactctgttctcatttttaaaaagagccacagctcccacgctgaggagctggaagggagtg

SEQ ID NO: 286226 - DNA, 122 bp, Homo sapiens
tctatgaaatgtacccttttctctggtgacattggcccatccttatgagcataataaaatcgcagaatcaaagcgctgcaagagatcttaaaaccacctaagtctaccactgagagcccaag

SEQ ID NO: 286227 - DNA, 122 bp, Homo sapiens
aactacacacataaacaaaagtaagggacaaggccaagatggcttattatatgctagagtcggttttaattgtaggctcagaaaagatagggaactaaaggcctatagattaaacatcacta

SEQ ID NO: 286228 - DNA, 122 bp, Homo sapiens
gctgtcactcttcattcagtccagcatctgatcacatctgtcactcagggcctgagggggcggggccttaaacgttatccaatcggggacactgggcggggggccgtccaatcaggcccgca

SEQ ID NO: 286229 - DNA, 122 bp, Homo sapiens
ggcctcatggaggctcatggagggggctgtgtgaatggggtgtgctgtgtcatgcctttccgccactgtttctgctcctacctgcctccaaggcctgcatatgactcaggagtcagttcaag

SEQ ID NO: 286230 - DNA, 122 bp, Homo sapiens
tgtgtgatttccaggtcctaacaaggctccctaaagcacctgaatcagtttctgaaatgccgcattgtgcatgctaatgtcatggaccaaatactttggtgctcaaggagtctttgaagact

SEQ ID NO: 286231 - DNA, 122 bp, Homo sapiens
tgctgcaggtggctgggctgacgctgctggctgttggggtctactcagccaagaatgccacgcttgtcgccggccgcttcatcgaggctcggctggggaagccgtccctagtgagggagacg

SEQ ID NO: 286232 - DNA, 122 bp, Homo sapiens
gcttgcattccaacccagactttgctactttgtagctttgacaagttatttttcctttctcggtcttaatttctctgtgtgtaaagtcaagataacaccaatgtgccttccgggttaaaatg

SEQ ID NO: 286233 - DNA, 122 bp, Homo sapiens
attaccatcccaagtatgtttggaactacaaagtgctagtcctaatgacttcaggtttaccgtaggaggtattaactccacttgagatcacagagaagacaggccaaggttcttggagaaaa

SEQ ID NO: 286234 - DNA, 122 bp, Homo sapiens
tgcgcccggttcaggaccgggtccaaatgaggttggcgtgcgccgtgcaggtgaggagtgcgggtcacctccccccaaaagaccctgtgccaacctccccaaccctacccgccccccatggg

SEQ ID NO: 286235 - DNA, 122 bp, Homo sapiens
ttttttccgattggtccgtgaagctcgggaggtcgttgggggctcgaccttgggatagaacgcctgccttttattggtcaatactcttcgggccgggcaatgtggctccccgaggctgcctg

SEQ ID NO: 286236 - DNA, 122 bp, Homo sapiens
caactctaaaagagctggatttgcgcccagcatgtggatttcagcgtcttcctggtaaatcgccaccctcagttgccacctgaacagtaactctccacgaaatggatgagaattgaatccgt

SEQ ID NO: 286237 - DNA, 122 bp, Homo sapiens
aatgacagattgtacacatgtattccaacacagagtataatagcctccaaagtcctcgtgcgtcacttttctcacagtatcctccctgtgggtggagtaaccttattgggcatagagcatag

SEQ ID NO: 286238 - DNA, 122 bp, Homo sapiens
tttagacaatcatttccagttccaaccatgatctggttcagccttggatgccgcaggcagcgtctgtgatgtctgtttcatacaccctttggaaagtcctacgctcaaggcaaacaagtttg

SEQ ID NO: 286239 - DNA, 122 bp, Homo sapiens
tgatcaaagtcttcatataatcaactctaatatagtaagaatccgaatcttaaaagatgtcgaaatcctcaaactaggaagggaaaaatcctcagaagtccacctttcaccagagttagtaa

SEQ ID NO: 286240 - DNA, 122 bp, Homo sapiens
actggaagtgaaagaaagggtgggcggggaaaaaagaaaagtgctttgcaagttcattttcgttgtcaggagcgctggtggtttactccacagaggcaggaaaacttcagtcacgaggcgaa

SEQ ID NO: 286241 - DNA, 122 bp, Homo sapiens
tctgggaaatgtgtccacctgtcatggatgaaaatattgcaaatgtgtcttctgtgttaccgaaagacctaagggggtgaattctattttgtaaccaagaaaagactagagccagttcttaa

SEQ ID NO: 286242 - DNA, 122 bp, Homo sapiens
aggagaaagtccagtctgtttctagacctcaccatgctgcaggtgtctgggccagcaggtcgcagccggagctatgcagctggctgctgtcacatccctttctctcccagctgccttcagct

SEQ ID NO: 286243 - DNA, 122 bp, Homo sapiens
cgtggtccttgtaggaccaagcattcttggcattctgtcgagattgagattccagagcatcggatgaacgggacttatagctaaggcgtactcacccacccctcccttcgtctttttacgca

SEQ ID NO: 286244 - DNA, 122 bp, Homo sapiens
tgcgccttccaaagggcaaagtctctccgcctctcgccccgcccctgcttcgtcaggccccgcccacctcccaggtcccgcccaggcctggcttctgtcctgcgcgcagattcgcgaaaacc

SEQ ID NO: 286245 - DNA, 122 bp, Homo sapiens
ctttgtcacccaggctggagcacagtggcataaacacggcttactgcagcctcaatatcccgggctcaagctgtcctcccacctcagctccccacatagctgggactacaggcacatgccag

SEQ ID NO: 286246 - DNA, 122 bp, Homo sapiens
cgcctggacattgtggtgcaatgccgctgatgtctcaatgaacttgcagtcaaagaccaccgcgcaggcccggccctctgtgtgggtggggaaaggcaggcaccagtaaacaaagggtgggt

SEQ ID NO: 286247 - DNA, 122 bp, Homo sapiens
gggcagcgcagtgtgcggtgggcaggggctgccctgcgcctggaggcactgccgggtgggcgggcggagggattgaccccacccccgtcccctccaacttgggcgtccgagccccgccgcgc

SEQ ID NO: 286248 - DNA, 122 bp, Homo sapiens
gagagcatgatatgactttcaatatcgcagtaggagtacacccacccggtgatatttatccgaatatcatctccagggggtggcgtatgacgttactcccaagatagcagtgggtgtgcatc

SEQ ID NO: 286249 - DNA, 122 bp, Homo sapiens
tagtttgtggcagagtggagaggacgggtggatatttcaaatttttttagtatagcgtatcgcaagggtttgacacggctgccagcgactctaggcttccagtctgtgtttggtttttattc

SEQ ID NO: 286250 - DNA, 122 bp, Homo sapiens
cttggcgtcccgtggctgaggtggcgaggtggaagatcagccctttacggggtgcggcaccggagctgggcccccagctgcatgcctcgcacccctcccgactaggtctgagcggggcagcc

SEQ ID NO: 286251 - DNA, 122 bp, Homo sapiens
gggcggggggaggaggcggccctagcgccattttgtgggagcgaagcggtggctgggctgcgcttgggtccgtcgctgcttcggtgtccctgtcgggcttcccagcagcggcctagcgggtg

SEQ ID NO: 286252 - DNA, 122 bp, Homo sapiens
ctgtgtgagttgagtctcctctctgagactgctaagtaggggcagtgatggttgccaggacgaattgagataatatctgtgaggtgctgatgagtgattgacacacagcactctctaaatct

SEQ ID NO: 286253 - DNA, 122 bp, Homo sapiens
cccgcggctcagacagatgggtacgtcccccccagcgctcgctcagggggcgccacacaccggaacacaagacacaggaaccgaacaccaatcagccgactttaggggcgggccggacgccc

SEQ ID NO: 286254 - DNA, 122 bp, Homo sapiens
ttaaattttaaccatgagggaaatcgtgcacatccaggctggtcagtgtggcaaccagatcggtgccaaggtaagaattttacacctcttttatttctttttacaaggaaaaatccaggtaa

SEQ ID NO: 286255 - DNA, 122 bp, Homo sapiens
agtttgccctttacgttctttgggtccttcgtctgcagtggcgtttgctggtgagctccccgcaggtagcggcggccgggcagagcgctcctcctcctcggtcgttctctcttaaatgcaaa

SEQ ID NO: 286256 - DNA, 122 bp, Homo sapiens
ccgctcccggataggggatgcaggaagctcgtggagccaatggccgcggcgggcgggcggcggcgcgcgtgcgcgttggcccccgggcctgcgggcgggaggcggggatggtgggggagggg

SEQ ID NO: 286257 - DNA, 122 bp, Homo sapiens
atggcccgtcctgggcactcagtgcatgaatgctggaagccaagagtcccctgcccagctcggggctggccggggcctccacatctgcgttcctgcagggcgctgagggaatgcccctggct

SEQ ID NO: 286258 - DNA, 122 bp, Homo sapiens
tggctgggaaggctgcattataagcaggtacctgtgtgttctgtgtagacctggccctgccgtttgagaaacaatggtgttagaattagaggtatgaatgtaaagtgcctattacatacata

SEQ ID NO: 286259 - DNA, 122 bp, Homo sapiens
cttgtgggtggatggccgtggaggagtccccagtgccagcctgctttctggcctgcaccccgtcccatctcccagcagagaggcttcgaggtttcctcccacagcaggctcctgagcctcag

SEQ ID NO: 286260 - DNA, 122 bp, Homo sapiens
cacaccggatgcaccccaccctctggaccaccaccgcacacctgaggggccactcacctacggccacaggttttatattttagtgagtgatccccaataaagtttatctgtacctcggactt

SEQ ID NO: 286261 - DNA, 122 bp, Homo sapiens
tcggccttcgtgcgttcccggtaggcggcgatgacctgtaggtcccgcaagtgctgtgtgcggacgctctgctgcgccagcagacaagaggacatgggtggacagggtcccaggcacactct

SEQ ID NO: 286262 - DNA, 122 bp, Homo sapiens
tcataatttacagttcgggcctttctagtaaccgctagacgctgcttctctatggttattcgtctcggcttggtgagtcagagccaacagcggagacgatctatatacgttcttctctatgg

SEQ ID NO: 286263 - DNA, 122 bp, Homo sapiens
gcatgagaccccagcctgacctggggaggtgccttgctcaggcctggggcagcctcccaccggtcacccctgctcaccccacgccgctcctgggagaaaatccacggtcctgacagagccca

SEQ ID NO: 286264 - DNA, 122 bp, Homo sapiens
catggaatgaaatgcctcttccgaataagcttctttcccaaagaccctgtggagctgctgcgtcgggatcctgctgcttttgagtacctatacatccaggtagagtctggcttggggataca

SEQ ID NO: 286265 - DNA, 122 bp, Homo sapiens
tcctgaggccagagacatctccacgggaaagtcaaaggcctggaggaagtgcggacctgacgacagatgccccgcacgctggccgggaccgggaagggcggtcaagggtggaaaggggctgg

SEQ ID NO: 286266 - DNA, 122 bp, Homo sapiens
ccgccacctccaggggcagcctctgctgccggctcacatgtgaggagggagctgctgccccggcctctgagagaagcccagtctgttctggtcaagcaagaagcaagtggaccagggaggag

SEQ ID NO: 286267 - DNA, 122 bp, Homo sapiens
ggtgtcactgggattcacggtagatctacgtagccgcctgtggctcgtggctgccaggtccggggcctatccccgtcggcccgccaaggtccctctcaccagcgtcctgtttttactgcaca

SEQ ID NO: 286268 - DNA, 122 bp, Homo sapiens
tctctctctataaagtgcggctgaagccagctcgagccctagaggcactgccattctccacggggccacatggccgcctctgcacccagctgttccctggcctgcgcctggtctccgccctg

SEQ ID NO: 286269 - DNA, 122 bp, Homo sapiens
cacagccccacagcagggcgaagcaggcgcgggctgcctggagctccatgccgcgcttctcgctctcggtccgatccccccgagcccggctcccgcacacccgcacgcctgcacgccggcct

SEQ ID NO: 286270 - DNA, 122 bp, Homo sapiens
gaaaaaactgaaaagccaggattgacggacactaaaaacccagcatttgttaaaaatccacgtcaacacacacacacacctcaccccgagccagcaccgtagccccgccagcagccagggta

SEQ ID NO: 286271 - DNA, 122 bp, Homo sapiens
ctaaagctctcctttgagttgccaagaggagttagttacttgaacacagacacagaaatacggtcgatagcaaaataagatatgctgagctcaggagcttaatttttttcccttcattgagt

SEQ ID NO: 286272 - DNA, 122 bp, Homo sapiens
ctgtgagcaaattccttaaaccttcctataaattccatcccttgatgcttttgctgcagacgtgggtaggtcaaacatcctttttctgtccttgtcctgctgaaggactgctgcagcccact

SEQ ID NO: 286273 - DNA, 122 bp, Homo sapiens
tcgcgcgttttccacggagccctctggaggggagggagcgcggttcggactagcctctcccgaacaccaagtgccgctcttagccccgtccagcccgccctgttcatcgggggcctcgccgc

SEQ ID NO: 286274 - DNA, 122 bp, Homo sapiens
ggaggcagaagggctgtagaagtgactcggaaccctgtagagcgagcgcgaccctcctgccgggtctacactggcttccgcacctgcccaccacgtcctcacaggctcccgcccctgtgcag

SEQ ID NO: 286275 - DNA, 122 bp, Homo sapiens
tcagagtcaccaggtgagtgaactgccaattggctaactttttgtaagtggtggcatatccgggtatggaatgggattgggttagtagcccaatttaggggagttagagtgtctcctaaggc

SEQ ID NO: 286276 - DNA, 122 bp, Homo sapiens
gccctgacagctgccaggcacatcttgttccctcaggttgcacaactgggataaatgacccgggatgaagaaaccactggcatccaggaacttgtcttagaccgttttgtaggggaaatgac

SEQ ID NO: 286277 - DNA, 122 bp, Homo sapiens
aacctgactttcggaggcccacgtagattttccacctttgtaaagttttctcaaatcactcgagcttcagtaggccttctatccttgaactcttgcttcttgtcctaacttaatctactaaa

SEQ ID NO: 286278 - DNA, 122 bp, Homo sapiens
ctgttgctcagctgtcccgattccttgggaacagcgccagggtttgcactgggaaacttccgggccccaatgcgggctcttaggatatgactgtcagtcaagccaaggggtgggcacatggc

SEQ ID NO: 286279 - DNA, 122 bp, Homo sapiens
ggaattttattttgccatataacagagaacagaggttcagcggacttcaggtaggacatacgtaagctctgctccatttctttctagattctttccacctctttgtgctagcattgaccaca

SEQ ID NO: 286280 - DNA, 122 bp, Homo sapiens
ctgcaccccagcctgggtgacagcgagatcctgtctcaaaaatttaaaaactgggccaggcgcagtggctcatgcctgtaatttcagtactttgggaggccaaggagggtggatcacttgag

SEQ ID NO: 286281 - DNA, 122 bp, Homo sapiens
gcagccgagcagaggagtccctcgtaggcgaccctcggacagacgctcctgcgcggcccgcgtggctcagctccgccccaggaaacttttcgcgcagcccccgctccatgcgcccccaccca

SEQ ID NO: 286282 - DNA, 122 bp, Homo sapiens
cattcagaacgcagtgagctgtttgggagatggccacgtgcagaggcagacggcagctgacgcaggcttctccggtgacacagtgaccgttcagccccaagagaaggcagtagggagattac

SEQ ID NO: 286283 - DNA, 122 bp, Homo sapiens
agcagcagagattcctggtagaggtagcactggctggcatttctccggatgcctctatagcgctgggatgccttcgaggttttcatgggagctaacccactgctaacaatcagaagctggcc

SEQ ID NO: 286284 - DNA, 122 bp, Homo sapiens
tttctcgagcagcagaaatcctcttgcgttccagggcactgtcagcaagcttgattttcacgtggttgaaaaagagaggggagccagccgagtgcgagtgcccctcatggaggctggagttg

SEQ ID NO: 286285 - DNA, 122 bp, Homo sapiens
ctcttcgtgtctctctcatgatttgtcattggatctagagcccaccctaatcaaatataacgtcattttacctaattatttccgtaacgaccttatttccaaatagggccacattctgatgt

SEQ ID NO: 286286 - DNA, 122 bp, Homo sapiens
accggccggcgctgggaggttagcggggtctcgggtcctgcagaggaaaacgcccagctccgggaggggagcggcggggagggaaggcgagtggttaggcgtgtccactctgcagggcccag

SEQ ID NO: 286287 - DNA, 122 bp, Homo sapiens
tacaaaactccagggagcgtcgccagcctcgatttcctggggttattcctgggagagaggcgttctcacggacagccaccctggggaggaggaggaggaaaggcactaatggatgaggaggc

SEQ ID NO: 286288 - DNA, 122 bp, Homo sapiens
cctacacgctttgggatagggccttgacctcttcccccgcagcccggtggctcagacctgcgaaggaaccaaggcaagagggagaaaagccctgccgcctgatcccacgccgccactcacag

SEQ ID NO: 286289 - DNA, 122 bp, Homo sapiens
ggtctctcacggctggaaacaaacctctccttcctgctcccacagcccctccgtgtcctccgcctactgctgcatgtgcgcggagcacacaataccgtgccgcccagcctccgcgcctctct

SEQ ID NO: 286290 - DNA, 122 bp, Homo sapiens
cccccctccaaaaagcttcagctcttttgactgagacctgtgggtggctctgaaaagagccgtttaaaattttcaaaggggaacgtcccgccagtttcactttttcttcggagctgccttct

SEQ ID NO: 286291 - DNA, 122 bp, Homo sapiens
agccccaacgctgttggcaagacccaccaggccttcttcagacagacacatcgagggacccgtcattccacccatgcccagcttcccggaggcccttcctgcctccactcctcccacccccg

SEQ ID NO: 286292 - DNA, 122 bp, Homo sapiens
tttcccgcgctggaactttttcaatagtaaacgagcaaagctccgcgcgcccaggtggcgcgagcactaggatctgtcggttggggtcctacttttacataacgcccccacaatgcccttcg

SEQ ID NO: 286293 - DNA, 122 bp, Homo sapiens
acctcccaggctcaagcagtcctcccacctcagcttccagagtagctgcacccacaatgccgggctaattttttaaattgttttgtagagacagggtgtcgctgtgttgcccaggctggtct

SEQ ID NO: 286294 - DNA, 122 bp, Homo sapiens
gctgctgtgctgtgagtccgtcgtctggcacgtaggacgtgcccccactaatcaggtagtcggccatggccaacacaggacaccgccgcgtgtctccgaggaccgcgccgcagagacctctg

SEQ ID NO: 286295 - DNA, 122 bp, Homo sapiens
gtgacaattacctctcctttctgcttctggctgctgtggttccagatggtggaaacgttccgtccgattcttccctcatattgtgcgtgctcaagccacaatacctagaatcctgagcattg

SEQ ID NO: 286296 - DNA, 122 bp, Homo sapiens
gtgagagtccggcgctcgcttccctgtgtgttaaaatcgctcggcgacgggtcctgtccccgctcgttctgccttgggccaggtaaacacggattttcgagactcctttccgcttaaaactc

SEQ ID NO: 286297 - DNA, 122 bp, Homo sapiens
ccaggccaaagggaacacagtgacgcagcaacagggttttcatttcattttccctccccccgtttcccccaagttatttagtgctgttttaaaagtctggggccacaatgcagtctcttccc

SEQ ID NO: 286298 - DNA, 122 bp, Homo sapiens
ttcctcctcaccttcccggggcgggcggggtggggtgagaggggttgggccctactcccccgacttccactcccgtgcgggtgggggtctcgcccccttagtaacctctccgaaattgacag

SEQ ID NO: 286299 - DNA, 122 bp, Homo sapiens
gctggaagggagtgataaacctgccatgcaacgatgttattactttaatggatacaggaccggttgagcactttatttccaccagggctttttactttgcatcttccctttccacaacatcc

SEQ ID NO: 286300 - DNA, 122 bp, Homo sapiens
atggacagcgcccagaagtgcgagccaagtgcaaggggctgctgcagagggaggctctgccgcaggcaccgccgcggtcagcgggggaaggtgggaagagggagacgggtcccaggagagcc

SEQ ID NO: 286301 - DNA, 122 bp, Homo sapiens
cactgctcccagtgctgcagccacgccgggggccgccgctaccactgcactcgcaggcctcgaggcccacacccacataggtcagtaataagctgctgcggcccctgtgccagcagagcggg

SEQ ID NO: 286302 - DNA, 122 bp, Homo sapiens
tcccgtgcggggttggggctcgtggcggaagctccggacctccctggcccgaacggtgagcgccgccggccactgggagcggccagagcccagtaatcaggacaccaccacagggaccacgt

SEQ ID NO: 286303 - DNA, 122 bp, Homo sapiens
gcagtgtgcttttccataggtctatgtgaaacaggtttttcatctagaactaccttcttccgcttggagcttagttttcccctgaattctctaggctaaactcatttgtgttcagttttgct

SEQ ID NO: 286304 - DNA, 122 bp, Homo sapiens
agcatgtcctgtggctccagtctggaggtcacaccatgacctcttaggtcctctctggcacggcctattggttttctaggacttggtgttctccaagagacatttcattccctaaggcctta

SEQ ID NO: 286305 - DNA, 122 bp, Homo sapiens
ttgggtggtcgatgggactgggcgccagggagcagggggcggcgctcgtctgggaggctccgcttgccgcacaggagcccacggagggggtgggaggctcaggcatggcgggctgcaggtcc

SEQ ID NO: 286306 - DNA, 122 bp, Homo sapiens
agagactggtcagaggaggaccaaggctaatcccctccacagtttgtctccagtcattcccgtttagggatctgtgctcagtaagcctgtgctgcacggctacgggtgtcccttattctctc

SEQ ID NO: 286307 - DNA, 122 bp, Homo sapiens
tagtgggcctctgttcctgcgggtggccagcctgtctgtgtggctgggctggggaggccacgtctggtatctgaatgctatcggtgggttggggtggaggaaccaggagagggctggaggga

SEQ ID NO: 286308 - DNA, 122 bp, Homo sapiens
ctcccacctcagggccagtcaagggaacaggcctctgctctgggcagaagtgctggcagccgctctctgaaaagctaggtgttgcctcagggtctcccggtgtcctgtggaaaatgcctggc

SEQ ID NO: 286309 - DNA, 122 bp, Homo sapiens
gccagtagcagagcccagcacgttgcgggtgcccagttcatcttcgtggggctaaacctgcgggaagagagggaaagggcccttagtttccatggagatcgggtgcccaggggcggagggct

SEQ ID NO: 286310 - DNA, 122 bp, Homo sapiens
atgcttgatgacactaagttgcgaacctctgatcattcctattggcccctgggtgagaggcgggaggcatggggggactgaagtttccagttggccagtgagcgaagaaggcgttggctgta

SEQ ID NO: 286311 - DNA, 122 bp, Homo sapiens
ttctcccgggccacccagtcctcggtgccggccccgcgttggcgcgcccccgccccacgccgacccggggccctggcgcagtgccatcaacatcctgcctgatggacttaaagtcccattca

SEQ ID NO: 286312 - DNA, 122 bp, Homo sapiens
ttgcacgatgccaagcactggcatgacatggagctccagaacctgggcgctgtggtcggccggctggaggcggagctcagggaaatccgagcggaggcggagcagcagcaacaggagcgcgc

SEQ ID NO: 286313 - DNA, 122 bp, Homo sapiens
gcgccccgctctccctcctgccgctggccagcgggctcggccggcccacgctcctctgtccgttgctcaagtgatggacgccccaagactgaagttcaggtggaagctgccccaagggcttc

SEQ ID NO: 286314 - DNA, 122 bp, Homo sapiens
aagctcatgttaaattgaagactacacttggcataaacattaaaaattgacagaacaccccgcacattaactgcaccagggcttcgtaattagcatttaaaagtaaaacatcatttccttac

SEQ ID NO: 286315 - DNA, 122 bp, Homo sapiens
tcgccgcggccatcagggtaagggtacctggacttgcggctttttaggtcggcctggctccgctccttccgcggtgacgaggtcccccggcctcctagggttgggaagagctgctttcctga

SEQ ID NO: 286316 - DNA, 122 bp, Homo sapiens
ttgtgtcctccttctttcactaacttctggactttccagctcttccgaagttcgttcttgcgcaaagcccaaaggctggaaaaccgtccacgatgaccagcatgactcagtctctgcgggag

SEQ ID NO: 286317 - DNA, 122 bp, Homo sapiens
ggcagcagcgcctggaaggaggcggccccggccgcccgcagagctccgcctcccaggccgcgctctgtgtctttgtccaggctgggaggggccgatggccgttaaaagccccgcccgccgcc

SEQ ID NO: 286318 - DNA, 122 bp, Homo sapiens
agccgcgcaagtctgcggatggggaagcggggacttggccaaggtcacgccgcgtctccgcggccgaggatgaaccaaggtcacgccacccgcccctgggccctgccggtcggtctcgaagg

SEQ ID NO: 286319 - DNA, 122 bp, Homo sapiens
gcatgagccaccccgcccagtgctttgcctactttttaatggggttgtttgtttttctctcgtaaatttgtttaagtttttatagatgctggatattatactttcatcagatgcatagtttg

SEQ ID NO: 286320 - DNA, 122 bp, Homo sapiens
gctgacgcccgccctgtgttctcaacaccggagccagagggagcgctttgcagccccgggcgtctctgctcagctccgaccacctctcccgctatccccctgggctccgtctctccctgcac

SEQ ID NO: 286321 - DNA, 122 bp, Homo sapiens
ttccggcctgtaaaatggtatcatagctcccatctcgccccctgcgctgggagaaatgggcgtcttgtcttcgctgcgcattgcatgcggaggagcagatgtctcagcccaggccctagcct

SEQ ID NO: 286322 - DNA, 122 bp, Homo sapiens
gggttgggatgagagcaggctggagccgaggggctcgggcaggagccagacaggctagagcgggctgcaagttccggggcccggctggaagcctgatggttagagcctggtcccagccagga

SEQ ID NO: 286323 - DNA, 122 bp, Homo sapiens
catccacccggatgttatgtctcttgttcatacaaattgcccatcagctttaactcctatcgaacagcccttaatgagggggccttagggaatgcaccttacttatactgacagccattatt

SEQ ID NO: 286324 - DNA, 122 bp, Homo sapiens
tgggtaccaaaaaaccagtaggtacaaagaaaagggagagaagatgcaatcaaggacttccggattccttactgattcttctgtgatagctcatgaggcaccactgccaactctcctattaa

SEQ ID NO: 286325 - DNA, 122 bp, Homo sapiens
ggatctgctgggttggctacgtgtagatcgggtccacagcacttggctcctcccttggggcgctgcttttggtcccggggagcaagtggaacccttgggattctataaggacacgtggctgg

SEQ ID NO: 286326 - DNA, 122 bp, Homo sapiens
tccaaaatggggagacagtactgcaattatatgctcatgcgattttgcaaatgccaacctcggaaccttctgtcagtcttatctgtgctggagctgagctcatgaggactcttttattggca

SEQ ID NO: 286327 - DNA, 122 bp, Homo sapiens
gccagcgcctcaatctaggcgggggtacagtgggctgtgctccgcaaacggggagcaggccgggtctggagaggcctcggcgctgctttcccaccttgggctacgctccaggctggcgtggg

SEQ ID NO: 286328 - DNA, 122 bp, Homo sapiens
ggtaaacgaggggtaaacaaaacccagagatgtcatcaggtgcctgctaggagtcccacccgttcccctctagccctggcctgcccctccctaccagagtcttgattctccttcaaaacttt

SEQ ID NO: 286329 - DNA, 122 bp, Homo sapiens
tccccggggaggggaagatagtggtctagagggaatttgctatccctttcaatcagcaaacggacctgcaagccagtttgcctgggcacttagggcactgagtttggggcacctcagggagc

SEQ ID NO: 286330 - DNA, 122 bp, Homo sapiens
gcccaaagggatgggttgaacatcaggaagctcttagccccagctctgccactcactcggcggccttggaaagagtacttgcccttgcaggaactcaagctccctcatctttaaaatgaggg

SEQ ID NO: 286331 - DNA, 122 bp, Homo sapiens
cgcccccagaatcatgaagatcatggtgttcgcgctcatggacatcgggcggggccgggccgggccggagcgccgccccccggccccggcgcccccccggccccggcccgatgctgagcccc

SEQ ID NO: 286332 - DNA, 122 bp, Homo sapiens
actctcgctccacgccccttccctggccacaaacccgccgaggcccccctctctacccggcgcgcctaccacaggcgcgacacctgtcaagccttgggacaccgaaaccgtacctgggaaca

SEQ ID NO: 286333 - DNA, 122 bp, Homo sapiens
gacgggcagcgcccactgcgtggtgtgtcgagcggcgccctgccctgtgccctccagccccggccaggagctttgcggcaacaacaacgtcacctacatctcctcgtgccacatgcgccagg

SEQ ID NO: 286334 - DNA, 122 bp, Homo sapiens
ccccattaaccccacctttgccgctgccccttaacccctttcaggcttcaccccattaaacgcctccagccacgggtgaggctcatctgctactggaacacccccgaatccttccaagtccc

SEQ ID NO: 286335 - DNA, 122 bp, Homo sapiens
agagtgattccgtagttaagatgaagggatttgttagtcttctcagagaggaaggacaagcgtgaggaataggaaaatttcacctgtaggtgggatggaaaaagcttggaataattggccgg

SEQ ID NO: 286336 - DNA, 122 bp, Homo sapiens
cttgcagtggaataagtcacatctgatggacattttctgtgcttatagcatagtaatgaacgtctgacaggcgcgacctttcataagacaacccacactattggctttctgcccagaatatt

SEQ ID NO: 286337 - DNA, 122 bp, Homo sapiens
gagaaagggggtcgagcaggcagtgtctgtgcgggatgcttgagaacgtcttccctgagtcggttccggccgcaaaggctttaacctcttcctccccgtgtcggggctgtggtggatctgac

SEQ ID NO: 286338 - DNA, 122 bp, Homo sapiens
ggagggtgcttgcttgccctcagggtgagtcacagtgacctcagaggagtttccccaaaacgtccccgccctgtgatggggaaaagccggaatctctcggtcccaggtggtcatgtggccca

SEQ ID NO: 286339 - DNA, 122 bp, Homo sapiens
gaagcagcaagttctgccttccaagtatgtccccctaaaatgacttgaatcaatatcactcggttcctcccctctaatgtggctggactgcaaagaaaaaacagagcgcccacataaatgaa

SEQ ID NO: 286340 - DNA, 122 bp, Homo sapiens
gaagcagctcacggtggtgatcagtgggagaaagaggggagggcaccagtcctgtgcccccggtcctgccaacccccacctggtgctggccctgaggaccacccgggaatgtggacctcctc

SEQ ID NO: 286341 - DNA, 122 bp, Homo sapiens
tggctttctttctgttattagaattctttatgaggaatttggcctcaggccaaaatcttacgtgatgtttgagcccactatagacaattacaaggctttatctgacaaactcaatggcggaa

SEQ ID NO: 286342 - DNA, 122 bp, Homo sapiens
cctgaagccagcaagacaacgaacccaccaggagggacaaacaactcccaacaggaggaacgaacaactccagatgcgccacctttatgaactgtaacactcaccacgaaggtctgcagctt

SEQ ID NO: 286343 - DNA, 122 bp, Homo sapiens
acaacccaaggcccagcatgaggggatctgctggctaactcacggtgagctaatccacggcgagctaacccacggcgagctaacccacggcgagctaacccaccgccagctaacccacggcg

SEQ ID NO: 286344 - DNA, 122 bp, Homo sapiens
gcggagcctggagttcgccttccagcccgagacagaggagtgccgcgtgggcatcctgtccggcttgggcgcgctgcctcgctatggagaactcctccactacccgcaggtccctggaggag

SEQ ID NO: 286345 - DNA, 122 bp, Homo sapiens
gggaactggtgccacaggaaaaggatgtgacgaagaccaggagggaaagtgaaacccttccgtcctggcttcagtgaggaacaagcatgcctgtgccagacgaacccttccttcctcttggg

SEQ ID NO: 286346 - DNA, 122 bp, Homo sapiens
ggggtcgtggaccccggccaggtcttagcagcatggaggcgcagggtgtagcggagggcgcggggccgggcgccgccagcggcgtgccccaccccgcggccctagccccggctgcggctccc

SEQ ID NO: 286347 - DNA, 122 bp, Homo sapiens
ccctgggggcgcaaggtgttatgcagatcctcccagtcactctccctgcttcagggagcccggtttgcagggccagtgtccctctcagatgatcagttcctgaaaggctgggtgcaggggga

SEQ ID NO: 286348 - DNA, 122 bp, Homo sapiens
cgaaagggctgcccgagggagcccaggcctgccacctcatatgtcgggttcagtgcgccgcgaaggctctccgcgcctgtatctcggaggacccccagagcgctgcagtattgggcgtcagg

SEQ ID NO: 286349 - DNA, 122 bp, Homo sapiens
tgccttcttgtgcaggactaggccaaaaactcgccaggtgggacagagtttcatatctctcgaggcagtctcctggttggggggtgggggcccatagaaatcagctgttattgatccagcca

SEQ ID NO: 286350 - DNA, 122 bp, Homo sapiens
gagcactttgtgcaaatatcaggccgggaagtgctgcgcccgcggagctgccgggcacctcggcgcccccgcgccctcggctgcgcgctaattcactttgccgtcacctctcgggcggggtc

SEQ ID NO: 286351 - DNA, 122 bp, Homo sapiens
cccaggtccacagctgagctggtaaagctgacaacggccctcttgtttccactctcctgccgtaaacagggtctttttcaaggtctatttagggccacgcatttcacactttttgtgctttt

SEQ ID NO: 286352 - DNA, 122 bp, Homo sapiens
gcagcacaatgtcagctgtctgaaagttcaaaataacccccacaggagaccaacacgcctcgcccagcagcagagctcccgaaggcaaacggaatgaacaatgcgacaacctacatgcctga

SEQ ID NO: 286353 - DNA, 122 bp, Homo sapiens
taggacttggggtctgaaggttgcagaccgaggcgatccgcagcgccctcttccggcggccgtctggagaactgcagctttagagcggtctcggggaagctttgctactagtttccggctag

SEQ ID NO: 286354 - DNA, 122 bp, Homo sapiens
caccccctagcacacgaagccccagctggcggtggagcaggtgtgttgctggtagctcatcgctggcttggagatagaggtgcttggtacctgtcccctttccgacaacacctgaaaccgta

SEQ ID NO: 286355 - DNA, 122 bp, Homo sapiens
ttaaaactgttttccagggcagtttctctctctggttctaggacacttaattgggctcaacgtttcccccaagtcttggctgtgggtttgttgtgggctgggtggttgaggagaggatgcag

SEQ ID NO: 286356 - DNA, 122 bp, Homo sapiens
atacaacagtttactaactggaaattttctaaaatctcttagagctttggttttctaaagcggtgatgatggtgatgataataattcctccctcaaagctctgtaatgaataaatgaacatg

SEQ ID NO: 286357 - DNA, 122 bp, Homo sapiens
tctgggaggatggacactgtgtcttctaaatcttgtgaccaaaggcaactgttcaccgagcgtcagcatctgaagaaagtgctaactgtggatgtgtcttctccagagattaatacctgctg

SEQ ID NO: 286358 - DNA, 122 bp, Homo sapiens
tccccacacccagttgatggctttccgtaataaaaagattgggatttccttttgattgcgcgtttgtgtgtttctgtattagaaaagcctgacaactgcagaggaattgcccatcttaaggg

SEQ ID NO: 286359 - DNA, 122 bp, Homo sapiens
aaaatgcctttatcttgttttaaagaggcgtgattcttcctcagcaagacaaaaggctcacgctgtgaaaagcatgagggaactgagtgaaatccagaccgtcttcctcttacacagggcac

SEQ ID NO: 286360 - DNA, 122 bp, Homo sapiens
ccagagacgggcgagttgtccacctgtgcaggtctgaactgacttcctgtgccagggcctcgcctgagcgggggcaggaagctcacccttgcaggtctccccgcgccaacggacgccctgag

SEQ ID NO: 286361 - DNA, 122 bp, Homo sapiens
aggatgaaatgttttagaattggtaccaggaatggggtgtatgacaaggcccttgaattccgtgaacctgagccctctgcttctcttcctttgctgtgaaatgagttatttggtcacacacc

SEQ ID NO: 286362 - DNA, 122 bp, Homo sapiens
gtgcgtagggctggcagaagcgggtcagctgagctctgcactttcagaaaagtcactgagcggccagggccttggggcggggaccccggggctgccctaatggggcggggctggatggggcg

SEQ ID NO: 286363 - DNA, 122 bp, Homo sapiens
tcaaactgaaaggattagccacccttctacctaggtagcttgcacaactcagtgttccttcgtgggtctgtggccactagattctcttggcttgatgttttattaacacattttctttctta

SEQ ID NO: 286364 - DNA, 122 bp, Homo sapiens
ttgtactttattgagcagctgtggaattaggaaggggaagtaggataggggacacgattacgttcctaagtgaaggtttcaagctgggctttgcagggggtataattagtatggtcactgtg

SEQ ID NO: 286365 - DNA, 122 bp, Homo sapiens
tcccaccagacccaggccgacctagatgacgtgtccgagtaggagttggcgaggtgcggccgggcggccggccctgcgcatgcgtgatacttgcaccggtcgagatggtagcatgagtctgg

SEQ ID NO: 286366 - DNA, 122 bp, Homo sapiens
ctgagacctgcacggcccccggggacaccatgttctctctgctcatgtgcaagccagccacgtgggcacacttggggcggcaggaccccaggctgactacacagccaagggaaggcgtggct

SEQ ID NO: 286367 - DNA, 122 bp, Homo sapiens
aagaagctcaaattagaatttctgctcggagtcacagtatttgggacccaggtccaaacacggttggagccaagattcaatctctgggcctgggctgaaagttgtgattagaaatctaattc

SEQ ID NO: 286368 - DNA, 122 bp, Homo sapiens
caaccccaacttgaaagtggttggtcagaagttctggagtccaagacatatgactggtgccggtgtgtcttcctcaggtagacagtgttggaattgaataggaggatacccagctggtgtcc

SEQ ID NO: 286369 - DNA, 122 bp, Homo sapiens
atgaaaattgaactgtactttaactaagaaagcaagcataaatgtagctactttagcagtcgagctgatttgttcaggggcagttaacagctgttagaaactgagaggaaaagtggcagata

SEQ ID NO: 286370 - DNA, 122 bp, Homo sapiens
gcccacaaggaaacagagacgctaccgccgccagccgccttggaacccagctcgacgggccgtggcgcctgcgccctcagctcaaccatagacaccgcccccaacagcgactccgacttctg

SEQ ID NO: 286371 - DNA, 122 bp, Homo sapiens
acgacggcgggggctacacggtggaggtgagcatcaatgactacctggacatctactgcccgcactatggggcgccgctgccgccggccgagcgcatggagcactacgtgctgtacatggtc

SEQ ID NO: 286372 - DNA, 122 bp, Homo sapiens
cctgctggaccacttcatctgtgagctgccggcgttgctcaagctggcctgcggaggcgacggagacactaccgagaaccagatgttcgccgcccgcgtggtcatcctgctgctgccgtttg

SEQ ID NO: 286373 - DNA, 122 bp, Homo sapiens
ggggtggggtcgctgagtcagcaggcaggctgcggtcggctctggtctccgctggggagccgaggcctctcccgcagccgccgctgtggccccagcccgcgggaaagacaacagaaagtgct

SEQ ID NO: 286374 - DNA, 122 bp, Homo sapiens
gctctgtctgccctgcacatttaactcaagcacatgcactgccagccccctagtgggggacgcttttcacctctctcccacatgagggcccagcggcccggtcctgcccccccccccccccc

SEQ ID NO: 286375 - DNA, 122 bp, Homo sapiens
ccactggaaggaagaagaaaagctcccacactttcccagaattgctcgtatgctaatggccgcagacttcacagagtgtgaaatcaggaaaaactaattccctcagaatagacgggacaatt

SEQ ID NO: 286376 - DNA, 122 bp, Homo sapiens
ctgaaaccagaggctgccggctgcaaacaaggccactggaaatcatcgtctcactcactccggagtcaattactggaatccaatgaagtgcaagacctttagagactcgagtcggcatcttt

SEQ ID NO: 286377 - DNA, 122 bp, Homo sapiens
gagtctgatacagcatcggtctttgtctctgggtctctcccttactcgcgctcacacacccgtaccccaatcaacacaaacagcccaagctttcacagcctggaggcggccgtcggagcagg

SEQ ID NO: 286378 - DNA, 122 bp, Homo sapiens
cttgaacattctcagacactgataaacttgattaggttgttgctggaaacactgaaagatcgactattttgctaaacttatagactcctacccccagggaaattttctttcctccctccctt

SEQ ID NO: 286379 - DNA, 122 bp, Homo sapiens
gcctgtagctgctgtgcccagctccagggtaaacagagttgcttgcaggatggtagggcccgggtccattgcctggccacctgttgccatggtgacccagaggcagcacaggcagcagcctt

SEQ ID NO: 286380 - DNA, 122 bp, Homo sapiens
gccccccccgcgctcactagggagaggctggggggaggcagtgacccacgcgcctcagcccgcggctgacgcaccttcgaaaagttgcgctccgaccttctcacgacctacattcttcccgg

SEQ ID NO: 286381 - DNA, 122 bp, Homo sapiens
gagatgctggtaatatgatgcaggcaaagtaggcccagatccctggcccgaaagaattcacgtactatttatgtattttagtcagcctgtcttttcctcctacattgcctctgccacttcaa

SEQ ID NO: 286382 - DNA, 122 bp, Homo sapiens
ctgcccctgtggtccatcgggtaactgtgaatgtccatctggacaccagctccctttgcccgattccaggcctgaaagcaattggccgagatgcaatttggtctctgggggaccaggcttgc

SEQ ID NO: 286383 - DNA, 122 bp, Homo sapiens
tttcctactagttggaacgacatctagaagtatgattcatgcagctggtcccaagcgcctcgagagtagacttgccacagagcaagcctaaagatgttaacctttataatgccatgatttgt

SEQ ID NO: 286384 - DNA, 122 bp, Homo sapiens
gaaaccttatcaagaattataggcttcacaatgtctttccagaaagccccgctttggaggcgcctaaggaaacacgagcagcctcagcagcaaatgaaaagcagcaacacagaggttctgct

SEQ ID NO: 286385 - DNA, 122 bp, Homo sapiens
ataagaggctggggtggcgttgggcaagcggctcagagctgcgggggagctccagcatcccgggagctgctgagggaaggggaggagcagggcctggctggaaagggggtgggatggggaga

SEQ ID NO: 286386 - DNA, 122 bp, Homo sapiens
gaaatttacattttattttcatcatactgaaaacctgatgctgaccttggcttcactcctcgaggtggtatgtagagttctgtgaggtcattgctgtggatattcagcatgcactaacagtg

SEQ ID NO: 286387 - DNA, 122 bp, Homo sapiens
tagaggcctcactcctccagcaggaagccttgtagtgcagcgaatctggacccggcccagcgtccagagacaggaagcattaataggagcgaatgtgaacactgttcgcgccctggctgcga

SEQ ID NO: 286388 - DNA, 122 bp, Homo sapiens
cttgctgttcacagaatagtctcctctcttcatcagccagaaacaaacaaaatgcctgtgcgaaccgatgctgtggtttcaccagcttggtccttccacaaacagcaaaactcagagttcag

SEQ ID NO: 286389 - DNA, 122 bp, Homo sapiens
gttgttagatgagacgagattgtctacttattcctggtataagactctagagaatagaaacgagagaaaatgaagtaaaatggagtgctatggtacagtgctaggcaccttcacgattttta

SEQ ID NO: 286390 - DNA, 122 bp, Homo sapiens
gggattccccgcctagggctcaagggatggtcagacgcagggtgcccagcactggacagacgagggggcaacagtttctcagtcccacaggctcaccacccaggggaggaaacttcaggcca

SEQ ID NO: 286391 - DNA, 122 bp, Homo sapiens
cggcggggcctggcctgggaagcgcggggctgagggcgatgcccggccgctatcccgagtcggtgcgtgcctatgctgcaggagggccaccaggagctctgcttctccgctgcacccggctc

SEQ ID NO: 286392 - DNA, 122 bp, Homo sapiens
agacgagctttgaactcgaagattaagtttcctggtcctgaatgacacataaagactttgcgagaaagacctccctccttgcctcacaaggaatataaatggatttctcccccttcctcagg

SEQ ID NO: 286393 - DNA, 122 bp, Homo sapiens
aatgattgcatttcagctccccccttcctcttcctcttcctctccccaccccccaccatacgttgtgctaaaggcaaagaaaagaaggcatagaccactacagaaggaccctaagtgaccac

SEQ ID NO: 286394 - DNA, 122 bp, Homo sapiens
agtggacgggttggagtgacccctggagcttggagtttgaattatggagctggggggctgcgaggtgaagatggactagaggagaacaaggtgacttttcaccccaacacatttaactttta

SEQ ID NO: 286395 - DNA, 122 bp, Homo sapiens
ctcggccttccgggagcgcaggcgggtggggggcgccgcccttgtcgctgtccggagccccgcaggcccgtggccccctgcctggttctcccgcctctgcaagcctagccttcaggactccg

SEQ ID NO: 286396 - DNA, 122 bp, Homo sapiens
cagaaagcttcaactggtgaatggtggctgtgggcacaattagtgctagcctttgcagcacgttatctcagaagatgagataaaactggtttcaggttacaacaagcagtttgggcttgcag

SEQ ID NO: 286397 - DNA, 122 bp, Homo sapiens
cgtgaaagactggaacacctgggtggtatgtacaggcatcatcggaattggtctcatgatcgaagcgctgaccgcagccccagctgtagcccgcaaggccatttcctcttctcaccgtcgca

SEQ ID NO: 286398 - DNA, 122 bp, Homo sapiens
cagctggccactgcgggccgaccccgccctgccgtacgtgcgtcagttaggccacatcagcgcaaatctgtgagggtctagtaactgcctgagaaaatatcttgtctgaccccggttatatt

SEQ ID NO: 286399 - DNA, 122 bp, Homo sapiens
ctgtgttttactgtcttcctaagttatctctgtctgaaaagtatgttgctcatttactcgcgctgtataacgcttccatcctctcaaacatacacatttactcgcaggtaaactccttggga

SEQ ID NO: 286400 - DNA, 122 bp, Homo sapiens
tgtgccttgggtaagcccttctccaggctactagtggccggaaaccgggccgcggaggcacgatgagagccgtgagagccctagcacgacttgcccaaagacaatttctcaggtctcgcgac

SEQ ID NO: 286401 - DNA, 122 bp, Homo sapiens
gcgcatgagacctggagcgcggcccgagctccacgccccccggctccagattccgccgcgcgctcaccgccatcttgtcgcgccgtgtggctcttcgcaggcaccgccccgcgccctttgac

SEQ ID NO: 286402 - DNA, 122 bp, Homo sapiens
cgctctttcaaaaaagggaatcacccgtttcttccatcccgacctcatccattcctcgaacgctccttctggatgaggaagatgggcagtgtcaaggttttctggaggagaggagatctggg

SEQ ID NO: 286403 - DNA, 122 bp, Homo sapiens
tggggcccttcccaggctgctgggtctccagcccacgttccggatggacgaagtcggctgcgccccggccgcacgccctccgccccaaccccgcctcagctgcgaaacggggggctggcccc

SEQ ID NO: 286404 - DNA, 122 bp, Homo sapiens
ctcctgcagccccgaggaggcagggctgtctgtggatcccagatcggttgtcggaaggcccggaagaggagagctgccctccaccaccactgtctcctcctcctggacaacagagtcaggac

SEQ ID NO: 286405 - DNA, 122 bp, Homo sapiens
agtccttaagccttccttctttcgtaaatctagacccaggcataaagataatggctgtgacgcatatggccctgctctttgtacttatttacaatggagagttaaaaaattctacctgaaca

SEQ ID NO: 286406 - DNA, 122 bp, Homo sapiens
tgtgcttgtacaaacccaagagccaggatggatgtgcgggggtggggcgggcggcgcctccgcattggccaccggctcagccacgcccatggaggggagcgggcagaggggagggggcgcgg

SEQ ID NO: 286407 - DNA, 122 bp, Homo sapiens
catgtaccacctccctaggtggttgtaaggattaagtaagctgatgttcattgggatcctcgtgcttcactggcaccgagttcctatccatttggtacgaactgattctgaaccaccactta

SEQ ID NO: 286408 - DNA, 122 bp, Homo sapiens
gaacagtatgtgcaaagactagggagaaaaagatgttagcagagttggaaacctgaaaggcgactgaaaaaaatgagcaagggactgagtgtgcagtgcctggaaaccatgagaaggatttt

SEQ ID NO: 286409 - DNA, 122 bp, Homo sapiens
cacggtgcgcacacccactgacctgcgcccactgtctggcactccctagtgagatgaacccggtacctcagatggaaatgcagcaatcatgcgtcttctgcgtcgctcacgctgggagctgt

SEQ ID NO: 286410 - DNA, 122 bp, Homo sapiens
gtaagagggattccagagtctcttatgtcctcaaagcttcaagctcagccaaaagaatctcgatggtttccacaaaaaatcttgggccttggatcaactgcccacccttgaaccaatcctgg

SEQ ID NO: 286411 - DNA, 122 bp, Homo sapiens
aagagcgtgtggagagcttcgcccccggcgaggatggacgccccgggcggagggagcgctcgggttgcaacacccagtctggctgcacagctcgtaacccctgccctttggcggcaaacaag

SEQ ID NO: 286412 - DNA, 122 bp, Homo sapiens
cgagttgggtggatgtcagaaggcgagaggtaggggatggaagtcccttcagattaaagacgttgcttgctgctgctttttaaaacaacaacagcaatgacaaacgtgcaaaggtgagcgag

SEQ ID NO: 286413 - DNA, 122 bp, Homo sapiens
acaagctggggagagaacaaggggttcacatgagacttaaaggagcagtgacttccttctcgggacttgtaagctcgacagtttcccctgatttttccccaaatctcttcttgtatttataa

SEQ ID NO: 286414 - DNA, 122 bp, Homo sapiens
tttgcccctcatcttaggaagagtctagtctgagaacaaacagtttgccaactcctaccccgagctcttgcgcgtatctccttaaatatttcaagggtctgggccccagatgggtgctcgga

SEQ ID NO: 286415 - DNA, 122 bp, Homo sapiens
ggagctgaacggatccaaatgtttcccagtgggctagcagcttcttagagggactgggagcgcctcccctcagctccgccccccactccagctcccatgtatggaaaataggggtggagcgc

SEQ ID NO: 286416 - DNA, 122 bp, Homo sapiens
cttagctctggatctcacagcatctgcaagtcagagggcaacagaggctgcgacagtcaccgggaactactagagcagaggatactaagcaatgaagatggaccctgagctctggctggagc

SEQ ID NO: 286417 - DNA, 122 bp, Homo sapiens
gaacccaagctgagggatacaggtcctgatttggtaggaatattattcccaagaaatacccgctcctcacctactccctcatcctaccaaggtgcctgaaaatgttcaagacttatgttcag

SEQ ID NO: 286418 - DNA, 122 bp, Homo sapiens
cacatgtatttttttaaaaaagctttacatgtcttgtgaaaatattagaataccagccaacgttaggcccatcctccttcatggccacagtctgcagcagctgagtcgagtgcgcttcagtt

SEQ ID NO: 286419 - DNA, 122 bp, Homo sapiens
accctccgcaacccggtgcgctgccgggcgagtcggcttataaagggagcggccgccgaccgcacggattggccaagctgactctcgcggctctcgtgagagtcactctctcgggcgggctg

SEQ ID NO: 286420 - DNA, 122 bp, Homo sapiens
ggccagggtctaggtcccagtccgagatgtagcggaggaagagcaattccacgtggcagccgttctggagagacagagaggaccacgctaaaattcactgacttttattgcggctctggtag

SEQ ID NO: 286421 - DNA, 122 bp, Homo sapiens
gttcactcattgtagtctttgtgacgctattgttggtgatagaatgataaagttgatggtcgattttgcaagatacacctgaggtacaggtgcatggagctcctgataatgtgtactgcgtt

SEQ ID NO: 286422 - DNA, 122 bp, Homo sapiens
ccgccagggctctatcaaggggctggtgtactccagcaacttccaggtagcgggcccgggcgccacaagtaggggtggggggtgaggaacccggggtggggtgggacgggcccggatggggt

SEQ ID NO: 286423 - DNA, 122 bp, Homo sapiens
cctcctcgcggagggtgggcgggcggagggaggaagcgcagccggggaacgtggcgcccgcgttcctcccgcccgggggctgcggctgggctgagtgtgtctttaaatctgagccccccgcc

SEQ ID NO: 286424 - DNA, 122 bp, Homo sapiens
tgggatgcatctggagggctgtgttttgatcctcgctctgctagcagcttgctgagtgaccgtgggaagaacgcttcccctggtgaagcctcaggttctacatctgccaaaggaaggagtaa

SEQ ID NO: 286425 - DNA, 122 bp, Homo sapiens
caaactcctgggctcaagcgatctgcctgccttggcctcccacagtgctgggattccagccgcaagcccccacgcccggccccgctggttcctgtagtacttcctcctcggggactcacagg

SEQ ID NO: 286426 - DNA, 122 bp, Homo sapiens
atgtggatgtagcaccacttttctagccctttgtagggctggaaaccagatttctttcctcggggtagcttggatacaagagggtggaattgttaatgaatgacatggaccacacagagaac

SEQ ID NO: 286427 - DNA, 122 bp, Homo sapiens
gggagaagggccagccttcctccgccggggtgggcagagccagaatggaagacgtttggtcgaccctggagcctcggggtctgcctgacatctccgggcttaaataaccgtgcgcctttgtt

SEQ ID NO: 286428 - DNA, 122 bp, Homo sapiens
ccttcatttggcagtggaggcccaggcagccgatgtgctggagcttctcctgagggcaggcgcgaaccctgctgcccgcatgtacggtggccgcaccccactcggcagtgccatgctccggc

SEQ ID NO: 286429 - DNA, 122 bp, Homo sapiens
ccaccccccgcccaaggtccgccttctggaagacttcaaccactcattagctaaggccgacgtctctctcaacagaggctttcctgattggacggcaaggaattcgctcacccggagccggg

SEQ ID NO: 286430 - DNA, 122 bp, Homo sapiens
cgcatcccgaacgcagaaccgatgctcttctcagcaacacgctgacgtcacgccaccctccgccgagtgctcccaaatcctgtgccgttcagagccctccacgcagcgtcagagcagggctt

SEQ ID NO: 286431 - DNA, 122 bp, Homo sapiens
aaaattccgacttttttggtttatattgtttttaagacagcttcagagttttcctggccccgtccaggaacactgatttcaaaagaaaacaaaaacaaaaacaccgaattaaatacagtcct

SEQ ID NO: 286432 - DNA, 122 bp, Homo sapiens
ttccccaggacctgcctgcatctggctgtcatctcccatgtcagttgctgagcccctggccgggctggcatatggaactgatttagtgccctgctggggcaggagaaggcgggcccccttga

SEQ ID NO: 286433 - DNA, 122 bp, Homo sapiens
tgcgagcaaacaggtcctttcatacacggctggggcaagtagaacctggaacattcttaccgagccagcaattccaggaatttattcttcagaggcatctactcggaactgcacaaaataat

SEQ ID NO: 286434 - DNA, 122 bp, Homo sapiens
aaaggagcccagagctcatgggagtgtccctggaaagcctattccagcgttctttactgccgtttaaataaagaatcatacatctgaaagtggcttgctggctgaatttttgtgtcccacag

SEQ ID NO: 286435 - DNA, 122 bp, Homo sapiens
caagtgggggcggctccctgggtcagctgggtgggcatcctgccaggcattcttcgggtccgctgtgcgcttggagtcagtcaccgctgtgtcctgagaggaggtcccattgttctggttcg

SEQ ID NO: 286436 - DNA, 122 bp, Homo sapiens
gtcaagaaacaaaatttcatcaaatttagtttaaagttcttggccaggcatggtggctcacgcctgtaatcccagcactttgggaggccgaggtgggcagatcacctgaggtcaggagtttg

SEQ ID NO: 286437 - DNA, 122 bp, Homo sapiens
tcttggccattgctgcacaggccgccgacgccgccgcgccgcccgctccgagggaaagagcgtagattcaaatataaacttacctaatgatacggcaagtacatgcccagaaaaaaatgaaa

SEQ ID NO: 286438 - DNA, 122 bp, Homo sapiens
gggaggtgaggagcgcctctacctggcagccccgtctgggaactgaggagcgcctctgcacggccgccaccctgtctgcgaagtggggagcacctccacacggccgccctgtctgggatgtg

SEQ ID NO: 286439 - DNA, 122 bp, Homo sapiens
ctagcgtgagccaccatgcccgggtgatttgtgagtttttgagacaaagtcttgctctgtcgcccaggctgcagtgcagtggcaggatctcggctcattgcaacctccaactcccaggttca

SEQ ID NO: 286440 - DNA, 122 bp, Homo sapiens
gacgggctcttgccatgttggccaggctggtctcggactcctggtctcaagtgatctgcccgccttgacatcccaaagtgctgtgattacagggtcttgctccattgcccaggctggagtgc

SEQ ID NO: 286441 - DNA, 122 bp, Homo sapiens
ttgcagaagtggcctgggtggctctctatcactgagttgggatttaattcctaacaatgacgactggggaagcaggtcacctgaggaaccctgagcctctggtctgctgctgatgccaaagg

SEQ ID NO: 286442 - DNA, 122 bp, Homo sapiens
gcgcagcggcgggcagggcctgtttctccggggcgggccggaggccgcgtagtgcagctgcgcacctggggcagggacctgcagaactgacccgctttggctgcagggctggtgtgtggacc

SEQ ID NO: 286443 - DNA, 122 bp, Homo sapiens
cgggcgtggccgggggtcgcggtctggggccggccaacgcgaggtgggtggctgcgggctcgggagcgcccagggaaatagggcgaatgcgccggagggtcgagcccttccagagagcgctg

SEQ ID NO: 286444 - DNA, 122 bp, Homo sapiens
ggccttctggaattgctgaaccctgcggggggcccggctgagtttgttcatttatggaaacgctccccagacgacgctcgccgggcccgtgggaggccgcgggagcttggggggacttccca

SEQ ID NO: 286445 - DNA, 122 bp, Homo sapiens
agcgcggaaccgtcctaatgggacgctgagacccagagggcgcccagggttttcccactgcggccggcctaactccgccgcagcagccgctcctggggccagggggccgggccccatagcca

SEQ ID NO: 286446 - DNA, 122 bp, Homo sapiens
gacttcccatccatccagggttctgcagccctctctgaggctggagccaatctccccttccgtcaagggatccggggagaccgccaagcccggtgctcccctgagagtctctgagaggcccc

SEQ ID NO: 286447 - DNA, 122 bp, Homo sapiens
tggtcatggaaagggtcacagccacaggagggcatggccggctcagccccaggctatagccggggtcacgctgagccagtctaatcacggtctcttcctgatgtgccagacacctgctcaga

SEQ ID NO: 286448 - DNA, 122 bp, Homo sapiens
tccctccccccagctgcaggggtcccaggaggcggggcagctccgactccgaccgccctccggattattcttaggtctgttgtgtaacaggcgcacattggaggcagagggaggaagggctc

SEQ ID NO: 286449 - DNA, 122 bp, Homo sapiens
tttaaatcaaaacagccccatgaggtaaccaaggaaagcattatttataagaaacgggtgcgcatggagttcatgtgagccataaaacctcccagagtgatcatcaccatactttatagact

SEQ ID NO: 286450 - DNA, 122 bp, Homo sapiens
ttctccgccatcctccaccccaccttgccatggggtaggagagaagaagaaaggaggattcgctgagcctaggcactgggaccctggccgtgcccttcccagacatgccctcagctcccggc

SEQ ID NO: 286451 - DNA, 122 bp, Homo sapiens
acactgttcaaattaacagatgccaaactctggtctgagagactgttgttaaggctactgcgtgggctatcactaccatcctgatcagtgttatacaatgttacctaaaatgaaaaaagaaa

SEQ ID NO: 286452 - DNA, 122 bp, Homo sapiens
cgccacctgtggggacaagggtgagcccgggaggggcgtggtccgagcagggacccgccccgcggtggccgaaccgagagagaacgccgcccgacccacctgcggcagcggcaggagcggca

SEQ ID NO: 286453 - DNA, 122 bp, Homo sapiens
acagtgctcggggctcacaagtcagaattcagccctgggcatccctgatcctgggctttgcgtggttctgctacctgggtgcctgtcagtcttccccaaaatctatgtaattgtcaaaaatt

SEQ ID NO: 286454 - DNA, 122 bp, Homo sapiens
acagccgttttgtgtaactgcgcatttttctagaccagtctttattattccagcaatcagcgctggaattactggggcgccgcctagaagcaaccgccggcggggcggcagaggatgccggc

SEQ ID NO: 286455 - DNA, 122 bp, Homo sapiens
gcaggaatgccaaccccaggtctgtgcttgagctcctgtacctctgtctctgtggcagcacgaacaggtgagttgactggcccaaggacagagagatgattagacacaacctgaggctcaaa

SEQ ID NO: 286456 - DNA, 122 bp, Homo sapiens
ggcctcgggggtcccggggcccgagcccgcggcaccctgggagtggtagtccacgcgggccgccggcctagccaagaacaatgggaggagcctggggctaggaccacacctcccggagaccc

SEQ ID NO: 286457 - DNA, 122 bp, Homo sapiens
atagcatctggtgcctgtcggtcagcgagttgtccgagcgtccacgagagagtgacaggccggggccagccaggaaatgccacccctcctccacccgccccaaacggaggccccagtcgggc

SEQ ID NO: 286458 - DNA, 122 bp, Homo sapiens
ttctgattgcagaaccaagtttatcatgcctcacctcaaagacaccagcattgctgtatgcggtggtgtgcacctatagaaccagccactcaggaagctgagggggaaggatagcttgagcc

SEQ ID NO: 286459 - DNA, 122 bp, Homo sapiens
caacagccgccagggcttcctgttgaaatatatagcaacaaaggaagaaaagaagcaaaacggaaatagtgcttaacagcaccttagaatgatgctgctcaggaccagtccaacactgaatg

SEQ ID NO: 286460 - DNA, 122 bp, Homo sapiens
gcggcagaagggcggcagcggcggcggccgcgatggatctaggctagggcagtcgccacccgcccaagctgcgagccccatactcgactcctgctcgcctgcctgccagcctgcccgtggcc

SEQ ID NO: 286461 - DNA, 122 bp, Homo sapiens
acactgaaggatgtgtcaacattttattgtgtgatgattctaaagtgtttattatgaaggcgctccggtttgcattgggttcaatttggcgccagctagatacacatttgttcttagatttt

SEQ ID NO: 286462 - DNA, 122 bp, Homo sapiens
tctagaggactggtgggggtctggaaccagctgcccaaggaaaacgattctcccaatgtccgggggacgcagtagcaactgttgcttctgactagctcaggctctggagacccgcgcgctct

SEQ ID NO: 286463 - DNA, 122 bp, Homo sapiens
gtggagtctggatgctatgaatggcagcaggaggcagataggttcctaagcagaaaagggcggatccctggtgaggcccaccttcaggccagggagagcctgaaggctgggggctgaactgc

SEQ ID NO: 286464 - DNA, 122 bp, Homo sapiens
cgtggccgaaaacaaagaagtccatggaacgtggccagagatctgtacagaggctgtgggcgctcctaggaaagtctggccaagtgcctgagagttggaagtgcttcaccaataaacatttg

SEQ ID NO: 286465 - DNA, 122 bp, Homo sapiens
tcactcccagaaatcatcatatttagtaaagcctaagtgctacaggaagtcacaaagaagcgggtggagtggtccgtcttcccttggggagcttacaacataaaataggcaaaaaacaaaca

SEQ ID NO: 286466 - DNA, 122 bp, Homo sapiens
gatggggaatggaggctggagtggccgcaggccggagctgcggcaggaggacgtatggagcgagcaggatggagtgccaacctcgcctggctatcgggaggaatcacggcatgggggtgctg

SEQ ID NO: 286467 - DNA, 122 bp, Homo sapiens
acagaacgatcacagcgtacagaccgaggcacagagcctggccccattcggccatcccatcgacctggtcccccagtccagtttggcactagtgacaaggtctgtgtgggctggatctgggt

SEQ ID NO: 286468 - DNA, 122 bp, Homo sapiens
gattagtacacagatatcaaaagtggaagtagaccctgagtccttagctaaggactagaacgatcgtggcagaaacgtgcacaggaaatcatgtggcctctgtctcaccagcgggtgttcca

SEQ ID NO: 286469 - DNA, 122 bp, Homo sapiens
agatcgacccatcaaaaagatcccctccttcccttttccctgccatcttttctccactgacgcctgctaacagctcccgtcgcaccaggtatctgtttagggaatctcattctgccaaacca

SEQ ID NO: 286470 - DNA, 122 bp, Homo sapiens
tccctagctgagccacatcaacccacagaaccatgggtgataattataaattgttttaagcgactccgttttggggtggtttgatgtgttagtagcagtaaatccatacttgtcagtagcaa

SEQ ID NO: 286471 - DNA, 122 bp, Homo sapiens
agagattccaagaagcggtgagtgatttcacggcagcagagggttgggacatattacgggcgcggatccctcttggagtgagatgactctccggagagatttagtcgtcaccctcgcgtgtg

SEQ ID NO: 286472 - DNA, 122 bp, Homo sapiens
tgaagataaaatgagttcgtatttgtaacatacttagaatagtgcccggaggtagtaagccggatgtgaagtgctggtgagacaaaatagagctggttgactgcagacctaaaaccgtctcg

SEQ ID NO: 286473 - DNA, 122 bp, Homo sapiens
ccgcagacccctcggtcttgctatgtcgagctcacccgtgaagcgtcagaggatggagtccgcgctggaccagctcaagcagttcaccaccgtggtggccgacacgggcgacttccacggtg

SEQ ID NO: 286474 - DNA, 122 bp, Homo sapiens
taaggtaatacatggttgatatcttgctttttttccacatatttaaaaaattacaacaaacgtggctgctggtcatgttgcttataatgcagaacagagaatataggaagtttgaggttggt

SEQ ID NO: 286475 - DNA, 122 bp, Homo sapiens
tctggctggcaaaagcttgttctccagtctgagccaaacgcttgcatgactcttcccccacggaggcacttggacaggaagctggcttctctgcacagccaggggcactaagtgatcccatc

SEQ ID NO: 286476 - DNA, 122 bp, Homo sapiens
ggataggggccggtgtccgtgccctggggctccccagctgatgagtgggcgcctgagggacgagcgcagggttacctgcctgggctctcacctggtggccggctcagaggtggcgcgccgga

SEQ ID NO: 286477 - DNA, 122 bp, Homo sapiens
acagacgctcgggggcagaccaagacgccctggggtccccgaaacagagatgtacagagtcggacacggaaagggagagaccagctcacggttaagaaaggagggagaccagcccaggatca

SEQ ID NO: 286478 - DNA, 122 bp, Homo sapiens
acaagggacatgaaaagggcaaggaaataagaaaatgagctgagttttgaaggcaatgatcggatgaagtgagagaagaatattccagcagagggagacaaggagactgcagagatttcaag

SEQ ID NO: 286479 - DNA, 122 bp, Homo sapiens
gccaggagaggaaaggtgaagggagggagcgaggccgccggcctagcccgatcggagcctcgaggcgcaatagagcagctgctccccggtaacacgccccgtcctttccggggagcctggtg

SEQ ID NO: 286480 - DNA, 122 bp, Homo sapiens
ggaccacgccttctgctccaccacaacgcaatcggaggaaatctgttcaccgagtgttggcggaactggatgatgagagtgagcctcctgagaacccgccaccggtccttatggagcccagg

SEQ ID NO: 286481 - DNA, 122 bp, Homo sapiens
acactaactcctaattgctgccctgtgtgcagggaaatatcacagcaaatgtacttcaaacgcattatttttgctgagaaacaagttattcctacaagagaatcagtcccctgccagttatc

SEQ ID NO: 286482 - DNA, 122 bp, Homo sapiens
agaaataaagttaaataggtctactgcacagcatggtgactatagttcacagcaatgtaccgtatacttggaaattgctaagggagtcgatttcaagtgttgtccaaaaatgataagacagt

SEQ ID NO: 286483 - DNA, 122 bp, Homo sapiens
ggtggggatggagagacgctggttggagactggatctcacctggacagcaggtgtgtgtgcgcgccggggtgtccggcctcgtccttccttcctccctaagtccccgaggcagggtcctccc

SEQ ID NO: 286484 - DNA, 122 bp, Homo sapiens
agaggacagcgccccctcaaggatgattggggtggcaatgcccggcctgggggtcctgcccgggctggtccaggcccctggggacgctgagtgcagccgtttgttgcagatcttggagctgg

SEQ ID NO: 286485 - DNA, 122 bp, Homo sapiens
ggatcgccctatgccttcttgccattctcttaaatgcactgacacccctggaggtgggaccggtcctggcacttttgaagacgtgggaatatgaacgagagacaagattaaccagaattccc

SEQ ID NO: 286486 - DNA, 122 bp, Homo sapiens
aattttgtggatcatctagttcaaattgagggcacatctaaccttaaacagaaaattccccggaaattgaaactataactgaccaggatcacatcagctcttaagatctatgatctcaggct

SEQ ID NO: 286487 - DNA, 122 bp, Homo sapiens
tgcagatgaaatgtagcactaacatgcatggaaaacattggctgttaggattatgtgactcggtccatgtccttcttaaagtgaccagaacaggacatgcactcctggggctaagttccagg

SEQ ID NO: 286488 - DNA, 122 bp, Homo sapiens
caggtgccttgattggaggggaggccttgtcaacctaatttcaggaacaggtgaacatcacgcactttgcagctgtgtttttctcccgactggcagctacacacctttcctctgcaaccatc

SEQ ID NO: 286489 - DNA, 122 bp, Homo sapiens
ctatatcagatacgccatgatttgggctgaacaggaaggcctccgctggccgattttgcacggtgcaggatgaaggaggaggtgcagatgagcatcattgcccgccactggattcctagcac

SEQ ID NO: 286490 - DNA, 122 bp, Homo sapiens
ggcgacgtagacagggacagacagctgggtctgaaacctaagcgagcctgcggtttcttccgggaacgccgagttagcaaaatggccgcttgtctccattttaaatttaagcacaacgaatt

SEQ ID NO: 286491 - DNA, 122 bp, Homo sapiens
cgatggtgccacttggtgtctcctctggcatctgggcaggagacttctccccagaggccccgggctggtctgcccgtgtcacaggaggactcgcctctggtccctcagtggcctctgcaaac

SEQ ID NO: 286492 - DNA, 122 bp, Homo sapiens
cacgttccacttttgattcataggagagagtatcagccaagcctccgaactgcacacaaacgtcttagaagtgcgccttctttttgtgttatagtggtctcccagccacagccaacgctcca

SEQ ID NO: 286493 - DNA, 122 bp, Homo sapiens
gggagctgacccacaggtacacatccacagccttgaggtaggacacctggggcatggaggcgctcacagcagtgatgattgtggacatggtcagcactgtggtgattcctgccatttgagaa

SEQ ID NO: 286494 - DNA, 122 bp, Homo sapiens
acgaacaatgattctggttcctactgactgacaggagaggtttaagggtctctcactctccggggagcccctttccttcctggctgcggagggcggagcccgagagaggcacgcatgcgcaa

SEQ ID NO: 286495 - DNA, 122 bp, Homo sapiens
ggagaacaagcccaagaatcactacaagaacatccttccctgtgagggcggaggccagggcgtcacccgtcgggcctgggggaggtggggggcaggccgagcatctgccaccgctgacctga

SEQ ID NO: 286496 - DNA, 122 bp, Homo sapiens
gtgggggaaagggcgcgggggttcacagctttgcctcggaggggcagtttttatagtgggcgcaattggtgggtaacagggtccagatgggaacaagcgtgtaggcgatccgaaactcgggg

SEQ ID NO: 286497 - DNA, 122 bp, Homo sapiens
cgccattgtcttttctcacttctatgctgtagccacaccagctgtttctattcctgaaaccgggtctctgtaattgctgttccctttgactggagtgcttttcccccatggtcttctcatgg

SEQ ID NO: 286498 - DNA, 122 bp, Homo sapiens
atgtgctggctttcctggggggaggccccacaggggttttggagtacccctgagaacattcgaacagacccattctaggaaggcacgactcgggctgggagcctgcatagctggcagggcct

SEQ ID NO: 286499 - DNA, 122 bp, Homo sapiens
cacgccgcccagcatggtccgggaaaccaggcatctctgggtgggcaacttacccgagaacgtgcgggaagagaagatcatcgagcatttcaaacggtgagtgacacgaggcccgcggccgc

SEQ ID NO: 286500 - DNA, 122 bp, Homo sapiens
atcttagcatttccatcctatcacaatgatgctcactccctgaaagacctcctgtgcccacgaggccccggtgcattttgaagtttttgttgtgataatcaatggtctgtttttgaggctgg

SEQ ID NO: 286501 - DNA, 122 bp, Homo sapiens
cacccttcagacaggtccccaaaccctgcggcctgcgcggaattcctgcattgtcattgccggcccacccactgttcaggctgagagcggtcccccgcccaaaccggcgcttcgccggcgcc

SEQ ID NO: 286502 - DNA, 122 bp, Homo sapiens
gcccacgattccttgttttttgggcagaggtcaaggctcaacggagagggagcccgggaccgagttgtggtgggagtttgctcctaacacccgcgaaatcctacctcaattcctcagatggc

SEQ ID NO: 286503 - DNA, 122 bp, Homo sapiens
ctccaggaagaagcatttcatgactcatatttttaacatgactaatgttacctagaaccacgtatcctccttctgttgaaaagtaagttcctgtttccatggggccttcaaagcaaggggtc

SEQ ID NO: 286504 - DNA, 122 bp, Homo sapiens
tcagggggcaggtcgtgcatggcctggatcagcagataataggcctctcgcaactgggtccgcagcctgcctgtctccaggcggccgccctccgcccccagggaggagcccgccgctggggg

SEQ ID NO: 286505 - DNA, 122 bp, Homo sapiens
ttccctttcttgctctgtgtcatgaagggttatgaaaaacttactggggacaggagacaccggattccatcaagaggccccatatatgtggaagttgctgttgcaggctggtattgggatta

SEQ ID NO: 286506 - DNA, 122 bp, Homo sapiens
tggcagggaaggcaacgaccagtgttaacaatggcagtaggaggggaatgggtagagccacggaggatgaagcagaagggaatatggcccgggaaccctacagtgaagctagtggatctagg

SEQ ID NO: 286507 - DNA, 122 bp, Homo sapiens
agccggcgaggccagagccagtccggggtggctttgccaaccggcggagttggccagcggcgggccctcctaccgtcggtccttccccgctcctcctcctctgccccctccgcccccgcctc

SEQ ID NO: 286508 - DNA, 122 bp, Homo sapiens
gccgggtggagtcctgcatcctgcggagcgcgggcggggcaggcaaagcgcccggctgctcgacctacttcgaaagttcatcagccgcccacgccccctggactaaccaagtctgaaggctc

SEQ ID NO: 286509 - DNA, 122 bp, Homo sapiens
gaatttggtcgcctcaggtaggcgctgcatgcgccccctctccacaggcccctcaactcacgcattgccagaggcatttgagtttgccacccacctggcctgcaggtcaggcctggggaggc

SEQ ID NO: 286510 - DNA, 122 bp, Homo sapiens
gtgcagggcagagagcatgagtgagataaaactgcaatttaggcctggtgcggtggctcacgcccataatctcagtactttgagaggctgaggcaggacaatcacttgagtccaggagtttg

SEQ ID NO: 286511 - DNA, 122 bp, Homo sapiens
ggtttcctccctcgcgatccttcctcgtgatcgcgcacccagctcacctcaccagcaaagcgcggtttcctccctggcaatacttcctcgggatcgtgcacccgtttcacctcaccaacaaa

SEQ ID NO: 286512 - DNA, 122 bp, Homo sapiens
tcacaccttccttcttgtaaaattcataataaaatctttacagggtcctacaagaccctgcgtgacttgtcctgcctctgcctctgcctctccaactctcacaacatcttaccccctatttt

SEQ ID NO: 286513 - DNA, 122 bp, Homo sapiens
tgggcgcacgcttcttctgcctgatcgttgggcgcacgctccttctgcctgatcgttgggcgcacgctccttctgcctgatcgttgggagcacgctccttctgcctgattgttggaagcacg

SEQ ID NO: 286514 - DNA, 122 bp, Homo sapiens
ggggctggaactcggtgtccgacctggtgatgggtcaggtgtgatcaggtgtgtggggctcggtctgcatgtgcagggctgtttgaaggcctgtggggccatctgatgccccccttttcttc

SEQ ID NO: 286515 - DNA, 122 bp, Homo sapiens
tgaatgaataattgaagatagtcatcactatttcttctaacaatggcagttacacataaacggatgtgaatgagctgttcttcggcttgtttgaccttacacaatgttccttaaatagcaga

SEQ ID NO: 286516 - DNA, 122 bp, Homo sapiens
ccaggcctccacgcgacggtgaagcaggaaccaggggctgccagcagagcagcccaggtgcgtcgccttagggacagagctgccaagtgccgagctggggctgccagagccgagccgggaac

SEQ ID NO: 286517 - DNA, 122 bp, Homo sapiens
ctacaagtatcctaaggggcatcattggctgaaacacttctaaatacaaaatgcttttgccgggtaagtccttaaactggctatcactaatgtgtctgatggtacagcaggctcctgttcac

SEQ ID NO: 286518 - DNA, 122 bp, Homo sapiens
tcccggaaactggcgcggtgccctctgggacttgttctgggacttgtagtcttgtactggcgctggcccgcctttcttccttagtggggaaaaccgggtgtaagccccggaagtacttgttg

SEQ ID NO: 286519 - DNA, 122 bp, Homo sapiens
ggtcctcatcccagtactggtccttctcagcggggggaaggttctggtacatttcgtccacggatagcagggacacctgggccaccagcaagttacaaggatcctcctctcctctccttccc

SEQ ID NO: 286520 - DNA, 122 bp, Homo sapiens
tgttgagtggcagccgcagggtcttgacgctgtctctttctctctcttgtccagttttcccgagcacccctgagcagcctggcctgccatgtccgggagaagacagtgagtactggggtttc

SEQ ID NO: 286521 - DNA, 122 bp, Homo sapiens
gccgcgctcgcgggtatataggcggccgccgcgccccgccccccgattcctggaactgcgcggccggccttcttgtaatgtttagtcactactcgcagcagagaaaggctgagcgcggaggg

SEQ ID NO: 286522 - DNA, 122 bp, Homo sapiens
ccagtttacatttaggaacagtaatggctcccactgactcagtcaaaacaaggctgcggccgggcacggtggctcacgcccgtaatcccagcactttgggaagccgagacggagggatcacg

SEQ ID NO: 286523 - DNA, 122 bp, Homo sapiens
gcgggcttagaggggctcagagccttgggcacagatatcgcggcgcctggggaggaccctcggagcggtgggagttgcggtgtggaatacggggggggtgggtggcacatcgcgcggcgcgt

SEQ ID NO: 286524 - DNA, 122 bp, Homo sapiens
gttaaggggggcagtccggagcgggtccggtaggggccgcctactgggcgggggcggggccgcgccgagcgagcgctgggattggccgtcgggcaggcgctacgctaggacggtaccaacag

SEQ ID NO: 286525 - DNA, 122 bp, Homo sapiens
aatgtgttttctctgcctgttgaaaatgattccgagcgaagggctgtgcttcctggctggcgcgagcctgactctgctgtgtcagaagatgatctttcacagatgctgaaaagttaggaagt

SEQ ID NO: 286526 - DNA, 122 bp, Homo sapiens
gttttattccactttccgcccttttcccttaatgaacacagggctaatctcgggccttgtcgaaggaagaggctgcagacgttaatgaggttagctgctggattccagtattcgtcgcataa

SEQ ID NO: 286527 - DNA, 122 bp, Homo sapiens
ttccatgttgactaggctggtctcgaactcctgacctcgtgatccaccagcctcggcccccgaaagtgccaagattgcagaagtgagccactgcgccccttaagaagcatttgtgttccagt

SEQ ID NO: 286528 - DNA, 122 bp, Homo sapiens
gacctctcccagtttgctggtctcatcccatgttgtggggagtgactggtgactaggaatcgatgtcaaaagcacatttgagcaacaaaagagatttgaaggatgtggctctcaggctaagt

SEQ ID NO: 286529 - DNA, 122 bp, Homo sapiens
acctccccggaccctgtccacccctctagggttctcgcgcgggaagagccgttccaatcgcgacaggagaggccactacgcgaccgggtcgcaatgacaggcacccctcctgttgtcagcct

SEQ ID NO: 286530 - DNA, 122 bp, Homo sapiens
atggaggcactcaggaaccagtcgggtctttggtccctcgagcgagatgcgagctgtgtgcgtcgacgtcagcgtgctgacgtcacgggccggaggtcccggggctgctgggtgcgggcggt

SEQ ID NO: 286531 - DNA, 122 bp, Homo sapiens
gcggactgagcccgcggagcacgttcactgacggaccagggaggggtccgcgccgagacccgcctccgaaccaggccccacctcctgagccaggcccccgcccccgattctgactccgccct

SEQ ID NO: 286532 - DNA, 122 bp, Homo sapiens
tggagggggaagcagccagcctccagctgttctgactatcccagatgcagcatcaacaggcgagtgaggccattttggaacatctagccctgtcctggtctcagatgatgccagccacagga

SEQ ID NO: 286533 - DNA, 122 bp, Homo sapiens
tccacggtttctcatctggggaacccagtagagcaattaagccctgccctgctggtgggacgcagagctgcctgacaactgtcttgtccaacctctgactggctacctctctacccaacagt

SEQ ID NO: 286534 - DNA, 122 bp, Homo sapiens
tccgcccggggaggtcccgttatctgggcggctcggatggcgggcgggggaggggaggcgcggcgatctgggctcggaaaagagacagggccctgacctcctcaaatccccctcctcttcca

SEQ ID NO: 286535 - DNA, 122 bp, Homo sapiens
tttaaaaatgtcttcttggagagacttccgtagggtcggccagcgcggagtcttcagttgcgcctggccaagttttttgcaaacgtcaaatggcccaggagcagtcctgtccccagccccca

SEQ ID NO: 286536 - DNA, 122 bp, Homo sapiens
atcttctgaatctctttccttgattcatgcagccagatgggtgccactgctggcttcactcgggcattattatcattgatgttattaacatcactaaaagttagagtactaattatgtttta

SEQ ID NO: 286537 - DNA, 122 bp, Homo sapiens
cactggacgccttggctcaggtgcctgcatctccacaggcaggacctcatggtggtgggtcgggttctagaggaaggttctgcatgtcctggggccttgatgtaggcagctgggagtctcac

SEQ ID NO: 286538 - DNA, 122 bp, Homo sapiens
cggggctagccctagagtacggagcaggcggacttttcggttccccgccccgccaggtggcggggcctactaggcctccgggcatccccggtctcaagtaggcctcatctgccggcaagggc

SEQ ID NO: 286539 - DNA, 122 bp, Homo sapiens
ctgcgccgcagccgccgccgccgcaacctccagcaccgccgccccagtccccgcagccgccgcgtcaccgccgttttttaaagggtccgcagcctgactctgctgagtaaggaggggtgggg

SEQ ID NO: 286540 - DNA, 122 bp, Homo sapiens
ttaagagtcaaacgtcagcgtccctaagaagaccctgtaggacccagccagaaggcacgacggggccaccctgccaaccccacccgtcagcaaacctgggctctcctctcgtcctaacaccc

SEQ ID NO: 286541 - DNA, 122 bp, Homo sapiens
acaggaagctctcacagggctagggtttaagctggcttccacagagggcagtcacgtgcacgtgggcctgaggccagccccaggtcaggtcccgatccccggtcctcaggtgcttccactca

SEQ ID NO: 286542 - DNA, 122 bp, Homo sapiens
cctcccggggacctccaagccccggagggtctgcactggaggccctggaagcagcagttgcggaggttcccagaccttccacggcccctcccgtgttccaagccgtcgcatcccggcctcag

SEQ ID NO: 286543 - DNA, 122 bp, Homo sapiens
aggggttttcgtcccctccccatccggagcagcctctttgctaggctagacccagacgaccgctccccatgcaaggacaacggcctcccaggcgctcattgtccacccgcaggagggtgccc

SEQ ID NO: 286544 - DNA, 122 bp, Homo sapiens
ggctcctgcgtctcaaccaatgggctggggccgttctggccctagggtcgccttagcaaccggcctcctggggcttccctttttagtccgcccgaaggaggtggttcctttctttctttttt

SEQ ID NO: 286545 - DNA, 122 bp, Homo sapiens
ctggctcttatagagtcacgagactatatctgggaaactacacttcccagaagcagcctgcggtgactgcctctgttaaatgacgtacttcctgaaagccggctccggataggttgcttaga

SEQ ID NO: 286546 - DNA, 122 bp, Homo sapiens
cgctcagcggctgaaactgcagcgtttcggcctcacagatggggctggagttggagacgtcgctgcggccaggactgggaggccacttgcttggcgggtgaggcggctcacgcggtatttat

SEQ ID NO: 286547 - DNA, 122 bp, Homo sapiens
gtccagcatagccgggtccaataaccctccatcccgcgtccgcgcttacccaatacaagccgggctacgtccgagggtaacaacatgatcaaaaccacagcaggaaccacaataaggaacaa

SEQ ID NO: 286548 - DNA, 122 bp, Homo sapiens
cagaagagagcgccaaggactggcagttccggaacgggcaatcccagccgaggggaccagcggcagagcacgggtggggcttgggagagggcggggcccatagaggggcggggtttggtgag

SEQ ID NO: 286549 - DNA, 122 bp, Homo sapiens
tctggggccagatatgttcacactctatcctgccttgcccttccctgagctcaggatggacgctcaattggtcccagttattgtctgcagcgcctgcctgcagcctcgatccagcccagctc

SEQ ID NO: 286550 - DNA, 122 bp, Homo sapiens
tccgctatttaatagagatgcacagcaccaaggtcctggtgtgcaaacaggcttgcagaacgctggctgtgcagcacgcctcatacatcgctcctgggaagggaggaacgcaccagagtggg

SEQ ID NO: 286551 - DNA, 122 bp, Homo sapiens
cggcacgcggacccgcggtggtcggggcggccgggaggagcgcggacagggcggccgctgcgggccgtggctccagacctggggcgtctcttcgaagctccagtaggtcagggagtccttgc

SEQ ID NO: 286552 - DNA, 122 bp, Homo sapiens
tctaccactggatcattcattaacacatctgttaagatgtgtgttgagtgactcaggcaccgggctctgtcatgggcccaggggagagaagagggaacagtacagccatggctgcggctcgc

SEQ ID NO: 286553 - DNA, 122 bp, Homo sapiens
tggcactatgaaaaggatgcggcattaacagtgggcgctgcggcaggttgcaaaatccagcggttccgtcacaggtacagactgcatggctaccacaccggctgcggaggctttgcacttga

SEQ ID NO: 286554 - DNA, 122 bp, Homo sapiens
cacctgaatacattctgagggtggacgttttacacggcttggcagctatgccgtctgtcacggacttgaaggaccacttgacaacagaattacgacagtaccgcgatgtggtggacttgacc

SEQ ID NO: 286555 - DNA, 122 bp, Homo sapiens
tgacagtgcagtctgggcctggaataattttaattaatgggaaaatggtcctcaatacaccgattagacctcttcaggtacaacaagataaaagcctgataatttggatggagtactcttct

SEQ ID NO: 286556 - DNA, 122 bp, Homo sapiens
ttagcgtgcattaaaaacgtggtgtattttttggtgttcctgcagcgattgagccgttgccgaacgtggtggagctgtggcaggcagaagaaggggaactcctgctgcccactcaggtgagg

SEQ ID NO: 286557 - DNA, 122 bp, Homo sapiens
ggggctcccttcccccagctgcagcagccagacccaggcccggccactgacgccctccaccggagagtttttgggtggagattttcccaagttactccgctgcttcctttcggagctaacga

SEQ ID NO: 286558 - DNA, 122 bp, Homo sapiens
ccagtgtcatcgtagctgaatggtttttgcgtctttttggttcatgactgtggaactctacgtctttggttttgtgccatcttttagtttgcctgtgaatgtctatgaaagaaatttaggga

SEQ ID NO: 286559 - DNA, 122 bp, Homo sapiens
aggctgctggctgcctgccaaggggccttccatggagcaggaccttgtggaatctaccagcgtccaaggtctggttgaatcaatttcattggttcatttggacacaactggccccagccggg

SEQ ID NO: 286560 - DNA, 122 bp, Homo sapiens
cctggggacagcaacctgcctggtgtgttcctcattagcagcgccaaggaagccttcggccgttcacttggtcaatgaacgcagggcacaggcaatcactctggggaatgcggcttccaaaa

SEQ ID NO: 286561 - DNA, 122 bp, Homo sapiens
agatttatgacagttgtttctcaaactacctacctaccgaagccccagtgtgaggaccaccgggattgctgtctgaggtcttggggctcaaacaaacaaaactggagtcagggagtgtactc

SEQ ID NO: 286562 - DNA, 122 bp, Homo sapiens
atatggccacacatcgatgaagaagataactgtccatactttaagcagaatgttgaaccacgaacgtttgcaaataaatagctggtagtgaacaaaattaactacagtatcataagacatca

SEQ ID NO: 286563 - DNA, 122 bp, Homo sapiens
ctcccagccccgctgcggcaacctaggggggtgtccgggcggggcctgtcagcagcgacccgcccccgggcacacgcgcgtcaggggcagcaccgccaagctgcctgtgcagccccatccag

SEQ ID NO: 286564 - DNA, 122 bp, Homo sapiens
cgaaccgagtctggaaaacttggttttctccctctttagcagctccgagatagttgtatccgagtttgccagacagaccccttctaagcctggtagagtcaatcaaaataatcttaacaata

SEQ ID NO: 286565 - DNA, 122 bp, Homo sapiens
ggcctgcatgacggtcacacagacaggcctcctgatggtcacacagacaggcctgcagagcgctccagttacacagatagatttccacagcacggccgtcacatggaacgaatagttaaacc

SEQ ID NO: 286566 - DNA, 122 bp, Homo sapiens
cctctgtcgccaggctgactgcgcccggccagagtgcggtgctcctgctgagcagttttgcgcccactcccctctcatcccctcccgcccttgctaactcacagcattgcaacagtcatgag

SEQ ID NO: 286567 - DNA, 122 bp, Homo sapiens
atttagtacagtctcttgtactggaaagtcacagagagtggaaggaaagaagtcttttaccgcactgtgggtaaaaagtgagtgccagactccaaccccagcccagtccagctgggcaaacc

SEQ ID NO: 286568 - DNA, 122 bp, Homo sapiens
atatttaataatactaaataaaagttgggtagaagaattatcgtcgatggctctttggtgcgcattctgggcctccgagggtcttgatgaagctcatgtagtgtcatgtgctctctcgggag

SEQ ID NO: 286569 - DNA, 122 bp, Homo sapiens
agggtgttgggttggggtcccctctgccacactgctttaacatcctcagctcctgattgacgcccaaccctggatttaaccctcaccatcactaccctttttccctgggttaaattttggtc

SEQ ID NO: 286570 - DNA, 122 bp, Homo sapiens
ctggagaagaccctgggccagcgccaagagaaactgggaatggttcctgtcctggggattcgggggcaggggctgctcccactgcgttaaactcttgggattgccagagagaatggcctggg

SEQ ID NO: 286571 - DNA, 122 bp, Homo sapiens
acccgtgccccatcatgctctgcgtgctcgttaggtgccccatcatttcccgctcgctctcgttacgtacccagcctccggcccctgtaagtgccccatcgtgctctctgtcgctccagtta

SEQ ID NO: 286572 - DNA, 122 bp, Homo sapiens
cctttggaattttgctttccatgcctattcaggtgtgaatcatttgccctctgatctctccgtgttatggatcaattccaccagtctttttcttctgcctgagagactttcacctcttttta

SEQ ID NO: 286573 - DNA, 122 bp, Homo sapiens
gacggggagagctgaggacggagctccgggctggagctcagcacagcgagcgcgggcgggcgcgcgccggggacagcctggccggctgggggcgcggggcggccctgcctcctgcgccttct

SEQ ID NO: 286574 - DNA, 122 bp, Homo sapiens
gtctccaccagggggcaggccaggaccggcttacagcactttctaggggttctctggtcccgggctgggacacatacagggcttagtaaagttcatagatggtagctaggcagccccaggcc

SEQ ID NO: 286575 - DNA, 122 bp, Homo sapiens
gcacctgggcccagtgcagaggagcttcgctctcctccgtccggattggtccagccgcgtcgccgaagttgtcaggccacgcccctccccgaaggaccccgctgtgattggctgtggctgag

SEQ ID NO: 286576 - DNA, 122 bp, Homo sapiens
ctgtacccggccaagaattgtttcttctccttacctaggtagagacttctgtagaaatgccgggagatttttggagaggggagatttttcttttttttcttttcttttcttttctttttttt

SEQ ID NO: 286577 - DNA, 122 bp, Homo sapiens
tggatctgcagcagccggggtccccatacctggctggctttggcattgatgttgccaagccggaagagctgaaggacagtctcgatgtcgtcctgggtcttcagggtggccagggcggtgag

SEQ ID NO: 286578 - DNA, 122 bp, Homo sapiens
acgttcactagggatcgcgggtgtgcgcctcggtcacgttcactagggatcgcgggtgtgcgcctcggtcactttatttgactggatcgaacgtggggcttggcttagtctgggggctggtg

SEQ ID NO: 286579 - DNA, 122 bp, Homo sapiens
ggaattcttcacactggtagcactggatttgcagcgcaaagcctgcgagacagacgcagtcgggttcagatccggcccccacagagcccaccccggaaatcacgaccatcccacgcctcaga

SEQ ID NO: 286580 - DNA, 122 bp, Homo sapiens
atccaagagcctgaacgtcctttcggcgaggatctccgtgtgggccccgcaggtccagggcgagactagctgaaacaggtgtgcaaactgccgggcatctatgcggtactgctcagcatagg

SEQ ID NO: 286581 - DNA, 122 bp, Homo sapiens
gattaaattacttcacattaatgggtaaatgaggcttaatccacaaaggtcaattccacacgtcattaaactctactatgtataaggcactaagtttaatcaattaatatacctatccttct

SEQ ID NO: 286582 - DNA, 122 bp, Homo sapiens
atctccaaatgcagtctggatggcactcaggtattcgagcgccccagtttatcttatcaccgccccctacaaatacacatccattccagattggcttctgggaaaagatacgggggtagggg

SEQ ID NO: 286583 - DNA, 122 bp, Homo sapiens
gccaggagggagcggccagccgccaccagggcgaaggttttgagggcctggttggttgtgcggcgcgctcggtccccggccctcgaccccacgcacacgcgcgcccagcccgcctttctcat

SEQ ID NO: 286584 - DNA, 122 bp, Homo sapiens
cctcccctccgccgccgcctcccctccgccgccgcctcccctccgcctgccagcccggaacgccgcctccaagcctcctgtgccagccccgtcctgcgcccctgtacctgggctctgtgacg

SEQ ID NO: 286585 - DNA, 122 bp, Homo sapiens
agacttttcacaatgtctggagacattttttagttacagcacctctggggccactactgacgtctggtagatagatgaccagtgtattgctgaacatgttaaattcacaggatggaccccca

SEQ ID NO: 286586 - DNA, 122 bp, Homo sapiens
aactaaagcaaaaccacgctggatggggtcccaaacaccctaagaaggccgagctcctgccgctctccagcacgcgcaccgaagaccggagggagggtctgtcgctctcctgcaggagcacg

SEQ ID NO: 286587 - DNA, 122 bp, Homo sapiens
agagcaacccccggggcagctcagtgaccttgttgtggtccaggtagaggtaggtcagctcggtcaggtcgtcgaaggcacctgcgcgcagcacgcggatgtcgttatgggacaggtacaag

SEQ ID NO: 286588 - DNA, 122 bp, Homo sapiens
aactttcctgcgaggtcagtcaaggctttgggggctctgttttgaatgtggatcaccactcggagtttactaatgtttacaaggctgcgcagtagggaaacggaagagttgggtgggggcaa

SEQ ID NO: 286589 - DNA, 122 bp, Homo sapiens
gctttgccgtggcggcgctaaacgcacccccaaagctgccccataggaacttgggagggtcgcagggttcggaaagtgccaaatccagcaccggttcgcccaggcagtctgtgtctctggaa

SEQ ID NO: 286590 - DNA, 122 bp, Homo sapiens
aggagccggctggaattagcctgcctaatgcgcctgtcagtccgggcgctgcgctgcgttcggcccgagctgtttgtaaattacattagctgctcctttattgcacccgaacctcgggcgac

SEQ ID NO: 286591 - DNA, 122 bp, Homo sapiens
tggaattgcactgcctgttctgtgagcgttctgatctccctggctgtaccacatgtacgccgcatacagacacactctacctctctctccctcccttcctcccgcccttcctccctcccatc

SEQ ID NO: 286592 - DNA, 122 bp, Homo sapiens
ggtctccccagattccggtgcagggcggctggagtcgcacaggtagcctcgggcggatttcggcgtgtctcgcgctccgcaggctgggacctgggctccgccccgaggcggggacagagggt

SEQ ID NO: 286593 - DNA, 122 bp, Homo sapiens
tgtgcatggggctaagtctggaatttactcattaaaacttatgaaaccactgcgaggtcacggtgaggctcccgtgggagcgggccacagcagccccgggctggaagtcaaacaaggaagtg

SEQ ID NO: 286594 - DNA, 122 bp, Homo sapiens
atcatgttcatgcttaaaactttccagcggctgtgtcctgcctaccaggaggtccctaatcggagctctgcagccatcccgggctctgtcccaactcacaccctgaggaaagccagggctgt

SEQ ID NO: 286595 - DNA, 122 bp, Homo sapiens
actgggaatgagatgagatgatgtttggatttggggtcctacttgcccaagatgcagcatcgtggcctcatgcttccaaagatgctctaggagaattgaagaagagtggtaaaaggctggaa

SEQ ID NO: 286596 - DNA, 122 bp, Homo sapiens
agctactcacctgcataataagagattgggttgggggctgccagagatttgcgccctatgcggatggcacatctggtcctcaccggtttttcacggtctatttagatcagatacagcctccc

SEQ ID NO: 286597 - DNA, 122 bp, Homo sapiens
ggaccctatggcctccacaactcctttgctccaaagttattttagggctgtgaggacaaccgggccaaagaccaggttcctgggacactgctccacgtcccttataccaggagagtgtggac

SEQ ID NO: 286598 - DNA, 122 bp, Homo sapiens
agtggctttacgtctgtagcgtttacccccaggcgtcttgctgatactctgtgatgtttccgtttcattttgacttaccttgtgcaattctttgtggttcttccgagatgaggcacatgcca

SEQ ID NO: 286599 - DNA, 122 bp, Homo sapiens
ggtagtgcttagagcagactgcaaggaaatgcctttggaaagccggactgcacccacacccgggatggtgcaaatatgccaagcccagctatggctggagactaaacctgttccagcagagg

SEQ ID NO: 286600 - DNA, 122 bp, Homo sapiens
cctcctggagaaccgggacacggggacgggagggccagcatcggctacggcccggtttcccgtttctttccgctgtcgcgtgtctgggccctcctgcagcgtccatgatgaaggccaggggc

SEQ ID NO: 286601 - DNA, 122 bp, Homo sapiens
agttatcatgatagtgggttgttacaaagcaagtctggccgctggtacctctccctgtctcgagtgctcagttgcccttctgccacgttatgacacagaaagaaggccatgctcttggattt

SEQ ID NO: 286602 - DNA, 122 bp, Homo sapiens
tcttggcccctggctgctgccctcgcccacggggtactcacccgagcttcacgtacaggacgccaaagcagagaaacacgtagaaaatccacttgcgaaagtttctgtgcatgatccaggga

SEQ ID NO: 286603 - DNA, 122 bp, Homo sapiens
tgtctctccatcttcaacaatatttacggctttatttgttccttaaaagaagaagtaactcgactatagagttatgttctgctttgcttggcacaaaataaatgtaacctggaggctccaag

SEQ ID NO: 286604 - DNA, 122 bp, Homo sapiens
gggtcccggcccggcgtgctgccccgaggacccggcggagagagttgcaggatgggcctacggccgggtaccgcccgggacttcttccccatcgcgagcccaagcgcgagcagagagcgtcg

SEQ ID NO: 286605 - DNA, 122 bp, Homo sapiens
gccccgccccggcacgccccgccgcctacctcgcgccctccgccaccctcgccctcccgccgccacaggtcggactgtccaaatcgcctcaccctcgggctggcttgacttcacgccacagg

SEQ ID NO: 286606 - DNA, 122 bp, Homo sapiens
aagatttgaacctggttgtgtatcattcaacggtctagcgcttggcctcagctgggccaccgcagatgggacatggttctgctgccacctggtggacactcgcggcagcgctgttgggatag

SEQ ID NO: 286607 - DNA, 122 bp, Homo sapiens
agtatatttatttttttctctctttaataaaaagccttcagtgggaaggactagtataaacgcatgggctagagctggacgggactgtagagagcatttacttcactgattttgaaaacttt

SEQ ID NO: 286608 - DNA, 122 bp, Homo sapiens
ggggacttcctggaggaggccaactttggagaacaggcattgacattgggtctgcgctagcgtgtggtacttgaagataggttatccgtgttgccttcgctttatttgtgacgaatcataca

SEQ ID NO: 286609 - DNA, 122 bp, Homo sapiens
ccccagggcttcgaggtcgcactgggtgctcacgtggtggccgctgtggggcaggcgctgcgcacccacaggcactatggcagcaccacctcggctacctacttagctttgggggtgctctc

SEQ ID NO: 286610 - DNA, 122 bp, Homo sapiens
tcccaaatccgagttgctctggggacttcgtaggagacagagaggcccgaaaccagtgcccgctgtgcgcggggttggggaagctgcagtgggtggccggcgagccgggaacaatgcccaaa

SEQ ID NO: 286611 - DNA, 122 bp, Homo sapiens
gtggcctctgcatttagggaggtcccgtgtgaagccgtggggtgccacgcatccccttcccgtggcctcaatgtggcttctctggcaccttcgttaccgacacagcactgcacccttcactc

SEQ ID NO: 286612 - DNA, 122 bp, Homo sapiens
aagcgggcagcagcaaagggcgggagttcgggagttgcacgtggcacctggtgacagcaacgcacagctggcaagcagccctgggctcctcatggaccctgtgatccggggatgtctgttaa

SEQ ID NO: 286613 - DNA, 122 bp, Homo sapiens
ggtctttgataatttgtgttcttctaagaaaggacccccagggtcctgccctcccaggaccgacatgctgaccaggcacttgatgtggacatgtcagaccacccacattctacttccttcag

SEQ ID NO: 286614 - DNA, 122 bp, Homo sapiens
aattttcttacggcagggcggggaggggaagtgcccaactaaggaaaagattctagcaggcggcaatttcgcactttgaacttggagggcagcaacagagttgcaggtgtaaaataacggga

SEQ ID NO: 286615 - DNA, 122 bp, Homo sapiens
ctaactcagataattcatctaatacagcatgaaccactccgtcctttgcctgcatagatccggcctggatgactgaacagctaccagcttcagagtcttaagaacctaaaatcctaaaatca

SEQ ID NO: 286616 - DNA, 122 bp, Homo sapiens
gaggggccctcggggccttgtgcatggggcagtggggagacggaggtatggtgaggacaccgacctgccagggtcacacagccagggtgggtgtccagaggggatccacagctgccctctgg

SEQ ID NO: 286617 - DNA, 122 bp, Homo sapiens
atgtgtgtgtgtgtacacacacgcgcgaatgtgcgcgcccccggggacgttgagggtgcgcgtgcgcgcgctgagagcagccactgacaacctgcagctccctaatgagtgacgaggcaggg

SEQ ID NO: 286618 - DNA, 122 bp, Homo sapiens
ttaataacttaaaatgtttaataactgataattgtaaaaaggtaatgtttataattaatgcgatattcttgggggttataaatgtcttaggaataaaatttggagcaggtagaggtgtattt

SEQ ID NO: 286619 - DNA, 122 bp, Homo sapiens
cgtctgtgaatccagcccatttaaaattccctttgaaaagatctctgtttgggtgagttccgtgggctctgcccagagagggcagattatctgaaaataggtgttattgattacaaccaagt

SEQ ID NO: 286620 - DNA, 122 bp, Homo sapiens
agtccgagcactgagaagcagcaggttgcagcaaaccctgcggcgcaggcgcacgagggacgatgggaagtccacggcattattattgccggatgaggaagggaggcaatggaggtaccagc

SEQ ID NO: 286621 - DNA, 122 bp, Homo sapiens
tgggaccttgggctctccatctttccatgtccgtagccccagagagccaggaaggggaagcggcgtcaagtgcctggaaaaacagccccatgacttgagttcctccctaagactcaggagtt

SEQ ID NO: 286622 - DNA, 122 bp, Homo sapiens
tgtccctgcgcgtgacacaaatttggccccgagggagctccgtgtgctcagcctcagagccgtaggcgagagcgcctgtctgcatgagtgagcatatgggtgtttttgagtctgtgggtgtc

SEQ ID NO: 286623 - DNA, 122 bp, Homo sapiens
aacttaatgccaattccctcctgaaagaggaggaatgcagtgatatcagcaccggggacacggggatagcgaacaccaccgcggctcttggagtttacagaggagcaaccccagctccgtcg

SEQ ID NO: 286624 - DNA, 122 bp, Homo sapiens
aaggttggacttttccccctttctgattaacctggattctgtgcttgctttcaatctggccgtttctagatcaggccttaagaaactggcagttcctacttcctgtctcttcagacactctg

SEQ ID NO: 286625 - DNA, 122 bp, Homo sapiens
ggtccaaactagaggcggcctctcagcatggacccgcttcaacctcatctgcatggcaggcgttttgcaaggcgtcagaaggcatctcctctttggactttttgtctcccctggtagtctct

SEQ ID NO: 286626 - DNA, 122 bp, Homo sapiens
ggctttgacttcctctgtgagtcctgggatcagggagggctgagacacccttccaggaatcggctctggaactgtctgccaaagtcgtaccagctcagctcaggccacagcggaaaccaaca

SEQ ID NO: 286627 - DNA, 122 bp, Homo sapiens
tgcgtaggaggagccagtggcgaagaaggggaggagctcgcgaagcttagactgcagtgacgaggaaaacgtggatgggataggagcaggaaaacctctagggctctgtggggttagcgctc

SEQ ID NO: 286628 - DNA, 122 bp, Homo sapiens
ccccaggaggagacactttaaatgccccaggaatcataagtggtcatcaaaaccagatcacgactaaaatcctgcaactgcagaaacttcccaaaattctcgcggactcagcccgtctttag

SEQ ID NO: 286629 - DNA, 122 bp, Homo sapiens
accgtgctgaccaagatgtacccgcgcggcaaccactgggcggtgggtgagtgtcctggccgcgggagccgcgcgcttgtcctcctctggatcagccagccggaggggacctgtctccccat

SEQ ID NO: 286630 - DNA, 122 bp, Homo sapiens
acctgccaggaaaggaaggggctgtcccggggcggggccagggaggggtggagacagggccggctgtggtcagtgacaaatgctggctgcaatccagccagccctctgccctttctgagccc

SEQ ID NO: 286631 - DNA, 122 bp, Homo sapiens
acatgttctcatttttacactaaaccacacaggattgatgcatttggttagactaccattcgcattgttaaattcaattttctctttatataacttggtaaaatttcatttcttctagattc

SEQ ID NO: 286632 - DNA, 122 bp, Homo sapiens
atgaagttacaaattaaatcataggtctccaagaagcctggaattttgatacattcatcccggttttcttccacccaagtgtatattccgtgggctgtatctgtggggaatctgctttcctg

SEQ ID NO: 286633 - DNA, 122 bp, Homo sapiens
tcatgtgcactctggcttccagttggccatttgagtaagtgatcgcaattaactgacgagcggcagggaaacacttcctggaattctcatctacagacaagaacaaactggggcggggccca

SEQ ID NO: 286634 - DNA, 122 bp, Homo sapiens
gggagcacaggtgtggacccagccagcacctgctgcccggggtgcctccccagggccttgcggggatgttaccgccagccagcctcacaccactggactctgcccccaattccacctgaatc

SEQ ID NO: 286635 - DNA, 122 bp, Homo sapiens
gggcctcttgaaccttgaggtccccagagaactcgttgaggttcccgatgtgcctgaggacgacgtccccgtagcggccgaagtcgaggggcagcaggcgatcgtggctgagccggatgagg

SEQ ID NO: 286636 - DNA, 122 bp, Homo sapiens
tgcacccgcgcttctgggcaccgagctcctcccgctgaagtgatcggcttgcactgactgcgcttgggcttcgcgctttcccgcagcggccgggccttggcgcctggacgccccgccgaccc

SEQ ID NO: 286637 - DNA, 122 bp, Homo sapiens
aaaggaaaaaccaggacagggactctgggggccggaggagcggcctcctgcaggcaccagcggaggggcgcgggggtgggggaagggatcagggctccgcgctccgtccgccccacgacccc

SEQ ID NO: 286638 - DNA, 122 bp, Homo sapiens
cacgtctgtgacaggaaaagcctggaaacaagcccaagccagcacttgggcccgagtgcacgccaggccagcctcgcatgaggccctgccccgcagtgaagggaagcaggacatctctagca

SEQ ID NO: 286639 - DNA, 122 bp, Homo sapiens
caagctgatgagaccttgagaggaacgttaccctacagcctcatttgcacaggaagaaaccgaggttagcagagattcagtgagttgctggagatctactgtgagatggaggcaaaactaag

SEQ ID NO: 286640 - DNA, 122 bp, Homo sapiens
tcagaatgtgcgacgcctggcgccgctccccacggattggccgggccggcagtgcgtgcacggagtaaacaaaccccgcccccaggcttccctttgagagtagggggccaacagatggaggg

SEQ ID NO: 286641 - DNA, 122 bp, Homo sapiens
gcagcagtttgtctttagggcagaggccattgcagtgaggtcggagccagcctgacaccccggagccagctccagagacaaaacaggcccagctcagtgattctgtaaaaagctggaaggcc

SEQ ID NO: 286642 - DNA, 122 bp, Homo sapiens
gggccccgtgcgctccacctggacgcccccagacaagtctcggcccctcttcttccactccgtccccactcagctctccaccaccgtggaatgtgtccccgtcaccaggagcaactcgctgc

SEQ ID NO: 286643 - DNA, 122 bp, Homo sapiens
ggtaggtctccttcgccttttctttcctttatttgcctttcctttccttgacacaggacacgagatcagggtttgtgccatgggcagcctttctggtgcagaggaccttccctgccctccgg

SEQ ID NO: 286644 - DNA, 122 bp, Homo sapiens
taggagaatggaggccaggttctcttcctcctcctccttttattgtgcactggggattaccgcgcctcccgcctctgcgcctctgcttcccactccgacgggcctccgcccccactggtttg

SEQ ID NO: 286645 - DNA, 122 bp, Homo sapiens
gtaaatggagtagagacaagaaagggaagaatatgatgtaatcaacctgacctggggctgcgaagcctcagagaaggaagcagcagcgccaagggcaaagaggcttttgccttttccctact

SEQ ID NO: 286646 - DNA, 122 bp, Homo sapiens
tcaatgcagccagtgtcaaggtggacacgcacacggctccgaagtcctgtgtgacgcccacgtgacctcatgaggctgtgtgatgtcacagcgggcggggtggtgtgtgcccagcctggtcc

SEQ ID NO: 286647 - DNA, 122 bp, Homo sapiens
cctttggcgcacccgcctcgctgcccatggcctccgcctgcctcccctgcgctcagctcccgcttctggtccctgtagcaaagctggaaggcaggcctgcaaggcagccccttgctccgtgg

SEQ ID NO: 286648 - DNA, 122 bp, Homo sapiens
tctcatgtttgctttttcagggcagcctcttcgcttcagaagcctggcaaattgaaataacgcgcccgctcccccgcgggctgcggggctggggagctggggcggcggggctgagcggctgg

SEQ ID NO: 286649 - DNA, 122 bp, Homo sapiens
ccctcctttactgtattagcaacaagctgtccatgggtgggggctgtgtgttagcctgtacgtagcacatgggactttccacatagtagatattcagttacattttgaactaattatataac

SEQ ID NO: 286650 - DNA, 122 bp, Homo sapiens
caggggcgggtctctccagagagcagccgggtgacaacgtggcacagaacggcactgcatcggagtaggcacactgcaaagacgagacgagtcctccccagagaggggaggcggttaaggag

SEQ ID NO: 286651 - DNA, 122 bp, Homo sapiens
cccagcgcggggaggggcacgctggcgacagagccccgtctttattgggcaagatcacgccgtgagcgccaattggctgagtcgtcgccgagctgggccaatcctcttggtggaggaagctc

SEQ ID NO: 286652 - DNA, 122 bp, Homo sapiens
ccacgcagatagtgcggagcccatcgcaagccatgggctcaatcaccttctttaccatctcgtcccggtcgcggggccggaagacacgaggctctcccgccccattgaggattttgcagcac

SEQ ID NO: 286653 - DNA, 122 bp, Homo sapiens
agctcctcctggctgagggggaacaaagagaggagaaggagcaggagtatgggggtcgaccgtcccccgaggccccgccacggcggccgcctcgccatcatcccccgcctccctgcacggcc

SEQ ID NO: 286654 - DNA, 122 bp, Homo sapiens
cccccaggactcccctttgcactggggtcaccctgggcattaccttggggctgcctgggccgcctttgttgcgcaggtgaccttcccggccgggccagtgtcccggctgctctgagggacag

SEQ ID NO: 286655 - DNA, 122 bp, Homo sapiens
gaacttaagagacggtgttttgactcgactcctttcccctttttcctcccggtaccaaagcggttttgtttgctgtttatactctaccccgtggaaaggcggctagctggctaaagggtttt

SEQ ID NO: 286656 - DNA, 122 bp, Homo sapiens
gcatatgtgctctatctatactgcatacaaaccgacacatttccccacagggagtcaaagcgagagggaggtggggctttgctctgcttggcagatggtccaatattaggaacttgatcctc

SEQ ID NO: 286657 - DNA, 122 bp, Homo sapiens
ggtgatgcacctgcctcagcctcccaaagtgctgggattacaggagtgagccactgtgcccggcctgtatgttatctttttacgtatcactttctgagtgcatttgtgtgcatgaagctgac

SEQ ID NO: 286658 - DNA, 122 bp, Homo sapiens
gtgaaactactgatgcccgctggtctgaagaattccccaagaagctgactcacgaaaaaacgcattttctacatccagatgatttcatcccccttacctaactaatcaacaactccaatttt

SEQ ID NO: 286659 - DNA, 122 bp, Homo sapiens
agagcggggtggccgggggctccctgggcgggagtcggctccattgcaaacttcagaagccggagcaggagagggcgggctcgagccaccgcacccgccgccgcctacccgcgcgtcccctc

SEQ ID NO: 286660 - DNA, 122 bp, Homo sapiens
cctaaccaagtaactcccaaatgaggttccagattcatttttctcatcccaggtagtaaacgtgttttaatgggtttgtttcttgcccatggcaacctcaacacagaggggagaactgtttt

SEQ ID NO: 286661 - DNA, 122 bp, Homo sapiens
aagagaacagcagggcctgcttccaatcacctttctggttttaatggtactttttggccacggaggtccattaggtagagaccattaggtaaagagactcaagagtgtggagtggagtgtgg

SEQ ID NO: 286662 - DNA, 122 bp, Homo sapiens
ctttgcagggagcaacctcctgaagtcggggctcactcctgggtccccctccactgcatgcgagccccccgttccaaggcaggagccagggtcacgaaaatgcatgcttcttcatcaatccg

SEQ ID NO: 286663 - DNA, 122 bp, Homo sapiens
aactttccccagagccctccatgtggccaaactaacaagaacaacatgaggagtgggcagcgagcatgtcctgagcacgtggtgcgtcaggaaggcatgcagacacaggaggcgtgtggacg

SEQ ID NO: 286664 - DNA, 122 bp, Homo sapiens
gggcacggtactcgcggcaaactagcgtgggcgagtcctgattgcagtcggacctgccgccgcggcacttaacagtttgcagagtgcttcccgcccctgatctcattggagccttcggacag

SEQ ID NO: 286665 - DNA, 122 bp, Homo sapiens
agccctcaagaaagatcagaacagattcatgggtgatttagcctatctgtcccaggccagcgtggctgagtgtgctggctggaggcctctctctctgcttcgagggtagctgagatccaccc

SEQ ID NO: 286666 - DNA, 122 bp, Homo sapiens
tcagtttccagcccccggatctgagactgagaaggattaggggctttggccaaggtcacgcggcccttcagggctagaagtcagggctcctgactccgggttctggacactttcccgcaaat

SEQ ID NO: 286667 - DNA, 122 bp, Homo sapiens
ggcacacacctgagaggcaggtgagcccagagagatggaccaggggcgcccatggatttgcggctcccatatcatacttactttgggatctgagtagaattgctgcacatttaaatggatat

SEQ ID NO: 286668 - DNA, 122 bp, Homo sapiens
ccgcttcccgcgggaacctctccagccgtccacctgaagggcactggcatcatggtctaacgtggcaccttcctggattcccctctatctcctgttcttcctaccttctactccttccctcc

SEQ ID NO: 286669 - DNA, 122 bp, Homo sapiens
cagcaagactctgcctctaaaaaagtgtttacaaggccgggcacagtggtacaatcccaacgctttgggaggccaaggcgggtggatcacaaggtcgagtgatcaagatcatccaggccaac

SEQ ID NO: 286670 - DNA, 122 bp, Homo sapiens
cagtagcacaggttgggagtctgcacagtgccgaggccagctcagtcttcactattcgaacgaaggaagcctggggcaactgtttgttttctctgccctgcgtgttagttgcccgttgtttt

SEQ ID NO: 286671 - DNA, 122 bp, Homo sapiens
attctactattccatgtagatacttcttcccttaattgtatatgagttggatcattttcccgttcattttgcaactaatatttagtatggaaaaagaaaagaggagttactgtacaatacat

SEQ ID NO: 286672 - DNA, 122 bp, Homo sapiens
aagaaagtctcagaggacatgaattcaacattctgttttgttgggggcggagggtggaggcgatgggcaagggagagatgtcatgtggcctgcccaagacccacactgggcatgtgcttggc

SEQ ID NO: 286673 - DNA, 122 bp, Homo sapiens
aggggatgcctctactgagcaaggggtaagcaccttacacagaatgtgtccacaaccaaacgtggcaggcgaacttcccctcagctggcttggccaggcacaaacccagactgcccaaccca

SEQ ID NO: 286674 - DNA, 122 bp, Homo sapiens
cagatcctggaggacagggacagggacagtcataaacggcaccggggattagctgtggctcgccgagcgtttgggagtggggaggaatgaggagatggcgccaaaggagggagaggtgttgg

SEQ ID NO: 286675 - DNA, 122 bp, Homo sapiens
ttttcctgcccactccaggctggcctgccactcctcctgctatgatgcctgggcagatcccggacccttcggtgaccacaggctccctgccagggcttggccccctgaccgggctccccagc

SEQ ID NO: 286676 - DNA, 122 bp, Homo sapiens
cggaggtgggtgtagacacggtggtgggtgtagacacagcggtggtgggtgtagacacggcggaggtgggtgtagacacggtggtgggtgtagacacagtggtggtgggtgtagacacggtg

SEQ ID NO: 286677 - DNA, 122 bp, Homo sapiens
gggctccgtgcgatctggggcctcccaagagaaaacttccccgggacaggacgtctgccacgcgcagctaaacaacttctgttttttccgccgtggggaaaataaaagaaccttacaaattc

SEQ ID NO: 286678 - DNA, 122 bp, Homo sapiens
ccgacagcccagaggcagcctgggagacctccgtagtgtcagggacggtggcagggaggccgagctgccaggtggaggtgctggttctgtttgggaagtggaagtcacagaggcctgtgtgc

SEQ ID NO: 286679 - DNA, 122 bp, Homo sapiens
aaggaaggcaggggctgagaccactttgatcgttcgacgatagaaaaaagtagcgcggggcggggtgcagggttccagctgtccagacagcaaagttcatggagccactttgtcctcctgtc

SEQ ID NO: 286680 - DNA, 122 bp, Homo sapiens
tccttcactgctgcgtttttcggcttcgcttccacttttgcaggaggtttaactgacaaccgcgccgatctcctcttgggcttttccttggcggctccttcagcagagctgaccttcccctt

SEQ ID NO: 286681 - DNA, 122 bp, Homo sapiens
agccgcaggtaggaggccaggagaaatcctctgcaggggactttgggacaggcagggggccgacttggaggctgaagctttgggaccagggcacacttgattttggggcttggagccctgag

SEQ ID NO: 286682 - DNA, 122 bp, Homo sapiens
cgattgcagtgatgggccagagctctagtcctagaggacaggaactgttaataaaaccagcggggagctgatggactgggagacagatgagagaagggctccaaggccagggcctctgagga

SEQ ID NO: 286683 - DNA, 122 bp, Homo sapiens
atacagctacaaaatgttttatttactcctgtctaactttagcctcccaacaatcctgtgcgttacttacagccactttacacataaagttatgcattcacatatattagtggggacactaa

SEQ ID NO: 286684 - DNA, 122 bp, Homo sapiens
ctcctctgaataaggggcgctctgggccacttcctctttcttcaaaacaattaagttgaccgtggaccttaatcacactagcagggcaattttgaaacaataatccgaaagaacttttgcca

SEQ ID NO: 286685 - DNA, 122 bp, Homo sapiens
aggtcagacgagtaaaagccactcatgctggtactaaatctccgaatgccagcaaagcaacgaggatcgcacgaggcttgtttcaggtcctatctgcagttgccaaaatgtcaacttaaaat

SEQ ID NO: 286686 - DNA, 122 bp, Homo sapiens
tccacattccggcgtcctcggaacagccggcacaggcagggcgggcgtcagctgtccggtcgcacctccctgcaggggcattccttggcctgctgctgcctgccaggctgacccaggcgcag

SEQ ID NO: 286687 - DNA, 122 bp, Homo sapiens
aacacaactcggcttcaaaaagcaaatccctgggatgccctcctgccttcagcctgaaaacggccagcgcgatgctgccgcttctgtggtccgtgcggcctgccttctccagcggggtcagg

SEQ ID NO: 286688 - DNA, 122 bp, Homo sapiens
cagcagccgctggaggtcttccgtgtttggtaaaggtggctacggactcccgcatggagacgcggcctggagggtgtcactgctctaggctgtctgcagggcctctccgcagacctggacgg

SEQ ID NO: 286689 - DNA, 122 bp, Homo sapiens
cacaaccattgtgcattgcagccctttcttttttcttattttttttctctttttttgagacggaatctcactctatcgcccagatctcagctcactgcaacctccgcctcctggattcaagg

SEQ ID NO: 286690 - DNA, 122 bp, Homo sapiens
ctgtaagcagaagagtgagtctaaagtacatatcaccagacagtgtttctcctagcatttcgctgttgcattaatcaacaagttaaaatataaacaacggctaaccttgggtttcaaattta

SEQ ID NO: 286691 - DNA, 122 bp, Homo sapiens
tattactgaagaaagaataatagcaacactgttacccgcctgtgtaccagtctttgttcacgggaggttttaggatctctatgacacacgcaggcagagcatgccaccgtcacttaggaggg

SEQ ID NO: 286692 - DNA, 122 bp, Homo sapiens
ggctggaagcaggtggaaaagcccagggttggaagtcagcacctggagcagagcaggaagcgagggcagggtggggtctggaggcaggtaatgactgaatgtttgtacaaacatcctgtgtg

SEQ ID NO: 286693 - DNA, 122 bp, Homo sapiens
atcatccttattatctctgtaatctgtgtttcatttcacaagggctagatatagggaaatcggtgaaagactagactaaaaataacatgtaattcagtaatatctagttttgcagttacttt

SEQ ID NO: 286694 - DNA, 122 bp, Homo sapiens
cttgtggggaaatcgtgtctgcggcagaaacactggaccttgtgagtaattcccgatgcccggtaggcagctggcgaggctgtaattgccctcggccacttcagagcaaccatgtgggtgca

SEQ ID NO: 286695 - DNA, 122 bp, Homo sapiens
aacccggcgctcagctgatttttatttctgccagagataattcagcgcgggaggagcggccgccaccatcccatccaccagcgccgttcaatatatcccgcgccggcgtttctcacccactg

SEQ ID NO: 286696 - DNA, 122 bp, Homo sapiens
tgcatccagcctgggcgacagagcgagactccgtcccaaaaaaaaaaaaaaagaatacatcgatcagcaattgtatcaatgtggttaagccaaattgcctggatttgaatcctggctttaat

SEQ ID NO: 286697 - DNA, 122 bp, Homo sapiens
ttaagttgcagaggcaaaaaaatctacgcttcgaaattgggggctgtctgacagcaccgtcggccttttatcagttgtgtttctgtggccagcatatcgctctgcctggttcaggacgtgct

SEQ ID NO: 286698 - DNA, 122 bp, Homo sapiens
acacagcctctttctggaacagagtcagaagagcaatttccagcacccacctcacagtttcgaaacgcctcctcctccagcgggacccgacctcagagacgtgccgaggaggccttattgtc

SEQ ID NO: 286699 - DNA, 122 bp, Homo sapiens
cggaggggaccaaacagccccacgcgccaggaagcctcaggcaacgggccacgcgccacacgggcaaagtgattactggtcggatcaaaagtcaggcaagcggctcagccccatcctcccag

SEQ ID NO: 286700 - DNA, 122 bp, Homo sapiens
ttttccagcgtgtgagctaatgaactagctgaggagtgagcctgcctctccccgtgaagacgccatgcagcgcaggctgatttacagactcgtacccgggcgctggggaggggatagggaag

SEQ ID NO: 286701 - DNA, 122 bp, Homo sapiens
gctgccgagcggcgatgcgcttgatgtcgtggtagcgctcggcggccagctctgcagccacggcgtccactgcctgcacccggccgctgtaggccacgatgtccgtctcaatggcttcgtgc

SEQ ID NO: 286702 - DNA, 122 bp, Homo sapiens
ctacacctccatctttcagaaacggcaatcagaaaatgaaggtgggaggctttgggaaggcgtacaattagtggcaccattttattatccgagcttggccgcagcatgggatgtttcgagtg

SEQ ID NO: 286703 - DNA, 122 bp, Homo sapiens
atgtggagcaggcggctaccaaggaattccaggacctggggatccatcaggtggcgtgggcggggtgggtgggtggctgctgtgtggctgggtggggcctcctgcacgtcgttgtcctgctt

SEQ ID NO: 286704 - DNA, 122 bp, Homo sapiens
atttattttttgtttttttcagacggattcttgctctgttgccaggctggagtgcatcggcgtgatctcggctcactgcaacctctgcctccttgggtttaaccgattcccctgcctcagcc

SEQ ID NO: 286705 - DNA, 122 bp, Homo sapiens
tgagaagagggaataggtcagggcaatgcttgcagcatcaagttcctcaggagtttctgtcggcccagctcatagtcctcctcgtctacatttaccagcagcttgatggcttcatggcccac

SEQ ID NO: 286706 - DNA, 122 bp, Homo sapiens
acagatgtctaattgccacctgattcctacctaattgcttttccctacctcttcactgttcgggaatctttttttcaaagctgtttttcatttccagcttattcacacatatgctttaatta

SEQ ID NO: 286707 - DNA, 122 bp, Homo sapiens
tgtttggtgggcggggcctgttattcgctctgccttccacccagcaagtctttgttctcccgatttaggagtatttgtgactatttcttgtcctgtgaagcagcgttgcttcctgcctattt

SEQ ID NO: 286708 - DNA, 122 bp, Homo sapiens
aagaagatggtggggcatttttagtaattggaactgtaacattaatttacaagattgaaccggggatgtctggatgctgacaagggagagccaagtactgttaatgccatcaatcctctagg

SEQ ID NO: 286709 - DNA, 122 bp, Homo sapiens
ttggagaagaaccttaaaatatgatctgttttctcaccttagcattaactattaagtcagcgataaaatggaaagacttgtgggatttttgaatggtccagaaaaggccacacaaaatgcat

SEQ ID NO: 286710 - DNA, 122 bp, Homo sapiens
actcagcaccgcaggcaccgaggacggcctcccacaaaggctcctctgggccagagcatccgtagtgccaaggggaaaagcccggacacaaaggatccagtgttttcaacgttgctcagggt

SEQ ID NO: 286711 - DNA, 122 bp, Homo sapiens
atagggcacagctgccacccctggacctcacctgtctggttgatgctgacactggcagtacggaagctgcggctggttaccaggcctgagacgccattgcgggcctccacggtgaaggtgta

SEQ ID NO: 286712 - DNA, 122 bp, Homo sapiens
ctctgcggggagggcgatcgcccagaagtgcccaggagttggcttcggagtcggcacagtcgtctctcctccctgaccatgaggaggggggcagaggtagcccaccggtgacattttagcca

SEQ ID NO: 286713 - DNA, 122 bp, Homo sapiens
ggccaactgctgtgctcgaattctcgccgagccttagctgcctcccggcagggcagggctcggacctgcagcccgccatgcctgagactcccccgccaacccgctgtgggctcctgcgcacg

SEQ ID NO: 286714 - DNA, 122 bp, Homo sapiens
tgtgccccaggaacagggtgacgtcccttccacccctacatgggctgcttatggggtaagcggagttcccagagcaccaaagggacagcagaacacagcagggaagaggcagtcaggggcac

SEQ ID NO: 286715 - DNA, 122 bp, Homo sapiens
ggagagatgcgggggttaatgccggtaccaccgcggttttaaacggggccgtgtctgagccgtgttcttgacgttctccagccagcagcagcagacgccacccggttgccccagccccagcg

SEQ ID NO: 286716 - DNA, 122 bp, Homo sapiens
aatcactatgtttggtgctttttaaagtcaggagatctggtgcacatccctgctctgctgcgtgatatcttgcaagaacttccccactcagagcctcagtctgccctctgtgaaatgggaga

SEQ ID NO: 286717 - DNA, 122 bp, Homo sapiens
gcgagaggcgaggaggatccttggactgtgggcaggatcgcaggcagcggaggccctgcccggaaggcgggatctggggacgatccccattcctcccagccgcagacgcggagcccacagga

SEQ ID NO: 286718 - DNA, 122 bp, Homo sapiens
agagtgggagctactcattttgaggcgcgagaagccgggggggcggtgctgcagcctcggcgaggggacggccctttaattaaagtcgcaggcacctaggcgcgcgggaggcgaggcaggga

SEQ ID NO: 286719 - DNA, 122 bp, Homo sapiens
actaacccaagggttacaaccgaaaagccccttccagcttcagaagcagaactggaagctcggatagacttctccgcctctacactcctggaaaacccgcagtggatttcaccaacttcagg

SEQ ID NO: 286720 - DNA, 122 bp, Homo sapiens
tcgagtgtttctgtgattctctcgccttctcagtgttttgattgctaggaagcaaaccagcgtggaggcgccggcgacactttgtttactacggagcagcagagccgagtactcgggaagcc

SEQ ID NO: 286721 - DNA, 122 bp, Homo sapiens
tcccaaagtgttgggattacaggcgtgagccaccgcgcccggcctcatagaggtcttatacggatttctgggtagtattctaagcatgtaccaagtacttttccagcattttctcatttatt

SEQ ID NO: 286722 - DNA, 122 bp, Homo sapiens
gtcttcccgactggcccagagctgagttcttactaatccccgctaacctggagttaggtgcgcgttgcaaagcagtaacgaatccaatcagccggggaggcagacagcagggccggaagaac

SEQ ID NO: 286723 - DNA, 122 bp, Homo sapiens
agcggggagagggtgagcgggtggctgtcccgggcttggggagctgggcgagccgggaagcgcgagttccgcccgcggccaccctgtcgcgcgcggtgctctccgcagccccggagtcgtgc

SEQ ID NO: 286724 - DNA, 122 bp, Homo sapiens
gttataggtcccatgtgttgggtcttcctgcgaggccttcacaaagatgattttgtcattcgctgaaagcgtgaagtgaatcaacggcctcctcttgctccgcagcactttattcacactgt

SEQ ID NO: 286725 - DNA, 122 bp, Homo sapiens
ctgggctgatcagatgcaggacagagggttgcctctgcctgtggaccttggggaaatgcgcggctcctgtcctagcagcacctgtctgtggccagcaaggagaaaccagactctcacaatga

SEQ ID NO: 286726 - DNA, 122 bp, Homo sapiens
gaggcctgtgggggtcccaggagagccccacttggcaggccaacaagcctggctccacagcgctggctgatcttcacctccttctgaagcttccacctgaacgcctgtctcccgcaccccaa

SEQ ID NO: 286727 - DNA, 122 bp, Homo sapiens
ccgtggattgtcatgttccctctggtaatgggaaatttccacaagctgagctttccttaccgcattttccagccacaaagatcccaaagttcagacctcattgcctatacatgaaaaaggcc

SEQ ID NO: 286728 - DNA, 122 bp, Homo sapiens
ggagccagggccgaaggcgctaacgacttctcggaaactccgcgggggtcccttcgcgctcggggtggtctccagacttcttgttcgccatctgtggtgaaactacatttatcctaggtcgc

SEQ ID NO: 286729 - DNA, 122 bp, Homo sapiens
aaaaatctattcgaattactgattcaattatcaaaactgattaaagaaaactttacccttcgtttatttaaaaaaaaaagcttactccacaacttgtaatgtttattacatatgcctgtaac

SEQ ID NO: 286730 - DNA, 122 bp, Homo sapiens
tgtcaccgagatgcagaggatactcagtcaaccaacatttactgagcatctacttcgtgccgtatgtacgaagctagcaaatatgtacagcaccagtactgattgcagggagcactgtagaa

SEQ ID NO: 286731 - DNA, 122 bp, Homo sapiens
tgtgaattctcaaatatgtgaatcaatcaaagacggctgatggaggggctcagccaatggcgcacactgtcatcgagtcggaggcggccccacttcagtggagagtcatcctgccttcctcg

SEQ ID NO: 286732 - DNA, 122 bp, Homo sapiens
agagaaaattatggctaagagagtctctgattgtagctcgaaagtgctagggatgggattcgttcccagttcaattctgattcttcgctttagcgtgttgtgggtaggagttaaatgggccc

SEQ ID NO: 286733 - DNA, 122 bp, Homo sapiens
tccctgccccggatggctcctgctccggcccctggtccactgggacaagtgtgcagccagcgagatgagaaatagcagcgtcacagcccctaagaggacccacagtccccaggcctgggtta

SEQ ID NO: 286734 - DNA, 122 bp, Homo sapiens
cgcgcccacatccggggctggttctcaccgcccctgagcctaccctataggtagagaggacgccaatctggattcagaggtcccttttccgcggtaattggaccatttgtccgccagtgcaa

SEQ ID NO: 286735 - DNA, 122 bp, Homo sapiens
cctcaggcctgaatggctgggtgtggagggcccttgtctcacattctgtagagcgcacgtcgtcccgtgacctggtggctccatattcgatggggagctcgcagcgagtcgcttccctctgt

SEQ ID NO: 286736 - DNA, 122 bp, Homo sapiens
gttggttaaataaacattatgtctgcctgtgtaatgtgactcccgtagtacttactctgtcgagaataaacagacatcatgcacactgaatcatatgagacaggttcagaaaacagctgagt

SEQ ID NO: 286737 - DNA, 122 bp, Homo sapiens
cttttaatggaagggagggtgtttggcatccccggaaggggctctctgcacagctgctcccgcggccccgtttctgcgtcttcccggaccccgctctttcttcgctacccctcgaggtgccc

SEQ ID NO: 286738 - DNA, 122 bp, Homo sapiens
ttttttttttaagtcaggtgaaggattatttcctgtgttctgttttttaaaatctttttacgggttagacgagggaacttgaaacaaacaaatcttatcaagaataggttgactttctcaaa

SEQ ID NO: 286739 - DNA, 122 bp, Homo sapiens
cacatttgaaaattaatcctttttcatctctgtaccctgagtacattttggacttcccttcgttcccaaataccctgaattcaaggtatctcaatccatggagcaattgtccagaggaagag

SEQ ID NO: 286740 - DNA, 122 bp, Homo sapiens
tccttaaactcaagcagaccttccgctccggtctcccaagtagttgggaacataggcacgcgccaccacgcccagctaatttttaattttttttttaagagacaggggtatcactgtgttgc

SEQ ID NO: 286741 - DNA, 122 bp, Homo sapiens
cttaagtaaaaacaatatggttttcattaacgtttttcttaaatacttaaaaaaaacaggcgacttttgggtcttttgttttaaaaattaaattatggggccagacacagtagctcacgcct

SEQ ID NO: 286742 - DNA, 122 bp, Homo sapiens
ttttatgaaaagcacagccacctctatgagtgatttccactgtctagtcggcatatgaagcgactgtgctcaaaggagtaggtagtcgtagataaggctatttaaaataaaaatttcggagc

SEQ ID NO: 286743 - DNA, 122 bp, Homo sapiens
cttccagctgcagtttatcattttccaggtccatgatgctctcctgggtcagcttcaggtcgccctccagtttccgctttgctcgctccaggtccatgcgcaccttcttctcttgctctagg

SEQ ID NO: 286744 - DNA, 122 bp, Homo sapiens
aaactgctgcattctaagcaagtctcctcagccagcttcacatctgaggcccacaggtatcgctttggagtcaggtgatgaccaaagaaccccactacaaagcaggaggagattatccagct

SEQ ID NO: 286745 - DNA, 122 bp, Homo sapiens
ccgatgcggatcgcttgaggccaggagttcaagaccagcctggccaacacagcaaaaacccgtctctcccaaaaatcagccatgcatggtggtggacgcgtgtagtcccagctgctcgggag

SEQ ID NO: 286746 - DNA, 122 bp, Homo sapiens
acccaggctgggcgagtcgcagtggaagccttggccaaaggtgccatcggaaggcgtggacgggttcatggagtagggtcctatgaagtcacaggggtctcgctctcccacgccgaaggccc

SEQ ID NO: 286747 - DNA, 122 bp, Homo sapiens
gcttggggattgaggagcctccagccctcagcctccgcagcccccgcagcctccaaagcccggggctgggcttgctcaggcgccctctgccgtgaatgtttagctctgctccctcccacctc

SEQ ID NO: 286748 - DNA, 122 bp, Homo sapiens
cctgcaacctgacttgctgtgcacaacgcaagagaaagttacgatctaacctattataagcgtcacatcaggaaacaggtttctctcgacgaaactaaaaatagcaactccgcccactcgtt

SEQ ID NO: 286749 - DNA, 122 bp, Homo sapiens
agttaacaacctggacagacaggcccatcatgtgtgttatgacctatctggtttcctactcgcatggttagaaggctcattttattgctttgaactctggaattaatcctgcttaaaggaga

SEQ ID NO: 286750 - DNA, 122 bp, Homo sapiens
gtcgaggctcgctctctggctgcttagcgccgcccgcccgcccggggccgccgccgctgacgccccaatgagttcgtacttcgtgaacccgctgtactccaagtacaaggcggcggctgcgg

SEQ ID NO: 286751 - DNA, 122 bp, Homo sapiens
atgaaaaattctccaattgcagtcaagtgttggcaaacctgatctttctgtgtatttgctcgtttgtggatgtctgtcctaggtcttcagtctagacttccttccccatcaccccagcatct

SEQ ID NO: 286752 - DNA, 122 bp, Homo sapiens
tgagcgggctgccggctgcagacagtaggtcgggttagcgggcagcatctgcagccttttcgtggtgggagggaggtcctgaagcagaggacatcttgattctggttcagtccccgatctgg

SEQ ID NO: 286753 - DNA, 122 bp, Homo sapiens
tacaggaagtgacgttatcatgcctcgcccgacggaaaccagaatcgttttgggtctggtcgccaagatggcgtcctccgcctccgcccggactccggcagggaagcgagtgataaatcagg

SEQ ID NO: 286754 - DNA, 122 bp, Homo sapiens
caggtttggacttcttaaccatctttttgtttttctttttcgaactgccatagtcactatcgtcatcatcttccattaggaaatcttcatcgctgccggaatcttctgagaagaaagaagaa

SEQ ID NO: 286755 - DNA, 122 bp, Homo sapiens
ggtgttctctcgttggtctcgctaaaggtggggagcgccaggaaacgagcgccgcgaaggcgggggtagtggggcggggtaaaggagccggcggctgggcggagccgtccgtttgcccgccc

SEQ ID NO: 286756 - DNA, 122 bp, Homo sapiens
aatgtataatagtatcaagtgagcatttcctgttggcagaaagttacaaaatgacattttcgtcaatgacaggccccatatataacagtggtcccataagattataagaccatatttttatt

SEQ ID NO: 286757 - DNA, 122 bp, Homo sapiens
gtcattctccgacacgggcagaggggtgaagatactgagtcgccagatgcacgcgttccccgccgaggtggagcgtgcaaagctctgccttcacgtttggctctcatatcgtgcacatgtgt

SEQ ID NO: 286758 - DNA, 122 bp, Homo sapiens
cgtagcacacccctgactccctagcaacagaactcacaatcctggggcctggcgggcaggcgggcggggccggttgctggggtgatgtcctgtaaggcctcttcccacagtggccccagggg

SEQ ID NO: 286759 - DNA, 122 bp, Homo sapiens
ataggacatagttctgtaagcacctagcctactatacagtcatataatgttatagtactgcgtgataaagtacacattgaactgtcttcaacattttgagatgttaaaaacaccaaaaacac

SEQ ID NO: 286760 - DNA, 122 bp, Homo sapiens
tatcacaaatccccaagcttttttccctcatcccagaactgacctttgtgcttgatgaagcggggacagggggtccctggtatgtcagttcaagaagaatggtcagcaaaaagctgacacag

SEQ ID NO: 286761 - DNA, 122 bp, Homo sapiens
tgctcgcatgggttgtgtatttggtctgtgttgtgggtggacagtgtgtgttttgtgtggcgtgaatatgtgagtggtgttcctgtgtgtgtgagattgtgcattatagttgagcagtggct

SEQ ID NO: 286762 - DNA, 122 bp, Homo sapiens
cagtcggctgggcggagcttcacgctaaagccccagagcccgacgcggcagccgcggtagcggagaagactggagctccgaggagctgcatctgcggcaacctgtgtgctgacgctacgtgc

SEQ ID NO: 286763 - DNA, 122 bp, Homo sapiens
ccatgctctctccttggtgggacgtttcctaacacctcactttggacacgtctatcctcccggctctcgggctttccttatcagcctcaccttcctgaccccgggatggtgaagtccaggct

SEQ ID NO: 286764 - DNA, 122 bp, Homo sapiens
ttcattcctcccaataggctcgtgggatcgctggttcaggagtgaagctacagaccttcgcggtgttacacctcatgcaagcagcgtggccccaaaaaatgaacaatagcaacatttattgc

SEQ ID NO: 286765 - DNA, 122 bp, Homo sapiens
gcgtagtcaggacccaccctcccatctctagggtaggtgaccacacatgccagtatgtgccggcctatccttgttgacatctgtcaccctgcccctttcacttttgtgtcagtctttgtcca

SEQ ID NO: 286766 - DNA, 122 bp, Homo sapiens
tgcaaggactggagatggctcatgctggccctgtgcccaggcagcctcctcctcctcctccgcccctcacacaccagaggttcatgaaattagtcacttggactttccatggtttcgctgaa

SEQ ID NO: 286767 - DNA, 122 bp, Homo sapiens
ctcccaggttgaagcgattctcgtgctttagcttccgaagtagtagctgggattacagggcgcccaccaccacgcgcggcctttttttttttttgagacggagtctcgctctgtcacccagg

SEQ ID NO: 286768 - DNA, 122 bp, Homo sapiens
gccgcagctccgccccttcccgggcgcgcccctcccagctccggcctcggccctggcccgcgtggcgctaaaccctgttaagatccctgcttggtctccgctgcctgcgccgcagcaactca

SEQ ID NO: 286769 - DNA, 122 bp, Homo sapiens
caactgactcggagaggcagtgacatttgggcatacggtgccttgtctccgtctgaaatccgggattcttgactttctccacccttgcccagtgaaccccgggcttgtgctgggggcgggtt

SEQ ID NO: 286770 - DNA, 122 bp, Homo sapiens
gccgcctcccgcccccaaaccccatccccgcggttgagccacgatgagcggcagagtcggcgatctgagccccaggcagaaggaggcattggccaaggtgagctgtagccctggcccgggct

SEQ ID NO: 286771 - DNA, 122 bp, Homo sapiens
atgggacacggagccctgcaggggccgggcgccggaccttagggagcgggcagggctgggcggggaaggtcgcttcccggccccagggctcggccgctggccccagcgccctgtcggtcctc

SEQ ID NO: 286772 - DNA, 122 bp, Homo sapiens
cgggccccgctcatgggaagggtcctcagaccctcgcaccccgcaggaatctgctgcatccgcagagggagttgggcccggtgccgcctggccggccagtaggtggtgtctctggcctgctt

SEQ ID NO: 286773 - DNA, 122 bp, Homo sapiens
cacgctgttgaagaggggacataggaggggaatggagacctctggggtcaggatcttgaccgtggagtgagtgtctgggaaaacagacccaagtccaaaggaagccttcctgctattggtgg

SEQ ID NO: 286774 - DNA, 122 bp, Homo sapiens
ggccactcagacagttctaagtgcctttccctgtaacgcagaggcacacctgccttccctcgggaaacagcggcccgacgtgcgcccgcaacgcgtaaagcgtcaacagctgaaaccctcgg

SEQ ID NO: 286775 - DNA, 122 bp, Homo sapiens
ttgaatggggaaacccattcgtggtgaagcagattcactgtagctagcggaaaagccctccggcccacggacccatctagagacgaatacatagcagctgctgtggctgattggcgtgggac

SEQ ID NO: 286776 - DNA, 122 bp, Homo sapiens
ccatgagtctccccaacagctcgaattcccagagtggaggagcccactgcttcataaatgcgagaacccagagcccctagtacccaactaggctagcctcggagttggcacggcgtgcagaa

SEQ ID NO: 286777 - DNA, 122 bp, Homo sapiens
cgcccgctggtttaagtgcagcctgtcaatcagagcagctctcgaggccccgcccaaggccgtgctgcgtttctccttacgtcacttcctctccagcccctgcgtaatcgataaggaaaccc

SEQ ID NO: 286778 - DNA, 122 bp, Homo sapiens
gggggtgcagcagtgcacggggttgggacgaggaaggtgcatcccctggggactggggagcgcaaagggtgagtgagtgcgcctggatccccagcagcggcttcacccctgcctctgggtcc

SEQ ID NO: 286779 - DNA, 122 bp, Homo sapiens
cttctaaaacacactgacttgctaagaaaaggggggactgactccaacaaaggacagacccgacccctatcgtgcctatgcaattcagaaaacggagaattcggaggctccagcaagcagtt

SEQ ID NO: 286780 - DNA, 122 bp, Homo sapiens
ttccaggccctggggatacattggtgaatttgacaggggccctgcttacattctagtaggcgagacagtcagcaggtcaacaacttaatgcatgacatcatgcctgagttataatcagtgct

SEQ ID NO: 286781 - DNA, 122 bp, Homo sapiens
ccaatgtgcagcggcgccagtgcccagcagccttgaccaagcggtcccgagtacaagcggcgccttcaccgggaaagataggtacttggcagccggtggcccctcttaccccgcccgtatct

SEQ ID NO: 286782 - DNA, 122 bp, Homo sapiens
ctgagaatattccgtgactcagcaggcccgaaaaggaggatgtcagaatccacataatttcgagtcttttaaaggcaagccgaggaacacaaacaacacagtggaagaatttcgcagtgggt

SEQ ID NO: 286783 - DNA, 122 bp, Homo sapiens
gggggcccgggagacagcgctggggccggcggcacggggagcaggagctgaggctgccgccgccaccaccaccaccacagccactgctcgggaggacgcggcccacggcgctccgcccgctg

SEQ ID NO: 286784 - DNA, 122 bp, Homo sapiens
aagtgctgagattacaggcgtggagccaccgtgcccggcctctaagggaaatattgaggtcgcagaccacagaatccaagagtgctaggaatcagaggagagagaggaaggtgaagatacgg

SEQ ID NO: 286785 - DNA, 122 bp, Homo sapiens
cgggcccggaggggcgggcggaaactgggccggtgggcacctgagggtctcgcagctgtccggttcgccaagctggtccagccgacctgtgcccggggccccagttcaacgagctggaggac

SEQ ID NO: 286786 - DNA, 122 bp, Homo sapiens
ccccgtccccaagcagcccgcgcgcccttccaggggccagacctgctccatcctggacggcgaaacgacctcgggagaccccggttaggaccttactccagggatcaactggaatcaaaatc

SEQ ID NO: 286787 - DNA, 122 bp, Homo sapiens
aacacatctgcggcatcctctcggccaccgtagagtgtcccacgtgtccgcttcctcttccgctactcgcccgcgcgtctgtctgtcaagagagacttccggcatgcctttttttttttttt

SEQ ID NO: 286788 - DNA, 122 bp, Homo sapiens
ggtgaggtttgctttcaggcaaatgtacgatcaccaaagacatccccaccccacattccacgccccggcgccccgccccgcgccgctgtcaggaccactcccagcccctcttaccaagatgc

SEQ ID NO: 286789 - DNA, 122 bp, Homo sapiens
aatgcaacttcattctagttggaggagacggatgataacatttttaaagtgcatttatgccgcatcataatgccataaggactagcaagaaaaagaaggcagggaagggagtcagggtgtgc

SEQ ID NO: 286790 - DNA, 122 bp, Homo sapiens
cccagggtccccgagccgagggacccgcgcggtcagggatgccgcgctcgccttaggcttcgggagatccaccaggatctccggggcgaaactttaaactcaaaactttaaagaagcatttt

SEQ ID NO: 286791 - DNA, 122 bp, Homo sapiens
aagaaagacatggaggtgctcatcatatccaacagagagatggtttataaaccattgctgcgtacaagcagtgctactgatttctggattagactacaaaagcaattgttgagtgcccctct

SEQ ID NO: 286792 - DNA, 122 bp, Homo sapiens
caggcgtgagccaccgcgccgggcccagaaggctaattcttactgtctctaacacaggtccggtacataacacttattttggcggaagttactgggtttttttaaggagttatgtatctctc

SEQ ID NO: 286793 - DNA, 122 bp, Homo sapiens
tgacacaccacgcaacacctccgtgggctgacacgcatggctcccggccctcacgcagctcggccaccgcccaggcacacgcacgggctcacccgcggggccactcacacacgtgtgcgcgc

SEQ ID NO: 286794 - DNA, 122 bp, Homo sapiens
ctcccgagcctctgcctgcaccctgagcatccccaggacggctgggagggccaggtcttccgtgatgcagaagtgcctgagatggttcatgaaatgccctcattgttccccttctgctaagg

SEQ ID NO: 286795 - DNA, 122 bp, Homo sapiens
caaagaaacaaatcgtaagtccgaagccgtacaacggagcccgaactgagtccagacacccggacgccacccgtccctaccgcaaccggcccagtcccaccacccccggcccgcgcctcacc

SEQ ID NO: 286796 - DNA, 122 bp, Homo sapiens
ccccacggccgctctgggaggagccagctctgccagtacctggacccatcacatgggaggcggctgcgaggctgggaggcaatggctcctgcacctgctctcgcggtctcgggagccccgcc

SEQ ID NO: 286797 - DNA, 122 bp, Homo sapiens
ccacagctgcggagaggagtcagagagcccacagtggttcctcgccggcaaatgctttcgcgtcgccgcttcagaccctaaaatgcaaaagcgaccagcgcccgccaaggcggagagcctca

SEQ ID NO: 286798 - DNA, 122 bp, Homo sapiens
gcgacctatggcttgtcaccatacttagaaagaaaaacgccagacagtttccttgtttgacgcctgctcaaatatggaagcacctttaatgagagttgacatgacttgggggatttcctaac

SEQ ID NO: 286799 - DNA, 122 bp, Homo sapiens
aactaaaaactcctccctcactccccatgttcatcttttactgagtcctgtgcattctaccgcctacacatccggcggtcgtgcccggatctctatccccacttaccaccactgccccccac

SEQ ID NO: 286800 - DNA, 122 bp, Homo sapiens
ttctggagtggtctgttgggagttgtggcggcggcgaggcccaagcacagctggccaaggcgggtgtaaaacgcgggtcgtgtccaccccaaagctcgacgcctctagaagccatggctttt

SEQ ID NO: 286801 - DNA, 122 bp, Homo sapiens
gcaagggtaaggggcagttacagccacatctctgccctggacagagccgggtccaggggccgcgggcctgcccgccgctcggttgtcagcatctcctgtagccggcgcgcacactgcgcgca

SEQ ID NO: 286802 - DNA, 122 bp, Homo sapiens
actctgtaggcggaagcatagggacaagcctgagcgtcacaggctccccacaaacaaccgcgtgacccggggactttccccagggtgtgcaaaagcacaggcaccccctcagttctggggtg

SEQ ID NO: 286803 - DNA, 122 bp, Homo sapiens
aacgcagggaggggacagctaagatccaaaggtcgaaatattcattacgcctaccgtcggcgaagagaaacagcagccccaaccggaggcaaaacgaaatcccaccgcagcctgcaaaggcg

SEQ ID NO: 286804 - DNA, 122 bp, Homo sapiens
ctccacccggtatggaacattaatcattaaccgtcctgtggccaggcccagcggggcgcccgcttcagctctcccggtgccacctagctgagtcaccgcggtctgggcagctccccgcagcc

SEQ ID NO: 286805 - DNA, 122 bp, Homo sapiens
aaacatatcttacgacacacagcaacttaagaaacatatccactaaaattcctagatgtccgtcattgtataattgttgatagaatgctttgttttttcttttttgtttgtattgttttctg

SEQ ID NO: 286806 - DNA, 122 bp, Homo sapiens
ggctctcgccgaagcgctcctccagctgccggcgaagctggggtgggcgggtgaggtgggcggggtcaaggccggcgcggggcggggtcaaggcagccggccccgcccccaccctcccgacc

SEQ ID NO: 286807 - DNA, 122 bp, Homo sapiens
aatcctcagcgcctgagccccccgccccttttgtctgcgttagtgaaggaattggctcttcgagggtgagaaaaaattccaattggatacacttctgttgagaagccttgactatgtgtcaa

SEQ ID NO: 286808 - DNA, 122 bp, Homo sapiens
cataaaaccccctctgctatcaagttggtatcctcctggcaactgtcccaatcagtaagacgttgcagtcacaggaggaacttgcttttatcctaactttaaacaatgcaaatacctccaac

SEQ ID NO: 286809 - DNA, 122 bp, Homo sapiens
ctcagcagaacacatctgaaactggccccctatgtgctacgcatccagaagaggaaaagccggatctgaaaacaatattccacgctaaatgggccgtcccggccggggcaggcggtcccagc

SEQ ID NO: 286810 - DNA, 122 bp, Homo sapiens
atcagtctgacactgggttgggggatccgcctcagagtttctgggcagcgtacagtgacgcggtggaggtcggtaacggctggaaaattgagccttgagcagcgcgtgcttgttgtcatagt

SEQ ID NO: 286811 - DNA, 122 bp, Homo sapiens
cctctgtgtgtagggctggcttgatccatctccccacaactattctccttttaggtcgagcgccccgaggtcggggtcgcaagcataagacgaccccccttcctcctcctcgcctagcagat

SEQ ID NO: 286812 - DNA, 122 bp, Homo sapiens
tcctgtgagaaggtgtccccgctcagccagtaaccttcattggatgacttcacctaggcccgcctgccctttttcttcccccggcttttttttttttttttctggcatgactaggcacccac

SEQ ID NO: 286813 - DNA, 122 bp, Homo sapiens
tctaccaaaggaatttgcatccagcagcagcacttagacctgccagccactgtcaccgagcgggtgcaagcactcggggtccctggagggcaagccctgcccacagaaagccaggagcagcc

SEQ ID NO: 286814 - DNA, 122 bp, Homo sapiens
gcaaagagattccccagggccagctctggcccttaacaggcaccccttaacgccaagctgcgaatctggctaggacctctatattttagccaagaacaccttgaaatgtacagtcctaccaa

SEQ ID NO: 286815 - DNA, 122 bp, Homo sapiens
agttgcagataaatggaacaaggtaagtgctgtaccctgtcaccaccctcactcctctcccgaatcgggaaggacgcagcccaggctaaatgtatcctttctctgcaagctgtttgcacttt

SEQ ID NO: 286816 - DNA, 122 bp, Homo sapiens
acaggtgcgcctcggggtatcctggaaaccctcgtggggcttccaggcgctttgacagcacgaccctcagtgaccaccagctgtctcaagcgctttgcagtcagtgctcccggaaagcatcc

SEQ ID NO: 286817 - DNA, 122 bp, Homo sapiens
actcttggccactgcaaggcagttatcccttgtccacctcagacatggcaaagcaagagccgtctggtcgacttcaatcatagcagctgagggccatctggtcaaccatctggtatcttctc

SEQ ID NO: 286818 - DNA, 122 bp, Homo sapiens
gcccagggccggagccaggcctggctggggctgggggacccatggaaacacatgtagctccggaggccccggcccagggctgagcctgggcacagctttctgctcactttacgggagaagag

SEQ ID NO: 286819 - DNA, 122 bp, Homo sapiens
ggggctggagtgggatgggggtgtgatgcaggccgcccaccaggttccctccgggcaaagcggcagggccccgcgcttcctgagccttcacggaggtctagtggtccctctgcctgaaaacc

SEQ ID NO: 286820 - DNA, 122 bp, Homo sapiens
cccctctcccttcctaccgcctgccctcctccccaaacctcaagcagaacacaatatatccgcagtccaggccctgaggcagtctgccagtctctggatgccaaattattatttttttaagg

SEQ ID NO: 286821 - DNA, 122 bp, Homo sapiens
atctgaagtccccggcggcaagaagagaagggtgctcgaggccgccgccatcttccccaacggaacttcccaaaattcgcgagataaaccgtggtcctgccagagagaggaagaggacaggg

SEQ ID NO: 286822 - DNA, 122 bp, Homo sapiens
tctatcagtcttcagggaggccctggaccagaaattccgtacctattggctacgatcaagcgcgcagttaattttgataggtccaggagggtgtacgtcccggagaaatgattttgaatccc

SEQ ID NO: 286823 - DNA, 122 bp, Homo sapiens
tctaccgaaagcccagcaggtttagaagcctcaaaaataaccattgtaagtattaactgtcgttcccatcaatgctgggaagcagaggctccagttagattgggggagctagaaacatttcc

SEQ ID NO: 286824 - DNA, 122 bp, Homo sapiens
agtggaggtgggggaatggcagaactgggatcaaagcccacgtgtctgtgtctggctcagcgcccatacaagggtgtcaaggttgcggggaggcacgagggaaccaataattaaccaaaact

SEQ ID NO: 286825 - DNA, 122 bp, Homo sapiens
agtctgcctttctgcacttgtgccttgggagagagctctgggcctctgagggcctcgtgccgtccagcgtgcccggggcatgtctgttcctcttgaaaatgtcattctttgtccaccctgaa

SEQ ID NO: 286826 - DNA, 122 bp, Homo sapiens
gcgtcgcagagggaaggtgggtggagcgtctcgcagtaaattaggaattcagaatgaaaacgtagagtttatttgggtttttagtgacacctcaggattattatacagcagtgtcagacaca

SEQ ID NO: 286827 - DNA, 122 bp, Homo sapiens
cggtgaaaaataagtttttggaaatgagcgaatttgtcttccacaagcctcccttccctgcgcccatccccgaggaggagcgtcgtggtcaattttaaaaatacgaactcaagagcagagtt

SEQ ID NO: 286828 - DNA, 122 bp, Homo sapiens
actaacagtgcagttggagaagcagagttttactcaattaattatatttctttgcccttccgtggttggctgataacacttgttacttaagaggaatggtagtttcgccttaaggtaggagt

SEQ ID NO: 286829 - DNA, 122 bp, Homo sapiens
cacaaatagatggcatttgagggccctccagctacagtacatgaggacgacttcctggcacggggccgggctgaggtggggtcagacacgggccggaggacgctgaccagcaggcagcaccg

SEQ ID NO: 286830 - DNA, 122 bp, Homo sapiens
tttcttcccgataccgcatcagcgcctgttgaatggaattcctctgccgtcatctgtcggcgctggagcatcctgagtttccggacgggcccggccctgcgagggcgcgatttcctgcgctc

SEQ ID NO: 286831 - DNA, 122 bp, Homo sapiens
ggggtacctctgacccttccctggacacaggggcagaaggggctcctggtcaggccggtgcgggtgtcccctgcagacagagcgcctgtcggctgagcagatcaaggagtacaagggagtct

SEQ ID NO: 286832 - DNA, 122 bp, Homo sapiens
gacggcggccaggcacagggcccgcagtgctgggaccagagccagatgcaggacaggaggcggcccggccagcgggcacagggcaccagaggccgaaggtgcctcagactccgccctcctcg

SEQ ID NO: 286833 - DNA, 122 bp, Homo sapiens
aaaggacagcaaggagctgtgtgcagtggcggctggcactagatgacgatgacaacatcacggctactcaccagtttggtgatacccccgtgctgcctcaccacccgccgtgctcttttaaa

SEQ ID NO: 286834 - DNA, 122 bp, Homo sapiens
tgagtgttagactgggccaggcacgtggagagctccataaagcttagcacagggccacatcgactagtccctcaataaatattgattaatttaaaaaaatacagaactgaattgtcgagctg

SEQ ID NO: 286835 - DNA, 122 bp, Homo sapiens
accggggagcgggcgggagtcatgcagcggccttgagcactaggggccggcgctgaggagcgcgcgcggcgggagggcagccgagcatggagctgagcctggagagcctggggggcctgcac

SEQ ID NO: 286836 - DNA, 122 bp, Homo sapiens
agcctccaggagggtccacgcgtgctcacgctctacgctcatggatggccacatgtgccccgaagacaacgtcagcccccgcgagggtccacgtgtgctcacctgcgctcatggatggccac

SEQ ID NO: 286837 - DNA, 122 bp, Homo sapiens
acggaactctgccggtcagcgacttccggccgtcaccacggaaactgccagccccgtgagcgcatggtgtggcacttgcctgcggaggggcccaggcgccactcctctgattctgcagatgc

SEQ ID NO: 286838 - DNA, 122 bp, Homo sapiens
aaaaaaaagtttaataggctaggcactctaaaatgtattcaggctgggtgtggtggctcacgcctgtaatcccagcactttgggaggccaaggtgggtggatcatttgaggtcaggagttca

SEQ ID NO: 286839 - DNA, 122 bp, Homo sapiens
acagcaggaagcagagttccccatgtgcatatgtttacgccacaccggaactctctactgcgtctctcaaaagagacacaggctgggcttattttatgtagctggcttgcctggcccctgct

SEQ ID NO: 286840 - DNA, 122 bp, Homo sapiens
ttgcatcccccagagcacctagtcgtgggccttgtacagagtcactgctccataaatagccgtggacttgatttctttaaatggatccatcaaacagatgtagaaaaagaaagagatctaac

SEQ ID NO: 286841 - DNA, 122 bp, Homo sapiens
tcagcactttgcgcctggacggtcccccagttgtcctggctgcaggcagtccgaacagtccgcttcctggaatattagccaggcaggatacgccctgggcgacagaaactccaactttcgcc

SEQ ID NO: 286842 - DNA, 122 bp, Homo sapiens
tcccagccctgtggaggaggccggaggttggggccggagccctggaagcagggccttgctcgggcagcttctgaccctcccctcctggccaggtcagcccctcagtgggccctggccctaga

SEQ ID NO: 286843 - DNA, 122 bp, Homo sapiens
agttatttgggggtaaggtgggggcaggccctggtcacggggagcagccccacctgctgccgattctcatgctgcaggtggagccgggcctggatgtaaccgcgggtctcctgaaaggcctg

SEQ ID NO: 286844 - DNA, 122 bp, Homo sapiens
gattcttagtcatctagatttggtgctacagtggatagctgaaatgaccttcatcaaaatcgttggggattttagcagatgacagtcccacctgtatgctttggtttttattggattcccta

SEQ ID NO: 286845 - DNA, 122 bp, Homo sapiens
accccgagcgacctcctgacccggcatcgcccctctaaggcgccctcccccgactcctcccgcaatccggagtctcccaggccgcggagcccaaggaccccagcgactcccgcgcggggagc

SEQ ID NO: 286846 - DNA, 122 bp, Homo sapiens
ctcggcgtcccggttcccttggagacagagctggccagggcggccgcggctgggcaactacgacagcggagcccctggggaagccaagatgccgtcgaagggaaaggacaaaaagaaaggca

SEQ ID NO: 286847 - DNA, 122 bp, Homo sapiens
cgtggcttcgattccttcatccgtacaatgggggcgacttgagacggagttcccacacaacgggtgctcgccgaagcgccgcatccctccgcactcccttccgggacttcctctccctgtct

SEQ ID NO: 286848 - DNA, 122 bp, Homo sapiens
gcgcgttgacggcgattttgcgttctgaggctgcagcgtcggcatcttgagctgccggttcgcgagttcgaggccaggttccgcctgtcgtgggttcgcaccccggacgcgatgctattcga

SEQ ID NO: 286849 - DNA, 122 bp, Homo sapiens
agctataatatactcatttagcaaaatcctgaatacaagacacttcttagctctagtcctcgtgttgtacatcagatccctttcatgttgtacgttattaatttttttaaaatagagccttc

SEQ ID NO: 286850 - DNA, 122 bp, Homo sapiens
cgaggaggacgcgtgtgggttttgcctgcaagggttctgaccacttggggacagcgagggcgcgtagaggcgcggagctcactacgcgccgcctcactcttccgcgcgaggtgccgggtggc

SEQ ID NO: 286851 - DNA, 122 bp, Homo sapiens
tcccttcgccttttctcactgagggccctcttggtgtcctccagcacttccagccactctcgtttgattttagcattttcggcctggaaaatacggctctcggggaacataagcagcttgaa

SEQ ID NO: 286852 - DNA, 122 bp, Homo sapiens
cgctggggcgtttccaggcagcgcgcgcctcctgccggcgcgcggggaacgcgcagcctgcggtgctcccgggagcccccaggaagtcctggcttgaggcccggtcttgccccacttttatc

SEQ ID NO: 286853 - DNA, 122 bp, Homo sapiens
atggggcccctgctcccttctgtccctctgctcccacagggccgttcctggccggttctccggagttacgatgactttcgttccctggatgcccacctccaccggtgcatatttgaccggag

SEQ ID NO: 286854 - DNA, 122 bp, Homo sapiens
agtgatctgcctgcctcggccttccaaaatgctgggattacaggcgtgaggcaacgcacccggccagattcatcacatttgttatccttccatggtcagctaggaaattttttctttttttt

SEQ ID NO: 286855 - DNA, 122 bp, Homo sapiens
ccctggaagaaaaactatccctcccaccctgccccgttgagaaccactgatgtcgaccaacgattgtcctgagggtcaatgacaccctttcaaagccaaaattattttcatactaatatgaa

SEQ ID NO: 286856 - DNA, 122 bp, Homo sapiens
agttcctttcccagttttgtcaagaattccctgagcggcagacaccctcaaagtaaaaaacgggaaccacagagaaggaaaaagaagaaccacaagcgttttgagaaacaaacaggctgggc

SEQ ID NO: 286857 - DNA, 122 bp, Homo sapiens
agatgtaaaatggaaattgaagtgtctctcccaggccaccatacacggatcaaacaggcacggtctattctaagcgttcattaatagctggtctctgagggcctgggcagcagccagaggat

SEQ ID NO: 286858 - DNA, 122 bp, Homo sapiens
cccagagaccgagacgccgccgctgcgaaggaccaatgagagccccgctgctaccgccggcgccagtggtgctgtcgctcttgatactcggctcaggtgaggattcaccggcgctgaactgc

SEQ ID NO: 286859 - DNA, 122 bp, Homo sapiens
tggaagagcgtcagcctggaccctggtcttgggcttctctgctggaatcctgggcagccccgggtgctgcggcgagggtcaaggccacacaaagggcaaggcaggcagacgagccagtcaca

SEQ ID NO: 286860 - DNA, 122 bp, Homo sapiens
aactctattccaaacacagatacctaagagatccaaagttaattcactttcagggacctccgacaagatacagctagttttaagagaaaacaccaggactagcagagatctgaggaaaatat

SEQ ID NO: 286861 - DNA, 122 bp, Homo sapiens
ttggttttcctatttcccttttcctggatttcctatttccagaagcaaggctcctctacacgctcagaaatgccaaatgaatataaaggaacaaaatggcctataagaaaatgtgtattaga

SEQ ID NO: 286862 - DNA, 122 bp, Homo sapiens
cagccaacgactgggctcgccataccttcctcttcctagagtaggcgttcagcaggtactcggtaaatgcaggttgaattacagaaacatcaaataagggagagacgaagagaaggtccgaa

SEQ ID NO: 286863 - DNA, 122 bp, Homo sapiens
gcctccagaagccttgactcatgggggaaggggaagtaggaaaaggcacgggtcacacagcgaaagcaggagcaaaagagaaagctggatggggaagtgccatagctttcgaaggaccggat

SEQ ID NO: 286864 - DNA, 122 bp, Homo sapiens
tctgtattttttggagtatttcagctctcctctctgtgtcatttctcactaaactcctttcgtaagccagcctttaaatgttcgttcattcattcattcatccatccatccaataatttctt

SEQ ID NO: 286865 - DNA, 122 bp, Homo sapiens
gtttgaaaattcgcttcagtttatgtcttaaattttgtatgggctaatattgttgtcaaacgcagtaggtgatttttattagaaatattgtttgccagatggcttgcttaaagtcagttaaa

SEQ ID NO: 286866 - DNA, 122 bp, Homo sapiens
cattgggagatgggaggatactccactgacttacggttggcagagtttaggctgccacgccggctgtgaagaggaccggagggtagacaacagggtggaccggccccgtcttcccgcctgct

SEQ ID NO: 286867 - DNA, 122 bp, Homo sapiens
gccccgcccccagcccggctcgcggcagccgccccgccccggccccgggggatccccacccgcgctgtcaccggccgcgtcctcaccctagcctggacaaccccatctctttgcccggctct

SEQ ID NO: 286868 - DNA, 122 bp, Homo sapiens
gtagcgtttctttttagtgcctgaggcagctctggctcggagagccttttgctagccccacggggacctctgtgcacggatggacccgcccggacctggcgggaagcggcctggcaggcggc

SEQ ID NO: 286869 - DNA, 122 bp, Homo sapiens
ggcaaggcagcctcgccgggaagggccctttacatccaggtagcgcgagccgcgccggcccgggacagctcacatgaccgagccccgcgctttgaacggcccttgcctccagccccagagat

SEQ ID NO: 286870 - DNA, 122 bp, Homo sapiens
tgatatttaagatgtgtgtgtgtgtatgtgtgtgtgtgcacgtgtgcgtgcacgtgtgctcgtgtgtgtgcgcatatatagcgttaagtgctccggcttcaatatccaatgatgtgggttct

SEQ ID NO: 286871 - DNA, 122 bp, Homo sapiens
actgtgtgctaggtacacggcgttagaggggggtagggatggatgtggatagaatattgacgtatagaagcctgtctttgtctcaagatacacacccatttcaggagcagtgagttttcaat

SEQ ID NO: 286872 - DNA, 122 bp, Homo sapiens
cccacatctcagacgatgggcggcggggcagagacactcctcacttcctagactggatggcggccgggaagaggcgcccctcacttcccagactgggcggcctgtcagaggggctcctcact

SEQ ID NO: 286873 - DNA, 122 bp, Homo sapiens
tgaatgagaagcaaccttcctgaacggtcacaggaaggcagtgttggtatcttgagtaggcgtgaaccactcccctgctccggggggactagagaagcgtagcccgtgtccttccccatctg

SEQ ID NO: 286874 - DNA, 122 bp, Homo sapiens
ccattcattcagcaaacatttcctgagtgcttatctgcatgtaggtgttgtgctgcaagccggagttacaaagaagacgtgggcaccactctcaaagagtttgccttctagagatgggggta

SEQ ID NO: 286875 - DNA, 122 bp, Homo sapiens
tcaaaagaattacatttcaattttataccaactatcgtgcctcctcatgaatcccttccccgcacaacctggaaaccctcgcctggcgtcggctccatctccagatgttactcactggctac

SEQ ID NO: 286876 - DNA, 122 bp, Homo sapiens
tcacattttaaaatggggaaacagcatcgctcgagccagggacgtcgaggctgcagtgagcgtgatggcaccactgcactcctgcctggtcgaaaaagcgagacccccatctctaaaagtta

SEQ ID NO: 286877 - DNA, 122 bp, Homo sapiens
gcctactcacaggaccccgcgggtcgcggtgaccctggcctcacgatccccaaactcttacgagctttggggccccgtgggccccgagccgcagaccccagacccaccaggctcagcgcagt

SEQ ID NO: 286878 - DNA, 122 bp, Homo sapiens
ctgggaaggaccagagaagtgcctattgcgcagtgagtgcccgacacagctgcatgtggccggtatcacagggccctgggtaaactgaggcaggcgacacagctgcatgtggccggtatcac

SEQ ID NO: 286879 - DNA, 122 bp, Homo sapiens
ggagtgacagctcgtgacggcctccgagacgccagctgccccttctcggctgtgtggcttcgacttcctgattctcccacgaggtccctggctgggatacccgctggactctgtggctggcc

SEQ ID NO: 286880 - DNA, 122 bp, Homo sapiens
cgtccccaccccgtactcccaacacccaagggaattgcagcccactccacttgtcccccacgacagactccctgacacaaacagtcccctaggtaatccccgccaacgccacacgaaaacac

SEQ ID NO: 286881 - DNA, 122 bp, Homo sapiens
tccttctctgccttcccgctgacacctgcaggaggcagaagtggccgatgagggcaggggcgggaggtcgggagatcaggagtccacgcaccagcctcgggaggacttccaagcctgctgcg

SEQ ID NO: 286882 - DNA, 122 bp, Homo sapiens
ccacgggcacatctgggcttttccaggcagtccacagagccatccccggcctctttaccgcggagacactgtgaggtcacacacgcagaacacaaaacccccacgcagcagcccctcgcgag

SEQ ID NO: 286883 - DNA, 122 bp, Homo sapiens
tccaactctgggggctgctgcagctctgggggtggtggctgctgcctgagccaccacaggcgccacaggtcccaccgtcgcagaccccagagctctgactgctgcagccagccctcgggggg

SEQ ID NO: 286884 - DNA, 122 bp, Homo sapiens
tcctgtcaccgggctccgctcagtcaccaccaccgtcgccgccctcttcctcaggctcctcggcgacccgcccacttaaccgcaaccaatgagagcagagggagacagaaattgccgtacgg

SEQ ID NO: 286885 - DNA, 122 bp, Homo sapiens
tgggtcctgacgcctcgcagcaaggagcgcagctgtccccgcatcacagatgaaaaccggcgtctcaggaatgaaaaaggagcccttgtcacatctcacagaaccatgagtcgggaaacaga

SEQ ID NO: 286886 - DNA, 122 bp, Homo sapiens
gtggggcccagggctgggagccaagggcagctgccgctcagaaggagggagaaggccccacgggctgagctgggtgcgccatgaaccacatgtgagatccggggcatacagggaggcaatgg

SEQ ID NO: 286887 - DNA, 122 bp, Homo sapiens
tctcccacaggtcctggtgcttgatggtcgaggccatctcctgggccgcctggcggccatcgtggctaaacaggtactgctgggtaagtcgctgctcgtggcccctctgtcatgggcccccg

SEQ ID NO: 286888 - DNA, 122 bp, Homo sapiens
gtggatttgaagtcaagggtcctggattccaaaaccttactagttcccctagtaaatgaacgtgggcaagacattgaatcttgcaagcttctgtccacatctctactctgaggctgagcata

SEQ ID NO: 286889 - DNA, 122 bp, Homo sapiens
aagtgagatttcaacaggtagcagagagcgctcacgtggaggaggtttggggcgccgcggcgccacccccacccctcctcgggaccgcgcctatttctaaagttacacgtcgacgaactaac

SEQ ID NO: 286890 - DNA, 122 bp, Homo sapiens
gggtctgtttgtccggcccccaggtatcatcgcagctgggctggcttctgagacgacttgcggagtcatccgtgaccccatgagtgacaggcctctgagacatgcagcagcgcgtggcctcc

SEQ ID NO: 286891 - DNA, 122 bp, Homo sapiens
gagtgggagcaagccaggatttactggcacccggagggtttagtcttttattccatttcccgtcactggtgcccagagtcttcttgggcaaaagggaatgggggggcttcatcgccgacttc

SEQ ID NO: 286892 - DNA, 122 bp, Homo sapiens
ttgcaaaccttgaggaccatgttcctcagcacctcccactgcaggctttttgttgataaacgtccagcaggttctctcaggcccgtgagcctccctgttgtaggctggggctacccagacct

SEQ ID NO: 286893 - DNA, 122 bp, Homo sapiens
tccccatccagatgtacaacaaactcttggagacttggatgtgttacacagggggccggtcgggtttccatttaggaccaggagattataatcactttattttagcaacctccttactacaa

SEQ ID NO: 286894 - DNA, 122 bp, Homo sapiens
tacaccgatgatgaagcattttccaggtttctaagggggtgatgcaactgactcactttccgggtcagtggggacttgccctcaagctgttctggcagcggtgggccactctttctcagctt

SEQ ID NO: 286895 - DNA, 122 bp, Homo sapiens
tgaaattaaaaccctcacactctgactaatgctatttctggctgtggagctcgatgctgtcgatgtgtgactatctccacgtctgccggcctagtggctccacgtctgaagagttgctgcat

SEQ ID NO: 286896 - DNA, 122 bp, Homo sapiens
tgtgtgtctgtgtgtgtatagtctgcatgtgtctgtttctctgtgtgtctgtgtgtatgtcgatgtgcctgcatatgtctgtgtgtgtgtgtatctgtgtatgtctgtatttgtgtctctgt

SEQ ID NO: 286897 - DNA, 122 bp, Homo sapiens
aaacgtcacacgctacgcacgcgcgtgctgtcccctccccgcagccagttccctccccttcgggccagtgcgcattgcctaccccgtgctacaggacttcgctgagcgccaggcgcagggac

SEQ ID NO: 286898 - DNA, 122 bp, Homo sapiens
tcctggaggctgagacaggagaatcggttgagtctgggagttcaaggctacagggagctgcgatcacgccgctgcactccagcctgggaaacagagtgagactgtctcagaatttttttaaa

SEQ ID NO: 286899 - DNA, 122 bp, Homo sapiens
ttatttacaaatgggggagtattatggagattttttttttttttttttggcaatgtaaatcgagaattaagattttccaactgtatagtatttgagtaaacacactgcttgctgcatagttc

SEQ ID NO: 286900 - DNA, 122 bp, Homo sapiens
cgtgcccagtcgagaatttgcatttctaacaagatgctgatgctgctggtcatgggatcacgctttgaggaccactgttctagctggagagacagaagtgtttcttagtgattaacagaggg

SEQ ID NO: 286901 - DNA, 122 bp, Homo sapiens
agacatctctgctccgagtagatagagcaaacctatggggtaggttggtgagctatttcccgtgcactgggaatgggtaaggtttcttgatcccaagagggagctagggacttaggatagca

SEQ ID NO: 286902 - DNA, 122 bp, Homo sapiens
acgtcacagtccatgccttcacatggccttcatggaccaccgcgggtgttctttttcccccgagtctttatgtacttgggaaaagtggccagggttgaaaggtgcaatgagtacacggcaga

SEQ ID NO: 286903 - DNA, 122 bp, Homo sapiens
ttaaattaagtgatggaacagcctggcctgttccatgtccttgctgctgtctcccgtgctcgctcctctggggctccaagcatgtggctgagaatccatttgggacatccgttccccatccc

SEQ ID NO: 286904 - DNA, 122 bp, Homo sapiens
gtcagaagcgggtcaggcacacagggcatttctcctgtggtcggcaggcagtgggcccaccggcaggcagtcagttcacgctggccactggcatcccgaacacgtccctcctaaccttcccc

SEQ ID NO: 286905 - DNA, 122 bp, Homo sapiens
cccccgcccggcgactttgtcacagactctgttgccctgtgatctgcaggtcctgggagacgcacagccaagatgccagggcaccctggaagctgtgaagtggtgcgtatgcggggttgggc

SEQ ID NO: 286906 - DNA, 122 bp, Homo sapiens
tccagggagggaactgagaagccgcgagggacaggcccccaacggagatgctgatgaggccggcagccttccagcttccagcgccatcttccttgggagtttgggaaactcagtgcctccag

SEQ ID NO: 286907 - DNA, 122 bp, Homo sapiens
ctggcacaggtcccaagtgcagagggggagctggtcaggctggtcagtcgggcgggggggcggggggcatgtttctggcctgctgtcaccatggaaatggcagtggctgcagggtgtgtgtg

SEQ ID NO: 286908 - DNA, 122 bp, Homo sapiens
ttgtcagaggaaggctcttctcatttacccagtggttcctttgcacacaggcagggccagcggccaggccctcatccaccagagtagaccccagcacgagcaggcgtcgcaccctggcgtgg

SEQ ID NO: 286909 - DNA, 122 bp, Homo sapiens
tttcttgccttgtggccagaaaaatgtgtggaaggggataggaaaccataaattcccagtcgggctggtttttaaacaataagctggggtcaatgtgccagctcagctgagtcaccacagct

SEQ ID NO: 286910 - DNA, 122 bp, Homo sapiens
tccccaacctccctccagccccctctgccttcccatccctcacaaaccggaggaaggcagcgaagcagctcatattcatgaaccgtaattcaatcaggcggcgattcctctgggctcggggc

SEQ ID NO: 286911 - DNA, 122 bp, Homo sapiens
ttgccagaaaagaatggtaacatgaacagcggagcgtgagagcgtcaccgggggaagggacgagattgatgggcagagcgctcacttctcagaggatcgcattccgaggaccgcgcgaggaa

SEQ ID NO: 286912 - DNA, 122 bp, Homo sapiens
tgcattcaacaccggttagacgtgcattcagcttcatcactgcatcacacaccgggtagacgtgcattcaacactgggtagacgggcattcagcttcatcactgcatcacacaccgggcaga

SEQ ID NO: 286913 - DNA, 122 bp, Homo sapiens
cgatggggatccccaagggtgggccgagagctgacggatcggcagcgctggttaaggccccgcacctgcagccccagtgaccttgaacgattccgctctgcggcgggtgtccctaaactagc

SEQ ID NO: 286914 - DNA, 122 bp, Homo sapiens
gattagaaatggccacagatcctttgcagctcctgcagtcaagaagtagatccatttcgccgcctcccccgaccccctcattagggactgacttgtgactagctttgaccaaagaaggtatt

SEQ ID NO: 286915 - DNA, 122 bp, Homo sapiens
ggcaagcagcaatttgttcatgcgcagttaacgctccctaaactgccacttgctcagctccgcgcctaaggtgtctattagtacgcctgcgctgtgacctagaatgggcgcatgcgccgagc

SEQ ID NO: 286916 - DNA, 122 bp, Homo sapiens
gccttaaataagatgggagttccctgagaaaagaaatggaagttcttagcccggcagctccgttcaataccgtggaagtcacgtggattccaacacccgcggtctttcccttggctttcagg

SEQ ID NO: 286917 - DNA, 122 bp, Homo sapiens
gcctgggcaacagagagaagctctgtcttaaaaaaaaagaaaattcattttaatgggttacgttacagggttgaggtcaacctacagacacaaaataggttaactgaatttggttttttttt

SEQ ID NO: 286918 - DNA, 122 bp, Homo sapiens
cgcaagcagtcagggtcctggccccggaagggttcctctgccacgggccaccagccccaccgtaaccgcacgccctcagccccaagcccgcgcaccagtggctccagctccttggtgtcgat

SEQ ID NO: 286919 - DNA, 122 bp, Homo sapiens
ctgaacccccttgtttatattggggggatgtctttgatctgggaagtcactgggtcaggacgcaggtcagattcacctttgtccccagagcacagcatcaggatggcccagaagtgatcact

SEQ ID NO: 286920 - DNA, 122 bp, Homo sapiens
tgtgagttgggactttagtttttctgaatccaggtgaattttcggaagcccacgtgctttcggcctttattaattaattcattcccaagccaggttcgcctgaccacacctcgagcgccggc

SEQ ID NO: 286921 - DNA, 122 bp, Homo sapiens
gatcacgtttttgttattgttttatttttcctcctgtatactcaagggagcatgttcaatcgccaaccttctatgttatgttttaaaactgtgtccagtcagccctgggaatgtgagggaag

SEQ ID NO: 286922 - DNA, 122 bp, Homo sapiens
gccgagtctcagtcgctgaactcgacagacctttaacgcccgaccacaagaactctcccacgccggaccgcaaaggcaccccaacccaaaggctccaccgcccaggccgccagctctcccca

SEQ ID NO: 286923 - DNA, 122 bp, Homo sapiens
tcgccgctgaaaaccctgccgccccgcgcggctcccgaaaataccatctccgtattgtctcgaggtcagggaagggagaaagagagaaacacacacagactgatggaccgactgagggtcaa

SEQ ID NO: 286924 - DNA, 122 bp, Homo sapiens
tagagacttggatcttctaatagatgcttcaaagggagcagtttctatttccggtgcccacggagatctcgagggagatttctccccacccctgctctgacgtcacgatgttcttgtttttc

SEQ ID NO: 286925 - DNA, 122 bp, Homo sapiens
gggacacagcgtgggtctccccggaacaagactagacaggaggcatgtgaggacgagctccggccaggccactgccagggactctggcagcgggttgcccaggcgcctgcagactctgaaaa

SEQ ID NO: 286926 - DNA, 122 bp, Homo sapiens
tttttatagcagcggctggcgtctgtggccctttaaaggcgctcgagctggtgcagtcaccgcggatcgtgtgaaagcaaagggccggctggggaacggagtccacgcggccacgcgagtcc

SEQ ID NO: 286927 - DNA, 122 bp, Homo sapiens
ctctcggatgtagtgcttactctggtcctctggggttatctaaaatctggtttccttaagcgtaaggcagagctctaaccgggagaccaccctgcccccaagggtgggggttctgggaggga

SEQ ID NO: 286928 - DNA, 122 bp, Homo sapiens
tttcacttcagcaggctccaggtaacctcctgatcaccaaatccagaaacgctgtgattccggacagacaatgtaagggtgtcgttgagaggggactcagtgccagggttggaatcccagcc

SEQ ID NO: 286929 - DNA, 122 bp, Homo sapiens
acctcatgatccacctgccttggcctcccaaagtgttgggattacaagcgtgagccaccgcgcctggcctagtgatttccttagcaacaaaacgacggagtttatcttctttaaagatacca

SEQ ID NO: 286930 - DNA, 122 bp, Homo sapiens
gtcctgtggctcctcgccctcgggccaaaggcgatcagtctgacactgggttgggggatccgcctcagagtttctgggcagcgtacagtgacgcggtggaggtcggtaacggctggaaaatt

SEQ ID NO: 286931 - DNA, 122 bp, Homo sapiens
gcgcgggggcgggggcaaaaagccaccgtggcaagggcaaaaagccgcaaaaagccgcggcggcgggggcaaagagccccaaaaagccgtggcggcgggcgcaaaaatccgcggggccgggg

SEQ ID NO: 286932 - DNA, 122 bp, Homo sapiens
caagccgaggtattggccgccataacgcacactgacttttgtaccgcctttgctgtcttacgcattttgtcggaataaaccaacacacggaggttgggtaatctagcccctttaccctgtac

SEQ ID NO: 286933 - DNA, 122 bp, Homo sapiens
ctgtccataaaaggcttttcccgggccggctccccgccggcagcgtgccccgccccggcccgctccatctccaaagcatgcagagaatgtctcggcagccccggtagactgctccaacttgg

SEQ ID NO: 286934 - DNA, 122 bp, Homo sapiens
aacacccctggtctgccgcaggagaccctgccgatgccactcagggtcaagactctggcgcggtggaaactgcagagcaaaaggaaacacagacaaaaacagtgagaaggtaaaaagagagc

SEQ ID NO: 286935 - DNA, 122 bp, Homo sapiens
caaggtgtcgtctccacttcatgaatgagataaagtgcaggctgagggtctccttcgccccgccccagttccggtgccgatctccccttcacttccattggggcggttccccgggcctccaa

SEQ ID NO: 286936 - DNA, 122 bp, Homo sapiens
tgaatatgcatgagccggttggaacccgggagtgggaagcccgtgcagaattcgtcccaccgtcggcaaacaggcgcggcccagcactcaattattcatgaggcttgcagatgaggggcccg

SEQ ID NO: 286937 - DNA, 122 bp, Homo sapiens
tctttaacagtatgggaagtcttagcctgggaaatgaagtaagagggaaagaaataaaagcgataaggactggaaaggaaaaagcaaactattattactactgttattcacagctgcagata

SEQ ID NO: 286938 - DNA, 122 bp, Homo sapiens
cccctctatttatggtccacatttagtctctggattttgaccctgcctctgtgaggctggcggctgggataaacagatatacagagaagttaagggactaacccaaatgtacacagtgagaa

SEQ ID NO: 286939 - DNA, 122 bp, Homo sapiens
acacacacactcgcacacacacggcgtcacccgcgcacacgcacacgcagagcctctcagcggctctctgcagttctcaggaaatgaatggggggcaacccggggaactgttgtacttgcaa

SEQ ID NO: 286940 - DNA, 122 bp, Homo sapiens
agctcaccttctcagggaggacttcctgaagccctgtctaaaacagacaacccccaatgccgccaccgcccacatcactcctcatcgtagcacttatccctgacgttatcgtacagatttgt

SEQ ID NO: 286941 - DNA, 122 bp, Homo sapiens
gtgtcattgttcacactcatgagctggaagaagctgtggtttcattatcttctttcctaccgccaagcactgtgctaagaacagtaaatacccaatacacagatgtttgctgaactgagtag

SEQ ID NO: 286942 - DNA, 122 bp, Homo sapiens
cctttgggcttggtccttctcacgccaccaatccgcgcctcttgtcccgccccctgcccgcgagtccgccaatcccgcccttcggaaagcgtcgcctggtatccagctgccggagcgggtcg

SEQ ID NO: 286943 - DNA, 122 bp, Homo sapiens
gtcgagctgtggcctcgcccctccggtggatctccgaagttcactgttctgacaattacacgccatgacttttgaaaaaccagctgaggccgggcgcggtggctcacgcctgtaatcccagc

SEQ ID NO: 286944 - DNA, 122 bp, Homo sapiens
aacttcccgaagctccaccccgtcttcccagcgaacaggtgggcactgttcagagagaatcggtcaggaaagggggcgggcttcatccaggaccagcagtccagtttttcagccttcaggct

SEQ ID NO: 286945 - DNA, 122 bp, Homo sapiens
tgcctgcctttggcaagccctgggttctttgctccccatatagatgtctaagctaaaagccgtgggttaatgagactggcaaattgttccaggacagctacagcatcagctcacatattcac

SEQ ID NO: 286946 - DNA, 122 bp, Homo sapiens
atagtcttttttaagtgtgatgcatgcgcacacaggcacgcatacacacacgcgcacacacgcgcacacactgcactgctgccctgtccttggcagacattcctgtggggtcatgttcgaaa

SEQ ID NO: 286947 - DNA, 122 bp, Homo sapiens
tcggaagccgcgaccctggggagttgcaaggtcccgcagggatgggacccctacagcccccgaccagggtgtccgcgccacctccatctccccggacccactgcgtcttcctccccacccca

SEQ ID NO: 286948 - DNA, 122 bp, Homo sapiens
gttcaaagttgttggctacagcgggttcctctttccgctggaatcacatcctctgtggctcggagacattcccagagatttacataaagcagcgtgaatcacccagacagaaactgagaaag

SEQ ID NO: 286949 - DNA, 122 bp, Homo sapiens
accacttcccttataaaactgaatgccttgcattacttcccgttttcacgatctgctgctcgtctcaggctcgtagttcgccttcaacatgccggagccagcgaagtccgctcccgcgccca

SEQ ID NO: 286950 - DNA, 122 bp, Homo sapiens
atgtctgggaacgcaaaaagatgttatacttattgtagcactcaattagatatatattctcgagaataaaatcaactgaccatgtatgtgtaggtctattcctagtggttcttttcttggct

SEQ ID NO: 286951 - DNA, 122 bp, Homo sapiens
gtttccatctactatacacagtataactttctgaggtcaagatctgtatcttttttatctcggtatccatagtacctagcacttggaagacactcaataaaagcttcctaatgaatacccta

SEQ ID NO: 286952 - DNA, 122 bp, Homo sapiens
ccaccagggccggggacggtgccgggcagtgccgctgggagacgggcttggtgcctaggccgggtgggggtgagctaagcacacccagccccgctccaccagactgaccttgccaggctggg

SEQ ID NO: 286953 - DNA, 122 bp, Homo sapiens
ctcctcccgcccgggggccgggaccgcgctgtgcccacggagggaactgggcgtctctggcgcactggggctccagctgcatgatcccagctcagaccttaagcctcagtggggtgtaggtg

SEQ ID NO: 286954 - DNA, 122 bp, Homo sapiens
ggcaccctaaaggtcgtttggaggtctagcaagcacttcatggtctcctccggaaagggccgtggcaaagcctagtaccccgatcaggaagatgacttctggccctcgggatgcggtgagcg

SEQ ID NO: 286955 - DNA, 122 bp, Homo sapiens
tatggacacgggtttgaggctccagccccggatgacaacactccggaaatatgcgagcggcggcggaagcggaagtgcctcagcggtaggggccggggaagtgtctgtagcgtccctccctc

SEQ ID NO: 286956 - DNA, 122 bp, Homo sapiens
tttcagcaccccaccccctcttcagttgaaggtagcaagccattcccacagtgggtggcccgcagggttatctgccacatcaaaaagagaggctttatggtactctaccaagcatccttaca

SEQ ID NO: 286957 - DNA, 122 bp, Homo sapiens
ggaaggggtgtgagcatacagcccagactctaaactgggcccaagggtcgcgctgtgagccgcagagggtccaggtgcccagagcctgcccatcctcatcccacccggcagctctgccttcg

SEQ ID NO: 286958 - DNA, 122 bp, Homo sapiens
ctcccaaacacactggtatctgcagtccctgtcccttcagaagtgggaacacagtgccttcgatgcatcccttctagtgttttgacaccctgacgactcatgagtgcagaacgggggaacag

SEQ ID NO: 286959 - DNA, 122 bp, Homo sapiens
accagaccacctcccacctggcccccctgccttcccctctgtctgccgctcacaactcctcgctggccttctgagcctccagttgtgacctccagtgtcttatgtcaggctgcagggaggtt

SEQ ID NO: 286960 - DNA, 122 bp, Homo sapiens
tgaatgaagaggaaatgaagttctggttcgcagagggtctttggttctgaaaagcgttgccgtggttctagccttcctcgcggtggagggtgttttgctttctgcgcggtttctgtgtgggc

SEQ ID NO: 286961 - DNA, 122 bp, Homo sapiens
cacagatttggggtgttatgtgactgaaaggaacgaggctgcaggaaagccacaagataacgatccgtttctgtgtgtcagctgtattcttcctcgagtatcttgtttgtgtacatgctttt

SEQ ID NO: 286962 - DNA, 122 bp, Homo sapiens
gtatgagggtcttagtccagccgggcacagggcagtgggcacagagctgcgggcatgggccgtgggcacagggtggtgggagccggtggctcctccctccagaatgcgcctggcttgcttct

SEQ ID NO: 286963 - DNA, 122 bp, Homo sapiens
gcatgtgcacggacatgtcaatttctcatcaatttctcagcgctcctatcgacagacacccgaattctcattcccagcaaaactcatccactggacccgagggaggagaagaccccttctcc

SEQ ID NO: 286964 - DNA, 122 bp, Homo sapiens
gcgtccagcctggctggggtcagggctgggtgttggggatcaggtcaggagtttccagcccgaagggaaggggtgtcactgctttgagaagaaaacaagacgcaaaccgtttggaccatcgt

SEQ ID NO: 286965 - DNA, 122 bp, Homo sapiens
ggaattgcagaatcctgagagacaggccagctataatgtttcactgtccctttattacctcgtaaatatagtgtcaaacattatccaaatcatttccagctcttttcctggcttctgcataa

SEQ ID NO: 286966 - DNA, 122 bp, Homo sapiens
cccgaagcccgcccgcctcaccacgccgcgcctcacctgacgccctggctgccgggcgagcgctgacataagtggatgcgaatctcacgcaggcccagctttgccccgactcctcgacttgc

SEQ ID NO: 286967 - DNA, 122 bp, Homo sapiens
tgccccccccaagaccgccccctagatcgccccccgggaccgccctctctagaccgcctgcgagactgtccccggaccgccccctggaccaccccctaggcggccccccgagctgtccctgg

SEQ ID NO: 286968 - DNA, 122 bp, Homo sapiens
ctgcgtctatttatggagaagcgggactccaggccgcgtttccggttccctgcgccgccccgtgattggtttagggccatagagtccattttacgtaatcggcgttgattatggttcccact

SEQ ID NO: 286969 - DNA, 122 bp, Homo sapiens
attctggcggcgtgggattcaggatggccttgtaggtcagtgttaactgtattctgactgcgtgggattcaggacggccttggtaataatttcggcctccgagttggtccttgagtaaaaca

SEQ ID NO: 286970 - DNA, 122 bp, Homo sapiens
ggattgcaagcaatcagcactgtagattcttcttccctaactgagcaatgtttgaatttgcgcctttcagacaaatgcattaataacatttagccactaggtatttgtggaagaaattggaa

SEQ ID NO: 286971 - DNA, 122 bp, Homo sapiens
ctctaaaggcaataaggggcggccatgccggtgtggtaccacgctgttcctccaggaaaccgtttctttttttccttctttaaaagcaaacagaaaaagatatatatatatatatatatata

SEQ ID NO: 286972 - DNA, 122 bp, Homo sapiens
acgcaaatgtcgcttggaaagagcttggcacccaggaaagggcggcgtggggcaggggggcgcatgcccactgtcggctggcaccaaaagaccttttgtggctatgaaggcccagtgtccct

SEQ ID NO: 286973 - DNA, 122 bp, Homo sapiens
tatacgctctggacacgcaggcccggctggcagaaaaaagggcctcagctgcagcggtcacgggtcacagcagatcacccctcgcgtgctgggcctctccctgcagggcacaggccccagcc

SEQ ID NO: 286974 - DNA, 122 bp, Homo sapiens
ctcaaactcgacctcaagtgatccgcccaccccaacctccaaaagtgctgagattacaggcgtgagccaccgcacctggccccagtatatactattttaatacttagaaatgacaaccccgt

SEQ ID NO: 286975 - DNA, 122 bp, Homo sapiens
ccgggttatcaatcacccagctggatcccgaaggtctctgcctaatcacatttaattgctcgtggaggcccactctcgccccgggccggccgccgcgctcaattactccccaaatacctgcc

SEQ ID NO: 286976 - DNA, 122 bp, Homo sapiens
agaaagtgtattttgagttcatttagactcctaggggcttagtcctctgagcatcccaatcgtgaaatctttaccagagctcttcctcttcagtgggcctttaagctctgcttatgaatcag

SEQ ID NO: 286977 - DNA, 122 bp, Homo sapiens
ttggctgagaaacctgaggctcacagaggtaaagacgcttgctcaagatctcatagctaccgaggttccgaattctggcttagattctcaaccccactaatccatccccaccagaagcccct

SEQ ID NO: 286978 - DNA, 122 bp, Homo sapiens
cggtgcagcagccctgcaaaggtaagtgccatttgtgtgagtgcatgcctggagtctgtacgattgtccttcgtgctttttgtcctcagtctgtttctcgtagaaaagcctgtgattgtggc

SEQ ID NO: 286979 - DNA, 122 bp, Homo sapiens
gtgaggggcttttttcctataaaactagagaagggggacactgagaaagagattggggaacgagaatcatatgatacttcccacacagatgtaacctatagcagattaattgtgtaataggg

SEQ ID NO: 286980 - DNA, 122 bp, Homo sapiens
agtggcctaatgattggatggatgcaaagaggaatggacgaatcagagtttagcactaagcggcccttctgattggataaaatggagctatgtttggatccttcccttggttccaaagctct

SEQ ID NO: 286981 - DNA, 122 bp, Homo sapiens
ggctgagggatccccaagatctcaggctgtgctgtcaggttgtatcttcaacttcaatgccgtttggctggaagcttttataaccttcgactgtgatgtcaccacctagctcccctcctcct

SEQ ID NO: 286982 - DNA, 122 bp, Homo sapiens
gtcgtccatgtgctgagccgggtggcactgagatctgcatgccacctccgttccatcgctcgtctccacgtgttagttggagtgtgcgtccagcctggagcaggttgtatgttctcgtccac

SEQ ID NO: 286983 - DNA, 122 bp, Homo sapiens
ggggtcccatcttcagcgtctctccagagcggggtcctctgggtccgacaggaagcacagcgccggggctctgaagggtcagaggtcaaagggcaggggtcagaggccaagcatgtgagctc

SEQ ID NO: 286984 - DNA, 122 bp, Homo sapiens
agcctgttggcgcaacagacatccagctaagaacctagagcgcatgtgcgcaaggagtggcggaaaacatgggtggagactaactgcggcgctcactgggtgcccgagtgcacgccagcgtt

SEQ ID NO: 286985 - DNA, 122 bp, Homo sapiens
agtcctagactcaggtctggaacagtgttattctcagtgtattccatcagccaaagcattcgcagacccagattcaagtggataaatattctcagaaatatactggagaagagagctagtga

SEQ ID NO: 286986 - DNA, 122 bp, Homo sapiens
gctatcactatctgatacactatatattctgctcatttattttctttattttctgtgccccgactcttacaacacgatggaatgcaagctctacaaggacggaggtttccttttgctcactt

SEQ ID NO: 286987 - DNA, 122 bp, Homo sapiens
ttctactcaccttgtttcttgaatacagattggattaatctaattttaaaatgtgcatgacgaatgagcatttgtttatttgagggcaatgtatgggaagtgcctgctgtgtgactgcaggg

SEQ ID NO: 286988 - DNA, 122 bp, Homo sapiens
cgaatcttccatcaggtggcggcacacacttaggtgggagagaaagcagacggagataaacgaccactgctcaagagaacagccatacaggatggaatcacgccagtagtattgttcctgtg

SEQ ID NO: 286989 - DNA, 122 bp, Homo sapiens
tgggcaagtttagacatagaagccttgagagagagttttaaaaagaggaagcaattgctgcggagatgtaggaaggcaggaagtgagcaccagcccaagacagcagtatccatgagggagga

SEQ ID NO: 286990 - DNA, 122 bp, Homo sapiens
tcctcattgctggcatctggtgaacagcaagtcagtgccagccagagaagaaaagacacacgatgccatccagagtttgcaccacccgaacgcgcccactcagatgagcccagaggactcga

SEQ ID NO: 286991 - DNA, 122 bp, Homo sapiens
gcgcgagaggagctatgggggcggggccgagccttccctccattgtgtgtgattggctggcgcgcggcgcgggggcggggcggcgtgtgttgggggatagcctcggtgtcagccatctttca

SEQ ID NO: 286992 - DNA, 122 bp, Homo sapiens
ccctggagactgtctgtggaatgactgtgtgacagcctccagtgaacaagttttctgtagcgggtgtgctcctttaaagcaggggccaccacaacttgttggcatttccctgggtgttgcta

SEQ ID NO: 286993 - DNA, 122 bp, Homo sapiens
cgtgcgcacaaacgagggcgcgcatgtcgggacggaactagaaaagctcagtggggctggcggcaactctaggtctaacatccctcggaagttcgtgcagcggcctcgctgaaaatggcttt

SEQ ID NO: 286994 - DNA, 122 bp, Homo sapiens
cgcagctgcctccccacccagacccgccgggccgtccccgcctcccctcgaagccctccccgcccccccgcaattacctgctccgccacggcccggaacaggcacgacccgtccttggcgac

SEQ ID NO: 286995 - DNA, 122 bp, Homo sapiens
gttcctatttagcccttgacctcaaatgtgactgacaagtggagtggtgatttgggaatgcgatcagacacctgtccactgaggaatggactgaagccaacagctcattacacagaaaacta

SEQ ID NO: 286996 - DNA, 122 bp, Homo sapiens
ggctctccagccatgagattttccggcccagccccaaccccgacctaagtaaccggctatcggccacccattggctgaagtccctgagcacctgttgggaggaaggctgctgcgtgcagccg

SEQ ID NO: 286997 - DNA, 122 bp, Homo sapiens
agaaagccagcctttggtcagaagcagcttctggcgcccctggctggactctgtgcggtgcggcctcgttgccaaactacattttccggcagtacccgggacgccgggcgcagagcggagag

SEQ ID NO: 286998 - DNA, 122 bp, Homo sapiens
caccctcgccaggaaaggagagggaaagagaggagggaaaaaaagaaaagaaagaaaaggcgaagaagatctcgaagccgacacactttttgtggtttccaggaatagaaaaggacagagaa

SEQ ID NO: 286999 - DNA, 122 bp, Homo sapiens
gcctccaatttactctgattatgcagaacaggtctgagagggtcacagccattagaaagacggtcactcagcctggccaggctaaagggacaacaagccttgtaggagagtcctgagagtgg

SEQ ID NO: 287000 - DNA, 122 bp, Homo sapiens
agcacggtaaagcattccttacttaccaatttagtgacgtcttttacattattagtcacacgattcctgcagatcccttcagttttgacgagaggattaaataggagcagctgaagataaat

SEQ ID NO: 287001 - DNA, 122 bp, Homo sapiens
aaagaggtggactctaagagaaggtctttggtcgattacattgtccagagagggagtggccgcttgggcggattttgggagggatcagccttccaattggttgttattagaaagggggttgg

SEQ ID NO: 287002 - DNA, 122 bp, Homo sapiens
caggtttgagggtggtccccaggcctcccatcccagccactctcccccagctgttgctgccgctcagtggttgcttagcaacggagctagcaagacaaaaatacttcagttggcatctccct

SEQ ID NO: 287003 - DNA, 122 bp, Homo sapiens
gcctggggttggggggcagggggtagtgggcagcagacaccccctgacctgggggcatgccgggggctgctgcctgcctggctggtaggagctaagaggtttccccttgtgagcaggggcag

SEQ ID NO: 287004 - DNA, 122 bp, Homo sapiens
tccacataaagtcagaagggaggaaaggcgcacgcgcattggggacttgactctggaaagcgtccagaccaaggtcagcggagagtaggcatgtagcttctgcagttgctcctcctcaccct

SEQ ID NO: 287005 - DNA, 122 bp, Homo sapiens
caggataaaaaccacgcccagagaagctgcgcctctctagcacacccctcccagccccagcggccactagcgacaatatggctcctaagcacgtgacccggggcagacggatttccggttcc

SEQ ID NO: 287006 - DNA, 122 bp, Homo sapiens
acagataccaggtctccccgctacactcaccaccgcttccagcttcccgcgtagaccctgcgcatgcgcgcatcggacaccaagcgctgccccacgcccctaccaacctgggcgtccgctgg

SEQ ID NO: 287007 - DNA, 122 bp, Homo sapiens
gagattccgtccccctcaccgcctccagtttgctatcttcgagcctccgcggagaggcaacggcgggcggcagcccacaagcaaaatggcgccgggcagcttcatcccctccccctctgccc

SEQ ID NO: 287008 - DNA, 122 bp, Homo sapiens
gcagctgctgaagcaaatatgaagcattcacaaaggaagctcctcttcccttgaggctcacggcatacactttatttcccagagtggaagggagaatctacccaaaaatggaaagtacagga

SEQ ID NO: 287009 - DNA, 122 bp, Homo sapiens
cactcagcgggctttatgcatatggaagggacaccgtcttctttcccctctcccccagggcgcggtttcccagcgcttgttcgagagcgagttggcagggttccccaaaagatacaggagga

SEQ ID NO: 287010 - DNA, 122 bp, Homo sapiens
gactccaggtgacctccggatccgccctctaagtcagtggcctgcggcgggcgtgggcgccgagggaaggaagtgtgcatttgaataaaagtaaaagtttgttattgttgttgttttataac

SEQ ID NO: 287011 - DNA, 122 bp, Homo sapiens
tctagaacattgccatcagcagcagtaaacttctcccatgggctccacgtgtagtcttttcgccagctgcagtgtgtacaagactatgatcccagggcatgtaagaagataggaatgcagtg

SEQ ID NO: 287012 - DNA, 122 bp, Homo sapiens
cgcgggggaccctcagcacgccgtccacggacacggctccctcggccacagtctcctccccgccatcagacgcactgcagacctggggcctttgtttcccaggcagggaaatgggcgtgctg

SEQ ID NO: 287013 - DNA, 122 bp, Homo sapiens
gagggagctctggcagccacgaggcactgaagccgttgttgggaccccccattcctcttgcgtgggagtgtttggtatggatcccactgacttttcatgctgggaccgcactggaccgccca

SEQ ID NO: 287014 - DNA, 122 bp, Homo sapiens
cacccaccactcccagcacaccctggtgagtggcccgcccgggcttggttctgagccctgcggtgtttgggttcggtcaactctagaaatcacaatgttttggagaaaaacctgggtttctc

SEQ ID NO: 287015 - DNA, 122 bp, Homo sapiens
tcctgcattcagctaagtgcggcagaagagggtgggcgacagggctgtgcagcgaccccccggcccaagtctagccctccgctggtactgcagccctagtcgctcggaaacctcagtgggct

SEQ ID NO: 287016 - DNA, 122 bp, Homo sapiens
gctctttgcagtggtctaccatcacggcaacagtgcgacgggtggacattacactagagacgtcttccagatcggtctgaatggctggctgcgcatcgatgaccagacagtcaaggtgatca

SEQ ID NO: 287017 - DNA, 122 bp, Homo sapiens
ccaagcgagaggctcacctccacctccaagctagagctcccaggtctttatccttctgggcgtttccttgcaaatctacttccttgcaaagtagagggatctacgctggccttacctctggg

SEQ ID NO: 287018 - DNA, 122 bp, Homo sapiens
tcagcacgttcgcggcatttgtattcttccatttctcagcctaagccatttagtgtaacccgagctcaggataattgccacgtctctgccgtgatactttttaaaacaagataatgcttctg

SEQ ID NO: 287019 - DNA, 122 bp, Homo sapiens
tagtgggaagtcccgcgaaacccggtgcatctggcacgtggccaggagccatgacaggggcgcttgggaggggccggaggaaccgaggtgttgccagtgctaagctgccctgagggtttcct

SEQ ID NO: 287020 - DNA, 122 bp, Homo sapiens
ggtgctccgggctggctatttcctccctcctccgggatgggtgtagcagggtgtgtactccgcatggggtaacctcctagagccggctacgccccaggcgcctcctttcacggccttgtcac

SEQ ID NO: 287021 - DNA, 122 bp, Homo sapiens
ttcagtggcggcataatagctctttttatagatgttgcctaaattatttagtcatcccaacgtggtttgacgttggattgttcctcttgtgtgcatttgtgtatgtggttataacaaagaat

SEQ ID NO: 287022 - DNA, 122 bp, Homo sapiens
gagcggggccgtcatattttatcgtttcattattacggaagcggggggcacgtttcgttgcggataaggagaagcctgaatattcgctgttaataagcaattacagacgccgccagtaatcg

SEQ ID NO: 287023 - DNA, 122 bp, Homo sapiens
ggccgcttcccacttccaagatggctgcgggtggagccgaccaggtaaggggccccctgtcggatgtccgtgggggccctgcgggcacaaaggcccgctcaaggcagctcctcgccactccg

SEQ ID NO: 287024 - DNA, 122 bp, Homo sapiens
tcctaatgcaagctgaaaatgtgatagtaaagaggcccaaggtttcactgataaggctaacgtgttgtttctgtatttacagaaaaaatattaataggcatatttatagatgcataagccaa

SEQ ID NO: 287025 - DNA, 122 bp, Homo sapiens
cgccgccgccgctccggctctagcctccactgcggccgcggctgcttgggcttctgcagccgccgccactgctagggccatcccgctgctgacgtactgtcatatactgcgcggagccagac

SEQ ID NO: 287026 - DNA, 122 bp, Homo sapiens
agggagtggacaggttgcgtgcgtgctctgacggtgggatccagaccccctcctctcctgcgttgaaggtgccaccgggcctcatccccagccacatcacatcctgagcctcttacaggcag

SEQ ID NO: 287027 - DNA, 122 bp, Homo sapiens
ccgccgctgctccgcggggactcggggagctcgaaggaactctgggaaagtttcccgctccgccccggcccgagcggaagcgcggatggggcgtggcccggtagctgtggccgcgcccccac

SEQ ID NO: 287028 - DNA, 122 bp, Homo sapiens
ggctccaaacctccctcatcttgctacacagccacccctgaggccttctgggccagaacccgcactatcaggtcccttctgtgacctcagtgctgacgtcacagcctcacacagagaagatt

SEQ ID NO: 287029 - DNA, 122 bp, Homo sapiens
atgagggtggtgaggacacagactgcgaccagaacagaaatatgaaaatgtgaatgacagcgtcccccgtgtgtggaatgtggggattaaaagcatttatcaacctctaagtcctgatctga

SEQ ID NO: 287030 - DNA, 122 bp, Homo sapiens
aagcagtgctatatctcattgattagtcatggctccctagagcatcatgtcagaaaagaccgtaaggctctgagggggctcaatgggaaagagttccattatcgattaggaatgtctgccat

SEQ ID NO: 287031 - DNA, 122 bp, Homo sapiens
cgtgctgtaggtgaaaatggatttttatattgaaattcaaataagtacagggatttgagccgattgttccattgcattccggtcgtctcaggaaaagaggtccctgtgtgatttatttgtgg

SEQ ID NO: 287032 - DNA, 122 bp, Homo sapiens
caccctagcgcttgtcttggctcctagaaccaggggcctggacgctgctcagggcagaggcgccccctctgaggggctggcccctcagccgcactccgagacagccgcccccgggaccgccc

SEQ ID NO: 287033 - DNA, 122 bp, Homo sapiens
ctcgcgggcgccaggcgcgcggagagcggcggctgcgcctgcgccaacgccgtcagtccgcggggcccgatcccgacacctaactccacagagaagctctgctcctaagggaaagggaagac

SEQ ID NO: 287034 - DNA, 122 bp, Homo sapiens
caccaggggagccagggcagattctctatgttgcagccagaaggctgtgggcgtacaggccgccaaggggagaaacagaaccgacgccggcctaggcggatctgcaaaaaaaagcgggaaag

SEQ ID NO: 287035 - DNA, 122 bp, Homo sapiens
gtcatacagagataatcagctcttttccaaccaaccaaagtaagagttcttttttaactgcgcggttacaactaaccaaaactcaggaaataactcctggaagcaaacaaacttagcagtga

SEQ ID NO: 287036 - DNA, 122 bp, Homo sapiens
ggtgatccacccaccttggcctcccaaaatgctggaattacaggtgtgagccaccacgcccggccaaggatgtttttttttaattgaaggtacattgctgcctgaaacaaagtcagggttcc

SEQ ID NO: 287037 - DNA, 122 bp, Homo sapiens
aaagtttacagtcaacactccttgtgtggggtcagtcctagaaatggcgacgctgctctccgaagataggaaagaaaaggacctcattccattgagccattgaccgaaatattttctcaaca

SEQ ID NO: 287038 - DNA, 122 bp, Homo sapiens
aaaccattttagctcatgtaccatgtaagaacagggggcattcagatttggcactcaggccgtagtttgctgacccttggcttagaccagtcatagtccattgcctggagctgggttcgctg

SEQ ID NO: 287039 - DNA, 122 bp, Homo sapiens
cccaacacactcagaggagtcagtgcttggcaaaaataatttaatattccatctgggcagcgctctgaggtctgcttgtccctccctggcccctgtgccctacctgacccactcagggacca

SEQ ID NO: 287040 - DNA, 122 bp, Homo sapiens
gctcacagccaaacagcccagaccaactgcaacctcactgacagttacttgctccaaactcgcccctagtctgcaccggttagcttcaggcccatcatctcttacttgattggctgatgaaa

SEQ ID NO: 287041 - DNA, 122 bp, Homo sapiens
ccggccaccaccaccaccaccatcaccaccaccaccacccgcccatgatcgctctgcagccgctggtcaccgacgacccgacccaggtgcaccaccaccaggaggtgatcctggtgcagacg

SEQ ID NO: 287042 - DNA, 122 bp, Homo sapiens
caaaaggaaacaccttgagctggccaggagctaccagcgtctgtctacacctgggtgagccgtactggtcgtagtggccccaccctacaaggatgcccttcctacagtattactgatggctg

SEQ ID NO: 287043 - DNA, 122 bp, Homo sapiens
cctgtatcctctgcgccgcctgggccgccgcctcgggcccaggccccgcgcctccgacgccggcttggttttgaccttcgtgcttggcccaagccagcgctggtggccccgggaccaccttc

SEQ ID NO: 287044 - DNA, 122 bp, Homo sapiens
tgtgattctcctgcctcagcttcccgagtagtggggattacaggcacacaccaacacatccggctaactttttgtatttttagtagagatggggtttcactatattggccaggctggtctcg

SEQ ID NO: 287045 - DNA, 122 bp, Homo sapiens
atttgttacacagcagtctccattcgcttttctccatactccattattcactattttctccgtatgccattgtccatacaccatttctatcatacatttttcattctctatattccacctct

SEQ ID NO: 287046 - DNA, 122 bp, Homo sapiens
agctcctgggaggctaacgtcgtgtcctgggcctctgtttagacagctctagaactgaggcgagtggagcagcaccaaggcccggagatcggggcagggcagctgctgtcgccgccgccgca

SEQ ID NO: 287047 - DNA, 122 bp, Homo sapiens
agacccaccccctgattcaattacctcccactgggtccctcccatgacacatggtgattacgggagctacaactgaacataagatttgactggggatacagccaaaccatgtcacaggttat

SEQ ID NO: 287048 - DNA, 122 bp, Homo sapiens
accatggaatgccttttccagacgccagcagaacagagctgccggatgttctagtgagcgcgtttctgctggtgaacctgactgtgcccttctttgtgggatctgcccaggatggcgtcgct

SEQ ID NO: 287049 - DNA, 122 bp, Homo sapiens
ttacaagcattgtctcattccatcctcacaaataaacccatgaggtaagcaggatgaactcggttattcttttttttttttttttttttttgagacagggtctcactctgtcgcccaggctg

SEQ ID NO: 287050 - DNA, 122 bp, Homo sapiens
gagctggcagggagaggtgccaggccctggtgccggggcgcgccctacgtctggggaccccgtcctggggagttcctgggtcccgacagcttcaaggcctctggctctgggcggcctcagca

SEQ ID NO: 287051 - DNA, 122 bp, Homo sapiens
atgtgggctccattctcacagaaggaatcctttccactgtggttcttcctgtgtggcttacgcatgagacaagtgtaagaaagtggccatgtcaataagaaaataagccagctctttggtgc

SEQ ID NO: 287052 - DNA, 122 bp, Homo sapiens
acgctattgattatttaagaaaacaacccatcttgagataatgttgctggctaacattcccggagttttctcgaaaggactttttctatcttttacttaattactttagagataagaacttc

SEQ ID NO: 287053 - DNA, 122 bp, Homo sapiens
ccaaagaaggaaagtggaatattactctcaatgttggaaataataccaagttgtcttatgcggaatatgaaggtacttttgcaataagtgaagccagatattttcctccagccctgaaattc

SEQ ID NO: 287054 - DNA, 122 bp, Homo sapiens
ccccaggcaaagatgagtgtcgaggccttttatgtgccagggattagggaaatccagctccgtaacttcccactgtccctatcattgctccatagggtgggaagggagaatggtaggcacat

SEQ ID NO: 287055 - DNA, 122 bp, Homo sapiens
cgggaccgtgaactggatctttcgggggctgttgtcttgctccatggctggggcggcggccggtgggcccgcgctgcggcgggagggaaggcggcgggactcggggctggggcgggcgcgct

SEQ ID NO: 287056 - DNA, 122 bp, Homo sapiens
tttcgtttataataaaaattgattttggcacatattgatggctttcccatgtgcctttttcggttctgttctgatatttttctatacagtaattaaatttgtggttttgttctgaactaaaa

SEQ ID NO: 287057 - DNA, 122 bp, Homo sapiens
taagaaggcaaatgtctttgacagtttctttttcaccccagccccagagctccagcatggcgctgtctgctcctccgctggttcccgcctaagagcagcggcagtggctcacctcgggagct

SEQ ID NO: 287058 - DNA, 122 bp, Homo sapiens
ttccaggatgcgcagaaacacaggagccgtgatttctccagcagccacgtgcctttcgtacggcgaaaggccccctttcgggccatttatcacaggatacctcaagcaaaggggaactgtgg

SEQ ID NO: 287059 - DNA, 122 bp, Homo sapiens
aatgaaataaaagatggatatggagaaggtggctggagtggggagatgtgcacagctcaacgcctgcctccaaactggcctccttactaccagcagagcctagttttatgaaaaagcctcct

SEQ ID NO: 287060 - DNA, 122 bp, Homo sapiens
gcaatggcggcctcgctgtccgagcggctcttctcgctggagctgctggtggactgggtgcgtttggaagcccggctgctgccgtcccccgctgccgcagtggagcaggaggaggaagagga

SEQ ID NO: 287061 - DNA, 122 bp, Homo sapiens
atatttaaaagatggtcattctgtcatagacaaccctagaaaatcccagcagcagatgtgcgactcatctttgttttttgtttttttttttgtttttttttgagatagagtctcgctctgtt

SEQ ID NO: 287062 - DNA, 122 bp, Homo sapiens
ttggattactgacaatgaggaaaacaaatataggcaatattctcttttaacaaagtgctgcgaagaaaaataaagcagaataagggaatagagaactgggattagggaactgctattttata

SEQ ID NO: 287063 - DNA, 122 bp, Homo sapiens
aaagtttgaaagttataatgatgttagtaatggcctagatcacgcacaaacctttaatcccgtctaaagtttctgggcaagcctccttccctctttgtgcttatagtacctatacaggcctc

SEQ ID NO: 287064 - DNA, 122 bp, Homo sapiens
ggtaacatgtccgcgccctgagccacggctctctgggcgcggccatcttggtagatctgccgtacagaagggaaacagttgttcttgtgtcattaaaccgggatgactctcctgaaagcaaa

SEQ ID NO: 287065 - DNA, 122 bp, Homo sapiens
gtgacagatacagtggcagtgagtcctggatgctctgtgagcacagcaggagtgcgcagtcgagaagggagtttgttggagaaggtggggctgggctaaggctttgaaggataagaatgagt

SEQ ID NO: 287066 - DNA, 122 bp, Homo sapiens
gtcttcttcctgtcctcggccgagggggagcagatcagcttcctgttcgactgcatcgtccgaggcatctcccccaccaagggcccctttgggctgcggccggttctaccaggtgcgtgtgg

SEQ ID NO: 287067 - DNA, 122 bp, Homo sapiens
aacagcctttgtagatctcagaatggatcagaatcatttgttaccgaacaagcgatgatgcgggcccaagctgcatgggtccgggccgagggcgggcccggggcgaagggggctgggcgggt

SEQ ID NO: 287068 - DNA, 122 bp, Homo sapiens
gcccttgacccttgaccacggactctccgtgtaactcggaagagccgtgattttaaaacccggcctcggggttacagaagcccgagatctgggaggcgtccgggacctccctcccagaaccg

SEQ ID NO: 287069 - DNA, 122 bp, Homo sapiens
tggccggtttcacccagctcagcgtcctcaggtccatccatgctgcggcaggtgtcgggacgcgcctcctccttgaggctgtatctatcatgctccaccgtatggaaggaccacactgtgtc

SEQ ID NO: 287070 - DNA, 122 bp, Homo sapiens
ccccggccgtgacccaggcccggggagctagtctccgcccttcgctcttacggatcccctcggagtacgccgcaccatgcagctcaggctcttccggcgcctccttctcgccgctttgctgc

SEQ ID NO: 287071 - DNA, 122 bp, Homo sapiens
aaaagattgtaattccagcagctctgtttgggaaggcactaccgcggcgagtccagggcccggccgggggtcggcggctgccgggcggctggggcgaccgcggaccgtgcgggaccggtagg

SEQ ID NO: 287072 - DNA, 122 bp, Homo sapiens
cacctcctgatgaaggaggagccatgggagacttgaccaatcgactaccgcatctgcagacgtgcgcggaaatggcacgcccgtttccgtgtgaacccgaaactgccacttgctggctgagg

SEQ ID NO: 287073 - DNA, 122 bp, Homo sapiens
gattacaggcgtgaaccaccgcgcccggccttaacatccttatacatgggttaccagcatcgcgacgaccttctgcaaatatttttatagggtaaataactgaatgaagtcgctgggcgcat

SEQ ID NO: 287074 - DNA, 122 bp, Homo sapiens
atacaggaggtgatgaagccagggtttggctacaggctttctgcctgcagagttataaaccgtattctcctccctacaaacttatataaggacattaaaaaaaaaaatcaaaaccatgtgca

SEQ ID NO: 287075 - DNA, 122 bp, Homo sapiens
gaagaacgtgtatgagcagcaaaaatactatgggatgtccagccgggacgcagtggaggacgaccgcatttatggcgggagcagccggtcccgggcaccttctgcatacagtggggagaagc

SEQ ID NO: 287076 - DNA, 122 bp, Homo sapiens
cttttttctatttgtttttcatctggatatttgattctgcatatcctagcccaagtgaaccgagaagatcgagttgtaggactaaaggatagacatgcagaaatgcattttaaaaatctgtt

SEQ ID NO: 287077 - DNA, 122 bp, Homo sapiens
acaaaatgcaaaggcttcccagcagttgtggagtctggttagaccatatgtgggcgtctgcgggaggcttcgtagagtgccacagactctgtcctattccacatcttgattcttggttgaaa

SEQ ID NO: 287078 - DNA, 122 bp, Homo sapiens
gctgcaatcagccaccaaaggacacttaggagcagcagcagattgcctctacaggggatacgttgcgacgcgcatctgatactgaaatgcatgcacagtgcccgctcagatttttttttttt

SEQ ID NO: 287079 - DNA, 122 bp, Homo sapiens
gagtgacaggaccgggggggcggagccggcgcggctgcccgaggtggagccccagtggtgcgagtagctccagcggccacgctgaggcgagggtgacacaccatgctcacggcccctggaga

SEQ ID NO: 287080 - DNA, 122 bp, Homo sapiens
tcctcgctcctgccctcccccgccctccccaacccacgcccgggtgggccaatcgctgctcggtattccaggcgctttctcaggtttctgctgatcttgcagcgcccagaaatggaccgagc

SEQ ID NO: 287081 - DNA, 122 bp, Homo sapiens
cagagcctacccctgaggcacaggaacccggtgccctcggcagggtgggtgtggtgaccacgctgctggctgggtccctgaagcaggcactgctcccacttccggccccagacccccatatc

SEQ ID NO: 287082 - DNA, 122 bp, Homo sapiens
cgctgtttccaagcggcgagatctcgcctagtaaccggcagctgaggttcactagcgcggcgttgtggccccgcccccggagccccggctggaggaagaacctgtctcccgcggcgccccag

SEQ ID NO: 287083 - DNA, 122 bp, Homo sapiens
gcggggccatgcccttcagtgggcacacttctgggagcccgtcctgagctcggtcactgacgtcgacggccgcctggcggcgctcgagccgctggccgagagtgacgtcatcagaggcggtc

SEQ ID NO: 287084 - DNA, 122 bp, Homo sapiens
ggcaacggaggcggcggcggcggcggctgagacatagctcctggctctcgtgtctcgctccgcgtcccaggcgaccctcaaaagctcatagcccagacccccaccaacccgactcggtccag

SEQ ID NO: 287085 - DNA, 122 bp, Homo sapiens
cgaggagcgcggcccaagccatcgcggggctggcggggctggcggggctggcggggctggcggcctggcccactcccaggtaaagttccccgcccccacccggcgcgcccctcccactccgc

SEQ ID NO: 287086 - DNA, 122 bp, Homo sapiens
agcctcctggttatttttctgtggctcctattgctttaaagacaaaaggtgaaacagggccgggtggtatttcttcagctgtaggtggtattgaggtctaaaaatgcaaacaggtacttcaa

SEQ ID NO: 287087 - DNA, 122 bp, Homo sapiens
ggtcctcaactcccgtggacgctgaacaatggcctccatggggctacaggtaatgggcatcgcgctggccgtcctgggctggctggccgtcatgctgtgctgcgcgctgcccatgtggcgcg

SEQ ID NO: 287088 - DNA, 122 bp, Homo sapiens
tgggcatgtgtgctcttcagcaaacttttcaggctcccccttctggactcacactaagaccgtccttccctgcctctctgaagcaaggtatggccatgtggctttatttggtggcagaaatc

SEQ ID NO: 287089 - DNA, 122 bp, Homo sapiens
tgctgctggctgggacccagccgcagggtggcggggcgcgctgcatgaccccgccaccgccgtccccactcctaggcacacaggtcaaggaggaccgcgctgactacaaagagttccaggac

SEQ ID NO: 287090 - DNA, 122 bp, Homo sapiens
gctttcattctaatgaaggacatagacagtaagcaagatagataagtaaaatatacagtacgttaatacgtggaggaacttcaaagcagggaaggggatagggaaatgtcagggttaatcga

SEQ ID NO: 287091 - DNA, 122 bp, Homo sapiens
tgcggagagctggggtggggcccaagtgagtatccgggagggagccgggcctgagcaaggcggtgagctggggcgggacccaagtgagtaatggaaggggcggggcctgaggagggtggtgg

SEQ ID NO: 287092 - DNA, 122 bp, Homo sapiens
cgaggccggggtcccgggctcagcctcccacagagagctgctggcggggttttgtgcagccggatgccatcctgcggtcggcggtggcgggcaatgaggaggggggctcggccccgtggggc

SEQ ID NO: 287093 - DNA, 122 bp, Homo sapiens
agctcgagccctcacgaggccgtgggtacgaccggaagccgcaggtgggtgaagcggaaacgcttcaaaccgggatgttgcgggccgtagcgcgtgggcggccgtggggtcttgggcgcgcg

SEQ ID NO: 287094 - DNA, 122 bp, Homo sapiens
gttatccattgttcacctgaaacttccaccccaccattcaaagtacaactgaagaataaacgatctaacagattcttgtgagacacattatcagataaattaatccagtgacacatgaataa

SEQ ID NO: 287095 - DNA, 122 bp, Homo sapiens
gcaagggcctatcaggggtgggtcggggcatccgagcgggtttgacggaaggagcggcggcgacggaggaggaggatggaggcggtggtgttcgtcttctctctcctcgattgttgcgcgct

SEQ ID NO: 287096 - DNA, 122 bp, Homo sapiens
gcgcaacaaatctcaggtaaaagagcatcagatttcagaagagctgtattctagacttggcgcaggcccctttggggagaagagcccaggggctatagagaacagaggtttgaaggaagcaa

SEQ ID NO: 287097 - DNA, 122 bp, Homo sapiens
ctgcagagacccggagaattggctggtgtgcaaaacccacacgcttgttgtcagccgtgtcgtgaatcgaggaacagctttcctttatccacaaaaaaagcgagttttcattccctattctt

SEQ ID NO: 287098 - DNA, 122 bp, Homo sapiens
aaggtgagtagtaggccaggcgcagtggcttaggtgaaggccacaccagacttgggcctacgtcttggccttccaggtcagcagagtggcctgggacttggatgccttggggtcacggagtt

SEQ ID NO: 287099 - DNA, 122 bp, Homo sapiens
tttaaagctgtatacattaaaggtgtttatatttaagtatttttaagaaaatgtctttgtcgtaaatgcatataatctgaatcttctgtaagtcctatgtgttgtagttaatatcatgtgat

SEQ ID NO: 287100 - DNA, 122 bp, Homo sapiens
cccctcccctctccctccaggtcaatttatgactcaaacatgagataagccctaggcagacggtgacgctgacttccccgtgggggcgcggggagagaaggatgaggcagacgtaccccctc

SEQ ID NO: 287101 - DNA, 122 bp, Homo sapiens
cgccttgttgcgtcactccacgaacgacggcggctggccggcaacattattagccgaacgcgccctgaaatctgatacacagttgtgccggcattatctctaggatccaaagggtggtctct

SEQ ID NO: 287102 - DNA, 122 bp, Homo sapiens
gcctcgcctagtgaatgctccagcaaagtggcgtgtgtctgtatggtgaacgtgtggttccgtgcctgcctttatgtcatgtcagggtgttgaaatagatgactgaatggttatcaggaaac

SEQ ID NO: 287103 - DNA, 122 bp, Homo sapiens
gcaaatggaaggcctaagcctacatacaagtggctaaaaaatggcgaacctctgctaactcgggtaagcaagttaatggtaattgtgccttagtcttgactataacgtttaatatagcctca

SEQ ID NO: 287104 - DNA, 122 bp, Homo sapiens
tcccatagactctgggctcctgccctcctcgcccccaacccccttcctaggaaccagccccggcttgtcagagagccagctagctgtcaaccccaccccagctggccagttaatgagtgacc

SEQ ID NO: 287105 - DNA, 122 bp, Homo sapiens
acagagcgggacaggcccagcccctgcctccgaggcccgggaagatacgcagatccctatcgcaccccgactcccggttatcagaaaggaagatccaagcggggcttaagcccccgtcaccc

SEQ ID NO: 287106 - DNA, 122 bp, Homo sapiens
ttaatagtaccctatacctgttgtaaaaataaggtgcttgcctccagaggagagtgagcccgggggaaagtgtctagacactctgtactgatagaacatgttggtctagacataaatttgcc

SEQ ID NO: 287107 - DNA, 122 bp, Homo sapiens
gccgggggccgcgcgggccgggagttgggtgggctgggggacaggcgcgcccgcgccgcccgctccagctgggctagtgctgcacattccggccagcccctcctcaagaccccattcccaag

SEQ ID NO: 287108 - DNA, 122 bp, Homo sapiens
tttaaccccaacccccccgggcgggaggccgcggagaaccgggagtcgcgaccgaggaagcgtccccagtcacctcctagccccccacacagagccccggggagggtgaggaggaggaagag

SEQ ID NO: 287109 - DNA, 122 bp, Homo sapiens
cagtgctcatcccagagccaggataccagctagtgttgactgaaggggcagacaggtagacggacagatggggggactaagtgaattctatccccagctctgccccatctgtccagagttca

SEQ ID NO: 287110 - DNA, 122 bp, Homo sapiens
cagggctcgaagagtcaaggctaatgccagagaacggacccggatgcatggcctgaatgacgccctggataacctgaggcgagtcatgccatgctactctaaaacccaaaaactttccaaga

SEQ ID NO: 287111 - DNA, 122 bp, Homo sapiens
gatgggaagactgagggctggggacacacacaggccctcagcatcttcctcttccagagccggagcctccgacggaagggaagcaggctgccccagcggagaacgaggccccccagacccag

SEQ ID NO: 287112 - DNA, 122 bp, Homo sapiens
gaaggcagcgagctggcaccagcggcctccccaccaccccgaaggcgccctctgcagagccggccccagccccgtcatcctgagtggggtgcaggctccaggagggcacagctttcccagcc

SEQ ID NO: 287113 - DNA, 122 bp, Homo sapiens
cgctggcgtcagggcgcggtgggggcaagacgggtgactggcagcagggcggtgccgggccgagaagggcgcctcacctggcgcctcctgccttcctttccacctcaggttgcagagagccg

SEQ ID NO: 287114 - DNA, 122 bp, Homo sapiens
ctaaccaagcggtacctgcctgagaacaagggccgcggagggacgtgagcgcctgagcctcgcctggaaattcaccagcaagaaggcagaaacagccatgaggtgacgctttcagagccaga

SEQ ID NO: 287115 - DNA, 122 bp, Homo sapiens
cacagagttcattcatagacctgatgttcaagctctggctccagtaactgccatctgggtcgcttacccagcctgaatctcagtgttctcaactgtataatgggctaatgatacctccctct

SEQ ID NO: 287116 - DNA, 122 bp, Homo sapiens
gccgatccaaccaaaaacgaccaggcagaccagaagcggaaatacatcatcggtgaacaacgctctccctcccacgctctctctcaagccgggcctcctcgggaggcctcacactcccccgc

SEQ ID NO: 287117 - DNA, 122 bp, Homo sapiens
ccacggaacagcgacgcgcaagcaggtctctttcgtcagcgtaatccctccgcagaaagccgcgcactagttttaatcacgccccaccccctggccgctggcgccacctccgccactcgggc

SEQ ID NO: 287118 - DNA, 122 bp, Homo sapiens
atggtgatgtcaggggttttattatcctagctcaccagcagttcatggagacttgtgatccgggatttggcaatgtgacacatacccagtactcactgagctaagaaaagagagacacaaac

SEQ ID NO: 287119 - DNA, 122 bp, Homo sapiens
gctggtgtggagtcctaagactcatccacgctgctcacctgattctcagcagacagcagccgtgggctttgcaatttagaaatatgtgtgaagaaccactgggtgcttagttctgcacacct

SEQ ID NO: 287120 - DNA, 122 bp, Homo sapiens
atagatggtgataaagaaggagttcggcggtaagaaggggctgagaggaggggaaatacgcggagaagaaatgcaaaagaaaaggaggcctaaagccgctcccggttgcatggcaacctttg

SEQ ID NO: 287121 - DNA, 122 bp, Homo sapiens
atctgctagagtaacaaactcatgacactattcagagttcaaacaattctaaacactattcgcatcaacttccttttacttttttccctttaatttgagaacgtttattaaactaggtccaa

SEQ ID NO: 287122 - DNA, 122 bp, Homo sapiens
cacggatgccccccggagccgcgggctggcaggtaccgaagtgtcctgccctggggctggcgaggggagggcaaatctggaatcccccgggcaccccccagcccgaggctgctccagacacc

SEQ ID NO: 287123 - DNA, 122 bp, Homo sapiens
agaaacttctatcgaggaaacttggagcgcattgaagttatagatcccagcaaaggttctcgtggccagggatgttgtctctgtaacacagcttggcttttaggacattcctcccctactaa

SEQ ID NO: 287124 - DNA, 122 bp, Homo sapiens
ccccctaaactcgctccacgaaatgacccctccaacctggcacgcccgctctcctaccttcgcccagggctggccgttatctctgtgctgtcacgcggggaagtcccatctgaactggggcc

SEQ ID NO: 287125 - DNA, 122 bp, Homo sapiens
acggaccccggcagggcgccaagggagaggctgggtggggctgcgggggcctacccggttcgcggagatgctgcccttcagcgccaccaccgcatccatgcgtcgcctcatgtactcgtggc

SEQ ID NO: 287126 - DNA, 122 bp, Homo sapiens
gttttatctttggaggattttccctattaaattgtacgatctttgtggggaggcacagttcgtgtttgtatttgtaaatcccagtagctcatacaatgcttatgcacttaaataggtcccag

SEQ ID NO: 287127 - DNA, 122 bp, Homo sapiens
gggcagcgggggcgctgcgggggctgcttgtctgggctgcaccgggtgggcggcgggggacgccggcaggagggagtcgggggtacccccgccggcctgccctgagccccctgcccgggtct

SEQ ID NO: 287128 - DNA, 122 bp, Homo sapiens
ttatatactgagcaaaaaaatatgttcctataaactcttgaacattacaccacatgactgcgaaaaaaatgattgtcttgtaaatactggacaagaggcaccgaagtgttgtccctgacaaa

SEQ ID NO: 287129 - DNA, 122 bp, Homo sapiens
gatactgagcgccggagagagcccggccgggcgggacgctgctgccccctcgtggccgcacgtgttaccgcaggcggcccatggtgtctgggtcactctggccctcccgggctcagcctctt

SEQ ID NO: 287130 - DNA, 122 bp, Homo sapiens
acgcggacgcctgcctcagagggcgacaggacaccaacgggcccctagccgcgtaatggccgctccaaccgctgtctcacattttcatggtgcctttaggacccaagttggtccgcagcaca

SEQ ID NO: 287131 - DNA, 122 bp, Homo sapiens
tctcgggcgcctccactgcgcacctgtgaactgggacgggcgctccttgagcaggcgtggcgctgctgtgcagctgctgtgtgtcccactgcccctggggacttgcgttgtaggagatgccc

SEQ ID NO: 287132 - DNA, 122 bp, Homo sapiens
tgggtgactcagtgggcaggacatttggggtcagagcacttgggaagtcaggctgacctgcgttaaagcctcagctctgctcctaactagtgactacggtcagatgccctcccttccctaag

SEQ ID NO: 287133 - DNA, 122 bp, Homo sapiens
ttgctccgtaagcgtcggttccagttaggccgttccatgaacccgagggccaggaagtaccgctctcgcatacccttggtccgtaagcgtcggttccagttacgccgttgcatgaacccgag

SEQ ID NO: 287134 - DNA, 122 bp, Homo sapiens
ccgcccccgcccctcgcataagaatacccatctgcctagcttcggaaattcactttcccccgcccgtcccccggagcatcccttgggcccctgtccctttcccggggctcttctaccttaac

SEQ ID NO: 287135 - DNA, 122 bp, Homo sapiens
gcatggccaggtttccgaagtgcaggagcatctggtccgtggccagctgctgctcgatgacgtcatccccgtagatggccacgatggccacgcagatgaaaaggtggaagtagtccgtctgt

SEQ ID NO: 287136 - DNA, 122 bp, Homo sapiens
ctcctcctcttgaaaactctgctatggctgagttacccagaggaatcttagtcctgctagcgctgcgatgcccattgcccagtgtgtcagtcctcattctggggcgccaaatggggcagcat

SEQ ID NO: 287137 - DNA, 122 bp, Homo sapiens
cgtggagggcggggcagcagagcaggtgaggggcactgtggctaattgcgtgacgcggcccgaaccgagtgggaggctgcagttgggccgttggagggagggagggcaggggcgatgccttt

SEQ ID NO: 287138 - DNA, 122 bp, Homo sapiens
cctgaaggggcgtggtgaagccgggccgcactcacgaaacgctggtagaagcggactagccgtggcttcccatggttgttgaaaaccagaatcgcctgaatcatctttgccagccacggttc

SEQ ID NO: 287139 - DNA, 122 bp, Homo sapiens
ggaggctgaggcaggagaatcgcttgtacctgcgaggcaaagttcgcagtgagctgagagcgcgccatcgcactccagcctgggcagaagagtgaaactctgtctcaaaaacaacaacaata

SEQ ID NO: 287140 - DNA, 122 bp, Homo sapiens
gaaaccgcccaaggcctgggatgcggtgtgattcctccccctggtggcctgaagaggtgccgccgcgatttctgctctcgagcggagggttttgccttagtcccgtgcgtaaccctccgcct

SEQ ID NO: 287141 - DNA, 122 bp, Homo sapiens
ccggcggctgtgccgggctgctatgcagggccggggtcgagcctgggaccttggtggtcccgggctgcgcgaggcccagcaccgagttcctgggcgcccccagagccgggccgacggccggc

SEQ ID NO: 287142 - DNA, 122 bp, Homo sapiens
aacaccacgagagtgagcaggccggagagtgcagagcagatgcagcacacggctggccaccgctgcggacaacaggccatgggcctggggagcgaggggtgcagggaaacagagacctggat

SEQ ID NO: 287143 - DNA, 122 bp, Homo sapiens
atcccccacgatctggacagcctgaaccctgcagctgcagttctggcatacgctgccggacgcctcggaggcaaagcgcagctcaggacaccctcaggaacacgttcacatcatgaccccgg

SEQ ID NO: 287144 - DNA, 122 bp, Homo sapiens
cgtgctcttgtgcacttcatttttcggcgtggagctgccaggtgtctgtggctgcggggacggctgctgtggctgagtctgcggcggctgggactgctgtacctgctgctgcggctgctgtt

SEQ ID NO: 287145 - DNA, 122 bp, Homo sapiens
gcctgccgttctgggagggcatcatccttcatcccgcaggcccggctgccgccgccgccgcgttaaggacagatggattacagctaatgagcctgctcgcaccattagcactcgagagcctt

SEQ ID NO: 287146 - DNA, 122 bp, Homo sapiens
tgtaagaagcagtgtgtctccctccaaagcaaagcaaagcaaagagtggctgtcaattaacgcagacagaaaattttaattttttctacctctccattatacaggcccttttctcactgtat

SEQ ID NO: 287147 - DNA, 122 bp, Homo sapiens
cgggccgggccaggactcttaaacccggagctgggatcagataagggcttgtccgggggccggggccggggtcgggccggccgggggcagagctgggccgggccgggccgccccctccctcc

SEQ ID NO: 287148 - DNA, 122 bp, Homo sapiens
tgtgtcctgaccactgtctctcatcatgacccctggtgttcacctccagatccaaagtgtcgtcgccaagcccccaaaataaaggaatgacaaacagccctcccaggccctcctccccacag

SEQ ID NO: 287149 - DNA, 122 bp, Homo sapiens
acgattattatggaagataaaatatatttttaattacttcaacagaaggaattatttaaacgcaatatttatttgcttctggaggacatttatgtaaataaaatttaggtagtgttcatcaa

SEQ ID NO: 287150 - DNA, 122 bp, Homo sapiens
ggtgtgggatatagtctcgaggtgcgccgtttcttaagccggtctgaaaagcgcaatattcgggtgggagtgacccgattttccaggtgcgtccgtcacccctttctttgactcggaaaggg

SEQ ID NO: 287151 - DNA, 122 bp, Homo sapiens
taagctccggtagattgcaaataacctgctttctttctgttcccgagctgcgttcggacccgtcggatcgtaaatcccacgtaaggtcggaagatttgaactttctacttggacacctaaca

SEQ ID NO: 287152 - DNA, 122 bp, Homo sapiens
gggggagggacagggcaggcgggcccatgaagaaagcccctcgttgcccagcactgtctgcgtctgctcttctgtgcccagggtggctgccagcccactgcctcctgcctggggtggcctgg

SEQ ID NO: 287153 - DNA, 122 bp, Homo sapiens
agtgaatagatattgttctcttaatcttccactctgccactgtgaagcaatcatattggacgggacttgtggtagtcttgacagtggttggtttctcttatgaaatctgatgtctccgaaaa

SEQ ID NO: 287154 - DNA, 122 bp, Homo sapiens
aagtcccactatttatacttcctaacggcggcctcttgttttgagtaaattacctcccctcgcaactcggagtgagcccccttcccgggtagcagtcgcgcctctaccgggggttggggagg

SEQ ID NO: 287155 - DNA, 122 bp, Homo sapiens
accgaggcttcaagggctcttctctggccctaaatccacagtggattttgccttattttccgaggtgcacatgaaatgatagaagtcgatcaaaggagagggcagagagaaagcaagagggc

SEQ ID NO: 287156 - DNA, 122 bp, Homo sapiens
gactgccaacctcagcacctgctggatcccggggccgcccgctcccgctcaggtcccaggcgctcaatgcctggcaggcgcgccgcctctggatatgcttttaaataacagagttgggccgg

SEQ ID NO: 287157 - DNA, 122 bp, Homo sapiens
cagacaccggagggttattatctgcagagcgatttccggcgatgggactcggagagagtccggctgcgaggtttcgagattctgggacgcaatcctaaagaaaacgtgccccctgctggcga

SEQ ID NO: 287158 - DNA, 122 bp, Homo sapiens
gggcttcgcgcgctccgtggccgccgcccgcgggcccgccacgctcgtggcgccggccagcgtcatcaccatcgtcaagtccaccccgggctcggggtctggccccgcccacggcccggacc

SEQ ID NO: 287159 - DNA, 122 bp, Homo sapiens
atcccccgagcttcggcgtggtccagctctcagttctgcagttcactcaccacttttagacggaggacgtcgattagatttgtggatcatgacattcgcagtctgatctcaaaaatgaaatg

SEQ ID NO: 287160 - DNA, 122 bp, Homo sapiens
ttaagactgtccacttctatcccatccctctccactggtgcatgctgctaccgtctcgcccgggccactgcacccggccacagcttgggcactggcgtccacccatttcacgttattccagt

SEQ ID NO: 287161 - DNA, 122 bp, Homo sapiens
agccacctctcagggacagtggctgccccagcctcgccccgtcctgcccctgctccgtgacgctccctggaactcagtcattctctggggaaccaacagccctcagaactgagttgcagctg

SEQ ID NO: 287162 - DNA, 122 bp, Homo sapiens
ttccttataaattgttcagtctcccaggcaagcatggtggtcagccaggcatggtggtgtcggcctgtagtcccagctacttgggaggctaaggcagaggttgcagtgagccaagatcatgc

SEQ ID NO: 287163 - DNA, 122 bp, Homo sapiens
tttttctttgcagagatgagggtgcaaagcagcagctttagaagccagaagccaggtcagcggtaaggatttaagggaggaggactgaacttctccacagttccctcctgagactgccccag

SEQ ID NO: 287164 - DNA, 122 bp, Homo sapiens
ccgcccagcccgcaacgaggtcctggacctgccacacagacacgagtctgaggcctgactcgccgcccgtcccccgcctggcccacccagaccgcaacgaggtcctggacctgccgcacaga

SEQ ID NO: 287165 - DNA, 122 bp, Homo sapiens
gccgggtgccagatactgggatcagccactgcagctccctgagcactctctacagagacgcggaccccagacatgaggaggtaatgccaccatccctgagccccaatccccaccccacccaa

SEQ ID NO: 287166 - DNA, 122 bp, Homo sapiens
tccgagagtgactggaagacagcatccctctgtaagccaggctgctgggcctatggaggccgccaggcgcctgtggggacaaggaggtgagagtccctgccttcggaggccaccgtcctgtg

SEQ ID NO: 287167 - DNA, 122 bp, Homo sapiens
ccagtggctaagccccagcttcattttgtctctattaggaatagtctttaagagaaactgcgtgtattcatttcattttctcactcagggctgtctttaactcagtcacgggtttgcttatg

SEQ ID NO: 287168 - DNA, 122 bp, Homo sapiens
cagggaggcgggcgatgagaattattagggggtggaagcggatcagtaggaaaactcctgcgacaactatcatgctagagtgaagaagggctgagactggggttgggccttccatcgcggaa

SEQ ID NO: 287169 - DNA, 122 bp, Homo sapiens
gttgtgatagttccacctcatagttgtaatgttaagaataacagccagaataaaaaataacgttgatctggctcttactgtgtgctgagcattttgctaagtgttttacacacgttattcag

SEQ ID NO: 287170 - DNA, 122 bp, Homo sapiens
ccagtgctccaggtgtggggatttgaggggagcactccggagctcccagggcacgggaatcggcgacccgccttcgctccctggcccaccacacacacctggagctgctcacagagaggttg

SEQ ID NO: 287171 - DNA, 122 bp, Homo sapiens
ccatcttggtgggggcaggtcagggggcagggactgtccatcctgggtgctccctccggccgccgacaggggaggtgggggtcctccgtgtccacggcctctgacgcccccgcccccttctg

SEQ ID NO: 287172 - DNA, 122 bp, Homo sapiens
atgcaggctgtactgaaagacaacaagtcacaggaagctgcctctcttacagggtggtgccgtcctgtggtttcccaccctcttggaggtgtagccattgtttgcttggtttcatgacacct

SEQ ID NO: 287173 - DNA, 122 bp, Homo sapiens
ctaaatttaaataaagtgtcaagtctgtttctgagtttccaatttcatctcactgatttccgagtatattttggcactagttttattttgattattttgcctccataatacaaggtaatatc

SEQ ID NO: 287174 - DNA, 122 bp, Homo sapiens
ttcatttctcttgcctccacgttatactttataaccacagacgtcagtgctcggtggggccgcaagaagccccttatgtgtcgttagatggatggaaaatgtgccgggctaggcgcccgtgg

SEQ ID NO: 287175 - DNA, 122 bp, Homo sapiens
gtttcgaagggaaggctgcactggtttcctgagataaatggacaggaagcgcattacctccgcgcgctggcaagcggctcccaaatgctttttgcacctgccgttttgagcggtgagagcag

SEQ ID NO: 287176 - DNA, 122 bp, Homo sapiens
atttttatgtatcagtgtgaaaacaaatggatgaagagaaccacctaatatgaatatttacgtgaaactagaagtgccctaggatctttgaataattttaaattgcatttagctaaggaaga

SEQ ID NO: 287177 - DNA, 122 bp, Homo sapiens
ttcctggcatttgaacattgacactgagcactgaagtggactacctagtccccaggttaacgtaccttgagtcttgagttaataaacccagcattctagaaatctcggactgctcagactgt

SEQ ID NO: 287178 - DNA, 122 bp, Homo sapiens
aaaaaataaaaataaaaataaaaaataaacagctggcacagtggggacccgggtaccgcacgtgcctttctgggagttgtagttcctagcacgtgtctctaaaatacgttaaacatggcacc

SEQ ID NO: 287179 - DNA, 122 bp, Homo sapiens
gtgcggggacttgcccagcaccctgtgagcgaccggcgtgttctttccatcttagaggatcgaggtctgcagggcacggtgaccgacacctggcgtggggacagggcggagacgtggcgtga

SEQ ID NO: 287180 - DNA, 122 bp, Homo sapiens
aagtggtaatacttttccgttgcagcatgtcctaaaagaaacattgtttcctcttaacgtcgtctggctttatttgactctgttatccatccagatgaaaggctaggcagtttgttactttc

SEQ ID NO: 287181 - DNA, 122 bp, Homo sapiens
gctgagccaggcagagtcgccagcggagactcgcgagtggcgcgcgggaggagcggccgccggcgctgggcttgccttgctgctgctgctgctgctgcctccccaccgcctttttttttttt

SEQ ID NO: 287182 - DNA, 122 bp, Homo sapiens
cctggcgtaagggtgattgccacatctcggattcgccgcggggcaactacctgggaaaaccgcagactgggcaatgaaagactacatccggcaaccggatgctgggttctgtgactccagga

SEQ ID NO: 287183 - DNA, 122 bp, Homo sapiens
ttagttttttaatataagaggttgtagtcttattttcacatgtccttgtttctgtctcaccggatgcctgtgccttctgtgctccaaggactggtttccttttagctttcagcaacatacaa

SEQ ID NO: 287184 - DNA, 122 bp, Homo sapiens
tcggcgcctgccgtaccctggtcagactctgggtcagagcgctaagtttcaaggaggcggcgctaaacaggccctctagccgggagcctgtcgcgacccgagcgaccgtgggtcgaccccga

SEQ ID NO: 287185 - DNA, 122 bp, Homo sapiens
ggggagagcgcgggtgggggtgtcgagggtgacagttgtggctgcgtgtctcccttctctcgcggcctggatgaattttctccagctgtgtgtgcttgtggcgagtccctgcacctccctgt

SEQ ID NO: 287186 - DNA, 122 bp, Homo sapiens
cgaggcctacgtggagacgctgaaggtgggtcctgccgtgcggcgcttgccctgagtccccgtccccttctcccagttcttagtcactttcagcgcatcgtcgtcacgtggccatttgtgca

SEQ ID NO: 287187 - DNA, 122 bp, Homo sapiens
gctgacttgtccccatggggctcccaggctgtttcattgaggacattcttcagaactggacggacaactatgacctccttgaggacaatcactcctacatccagtggtgagttggggaggat

SEQ ID NO: 287188 - DNA, 122 bp, Homo sapiens
acgtgaccaggcctgctggccggtcctctctatcccgggctacaggaaccagatcaccggcgctccttgggaaacgcaggatgtggaatgtgcataagaccccatgaattttgatgttatag

SEQ ID NO: 287189 - DNA, 122 bp, Homo sapiens
tttcccgtcccgcccggcccttcccggcccgcggcctcctctgggccgcaccctctgcggcgcgtttccggatcctcagccactctcagcgcccgccgctccgcccctcgtgcgtgcgccct

SEQ ID NO: 287190 - DNA, 122 bp, Homo sapiens
tttagggggcattggcttggcaaaagagcactggaattattgcataagtgtgtttatgtgcgtaggtgtgtatgtgcatacatctgaatgaatatacgcatgtattccgcaccttgttccca

SEQ ID NO: 287191 - DNA, 122 bp, Homo sapiens
gcgtgagcgggaacaggggctgcgtgcggcgcttgcgggccacctggagttccgggtgggcgtgggcttagcaggccccgcactcggagcagccggccagccctgctggccccgggcagtga

SEQ ID NO: 287192 - DNA, 122 bp, Homo sapiens
caatgccaaagagaccatgaccatcgagaacccaaaactggaggacactgcaggggacaccgggcacagcagccttgaggccccccgcagccctgacaccctggccccggtggcttctgagc

SEQ ID NO: 287193 - DNA, 122 bp, Homo sapiens
ttcagccagcaccaagctgcaattcaccagttactgccagctgacagcctgcccctgggacgctgtcactcaggagttagcttttcttgttttttttttttttttcctgaatgtgaatggct

SEQ ID NO: 287194 - DNA, 122 bp, Homo sapiens
gtgcgccccgtgctcagccatggtggacatgggggccctggacaacctgatcgccaacaccgcctacctgcaggcccggaagccctcggactgcgacagcaaagagctgcagcggcggcggc

SEQ ID NO: 287195 - DNA, 122 bp, Homo sapiens
ggcgcctccaccagggtagggacccagggcggagcatggccccaccacagggcgcgcgcccgcagagccctcaccttgcctgtgcccacgccaggggactgagctccccgcgcgcccgcgcc

SEQ ID NO: 287196 - DNA, 122 bp, Homo sapiens
gctgttgtcaaaagaaggcacctctttgtctccaggggatgaaagccatttggtttccagcgccaccctttctctccgcccggcaacttttctccgcgtcccgtccccaaggcgtccctgga

SEQ ID NO: 287197 - DNA, 122 bp, Homo sapiens
ccactcaccctccccccaccctcaacctccacaacgttcccgtttgcttatagttgtcaacgaccatgatctctggacccacactacagtaacaagtttgtcagtcattttcagataaggtg

SEQ ID NO: 287198 - DNA, 122 bp, Homo sapiens
agccacattgggggttagggctccccacgtgaatttaggggacacttcagttcgtcccggcggggactggggacgccgggctgtgtgctgtgtcctgtgggagagtttgttcaccctgctgg

SEQ ID NO: 287199 - DNA, 122 bp, Homo sapiens
ttgaaatgtcttggagttctacaagtcaactgtacatgtcaagaatagtccaaaactgctcgttgctcctttttagctggaatgggtggtaaatgtttgttcctttggtaggcatcataaag

SEQ ID NO: 287200 - DNA, 122 bp, Homo sapiens
gtgctgggattacaggcgtgagcccccgcgcccagccagctgttagttaatcaagaaattcgactgcctactacttaacctgcacagttctaggtgctggggaaacagtgacgaacaagaca

SEQ ID NO: 287201 - DNA, 122 bp, Homo sapiens
caacagagtgagaccctgtctcaaaaaaaaaaaaaaaatgagtaatggagtggccgggtgcgtggttcccacctgtaatcctgcaataccactacttcgggaggccaaggagggagaataac

SEQ ID NO: 287202 - DNA, 122 bp, Homo sapiens
tgacaggcatgaaatgacggcatgcttctgagccgatgcctggccacgggaagcgcctcccggtgaaggatggctaacttcaccacccgccgcatggctgtcacaacaccaggtttcggggg

SEQ ID NO: 287203 - DNA, 122 bp, Homo sapiens
atactagttggtagaagtaaatcaacctttactatggctccagtcccaccatatgtgactcgtttgcatggatgcggaaatgctaatcaaaccatgctgcctcaaaacataactgtgttcag

SEQ ID NO: 287204 - DNA, 122 bp, Homo sapiens
aacaccctgctccagttgctgtctaaaccggaaacaccctgctcctgctgctgtctgaaccggaaacaccctgctcctgctgctgtctgactctgagacaacacggccgcgccaactcgcta

SEQ ID NO: 287205 - DNA, 122 bp, Homo sapiens
tgctgagctccccgagccgcggtttctccaccctaatggtgaacagccttttggaagtcgcgctaaccttggcctgagacctgcaaacttgcccaggctggggcgtgtgaaccggcgagcgc

SEQ ID NO: 287206 - DNA, 122 bp, Homo sapiens
ggcccccagccagcctgccccggcccacccggccccgccggccagacacggcgacctatacggaccgcccccacgccgaccctccaaagggcccccggccttgggtttcccgtgccggggcc

SEQ ID NO: 287207 - DNA, 122 bp, Homo sapiens
taaagggaaggtgattttgccaaggctggagtctaaaggaagatggaactgtctttcaggcgtctccagcagaccctctacagacccgtgttcctgaaggcagagtcctgaaggcagaatac

SEQ ID NO: 287208 - DNA, 122 bp, Homo sapiens
catgcgccccacatggtcttcccggcttgggaaaggaatgagaagctttcatgattctctcgcgagaagggaagtcttcatgccacgtcagagactagagatcctggcgccgagcgacaggt

SEQ ID NO: 287209 - DNA, 122 bp, Homo sapiens
actgccgggggtgcgggggcggggagggggccggggtacgagcgtgtcggctcctgcctccgttgcggctgttgctgacctgaccagcttgaggcttgcgccaccctggtggcgctggttgg

SEQ ID NO: 287210 - DNA, 122 bp, Homo sapiens
actgcccgcacgcaggtcggccgcctccttaggggaggggaggctgggaccccgaccagccgaggaggggcttcccgcccgatccctgctacttcccagcccctgctctgaacccaatcccg

SEQ ID NO: 287211 - DNA, 122 bp, Homo sapiens
gaggctttggctgcatggtctgaaagagctggagaatgaaagacttaagatgttctaattcgtagtattggtatacatagaaaatcctttggggtttatgtagtatattttgatgtatttta

SEQ ID NO: 287212 - DNA, 122 bp, Homo sapiens
tgttcaagcgattctcctgcttcagcctcctgagtagctgggattacaggcatgagacaccgcgcccagccacattttttaatttttggagataaggtctcgctctgtcacccaggctggag

SEQ ID NO: 287213 - DNA, 122 bp, Homo sapiens
caacagccgctaacccctgctccccgactctggcctcagttctggtccctgggcagcgggcgcgaccacatgatggatgccatcgcccggtgtgagcagatggcccaggagaggggcgagag

SEQ ID NO: 287214 - DNA, 122 bp, Homo sapiens
ggcggcaaacgacgcagctggaggacttcttgcttcagccggagctctggcatgaacccccggggaactgtgctcactgagcgagggagccccagaggctcacacagagcgggctgggtctt

SEQ ID NO: 287215 - DNA, 122 bp, Homo sapiens
cgtgtcacagactctcagaaagcacagtgagagttcccctggttgagaatcgcaggctgccgctggcttcccccacttccctgggcacatcggaggagggggccacagctggtccctggtct

SEQ ID NO: 287216 - DNA, 122 bp, Homo sapiens
ctgggcttcatttttctcatttgtgacaaaggactaataatggtccttattgtttagggtcgttaaaggagcacatgggatgacacatgcaaagtgcttaagagtctggctctgaaataact

SEQ ID NO: 287217 - DNA, 122 bp, Homo sapiens
cgtgggccacctgtgctggaaacaccttttgggatgtgtcggggtagcgggcggcctccacggaaacaagggggatcgcgtctgagctgtgggggggtctcactacacatagctgtccattt

SEQ ID NO: 287218 - DNA, 122 bp, Homo sapiens
agtacctgtgtgtgtcaatacatgtagctgtggcttaggctcttgtgtgcctgtgagcagcggtgggttctgcagttgtatgtccacctgttcctatagcttacagttttttgtttgtttgt

SEQ ID NO: 287219 - DNA, 122 bp, Homo sapiens
cagggaccatctaagcatggagtgctgtatgagtgtacaggttttctgtgaagctggctccggtcccagggctcagtcccccgtcctcttccgtttatccaaccttaaaacctttaaagccc

SEQ ID NO: 287220 - DNA, 122 bp, Homo sapiens
ctcggagggaagccactgccacctgagacagcccaagcagcaagataaacccgctccacccgacccgccgaccttcagctttgtgggactatcaggaaaaaacaaaacaaaaacaaaatgta

SEQ ID NO: 287221 - DNA, 122 bp, Homo sapiens
ctgggcagcacaggaagactcctttctaaaataaacaaaactcagaaacttggctgggcacggcggctcacatgtataatctcagcactttggaagaccaagacgggaggatcacttgaggc

SEQ ID NO: 287222 - DNA, 122 bp, Homo sapiens
acttgccagcggcgtgctagttctcgttctcgcgttcctccagcagtataaagctctgaacgaacagttgtctctgtgtccgcttgctacggtctcgggggtttttataggcacaggatggg

SEQ ID NO: 287223 - DNA, 122 bp, Homo sapiens
tatcttaggtcagctgactcatgaaattgctatcagaaaagcaaactgcttcccctctttcgccatcagactcatggttctgcttttcgtttatttgctgtaccttttctgcctagctattg

SEQ ID NO: 287224 - DNA, 122 bp, Homo sapiens
tccataagctttaccttgccctccttatccccctaataaaatgtctgcattttggccaggcgcggtggctcacgcctgtaatcccagcactttgggaggccgaggtgggcagatcacgaggt

SEQ ID NO: 287225 - DNA, 122 bp, Homo sapiens
gaaattggggagtagggattaaaggagggaagaagagaaatggcagcagatgcatttttacgttgctcaattggaaattgttctagcaaatacagtctgaattttaatagaagggtacttca

SEQ ID NO: 287226 - DNA, 122 bp, Homo sapiens
acggggagtcccctgggatggagctgctcccctcacggcagcaccacgtttccagtccctcgatgccactaatcagcatggactgtgttcaggacacagggtgaacttttctctgacccccg

SEQ ID NO: 287227 - DNA, 122 bp, Homo sapiens
caccctacctgaagcagccgcacctgcctgctcctagtcacgccgttccttcacctgtttcgtttcctccacagggtttaccacaatctgaaagtcttattcatgcaggtgtctacttgttt

SEQ ID NO: 287228 - DNA, 122 bp, Homo sapiens
tacttctgtctgcaagaggccagtcaaagtatatgttattaataaaacctacatggttgtcgtacccatggggaaggtgacaggggaggaaaacagattgctctgagctgtgtccaggaact

SEQ ID NO: 287229 - DNA, 122 bp, Homo sapiens
ttgtgaccagaatctagatgaatgtggttcacacaaatagccccacagttacatgcttctcgagtgtcctgtctaccagctgtgtaggctctacctgattgattcattcagtaaccatccaa

SEQ ID NO: 287230 - DNA, 122 bp, Homo sapiens
gggagtgcggcgcatgcgacagcgcctgcgcagtcatgtcttaagaatcctttgcgctctcggtgcccccctccacgcccaggagcgtgggaaccctgcttaagggctttactagggaaaac

SEQ ID NO: 287231 - DNA, 122 bp, Homo sapiens
gtgcgcctgctggggtggctcaggcagccgtggggacctcctgtgggcttgcccccaggacgggacaattcacattcacatcttcctgggcagtccgtgttctcagcggctccacagggctg

SEQ ID NO: 287232 - DNA, 122 bp, Homo sapiens
caagcgcagcactaaagaaacgggagacccggcttcgggtgactcgtccccccttccaaacgtcagcacagtcgaaaacgtgcaccccgcagcctccactgccgcgagccacacgccacctc

SEQ ID NO: 287233 - DNA, 122 bp, Homo sapiens
gttgctgctggaaccagcccccgcaagggcccgcagcggccgggccgtttacctcagacccgcgccgcagcctcccggagcccgcgcccaggactccctcacgacctctccagggtcccggc

SEQ ID NO: 287234 - DNA, 122 bp, Homo sapiens
ctaagaccccatcatagatcaccagtgaagcctcctgtgtcaggaagaggtggttagagtcggtttatggaaggcccccctggagatgtgttaactgcccccgcaccaggactgcccttcaa

SEQ ID NO: 287235 - DNA, 122 bp, Homo sapiens
attgccactgggaccacaccactgtcaaatccacttatgctctgctgaagcttcctggctcgtggagcccacggctgcccactactgccactgctagtggctcttagctgatgacaatccct

SEQ ID NO: 287236 - DNA, 122 bp, Homo sapiens
gacctgggagccagagggagccctgagtgtcggcgtaaggcacaggtccctgcccaggatcgccgtctcagaggcacatttagtgtttgttctacttatgaaatcaaggacaatcaattgta

SEQ ID NO: 287237 - DNA, 122 bp, Homo sapiens
cctcctgcctctctcatattacttggtgtctctttccagcacttgttacaatctggatatcgtcttgtttagttatttctgaatcatcattctcctcagtagaatatgcattagttcatttt

SEQ ID NO: 287238 - DNA, 122 bp, Homo sapiens
gaaggaaaggtgaagtccagagtccccacaggtgagccctgaaagctgtgaatggggctccggagcttgagcagctgagaagccaaggctgccaaacaggagtaaattcaccccacggtgcc

SEQ ID NO: 287239 - DNA, 122 bp, Homo sapiens
gcccgcgctgctgtcgcctccccatctttcgtaaactctatccctgggggttacctgccccgtagagcccgtttgtgtacgaattgccacagcgaccgcctccgtccgccctcattctctgt

SEQ ID NO: 287240 - DNA, 122 bp, Homo sapiens
tgccgtacatggtgtttctacttatgaaagattttccaactaggtacagatggaaaataccgcggcagaaatctctggcctttgggtgggacaactcctgcaagacacacgttagggcgtgt

SEQ ID NO: 287241 - DNA, 122 bp, Homo sapiens
tgaaaccttcctttttttcaggataaagctttcccacttctcttcctgcctttgtgtctccgccaaaatgcaagtgacagtgtggctgactccctgcctctagcaagctcagaataaatagc

SEQ ID NO: 287242 - DNA, 122 bp, Homo sapiens
cacgggccgacgcgctcttgggaatgcgatcctaaaggcttgggacttctggggaagtggcggcttttagcccctgcgggagccgagccgggccgggggaggagggatggtgctgtttctgg

SEQ ID NO: 287243 - DNA, 122 bp, Homo sapiens
tttaattgaatccttgaaacaacctgttgaggcattgtcccccttttatagacaaggaaacggaggtttcgagagtaacctgttttgcgcaagatcacacagctgggggaagctgggatttg

SEQ ID NO: 287244 - DNA, 122 bp, Homo sapiens
ttgggacagcctcaccacaatggcgtccttataaaccataatggcgatgtttatgaaggccgcaataccagtgtatgaagacaattttatgcctaattagaaaatgatgtaactcgagagaa

SEQ ID NO: 287245 - DNA, 122 bp, Homo sapiens
gcccgggagccaccaacctttgggttctcggactgaaccctgagcggggtcgccccgcagcgccctgaaggtcggagagttcttgccctcgggaacctgcccccagccactcgcccctaagg

SEQ ID NO: 287246 - DNA, 122 bp, Homo sapiens
gagtctcacttctgcctgcacggagtctccattagtatttctctccctcatttatcatcccgggcacagtcccctgcctgtcgccaaattttcttttccatgaaaaatctctccttcggaga

SEQ ID NO: 287247 - DNA, 122 bp, Homo sapiens
agagcccgggaaccgaggaacgggtgggtgtgcttgggtgcgtgcggcgccttggcgccacgccgtcgctccacgccatgaggctcgggtgttccagcgggggccggagtttggagggcgcg

SEQ ID NO: 287248 - DNA, 122 bp, Homo sapiens
ttattttttggtcttgtgttgctattgctgttaatttctacaactgcagtaaaattccttcgttccaacaaagtaaggatgggtcaagtgatgaccaaagtactttaggagaaaatgttaat

SEQ ID NO: 287249 - DNA, 122 bp, Homo sapiens
tatgcagcctctcagtgactcagtgccattttgagtaaggcttctatactggacaccacacgggtgaagtagaaagagaaggcagaaacctgagcacagggaaatgtgcagaaacagggctc

SEQ ID NO: 287250 - DNA, 122 bp, Homo sapiens
tctgagccaggtgtgggatataatctcgtggttcgccgctttttaagccggtccgaaaagcgcaatattcgggtgggagtgacccgattttccaggtgcgtccgtcacccctttctttgact

SEQ ID NO: 287251 - DNA, 122 bp, Homo sapiens
cttcctggtatcctatgtcccagttttctgtcttattcaacattaaccatgaattctttacgtattttcaaagtattgattcgctgatggataggatttggggtataagggaggagtcaagc

SEQ ID NO: 287252 - DNA, 122 bp, Homo sapiens
ttatctgctccctgaataccctctctctcctcttctgtttcttttcttcccaaatgcagtcgtccaacttggagagcatagagttcaataaaggggctttggaaactacagctttcagaaaa

SEQ ID NO: 287253 - DNA, 122 bp, Homo sapiens
tgtgtaaggattgcgtgatgtataaggaatgtgtcacatcaggttgagttttaaaatgaacgtactccattcttaggttttatctctacagatggataggggcccagaggcccctggaagca

SEQ ID NO: 287254 - DNA, 122 bp, Homo sapiens
ctcacgccgctgcggacgacgacaagcggccaatcgtccccgccccccgcggcccgccgccgcgccgaacctggtcacacccacaaggagaggagaaccctcgcagcccctcgctcggggtg

SEQ ID NO: 287255 - DNA, 122 bp, Homo sapiens
cggtgctttgagggatacataggaagtatccgactctttgggaaacacaaaagccttcctcgacatgtctgtgagccagaaaaacaagcaaatgtgagaggtttctcagatcacacagatct

SEQ ID NO: 287256 - DNA, 122 bp, Homo sapiens
aaggcagaatatgcccccgcaaccaattaaaaagagctctaaacttgacggacgacttcccgcccctggactgtcgtagctcctcccccagaccaattgttttaagagaggggggcggatac

SEQ ID NO: 287257 - DNA, 122 bp, Homo sapiens
tccggcctccctgccccggacccttgtgactatgaaggccggttttcccggctgcatggtcgtcccccggggttcttgcattgcgcttccttcggggacccccatgtgcgcagcttccacca

SEQ ID NO: 287258 - DNA, 122 bp, Homo sapiens
cccatcagcccagccaaaaggttgtgattaccacacaagcacacgcacgtaccaaacacacgtgtgcacgcaagcacagatgcctgtatgcacagtcatagacgcacacatctccccacaca

SEQ ID NO: 287259 - DNA, 122 bp, Homo sapiens
cagcaaggtttctccctctcatcgcccccgtgcccgccatgctcagggatgcggcctgtgcgccccgtcacggcttcagacctgctcagaggaaaacgagctcactctgctctgggtccttg

SEQ ID NO: 287260 - DNA, 122 bp, Homo sapiens
atacgtacgtgttaatggtgctaaataactgatcacctgacacggggggcgggggcggtgcggagagtagaaaggaagagaatgttgatatcgcgcacggagtcctgtgtccctcctttccc

SEQ ID NO: 287261 - DNA, 122 bp, Homo sapiens
gagggcaggggatgcattctccctgttccacaaatcctagtcttaaagcacaaatgatagcgtttgccctgatggaatcctacaccttccagtaccccagcgggatgcactctcagtccttc

SEQ ID NO: 287262 - DNA, 122 bp, Homo sapiens
ttcccgggctgggtggccggggcgtgggggggttcccggagacaaatgcgctgcttcctgcgcctcggaggcggtggcagagcggaaaccagccctccccttcccggggggggcgccgaggg

SEQ ID NO: 287263 - DNA, 122 bp, Homo sapiens
atctgacatcgtttggaaatggtgatctgccagtggagttcaatgtcatggccaagcctacggcccagaggggcagcttccaagatttgctttaggaatagtcaatgcagaatgtgtttaat

SEQ ID NO: 287264 - DNA, 122 bp, Homo sapiens
tggacagggggactggctgcctactggaatgtaaatatgtgataaaataataaatgacagcggcaaagcctatggtttctaggcattgctctctggtggctgagaggtccccatgggattga

SEQ ID NO: 287265 - DNA, 122 bp, Homo sapiens
ctgagtgtcttgactaccgtgacaccacgcatggccagagctagcgtccctactgcctcccgactcctcagtggaggaggagctgcggtccctctggtgtctgccatccccctccctccctg

SEQ ID NO: 287266 - DNA, 122 bp, Homo sapiens
cagagtcctgggcctcagcctcctgctgtccccatggctctgggtcgggatgcacattcacgccctttgccctctttcatccccatctggctctccccttcagtgcaggaggctgaagctgc

SEQ ID NO: 287267 - DNA, 122 bp, Homo sapiens
aaacagactcaaactactcaagttaaggcagtttgaagcaaaaaagtctccttacctgggcgtgcttgggatgttaagacagaagtatccttcagcccagcccagcactgctctaacagctc

SEQ ID NO: 287268 - DNA, 122 bp, Homo sapiens
gtcactcttctttcagccccgcatctcatcacatcttccgtcaatcatggcctgagggggcggggatttaaatgttatccaatcagagacgctaggcagggaaccgtccaatcaggcacgca

SEQ ID NO: 287269 - DNA, 122 bp, Homo sapiens
gaaaattaatgtattctaaagcaactgagtaatctggctaactttttacaattttcctcacgctttatttcttaggacaaaataacccaaagccctcttcctgcttttccaaaagaagacaa

SEQ ID NO: 287270 - DNA, 122 bp, Homo sapiens
caaaacaaagatccctgtctttgtggagcttatactgaagcagagatagacttcacacagcgaacatgatgcatgagtggattatctcgtataacatagggtgacaataataagtgaaatgg

SEQ ID NO: 287271 - DNA, 122 bp, Homo sapiens
gtgcagcacccaggacacagccagcatgaactgggcatttctgcagggcctgctgagtggcgtgaacaagtactccacagtgctgagccgcatctggctgtctgtggtgttcatctttcgtg

SEQ ID NO: 287272 - DNA, 122 bp, Homo sapiens
gtaataaaccttgaggaagcctaggaaataacccactggtctgtcttctaacatgacagccggtgttcactctacattcaaatgcagagtagggtgtgtgccgggcaagatctcctgtttga

SEQ ID NO: 287273 - DNA, 122 bp, Homo sapiens
aggactgctgcgaggccgggttgggtaacccgagaggagggttgggtaacctgagatcagcgagggtgggaccttagagctagccgagacccgggcccatagctccctgggggttttaaaga

SEQ ID NO: 287274 - DNA, 122 bp, Homo sapiens
cggactaacgaacaaacggctcactaaattcaaacatgagtttcagcctggtcgccgagccggcgggtagaaaaaacctttcccctcctaaccctccgcagatgtcggccccgcactccgcc

SEQ ID NO: 287275 - DNA, 122 bp, Homo sapiens
gctcggccagctgtgggaaatgctctggttgacctcggatttctgcgcactaagctgagccgcgaccccggctttgagccgaggcatccccgggctgggcgaccgtgggcgtgggcgctccg

SEQ ID NO: 287276 - DNA, 122 bp, Homo sapiens
gggccgccgccgatgactgatgtccgtgaaaacaacttgcggggaagtcgagctgacaaacgcccattaaaggcggcgcataatgaaggggaccgcggagggcggcggcagggaggctccgg

SEQ ID NO: 287277 - DNA, 122 bp, Homo sapiens
ctcattcttttctttttagagatgcggtctcagtctgtctcctaggctggagggcagtgacgtgaacatagctcactgcaatttcgtgagctcaagcaatcttcccacctctgccttccaaa

SEQ ID NO: 287278 - DNA, 122 bp, Homo sapiens
agccgtgggcgctcgggaaactcggagctgtcaaaacgcccgggccaggtggtctcggggcgcgggctgggggcgagaagaaagcggccgggcgagtgcagcttttgtttgtcagcgactcg

SEQ ID NO: 287279 - DNA, 122 bp, Homo sapiens
gcaggctgaaggctaggcgcctcgccactctaggactacaattcccgagaggccttgcgacggaagccatctttgttccccaccaggctaagcgattttccggagggggagtaagatccctt

SEQ ID NO: 287280 - DNA, 122 bp, Homo sapiens
aaccattttcaaagtttccataaaaggaatctcaaaatagattataatgaattcctctgtcgcatattatcatggaacaaagtggcacatttttagaagtgggctactgagaaatgaatcta

SEQ ID NO: 287281 - DNA, 122 bp, Homo sapiens
acacagaagtggcagcgtgccacaggggtggctgcaggggtggccatgcctggggaaacgcgactgcctggtttgtcagtgggccctgtaggacagcagtgaggcacctcccaggcagctct

SEQ ID NO: 287282 - DNA, 122 bp, Homo sapiens
ggcccgcgccctgattggtccggttatctgacccggggcctgccagcgccagacaatagtcggagtcaaattattcgccatggagacgctgtcagtcactggtaacccgagcctcggcgggc

SEQ ID NO: 287283 - DNA, 122 bp, Homo sapiens
ccggagagcgaagggcgggcgggtcccggaggtgagtgctggatgtggtctgtgtgcggacgtcgggaggggccgctgcgggcggagcgacccattgcccggctctgccagcgcgctcctag

SEQ ID NO: 287284 - DNA, 122 bp, Homo sapiens
ttggcatcagaaggtagtactctagaaaaaggatggtgtttttttgttcacaaatatggtcgtgatcagtgttttaagaatttgttttacaggccaaagttcactttaacaactgctgtaat

SEQ ID NO: 287285 - DNA, 122 bp, Homo sapiens
atttttgtgtccattttaacctggtaaggaaaattccaacaaaaacccagagttttggagcgagaagatctcatgcagtcattctccaaaagggagcactttctgtttgaaagaaaacaaag

SEQ ID NO: 287286 - DNA, 122 bp, Homo sapiens
agtgctgggattacaggtgtgagccaccgctcccggccttgcacaccatcttaagtgtgacgccacactgcccttcacagccttggggctctgcccagaccaggaggaatggggagggggtc

SEQ ID NO: 287287 - DNA, 122 bp, Homo sapiens
gctctgcctcaggacatcctttcacagccagcaactagcacctccgtgtaaggagcctgccgggcaaagatgccccctccataattaggctctcggcttggcttcccacatcctcagcagcg

SEQ ID NO: 287288 - DNA, 122 bp, Homo sapiens
cggctctggcgtccgtgctccaacgctgggagcagccctgaaactccagtgaccctcagccgtctgcctttgttttgggataaatgaattcaagcattcttcagtcaattcgatttatccaa

SEQ ID NO: 287289 - DNA, 122 bp, Homo sapiens
gagaagctgcacctgggagggaaccaaaggtgctggtggagagggaagctgagattaagccgctggtttttgcaaacacggcattccttgatgtagtcagcctcaggcactctgagtccaga

SEQ ID NO: 287290 - DNA, 122 bp, Homo sapiens
ggaatgaagccacaggagccaagagcaggaggaccaaggccctggcgaaggccgtggcctcgttcaagtaatccaggataggctgtgcaggtcccaatgggcctattcttggttacttgcac

SEQ ID NO: 287291 - DNA, 122 bp, Homo sapiens
ctctggtccctctccggtcgctcctgccactcacgttgagtaccatccaccactagagggcggaatagaacaaaccaagatgggtgcccctccagctctctatggcgtctgctcgccgagcc

SEQ ID NO: 287292 - DNA, 122 bp, Homo sapiens
ccctgctccccgaatcctcggcccctcccccagactctcaactcggaaatctctcgccgtcgccgccgcgcccctctcgcagcgcatcgcggcttccaactctcaaaccgttcccccccaac

SEQ ID NO: 287293 - DNA, 122 bp, Homo sapiens
ggaggcctagaagtccctcccaggcttgagttgttctgacttggcatgattacatagctgcggcaagtgacgtttccttcaagccttggttccctcatctgtaaaatagggaactaatacct

SEQ ID NO: 287294 - DNA, 122 bp, Homo sapiens
aggccgctgccgccgctgcaaacagatgtcagcgacaacctgctagcttacacctggacgcgcggccctcacctcgcgcgccgcgctgaaacattcatgtctcggaggacttcccgccgcaa

SEQ ID NO: 287295 - DNA, 122 bp, Homo sapiens
cttatttaaaaaatatgaatattctgtatcttttgttgttgttgtttaggtgtattgtttcgacttcctagaagagacccccaggtacagtgggacactagctgctactagtgcacccaagc

SEQ ID NO: 287296 - DNA, 122 bp, Homo sapiens
cttcttgcaggattgacctcttcactgttacaaaatctcttttacaaggcaatgatggtccggcgtggtggctcacacctgaaatcccagcactttgggaggccaaggcaggtggatcacct

SEQ ID NO: 287297 - DNA, 122 bp, Homo sapiens
ctgaagccttctgtcaatgtgggatcatctgtcgtaaagtctgcaccgctgtggtgggggcgtggatagtgggggaggctgtgcgtgtgtgggggcagggagtgtatgggaaatctctgtac

SEQ ID NO: 287298 - DNA, 122 bp, Homo sapiens
gcatcaggaagccttgggctccagacctagttcttccactcaccaacctggtagaaacctcgggtatgtcatgacacctctttgagcctcagttttcctcatgacgaaaatggagcttagat

SEQ ID NO: 287299 - DNA, 122 bp, Homo sapiens
agagcaggccagggccaggggcctgagaccgacggaggggacagtcggggagggggtactcgtcacttttaatgacacaaggaaaacaaggcttgaagatctgagtgcggttttttcatcat

SEQ ID NO: 287300 - DNA, 122 bp, Homo sapiens
ccccgaggacaagagcaaaccatgtggcagcccaagggttcaggaaaagcccgacagccccggaggctccacgcagatccagcggtacctggacgccgagcggctggccagcgccgtggaac

SEQ ID NO: 287301 - DNA, 122 bp, Homo sapiens
ccttcccagtccacctttgccctctcaagtgggtagccgcagagtaagttgttttgcatccggttgccttagtacagacactaaatgtaatctctgaaataggcactcttattgtcgcccac

SEQ ID NO: 287302 - DNA, 122 bp, Homo sapiens
tgcccagcctcaccttgcccttaacgtccagaatgaagacagccgaggcggacatggtggcggccgaaggacttaggagtcggggagggagcgccgggaggcgatggcggcgccgcttcctt

SEQ ID NO: 287303 - DNA, 122 bp, Homo sapiens
caaagcaactgttttcatataccaggttcattttcaagtacatgatgtcattcctcttttcgaagagtagttgtggagagagctaagacctctaattctcatttccaattttactaaaaatc

SEQ ID NO: 287304 - DNA, 122 bp, Homo sapiens
ctctccccggagctggggaccaaggctgggccccgccggccgcatcggtgggaacttccgcggtccccatcccagggcgcacagggtccagctcctcggcgccgactcctggaaacaatgaa

SEQ ID NO: 287305 - DNA, 122 bp, Homo sapiens
gcagtaccttgaagaggactaggtatggctttgggaaggagtgaaatacagaaatatactcgctgctcctagtgtggtctacagaccagcagcaccagcaacacccatgagcttcttagaaa

SEQ ID NO: 287306 - DNA, 122 bp, Homo sapiens
gcccgcccgcctccccgccccccctccggccgggaggtggagctcgggaccgctccggtccggctgggaggggaccccgagcaccgctccccaaagcctggacccctccctctgccatctct

SEQ ID NO: 287307 - DNA, 122 bp, Homo sapiens
agccagagccggggctggggccgcgagggggcggggcctcgggcaatgacttcaggcgtgcgcggcgccgcgcggggcggggactgcggggggcggggactgcggggggcgggtgagctacc

SEQ ID NO: 287308 - DNA, 122 bp, Homo sapiens
gcggcccagcccgaggactcggttattgaaagggtccccctcatgggacccgcctggccgcgcccgcgggcgagcacgggcttccgggcagggcgtcccccgggtgaccgcggccagggcgg

SEQ ID NO: 287309 - DNA, 122 bp, Homo sapiens
gaagctgttcagggcatcggcagctgaaccctgctccgttggtcagcgttactatcatctcggatcatatggagctcatgtcagccgtgtgggtggcgggtgcacagagacggtctggaagg

SEQ ID NO: 287310 - DNA, 122 bp, Homo sapiens
ttctgaactgagctgggccaagagagaagacaagctctggccaagcggtggccaagggtccgggcggaagacaaccctctgggattggccagttaagactgcggcccagccggttaggcaaa

SEQ ID NO: 287311 - DNA, 122 bp, Homo sapiens
tggagacacgagtccaggggcgcggaggggcgggcagcgcgcggagtggtgagactgagccgcgatggaacgcgctggggagacccagcctgttcggctccagggttcggagacatcctggg

SEQ ID NO: 287312 - DNA, 122 bp, Homo sapiens
aggatggaacatgaaggaggactaggagcatgactgctgaagcacagcatcacagggagacggttaggcctccggataactgcgggcaggtctgactgaagtcaggccctccacaagaggtg

SEQ ID NO: 287313 - DNA, 122 bp, Homo sapiens
ccgccgccgccgccttcttcctgggcatggtcgcggctggagggagacacggggcagcggcgcacaatggacgggttataaactgcgcggggggaggggagcggagacgagccacccggcct

SEQ ID NO: 287314 - DNA, 122 bp, Homo sapiens
tttctcttttgactcgaggggctcaaacctgttacctgaccagttttcatttctaaggaacgccgatcacctttctaagacaacgccgcagctttctgctgctgcttccaaattgtggtttg

SEQ ID NO: 287315 - DNA, 122 bp, Homo sapiens
gccacaaagcctctttgacggcccaggtccaacagcgggcggcgggggtggaggctggggcggcagacgctggaggccggcagggccccggctgggtccggctggctgggacgggacagagg

SEQ ID NO: 287316 - DNA, 122 bp, Homo sapiens
ccttgtctccccaggagagtagccaggtggggtgtcctgtcccaagccgaggcccagatgcggtggccctggctattcggtggggaccctgaggagtagtggctgcagcagcagtggcaggt

SEQ ID NO: 287317 - DNA, 122 bp, Homo sapiens
acatttcaaatatttctgaatttttgagttatctcaacttgaagcaaaggcccagcagttcgatatcaggagtaataaacggtaaagaaaacagaaacaaattacaatcaagcaatgccaat

SEQ ID NO: 287318 - DNA, 122 bp, Homo sapiens
cctggacgcttccgaagaccagcttccaggatcgccctatgctgaccccgccccaggacccgccaacctggactctacccagcacctgccccaacgacgcttatcctggccctaccccaggc

SEQ ID NO: 287319 - DNA, 122 bp, Homo sapiens
ttccagtcttgaaagattagatttccacttgactctctaacacagacagcaaaactgtcacgcagacatgagaagcaaatgtaaaacaattgtgatagagaatgttttgtttcaatatgtcc

SEQ ID NO: 287320 - DNA, 122 bp, Homo sapiens
agactccaaagcccagtacctgttgctgctgctgctgggcgtgggcgaggtcagctgccccgatgtccacggccggcgtctctccgttggaccgcccctcccgaagaccgccgcactctagt

SEQ ID NO: 287321 - DNA, 122 bp, Homo sapiens
acttctgggcggggaggctttctggacagtcagacgtggattacggagggggcgtggcttcggaggggcggagcttcaacaaattcgaatcgttctttgaagagcagggttttgcccttttg

SEQ ID NO: 287322 - DNA, 122 bp, Homo sapiens
caacgagggcagcttcaggtcccaggaccgtgcctgggggggctcccaggcaggaccaaacgtacccatcaagtaaatcaccctctttactcactgcccagatgctcccgggtcactgagat

SEQ ID NO: 287323 - DNA, 122 bp, Homo sapiens
gaccagcttgggcaacatagcaagaccccatctctaaaataaatttaaatattagccaggcgtagtggtgtgtgcctatagtcctgcagctgtatcaggaagatcacttgaccacagaagat

SEQ ID NO: 287324 - DNA, 122 bp, Homo sapiens
tccagtgtgaaatagcatgaggaataaactcctgaggtttgcagtcttcgaagtccctagcgtgtttatgggtttcacctccagtaagctctcatgataaagagccaggaaattccctggtg

SEQ ID NO: 287325 - DNA, 122 bp, Homo sapiens
agaccagcagcagcagcagcaggaggcacctttaggcccgggtcccaagttttgcaaagccggccccctccaccactacccatccccctccccggaaagcagcaacccatccgctgccgccg

SEQ ID NO: 287326 - DNA, 122 bp, Homo sapiens
gacgtctaggctgagtaattccgtgtgctgacctcagcccagtagtttgagctgaattttcgctttcagcagccgcatttgtagcagctcttttgtgatgacttagtctctaagcccgtgaa

SEQ ID NO: 287327 - DNA, 122 bp, Homo sapiens
aggccgctccagggaaatctctggtggctcatttcccgcaagatttccccctgcccacagcgagctccgagccgcgggtgtcagcggactcgacgcattggctgctcttcgcacttgtgcgg

SEQ ID NO: 287328 - DNA, 122 bp, Homo sapiens
tatagaaaatagaggggaaattgcactacttcttaatgccctttctcttttatttgaaaacgtatttcatagttctaacttgggaggaaaagtgtgggtagtctgtaagatgctttagtaat

SEQ ID NO: 287329 - DNA, 122 bp, Homo sapiens
tccaccgttgtcctactttggatgtgagttggagtaggtaggggtgggaagggactgactcgcctctccaggggtaaaataaaagggatgttcagagtttaaactttagaagaataaggaca

SEQ ID NO: 287330 - DNA, 122 bp, Homo sapiens
atctcaaatagacttttcctgagcagaggctgaaatttgcaagtaatgcaaagaagactccgggagagcgtcgccgatggtggagcgggagacgggcgtggggagccccactgcagtgctgg

SEQ ID NO: 287331 - DNA, 122 bp, Homo sapiens
tgatggagaaaggaaatccttgagagtaaattcccaacactggttttgctaaaatgagaacgtctcttaattattccacagtgtgttgtgaaattctcacagaatttaaaaaaaaaagtaat

SEQ ID NO: 287332 - DNA, 122 bp, Homo sapiens
ggaaggaaaggaaaaggataaatttggagtggggggtctctaaacagattgcctggattccgttctttcctggggttctacagctgcctaagccctcaccttgggggaggatcaaagggaat

SEQ ID NO: 287333 - DNA, 122 bp, Homo sapiens
tactgagcccacagcagagtccatcccggcttctagacacccgcttccagctgggaaaggcgccagctccgcccacccggttcctggtgggtctcggcagttgccccgcccactcacaagcc

SEQ ID NO: 287334 - DNA, 122 bp, Homo sapiens
ggggaggtaaaaaacgagaagtcagcacttgagtttaatttcagtggaacactcagccggcgatctgcgcctgccagcacattccttccacacggcgcatgattcagagcatcactcggatg

SEQ ID NO: 287335 - DNA, 122 bp, Homo sapiens
cagaatgggaaaacacagacatatgtaagaccctcagctcaagtttagggtctctgtgttcggtgaagtcctttccatcaatttagacagtaactgtttattgtctggtgaagaagtgtttc

SEQ ID NO: 287336 - DNA, 122 bp, Homo sapiens
ccacctggccatattgtcaccacatttaggtggggtatactttttttacgacagccttcacgcctggcctctgtgtatgcatttgagtttattacccatggtctaggaagatgtaataaacc

SEQ ID NO: 287337 - DNA, 122 bp, Homo sapiens
ccgcagcgccggaacctcagaggcgggtcgcagcggcgcagaggaggtcagctgcgggagcgtttccggggacggtgccgccatgagattgaccccgcgcgcgctgtgcagcgccgcccagg

SEQ ID NO: 287338 - DNA, 122 bp, Homo sapiens
cactaggctgtctatccttctggtcacttttccagggaacttgcttctttcccctgacctcggggctcccatacctgcccccacttgcttccccagccttgctgctcccaggcactggctgg

SEQ ID NO: 287339 - DNA, 122 bp, Homo sapiens
gcccagagtccttccctgcacttcaccctaggaaacccctacttgttctcaagactcagccgaggggtcacttcctccaggaggtgtccctgacttccatcattgcagactgggccaactca

SEQ ID NO: 287340 - DNA, 122 bp, Homo sapiens
ccgcatggcctgtgacatttgctgggactcacacacggcgtccaacctcctttctccgagcgatgactcctaggaacttcccaaggaccagagcgatgcaggctccgacacgcgagggcggg

SEQ ID NO: 287341 - DNA, 122 bp, Homo sapiens
ctcccagggtgtggtgctgcagcaggacagctacattgaggaccagaaactggtgctgagcgagagggcgctcactcgcagcttgtcccgcccgagctccctcattgagcaggagaagcagc

SEQ ID NO: 287342 - DNA, 122 bp, Homo sapiens
ctgaggaggctgatggaaactcaagcctggcaggagcggtgattccatctgcatcttgtccgggccgttgggggccgggggggcagcggctgggctgagggccggcactgcgctgttttcct

SEQ ID NO: 287343 - DNA, 122 bp, Homo sapiens
aaggcaggaccgaagcccccgggcttgtccgtgtccgtggttctggggagcagagaatggcgcactgaggcgctccttagggccctgcagggcgcgaagaacagtgacagcaactgctcctc

SEQ ID NO: 287344 - DNA, 122 bp, Homo sapiens
gtgcagccgcggcgcgcatgcgctctgggctcgccgccggggagggcggggcggcggacgcggctgagatcactgcctgggccttaaaggggccgcgccccgaaccccagcccgccgccccg

SEQ ID NO: 287345 - DNA, 122 bp, Homo sapiens
ataaagcaaagaaaaaagaaatttacagtttatgagcgaaaacaacatggctataatttccgcaatgtagacatttccagggtgtaataagatagttggttgaaagctggggataaggatat

SEQ ID NO: 287346 - DNA, 122 bp, Homo sapiens
acccttgctttgtgtagggggagggctttgcccatgccctggtgccccggcgcagggcatcgaggtctgcagttcagaaccgcagtctaacctatgtcttggcggaataccctgctaagtct

SEQ ID NO: 287347 - DNA, 122 bp, Homo sapiens
gcctgacccgctggccagactcaagctctgcaccaggtattaccaccctggcgacggctccggagcgtcactgacaaccacccggaaatggtactatcgcttccggggctgcctagcgcgcg

SEQ ID NO: 287348 - DNA, 122 bp, Homo sapiens
cagtggcatcagcgatggcggctgcgtcggggtcggttctgcagcgctgtatcgtgtcgccggcagggaggcatagcgcctctctgatcttcctgcatggctcaggtggatttcaattttac

SEQ ID NO: 287349 - DNA, 122 bp, Homo sapiens
aaacctaaatattgaagcaccaagttttccaagccagggggtgtagggggtgggaaaagacgacagaggatctgatctatcaaccaaagagatggacaaaccattctgatgaggcatagaac

SEQ ID NO: 287350 - DNA, 122 bp, Homo sapiens
tgcagagaatgcaagatttgaaccatatacattccgctggagaagctgcttgggtccaagcgaacctcatcagcgatcacttcaaagatcaattcttcatgtccacagcatcatgtttaaat

SEQ ID NO: 287351 - DNA, 122 bp, Homo sapiens
gaccgtctctgctgccctcacctgggccctgggcccacccttctctctgcagggccctttcgtgcacctgtctgtgatgatggctgcctacctgggccgtgtgcgcaccacgaccatcgggg

SEQ ID NO: 287352 - DNA, 122 bp, Homo sapiens
aataaatttgcggcttcttgcccagtacttggcacttagaggccctcaataaatgactatcgagtttatatttcatctccccaacgcatttgtgacattcttaagggcgtgaaccatgtact

SEQ ID NO: 287353 - DNA, 122 bp, Homo sapiens
tagaggagaaagaatgagatttggagtcagatatgaatttcaaatcctggttctgccactcgctcactgactgcccttggggaagtatttttcctctatgagcttcgagttttctcatttgt

SEQ ID NO: 287354 - DNA, 122 bp, Homo sapiens
aagcggaagcctgggctgtatgtttccaagaggaggagcaggagtggccacagccatgtacgccacgatgtacaccaggggctgcgtggccacagctctggtctgctggtctgctccctgga

SEQ ID NO: 287355 - DNA, 122 bp, Homo sapiens
atggcgaacgttccgtgggcagaggtctgcgagaaattccaggcggcgctcgctctgtcgcgggtggaactgcataaaaatccggagaaggaaccatacaagtccaaatacagcgcccgggc

SEQ ID NO: 287356 - DNA, 122 bp, Homo sapiens
gaagtcggcgtcccagttcgccccctactctctcctccccggggaaggggggcagaaaagcgcaaagaggaactaaatgaactgcaagaggatgccctgaaagctccctcaaagagggggtg

SEQ ID NO: 287357 - DNA, 122 bp, Homo sapiens
ataaagagcaaccagagtccatgggttcagaaatccccatgtgtttctgtttgaatgagacgcttgcataaacagcacaaggagtttggggtggggttaaagagaatggtgtggtataggga

SEQ ID NO: 287358 - DNA, 122 bp, Homo sapiens
cccaggccggccgccttgatggaccaggaagggattcggagtccggctcagagtcttgagcgtctaggagggctgcctgggggtgtccaggagatgggaagcccgcctggggcctcccaggc

SEQ ID NO: 287359 - DNA, 122 bp, Homo sapiens
gcattagaagagaaatatcgccctgtaatctcagcattttgagaggtgaggcaggccaatcgcctgaggtcaggagctcgagatcagactggccaacatggtgaaagtcgtctgtactaaaa

SEQ ID NO: 287360 - DNA, 122 bp, Homo sapiens
ttccctgaaggaagggactaagggacggtggcgcgggcccggaccggggccccggggcggcggcacggccgatatggcatgctgtcacaaagtaatgctgctgctggacaccgcgggcggcg

SEQ ID NO: 287361 - DNA, 122 bp, Homo sapiens
gggggcgggcagggggagttgggggcgggggctgctgtcgccctgggatcccccactctgcgcggccgggcagaccctgggcgggccgggaggggtgcgggtcgcccgaactgaggcccagg

SEQ ID NO: 287362 - DNA, 122 bp, Homo sapiens
tccaacacccgccccctgtgagctcctccagttccttggcttcaccatcccagccctgcccgttctggggcatcaccatctggggatgggtctgtccccttcactagactttgtgccccatg

SEQ ID NO: 287363 - DNA, 122 bp, Homo sapiens
cgatgatcctgcaattctcatttataaaaagatggcagtcgtatccaactcccgagacggcgaacccgcaccatttccatgcgcgctctgtgcacaaggctggcctcacgttggccagcgac

SEQ ID NO: 287364 - DNA, 122 bp, Homo sapiens
cgggctcgactttctctttttgccagcgggagctgaagcccgtccttagcgcccgggccgcggtttccatcttgagctggcggtctccttgaaacttccccaagtgtctgcacaacttacct

SEQ ID NO: 287365 - DNA, 122 bp, Homo sapiens
gaccccaagcggcgtggctggcgacgggtgggggcgccagcgggtggagatcgagcagcccgagggagcacgttcgctcttctcccggacccagggaccaccttccttccctccagtgggcg

SEQ ID NO: 287366 - DNA, 122 bp, Homo sapiens
cagggtcagtctggaatgggacagcaggctctgagcatggggtggctgtccttgcagatgcgtctgggcttcctgcggctgcaggccctgcaccgctcccggaagctgcaccagcagtaccg

SEQ ID NO: 287367 - DNA, 122 bp, Homo sapiens
ctccaaggtggaaggcccacagaagctcgatctttctataccctcttaagtctgatattacgtgtgtccttgaaataaaaggtcaacacccctttaaaaagttacaggaggtgggccaagca

SEQ ID NO: 287368 - DNA, 122 bp, Homo sapiens
ggcggcgatgggaaggaggtgcggcccttcgtcctgtcctcccaaacgtcgagtgaaaaacgaagcgggttctgcggcctcgcggcggagcagagcgtttcgggaagggcgggcccagcgtc

SEQ ID NO: 287369 - DNA, 122 bp, Homo sapiens
cgatgaggctgcacttccttaaatgcgcaagcggcccagcgcgcgtgtgcagtttccaggcgctgaacgccagccagcgctcatcaactcggatgcccaggcctgagccagcatcacacatc

SEQ ID NO: 287370 - DNA, 122 bp, Homo sapiens
ccaaaccggccgcagccatgttttcgcataactggcaaaacgcgtttccgccaacgatagcgtcacttccggcgtctcaagccggcggtgaggagaatagaaaacttgccctcacttaagat

SEQ ID NO: 287371 - DNA, 122 bp, Homo sapiens
ggggcaagcaaggctgggaaagagacaagggccgcctgttccagcccaggagacagagggcgcctctgtctgctcctggccccttgccccacagggtgttcgtctgtgaaggggtggagtcg

SEQ ID NO: 287372 - DNA, 122 bp, Homo sapiens
acggagatggcctccgcaggggctcggggaagcccccagggcgccggaccgtctcaggcgcgcatcccgcgccactcacctgtgggatccatagcgtcgctcgcctcagagatggaagccgc

SEQ ID NO: 287373 - DNA, 122 bp, Homo sapiens
gaccccgcccccgaggccccgccccgggttaggttgaggccgccccactgcgccgagggccgccatcgctattgcggcattctccctcggctccggaggtaggggcaactcttctcttcctg

SEQ ID NO: 287374 - DNA, 122 bp, Homo sapiens
caacatccagcagctacttgatgagcgccctccagtgggccttaggtccctatgccggcgcggggttacagcagtggacagacaggccagtccctgtcctcgaggagcccatgatccgcggg

SEQ ID NO: 287375 - DNA, 122 bp, Homo sapiens
tgcagtagagacgccatctcttcctgcaatggggtcaacggcttggagactacaggtggccgctgcaggcacaacgcgcccaacaagcgccatggggatccgttgcttgagggtgcggctgc

SEQ ID NO: 287376 - DNA, 122 bp, Homo sapiens
acggaagaagcggggacaggagtggggtgctgctcttaggagcccactcggccctggagccgcagccttcccccgggacgtgatggtctctgagctgcagctctgccagccgcgtctcgttt

SEQ ID NO: 287377 - DNA, 122 bp, Homo sapiens
cctctccaagaatttgatacaaatgcccccaacacacattgcctcaaggtgctatgatttcggcccttcgaagtagtcgagctgaactccttcctacagaggtttatttgaagaagaaagca

SEQ ID NO: 287378 - DNA, 122 bp, Homo sapiens
tggcgtgtttagaatgtgcaagttgagcggtcactgagaggcagctcagcagagtgctctcgcaaggattgggcgggcaacttcccactgcgtgcgatgtatcttaggaaagccatttaaaa

SEQ ID NO: 287379 - DNA, 122 bp, Homo sapiens
cagtggggagccctgggggcaatggggagccatgggaaggctgtgggctggggagggacacggccagctctaggtatagaaagatctctctggggctaaggtgggaatggatcagaggaggg

SEQ ID NO: 287380 - DNA, 122 bp, Homo sapiens
tgaactcctgacctcaggtgatccacccacctcggcctcccaaagtgctgagattacaggcgtgagccattgcgcccagcctaaagtcatgcgtttgatagagctgcatttcaccctcttaa

SEQ ID NO: 287381 - DNA, 122 bp, Homo sapiens
atctgtgactcgctctgtgttctgctgtgccccaagacacatacacccctctcctcctaacggccccccgctaacatcccacccacctgcccgctgcaaggggcattggccaagtcactcat

SEQ ID NO: 287382 - DNA, 122 bp, Homo sapiens
ctgacccgcccctcaagacctggccttagcctaatctcagggtttgccccaccccgaatccgcccctccacagccccagcctcagccccgccccgcctccctcagtccctcctctccctgcc

SEQ ID NO: 287383 - DNA, 122 bp, Homo sapiens
ttcctgatgctgggtgctggcatcgggcccttccttgtcttctgatcttgtccctgaccccgggatatgcgctgccttttccctcctcagcccgggctcccctttcccttcactctaaccta

SEQ ID NO: 287384 - DNA, 122 bp, Homo sapiens
accacacacacgcagtgcagccaggcggagaagctgtcccagcgcagcaggccccggccacggccatcgtcctcttcatcgtcctctggcgcgcctcccgccgccacaagggccggcgcctc

SEQ ID NO: 287385 - DNA, 122 bp, Homo sapiens
tccttagcgccgcagaaagaccaccgatgtggagcaactaccccccctggtggtgaatatcgggataagattacacaggggcagcttacttggccctcacttggtcttgcaatttctccccc

SEQ ID NO: 287386 - DNA, 122 bp, Homo sapiens
ccttaaaggcgagaaacagcctactgtacagtgtgccagggaaagcatcacatcggtgggcgtcggtggcaacaccacttacacttcaccctgattttgtttcctccttgcacgtgctcctt

SEQ ID NO: 287387 - DNA, 122 bp, Homo sapiens
cagctcttggtctggtacccagcaactgccttagcagacaacaaacctgtagcacctgaccgacgaatcagtgggcatgtgggcatcatcttcagcatgtcatacctggaaagcaagggatt

SEQ ID NO: 287388 - DNA, 122 bp, Homo sapiens
cggtccggtgggggcaggggcgggggtcgtgaagggttccagcagcgggaacggcaggcccggcgctgatgcggggtcaacctccggggggcgctccggcgcgggcggctctcggtccaggg

SEQ ID NO: 287389 - DNA, 122 bp, Homo sapiens
aacacctggtgtccccaagccccgcccctccccaggccccgccccctcggctccccgccgcgtccagagccaccccattcagaaagtcacaggtccccctgccgggaagggcgccaacgtcc

SEQ ID NO: 287390 - DNA, 122 bp, Homo sapiens
cagactgctgtgctaggagtgagcaaggctctgtgggcgtgggacccaccgagccaggcacgggaatcaccttgtctactggttgctaagtccttgggaaaagcactattttggtgggagtg

SEQ ID NO: 287391 - DNA, 122 bp, Homo sapiens
gtccccacctcctcgaagcctccaagctgctgttaatgtcagttcttttcaccaggcaaacggaaggggcattcttgctgctgttaggaaacggttaccacttctccgtgtctgtttaaaat

SEQ ID NO: 287392 - DNA, 122 bp, Homo sapiens
ataggacaaactttgggcaggcagcgttaaactgacaccatcacttccgggttatccccacggctgccccctccttagcaaccgcgtggggttgctaagcggaagtgccttcaaagcaaccc

SEQ ID NO: 287393 - DNA, 122 bp, Homo sapiens
tgcttcaagcgccggttagacaggttcagggtcccggtggccacggcctcctctagggcccgctctgcactgcgtctccccggcagacctggagacccgggcacggaggtcgtggctgccgc

SEQ ID NO: 287394 - DNA, 122 bp, Homo sapiens
tggctacaagatctagctcctttacctcctggctccccataccccagcacctgtgggacacggagcctaagctgggaggaagttctaggttcaggccccatgtggtcactgacctgctatgc

SEQ ID NO: 287395 - DNA, 122 bp, Homo sapiens
aagaaacgggataaaataaagcttagattggaaaaaatatttaagattctacaaaattcacgcgtaaacaagggaagctgagtaattgtatgttcaaatacttgcaaaacatgtaggcttaa

SEQ ID NO: 287396 - DNA, 122 bp, Homo sapiens
cggcgagactccaaggcctcagctgcgcccacccgggctaggtgggggtgggggtccggacgtccttctgcctcggctggctccttgcagccagcaccgtgtggccccggcttcctgctgtc

SEQ ID NO: 287397 - DNA, 122 bp, Homo sapiens
aagcgaagtcacctaacgtcccctagtgtacatacccttccttcttactgtcaccagcctcgccaacctgggtcccgttgccttggaatgttctttccagttttgcatcgaggccaagagga

SEQ ID NO: 287398 - DNA, 122 bp, Homo sapiens
cgcccgccggaagctgaaaggcgtgtccgaccccgcccccgggcgcgaccaatcagcgcgcgcgactcatgaatagtgagcgcgctggcaccgccccgcccccgcctcccgcggcaccgccc

SEQ ID NO: 287399 - DNA, 122 bp, Homo sapiens
tcctccctccctacccgcaacacttgcttcctagaaactctcctggatgggatttaaaaacggctcctggacagggcttccccttgagtggcaggtctggtcagtgccacatagcaaatcac

SEQ ID NO: 287400 - DNA, 122 bp, Homo sapiens
gtggctgcgcgtccccatggcgaccgggcgggtgcgcgcgtcaggggctggggcctgaggcggaagtcccgcccttgccggctcccgtgagaccttgcaaagcgcaacgtagccggaagctg

SEQ ID NO: 287401 - DNA, 122 bp, Homo sapiens
gaaagggcagccgcacctaccctgggcgcggaatgcgcgttaggcaatccccggtctgcgcgtcccacacgcagacgtggcctgccaggcagcagctcaccagcagcatgccgtcgctggcc

SEQ ID NO: 287402 - DNA, 122 bp, Homo sapiens
taatattaagatctttgtgcaaattcctcaaaagcctcttttatattttgggcatatcttcgcctgtcaataaacacactcacctactccagcattttcatgactacaaagtattctactat

SEQ ID NO: 287403 - DNA, 122 bp, Homo sapiens
tgaagaccttaaattagaagaagcaacacgtgttcccatttcttgaaattggcagatattcggatttcatcgtgtttgctgctgcctttttttaaaaaaacttttttaaaaatgaaacctta

SEQ ID NO: 287404 - DNA, 122 bp, Homo sapiens
gctccctgtcactcagcccgcgcggggcccccgattggcggcctagccccgttacgcactcgcctcgcgttcacatacccggggagggcagtagaaaggtgatcaatcttcatcaggctaca

SEQ ID NO: 287405 - DNA, 122 bp, Homo sapiens
cctcagcttctccaccaagtccctgccgcaggcggtgggccagggctccagctcgccccccggtgggaagcacacgccctggtccacgcagtccctcagcaggaacaggagctcgggcctgg

SEQ ID NO: 287406 - DNA, 122 bp, Homo sapiens
acagctccgttttatgtttactgtttcatagtcaactcaagcaggattgttttttgtacacgctagtgtgttagtctgatgtgtaagcttttcttgaattttctaaagaatgacacacaaaa

SEQ ID NO: 287407 - DNA, 122 bp, Homo sapiens
ggaccaaggagtcaaaatgaaaagaggtaggagaaagagagacacagaaatcacaggctccggggacttcccaggacccagaatccacatttacttctgtcaagtttaccaaaatctctgag

SEQ ID NO: 287408 - DNA, 122 bp, Homo sapiens
ccagagccactctgttcatctctggtggaacgggctcgagaatctgcatgtttttataagcggtctagatggttcttaacgtgccatgaagtttgagaaccacttttgtggcactaaggaag

SEQ ID NO: 287409 - DNA, 122 bp, Homo sapiens
ccaaaatgggccttttcctgtatcattaacagtcctcaatgttctggctaatcaactgagcgactgtttatagatttgcaggccatttggatttacaattaatcttattaatgaggctgaaa

SEQ ID NO: 287410 - DNA, 122 bp, Homo sapiens
gctcccttgcggatagtctatgttctccatataaacccagcacttcccttaattgagatacgtgggacttcactccgtccccagcccggaaccacaagtgagggcactgcgtttcctgattg

SEQ ID NO: 287411 - DNA, 122 bp, Homo sapiens
aatttaggagagcctatgtggacagcaattcttgctgcactttgtggggtaatcaagccacgtttatgggattgcagcttatttcgcaggtaggtttgtcttgctgagatttgtctttggtg

SEQ ID NO: 287412 - DNA, 122 bp, Homo sapiens
cctgaattccccaaagcgcagagacagacaggatctgccaggacagcgcgcagggcggggcggggacaggcgcgccaggagcggggcgggcttccagccgctggttttgctgagggctgagg

SEQ ID NO: 287413 - DNA, 122 bp, Homo sapiens
tctccgcacgcctgcgtttctgctcctgtgtgcttgtctgtctgtgacacaggccgcggccgcatggctgaagagaggggatccctatttgctctcctgtcattattgctgtcacaaagacc

SEQ ID NO: 287414 - DNA, 122 bp, Homo sapiens
aggataaatgagataaatgagttaatcatctcctgcaaggcagccacttcagagttatgtcgcccgcctgcggggactaacgactgcaattaagacgctccttctcggtcccggtcgggttc

SEQ ID NO: 287415 - DNA, 122 bp, Homo sapiens
gggcaagcccctacgctcctgatctatgctgcatccagtttgcagtcgggggtcccatctcggttcagtggcagtggatctgggacagatttcactctcaccatcagcagcctgcagcctga

SEQ ID NO: 287416 - DNA, 122 bp, Homo sapiens
ctacacgctctgtgacggggccgtccgcctccttcctgggctcctttaagagggtggtaacggtacatcaccgcgggagtggagaggcagggcccactaggtcgtcgctgcaggccaggccc

SEQ ID NO: 287417 - DNA, 122 bp, Homo sapiens
agccgttattcctttttcctctgccttaggaaagcgcgcgagagggaggggccggaacaacgaacgctggttacctaacggtccggcccagccagtcaggttcccaaagcccacaccgcgcg

SEQ ID NO: 287418 - DNA, 122 bp, Homo sapiens
aaggtcaagagctgcatccagtgagagcctcctggttggtgggaagtctctacagagtcccgaggcagcgcagggcctcacatggttgggggggcttagcatgtccctctgatctctcttcc

SEQ ID NO: 287419 - DNA, 122 bp, Homo sapiens
ttgggcagccggtggcaggagcccaggatctaaggagtagctattgtttcccctgaagcccgcgtggccccaggtcaccccgtgcggggtgaagcgcaggcgaccgcgcggagacccgggat

SEQ ID NO: 287420 - DNA, 122 bp, Homo sapiens
gattgtcacgtgataccgcaacggccaaagtcagcaaggcagggactggaggcccaagcccggtgccagcctcccctgcagcctctctcacccacccacccagagagggcgagctagggccc

SEQ ID NO: 287421 - DNA, 122 bp, Homo sapiens
cgtgatctgcccgcctcggcctcccaaagtgctgggattacaggcgtgagccactgcacccggcctaaaacaataggttttgaattggactcagaatatagggagaataataataatcatgt

SEQ ID NO: 287422 - DNA, 122 bp, Homo sapiens
taaggcgcttccccactccaggcccgacccccggcgcctgagcgccaacttcgccaagaacgctcctaactccaggccatcctgcagcgcagagggggcgctgctgccgggcatcagccgtg

SEQ ID NO: 287423 - DNA, 122 bp, Homo sapiens
accatatctgaaattgtctttttcatgccttctcttgctcaattgtgcctggaatctggtcgattttattaattttaaatacaaaccagttattttattagttttaataagacctttccaaa

SEQ ID NO: 287424 - DNA, 122 bp, Homo sapiens
tctcctctcaattttaaccctcctcaaccactcaatccatccaaaaacgtctgtgacagtcgtggctctaaaaccgcgcagaacttgactacagaacggtcggtgacaactccacatatgat

SEQ ID NO: 287425 - DNA, 122 bp, Homo sapiens
gtagggcgccctgctactgtactggggagtcagtgccctgttaccgggtctcgtctgtctcgtctctcccgcagatctcgcgagagtggctgactggctgtgggggttgcggcggcagcagg

SEQ ID NO: 287426 - DNA, 122 bp, Homo sapiens
ccgccagcataatcccagggctgaggctgcagagaggactccaaattagccaggagaagacgtgcagagcagcctcaatgctctcttagatgctggggcccaggccagtggagccaagttga

SEQ ID NO: 287427 - DNA, 122 bp, Homo sapiens
atatatatgccaaaacaaaaattcgttgttttccagtgtcattaaaaacagaatctaggccgggtgcagtgactcatgcctataatcccagcactttgggaggctgaggcgggtgaatcacc

SEQ ID NO: 287428 - DNA, 122 bp, Homo sapiens
ggaatactagttcttcgtgaatcagtaaatatttgttaagctcctggtttaggccaaacccggtatttgacactggggaacaatgatgagcaaaaacacagttcctgccctccttgagctta

SEQ ID NO: 287429 - DNA, 122 bp, Homo sapiens
ccagtgcgcccgcatcgtcgaggtgaggcccgggcagcaggcgggctccttggggcttgacgggatgcgggccggcctgtcccgccgcccctagtccgcgccccgcggagtcgccgagccgc

SEQ ID NO: 287430 - DNA, 122 bp, Homo sapiens
agggcgcgtctggcaccgggaaggtgtagatcatctagaatgacggcgattccgacgccccggtcagtcctgcgtgattggcgagggtgcatctgtcgtgagaattcccagttctgaagaga

SEQ ID NO: 287431 - DNA, 122 bp, Homo sapiens
ctcattcttcctcagtttgttcgtctgcttgaaagttggccaaaaaatcctgctgctcaccgacttcccgtggtcagctgctgtcaagcgttcactttctcttctgtcattcctcatggaat

SEQ ID NO: 287432 - DNA, 122 bp, Homo sapiens
tggcagactcccatctctcctggtgccatctccggagcggaaagtggagcgccccgctggcgaccaaggccgcactgagagccctggtttggtcaacagttgggctccaaggtaccacttcc

SEQ ID NO: 287433 - DNA, 122 bp, Homo sapiens
tgaatcgtccagtttaagagggataaagtggcgtcgcacaggagcgaggatggagagcggcgactaggcggctatggagaggtacagcgtccagttgcgcccagccacactgcaggacgccg

SEQ ID NO: 287434 - DNA, 122 bp, Homo sapiens
cacaggtcagtgctcggccggggcgggcgcgggacgggagcgttcgagagcggaacagggcgcccacccctccgctcccgggagcagagaagctttggtttcatttcccggccccggccgcg

SEQ ID NO: 287435 - DNA, 122 bp, Homo sapiens
gctctctccacaacctccgtccacagcgcacgaggacgttcagaaaactccgccccctagcgacgctagcggtgtcacgctaggccactaaagccactcccacttggcctttacgctgtgtc

SEQ ID NO: 287436 - DNA, 122 bp, Homo sapiens
agcatcagggtcctcttgaaggcaccccataggccccactagatcctgggaatctagatgcgggtgtctgcaattctggaaaaagccatgtgctttttgtttttgtctcactatgtcaccca

SEQ ID NO: 287437 - DNA, 122 bp, Homo sapiens
tgtattcctggaccccacagtttgcaactggtacaaccacgtctcctgaaatgaaaggcacggtccatgccatctccctgggccccgtcctcactccaaaccgtctgcagaggaactctcca

SEQ ID NO: 287438 - DNA, 122 bp, Homo sapiens
ggctaatttgtcctttctgtaacagacaccctagactgtgtctatgcggttgggcagaggcgtgatgggtaaacactcctggcgggagactacaggcgctgcagctacatcctgtttcgtac

SEQ ID NO: 287439 - DNA, 122 bp, Homo sapiens
gttgagcagaataaaagcccattttgccagggcccgcagtcctggcggcccccgcagctgcggccctgtaactttaaacctggcctgagatcatcgttttggcgccggccaaacagagcccg

SEQ ID NO: 287440 - DNA, 122 bp, Homo sapiens
ttcatggagatgacattctaaatggtggagacggagagtgaaagtcgggtttgagaaaaacgtgctgcccaggcgcagtggctcacacctctaatcccaacactttgcgaggtcaaggcagg

SEQ ID NO: 287441 - DNA, 122 bp, Homo sapiens
ggaagccaggtcctgcttccagaggagtggtagttggaaatttgcttccggaagcgcagacgtttagcttccggcaactgcaggtttagaggtttgtgttgcaatttcattttgtacttttg

SEQ ID NO: 287442 - DNA, 122 bp, Homo sapiens
ccctgagttctgtgacccattccagcaaatgaccaaactcaaggaaggggtcgtgggaaccgccccgccccacccccaatttatagtaagtcagtcagaataccagaggccggggccaagct

SEQ ID NO: 287443 - DNA, 122 bp, Homo sapiens
acctctatgaaccccaacctttttgtactcggggaggctgaacccctgcccaaaatagcgcggtgaaagctactgccttctcccaagtaggggcctccagtactgccacagcaggggccgca

SEQ ID NO: 287444 - DNA, 122 bp, Homo sapiens
ttaagtcatattccaatttgagaaccactcatcagaaagaacaaagccaagcagttaccacgtaatttacagaattccaattcttagtatccttgaacatttgtgggcacagttagttctat

SEQ ID NO: 287445 - DNA, 122 bp, Homo sapiens
gaaaacgcgggaagagggtcttgcagattccaaacttaggaagggtcgcggctccgcgcacgtgctctcggggtcaccttccccgcgcctgtgagggtgccaggagttcgtctccaggtccc

SEQ ID NO: 287446 - DNA, 122 bp, Homo sapiens
gtgcttagagtcctggctcctgggggagagacccccgctgctgactgtacttagagtcctcgctcctgggggagaaatcgccactgctgactgtgcgtagagtcctcgctcctgggggagag

SEQ ID NO: 287447 - DNA, 122 bp, Homo sapiens
gtcattgggtggcagggacagttcttttgcagagtagtgcgaaaagggtaggtaggtcgacgcccagccaagaatttgggatggcgagccccaaaagggttgacctttaaagtcattcagcc

SEQ ID NO: 287448 - DNA, 122 bp, Homo sapiens
gagagcgaagggcgggcgggtcccggaggtgagtgctggatgtggtctgtgtgcggacgtcgggaggggccgctgcgggcggagcgacccattgcccggctctgccagcgcgctcctagact

SEQ ID NO: 287449 - DNA, 122 bp, Homo sapiens
caagaatttcaggtggtgggaggtcgtgcagaaaagaggagaggtcaatggtggaaaatacggagggccacttggggaaataaaagaacaacaactcagagggttaaccatatcacactgag

SEQ ID NO: 287450 - DNA, 122 bp, Homo sapiens
tcggcgatggcggggagagtaaatccagtacctcccatccgtgaactggacggggcgggccgggtgggccggaggaggaaggaaaacagaggacagcggatgaggcggccacccccgtggtc

SEQ ID NO: 287451 - DNA, 122 bp, Homo sapiens
atataaataaaaatattaaagtacaaaagttggctgggcatgttagtgcaaacctataatcgcagctacttgggtagctgaggtaccagaatcgcttgaaccagggagatggagtttgcttg

SEQ ID NO: 287452 - DNA, 122 bp, Homo sapiens
ccccaggccccgaaatccctgactcggggccagagagtggagcagggaccctctcctgcccggtcccgtccccaccccagtcagggccccaggctggagactgagacgtgcgctctttgtac

SEQ ID NO: 287453 - DNA, 122 bp, Homo sapiens
ttcagggtccccttaagtctcctcaggacagccgtgtgcgtgtctctgtgtgcacaggagcgacacatgagaagggagtgtggtctcagggtgggcgtggacccacagtgcccagaccctac

SEQ ID NO: 287454 - DNA, 122 bp, Homo sapiens
cgggattcaataactaaacgtccatttctagcattgactgaagagctcaagcttgacactcgacctcaatccttagcagcaccgcccaccatgctcccggaagctgcgacactacgccctgc

SEQ ID NO: 287455 - DNA, 122 bp, Homo sapiens
cattttttaacacattgagaccccactgtctaacagtattgaaaggttgttttagtctctcggtcctgtcattaaaaataataatgataattgttgggtcttttcttcaattggaatgcaga

SEQ ID NO: 287456 - DNA, 122 bp, Homo sapiens
ggttaaatgtatttgcttcctgtggctaaaaataagtctcacccattgcagttatgtcaacgaatggcctatattcctcagctgcaatgaaatggtaacatttgaaactaagaaatgctaaa

SEQ ID NO: 287457 - DNA, 122 bp, Homo sapiens
ctcaaacttacagtaagtgagaagctggcccctttccaacccagtcctttgcccagagggcgggcgggtcactcgccgcctgcaggttccgcggggaactgcagaccagactggcggatcag

SEQ ID NO: 287458 - DNA, 122 bp, Homo sapiens
gagtgtgtattatcccaattttatggggagtaattgtgctcactcggctcaccaccaagtcgccagagcgcgcctccgcaaggaagccctccaggcacttctactttcccggacccgcctcc

SEQ ID NO: 287459 - DNA, 122 bp, Homo sapiens
cgccgccgcctccctcccccacgcccgcgagcggcgagcgccggcccggcccgcgccgcgcgccgccgtacctgagccgcctgctgacagggtccatcttccaggaaccgggcgatgaggaa

SEQ ID NO: 287460 - DNA, 122 bp, Homo sapiens
caactgtgggatagcagaactgtgggaagcctgtgtgcacggagcccacggggacacccacgtgcaccctgaagggatctcaggacggaaatatgaaagcgaggggctgagggggcggagca

SEQ ID NO: 287461 - DNA, 122 bp, Homo sapiens
cggcgaaggaggctcatctattataaatgcacattcggggctgacatcagcgacgagcggcgggcgagcgccgacgagcggtccctgcgcgctgcccgcccggagcgcagcccccaggctcg

SEQ ID NO: 287462 - DNA, 122 bp, Homo sapiens
cgtttgaagtccaaactctagttggaattgtgggaccttggaaggttagtctcagggattcgattccttttcaggagaatgaaggaatctgcaaggggttgttgttacacaacttacgtgag

SEQ ID NO: 287463 - DNA, 122 bp, Homo sapiens
agaccgggcggtggcgggggcggcgggggtggtggcggaggcggcgggggcccagggtcccggcaggccgcgtagcgctgcacggtgcacgccgcgcgccgcccgaagcccgcctccggctg

SEQ ID NO: 287464 - DNA, 122 bp, Homo sapiens
gaccaaggccgccttcctcttgccctcgttggtcttcctctctgaggggttttctttgggcggtgcgctttggggaggcggggtcccagcggctgggccggacgcacgctcccgggtccgcc

SEQ ID NO: 287465 - DNA, 122 bp, Homo sapiens
gaggccttggcattgcagtaaagagtttcactgacgcaaggctggcgatgcacaaggccacgcagaagatggagctgttactcaaatcagtctccccaaaggcttagaggtcagggtttttc

SEQ ID NO: 287466 - DNA, 122 bp, Homo sapiens
aaaacattttaaatgtaagttctataactgtaacataagttgtaattcggatctcccttacgggcgcaatcacttttgaaatgtctgccgtcagcttatgtgtttttccatttgctttatgg

SEQ ID NO: 287467 - DNA, 122 bp, Homo sapiens
gtagctggtaagtgcagagcaaggattggaagccatgtacggtattgtaccaaagcccctcgtaggcacctgcttctagcaggagttattccaccttagacagatgttactcatggaaaggt

SEQ ID NO: 287468 - DNA, 122 bp, Homo sapiens
tgaagcacaccactatccaaataccagtagctccacaatttctgaatttgatttttctaacgctgtagtacaccaaaagagctattcatgagatccattgatagataattcaatatttccac

SEQ ID NO: 287469 - DNA, 122 bp, Homo sapiens
cggactcatactacagcggtcgcaagagggaagagcacgtctttgctttttcttggcatccgaaaactcaagctcgaactgggggcaaaggccagcggctgcggttccaccggctaaggcgc

SEQ ID NO: 287470 - DNA, 122 bp, Homo sapiens
tgaaagtcgctactcgagccttgccaactggggagactatgcccatgatatccgcggcctcggaccccggaccctccaggccctcgcgccccacccccgaccagcctcgggccaggctaggg

SEQ ID NO: 287471 - DNA, 122 bp, Homo sapiens
accggcgcaggcctcgggcggtggagacaggcttagcttccaggaaagagcagcagagagcgattcccagaacgcgagggcttacagttccccgagaagcaaaagaaccaggtccttcccag

SEQ ID NO: 287472 - DNA, 122 bp, Homo sapiens
agaacgcgagtgcttgcccagccagcatctggctgtgcagtgagagctcccactggtaagcgtggatgtgagtggggcaagtttgcaggatgccctgtggcagcggctccaggctgaccctg

SEQ ID NO: 287473 - DNA, 122 bp, Homo sapiens
ctgagacatttacatgctgtttttcggaggtgtccttaaagggaaggggaatgccaggaacgggctgcaacttggcaccaccgagggaggtcagcttttacaaagcacatccaaggcaggcc

SEQ ID NO: 287474 - DNA, 122 bp, Homo sapiens
ccagagcgggcctggccacgggcaagggacagcgaccgcctgggccaggacaggtgagagcggcgcagtcccgggcccggcgtgtccgcgctgcgcgggagaggccagcagagggcgccaga

SEQ ID NO: 287475 - DNA, 122 bp, Homo sapiens
ggcccggcaggaaaagtttcccggtgaggtgacgatggacaagagtcgccccatcgtaagcgaaagtggactgagaggaagcacaaacgcatggactcaaccagctcgcccagattcaccct

SEQ ID NO: 287476 - DNA, 122 bp, Homo sapiens
gcggtggccctgcacaggacttgacgttctgggtcagcgatggactgcaggccagccccccggcgacgctgaaggtgatggccatccagccggccatacagatccaccgcagcacagggctg

SEQ ID NO: 287477 - DNA, 122 bp, Homo sapiens
ctgttacctatgggttttctaacaacaagacttggtactttaggagtctgttttcagacacgttgtattctctgtctgcaaggaagtttggtgtttggactagatgttggattcccagttct

SEQ ID NO: 287478 - DNA, 122 bp, Homo sapiens
aaccttcctctatggaggttctagagccaagtcttgtgcccatcatggccttggagatgacgggaaatgggtggggagggaggctctggtggaaccgagacctgggcccccggcatccctgc

SEQ ID NO: 287479 - DNA, 122 bp, Homo sapiens
cttctgtgctcgccgctagcgtacgtttttctctcccgtcagtgcattaaaagacatcggcgcgcttttttggagtcatgcacttctggcctgagaaaacttaaaacgcctgcctgtggcca

SEQ ID NO: 287480 - DNA, 122 bp, Homo sapiens
ggccccactccccagcagccatatgtgtttgcgagcgttttcagtcggtccgcatccacccggtcccttcagccagaaccctaggagccccgccccgtcctcccggggctcctttctcaccc

SEQ ID NO: 287481 - DNA, 122 bp, Homo sapiens
atgaatgccaatctgcgaatcctgtgtgtgactggatatgtcgctgaggaggcggaacctcgggactggataatatggactgagtgtcatttcccctgtcagatagcaaatacacccccttc

SEQ ID NO: 287482 - DNA, 122 bp, Homo sapiens
tccccccagtgaatttgtggcatcaggagcccagcccagcactccttccactgcacgtgccgctgtcctggaggacaggaagcagagccagggtgctgcgtacgtggctcttcagagggctc

SEQ ID NO: 287483 - DNA, 122 bp, Homo sapiens
gccacggcttgggcgggactaaggctgggaacgagccaccgattggtcagagctacgcggcgaatggcggagacgctgaggcgggtgctaaccaggggcggtgcggcctggtccggggagga

SEQ ID NO: 287484 - DNA, 122 bp, Homo sapiens
tagtgaagggggaaagtgaggttggggttttgtcaggcaggctcgtgcttttactctccacgtgtggagcagccctggtgtgagttgtggggtggttctctggctactgggataacgttcca

SEQ ID NO: 287485 - DNA, 122 bp, Homo sapiens
aggaaggagtggcgacctcaccctagtcggccggccggccgcgcggcttcccctcgccggcgcagccttgggcaccgcggctcacacccccacacaggccgcccagtcctgcgctcgcacgg

SEQ ID NO: 287486 - DNA, 122 bp, Homo sapiens
aacttccttgtctctagaaaacttgccactatgaattatttctccgtccctttgagacatcggccctttcctggcctcttgctcagttcactgcccagctttgtcttctcgaaggacccagg

SEQ ID NO: 287487 - DNA, 122 bp, Homo sapiens
aaatgccattctagcaaattgaggcaataatctgaacactcagatttacatattcattctcgctaacttcccaaacaagaggcactatctcttcagagattttcttctaaggaaaatcaact

SEQ ID NO: 287488 - DNA, 122 bp, Homo sapiens
gggtagcaagaggagggcaggccagcgagcggggcggggctggagggcggggcctcctcgcgtcggagcgggcgcgcgctgacttaagcacgcgcccgtgctcgtggcctgggttgcgcggc

SEQ ID NO: 287489 - DNA, 122 bp, Homo sapiens
ccagctagaggggcggaaagtaacaaggaggtgggggtacaaatcctcagctcctgcttccgcaagcactaacctgctctgaagtgagccaggcagctctggccatcttttcccagccacag

SEQ ID NO: 287490 - DNA, 122 bp, Homo sapiens
cctgctgtcttctccccatcgggtttctcccttgtggtcacgttagtgatgttttggagccgtggaccagggcaccacgtttcactgaaattcaccccaggtagctgagtgtggcaggctct

SEQ ID NO: 287491 - DNA, 122 bp, Homo sapiens
tccacacccacacctgtctcacagctgtttccagcacctgttccctggggtgggtgggggcggtgaagcaaggcagggagagaggtacctccatttggctggagtccccattcggtgtttcc

SEQ ID NO: 287492 - DNA, 122 bp, Homo sapiens
ttgatttcgaacatcccattcttcaaccaccagattcaaaacttctagtacatgtacatgcgtcctgccaagaattagagtgcttacttttcaacagcaccaacagaagccagaagaaagta

SEQ ID NO: 287493 - DNA, 122 bp, Homo sapiens
ccccaggcaagcggccacccccggcaggagggtcccccggcaggagcgtcccagccactccgcagtcactcctgacccagaaaagaacaaccacagctgggcccagcaccccgggccactcc

SEQ ID NO: 287494 - DNA, 122 bp, Homo sapiens
cggcagcttgtttacgacccaaaacggggatccaaatgcccctgagagcagcggcatactcggagagaggaggatggtcacgtggtggagaggcgtgtttttgtgtaccagcccttcacctc

SEQ ID NO: 287495 - DNA, 122 bp, Homo sapiens
ctagaccagagccatccagcccaggagcgatggccacgtgtggccgctggacacgagagacgtggccagtccaaactgtgcagtgcggtaagggcagaacacatgccagctttcgaaggctt

SEQ ID NO: 287496 - DNA, 122 bp, Homo sapiens
ggaagggaggagcaaggctgagcccaatggctaaatcaaggcacaggcaggggaccaattcgctcaatttaaacaggaaaatacatgtgtttatatatctatttgggaaaagaggaagggga

SEQ ID NO: 287497 - DNA, 122 bp, Homo sapiens
aggtcccggagctggccctgcggggcccggcgctcagaagtgatgaattgatcagatagacgaggccgggcttgtccccggccactgattatcgaggcgattctgatctgggcacggccacc

SEQ ID NO: 287498 - DNA, 122 bp, Homo sapiens
tgggcttcgctgctcagccagctcctgcgaccgccctgcgcttcgtgcaccggggcggtccgttgccaaagccaggtgagcgagacagaattatctctggtctgtcccagcagggtctccag

SEQ ID NO: 287499 - DNA, 122 bp, Homo sapiens
ctgcggtgggtggagtctgagctgcgccgccccgtcctgcggtgggtggagtctcagctgcgccgccccgtcctgcggtgggtggagtctcagctgcgccgccccgtcctgcggtgggtgga

SEQ ID NO: 287500 - DNA, 122 bp, Homo sapiens
ggcgctagtcacatgaattctctactgaaccccacgaggtgacagtcagaagactgaaaacgaagccccttgggccgtgcagggaggctcctgcacacatacgtttcccatggggcaaacgt

SEQ ID NO: 287501 - DNA, 122 bp, Homo sapiens
gggcgcccagtcccatcgatcacccaagggctgaggagtgtgggttcacagcgcgggacccgcaggcagctccacctgtggccccgatgcgggatccactgggtgaagccagctgggctcct

SEQ ID NO: 287502 - DNA, 122 bp, Homo sapiens
gatcttggcagacacctgtcaccttggcccgcgctaccttctggagattttccccagtgacgactgagccctgggagtagtgacaatgagtgagacgttgcatttttggcgatgtcatccca

SEQ ID NO: 287503 - DNA, 122 bp, Homo sapiens
tggcagttgtagcagaggcagttgaggcttgttgaccatcaccatggaaacccccgcctgcgagcacggggcggagcctacgaggggcggggtcaggcgcgctgccggccccaatcctcagc

SEQ ID NO: 287504 - DNA, 122 bp, Homo sapiens
gccgctgcactgtgaagctctccacaaccccgtagttgtgtctgcagtaggtgtccaccgcggcccgcgcctgctccaggatgtccttctggctgttccagtactcagcgtcaggccgcccc

SEQ ID NO: 287505 - DNA, 122 bp, Homo sapiens
aaatgtaagaggacctgggcctgcttcccactgagaaacctgtgaatgcagggaccatggcgatgctgttgaacatcacactgcttccccagagtccaaacagtgcccactcctttactgct

SEQ ID NO: 287506 - DNA, 122 bp, Homo sapiens
ctcaaaaatcctaacattcagctgattgccggcaggcttagagtcaggcatctgctgcttcggtgggggcccaacgcgcatgctgggcgcccgggtgattgagatccaaagagaagggcact

SEQ ID NO: 287507 - DNA, 122 bp, Homo sapiens
cgtagtgccagcctggacacaggcgccccggcttgacaccccctcaccccaagccaagggcgcgctgacccccaaggcctgaggctggctgccccctaaagcaggacaaaggctacgggacc

SEQ ID NO: 287508 - DNA, 122 bp, Homo sapiens
ggatagcaggtcagttgatcttctgcaggaaggtgcagcttttccatatcagctcaaccacgccgccagtccattcttaaggaactgccgactaggactgatgatgcattttagctttgagc

SEQ ID NO: 287509 - DNA, 122 bp, Homo sapiens
tcagagtccgcttgtactcctgctccggccgggcctgctccttctggaagtcggaggccacgtagcaatagtggtgcttaatgttctccactaggtccaggtcctgctgtcccaggggcagg

SEQ ID NO: 287510 - DNA, 122 bp, Homo sapiens
cctgagtgccagccacccaagtcatgactgtctctcctctctttagagcaacgaagattccggaggagcctgggcatcggcctgagtggtagacatgaccagtgggtgcccgggtgccaggt

SEQ ID NO: 287511 - DNA, 122 bp, Homo sapiens
gtgagaattctctgttttttctctaccatcctttccaggccttttcctcacctaatgagtcgtagagacgagggcccagagagtctgtaaagtggctggtgaaagattagtgtcccagggcc

SEQ ID NO: 287512 - DNA, 122 bp, Homo sapiens
cttgtctgctgtttctgtggcctggctgagccaagaaaacatgttaaagcacagagcccacgcaagacagtgtgcttgcaggagaccctaccaacaggaatcggataacaaggagctaaagg

SEQ ID NO: 287513 - DNA, 122 bp, Homo sapiens
gactcaactggaaggaagtgctgctgccagtgtgaagaagccagcctgaggtgacagaaacggaagcaaacaggaagcagccagtcttttcttcctcctcctgtcatacggtctctctcaag

SEQ ID NO: 287514 - DNA, 122 bp, Homo sapiens
gaagcaaacaatttgtgggccagtgtcaacacatggaccacactttatatagcactgtaacggaaaatgattctgttaatgtaatgaacatgggaaagaccagccttggcctatctttatga

SEQ ID NO: 287515 - DNA, 122 bp, Homo sapiens
gacccaagctcgttgtttttgaactaggattctgagacagtcttttcatgtggttgcaaccgaggagatgtaaactcaagaccttgaaaatagtcatcattttcccactgcagtagagagaa

SEQ ID NO: 287516 - DNA, 122 bp, Homo sapiens
agagacgcacttgtgcctgtgccaagactcccccagatacacgcacgcagccctgtttcccgcggcaggtagccgggtttaggacttcgaagctactattgctcccttcgtgttctcctctt

SEQ ID NO: 287517 - DNA, 122 bp, Homo sapiens
ttttttttttttttttgagatggagtcttgctctggcacccaggctggagtgcagtggtgcgatctcagctcactgcagcgtccgaggaggagctgtagtttaaaggaagatactcaatact

SEQ ID NO: 287518 - DNA, 122 bp, Homo sapiens
ggcgcgtcaggcctcacatgtctgggagatgtaggctgcctgggctggtggcccctgagccgcatggcctccctgggccccaggacaccggccccgagcaggtcacgaggacggagggccat

SEQ ID NO: 287519 - DNA, 122 bp, Homo sapiens
tcgctcccactcggctccgcgccgcgaccacgcgccgccctcctcgttctagaggcagcccgccagggcggggaccactcacccgcttccccggcgaccctagtccactccttggcctggca

SEQ ID NO: 287520 - DNA, 122 bp, Homo sapiens
tgcaaatcaatactacaataataccacttcataaccattagaatagctttaataaacaaacgaaaaaaccaaaactaacaattactgacattgatgtagagaaacagagaccctcatacact

SEQ ID NO: 287521 - DNA, 122 bp, Homo sapiens
ctgagcctgtctttttcctactcaaatacctcccaatgtgcccacacaccagagattagccgatagccatcagcatgggggagaaattcctcggccagctgaagcagctcaactgacccaag

SEQ ID NO: 287522 - DNA, 122 bp, Homo sapiens
gcgcgaggggtgcacgacgtcctgcccctccttgggtcccagagcctcgataccgccctgcggaccgccctgtggcttcctcgcagccctgggctacaaatgccaggatttctcaggctcag

SEQ ID NO: 287523 - DNA, 122 bp, Homo sapiens
tagagtagcaaggttctatctacctcctgtctgactgtggctgagccatctcttgggctgcggcccatgatcccaatagctttgctgtgcagggcttctcagctcccaggatcacccccctt

SEQ ID NO: 287524 - DNA, 122 bp, Homo sapiens
ccccgaggctcccgcatcaacgccctcagtcggatgggactgagggtgccgccgccaccacgccggggactgttgacagccagaacctttaagcgtaacagagtcacctggcaagtttgtac

SEQ ID NO: 287525 - DNA, 122 bp, Homo sapiens
ctgcctgggcttgagacggggagagcaggtggcaccttcagtggtcccttccctctacagcgacttcattgtgctaggtgaggaatcagagtggtgttaaggagaatctcacttcactttcg

SEQ ID NO: 287526 - DNA, 122 bp, Homo sapiens
tgactctcctcaccaggccccttaagtcaatgtcctgcagcacaggatgggtactttctccgttctccctcgaaggtggcctggtagttccctgtccgttaaaaacttttggcccacaaaaa

SEQ ID NO: 287527 - DNA, 122 bp, Homo sapiens
caggcgctagtcaatacacgcaatcccactccaccgggagaccgggcactcgccaatacacgcaatcccactccacagggagaccaggcgctcaccagtacacgcaatcccactccaccggg

SEQ ID NO: 287528 - DNA, 122 bp, Homo sapiens
catccccagctgagacagttcagattaaaaactaaaatgaattttccctctgaaacctatcgcatttttattatattattctacagaaaaaaaatcattttgaatcacaaccaacttctgga

SEQ ID NO: 287529 - DNA, 122 bp, Homo sapiens
caggccgcaggctgaagccaaggagggagagttcaggtagatccggcttaacatcaggtgcgagtagggaccacccttggtagtctgggcccggcccaggtcagaaccttactaaaacaacc

SEQ ID NO: 287530 - DNA, 122 bp, Homo sapiens
gtgaagccaccctcctgcttcagactcccaaattgctgggattacacacgtgagccgccccgtccggctggggcactgtgatttttaataactctcatgccacccagttgtctacaatccag

SEQ ID NO: 287531 - DNA, 122 bp, Homo sapiens
ccattccaggaatcgacctccgcaccggcctcgaaaattgaccaatcggttgtgtagctccgctcttagtcccgcccccacgctgaaactgacacttcggatcgccgagtaacgctcaccag

SEQ ID NO: 287532 - DNA, 122 bp, Homo sapiens
gaggtcgtgtcccagggttctgacagtggagccaggacgtccgggagctgacaatctaaacgcgacctgggaaggggcggtagcgggagtggctgcttcctgggaggtggtgctcgcaaacc

SEQ ID NO: 287533 - DNA, 122 bp, Homo sapiens
acagttcatgagcaaggtgttagcagcattggtgtctcctgggcccctctccaccgcctgcgagggccgccttgctgtgtcctcagatggccttttctctgcacgtgcgcatgcctgtgtct

SEQ ID NO: 287534 - DNA, 122 bp, Homo sapiens
atgggggccactgcagcagctcaggtaagaggtgacagtgacctgggatagagtgggacccgagaagctggaaagaaggggatggactcagcatatatgaatattttcacagggcagctgaa

SEQ ID NO: 287535 - DNA, 122 bp, Homo sapiens
aaagaggtcttccctgactgcctgagctatccgccttaggaaaaggcctggcattattctcggtgcctcatcttatttatcacgaccttacaatcttggttgctcttatcactttgctcttt

SEQ ID NO: 287536 - DNA, 122 bp, Homo sapiens
cagaatcttccttctgggatgccgactttttcaacacgtgccaggagcccttcctcggcccggaatccccagagtgcccacagtggacagggcacctggatacaccccagactaacccacgt

SEQ ID NO: 287537 - DNA, 122 bp, Homo sapiens
gctgcgcgccctgtagagtggaggccatattcaggcttccgggtgatgtttgtggccacccgggaacctgcatccccaatacgcagtacccaataccctgcctagcagcacaggctggctcc

SEQ ID NO: 287538 - DNA, 122 bp, Homo sapiens
acttgattccatcccagccagaaaacagacctgtttctctagattttatgaattctgaggcgtgactttacttttgccttgcgtggccttaggttttgtttgtaagttagtatcttcttgcc

SEQ ID NO: 287539 - DNA, 122 bp, Homo sapiens
tccagaggctcctcaatgtagcggtaccccaggcgtttacactcgcccggctcctcacagcggttgcagtcctgccagggctcccaccaggtaaaaatgagctgtttgctgcccaaatgcag

SEQ ID NO: 287540 - DNA, 122 bp, Homo sapiens
gttattcgcctgagatgtctggcgttggttgcttgcctttctgcaaggattgtagggtaccgtccaacgcatcttgtatgtggggacattttggaaacacataatactgtgtaagcattgtt

SEQ ID NO: 287541 - DNA, 122 bp, Homo sapiens
ggggcggcgggggcgggcggggccggtttgctcgcgggtgggcaggacgttctcaccccccgccccctacactcgcaaactcgcaggcacagcctccgtcatcgccccacccgaatctcaga

SEQ ID NO: 287542 - DNA, 122 bp, Homo sapiens
ggcgcgccccgccctcctggtcacgtgaccacgcctacagccgaagaggatgggaaaatgcggccctgttcctgaacaggaagcggaagcaggaaggaactgagaacaccagcatctgctgc

SEQ ID NO: 287543 - DNA, 122 bp, Homo sapiens
gctgaatctggcaacccaggccctggccaacctttccttcttgtccaggcccctagcggccgccaacttccccaaagccagcaggcacgtgcaggacatgccagcttggaataggtttcctg

SEQ ID NO: 287544 - DNA, 122 bp, Homo sapiens
tcagtgcaacattctgagcattgggcaggtgccttccagcacaggttttggttggttttccgccagatgtgccttacctgggagtgcagcaagagacagtgtctggtcccgacatcagaggc

SEQ ID NO: 287545 - DNA, 122 bp, Homo sapiens
ctgaaaaacttcgctagctaacatcaactattccagctgtttgagaacttatcttccttccgttttccaactcttcctacttttttatgtgcttgattttgttttgtttcctggtaaatgct

SEQ ID NO: 287546 - DNA, 122 bp, Homo sapiens
cctcattttcggttcccacatccagaatgacaggcagacattcttgaggattcatccctccgcaagctgtatatagagccaatttacccacagggatgcccattccattacagccaaggtct

SEQ ID NO: 287547 - DNA, 122 bp, Homo sapiens
attattatcgattgcctcacacccacatatcttgttttcctaatttgatttctgtatttgcgtcactgccagggacactcagactagaccagtcagttcacttcctgtttctcagaactggt

SEQ ID NO: 287548 - DNA, 122 bp, Homo sapiens
acctacatctgctttcaacaaagcccttcccttattgtctgctagtgcccggagaagtaccgggacattgaaaatttctcattaatttaaattatgtgagatcaaagagatattgatcaaat

SEQ ID NO: 287549 - DNA, 122 bp, Homo sapiens
gtggcttgctgctgcctggccttgtggtcctcagagcaagtggacagacacctcctcccccgtgcagccctgggtgtgactctgggggtgcaggctcctcccacccacagagagccccccca

SEQ ID NO: 287550 - DNA, 122 bp, Homo sapiens
tgaatcagcagtccgctttatcccttcgaattgagcaggaatttgttggttgtttggctccggagcaggtggcggcgggggctgtggcggttgcgtttcctctttgaggtgggggctcagct

SEQ ID NO: 287551 - DNA, 122 bp, Homo sapiens
cccccatcacaggctgcgccatctggttaccagcacggtggtctcgtgctaccctggttccgtgtcggcgccagccctccaaccttctggcccacactgagccacctattcccaccacagcc

SEQ ID NO: 287552 - DNA, 122 bp, Homo sapiens
gtggcagccggggcctgctcccagcgaggggtctgctcccagcacggggcctgctcccagcgcggggtctgctcccagcacgtggtctgctcccagcacggggcctgctcccagcgcggggc

SEQ ID NO: 287553 - DNA, 122 bp, Homo sapiens
aagccaggcgctggtgcctgtgcattgctgagtgcagtaggaacacaggatattgctgagcgtgggagatggggttaggggaggcttctcagaggaggtaacatttaagaagagctttgatt

SEQ ID NO: 287554 - DNA, 122 bp, Homo sapiens
atgtttcatacataataagaggtcaagaggtaagatcatcccaggcttgattaattccttcgcctcgtgatatcatcaaaggctccagtttttccaccttcctgctctataagagaattaac

SEQ ID NO: 287555 - DNA, 122 bp, Homo sapiens
aaggaagctacaggtggaagcgaggcggggatagtcaaggaagtgaccgtgtcctggagacgcggcaaccgtggtgaccgcagtcaacacagtaagccccagcattcgcattgtaattgagc

SEQ ID NO: 287556 - DNA, 122 bp, Homo sapiens
cctcaccccaacagtgcttttgcgctggtctgacactacctggaaaactatgccaccagtcgcttcagtggacactaccatttcaattgcgaagtcaggcaatgattgtcctaaggcaaggt

SEQ ID NO: 287557 - DNA, 122 bp, Homo sapiens
tttgtcatttcagaaaatcaaaaggtttccaattaacctcactttccgataataacagaacgcccttaccaatgcacaaaagtgtccaatggggaacacaagcctcgagaccactcaatgag

SEQ ID NO: 287558 - DNA, 122 bp, Homo sapiens
actggctgctcaattgcttcctcctcaatctggcagccactgacctgcagtttgtgctaacgctgcccttttgggccgtggacacggcgcgcgactttagctggcccttcgggggtgccatc

SEQ ID NO: 287559 - DNA, 122 bp, Homo sapiens
gggcggagtcagcagccccacccaccctgttgtcgctcccaggcgtcatttccctcgctccgtccccaggtttccggcaggcttccgcactcacagccttggcaccgcccccaagccgaagt

SEQ ID NO: 287560 - DNA, 122 bp, Homo sapiens
ccaggcggccctgcccgcagccgccacctgagcttgggcgcggctcctatctcccacccgcgcgtcggccagtgaagggctccgtgcttaaacatcattcgttacagaagtattgcggccat

SEQ ID NO: 287561 - DNA, 122 bp, Homo sapiens
gattctcgccggcggccggcgcaattctgcctctcagagagagcttagtgccgcgggtttcgcccgttcccgccgccggcggaagccgagtcagcccgaggccgagccgagacgagccgaat

SEQ ID NO: 287562 - DNA, 122 bp, Homo sapiens
gggaggggcgggaggaagtgcggctgctacgttgtagcagaagggcggggccctgcggggcggggccggggcgccgtgggcgcgcggggacaatgcggcgttgcccgccggcaggggcgcgc

SEQ ID NO: 287563 - DNA, 122 bp, Homo sapiens
tggggtccgaggaggcagagctgcggggaggggcagtgagatgaggggccagccgctgctcgggacccaccactacctgtggcgtcccccagcccaacttggcagcacccgacaacccgcgg

SEQ ID NO: 287564 - DNA, 122 bp, Homo sapiens
cccgtctgggaactgaggagtgtctctgccccgccgccaccctgtctgggaggtgaggatcgtctctgactggccgccccgtctgagaagtgaggagccactctgcccggcagccgccccgt

SEQ ID NO: 287565 - DNA, 122 bp, Homo sapiens
ttggctttccagcttggtagctgaagggagatggtgttccagaagtcagagctctactctcgctttgaaatgctgaatctctaggaagttactccttggctgtagacagaaacatacggagt

SEQ ID NO: 287566 - DNA, 122 bp, Homo sapiens
tgaactcctgacctcaagtgatccacccgtcttggcctcccaaagcgctcagattacaggcgtgagctactgtgcccagccagttattgatgtttattaactaatgcaagacaggggatacc

SEQ ID NO: 287567 - DNA, 122 bp, Homo sapiens
cttctggatggtgctccccaaagcccagctccatgccccactgcagctcactcaagatgacggtgctcagggtaatgcctgagatgccaaagccacacaggaagcggaagaccatgtagatg

SEQ ID NO: 287568 - DNA, 122 bp, Homo sapiens
actgatgtccaaagggggaagcacccttgtgcaaactaattctaaccagcagattgcctccggtgggagagagggacccagaggctgagcaggggaaggatgcccctgagaaagccgccccc

SEQ ID NO: 287569 - DNA, 122 bp, Homo sapiens
ggcgcacctcgaggcgcacgaagtactccaggtgggggcccccagctcgcggcctctgggcgggccgggtctctagatggtggattttggcttcaaacgtcttagggagcaaaagcaggaag

SEQ ID NO: 287570 - DNA, 122 bp, Homo sapiens
gggggcggggccttcagcgggcgggcggggttttggcgccgcgaggtggcggcagcagagcggcgcagaagggagggggcggctggccgcgcggaaggagtgagtcacctgaccgctgccct

SEQ ID NO: 287571 - DNA, 122 bp, Homo sapiens
ttgacaggcctttccagtgggactgagaagaaacctcattacatggaagtgctagaaatgcgagccaaaaacccagtgccccagctgcgtaaatttaaaaccaatgtgtaagtaccctcgga

SEQ ID NO: 287572 - DNA, 122 bp, Homo sapiens
ctacccttacaagtgagacatcttgtgaattagaacaagtgctgctgctaaaatccctaacggctacatagcaatgtgaaaaaaggtatcaaatgtaattttctcaaatttaatcttcttca

SEQ ID NO: 287573 - DNA, 122 bp, Homo sapiens
ccgcccctcacacctgcgcgcgctctgcctctttcccgcgccccgcgaggtcccgccccgcgcatgagcgacgcaaacaccgccctcgcagcccgcgacagtcagcaccgccccagccaggc

SEQ ID NO: 287574 - DNA, 122 bp, Homo sapiens
atgcactctgcacttccattcctgcagtgaaattaactcgagcttggcaggtaagtctttcggctcacctttaaaaagaaaagatatgtgagctgcggtgggggtgggctgttccccatttg

SEQ ID NO: 287575 - DNA, 122 bp, Homo sapiens
taaagagcccggttaggctgagtccctgcccttccgagggagcccgtctgcgagtgagcccgtctgcaagtgagcccgtctgcaagtgagctgggcctgggcctctgcaggggtcgccccgc

SEQ ID NO: 287576 - DNA, 122 bp, Homo sapiens
ccctagcccaccaccgccgcctcacctgcctccgcagccctttctgcttccagtagcccgcgccactggccaacctattcagttgccaggcgacatcgttgccaggcgactccagcagcgtc

SEQ ID NO: 287577 - DNA, 122 bp, Homo sapiens
gatcctggacactcagggggcgtggccacgggaggcgggcttctttggaagctgcggggccgagggcgccatactcctgtctgtccagacccccgatcgcccaccgcccctgtcgccctagc

SEQ ID NO: 287578 - DNA, 122 bp, Homo sapiens
tcctggagtgcgcacttgaggcgcgggacgcaccggctgtgtgtcccaggggctgagactcgcgccccgccccgcagccttcggctcgccgggccgggcccctctccggaacctccaaaggg

SEQ ID NO: 287579 - DNA, 122 bp, Homo sapiens
tggaattggcacttctaggtacccctggaagtagttgtgagataaggtgaaactagtagtcgaggcctgtttaagaagccgttagactccccattccacacagttgggcaaccgtgcctact

SEQ ID NO: 287580 - DNA, 122 bp, Homo sapiens
tgatatttgctatgctggttaaattagattttagttaaatttcctgctgaagctctagtacgataagcaacttgacctaagtgtaaagttgagacttccttcaggtttatatagcttgtgcg

SEQ ID NO: 287581 - DNA, 122 bp, Homo sapiens
aggaaggtcaggacatactgcctaaatgcaaatgtcccctgggagggggtcaggtcacagcgcagggaggaagctagtcctctcaaggcctgtctggaatctgtttatcaggttccactccg

SEQ ID NO: 287582 - DNA, 122 bp, Homo sapiens
ggcagccaccagcccagacgcccatccacagaggcgcggaaaaacagcatgcagtgcacccgcaccgtggaggcctgctcagctacaaaaaggaaagcagcactccacatgccacaccacgg

SEQ ID NO: 287583 - DNA, 122 bp, Homo sapiens
ctcagggccggggtggtgctcagaaacactgtctttatgatatacatgggcttttgagctcgtggcttgtggttgtggactgagaaaattgcttcctgggtttatagagatggtaggggaaa

SEQ ID NO: 287584 - DNA, 122 bp, Homo sapiens
gcgccttcccagatgactgcatggatacactccataacacattgttaaagtgataattagcgatagacttgttatgaatattccaaatacagtttctctctacaacagttgatggagacaaa

SEQ ID NO: 287585 - DNA, 122 bp, Homo sapiens
ttccgcggcgccaatctccacccgcagtctccgcctcccgcacctgtggtccgggcctcacggtttcagcgccgcgaggcctcacctgctggtcttggagcctcaagggaaagactgcagag

SEQ ID NO: 287586 - DNA, 122 bp, Homo sapiens
tgggtgtccaccctagtccttggtttggaatcgtctgctctgggggtcctgaaatactcacggctttgggttacttggcagagactttcataagtggtgggggagcatgttagacaacttgg

SEQ ID NO: 287587 - DNA, 122 bp, Homo sapiens
atagggtgtttttttttccttctcccccgcctagaacaaaacccaggtttcaggttgtcacggtgggcgccgggggaccctggccacgggctcctctccgagttgctgcggaccgccccaac

SEQ ID NO: 287588 - DNA, 122 bp, Homo sapiens
gaaatacagatgctgctcaggtacaaaacatcaaacactgaaagttggcctggccagatgcgcggagggaccccacggccatatgacgggctctggccttgcctcctcgatcctgcctcacc

SEQ ID NO: 287589 - DNA, 122 bp, Homo sapiens
tacacgattggaggccgaggctctaatggggcggtacttactgctgatctatatctgcggcgaggctgggacggaggcaccgccccgcccgaccccacagaacctcgcgggccctacactcc

SEQ ID NO: 287590 - DNA, 122 bp, Homo sapiens
gcggggcaaagttgccggacctgggggcaggagggccacgccgagatgactcaggtttagcgcgggaggggaggatggcgacttcacccggcctttaacaacacgtacgcatctttcggcgt

SEQ ID NO: 287591 - DNA, 122 bp, Homo sapiens
ctccagctccccagcaaccgagtcctcccccatcgctatttaacagctcccaccaggtggcgccagaacactgcgaggcctggaattcctggcaggctcgcagtgcatcctcacctcagccg

SEQ ID NO: 287592 - DNA, 122 bp, Homo sapiens
cctggtttctgacccttgtcagaccaggaacaaattataatttgaaagtagggcataaagcgctggagttgagacttgtaaggatgtaagagcttacaacaaaagaacataggaaagtgtgg

SEQ ID NO: 287593 - DNA, 122 bp, Homo sapiens
gcctgtgtgcggtgcatgggccaagggcgcccacacccacgccaccctttccgaaggaaccgagccccagcccctcatgggccaagggcacccacagccacgccaccctttccgaaggaacc

SEQ ID NO: 287594 - DNA, 122 bp, Homo sapiens
gtctattctcttttgatggacacttgtgtagttttcagtttttgtctattataaataaagcggctatgaacattcatgtacaagttatgtggagacaaatgcttttatctatttcacataaa

SEQ ID NO: 287595 - DNA, 122 bp, Homo sapiens
gctttctccttaaactaagctttgtctttctttctagtcacgtttccttctttcccttcccggtattttctgccagctgacgcccacgcctttcctagaaggggctgggggctgcatgcggt

SEQ ID NO: 287596 - DNA, 122 bp, Homo sapiens
gagtcgacctgggctccgaggtgtacaggatgctgcgggagccagccgagcccgtggccgcggagcccaagcagtcaggctccttccgctacttgcagggcatgctagaggccggcgagggc

SEQ ID NO: 287597 - DNA, 122 bp, Homo sapiens
tgtgtgtgtgtgtgcgtgcgtgtgtgcagggtatatgtgcggggggcgggggacagccagcggtggggcggggatgtggtctgctggaaaatgtttaaaaaaacaaatccgctccaaacccc

SEQ ID NO: 287598 - DNA, 122 bp, Homo sapiens
aaagaaaagaaaaagaaaacagtaatgataaccaactgcagccccagggactctgccctgcgcatggttagccctggcccggggcctgactcagctttttgtatccgggtccctttgccatc

SEQ ID NO: 287599 - DNA, 122 bp, Homo sapiens
tttttcaaaatcagtttcctttaaagaaaacaaacaaaaaccccacaaaatgcaaaatatcgtaatgtattaaatatgccttcatgatacctctgttataaaagttgtctgtgacagacaaa

SEQ ID NO: 287600 - DNA, 122 bp, Homo sapiens
ccttgcctggaaactggagagctccctctgccagccccagggtctgccgagttcacttgacgaggccgggaactgcaggggcgggctggggctcactcagcatttatttcatacagctgctt

SEQ ID NO: 287601 - DNA, 122 bp, Homo sapiens
atttgattgttttcattcagcacaatccctttgagatctatccaaggttttgacatgtatcgagagtttattcctttttattgctgaatagtattaatattctatagtatggatgtaacata

SEQ ID NO: 287602 - DNA, 122 bp, Homo sapiens
cgtgcgcacctccccgctgggggacacgcctgagcatgtccacttccttcctgggggacacgcatgagcgtgcccacctccccccaccccacaggacacacctgagcacgtccgcctcttcc

SEQ ID NO: 287603 - DNA, 122 bp, Homo sapiens
tcctgccccatgaggctctgtcacctgcggctgcccaaggggcctgcccggcgcaccacccggatgagcactgctctgtcggggtatcccgtctcacccctggctgcgttgtgcccaggcag

SEQ ID NO: 287604 - DNA, 122 bp, Homo sapiens
gcatgtgtgcgtgtctccatgtgcgtccatatttaacatgtaaaaatgtcccccccgctccgtcccccaaacatgttgtacatttcaccatggccccctcatcatagcaataacattcccac

SEQ ID NO: 287605 - DNA, 122 bp, Homo sapiens
ggaccgcagcagggtggtgctgagtgggccttgggggtctttaatctccttgagccccagcgaagcaaaatttcatagggatagtagcacaacaataaatcgcctcctgaaagccagaccgc

SEQ ID NO: 287606 - DNA, 122 bp, Homo sapiens
gcccataactatgcgacaaaagcaaatttccttgccttaataaattgagtctggagatgacgccgcacacagccacttctgcctttctgccatgggctatgtcagctttatcagggtgagtc

SEQ ID NO: 287607 - DNA, 122 bp, Homo sapiens
tgctatctctctggagctgtaagcttcagtttacaggggaaaggttgggggagagaggggcgaaagggactcccgccagtttcagcggaattcagatgacagtttaccagccaagctggggg

SEQ ID NO: 287608 - DNA, 122 bp, Homo sapiens
gacttttcccccactgcctccagttcccacccaggaggctccctcgcggccgcgagagctcggcgcccgacccacagtaggcagtgcgggcacagtgttgcagaccaccacctcgccaggtc

SEQ ID NO: 287609 - DNA, 122 bp, Homo sapiens
gtcatatgctagtaagtgacagaggctagatttaaaccaatacctatgcagagtaaacgacgcttgatacagctgaggagatgacatcgaggttgaaatggattggtaatgcacgccatacg

SEQ ID NO: 287610 - DNA, 122 bp, Homo sapiens
ttatattttgataatgactatatcccttcccactctggtagcaccacgctgatgctcagacgtgatgtgatgtttatgtttgctttgctgttttctgttgcccatccaggcctttgcctttc

SEQ ID NO: 287611 - DNA, 122 bp, Homo sapiens
tcccacattcgtcgtgtaaattctgcgtcccaaccgcccagccgacctgcaccgcattcccgccccctcaacacggctcaacggccgacgctgggggcccgcctccttagccaatcggggtc

SEQ ID NO: 287612 - DNA, 122 bp, Homo sapiens
cgcctcacaaagggagggcggctcacggccctcgcgtatccctgcgcggcgctcgcgagccgcccctcccccggcgtttgtccctgacgcagccccaccggttgcgcagtccctccccgccc

SEQ ID NO: 287613 - DNA, 122 bp, Homo sapiens
ggagttgtctggcattgacgcctatggaccttggagtcacacagacgtggactctgatcccggctttgcactctctagctctgtggccttgggcaattcagttacttcttctctagaagcct

SEQ ID NO: 287614 - DNA, 122 bp, Homo sapiens
atggcggctgcaccagcagagccgccgtgggcttcatgccacgttacgcggagtctaggacggcctcaccccgctggctcgggctccctctcactgggtacacatttatcgggatttatgct

SEQ ID NO: 287615 - DNA, 122 bp, Homo sapiens
taggtcctgcaaggatttttggaggttctcttcagaagagaaggattactgtcttcatttcgaaagatttatttgcaaatctgagacaaagaaacggttcaattcaacatcctgttacatcc

SEQ ID NO: 287616 - DNA, 122 bp, Homo sapiens
cccctgagcaaggttatcgaccagctcaacgggcagctggaccccagcacctggtgctcccgtgctgagcccccagaccagtcctttcggaccggctctcccggggatgccccggagaggcc

SEQ ID NO: 287617 - DNA, 122 bp, Homo sapiens
actgtccccaccaacgccctgcgccctcgtccctctcagtcccggtcctctccactctagcgcactgccctactctgtccgtacccccagccgccgccgccgccgccgcgcccagtccctcg

SEQ ID NO: 287618 - DNA, 122 bp, Homo sapiens
cagagactgccacttgtcctctagtatccacttttccttctagaaccatctaggctgccccggatactctgtgaaagatttcgctccccagtctccatgtagctaagggaacatgtggccca

SEQ ID NO: 287619 - DNA, 122 bp, Homo sapiens
gacttctggaggtcccaggtcacgggctactcggggtccgtgacacgacacctcagtcaccgggccaacaacttcaaacgacaccccaagaggaggaagtgcattcgtccctccccaccccc

SEQ ID NO: 287620 - DNA, 122 bp, Homo sapiens
cgagaactcgcgggtctcccactacatcatcaactcgctgcccaaccgccgttttaagatcggggaccaggaatttgaccatttgccggccctgctggagttttacaagatccactacctgg

SEQ ID NO: 287621 - DNA, 122 bp, Homo sapiens
cttcccatggtaatactcaccagaggcactagtgctggcctctactctgggcttcgagcccgtgggatgggggctcagactccctttctctaggctgctgttctctcccctgacggctgtag

SEQ ID NO: 287622 - DNA, 122 bp, Homo sapiens
tttaaggagccagtgaagggcgacgttccgctccttacatggcggctgtatttactcggccgcagccaatcagccggcagtgccaagccacgtgacatgccacgagggcacgcacagccatt

SEQ ID NO: 287623 - DNA, 122 bp, Homo sapiens
gaggccgggcctcggagcagcctccccatgggtgaagcctgggcaggtgctgggagcctccgaggctagggggagaagagaggggttacacctggcgggctcccactcccctcctcccagcc

SEQ ID NO: 287624 - DNA, 122 bp, Homo sapiens
ggtgttccacccgcctctgcctcccaaagtgttgagattacaggcgagagccaccgcgcccggcatgggcataggctcttatttgcatcatatttacatctgtcttgcatgtgagttatttc

SEQ ID NO: 287625 - DNA, 122 bp, Homo sapiens
caggcaaatttgaatactgacaaggtattcaacgatattaaggaattctaaatgtttaggcgtgatatggaattgtggtaaggttgtttttttaatttaaaaagtcctccatggctgggcgt

SEQ ID NO: 287626 - DNA, 122 bp, Homo sapiens
gagaccactcgctgggaaactgagtttccccctcgatttcagtttagtccctaaaaagttcgcccggccctgcaaacaccacgctcagaaacgcagcggcctcttactcttacctttttaaa

SEQ ID NO: 287627 - DNA, 122 bp, Homo sapiens
gtttctctgagtcaagagtgaggaaaaaaagagggggagctcgtggacaggtaggacaggcggcagccaggatccaggctgtgcacggggaacattgaagaacgctgccacggccccgaaga

SEQ ID NO: 287628 - DNA, 122 bp, Homo sapiens
aaccaggaggccacgcccctcagcggcttcaggagcccagacctttgggggcccaccttccgcagctttccattggccccacggtggaagcccgtaggttcaggccctccgaacacagctcg

SEQ ID NO: 287629 - DNA, 122 bp, Homo sapiens
cgggacagagcgccattgtctgtgctgcagtcgtctgatagccagtggagtcagccagcccgggaggaaggcggagggtgaccggaactaggccttggggcgcagagaggtggtcatctgtc

SEQ ID NO: 287630 - DNA, 122 bp, Homo sapiens
aggctcgatattcacccttaggatattttcctgaaccccgataccccacaatctcctatccgcacattaactttaccttgggatatgcaaatattaagtagaaccctatgaaatttacatta

SEQ ID NO: 287631 - DNA, 122 bp, Homo sapiens
caggcacatccgttggaggcaggggagacaacaaaagccgaggaacgagccttccccagccgctccccaaaggcacggcttattcttcagggtgcccgactggccacgtggacgtctctcca

SEQ ID NO: 287632 - DNA, 122 bp, Homo sapiens
gcgaatcgttctttgctgctgctgtcctcggtgtgaaaaggtgacccccccactgcccatcgcacctgcttgctatctctcgtcggtcaccccctacaagaccggaaaacaggtctaaaaaa

SEQ ID NO: 287633 - DNA, 122 bp, Homo sapiens
gcccctaaaatctgtgatccctgaagcagcaattgatgtgaaccaccccatcactcaccccgacgctcctgcgtcctcctgagcactcacccttgatggccccagctcctcggagactcagc

SEQ ID NO: 287634 - DNA, 122 bp, Homo sapiens
taaaaagcatccagtcttcctggtgagaaatttcttatcacacgaattcaggtttcggatcgaattgcctatgacttactgcgattagttgctgaactggctcaatagctatgtagctactt

SEQ ID NO: 287635 - DNA, 122 bp, Homo sapiens
gaaggaaagactgggcacccctaaggtgctgttgtcatcgtgcctgcaggaggtgagacccgaactggggcctcagcagtgggtaaggagagaagactagggtattgcaagtacagacacgg

SEQ ID NO: 287636 - DNA, 122 bp, Homo sapiens
aaggaacccgagtccttgtttcgttccttcctcgttttttttgcagcagccaagttgggccgggtacaggcaaagttcgccttcttctgaggtatcagctgaatgtcttgagcagatagccg

SEQ ID NO: 287637 - DNA, 122 bp, Homo sapiens
gtatcttgctcgggccctagctgttggggttctcatgggttgcactgaccatactgcttacgtcttagccattccgtcctgctccccagctcactctctgaagcacacatcattggctttcc

SEQ ID NO: 287638 - DNA, 122 bp, Homo sapiens
cgctgtatctccaccagtggttagaactgtgaaacatcctaaccacaacgtccagaagggcgactgatcgcagagcttcaagtgatcttaactacgttatgtgttcctaacacactacagct

SEQ ID NO: 287639 - DNA, 122 bp, Homo sapiens
gctgtctgtttgggcctcaggtgtcggggcaaggcctgcttgggttttacacgagtgttgcgcctttacccgggtctctgtcagtgggtcccgcctgacccgtgggtgtgcatgggtccccg

SEQ ID NO: 287640 - DNA, 122 bp, Homo sapiens
ggccgggccggggataccgtggggtatgcccagtgatgccagcagcttgtggcacctgggcgcaccctccagctcgggccccttccgatgggtctgctggctcaggtgcgggcgatggccgg

SEQ ID NO: 287641 - DNA, 122 bp, Homo sapiens
gctgtactcggggtgagctcgcttcatgctggctccctgggggttcctggggagggtcggcgcggcgggcagggaggagttaactacagcggcgcctctccgctctcggctgcttgcgttcc

SEQ ID NO: 287642 - DNA, 122 bp, Homo sapiens
agtgatctgcccaccttggcatcccaaagtgctgggattacaggcatgaaccaccctgcccggccgggatgtatgctcttggatccactgtctctcacagactagtgtgggccttgggcccc

SEQ ID NO: 287643 - DNA, 122 bp, Homo sapiens
ggaaagtacaagaaggagatcagcatgtgaatagggatgaacccatgaaagagcatatcacgttccggaaatattctccacccaacactgatccccaggtagaggctctggtttctgagctt

SEQ ID NO: 287644 - DNA, 122 bp, Homo sapiens
ctaattcagtgggacagcagctgtctgggagacagcctcgggccggagccagcagaaacacggccgcagcactgtcctcaccttctagacagggaggtcagacttccccggaagaggctatt

SEQ ID NO: 287645 - DNA, 122 bp, Homo sapiens
gcggccggtgcggggaggggccttccaggctgctgtggggcccccggcctcgccccaccccgccccgccccgtgctgggccattgcctcaaatgcagcggctctgttggccgtgggactgga

SEQ ID NO: 287646 - DNA, 122 bp, Homo sapiens
ttcccctcaatccccctgctgccctccctgccctgcctgtagggctcggggacctccagccggctggagccgagagaacgcatggagcccacctatcagctgtcccgctggaccccggtcat

SEQ ID NO: 287647 - DNA, 122 bp, Homo sapiens
cccagtcgggaaggggcgtctgcagggaccaggaagggcttagcttggggctgcccgctccggcaccgacctgggacgcgccctgaggcccctgcctgggaccgtcccggactacatttccc

SEQ ID NO: 287648 - DNA, 122 bp, Homo sapiens
actatctccatcatctaatcacctcccacctgcctggatggagatctgaggccccatctccgacactgggaattatgattcaatttgagatttgatggggacacattcaaaccatatcacca

SEQ ID NO: 287649 - DNA, 122 bp, Homo sapiens
tccgggccagaggccccaaggtgcatcggggcagagccggaagcggacgctgaaaactggcggctccttaatggttccggcggcagggaccgcagcgacgccctcaccggaagtcccgcctc

SEQ ID NO: 287650 - DNA, 122 bp, Homo sapiens
gcctgggctgccgacccagccccctcgtcacttagacctccaacttgtgggcctggatggcggccacgttctcgtagatgaggttttcgacatcctcatacgggacttccttctcggctggg

SEQ ID NO: 287651 - DNA, 122 bp, Homo sapiens
ggaatgcggtgtctgtgaaacctgcttcctctccttttgaaaatgaaacttgctttactgcgtaggtgaaaagccacggcaagtgggtcgactcggacggataccggtgcggctgccccggg

SEQ ID NO: 287652 - DNA, 122 bp, Homo sapiens
gcattccggggagaagcccttcaaatgccacctctgcaactacgcctgccgccggagggacgccctcactggccacctgaggacgcactccggtaggtcccctggatgcagtccggggctgt

SEQ ID NO: 287653 - DNA, 122 bp, Homo sapiens
cccgcggccgcacacacgagggcccgtcgcgccccccgccctgccccgcctcgccctccacgtccctgcacccccaagtcgcactaagaacccagtccccgatcggtttcctctacgccgtc

SEQ ID NO: 287654 - DNA, 122 bp, Homo sapiens
aattgggtcttgctgttccaccaagagccagttgttaaacatttactgggaccctactgccgggcctggggccacagaagcaaccctgacccttccctgaagtgtggtccatggaccaagcc

SEQ ID NO: 287655 - DNA, 122 bp, Homo sapiens
gggcagtgcagtccccgcagcccgggcggcgccccctcccgcactggcggaggacgcggccgttggaggcgacacctccacaagcagcgtggaggcgacacctccacaagcagcgttatctg

SEQ ID NO: 287656 - DNA, 122 bp, Homo sapiens
ccactgagccttggctcctgaggggatcagcacccagtagatgtttatccaccccaagaacgagggtatcacacctcctctagtgagggcccaggtgatgggtgcaggctgctcttccctaa

SEQ ID NO: 287657 - DNA, 122 bp, Homo sapiens
gctccccagccgcctggcaagaccccgcgtattgataggcttccaccgcccgccgggccccgcctcctactgctccattgggtccttctgcaggctctgccacgcccccaggcacccatagg

SEQ ID NO: 287658 - DNA, 122 bp, Homo sapiens
ctccgtgctttcccctgtcgggcgccgcggccggaggagcagctgcgggcggtcacgcagcgctgccctagccagagccccgagctcccacccagtcccatccccagcccgatccgccccgc

SEQ ID NO: 287659 - DNA, 122 bp, Homo sapiens
gcaccgccccacccagccccggccgaatgccgctccactttcccgtccgcggtgaggtgacggaacagctggaccgtccccgcctccgggagcccgcacagccctggcacacactgccgcct

SEQ ID NO: 287660 - DNA, 122 bp, Homo sapiens
tgcaagtcagagatggagaagattcctggaaagcagcgggggcggggcggggggaagacacgctccacacatgagaatggaaagggtcccaggagcgcagaggccgccagacaccctgcatg

SEQ ID NO: 287661 - DNA, 122 bp, Homo sapiens
gcactggtgaaggacaaagtggttgtcttccctcaaggggacggcggagcaaccccagtgcggcttcagcaacgccatggtgcagatcctgtgggtgcacggcgtccgcgactatgcggcct

SEQ ID NO: 287662 - DNA, 122 bp, Homo sapiens
aagggaagcagcatgcacagggccactgagaggacttgcggccagtgataccaacctcaccgtttgccttggtcagctcgctggggtgactgaattaaccacatctctctctccttaattgg

SEQ ID NO: 287663 - DNA, 122 bp, Homo sapiens
tttagcatctatttgtcctggcaacacagcacttgttgccccaggacccagcttcttcagcgcatgaagccacagattcagtcaattcggtttccacaaattgtgaacctgtctatctctaa

SEQ ID NO: 287664 - DNA, 122 bp, Homo sapiens
ggaacagaatctggccaccacccttactaaaatacctctagacatacatgaaactgaagacggggcactggaatggagcactgctacagaaaacctacttttccatagtcttttctgtatgg

SEQ ID NO: 287665 - DNA, 122 bp, Homo sapiens
tgggggagattgcggggctctgcgggatctcagggttggcacgagagttctgacctccgtcgtccgctcccgcaggggtccacgcggggcctgtccggcagcagagcactgggccttccgag

SEQ ID NO: 287666 - DNA, 122 bp, Homo sapiens
agcccaggggagaaacggtagggagccagaagggggctgatccaacaacctgacggaaagcgttgtctatttcgcagcctggccggggtgaacaagtttggcaagtgtcggaccgaaccagg

SEQ ID NO: 287667 - DNA, 122 bp, Homo sapiens
aggagtccctgcttttaccctctactcacttgtactcgcatcgccacaactaccctcccccgaaactatcatcaacacaagcacttacggtatctacaaatgtgtgggagcaggggtgggtg

SEQ ID NO: 287668 - DNA, 122 bp, Homo sapiens
acgcgctccgcagtcgtctccagctcttgcctgtgcgcgcggccgtggctcccctgcctgcgcgcttcttcgtatctttgccattacggcgctaatgcagtgcacgactgaaggtccagtgg

SEQ ID NO: 287669 - DNA, 122 bp, Homo sapiens
tgtttgcttcaagtgatggccggtgagctgcggagagctcatggaaggcgagtgggaacccggctgcctgcctttttttctgatccagaccctcggcacctgctacttaccaactggaaaat

SEQ ID NO: 287670 - DNA, 122 bp, Homo sapiens
gaccactgtgccaagccccctggttgggtgacatcacaggtacatctgggttgggaggggcgccaggttccatgtagcccagagatccccatcattccttgcttcaagccagaggttggtcg

SEQ ID NO: 287671 - DNA, 122 bp, Homo sapiens
cacacactttattaattacaaaaagcaaattgtaactgcacagtagggaaacctggcagacgccactttatccaaatgatcagagttaacatcatcaggaatggaactaatcactatcaagt

SEQ ID NO: 287672 - DNA, 122 bp, Homo sapiens
gagatggggtctcgcttcaagacccaggctggtcttaaatccctggtctcaagcgatcctcgcagagtgctgagccaccatgcccagccacatatgttggctttcttgtataggtataagaa

SEQ ID NO: 287673 - DNA, 122 bp, Homo sapiens
gttcgtgctacttctgtggcctctcgtggctggcggcaggtggggtgatggtgctggcctcggcgctgctgtgtgtgattgtgtctgttctgaccaacgtgctcgtgggtggaaacacccca

SEQ ID NO: 287674 - DNA, 122 bp, Homo sapiens
gaacgcctagagagtcggactcccctcccttcccaggctctacggggcgccgcggatccgcgaacagccgtgcccggctagcgggcggcccagcaagtgtcaagacccttcggaacgacact

SEQ ID NO: 287675 - DNA, 122 bp, Homo sapiens
taataaatacgttttctctgctacagtctcggcaaaggccacggccctagaacggggcgccgcctccgatgcagtctcagggccacagcctcagcgcagccacggcctccagggcccacccg

SEQ ID NO: 287676 - DNA, 122 bp, Homo sapiens
aggcgttcgagagcgacctggcagcgcaccaggaccgcgtggagcagatcgcagccatcgcgcaggagctcaagtatgtgcagatgccctccgtcctcccgggagcccctgggattccacag

SEQ ID NO: 287677 - DNA, 122 bp, Homo sapiens
caatcattgaatcggttactgaatactttcttgcatttcttcttctccaccttgtgcccacgttaagcaggaagacatcatattttcattagcacctgttttgttttttcaccttctgtaga

SEQ ID NO: 287678 - DNA, 122 bp, Homo sapiens
ctccgcctgcctgggctgggcctcctctgtgagccagagaaggtggacccctgaccaagccgaaacacatttcctttcaactcactgaaatatcttttctctggaattaaaaaaaattaggc

SEQ ID NO: 287679 - DNA, 122 bp, Homo sapiens
tcccacacctcccggtgaatcctgcatgtcagattcacacaccttcacaacctgaccccacgcagcctgggccttcaatttcccattacttcccaaccacaatcccgtggtcccgctacacg

SEQ ID NO: 287680 - DNA, 122 bp, Homo sapiens
ggcaggtcagcagcgagcagttagttcaaggccttgagggcttccactaactttgaagggcgaggatgggcggagctctggaggccgccggggtaggttcgaggggagtgttcaagaagcct

SEQ ID NO: 287681 - DNA, 122 bp, Homo sapiens
gatttaaagagcaacagaaatccttacaggaagagcagtaggatggctgattcctgaaagcggcttcctgacaccctcgccccagcacccctgggtccagtcaccattcagatacatctttt

SEQ ID NO: 287682 - DNA, 122 bp, Homo sapiens
tagcggaaccgagttattgaagggccccacctgggtggagccgtgagtgtgagcagcttccgcttcccccggaagctggcgtcgtgcaggaaccctcacccgcccgagcggggccctgggcc

SEQ ID NO: 287683 - DNA, 122 bp, Homo sapiens
ccggcccgatggcggatggaggtcagccaggggaaggcgtctgggtggaggccgcccgggcgaggccggggccgccggggcggggcggagcgccggcagctggctgggcggccctcgggcag

SEQ ID NO: 287684 - DNA, 122 bp, Homo sapiens
acaggcataagccactgcacccggccaagatctgatggttttataagcgtctggcagtttcggttcttggggcgtattctccttcccggtatgtccggaattggtgggttcttggtctggct

SEQ ID NO: 287685 - DNA, 122 bp, Homo sapiens
gctgtgccaggagggaaaacgtcccaaacaaatggtgagcagttaactaaagaactgtcccgcaaggcaacccctggcgcacagccctgtgtatactaaattctgagagagataaaaggaga

SEQ ID NO: 287686 - DNA, 122 bp, Homo sapiens
ggggctgcaggcggggcagggctgggtgggggcgcgcgacgcacctgcctgcttcctgcacgggtggtccccaagcactgcggggccccagcccaaagcggaccttgactaccgcccagccc

SEQ ID NO: 287687 - DNA, 122 bp, Homo sapiens
gaaacgatgatgcgcacgcgcaaagtaggcctacgtggagccgacctgccattgggtaaacgcaagggaggagaaaaggtggggcaggggtgatttgggtggatggataggagggcttccga

SEQ ID NO: 287688 - DNA, 122 bp, Homo sapiens
ctctcacctgcttggcccatcacacgcaggctcaggcccacaacccccacccgggcaccacgctgacccaagtgcacgcaccacagcccttcccagcccccggccacttgcctgcctggctc

SEQ ID NO: 287689 - DNA, 122 bp, Homo sapiens
agtatattttgttattgatgatgtgtaccttgatcacttgtttgccatagatactttcaacgcagttgggttgactaggttatgtaagtcctgatgagcagagtagcacccatatttccgaa

SEQ ID NO: 287690 - DNA, 122 bp, Homo sapiens
cactggccacacttgaagcccgcctggattcaaggacattagttcagctcccatgctgaccgtggtaccctcgcctgcactttcccgcagagggggtttaattgttttttcatgatgctggg

SEQ ID NO: 287691 - DNA, 122 bp, Homo sapiens
ccccctgttgtgttgctgcggagaggtgaggttccggaggccctgaggtcagcgggcccccgcccgccgcgtccgcgcaccctcccgatcctaagacccgctccgtccccctcagagggcgg

SEQ ID NO: 287692 - DNA, 122 bp, Homo sapiens
tcccagctactcaggaggctgaagtgggaggatcatttgagtccagggggtcaaggctgccgtgagctggaactccagcctgggcaacacagcaggaccttgtctcaaaaaaccagtagcag

SEQ ID NO: 287693 - DNA, 122 bp, Homo sapiens
agaaagcagcttttggggatgggggtcggtggccaagggagggaaagtaacgggatgcgtcgtgtaaatatttcacgttggaatcactactttttataacaggacgtagttgcgaataaata

SEQ ID NO: 287694 - DNA, 122 bp, Homo sapiens
cacatggcggaagttcaatggctggtaaagggcttccccgggtttgaacccccgctctgtcgcatcataggtgtttgaccttggacaagttattgcactactctttgccaaaatagtttgtt

SEQ ID NO: 287695 - DNA, 122 bp, Homo sapiens
ggtgcgggcccagatgtgggcgtgggacccgggtttccgaggcagggatccagcagtctccggcttcaggggcttctagcttcccggctcccggcggggcgggcccggggaggagctcggcg

SEQ ID NO: 287696 - DNA, 122 bp, Homo sapiens
gtatcctgggtgattcttatgattaggtgagcttgggaaacaccggcaagaggggtgttccgtccaatggttggtctgcggcaaacccttactgtctctccggtgctggggctcttcgtttt

SEQ ID NO: 287697 - DNA, 122 bp, Homo sapiens
ggcgccgtctcctccacatcccacaccaggtcctgcccatgactttccccctctcagcgccgtcctcagtggccacaccaagaacgaggccatgtcttcctgggaagggcctcagatgtcag

SEQ ID NO: 287698 - DNA, 122 bp, Homo sapiens
acctgcagcctgccgtgcccgagtgccccctggcactcctgccctccacgggctcccgcacgcccgagcctccctgactggcactgccccctactccgggggcctggtcacaccaaccgccc

SEQ ID NO: 287699 - DNA, 122 bp, Homo sapiens
tcaaagaggcaagaaggcaagtcctgccagatctgattgtgcagacccaaaggatctgatcgcccgtcactaaggctactaatcaaatttccatccaatatgctcacgcaggatttcctgat

SEQ ID NO: 287700 - DNA, 122 bp, Homo sapiens
gcgcctggcagggggtcgtcgcggccgcagcctggacggtgtggaccccgggttctgcgacgccagatcggccccagcggcccgcacccgcaccctgcaagctcgttctcccctgcgggccg

SEQ ID NO: 287701 - DNA, 122 bp, Homo sapiens
cctccagcgcggctcttcgcgacctcgcgatcctgtcctccgcccggccccgcagccgcccgccggtgccatatattatagcagcgccagaaatgtggtggtcgtcgccacgttagggtccg

SEQ ID NO: 287702 - DNA, 122 bp, Homo sapiens
catgccctcataatgccattagggactcgacatgagagtcttaaaacagtgattatttatcgcgcgtgccttcagctcagagcaatcctgaccgcgttccgctgcttcagggagcgagggtg

SEQ ID NO: 287703 - DNA, 122 bp, Homo sapiens
tttgacaggtgaagccaagttgcatgctgggagcatccctgctgtccaggtttcaacttccggagactctgccgctgtggactacatttcccagaagtctccggggcacaggccttttaggg

SEQ ID NO: 287704 - DNA, 122 bp, Homo sapiens
ctcagttcgtagaataaataagcaagcacagagaggtgaagccatccgctcaggcccacacggccaggaaggggtgcgtggcgtgggtctgagcacctggctctcgcttcactttgcttctg

SEQ ID NO: 287705 - DNA, 122 bp, Homo sapiens
tccgccgtagaggggttggcagtggcggtcagcatgggcgatgggggcgccgagcgcgaccggggccccgcgcgccgggcggagtctggtggcggcggtgggcgctgcggagaccgcagcgg

SEQ ID NO: 287706 - DNA, 122 bp, Homo sapiens
gaccagggtttgattttgaggaaaccaattttgtgccccttctgttttctttcctgtgcccggggagtgttctgccctttgccctctctccctcccgactggcatgggttgacagatgtggg

SEQ ID NO: 287707 - DNA, 122 bp, Homo sapiens
aaagcttactatttcttgggagagtgcaatgttatcatctccttaaattctactgcaagtcgtcaggtttctgcagctgggatttaagcccaattctgcctgaagccaaaacttgtgttctc

SEQ ID NO: 287708 - DNA, 122 bp, Homo sapiens
ttcgcggtggacttgggggcctcgccgggttcgccttttccgtcccacgctcctttctctcgtctccccacccacgcccggggccatgcccagctggacctccccacccctgcactcaccct

SEQ ID NO: 287709 - DNA, 122 bp, Homo sapiens
cagaaagaatgggctcaggtattcagtacggagatgctgccttgagacagctgaggtcaccgcggcgcgcacaggccccgaacgctcaggagtgtggttgttaggagagcacacaggtgggt

SEQ ID NO: 287710 - DNA, 122 bp, Homo sapiens
tttataaagcttttctccgagacagcttcagctttggaagtcacttccttcgtcttgctacggagttgttggtgattcagctggtctgcaaactttagggagttggtatgcaagtagccaaa

SEQ ID NO: 287711 - DNA, 122 bp, Homo sapiens
cttatcacttaccctcttgccggggggcccgggggcgccgggctccccagaagctccaggcggaccctggaggagacaaggacaccagctgtggtctcagctaacattgtttgagcctgact

SEQ ID NO: 287712 - DNA, 122 bp, Homo sapiens
tttgctccacaacctttcttctagctccgtaagttcggccttgtggttttcaagagacagcgtttatgtgggtttgggacaccgttatccaaagccctaagttttgaaattgagactttgta

SEQ ID NO: 287713 - DNA, 122 bp, Homo sapiens
caggtctctgctcctatttgctggtacctagttcaagagagtcttataaatacacaaagccggaaatgcctgggtaggggggtggcaagagcatgcggttccactccaggacaggatctgac

SEQ ID NO: 287714 - DNA, 122 bp, Homo sapiens
ctaaataaacctagcaaagttcctttctaaataccccatattgaataaacactgtttaaacgctgctttgcccccaaccaatcctaattttaaaaaaaaatcttgttttctctattctagaa

SEQ ID NO: 287715 - DNA, 122 bp, Homo sapiens
gatttcccacactaaaactctccagaagactgtcaaagaatactgcaatcaggccgggcgcggagactcatgactgtaatcccagcattttgggagacggaggcgggtagatcacgaggtca

SEQ ID NO: 287716 - DNA, 122 bp, Homo sapiens
tggcctgtgcttctcactggcactctggctgggtgcttgtctgctggagggtttggaaagcgagtcggctcactagagctattgttttacaccacctgtttgtgggagcgacagctgggctg

SEQ ID NO: 287717 - DNA, 122 bp, Homo sapiens
ggaacaatgatatggcccagagggtcataaggactgaagcactggttcccacacacagtacgtggtcagcacgtacaaattccatcctcttttcctccattcccgggggccccatggttgct

SEQ ID NO: 287718 - DNA, 122 bp, Homo sapiens
cgtaactgttgagcaaatgaatgctgagctgtgatggcaccgacgtgtccggggagaggacgcacccggctgtgtggacatgtgcccagggcccaggacagcgccacggaagaggacacacc

SEQ ID NO: 287719 - DNA, 122 bp, Homo sapiens
cttgccttagggctttactagttatatatcttctccctcttaaagatgatggattctggccgggcacggtggctcacgcctataattccagcactttggaaggctgaggcgggtggatcacc

SEQ ID NO: 287720 - DNA, 122 bp, Homo sapiens
gggctttcccagatgacgtcagtgagccaagtgcagggcatcacccttgccagatggccccggaagagtctcagctgccctgtcaagtttagcttctcaagctccccagaaccagcatggca

SEQ ID NO: 287721 - DNA, 122 bp, Homo sapiens
cgctacgtggagaaggatggccggtgcaacgtgcagcagggcaacgtgcgcgagacataccgctacctgacggacctgttcaccacgctggtggacctgcagtggcgcctcagcctgttgtt

SEQ ID NO: 287722 - DNA, 122 bp, Homo sapiens
ggattttgaaatggttataaacaatttgcaattagctcttttgtctaaatgagaaagggccgcttactcaggctttttattgactcgaggccctttatccatgtggcgagtgcgtcagatgt

SEQ ID NO: 287723 - DNA, 122 bp, Homo sapiens
cctgctttccaggcctggctttgggcggcgtcaggctggcgcttggcacctgaacaccctcgcgccccccacccgcttcagtcattacagttttgggattcattttaactttcagacgtgag

SEQ ID NO: 287724 - DNA, 122 bp, Homo sapiens
gcaagcgctctgagcctgcgtccgccgagggggagggtttccccagcccggccggagttgcggctgtgcgctgcttctggctcacaacgccgacgactgtcaagagagttggggagtggaac

SEQ ID NO: 287725 - DNA, 122 bp, Homo sapiens
taatgacttttaatggctgcatatgcaatagcgtgcaatgcataatgatattctggtcaacgatgttctggatggcatatccaatggtgctcccttaagattataatcaagtatttttactg

SEQ ID NO: 287726 - DNA, 122 bp, Homo sapiens
ataaaagcacgtggcatgaacaagtggtggcctcctcactctggcttccctttcccaagccgttgcctccccactacctcctgtctgtgggcctctccacccccctcacatttccgcagtgc

SEQ ID NO: 287727 - DNA, 122 bp, Homo sapiens
ctgggccttccgtgattccgaacccagcgccttacacaacctcttcagaaggtgaaaacacgaagggtctacaggctgttgataggaaggggaagcccttctggagtaagtccataagcacc

SEQ ID NO: 287728 - DNA, 122 bp, Homo sapiens
aacatcaccgtgacatgcagggcttccagcttctatccccggaatatcatactgacctggcgtcaggatggggtatctttgagccacgacacccagcagtggggggatgtcctgcctgatgg

SEQ ID NO: 287729 - DNA, 122 bp, Homo sapiens
gtcagactggaccactccgcaaaggccagtgtgaatctgctccgtggtgtcacctgggagcggggacggaggagctgccggggatagcacgtgctgcaccatgcagggtttgcatagggatc

SEQ ID NO: 287730 - DNA, 122 bp, Homo sapiens
gtacttataaatgttaggtcgattacaaatatggtgtcccattttcttttctaacctaaacgagatgttttaaacgagtctcattctatccggtaagaataaggaaggaggcaagtaaactt

SEQ ID NO: 287731 - DNA, 122 bp, Homo sapiens
tccttttgggtaattcagatgcattctccaggtcccagctcagctgtcattcgcacagcccgggtcggcagtctccagcccccaaccggtgtccaccgcgtggtccaggcgacttatgtctt

SEQ ID NO: 287732 - DNA, 122 bp, Homo sapiens
cttgcttccatagaagcccaaggagcccggcagaaactgctttgagcaaccaggaacacccggccctaagtcccgccccgcgcctctccccacctcaagtcccgcctctggctataagcccc

SEQ ID NO: 287733 - DNA, 122 bp, Homo sapiens
cgcgggaggagatggacctgcgccacggcggcgccggctgggggattggaattcaggccgcgaaccaacttgcaggaagaggagttccatgttggacctctaggtggcgcgattcttcccgg

SEQ ID NO: 287734 - DNA, 122 bp, Homo sapiens
cagaacgttccagaaaggagatgtgaataatttcgagagaaggttgtcctagggggagcacgggcatcctgtggtatcgaaatctgctggtcacgtccccacacccggctggttggctctgc

SEQ ID NO: 287735 - DNA, 122 bp, Homo sapiens
ttccgagagagtcttcaaataacgagttctctggccaaatcagcccttacataactcacccgcaccaagagcgaacaccccacccgcacataaggtgggcaataaaccaatcaaatatcagc

SEQ ID NO: 287736 - DNA, 122 bp, Homo sapiens
cccggaaacccgtgggcggggtcactgagcagcaggggattgggggttgggcgccaggcgcgtgcgcgtctctgaaacggggacttgggagcgcgcgctgcccctcacttggctgcaactgg

SEQ ID NO: 287737 - DNA, 122 bp, Homo sapiens
cacccactttgggagctgaaggcagagactcgggagccctcccggctcagactccccctacgctgggtgtgggttatattcagaggcccacacccacactggggtaggttaggtatggttta

SEQ ID NO: 287738 - DNA, 122 bp, Homo sapiens
ttcccttagcctccagggacaacccggaaaccacatttcccagcgtgccgagcgcctctgcgcaggcgcaaagagtttccctcgttgccatgggaacctcgccccttctagagtcctggccg

SEQ ID NO: 287739 - DNA, 122 bp, Homo sapiens
accccaagaccgtgcaggacctcacctcggtggtaagggacggctgtgagggccggaggccgcggccttcccgggcggcgccgggccaagccctgctggacagaggcgcgcccaccgcggcc

SEQ ID NO: 287740 - DNA, 122 bp, Homo sapiens
ccgggcccctagcggcctcacgccccgggggctgaggcctaggccggcgccgcccacccgcgccccagatagccagttcccgacccgaagaccagcacttaccgctgtacgacttcccctcg

SEQ ID NO: 287741 - DNA, 122 bp, Homo sapiens
cttccactggagcctgctgtaactggccccttcatggaagtctccagccctaatgaatcccggctgttcacctacacaatgagcaatcatgttctgcctcaggtctggctcagctccattcc

SEQ ID NO: 287742 - DNA, 122 bp, Homo sapiens
ttgactctaatgctgggtgcgtgagcgcatgcgtgcatgtttgtgtgtgtgtgtgttccacgcacatttgccagggagagagatttcacagcatggctccagctggaggcggtgaggcggtg

SEQ ID NO: 287743 - DNA, 122 bp, Homo sapiens
tgacacacatagcattctttcttgttttggagagttgcctttcattgtcttgctggaatacgtatacattttccctatagtagataagccttgggtatggggagtaacaggtgcagagatct

SEQ ID NO: 287744 - DNA, 122 bp, Homo sapiens
tcagcttctagaagatgaatcaattttgtgaggacttggccaatatcaaggtcttcagcacgactcatcagcctgttgctaattcaaggacaacaaatgcctacaaatgctttaagtaagcc

SEQ ID NO: 287745 - DNA, 122 bp, Homo sapiens
aaagtgggcagccctgggaggctggactgagggaggctggacttcccactcaggcctacacgcaggaaaatgggcagccctgggaggctggaccgagggaggctgggcctcccactccaccc

SEQ ID NO: 287746 - DNA, 122 bp, Homo sapiens
ttacaagtactgctgtcctctggttagcaagaaatatgttcagcacttaattgttgcagacgtgaatggtggcctcttcactgggcaacaacctatgggatctttgatctattccctttccg

SEQ ID NO: 287747 - DNA, 122 bp, Homo sapiens
gaaaaacagatgttttccgattcaaaatcagaaattgagtgcctgctgtctaccctacctcgtgccaactcaatgaaagtagagaagtaaaatcttaccgatttcaaacatacgcagtctta

SEQ ID NO: 287748 - DNA, 122 bp, Homo sapiens
tgttccttctgatgttcggatgtgttcggagtctcttccttctggtggagttcgtggtctcggtggctcaggagtgaagctgcggaccttcgcggtgagtgttacagctcttaaggtggcgc

SEQ ID NO: 287749 - DNA, 122 bp, Homo sapiens
cactgagcagcttcacttctaggaatttcttccacagatatccttacacgtccccaaagtcgactgcactgggacagtaaccaaagcacaatgtgtaggtaacaaaagtcaaaaataatctt

SEQ ID NO: 287750 - DNA, 122 bp, Homo sapiens
agagacagccctggattttagagccggtaaagcctggggtcactgtggaaggctctgtcccgctcctgaggagaccctccctcttctgccgggttcaggcgtggagatcagagggcaggcag

SEQ ID NO: 287751 - DNA, 122 bp, Homo sapiens
gccgacattcctgggtaggaatctgatggatacgtaggtgtttctgacattgcactccagcggatttttaccaacgcctcctggtgcctggggtctcctccttcatctgtgacctggacatc

SEQ ID NO: 287752 - DNA, 122 bp, Homo sapiens
atgtctcctccatcagaccgggagctcccagagtcagggtctatgtctcctccatcagaccgggagctcccagaggcatggtccatgtctcctccatcagactgggagctcccagagtcagg

SEQ ID NO: 287753 - DNA, 122 bp, Homo sapiens
ttgagcctccttgtcagtcaaagaagcccttcctctcctgtctgaggaggttatgttcctcgtccctgtgaaatctgtaatggcctcacctgaggtggttgcctggcgggatctgctgattc

SEQ ID NO: 287754 - DNA, 122 bp, Homo sapiens
gccggggccggggccggggccggggcggggccgcgccgggggcggaccccgggcccggcgcgttcaccttgagcgcccctggtgctcgcgctggagctggttatcaggttcccggcccaggg

SEQ ID NO: 287755 - DNA, 122 bp, Homo sapiens
cttcttcagccatgacttctcacatcttagaacacattaaaaataagaatatttgtaggacgtactggagaatgaatgagtatccttgaggtcagaaaccactggtcaggggttagcgtggc

SEQ ID NO: 287756 - DNA, 122 bp, Homo sapiens
ctctgagccagactctgtgccgggcgggggccgggaagtggtgggagaagtcgccgcccgcgtctgtccaaacttagtcccaaactcaggaggttcctgtcccaagaagcaatgtaaagttt

SEQ ID NO: 287757 - DNA, 122 bp, Homo sapiens
cacctcagggtgatggcttcaatagctcgtttgcaccaagtagtaacaggccacagcgggcgaatcaaccttttgtctgcctcatcagactctttgccccattgtcccccctcagatcccat

SEQ ID NO: 287758 - DNA, 122 bp, Homo sapiens
tcagctcgctgggtgtatgaaagaatctgtctgagctctaccagcccacctaggacagggcgcctcgcagcagggcaggcgcgctcaggaagagaacgactttctcaggttgtggcctgagt

SEQ ID NO: 287759 - DNA, 122 bp, Homo sapiens
gcaggtaaggaacccggcggggggtccctggggttggtgtgagggagtggctccggcctgcggatgcccaccccgggggagccgtgcggagaagcaatcggtccgcgatgcagcccccgggc

SEQ ID NO: 287760 - DNA, 122 bp, Homo sapiens
ccccccagcctaccccccacttttttttttctttttgcagcctacttatcatgacttcatcggactccggggagcgggaaagggggttggggcgggggggcggggagtgggcccgcttctgg

SEQ ID NO: 287761 - DNA, 122 bp, Homo sapiens
ttgttggggtatgaagttgtttgaagtgtgatatagaaacaataactatcagattgccaacgagtgtggtcagaattatgagcaccattaaactgtacagggaagcacggacatcatttgac

SEQ ID NO: 287762 - DNA, 122 bp, Homo sapiens
agtggcccgagactgtgggaatccgaaacctcgcttctggctagccacaaggtctgggcgcgccccaggcagcagggtcttgactctgagcctccgttttctcatccgggaagtgggcttaa

SEQ ID NO: 287763 - DNA, 122 bp, Homo sapiens
tttctgaggcaaattaaacttttccataaatgtgtctgatcctcagaacagtccatcaggcggagaatccgattttgctgctcctgtttcctaagtgaggacatggagttctagccccgctg

SEQ ID NO: 287764 - DNA, 122 bp, Homo sapiens
gctctttcctctggcgccggccgcaggcctcggtcacgcccccagcggcccgttggtttccgggtcccgcggggtgcccccgcccacacgctatgccttaaattgggccaggctgaggcgct

SEQ ID NO: 287765 - DNA, 122 bp, Homo sapiens
gcggggaagcgatgctttcttggcccgggcttggggccagcgggaaccgggctgtccggccgcgccgtcgcgcctcgcacggcgtgagacaacctagctttttttttttttttttttttaag

SEQ ID NO: 287766 - DNA, 122 bp, Homo sapiens
cctctgagaggcaggaaccaggccccagaattcccgccaggaaggggtccagcaggagcccgtgcccggtgtgcttcctggaaagcccacacttccacccaccaccactgcaccccgcccag

SEQ ID NO: 287767 - DNA, 122 bp, Homo sapiens
aacgagcgccgtttcaggggtgcggaggtgctgcctccaggagatggatacaggctggagcgtaaacaaaatatcggcagtcgcgtaaatgctttggagtaaacaagcagcctttcatgata

SEQ ID NO: 287768 - DNA, 122 bp, Homo sapiens
ttcaaacttctgctgtgtatgacacaccattaactgcacaaggacactgtgtatttgctacgttaatatttactgatgagttaatgtaataatgacccatccgcttctgctgcctgtgaggt

SEQ ID NO: 287769 - DNA, 122 bp, Homo sapiens
tcgaggcagcacagatatcgatttagatggaaaccggggtcggcgcggagggaaggagctcggtgagcttcgcatgctaatgtattatttaggctttgtggtttcatccggagtaagtgcct

SEQ ID NO: 287770 - DNA, 122 bp, Homo sapiens
gggatattccttggccaaacaaccaagtctccagagcactagcaagttcagaggaaacggcgtacaggttgcacaagaaatagcaagaaatccagattgtattcaaagcggcagactaattc

SEQ ID NO: 287771 - DNA, 122 bp, Homo sapiens
gagaatgaccacgatgatgctttcctctccgtcatgtctcctgacacccagttgcctctacgattcagatgatgtcaggcccagtccctcagtgccctgtgcaaggaacaggactcatcttc

SEQ ID NO: 287772 - DNA, 122 bp, Homo sapiens
gagaaggcatttttgttcttagccacaggggctgctgagtggaaaccatcacatgttaaacgtgcacaccatggttttgacccatgctttctgttcagatcctaaggctactcgaatagttg

SEQ ID NO: 287773 - DNA, 122 bp, Homo sapiens
actgacaagggcaagaatggaagagaaatctattacagagtagtggcagagtgctgtaatcgcatgcaaggacactaaagaaatggatagagagagtagcataaagaaaagggaaatatggc

SEQ ID NO: 287774 - DNA, 122 bp, Homo sapiens
acagaaatgacaggtgaggagaatgttcccttgacatacctgctgctgcttcttcctcttcgtcctcctcttcatcatcctcctgaccctcctgcatctgttccagatcctcctcctcttca

SEQ ID NO: 287775 - DNA, 122 bp, Homo sapiens
tttctctgcttgatatagaaacccacttcctcatggttggagagaaatctgatagagaatcggaagtgggaatgaaaaaatcctgctgaggtgcaaaataaatactagggcaatttagacaa

SEQ ID NO: 287776 - DNA, 122 bp, Homo sapiens
aattgggccaggaggctggagccaggaggagatggggagtgcagcacaggatgaggctgacgaagatgacagaagacagactgaatttgaaccttatcctcaaggcagcagaagccactgga

SEQ ID NO: 287777 - DNA, 122 bp, Homo sapiens
ctgtgtccctcgtccccttggaccgggtgggcttcccacccagagggccgtcaaagtgaccgtgggggcttagaaaccgcctcactttgtgttgttggctggaacctgcactccctcagtgc

SEQ ID NO: 287778 - DNA, 122 bp, Homo sapiens
cccctttccttccttcacgtggatgagggcagagccgtttcggcggatgcttggaggccacgggcccctcgcgtaccccttttcctttttgctgatttgctctgatctctcccgccaggtgg

SEQ ID NO: 287779 - DNA, 122 bp, Homo sapiens
tttaaaggccctatggtaaggaaatatatagaggttattacctaacacaggaagtagcaccgacgaatctcaaactctgttactggggccccaaagttcaggtgccaggtgtggaaatcctg

SEQ ID NO: 287780 - DNA, 122 bp, Homo sapiens
ataataaaggtaaaatttttgttggtcttaatgagagagaatttggaaagtggagataagcggggctttggagctcctaaactattcgggctgtgttttgactcagcgagctcaaagtggga

SEQ ID NO: 287781 - DNA, 122 bp, Homo sapiens
tcgatcctgggatgcaggagggaaccaatgactctgaattccaccttcacagatgtgtcacgccagtgtggacctgacacaaaacaaagacacaaaacaagcggttcaattcaaatcttgaa

SEQ ID NO: 287782 - DNA, 122 bp, Homo sapiens
ctctgaaggggaatggaccccccagctggttgccggcccaagtgtgcagagccgcggttgcgcgctgggtggaggggtcccccaagctccggtgctggtggggcccgaggatgctgtgtcct

SEQ ID NO: 287783 - DNA, 122 bp, Homo sapiens
acttttgtcacccaaagtgcatatgcacagcagccatggtgacattttataaacctaaatcgggtcatgtcactcctctgctcaaaactctccagttccatcatactcagattaaaattcaa

SEQ ID NO: 287784 - DNA, 122 bp, Homo sapiens
ggccagcgcgagttccgggtgggcacgggctgggcgggccccgcacttggagccgctggccggtgacactggccccaggcagtgaggggcttagcacccggaccagcagctgcggagggtgt

SEQ ID NO: 287785 - DNA, 122 bp, Homo sapiens
gtgatataaagaggactaatgaacaaggctcagttaaaaatgagattcaaaagagaatctcgaagtccatatgagacaaaagtcttgaaagctggctttgttgattaacattttggttagga

SEQ ID NO: 287786 - DNA, 122 bp, Homo sapiens
ccccacctgacactctctccaggaagtgtcagggagtgggctctgctgcctggcccctcacgccaggcttcaggatgaaaggaaactccagaatgacaatttgggattatctagtgccctgg

SEQ ID NO: 287787 - DNA, 122 bp, Homo sapiens
agtggggtgtctttgtgtggggaactgactgatgctactttcagggatgacaatagctgccgaaaagttcgagatggatgaaggtttgttattccatcatgattttgctcccaggtttaatg

SEQ ID NO: 287788 - DNA, 122 bp, Homo sapiens
cggcaggcgcggcactgtcgcaagaccgcgcgtgtttacggcagggctgagttggggcgtcgatctccttggcaatgagggcccgggaagtggctctcgggcgggagttgagaacgcaggga

SEQ ID NO: 287789 - DNA, 122 bp, Homo sapiens
tcagaagtctggagacagcatctctcttgcggtaaactgaaaaagggaaagaaattccaccggtcacagttctaggaagcaagagatcccccgcatttatgcacctgctgctgcctgcaact

SEQ ID NO: 287790 - DNA, 122 bp, Homo sapiens
aagaccgaactcagtggggagcgtgtgttgctggtctccggagacagaagcgcttagcatcgcgtgttctcttggaagtcgtacaggaagccctggcaatgtcagatgaggggtattctaat

SEQ ID NO: 287791 - DNA, 122 bp, Homo sapiens
cgaagccgggacccgcgcggggaggctgcactggctggaaacagcgcctgggcgctcccgcggctcccacctcagagatgtccccaggtgccccacgccccccgcgcgagccccgacacgcg

SEQ ID NO: 287792 - DNA, 122 bp, Homo sapiens
taggaaggcatagggagtcccgaggaggtgggttaggattgtagatggaatcagtgggcccggttagtgatttgaagtgacagccagtctttgcctgcttcctagccttccaaaccaaggtg

SEQ ID NO: 287793 - DNA, 122 bp, Homo sapiens
acatagtgagaccccgtctctgcatataacaaagaagaaataatcaggtatgtttgtgcacgactgcagtcccaactatttgggacactgaggtgggaagattgcttgagcctgggtggtcc

SEQ ID NO: 287794 - DNA, 122 bp, Homo sapiens
ggggaccccgaagtcaccggcagggtcggagctcggtgcaccacgccccccctctgcgcccggggcctctgcggggacagaggtctcaggaaagtagcctttatttatgtggcaccgatcgg

SEQ ID NO: 287795 - DNA, 122 bp, Homo sapiens
tttttagttaaccagaaccacacatcccatagataattccatttaactgaggtttatatccgtaagagcattaccatagaaaaatttccctttagcaatttcaagagacctcagccaccaat

SEQ ID NO: 287796 - DNA, 122 bp, Homo sapiens
tgtagctacaggtccctgagagagaccggcgcgcctctcccacaggggcgatcctccctccgcacccttgcgaccacctcggtgccctgttcttgggaaaacaggttgcctcggagttccag

SEQ ID NO: 287797 - DNA, 122 bp, Homo sapiens
ccgcctgcccgcgccacagccccaccgcccgcccgcggaccttcagccagctccggcccgcggctcccggctgaattaggcatctccgactccggactcgccgctccttccctcagtcagag

SEQ ID NO: 287798 - DNA, 122 bp, Homo sapiens
cgtgcgttattccactggggcctcacccattatcaggacaccagttctattttaacccagcgctgaggctctgagaggtcagtaacatggccaagagctcacaaccagcgaaaggcagggct

SEQ ID NO: 287799 - DNA, 122 bp, Homo sapiens
acaattaagggatgaaatttctgagggaatggagggaagacagtccctggaataccgatccgcggtcccctttgagccctccaacagccttgggccccgtgacttttctctcaagttttgtt

SEQ ID NO: 287800 - DNA, 122 bp, Homo sapiens
acatcagaaacttcacagtggtgactaatgctgccatttaggttatgacagtttctctagcgaggatgactacgaatctgactgggagtagaggggcaggtagagttcctggagggaaggat

SEQ ID NO: 287801 - DNA, 122 bp, Homo sapiens
ccacccacctcgtttttcagtgctttgcagtatgtctttttctctttccccttccacgttcgtctcacccactctcctggaccctctaaccaagttgccacgcaaaagcagcaagcaaacct

SEQ ID NO: 287802 - DNA, 122 bp, Homo sapiens
cgggttggacccagtcctgctagggagtctgctgcagctcaggaacggggatctgggaatcggggatctcggtctgggaactgggatcttagtggaggatccacgaggcacggcgattggat

SEQ ID NO: 287803 - DNA, 122 bp, Homo sapiens
tcgcaactgcacacacacacagctccccgatctcatccgttctgcacagctgaggaaccccgtctggcttcactgaacacatgatggctaaaagcaaacaggaaagcacatgcagtgtgaga

SEQ ID NO: 287804 - DNA, 122 bp, Homo sapiens
tggatgcagggcttttagtgctaaatccacaaaagtccagggcaaatggaaccaactgctcgctctttgacatagcaagctgaaacttagatcttcaattactctttacacaacagtgaaac

SEQ ID NO: 287805 - DNA, 122 bp, Homo sapiens
gagcaggagggtttttcatagctcctgacaattatattcctcgccatggggtctgagagtcgccgtagagatttctatgctctggttagcagtgtgccggcagatggtttaagtaaagccac

SEQ ID NO: 287806 - DNA, 122 bp, Homo sapiens
ggggccgccgctggctcggccgccgccggagctcccgggctgcctgctgccgccgcggctcgctgctgctgtgcattgaagcccggccaagcgctgcaaaaactccagctgcctggcgctct

SEQ ID NO: 287807 - DNA, 122 bp, Homo sapiens
gacattcagcttggaaaattccttaggaatagcaacctagattagatggggggctgaggacgggaacttagataaaagctgatacttgtaatttatacattccttgtccccttatcccttca

SEQ ID NO: 287808 - DNA, 122 bp, Homo sapiens
acacgtagcatatccaagacttgggcctatatgtactcaatggcatctgctaaccttggacgtttcaattctcacacacacggacagtgggaaatgatgctgcagggagtgatttcatcttt

SEQ ID NO: 287809 - DNA, 122 bp, Homo sapiens
aggggcgtgtggcagaactggcatcaacactctggtcttctgattcccgggacggatcttcgacttctaattgggccgtgcctccttgcaaaactgtgtgtgcatgtgggttttgttcagaa

SEQ ID NO: 287810 - DNA, 122 bp, Homo sapiens
cgcgggagtccagcgcctgaggtcggggagacgacctgaggatcgggggatcccgctacccgccgccgaaaaggatctggggaccagggccccagcacgaccggagggtggatcctgacact

SEQ ID NO: 287811 - DNA, 122 bp, Homo sapiens
gcggtccccgcgcattagaggtgaatcagacacttgaacatctgtccacttcatggaagacgtttcatctcagaatacacgtactaataaacaacagttggagacaattgtctctgacattc

SEQ ID NO: 287812 - DNA, 122 bp, Homo sapiens
ttccaaattaatccacccacgcaacctcaccaggaaatctgatttcgctgggatcctgtgcgcggggcacgccagcgattacaaacgtgtctcaattctgttgagtcaaagccctggtgcca

SEQ ID NO: 287813 - DNA, 122 bp, Homo sapiens
aaagtataaaggaacaggtcatttattaaagataaattatcagccgggcacagtggcttacgtctgtaatcccagcactctgggaggccaaggcgggcagatcacttgaggtcaggagttca

SEQ ID NO: 287814 - DNA, 122 bp, Homo sapiens
gacagaggccagaggacttctcatactggacagaaaccgatcaggcatggaactccccttcgtcactcacctgttcttgcccctggtgttcctgacaggtgagggaagttaacttcttggtt

SEQ ID NO: 287815 - DNA, 122 bp, Homo sapiens
cacccgggtgtgccctttgtattgctggaagcgctggcgatcataggggcagagggctggcgttggggcggcctgggacccacccggccccgccccctctcaggccccgccctccccctcct

SEQ ID NO: 287816 - DNA, 122 bp, Homo sapiens
cacagcagtccgaggaccttcctgactgtgatcctggccccagcagggggacctagaaaacgccaatgaagctgtgggcaagcaggcaccaggtgggaaagcggccaagctcagggcaccct

SEQ ID NO: 287817 - DNA, 122 bp, Homo sapiens
atggcactgacttcaccagtcagcggaaggccctgctgttgttgtatacccagaggctgccgtaagcttgaagttacatgacagaaactaagaagactaaatccaaatgtgaaatacacaca

SEQ ID NO: 287818 - DNA, 122 bp, Homo sapiens
aggtgaggaagaggcactgcaaagatggggtttcttttacttggcagtggaaaagataaccgtttctgatatttcttgggaggaatagaaatatcctataagaaaatacactgggatggggt

SEQ ID NO: 287819 - DNA, 122 bp, Homo sapiens
cgcaccagcacaccttcacgccgttcccccacgccatcccacccaccgccatcatgccgacgccagcacctcccatggtgcgtaccccaggcagaaatgtgaggataagtagagcacgactc

SEQ ID NO: 287820 - DNA, 122 bp, Homo sapiens
ccagtcagagaacttcctacaaaactgaagatataaagtgctgatgcctgggcgtgcctgcgttcgttgggggcacgacgtcatcgtgggaagcgtgtactttttcggattactgcttggcg

SEQ ID NO: 287821 - DNA, 122 bp, Homo sapiens
gtgcctctctctggctcccagatcgtcaagggcaaattggcaggcaagcggcaccgctatcgagtcctcagcagctgtccccaagctggagaagcgaccctgctggccccctcaacggaggc

SEQ ID NO: 287822 - DNA, 122 bp, Homo sapiens
ttggaagcgcgtaaatggttaaactcctggcctgggctgggctggtgcacagcctgggcccggcgcggcgggggttaaggtgggcgcccgcgccccgcgccccgcgccctcccgccgggatg

SEQ ID NO: 287823 - DNA, 122 bp, Homo sapiens
gactcacagaccatacacccaggaacactttttcctctcccttcctgcctagacttgtagcgtgcatgtgctcactccctccctctctctccccatctccttctcattgaaggtaatgtaaa

SEQ ID NO: 287824 - DNA, 122 bp, Homo sapiens
attgcaactgttttggaaatagctttgtgaaaagagggtggagagctactcaaaattctacgttagagagactgaaaagacatctaatttcattgctcggcaggtaagtgatagcgctatta

SEQ ID NO: 287825 - DNA, 122 bp, Homo sapiens
cacaaacagagagaggtgcgggcgtatttgtggcttctgactgttctccttatccacaggcgtgcctcagagttcctgatctctgcacgccctgcagccgtgttacatcagggcagccacac

SEQ ID NO: 287826 - DNA, 122 bp, Homo sapiens
ttcccaccagtgccgcctggaggacagcccacaaggtgggccagctgcgtggccctgcgacgggcctctcccatgcccaccgtggcccagggtccattgggggcaccgctctgcagcacggc

SEQ ID NO: 287827 - DNA, 122 bp, Homo sapiens
acaagtgaggggaagccccgccgcgggcgcttaaatgcgtgcccgtcgccccctagcgctcgggaggccacacaccgcttctctgcccagggcatttaaaagggagcccctcccttcggggc

SEQ ID NO: 287828 - DNA, 122 bp, Homo sapiens
gtggctgggattcgggaagtactttaagctcacgtgacctacagccctgagggagtggggcgcttgaagacacgccttccacagtgtttatcattcacttaaaaggattaagcactccaccc

SEQ ID NO: 287829 - DNA, 122 bp, Homo sapiens
gtaatttaaaagtggaagagattatagtggggttaggaccagtataggttgcaaggaggacgggcttaggataagaagctaactgcactcaatgcatttttttacatcagttaaatgaataa

SEQ ID NO: 287830 - DNA, 122 bp, Homo sapiens
gcactccccgcagctggagcatgggctcctctctgccctatcagcacagccacccattctcggctctttaaaacagatgttgcaacaagcaaacatctttgtgatgacacagtgatgttatc

SEQ ID NO: 287831 - DNA, 122 bp, Homo sapiens
ggaagacctccaaccccgctgacaatgctgggccctcagccagacctgccctgcgtgccacgttctgttctaagatcgggctgccgagctgtggcctggaggaaacctggcaggtgtcacca

SEQ ID NO: 287832 - DNA, 122 bp, Homo sapiens
ggccatggcagcggcggcgcgtctgggggccggcggccggcggccgctttatgccgagcccgaggtgtgaagtggccccttccaggccgcatcagcacatcaaagtgggctcggggcttgga

SEQ ID NO: 287833 - DNA, 122 bp, Homo sapiens
gctgccactccttggagtggggaaacttcccttctattctgctgggctcattaccgcagacgctgttgcctctcctgaacattgggtcagcctccccacctccactcttccttacttcaaag

SEQ ID NO: 287834 - DNA, 122 bp, Homo sapiens
acaccttccaccaggtcgcatctccaacactgggaattacatttcaacatgagatttgggcgggggacaaatatccaaactatgtcacggagcaagaggaggtccctggagctgttgaagca

SEQ ID NO: 287835 - DNA, 122 bp, Homo sapiens
ctgcccctgagtgatccacctgccttgaccttccaaagtgctgggattataggcatgagccgccatgcccgaccacttgggaactgaggtcttaagacacacttgccctcagaaggacaggg

SEQ ID NO: 287836 - DNA, 122 bp, Homo sapiens
cagtgtcacgccttagcgcttccagctccagctcagattccagctcctcctcttcctcgtcgtcgtcttcagacaccagtgattcagactcaggctaaggggtcaggccagatggggcagga

SEQ ID NO: 287837 - DNA, 122 bp, Homo sapiens
tacatccagacccgatgcaaaaggaattctccaatgcttttcggcaaaggcctccatttacggatttccttttccttctcttccacagatcccctcacagagccagaggaccctacaccttc

SEQ ID NO: 287838 - DNA, 122 bp, Homo sapiens
tctctccgctttggacccgggctctccgcggggagagataggttgggggctaggggttcccgaaataattcaggacacctcccccgggtctagccaggtaattccgacgcccatggatttcc

SEQ ID NO: 287839 - DNA, 122 bp, Homo sapiens
tgacctcatgatccacctgccttggcctcccaaagtgctgggattacaggcgtgagccaccgcacctggcccagaatatttatttagagagtgatgtcaggcctaagtgttgatagtgggta

SEQ ID NO: 287840 - DNA, 122 bp, Homo sapiens
ccttcctttgccctcgagagagggttcagcatgcggcaccttttcccagcgtccgcacagcgccggcactgtttgtactgtgtgtgtgtcacctgtctcaggcccataatgttttccttcaa

SEQ ID NO: 287841 - DNA, 122 bp, Homo sapiens
aaagacacgcccccgccatttacgcagcaacgctttccgaagagcgtgtgacgtatgtggcgcgacggcgcgacggcgctcgcgggggcaggatacatgcgtcatatcttcgaaaatcagga

SEQ ID NO: 287842 - DNA, 122 bp, Homo sapiens
tgaacgagccacaaaagtgtcttgtgaatgttcaaattatcctagtcttaccttcagactcgggcaaactgctatataaaattaacttgtttttctgtttttttgtttttgctttttgtttt

SEQ ID NO: 287843 - DNA, 122 bp, Homo sapiens
agggaggctttaaaaggggggatgcaccggaagtgacgccagtcagaggttaacggaaaacggaagctggctggctgagaagaagcttccgttagtcctaccttgaagagaaaagagccaga

SEQ ID NO: 287844 - DNA, 122 bp, Homo sapiens
cttgggtgggtgggtgggtggtcagggatgtgtgtcattgtcatggaaaccccataccatcggggtgtgtgggtagcacatctctgtgaggcaaagtcaggtggtggtggagtgtatacaga

SEQ ID NO: 287845 - DNA, 122 bp, Homo sapiens
agtgccagacagtgggcgcaggtcagtgggtgcgcgcaccgtgcgcgagccgaagcagggcgaggcattgcctcacctgggaagcgcgaggggtcaagaacttccctttccgagtcaaagaa

SEQ ID NO: 287846 - DNA, 122 bp, Homo sapiens
taaaacaagaggtggagtgaccaggacaatcctgcttcacaattgccctcatcacatcaacgtaaactgacccttcgctaatcggggcatgcagagaatcttccagtagccagttaatcttc

SEQ ID NO: 287847 - DNA, 122 bp, Homo sapiens
tcatggacctgtggaagatttcccggtcccgcttcttgtcctcagttggtgtggctgtagcgatgcatgtactccttccccggcttgcacaggtactgctgcagcgtgtggtgcgtgacggg

SEQ ID NO: 287848 - DNA, 122 bp, Homo sapiens
gctgttcctcggggtgagcaccagcgtttgtcccatcccgacgctgccccccggtgagtgcggcccccgcacccagccagtgcagccctaagggcgaacgcggcccctcaccccattctgcg

SEQ ID NO: 287849 - DNA, 122 bp, Homo sapiens
gcacagctgacaggacaagggtcccacccaaggccatcatgagcatgaggactgggcgggcggaggcgggcgtctgagggtatgtgggttgggggcctgcagaggggactgatttctgagcc

SEQ ID NO: 287850 - DNA, 122 bp, Homo sapiens
tttattcagttactagccttaaggacaaattttatgggctaagctaatggttttagtggtcgttttctacagaatgcattgttggaattatttacgttttaagcaaatgtcctaattgcttg

SEQ ID NO: 287851 - DNA, 122 bp, Homo sapiens
cgacttgggaggttgcccactgggtgggtaataggtctctcgagtaggtctcagccctgtcgctggttcggttcagtggtaattgtcaaactaaatgagttctgctgtagttccttaatgtg

SEQ ID NO: 287852 - DNA, 122 bp, Homo sapiens
cgtttcttggcaacaggaagctcttggtttacacagtgtcacccaagcgactgggagccgcgtcctgctctgggactgagccgttggagctgccccgctgaccgcactaggctgaccgcaac

SEQ ID NO: 287853 - DNA, 122 bp, Homo sapiens
attatgtggtggaattgatcacagcaacccgctggcttccctcagggagacgggacaaaccgtgagcagaaaagcctgtcgcaaagagggaaagacaggcccacgcagacttagctgggcct

SEQ ID NO: 287854 - DNA, 122 bp, Homo sapiens
tctctttctatgttgtacgcagcttgcttgtttgtcctgtagttcatgttaaattaaatccggtatagtgctcagcatgtagtaaatggctcacaaatgattgccattactcatgtaaggta

SEQ ID NO: 287855 - DNA, 122 bp, Homo sapiens
tgcgggcccagcagagtgcagtgcggctcaccgaggtgaggcccagggcagggggacccccgggctccaccagtcccaacggtgggctgacgcttcttcctcgtcccctcagatcggcccgc

SEQ ID NO: 287856 - DNA, 122 bp, Homo sapiens
accaggaaagtgaaatctgggaatgtgaggagcctaccatgtcctgcgggctggaccacacggtatggaggagaagaggaggaacggaagctggcaggtcagcagaggctgagttctgacag

SEQ ID NO: 287857 - DNA, 122 bp, Homo sapiens
gtcactgcaaccccgcctcacctccgatgcctgctgtgcccagggtggtcccgctcatagcgacggcctgtgcgttcatacgacctcgagcgctctcgtcgctgatctctgtagtaatgact

SEQ ID NO: 287858 - DNA, 122 bp, Homo sapiens
cgtgaagatcccgtgaggggtacgcgagctcaaggaaagaaagaggccgtgcagcttgggcggcttggacgacgtatctatccctgggctagcgggtcctgattactattcgtaggatcctc

SEQ ID NO: 287859 - DNA, 122 bp, Homo sapiens
gtatgatattagtcatacgtgtgcgaggcagtggtgacagcctagggaggcagttctgctcggggggatactttggtatgtaggggttacctaagctgagtctttttctcctgagtcttcag

SEQ ID NO: 287860 - DNA, 122 bp, Homo sapiens
cactcaagtcccagcagccctgctcaaggccaggttgaaggctttttccgcctcccagggcggggtcagaggtgtccccacctgtagcttttagatccccaagtgctcgcaggtggggggtg

SEQ ID NO: 287861 - DNA, 122 bp, Homo sapiens
atagctaacataagaaattcactaaaggaatttggatttcagcaggcatcagaaagcagccgtgaacttgaaggtaggtcagtgaaattacccagtctaagcagcagagaagaagaatgcag

SEQ ID NO: 287862 - DNA, 122 bp, Homo sapiens
gagccaggcgggcaggtgggggtcccgggaagggcctggggctcaatccctgactcccagcggggagaagggcaggtcaggctccgggctgctcagggcccattgcgtccacaggcttcatg

SEQ ID NO: 287863 - DNA, 122 bp, Homo sapiens
tgtcgggagctagtcacccgctgggggcgctgcctcgagcctcatggctgcccctgcttccgtcatgggcccactcgggccctctgccctgggccttctgctgctgctcctggtggtggccc

SEQ ID NO: 287864 - DNA, 122 bp, Homo sapiens
ccagacttccatgtttcctctgagctcccattcatccactcactccagagagatcaattgcgccctgccatatgccaggcgtccttctaggtgctggaggcacccctggtagtacaacacac

SEQ ID NO: 287865 - DNA, 122 bp, Homo sapiens
tgaggaaactgcctcttctccttccaggtccatatgagaaaccttctctctcagcccagccgggccccaaggttcaggcaggagagagcgtgaccttgtcctgtagctcccggagctcctat

SEQ ID NO: 287866 - DNA, 122 bp, Homo sapiens
tcccccagtggaccttgagctctgtgaaggcacttttgtattcttgaagcctagtacgtgcggaagtacttaataaaagttggtgcaatgaatgattgaagagccaatctggagttttgaaa

SEQ ID NO: 287867 - DNA, 122 bp, Homo sapiens
gactttcggcatctcccggaaccgcaacagccgcatgaacaaggagccgtgctttttccgcgccatgctcgtggtgcacaagctgctgccccctgagctgctcgccatgtgggggctggtgc

SEQ ID NO: 287868 - DNA, 122 bp, Homo sapiens
caagggacgccgaaacaggacttgcctcagttatgagcacgtgctctgacctggctgcggcggcgcaggcaaacccctcggaaggtgtcgttgtccaccgagacggccattgacctctgact

SEQ ID NO: 287869 - DNA, 122 bp, Homo sapiens
cactcttccccacaccccaactcttctcacttgcgctcctgatgagctaagaggagttgacgctgtcaccccgggacggtcggctgcccacccttcgcaccctgcaccccgagagacacccc

SEQ ID NO: 287870 - DNA, 122 bp, Homo sapiens
actccctttcctactcccccttccaagtagagctgtgaccaggaactggggcacagcctccgtgtcctcccctacatccccaactcaggtgttggcacacttgaatcgcctgatataagaca

SEQ ID NO: 287871 - DNA, 122 bp, Homo sapiens
gtaaccccggtgggcagggagagaaatgacccaggggccgccactgagctggcagcttggcgcagctccataagaacacgggctttggtgcttggattccaggaagagtgactgtgtctttc

SEQ ID NO: 287872 - DNA, 122 bp, Homo sapiens
tggcagaccccagacgcgtggcagaacctcagtgcagatgcgtggcagaccccagacgcacggcagatcccagacacatggcagaccccagacccatggcagactccagacgcgtggcagac

SEQ ID NO: 287873 - DNA, 122 bp, Homo sapiens
ccagcatccagctcctattctagtgcctcttccctgcagggcagggaccccttgggaaatcgaggaggtgggacgggctgggccctgtgtcccaggtttcacagggctcagggttatgctcc

SEQ ID NO: 287874 - DNA, 122 bp, Homo sapiens
caggaggcacccacagcaggggcagtgcaggtctgtggtcactcctgctctcacctgcggcgtctcccgtggagggattgtcacttctggttccctgtgggcaggaatggtttcctcgtagg

SEQ ID NO: 287875 - DNA, 122 bp, Homo sapiens
tggctggactggctgccttgttcctggcctaggacttagcttcataactatcacctgcaccgactaggctgaggtgctggtacttgccccaacccctacttttgtatttatatgtgtgtgtg

SEQ ID NO: 287876 - DNA, 122 bp, Homo sapiens
gagctgtagaaggcaagccagatttttgctgggaaagaccttcatcggggcggcgaagcccgcagtgacagagggtcttagcgtacccgttcacatgaattgtaaaaacgcacttacatgcc

SEQ ID NO: 287877 - DNA, 122 bp, Homo sapiens
ctaagtgtcctggctggcagcagagttccccacccagccaggacccgtggtagttccacacggtgagcgcacagccagccagagcctgaacccgggtttctagccatgaagggcagggagct

SEQ ID NO: 287878 - DNA, 122 bp, Homo sapiens
tccctgggaggagaaggcccaaggtttcccctccacttcaagatctgggctccgaggctccggagcccccttcactgggccgcgtttcttgtgccacctcttccttaggctccttctgcagg

SEQ ID NO: 287879 - DNA, 122 bp, Homo sapiens
cagtccctgactcgcggggggtgcctcccccgttgcgatgggggtagtaacagccaggggcggaagaggggatagctctcagtccccactctcgtggggggtgcctccccctcctgcgatgg

SEQ ID NO: 287880 - DNA, 122 bp, Homo sapiens
ttggggtctacttggaggctctgggggcatcacttggggtcttgagccaggacctgtgtccgggcagcaaaggactcagggaagagtggagggccaaatgggagttggtgaagtctctgggg

SEQ ID NO: 287881 - DNA, 122 bp, Homo sapiens
actgtctggtcattgtggatacctctcttggggccctttaataagaagtatgttagaggtcggttttggggcagtgttgacctcctgcctaaggtcaaaggcagttttcttcctaaatctta

SEQ ID NO: 287882 - DNA, 122 bp, Homo sapiens
tcagttttgtaagcataaaaaggggaaaaataaaacccagagtttagtaaggtttagaaacgctacactcagcaagtcatagctaagtcaccgtcaccaatggtagtcaagtgtgtggtgca

SEQ ID NO: 287883 - DNA, 122 bp, Homo sapiens
agccgcggcgctccctggggcagtcacccaaaggactttcccttctttatttgttgggggcggcggggactggaacccagacgcgcaagtgtggggcgtgtcctcgtggcgtccctggcgct

SEQ ID NO: 287884 - DNA, 122 bp, Homo sapiens
accccaaaggggagaagccccggacaccacgcaggcgctttgggaatgaggcacccttggcggatggactgggcgggctggggtcagaggtcacctgccctgcccagcagccgcatggagat

SEQ ID NO: 287885 - DNA, 122 bp, Homo sapiens
ggtcccggcaggggccgagcgaacaagggccggcctggggcgcccagagacgcgggggaccgttctggtcgcagctgcctgggtgacctcttggaacctcagcttcctccttgttttttttc

SEQ ID NO: 287886 - DNA, 122 bp, Homo sapiens
gctgtgacaattccagtacatgtcccgcagttgtgaaattcctgttgtttgcctccatggcggttgggaggtgggagcacgtgtcctccccagccttgttccatgccccgctcattgcttct

SEQ ID NO: 287887 - DNA, 122 bp, Homo sapiens
ggtagaaactacggcaaactggacagtgcatgcccatcatgggaagcagcttctattccacgccaggtaacttcagccatgtgagaatgcgggcccaagttgttatcggatttcccgattgt

SEQ ID NO: 287888 - DNA, 122 bp, Homo sapiens
gtcacttgtttgctcactgctacacaaaagtgtggagaccggaagctaattctacagcaacgattctcctgctcagaatcacaaacacaatttattatacccagaacctgcccaaaacatta

SEQ ID NO: 287889 - DNA, 122 bp, Homo sapiens
ccattaactctgcaaagtgtgtaaaggaaaaccaatctaatggcattcattttccatgaccgaacaactggatttggttctggtcaattaaaatggcctgtccaggactctcaacaggacag

SEQ ID NO: 287890 - DNA, 122 bp, Homo sapiens
ttccaaacccgcccccgggcctcgttctcaggtccaactacacccatagaagctcaaccccgcccaccttaagcatgaggccgcacatgctgaagatcatgcccagcaggttcatgtagtcc

SEQ ID NO: 287891 - DNA, 122 bp, Homo sapiens
agtcccctcagtgtgacaaatggctcttcaacaggaccgctgtccctcgttgcctggcaacgctgctgtaacccctggttactcagcaaataggctgtagcagcaggaatgctggaaggaag

SEQ ID NO: 287892 - DNA, 122 bp, Homo sapiens
tctagaggccacccacatgccttctcatgttgcccctccatcttcaagccagcagtgatgcgctgagttcttctcatgctttgaatatctgacttcttctgcagccagctggaagaatatat

SEQ ID NO: 287893 - DNA, 122 bp, Homo sapiens
ccgagaggtggacagccttcatgtccctgtgaggctgcctgttctgctcctggccagactcggtcgccagcagattttctcatgtggaatctgtatgcctgtgtggcaaatatctattgttt

SEQ ID NO: 287894 - DNA, 122 bp, Homo sapiens
gcccagaccttggactgggatgggagattacctactctctgagactttctcttgggctttcggtttttctgtgcgaaagtggctagttcgctccgcagagcgcggagcgctgcgcatcagcc

SEQ ID NO: 287895 - DNA, 122 bp, Homo sapiens
agacagcgatgtcttgcatttcttctcccgctccagtttttattgctgcggagggcacgacgtgagctgcccgccatccccgccctctcttgacaacagctcagtgaggtaaaaagcatgat

SEQ ID NO: 287896 - DNA, 122 bp, Homo sapiens
ggtccccgaaactccttccgggcctacctgacaaaaactgggacaacctccttaggcccccgggattccccctgtgccgcctgaccgcccgccagtcccagagtttagggccaggggccccg

SEQ ID NO: 287897 - DNA, 122 bp, Homo sapiens
aatacaatccaatttcattatatcaatcacatttaattggcaatttgtacgagcaatgaccgggctggctttaggtaaaactattagacgacaggcggatgtgctactaaaactcttggtta

SEQ ID NO: 287898 - DNA, 122 bp, Homo sapiens
tactgcacccgcttcatcccattgaagatatgacactcacacttagcctgctccaagaaacgtgctgtggggacacgaacgatccagtcacagggatggcctctgaggaagacactgacagc

SEQ ID NO: 287899 - DNA, 122 bp, Homo sapiens
aagtaggaagaagaatgccagccaaagggaaacagctggagcgcattcttgagaaaaacacgtgcaaaggcacagaagaatcatgtaaaactgctaataattttgcttggctagagcaggag

SEQ ID NO: 287900 - DNA, 122 bp, Homo sapiens
aaggcggcactccagctgggcaaacacacacacactggagaaggtggcactccagctgggcgaacacacacacccactcgagaaggcgacattccgctgggcaaacacacacatccactcga

SEQ ID NO: 287901 - DNA, 122 bp, Homo sapiens
ctcccatcttgggcaggtgcttctgaaggtggggtgcaccagacaacgggcggaagccgccggagcctcacggtctagcgggcccagccctcgctgctgaaatgatttcattctttatgctg

SEQ ID NO: 287902 - DNA, 122 bp, Homo sapiens
gggagtgaaaacagccctggaaccttggtctaggcggtagatgggtggcagtggcttttccgacagtgctgggtattatggtatatgtgcactgcaacccctgccttgaaggaggaggagtc

SEQ ID NO: 287903 - DNA, 122 bp, Homo sapiens
ctttgtgcaaatgtgaggaaatttttccaggttatatatctaaaagtagaatgactaggccgaaggatagcctgtagtcagcatgactaggttttgccaagttgctctccagtgtcccagtt

SEQ ID NO: 287904 - DNA, 122 bp, Homo sapiens
aggtgcggcggggagtgggagccggcccggctcagtctgatttacggctctgctgaaaaccgcttcgctcccgcagcatcagcaccggaggcggcggctgcagcagcagcagcaacaagtcg

SEQ ID NO: 287905 - DNA, 122 bp, Homo sapiens
acatgaccagccctgcctgtgctgagtgctcaccctttgcttagggatgtgctgctcacacgacaggtcctttgttctgcaggggcactctctcctccagggcatctggcaggccctgagta

SEQ ID NO: 287906 - DNA, 122 bp, Homo sapiens
gtctgtggagtaatcccttaccaaaagccagagtctgactggccatcaggagaggagccacggcttccagggagctggagctgcagagtcaagaagtttcataatttctggggttggaacat

SEQ ID NO: 287907 - DNA, 122 bp, Homo sapiens
agccggcggcggaatgcttgtctagtaattgctacttccggcgtcgattagctggggacccgtcgctgctgcacacttccggtccgttcaaccctttcgataccaggatttgggtggccaag

SEQ ID NO: 287908 - DNA, 122 bp, Homo sapiens
caatgtagaatgcccttgaattctccccaagtaaatatgagcccttctgtgttacagaaccgcccgacctctcctccataattgagccgatcacagaggagcgagcctctcgaactctgtac

SEQ ID NO: 287909 - DNA, 122 bp, Homo sapiens
tgggtgcgccggcatgctttcttggcctgtgagaagacccggactgctgattcccgctctcggccctgcaggcccggaactgcagcacaaagccccttcccgctccggcggacacccggccc

SEQ ID NO: 287910 - DNA, 122 bp, Homo sapiens
gatcactgggaagggtggttgtgaaagccactgagggtgtgtgcctctccccagccacagcggtgctggagaggaggctggggcgctcaccactctttcctctaccatccggctctgggggc

SEQ ID NO: 287911 - DNA, 122 bp, Homo sapiens
ctccacccactttcaggggattatgggcacctaccgtccctgggccgaggagtgggcacccgcgtggtctcagaaccatcctgctggacttgcagtcccagctcctctgggcctggttcagg

SEQ ID NO: 287912 - DNA, 122 bp, Homo sapiens
cagatttcagtgtgaaacagatgaccactggtgtgagaacgagaacaccgtaggacctatcgcttttttatcttccgcactctgaattgtgacccattttctagaccttctgatgagaaata

SEQ ID NO: 287913 - DNA, 122 bp, Homo sapiens
acgcgtaggtttttgtgacgtcacacggatttttccggtgaccggggcgtggccacgcttcggactccacaaggaaagaagagagccccctttggggcggagccactgagggctgcgcggaa

SEQ ID NO: 287914 - DNA, 122 bp, Homo sapiens
ctatctacgaggtacctcgtaagatatgcggatggatcaagctgaaaaatatctggcccccgacggatgaatcttattattgagacattatttattcacaaaaatgatgaggtagcaatgca

SEQ ID NO: 287915 - DNA, 122 bp, Homo sapiens
tttgattacaaggtcctttttgattacaagtccctgcttctgtaatcagggactctatgtcgctattatctatcctcagggcctagtgagttgtgcacgaaggcgctcaagtatttgaatgt

SEQ ID NO: 287916 - DNA, 122 bp, Homo sapiens
gtgtgtgtgtttaaagtgaaccccaaagaagtgctggggtgtgtgtgaagtgaacccgaacgctggaacgtctttcttcgcctccatctagttgacttacaaaataaatacgcttgtaaaaa

SEQ ID NO: 287917 - DNA, 122 bp, Homo sapiens
gggaatgggcggggccgagctctgcgaggggcgaggtggggaatgcagagcggggccggacgcgggagcagggagctgggcggggagcggggcggggagctgggctgggctcggcacggggc

SEQ ID NO: 287918 - DNA, 122 bp, Homo sapiens
caggcctcactaacacaggggctacctgtctcttattctcagcacctgtgtcctgagatacgctgcctgagacagagagagtccctcattaacagcctgtgtggctgtcagctttttgccta

SEQ ID NO: 287919 - DNA, 122 bp, Homo sapiens
tcaatatccccccccaaagttgtacatttgttagaactgatgaacctatgttgacattatcgtcattggattctcattatcatccaaagtccatattttacattagggttcactcttggtgc

SEQ ID NO: 287920 - DNA, 122 bp, Homo sapiens
gcggtggcggcggcggacccccggggggcgtcctcgtccagcggggtggtggtgcaggtccgcgagaagaagggccccctgcgcgccgccatcccctacatgcccttccccgtggccgtcat

SEQ ID NO: 287921 - DNA, 122 bp, Homo sapiens
catcttgtcttgtggctttgtgaagtgaggacgtcagtacttttgttgtttggtcccgcccgttgttcacaacttgaaagacacttggatatgcagacagacgttaaacaatttcgtgttgc

SEQ ID NO: 287922 - DNA, 122 bp, Homo sapiens
ttgtgaatgactctctcagggagcatgtgcaggagaagccagagcctcactccatgggaacgtaacagacagagctaaagaatgggctaagaacagccgctgaatggaacaggtcatgctgc

SEQ ID NO: 287923 - DNA, 122 bp, Homo sapiens
ggtaggcttcagcaccgaggctaggcactcctgggccgtgcacggcagacgccggtagcccgacaggatgaagcactccacgaagtcgtcgggcacctcgtcccagcgcagcagcggcttgg

SEQ ID NO: 287924 - DNA, 122 bp, Homo sapiens
atcccctcatcagcaccttcggtgattaggccctccaggcgcgggggatgtgggactacccggactgaggactgcgcaccggaagtagtggcggcgctgcgtaacgtcgagaggaagtgcct

SEQ ID NO: 287925 - DNA, 122 bp, Homo sapiens
gtcgagggccggcggaggcgggagtggaacggcagggccgggggagtggcccgcacctgacggacagcccttcggaccaccctaccgagggggggccctgaaggacggccgtcggagccaat

SEQ ID NO: 287926 - DNA, 122 bp, Homo sapiens
gctggttccctggccagccattggcagagtccgcaggctagggctgtcaatcatgctggccggcgtggccccgcctccgccggcgcggccccgcctccgccggcgcagcgtctgggacgcaa

SEQ ID NO: 287927 - DNA, 122 bp, Homo sapiens
ttcaggatccaggacacaaaatgaaaggatattataggaaattaaaaattgaggccttagcgacattcaatctgagataaccttctagaaaatgcagccttagaaaagcaggttatgttatt

SEQ ID NO: 287928 - DNA, 122 bp, Homo sapiens
atgaaaggatgaatagaaagccatacatgggagtgtggagagtccagctgaagcgaataacggccatgatggtcacattggccaccaggattgtcaagtataggagaagaaagatgacaaaa

SEQ ID NO: 287929 - DNA, 122 bp, Homo sapiens
gccttgctctgaacactggtaattccaggtgctgcgcttggcagaggggtctcgccaaagcgcatgtgtgtgcatgtgtgaacgtgtgtgtcctttgcatggttgggcgtgggtgccttgct

SEQ ID NO: 287930 - DNA, 122 bp, Homo sapiens
tctggcagccgctgccgtgcgcactctgagcccctagccctgtgtggagagacggcaccccgggacagcccccctgcctcggaggcacctgcctccgagcctggctatgtcaactacaccaa

SEQ ID NO: 287931 - DNA, 122 bp, Homo sapiens
ttggggaattccagccttaggcctcagtctctccgcagctgagacttgggactctgtacccgggaggcgcgcccgccgacttgggacccgcctccagggtcccagagcgaccccgcccgccg

SEQ ID NO: 287932 - DNA, 122 bp, Homo sapiens
attctcgctcccgtcaagccaggacaccttcacagggttctgagcacggcgccgggatctcgcctcctccccaagaggctcaggaggggacaaggatagggacagaggtcgcaggaaggcca

SEQ ID NO: 287933 - DNA, 122 bp, Homo sapiens
tgcaccacaccgcccgccctggaagaggcagtcaccccggaagaacaacttagtctgccccggaatctgaacgccgtcgaccatagagatgagacattctaggaaaagcggcggaggtcggc

SEQ ID NO: 287934 - DNA, 122 bp, Homo sapiens
cctgggctggcgacgcccgccatagaccagggtgccagaggcccctcgctccgagaagcgcgggtccccatccccgctccagggccggcacgcagcatgcatgtgggcctgtgtgtcccaga

SEQ ID NO: 287935 - DNA, 122 bp, Homo sapiens
ggccccgcgggcggcgctggctttgtctgccaggattgctcgctagaggttggaggcctccgccgggaccccgctgagccgaactccggcgccgcgcggacgagagccgcggcgggcccggg

SEQ ID NO: 287936 - DNA, 122 bp, Homo sapiens
ctctgctccagcacggccagcgccagcgcccgccgtcggtgcactctacgagccgtgcagcgtgcccactggagttgttgtgtatcaaggatcgatcccctatatgcacacacacacctcca

SEQ ID NO: 287937 - DNA, 122 bp, Homo sapiens
ctggatgtgggtcccggcgcgaggcagcttccgggtcgcggccagctccggccgacctcccgcccggccctcaggctgctcccacagttcccggtccctagacaaccctggctctgcccgcc

SEQ ID NO: 287938 - DNA, 122 bp, Homo sapiens
tcgtgaggcgcggccgcctccagcggcctgagtgattgctgtcgggtttccgggagagggcgctgtccttgctcagtgatggccggagagctgcaccctgcacgtctgggcttgaagacaga

SEQ ID NO: 287939 - DNA, 122 bp, Homo sapiens
aaaaggaggagggcaagagaatcctagagcgggaagagcgtgggctctgcgggacgtgggcgagaggttaccagggaaagaatggacattgacggcagagagcaagtttagcctggagagga

SEQ ID NO: 287940 - DNA, 122 bp, Homo sapiens
atgtcagatgtgaaccaggccatacgatgcacagggcgtgctcttcccatgccaggctgccgccccagtgattctcagcttcattatgagcacagagtttatttcagccattattggccaaa

SEQ ID NO: 287941 - DNA, 122 bp, Homo sapiens
tcctcagctgaaatgactcacattgctgtagcttaaatttcagtccaggctctctggactcggggaatttctttttgctcatgctcctgagaaccagagttctccaggaacatctgtagtct

SEQ ID NO: 287942 - DNA, 122 bp, Homo sapiens
ccgcggcggcagcagccgctctgagtcggcggggccggcggggccgctgtgacgagacggcggcagctaagactggggccccaggcccggcttctggaccttcgctgttggtgttgtcgccg

SEQ ID NO: 287943 - DNA, 122 bp, Homo sapiens
gctacccacaacgcacagaccagaaaccaggatagacagaagcctagaatggcctggcatcgagcaggcccagcgcaaacgcaaggtctcttcctctcctttcggtgaaccccacgcccagt

SEQ ID NO: 287944 - DNA, 122 bp, Homo sapiens
acaggagagagtgggagaggaggctcagagaggtcactcaggacccaaagtgtgcccagacgggccctaactacgtggcgtgacctcaggcggggcaaacagatcaaggacacagggtcccc

SEQ ID NO: 287945 - DNA, 122 bp, Homo sapiens
ccaagaaaattttaaaacccatgggaatttctctagacatttgaagactgctggagggcgcgggcttcctcagcatggagctaggaagctgtggccacgcccacctgtgctctgcgtcagcc

SEQ ID NO: 287946 - DNA, 122 bp, Homo sapiens
ggaactaagccacctctgattccctctctgttccctatgtataagacattgtccaggcatcgtctcttctttcccttcctctctggaattgggctccgggctccatttctgggttattctgc

SEQ ID NO: 287947 - DNA, 122 bp, Homo sapiens
tgctcaaaggggccctgtgtactggagcagaacgcttcctctccaaggctctatggctctcgctttctaggttcctcaccctctctctttctcttcttccccctttacctcgcgctctttct

SEQ ID NO: 287948 - DNA, 122 bp, Homo sapiens
ccctgtgggatgggagagcccgttgctggcgttgctgtccccgccgtcgatggcaggaggcgtcctgaaagccagctcatgccatgcggcctcctccggtgatttcagatggggctccccgg

SEQ ID NO: 287949 - DNA, 122 bp, Homo sapiens
cgagtctccgggcgaggccgccaccctctcggtcccttgcgaaagcggccgcggggtgtgcggatgaactggagcttaatgtcaaatcctggcacaagatgttcaaaagaaagacattggct

SEQ ID NO: 287950 - DNA, 122 bp, Homo sapiens
gcggaggaaaccgcggcgttagcgtgacccggatgcgcatcgctaggaaccggaagtaagcggccagagtcacctcacaatccacacctcgttccactagaaacctctgggcgcatgtgttg

SEQ ID NO: 287951 - DNA, 122 bp, Homo sapiens
agtggggcgtggcaggtggccgcgcctggggcagcgggtgcacggggcacctgcgggaatcgacagaaatgccgagcacctgaacaggagagaaaggagctgagccagaggatgtccagggg

SEQ ID NO: 287952 - DNA, 122 bp, Homo sapiens
ccaacagcactcccgtgagctgcactcaacaggtgatctgctgtgggctccagccaccctcgccatctaccctcacacaagtggtctgatgtttctgtttatggggacaagagatgccataa

SEQ ID NO: 287953 - DNA, 122 bp, Homo sapiens
aagaggatgaagagagctggtgaagcagctgaccaaatggcccgaggtggtatgcagccgcggtaaagcagggcccctccgtgaggcacagccgcccgggggttccctaggggaagcagggg

SEQ ID NO: 287954 - DNA, 122 bp, Homo sapiens
agctggttctcttagtccttctcgtttatttttttcgagagcgttgagttttggcggtgccgcctcccggtgcttgcccacattgcagatgaccctccggcaacccgagacgtccttctggc

SEQ ID NO: 287955 - DNA, 122 bp, Homo sapiens
cactctggataagccacggcctctcttagagcctcggtttccccttctgtaaattgaagacggtctgttttgctctctaaggacccttccctgctcaagccttctgtgtttctaggagagtt

SEQ ID NO: 287956 - DNA, 122 bp, Homo sapiens
ctgaactgcattccttccccaatcacctttcctgttccagaaaaggggctgggatgtctccgtctctgtctcaaatttgtggtccactgagctataacttacttctgtattaaaattagaat

SEQ ID NO: 287957 - DNA, 122 bp, Homo sapiens
gaaagtgcccggccagctcatcagccatggagatatatgcgcatatatttgactgccaaacgccccctcgcatagattatgttaatgaggcgccggccccgccccttccctcccccaccccc

SEQ ID NO: 287958 - DNA, 122 bp, Homo sapiens
ctgtgcagacagaccatgtttcaaggctggaagtagtgccctggcaacacacaaaaggaacggtgaaatggtaggcaaagtgaacttggctctgctggcctctttggggtcacagaaattgc

SEQ ID NO: 287959 - DNA, 122 bp, Homo sapiens
aacacacgtgcacacatacttaacacacacttgcacctgctgtgcacatgtgcacacacacgtagtagtgtgttttccagccacccacacactgggtttgcattggagattgtttcaccctg

SEQ ID NO: 287960 - DNA, 122 bp, Homo sapiens
gacttgggactggacgccaccaagtggataaaatatggagctcggaaaagattggattcccggccctgaactgaccacacagttgagaggaagttgaggcctagaagagcgcgcaacagtaa

SEQ ID NO: 287961 - DNA, 122 bp, Homo sapiens
ctggagttcagaatcctcaagcatatcattcacccaacccttcattctactacctatgagcgttgagcaagatagtcttcctctcctattcccaggtagggtggagctggtggattagaaag

SEQ ID NO: 287962 - DNA, 122 bp, Homo sapiens
acaaacggggccgtatctcacagtgctgcaggatgccagtggtgcaaacagtcggcgacccggccatttcccgagggtctcaggcgtcccacccaacggccgctccccgttccctgtccgtc

SEQ ID NO: 287963 - DNA, 122 bp, Homo sapiens
gatcacatctgtcactcagcggctggggaggcggggccttaggcattatccaatgagggacgctgggccggaaaccgtccaatcaggcacgcagctggagcgaaccacatggtttctggggg

SEQ ID NO: 287964 - DNA, 122 bp, Homo sapiens
aatgaggacaacatgttttcttcctatctcttgggtttgttctgatcatggcaaggactacgtgctatgtctgactgcccagcaatagtccttggttttctttgagttagatctaggtctgc

SEQ ID NO: 287965 - DNA, 122 bp, Homo sapiens
cttcatgttgattcatacattaaacaaagagtcacacaaataaggataaaattcaaatggcgatcagtgctatgaaggaggaagtcagggtgtataagagcctaaaacttagagaactacgt

SEQ ID NO: 287966 - DNA, 122 bp, Homo sapiens
gcgtcccctcgatttccccgcaacccgcaccttctcctcatggcggacgctccaagcagccgtgagtccaggtccagacctactccacacggccccgagagcaacaaccacccgcaaacacc

SEQ ID NO: 287967 - DNA, 122 bp, Homo sapiens
tggacgaggactgactgcggcaaattcactccagggctgggcgtccacgtccagccagaacgcagaacttgccgggttgcgctgctcacacaggccccgccgtccccgccgtccccgccgtc

SEQ ID NO: 287968 - DNA, 122 bp, Homo sapiens
gtgtctgagaaaggagctgagatgggaagagaggaagcctctgagggttcttccaaaccacgttcactgacagtgctgacctcagacagtgaggagggcagtgaggcctcttcctacctgtg

SEQ ID NO: 287969 - DNA, 122 bp, Homo sapiens
aagaaagctgctgcgggtgcaccgggagccctgttgtgcgtcggtgacccctctgtgctgcgatggccgtgtcctgcctttggtcacacagggtcccaatgctgaggctcactctgcagacg

SEQ ID NO: 287970 - DNA, 122 bp, Homo sapiens
ccacatgcctgtaatcccaactacttgggaggctgacacagcagaatcacttgaatttggcgggaggcagaggttgcagtgagctgagattgcaccactgcactccagcctgggtgacaaag

SEQ ID NO: 287971 - DNA, 122 bp, Homo sapiens
tgaatctaaaagcatagctttaaaaaaataaaataaaataaaagcatagctttgctcattcgctgacaatcttagcgttcattttagctgaagagtttgttttgaagagctggagggataaa

SEQ ID NO: 287972 - DNA, 122 bp, Homo sapiens
agaatggaggaggagggagagggtaaagggaggaaggaagggagagagaggaaggagggacgaagaaaggaaaagcatgattgttaattcttctgaaaattacttgcagggttgccactttc

SEQ ID NO: 287973 - DNA, 122 bp, Homo sapiens
tccctccatccacccctctggcacctgggttggtctaatcctagtttgctgtggccttcccggttgtgagagcctgtgatccttagatgtgtctcctgtttcagaccagccccaccatgcaa

SEQ ID NO: 287974 - DNA, 122 bp, Homo sapiens
cagagccagtcacctgagctacccagggtgggatccctggccccgacctctgtcctgacacgccccaagcggcagcaacaaagccccaattggcctgggcctgggcaggaggagctgggccg

SEQ ID NO: 287975 - DNA, 122 bp, Homo sapiens
caactggaagacactcttccaccgcgagggcggcacgtacccgtgggtggtggaccgcgtcgtgtttcccaccatcaccctggtgccgcctgtgctggtggccttctgcacccacgacctgg

SEQ ID NO: 287976 - DNA, 122 bp, Homo sapiens
acaatggactttggggactccgtggggagggggaagggggttgaggaataaaaggctacacgttgggttcagtgtacactgctcggatgacgcgtgcaccagaatctcagaaatcaccacta

SEQ ID NO: 287977 - DNA, 122 bp, Homo sapiens
ccgccgcgcgccccggtccattgtttcgcttctctgggttccaggtaggtgcgggcggcgcgcggggtccgcacgacgtgtcaccccggcggttggggcgccgggacccgcgggcgccggca

SEQ ID NO: 287978 - DNA, 122 bp, Homo sapiens
cggtgtgtgtatgtctgtgtgctcagggaaaagacagaggagtggcacaattttaaatgccgtctactgtcctgtccccggtcccaaagcaggacattctcgagttgtgggtgggggctctg

SEQ ID NO: 287979 - DNA, 122 bp, Homo sapiens
ggggtcactggcacggagtcctccttgagagtgtgttccagtcggccaggcaggggcagccggggatccgtaccagtggtccctgcccacctgggttaggaaaggctggctggcctggggag

SEQ ID NO: 287980 - DNA, 122 bp, Homo sapiens
aactgtggacccgctcaacaaagaaaatgtgcagttctgagtgcttcgcggggctgagcccggcctattccatttctcaggccaagttcatttgtcaccccaccaacaaatggcccaaggcg

SEQ ID NO: 287981 - DNA, 122 bp, Homo sapiens
accgcagctccacacgcctttctctgttgggggagagcagcagtcgctgcttagtgattccggctgtcagcacatatggccccacacgcagacccgtgtactgcaggttcctgctgaggcca

SEQ ID NO: 287982 - DNA, 122 bp, Homo sapiens
ttgtgtaatttcaacaaatccccttttccctgaagtaaggaatgagtctgtctgcagccacggaaagacccccagctagtctccttcttatactgactttagtgtctcttttagccttttct

SEQ ID NO: 287983 - DNA, 122 bp, Homo sapiens
tcccatttactaaacattgatttcccccctcctgcccctctaatagagcagaaaccaatacgtctttgtttgcttttctcgcgcgtttggggcgcgggcggcggcggggggcgccggctgct

SEQ ID NO: 287984 - DNA, 122 bp, Homo sapiens
ccacaccgggtgacctcgcagtcaagctatccggggcagggacacgaggccaggctgggccgagctgggtccggaagggagctgggcgggtgaggccgcaggaggccagcagagcaggggta

SEQ ID NO: 287985 - DNA, 122 bp, Homo sapiens
tgggcctccgctaatgtgaagtgaagggtagaactagaaggctgcccctccgacctcctgcggcgcctccatggtcacaccctccggtcatcgtcgcagctccaaatgccagccccagctcg

SEQ ID NO: 287986 - DNA, 122 bp, Homo sapiens
tcttgcaaccggaacaaaactgccacccaagggaagaaggcatggagttcatggtgttagcgcaaaagttctgaatggcatccgtcctaccggaaacctaggaaaaggtatcagaactcaga

SEQ ID NO: 287987 - DNA, 122 bp, Homo sapiens
ctgggactacaagtgtgcaccaccactctcagctaacttttttctttttttggatagagacggtctcactgtgttgtccagaccggtctctagctcctgggcttaagcaatcctcctgcatt

SEQ ID NO: 287988 - DNA, 122 bp, Homo sapiens
caggccgcgccccgggctccgcgccagccaatgagcgccgcccggccgggcgtgcccccgcgccccaagcataaaccctggcgcgctcgcgggccggcactcttctggtccccacagactca

SEQ ID NO: 287989 - DNA, 122 bp, Homo sapiens
gctgtggcaggagcccgagcagccgaacggcatcatcctggagtatgagatcaagtactacgagaaggtaccacgggcaggacggagtgggaggggctgggccagcagggcagggcccactg

SEQ ID NO: 287990 - DNA, 122 bp, Homo sapiens
gcagaccccgttcgaggttgcagcaaaccagaaacactctccagcagcagcaggcggagccgcgggcccgagctcactgccgagagacccccggtcccgccaggaaccccagccgcggagcc

SEQ ID NO: 287991 - DNA, 122 bp, Homo sapiens
cgggcggcccttatgtattattcactcggatggccgcagcgctttctggagagcccacgccggagaggtcttcacctggcagctagtagtttggcgatttgtttcttggaaacttggggtga

SEQ ID NO: 287992 - DNA, 122 bp, Homo sapiens
agggctgggagtgccctagtttttccatttatctcgctggggaccactcccgtgcagatgcgagaggagacttgcatttccctcctttggtccaccaggttcaaggcactatattttggcga

SEQ ID NO: 287993 - DNA, 122 bp, Homo sapiens
gggctgatcgttgataccagatcctgctccccaaatcacacctctcaaatattagctcagcgtagatggcatccacacctcctctctctcatagtaagggaatcaggggcatctccaggtgt

SEQ ID NO: 287994 - DNA, 122 bp, Homo sapiens
agggcgcaggtcttggcctgggcatcacacacgaagcccaggttgaagaggagagcattgcggctgtacttcttgtgttcgatgcacacaggacagccgatcagcttcttttccatagctgt

SEQ ID NO: 287995 - DNA, 122 bp, Homo sapiens
tttccacatatttctgttttatttcagctgttctctcggattatgaaagtgcagaagactcggaagtgagtatgacaggttttttcctatggtatagatcagaaatgctttttaaaaacgtg

SEQ ID NO: 287996 - DNA, 122 bp, Homo sapiens
ccaagtttgaatctcagctttccaattattagggtgaatgacttaacttttctgtgtctccgttctttatttgtaaactagggatagtaatgccttcctcacagaattgttacagggtttag

SEQ ID NO: 287997 - DNA, 122 bp, Homo sapiens
cctatgggtgcagactggtttgggaccacacgtgagccaccccaggggcttccagaagggcgcagtgccaaggcagctgaggatcacgagtaaggagcctaagggggccagagaacttgggg

SEQ ID NO: 287998 - DNA, 122 bp, Homo sapiens
tgtgccccgtgagcgctcaacgccctggtgtgttcactgaccatggtgcctgggctgcggcgccgggcggggcacggcgggacttttcgggacctttcctggggggagcctcgctttccccg

SEQ ID NO: 287999 - DNA, 122 bp, Homo sapiens
tgactcacaaccagctcccgtgtattggccttaaatagtgtgttgaggccgggagtggtgcgtgcagctgtagacggctcaggtatgaggaaactggctgtgcagaattccctgcaggcaca

SEQ ID NO: 288000 - DNA, 122 bp, Homo sapiens
tgggctgctccagaggttcttgcccctgcttcctgctccaggcccttacccagggtaggccggtggaggggcctggtcggagaagtcaccccctctccccactccaagctcctgaagcctgc

SEQ ID NO: 288001 - DNA, 122 bp, Homo sapiens
ttatagaggcgaatgatatattcaacattgtcttagtactgtagtgtctaaggcactttccgtaatgtcagtttgcttaactaccaaccaaaaacaggatgctaagtgttcactgtaacact

SEQ ID NO: 288002 - DNA, 122 bp, Homo sapiens
ggcggcccgggggtccagccagcccaccctcgctccgccggtgctcgctctatttgaaaacgctgactgttggtcccccaagcagcagtctggagtcagcccagcccgtctgcagcggtgga

SEQ ID NO: 288003 - DNA, 122 bp, Homo sapiens
ttattagggactcccaccctcttcaagttataaatatccccagaaccttggctacgtgcccggaagcctgttgtctctaactgtacaggagacttctctgcctgggctgggaaaggggcctt

SEQ ID NO: 288004 - DNA, 122 bp, Homo sapiens
ccgtgtgctgcccatcctacgttctgtctgcagggaacgttctttccctccacacccgcacgtccccgagaccagcccggtccaggctttggggtctgcctggctgtctccttgtcctccgc

SEQ ID NO: 288005 - DNA, 122 bp, Homo sapiens
tgccttcttgactgtcttttattgacaaatgaagattcagacttgaacgtctttaactttcgaatttgttctgcagcgaatgagaaaacagagtcatcctctgcacagcaagtagcagtgtc

SEQ ID NO: 288006 - DNA, 122 bp, Homo sapiens
aaaataaatgaatagataagctgagacggactcaggcccagctcctgcctgcgatccctgcgggggccaccagggggcgcggcgcccctgcccaaaactccgccgtcggctctgaaccccgg

SEQ ID NO: 288007 - DNA, 122 bp, Homo sapiens
aagtgatctgtccgccccggcctcccagagtgctgggttgggattacaggcgtgagccaccgcgtccggctcaggacccagttttggctgctggttcccagcaggggactcgggggatatac

SEQ ID NO: 288008 - DNA, 122 bp, Homo sapiens
gcgcttcgcccgcgaaccacagggctgggcggcggttgggtcgcggcagggcgagggctccgctgcggttggccccgagcggcgtccttcccccgggggcccccgatcactgcctggggact

SEQ ID NO: 288009 - DNA, 122 bp, Homo sapiens
cccgggaccatgaggcctgggtcgggccgcggtagagcggggatgactgtgcgcttcggccgccgcgggcttaaggcaccaggcgcccgctcccagcagtccccggcccacccgacacagcc

SEQ ID NO: 288010 - DNA, 122 bp, Homo sapiens
ctggggcaatttgtcttgatccatggaactggacacaaatctgcattgcttttaagttttcgcattatttcactcttctaccaaatttttattagcatagtgtttttgaaatttgtccatgc

SEQ ID NO: 288011 - DNA, 122 bp, Homo sapiens
caaaaggaactttcttgataagactctccacccagcccctccccgagcctcccgcctccccgctcacctttcaacatcttcacggccacggtgaccgcctccttgggcttgtctttgtcaat

SEQ ID NO: 288012 - DNA, 122 bp, Homo sapiens
cccgcgcaagctctggcctcgcccactaggctggtcgcgtcagagggtggggcgggtcttcgccccgcagcgtctaagctctgctgcgacgttatgggaacctggtgacccgcggcacactc

SEQ ID NO: 288013 - DNA, 122 bp, Homo sapiens
tgctcacagaaaaacaacaaacacccacaagatagaatttcaggatttagaagtatttcccggcaagggggccgggattcgcactcaggccctggggccacagagcccgcagtgggcctccc

SEQ ID NO: 288014 - DNA, 122 bp, Homo sapiens
tctaccatgcactcggtctgacgcttgaaggcctccacggatgagttcttccaccatggccggaggttcccgtccttgtcatactcccgtcctgtgggtcagagggaggcgtcatgtcaagg

SEQ ID NO: 288015 - DNA, 122 bp, Homo sapiens
taaagagcagcataaccaccccacagagcatgatgcggctaccgtagaaacgggcacaggcgacatctatgcagcccacagagcatgacgcagctaccgtagagacgggcacaggtgacgtc

SEQ ID NO: 288016 - DNA, 122 bp, Homo sapiens
ttagaaagaacccggagctgctgatgtctgagggagtcgtttcaacagagactagaatatcgagagagaaaattgatccagctctcttgtctggtgcttataaaacatgaaagtatcaccct

SEQ ID NO: 288017 - DNA, 122 bp, Homo sapiens
caagtaagtctaggggcaggtgctggtgcatgtccacttcccaggggtgtggggtgccggcgggggtcttttcatggtactatgatcaccagcctcaccattcgggactcacctgggggtca

SEQ ID NO: 288018 - DNA, 122 bp, Homo sapiens
tgggctccccggagggttaacctgggtgtcctcggcaaagttgtcgccgagccgggagcccgtgtaggggccgcggcgccgcggctcggggggcggccgggcggccggcggcggtcgtggct

SEQ ID NO: 288019 - DNA, 122 bp, Homo sapiens
ggtgctcctgcgccggaggagttctgcgtctcggggtggtgactgggtccagaatggcttcggattcggggaaccaggggaccctctgcacggtgagggtcgaggcttcgtgtggagcctcg

SEQ ID NO: 288020 - DNA, 122 bp, Homo sapiens
ctgaatggcagcttcaaggtagtcaaactactttgtggtaattcaaggttctaaaagcaacggacccagcagcaaggcagaggctgcatcacctttcctgacataaccatgaaagtcatgtg

SEQ ID NO: 288021 - DNA, 122 bp, Homo sapiens
aagtcttttattataccagtctgttgcttttgtaaggctctgaatggctatgtcaattatcgtctattgagcatctattaaacagccctctgttaagcaaaaatgcaacattagatttggcc

SEQ ID NO: 288022 - DNA, 122 bp, Homo sapiens
tagagacggcgcgcctcagctgccttcgggtgtcactctgcaggtcatgcattcccaccccgtcctgtcctcgggctggagattgttctcttcgggttccagcaattcaaccaggatgctct

SEQ ID NO: 288023 - DNA, 122 bp, Homo sapiens
gcagactctgtcacacctacctaacctcctcagagggttgctaataaaagcgcatgtgaacgccaagtgtgaaactgctatggaaagtgataaactaacatgagctacaggtgatgctgctg

SEQ ID NO: 288024 - DNA, 122 bp, Homo sapiens
ccttctactctaatgcccctacgttcagtgcataagaaatcatgacttggcagggtgggacggaaaatgcatatatatataatacatatacacacacacataatacagaaacataaatgttt

SEQ ID NO: 288025 - DNA, 122 bp, Homo sapiens
tccttaggagatcttggtctggttcctccccttctctggtcctcagtttttccatcagtacgaaggggatggcctaggatcactctagcttgatattcaaacttcccccaggaatgttgttt

SEQ ID NO: 288026 - DNA, 122 bp, Homo sapiens
acctgtttctgatatgacaggagtgactggctgccccactcagcaagcctgtgccaaggccgtggctcctgtcgaggggaggatcccaaccccctgctgcaggtgagggaggggcgggagtg

SEQ ID NO: 288027 - DNA, 122 bp, Homo sapiens
agaggtgaaatgcacctttcaaaggcccagacacggtaaagattggatggcatttttggccgggcgcagtggctgacgcctgtaatcccagcactttgggaggctgaggcgggcggatcacg

SEQ ID NO: 288028 - DNA, 122 bp, Homo sapiens
ttttaatttctaatatggtataaatatcaacaaatttaacccacataaacaagtgttcttcgagagtacttaataacttttaaaaatgcaaaggactcctgagaccaaagagtgtgggtcct

SEQ ID NO: 288029 - DNA, 122 bp, Homo sapiens
tccgcaacccggtgcgctgccgggcgagtcggcttataaagggagcggccgccgaccgcacggattggccaagctgactctcgcggctctcgtgagagtcactctctcgggcgggctggttg

SEQ ID NO: 288030 - DNA, 122 bp, Homo sapiens
gcactgcgggaggggacacactcagggaggggcccgggtgagggccaggctctcaggggtcgccgacccggggaacctgactgcgcacctcggggcccctcttctcaccccacagcacaggc

SEQ ID NO: 288031 - DNA, 122 bp, Homo sapiens
gtcaacacacttcaatgtagtgtctgactccagacacaccggccagcccagatctgctatcgccagggccactaacagctcctagtccttatcagatgacctctgggcagccagctgacccc

SEQ ID NO: 288032 - DNA, 122 bp, Homo sapiens
tttatggaattatcctagcttcctcctctctggaggttttctaagaacagatattcacaccggatttcagaggctacatgctgtactgggtctatggcacgacctcgaacagaacaaaccca

SEQ ID NO: 288033 - DNA, 122 bp, Homo sapiens
catacgtgcttgcctgcccataggggacaggaacaaacgagatcatgtattccatgaacacgcttttaatgcccacctactatatgacaggtgctgtgctaggcacttctgtattcattcta

SEQ ID NO: 288034 - DNA, 122 bp, Homo sapiens
agaagcccggtagtcgaaacatatcctttcttcaaaccatcaagaatttggacggcaagtcgtgagtcataataaattccctttttattgttttcattagttctctaaaggtcaccagtttc

SEQ ID NO: 288035 - DNA, 122 bp, Homo sapiens
agagacggcgggatggcgcagggacttgaggcttgagatcccgtccttcagctcaggtcccgtcgcgcttttaccccttcccggtgacctcaacccctttataccgaccccacctctttgga

SEQ ID NO: 288036 - DNA, 122 bp, Homo sapiens
cagctcccagcgtgccccgcgccaggggccgtcttccggcggaagttgtctcttcgccgccgccgcagcctctgccccactcgtgagggatccgagggctccgtccttgtgctgtcttcgcc

SEQ ID NO: 288037 - DNA, 122 bp, Homo sapiens
catccatacaatgaggggtaatatactagattacctgaggtcttcttacggtaaaaacaccggtgtcttaaggtttcccagtggaatttgggggccgggttgacttcggagctggagctcgc

SEQ ID NO: 288038 - DNA, 122 bp, Homo sapiens
cgcggcgccccgcgtggcggcggccggaagggaaggccaatggggctcgggggactcccgcggccacccagtccttgtccctgcaccctgggccgagggcagagggacaggtccccggcggg

SEQ ID NO: 288039 - DNA, 122 bp, Homo sapiens
cttctggaatggaacgtgttaagaggagaccatttcctccattccctccttgttttccaccggcctgactctccccctgaggcaatgagcctggaatagttttactttttggaacggattag

SEQ ID NO: 288040 - DNA, 122 bp, Homo sapiens
acctggtcaaaaggctgatttcttatttagttgacaccaccatcatttgcctgggctctgcgatagcctccactctgggctctcccacgtgggtcctgcctccctcacccccgcagatcgtg

SEQ ID NO: 288041 - DNA, 122 bp, Homo sapiens
gggctgctcgctctctcttaacaggggcagccggcggagcactatacggccactgttctccgagacacaaagagggccttgttttgggtgtggcctcctggaagagagatggggagtacagg

SEQ ID NO: 288042 - DNA, 122 bp, Homo sapiens
aggaaaggttccctaaagtgttataagttgtttggcgagggttgacaaaaggtccaggagcggctgggctgggagaacacttactaacaccgtggctactacctgttcttcatttctttctt

SEQ ID NO: 288043 - DNA, 122 bp, Homo sapiens
atgcgtccagggataggacatgctcctgtgggggccctgcatgcgtccggggataggacacgctcctgtgggggccctgcatgcgtccggggataggacacgctcctctcaggccgttccct

SEQ ID NO: 288044 - DNA, 122 bp, Homo sapiens
taactggggaaaacggaattatggtaaccgaggtaacggggtcggggactctttctccttcgctgcatgctgggtggcggggagagaccgctctgaggaggtttggtctgtcggccacgccg

SEQ ID NO: 288045 - DNA, 122 bp, Homo sapiens
catttgttcttctttttaatggcccaaatgcatgcaaagaacatttcagaaagtacttaacgttgccaccctagataaaaagtttttcagtcagcccaacctcctccttctgcttctcctcc

SEQ ID NO: 288046 - DNA, 122 bp, Homo sapiens
gcacggggaagggagggccgcagacccccgttgagtccccgactgccagcagcaagttgccgcaggcgcactggctctgcagccccgggatcaaggtgggttcaccttgcaccgggccacct

SEQ ID NO: 288047 - DNA, 122 bp, Homo sapiens
ttctgaactgtcatctcctcacttctcttctggttggtgctcccttctccagccactagccgaaagagttaccggcccagctccatggagccttggatggagcccctgagtccttttgagga

SEQ ID NO: 288048 - DNA, 122 bp, Homo sapiens
caggaagaggcctccccagagcccaggtctctcacagttaagtgttgtcagaggctgccgcgtgggccagcagtccatctcattgggttagcagcagcattccaacccacaggatttgttca

SEQ ID NO: 288049 - DNA, 122 bp, Homo sapiens
agcagagcccagaagatgctctggccgacggctcccgggatcttggccggcggtcactcgcgaccatccgcgacgcccccaaaatggcctccgcgcccctcgccgccccgccccgacgctcc

SEQ ID NO: 288050 - DNA, 122 bp, Homo sapiens
ggtccagccagcgcagcaagagagctggggagtcttcttgcagtcccttcctcctactcacgcaaagatctcctctatgctggtaggtgcacctgccctccaccgatcctcaccctgagcgc

SEQ ID NO: 288051 - DNA, 122 bp, Homo sapiens
tgtggccagaattatatttatgaattacatatgtggctcacattttcattctaatacatgcggctcacatattgctattggacagcactgggctagaggtaggatggttggggcaatctcag

SEQ ID NO: 288052 - DNA, 122 bp, Homo sapiens
ttacaggagctgaattcagcatatgctgtgggtgacacacaaaccaatctctccctccaccgctgtggccagcctatcttgccggtgcagggcgagggtggcgcgcgtgcagagggccgata

SEQ ID NO: 288053 - DNA, 122 bp, Homo sapiens
agtaacaatgcaatctacttaaggagattggaaaatttaggatattgaagatttaaggaacgggttggcccaagtaacaaaaccattgccctagtcaatctatagtggccacttggaacact

SEQ ID NO: 288054 - DNA, 122 bp, Homo sapiens
gcggttgaccctcgccagcccattcgcggctcttggactttgtctctggactgggcagctcgcccccgccccagcctaacccgggcccagggcgggtgtggggaggggagccacaggctacg

SEQ ID NO: 288055 - DNA, 122 bp, Homo sapiens
tgcgtgagctgggactcctgttcccgggcccggggaggcctgggcagccgacatggaccccgctgccagacagcccgcactcacctcgcgagggtctcactacatggtctccgcgcgcttcc

SEQ ID NO: 288056 - DNA, 122 bp, Homo sapiens
agcatcccaagtagctgggaccacacacaccgccactcccagctaatgttttttatttttcgtaaagacgggatctgactatgttgctcaagtggtctggaactcctgagctcaagagatcc

SEQ ID NO: 288057 - DNA, 122 bp, Homo sapiens
aaacctcagaaagagaaaccacagatgggggaactactgcaatgttttttggccagctcacgtgtgccagcctctgagatggacactttctatgggccctgaggaagaagcacagcacagag

SEQ ID NO: 288058 - DNA, 122 bp, Homo sapiens
tccaccccagctcacggttacttctcaggcttatggcacacgggcctctctaggtgcccacggtgtgtgccaggcagccctgtcgccatcgagcttactcaacattgaggcgtctttgtccg

SEQ ID NO: 288059 - DNA, 122 bp, Homo sapiens
ccttggtgaggaacccctgtgcccccactcactgcgggcagaggcaccacctctgggggccggtgtgaagccagactcctagccagccctgcagcctgtcccaggggccagtagaaccggga

SEQ ID NO: 288060 - DNA, 122 bp, Homo sapiens
taggccagcttcactattacttttcctccttttacgaccaccaagaccagtgttcagatccgatgggaaagggatcaggaggattaagctgatcaactttaccttaaagcacagctccagaa

SEQ ID NO: 288061 - DNA, 122 bp, Homo sapiens
gactccttaaatccttggagctcagggctctgcaaggccagctctcagaggggactcctccgggcccacaccgccctcccaggtcctcttctgaccaggagaggtctcagggacagcaccct

SEQ ID NO: 288062 - DNA, 122 bp, Homo sapiens
gaccgggatggggatcccccccatatacacacttggtatcccagtggctctttgtccttccgcatacaaacaagtctctcccatctataataaaaatcctctctcaatccaatgtcctcctc

SEQ ID NO: 288063 - DNA, 122 bp, Homo sapiens
ttctgatgaatcatattctggagctccatctaagaatccccatgcccagattagggactgcgagcgaccacccagcgccagcgcgaccaggaccaaggacctccgcggctgagcggcgagtc

SEQ ID NO: 288064 - DNA, 122 bp, Homo sapiens
ggagactctcagacacggttcgggaatgagggtaatccctttggctgggctcaagccgggcgccatcttgctcatcgcgggcgtggcgctgaactacatttcccagaaggcgccgcgccctc

SEQ ID NO: 288065 - DNA, 122 bp, Homo sapiens
tctgatctgcccaccttggcctcccaaagtgctgggattacagacgtgagccaccgtgcccggccgctctctgtgaagttaaagaacttgagtataattcagttttttggcttattcagaga

SEQ ID NO: 288066 - DNA, 122 bp, Homo sapiens
ctgggacgtgggcacctcccaggggaggggcactcagtggggcacgtcgctggatttgcacgcagccttaaaagcaaataacaaacgcgcatgctccctgtattttgtaaatgtgaaccact

SEQ ID NO: 288067 - DNA, 122 bp, Homo sapiens
tcacctcccaccacacccttcctccaacactggggactacagtttgacataagatttgggcgggtacacaaatccaaaccacatcaatatttaatggtgaaagactggttgctttcctccta

SEQ ID NO: 288068 - DNA, 122 bp, Homo sapiens
gggtatgttaggtttgggatgtccattacacatgcaaatgcagctcttgagtaatcagttcgatatacaagtctaaagttcaataacatttatgtcccacagtcagactggagttaccaatg

SEQ ID NO: 288069 - DNA, 122 bp, Homo sapiens
ttgagacagagtcttgctctgtcgccgagactggagtgcagcagcgttatctcagctcaccgcaacctctgcctcccacgttcaagtgattcttctgcctcactctcccgaatagctgggat

SEQ ID NO: 288070 - DNA, 122 bp, Homo sapiens
ccgaaggctcaacggtgtgctgcggtgctcccggccgctgtgtgtgtatgtgtgtatgtgcgtgctcacacactggggagagagacacagagcaggtgtgactgatgccacgtgcaggggat

SEQ ID NO: 288071 - DNA, 122 bp, Homo sapiens
ccttgtttagatgaaaaccaagaaacacatatcctacaagaagaaaaagtaaaagtgcaccgtctgtttcaaaagcagtagtttcctgctagaaggcaaatttgagtacaacttggtattgg

SEQ ID NO: 288072 - DNA, 122 bp, Homo sapiens
actgcccgcctctgtgccgcagctactggtaatgaagatcaccggccccgcccagcactgcggacagagccgggcattcttcaaggccaccactggtcttttatcttgtccaaggctctggg

SEQ ID NO: 288073 - DNA, 122 bp, Homo sapiens
cagcccacagcccacagcccgcagcccgcagccctcagagcccagacgcgccttaggggccgcttggccagcgggatctgcagaccctaaccctcctgcaggatcccgggcccatttcccgt

SEQ ID NO: 288074 - DNA, 122 bp, Homo sapiens
cttcggcaaaggtatctggttccagctataagtcgctgtgggagaccaccaaaatggaggcgaaattggcctcggggcgcctcctggagaagcggtaggagtcggtggtggtgaaatggccc

SEQ ID NO: 288075 - DNA, 122 bp, Homo sapiens
ttggggggctgcagcggccgccagagctgggtggggtgaagtctaggagcagcgctgcgccgcgcctcgcgccggagctctgccctccctctcttttcactctctggccactcggacgagct

SEQ ID NO: 288076 - DNA, 122 bp, Homo sapiens
cccagtgctgcacccacatgagttactctcggagcctgtaaggcgagatggcgtgaaggacgatgtcgctaacctgcccacgacagagtaggtccccacaccagggaggccacactcctcat

SEQ ID NO: 288077 - DNA, 122 bp, Homo sapiens
atgtccacactgcacggatgcgcacacacggtgaacaagggtctgtgcatgctcacacagcgaaccagcacatctacccagatgcgcacatctgtgcatgtacactgggcacaggactctgc

SEQ ID NO: 288078 - DNA, 122 bp, Homo sapiens
cgctgtttcgcccaggctggagtgaagtggcgtgttttcggctcactgcaagctccgccccgcccctccccgccttcaggttcaagcgattctcctgcctcagcctcctgagtacctaggat

SEQ ID NO: 288079 - DNA, 122 bp, Homo sapiens
ttgctaattcagatagatgaagaaaagccagcgtgcattcgtgaaattccagaaccacagcgcataggctgtttctgtcaagtccatacagcaactcagctttaagttaaacataagttttc

SEQ ID NO: 288080 - DNA, 122 bp, Homo sapiens
aagctgatgggctgttggggtccctgaggtgtagggggtggctgatgagcccggggaggtcggatggaggaactgaaggcctcccagccccggtgctgttcaaactgagcagggtccccact

SEQ ID NO: 288081 - DNA, 122 bp, Homo sapiens
ttcttttttttttttttttttttttgcgtttggggtttcttaaggttttttttttttaatcggatcaatataaatctctttaggaaaaaaagcaatgttgctggtttgttctcactggggag

SEQ ID NO: 288082 - DNA, 122 bp, Homo sapiens
taagttgttatgaggcttctgaacaggaaaataatacaaatgtacagatcaaggacttcccgtaatctcacccagatctgcaaattaggagataaatcagcaagcgtaccaccgtttttaaa

SEQ ID NO: 288083 - DNA, 122 bp, Homo sapiens
ttacaatgtaaatgtttacataactatatcattttctctaattgcagaagtagtcaagcccgttataaatgtccaatcttaaacagttttataatgtaggacttgaaagccgcagggacaac

SEQ ID NO: 288084 - DNA, 122 bp, Homo sapiens
aattagatggctacattattctatgtgccatgtataaatctctattcctatttactctgacgtttaacacagacacacatgtgacttccaataacctttatccttacaaccttcagctcata

SEQ ID NO: 288085 - DNA, 122 bp, Homo sapiens
gattcccagccatgtcctgccctgcggggcctcggggtccagggaagaagtggccccctccggcccctcacagaggcgcccgctgcacctgagggtcctcgaccccaccccgccatcccccg

SEQ ID NO: 288086 - DNA, 122 bp, Homo sapiens
agaggcgatgaagccgccatcttgaacatgtctagtcggtagttccctgtggcatttacccgtgcaagctcccagcttgtttgtgtctgcagctccactttacaggctactctgttagaaga

SEQ ID NO: 288087 - DNA, 122 bp, Homo sapiens
cccacgtcgctgtcgaagcgcacggactcctcctggttatagaagtatctgtccaggaaccgcacccgctccgtcccattgaagaaatgacactccctcttaggctgccacaggaaacgtgc

SEQ ID NO: 288088 - DNA, 122 bp, Homo sapiens
tgagcggggcgccgactttggcccttaggctcgcccacatccggggatcaaggtcaagggcgagggcttccttcccctgcccccggcccccggcagccccgagcccggggatccgctgccaa

SEQ ID NO: 288089 - DNA, 122 bp, Homo sapiens
cactggggccttccctgtcctctcccaggcctggctccttaggcccctgacacaccttgtcgtgacactcactcactctggtatttcctggtctgaacaggcagggaagttctgcctgctgt

SEQ ID NO: 288090 - DNA, 122 bp, Homo sapiens
ttgtgaccctaatgaagacgggcggcttcacagctcggccccagaccctgtggttggctgcgggcaccccattcacgacttagggaaggcagttgctcatactccactccagaagagctacc

SEQ ID NO: 288091 - DNA, 122 bp, Homo sapiens
ccgcagggtctggtttccggtgagtgacatccagaagacttggaaatatcaagtgccagtcgctgtgaaaagccttttccagcccctccccagggcctcgtcctctccccagcccccgcctg

SEQ ID NO: 288092 - DNA, 122 bp, Homo sapiens
caaatattatttatagagaacatgcattggtcttagagtctgagggtccaggttccagttcggttgctgccatttattacgtgaatgaccccaggcaagtctctttttttaaggttcagttt

SEQ ID NO: 288093 - DNA, 122 bp, Homo sapiens
tcacacctgcaaggcctggatggcgttgttgtagcaggccagctctccagacacgctcggcgagttcagggccaggcggtgccacatgcgcgccaagtagtcctcactctcggccttgaatt

SEQ ID NO: 288094 - DNA, 122 bp, Homo sapiens
tgtctaattccaaaacatttccctcatcccaaaaataaaccctgtgccagttagtcagcccggactctccccaccccagccctcggcagccgggaatttccttcctgtctctttgtgggtaa

SEQ ID NO: 288095 - DNA, 122 bp, Homo sapiens
cttgacaccccactctcctttttccaggggtgtcagcagggagtggcttggtgcagtctgcgcctcccctccgtgttgggaggtcaccgtccttccacatctctcttgttttttggccagtt

SEQ ID NO: 288096 - DNA, 122 bp, Homo sapiens
gcccgcccctccctggcgccgcccgcgtggcgcgcctcgaccctgctctcccgcgagggccgggagggctccgggaccttgcagactccacgcgcctcacggctcctccagctcctcggatc

SEQ ID NO: 288097 - DNA, 122 bp, Homo sapiens
tgcttcctgtacttgtccttttcgattaagcactgcgagtactgtgtctgagcttcatctcgggagtggaaggcctgccagggagaagcgggacgaaggctgctttgggggttgcaccccag

SEQ ID NO: 288098 - DNA, 122 bp, Homo sapiens
tctcccggctccgcctcccgctcacgctctgcttccgccttccgtccccgcggccgccggcgacctgggcctacttccacttccggggtcaccagggaagagacgggaaggaaaagaaatag

SEQ ID NO: 288099 - DNA, 122 bp, Homo sapiens
aagagtcgcggcggcggcccagatgcagaggaccacagcgacacctggctcttctttgagcggcgtccagaggctgccttcccgcgactcaaaggagcataggggaacctgcaggggcgtgg

SEQ ID NO: 288100 - DNA, 122 bp, Homo sapiens
cataggccgggaaccagcggctcgccggcctttctccaccgtgctcggccccagcgcccacggctgaagagagaagctgccgactggcccccaccgagccggggtcggcgttatgatgcggc

SEQ ID NO: 288101 - DNA, 122 bp, Homo sapiens
gcctgcgcaatccagctgacttccggttacagataaccacgtgattgggaacccttgctgcgcatgtctagtaggaagtcggactataccactttccctacggaaggggtacttttttatgt

SEQ ID NO: 288102 - DNA, 122 bp, Homo sapiens
ttcaaaccgaattaccccttttgcatacatggacacttactgtacagatgaggaaagtgacgcccagagaaggggaactgtcttgcccaagggcttccaagctagaagctgaactgggtcaa

SEQ ID NO: 288103 - DNA, 122 bp, Homo sapiens
acttttaaattgcttctttattaactacaataacacaaggtatctttcatttctttcatacgcaacttctttctgagtcttccaattctttgtcacccttctcctgaggtcagggaaaatat

SEQ ID NO: 288104 - DNA, 122 bp, Homo sapiens
gggctgcatcaccatccccttcgcagtcttcgatgtcataaagcgcaagggcggtggccacgttgcctacggcccccagggcaatggctgcttctcccaaggctattaccagaagaggcagc

SEQ ID NO: 288105 - DNA, 122 bp, Homo sapiens
gcgtgccgcggccctccaccccgccccgctcaggatcttcccgggattggctgagctacccgacctctccaggggatcggctgcgcgccccgcccttgcccagagtcttcccgggattggct

SEQ ID NO: 288106 - DNA, 122 bp, Homo sapiens
tggccaataggagggctgactggtacttcctgttatttgattggcttaaaattttgcaaccgcccggacaaacttgccgaggattggctgagccttcagttttgaaaatcatagttttcgcc

SEQ ID NO: 288107 - DNA, 122 bp, Homo sapiens
tcactcgcactgtcctggctggggctcggaaactgagtgtttttgcatggctctcgtctccgtgtcggtattgctgtttcagtgccagagcagatgctcctcgggccaaaaaatgctaactt

SEQ ID NO: 288108 - DNA, 122 bp, Homo sapiens
ctgacaaagacttcctctaacattccttctggcaggttgaattagagtttggttgcagaccgtgtgggttgaagggatgtgtggtgagacagatcaggggcttgtaacaatcctacatcatc

SEQ ID NO: 288109 - DNA, 122 bp, Homo sapiens
ctcagaatctcagggctcgggggagcagtgtcctccagggtagccaccaaacccctgcagcgttcctaccaagcacaaggtcctagcccaaagcagacaccctgctccaccacccccaacac

SEQ ID NO: 288110 - DNA, 122 bp, Homo sapiens
ggagctggggagggaaggggagtgctggacaccggcgcctgctgtcaagttctcgccggccggtgagagacccgctgccgccgcgcaccccgcacctcctgacccctctcccctctccgcct

SEQ ID NO: 288111 - DNA, 122 bp, Homo sapiens
aggggcaggaagggtgggacattctgattggacaggcatggtcacatgaccaccaggaaccggctaatcctcatacaggtggagaatggtttccttacaggggagggtcagagttgctggac

SEQ ID NO: 288112 - DNA, 122 bp, Homo sapiens
aggaggggacgccaggagggcagcgatgctccgggctggtgcaggcttgctgggggatgtcggctgatgcgagctggagagcgcgtgtggcggccgcggcgccagtgtttgtgtgtatgtga

SEQ ID NO: 288113 - DNA, 122 bp, Homo sapiens
acttgggaagcacaaggagtcagggagttccctttcatagtcaaagaaaggggtgacagacggcacctggaaaatcgggtcactcccacccaaatacagcgcttttccaacaggcttaaaat

SEQ ID NO: 288114 - DNA, 122 bp, Homo sapiens
gcagcggaccgagggttcgttgagagcgttgtgcgcacgcgcagtttgccttccaggccgcgctttcagcctctccccctccagccttttccttcgcgcctcgggaccctctgactcacgcc

SEQ ID NO: 288115 - DNA, 122 bp, Homo sapiens
attgcaaaaggtacatcttgtttctgaaggatgaaaagattttgtaagagaagcagctggcggtgtggaggtggagttgatttatcatggttaggaacctggccatccctccccaggaagag

SEQ ID NO: 288116 - DNA, 122 bp, Homo sapiens
actgctgccaacctcgggccaagctgatgaccagggtggctgtgcgtatcttccggagggcgctcttggctgggccctccccgctttccttttcgcccggagccatgctgcccacctgtctt

SEQ ID NO: 288117 - DNA, 122 bp, Homo sapiens
cgagccgcagtgcagggccctccgcggacccattttctcccatcaccaccagggcggcgccggagactctcaggacctcactctgcttaaaacctgacttcccatagctgggggtcctgccc

SEQ ID NO: 288118 - DNA, 122 bp, Homo sapiens
cagcgacttagattgaaccacttgctttgtggtggagcgtcaagggccccaggttgtgtgcgtgtgtgtgtgtgtgtgtgtgtgcgcgcgcgcgcgcgctctggactaaccagtgggttggt

SEQ ID NO: 288119 - DNA, 122 bp, Homo sapiens
atcgaagtagaggcttcagtggcctgacttttcccacttcctgctcccctgtgagctgaacgtcagtccaaggatgcggtcttgggctgcccatggtgggagacagggcagtttgggggaag

SEQ ID NO: 288120 - DNA, 122 bp, Homo sapiens
acatcttagattccattttgattgcttccgtagaaactgtgtgtccttgtgctggaactccggtgaacacctggctcaatatccattgctcttctctagaaatccagcccagttctcttggt

SEQ ID NO: 288121 - DNA, 122 bp, Homo sapiens
aaatcctaggttaaggtgtcagcaaggtaatgcatctcctgaagactctaaggaaggatccgcctcaggcttccctcttagcttctggtagttccttggtgtaaggcaggataacttcagtt

SEQ ID NO: 288122 - DNA, 122 bp, Homo sapiens
cttccggtttcagaagttaaggctggtgtcctggccccagtccacctctgggagcgcctgcgccgctccgcggagagtccgtggatctcacagtgagcgagttgggacccagggaggggaaa

SEQ ID NO: 288123 - DNA, 122 bp, Homo sapiens
tctgcccgcgcgctctggtctctaaagggttacaccatcgggggctcggcgtcccccacccgcttcactacaattcccaaaatgcactgcgggtcggacatagtgacgcacttccgccctct

SEQ ID NO: 288124 - DNA, 122 bp, Homo sapiens
gtcaagcagtctgcctgcctcgttctccaaacgtgctgggattacaggcatgagccactacgcctggccaagtattcggtatttataaaatctacagtagtacacagttatgtcgtaggcca

SEQ ID NO: 288125 - DNA, 122 bp, Homo sapiens
ccgcgtaactcagggaacactggtcagactgctccccaaacgattacagtgttatttctccggtagaaattttgcttgatgtatggcacttccggacccataagatgatgtcagttgtattt

SEQ ID NO: 288126 - DNA, 122 bp, Homo sapiens
acttttgtctccagacaaaaccttttgaactggaacccttgcctcattcaatgctattttcgatttgatgaacacctgctgtgtgccaggcactccggagaacaaaggtggaacagccccta

SEQ ID NO: 288127 - DNA, 122 bp, Homo sapiens
ctgtcgccgtcagggccgcggagccaatcagagcccaagtcgagggctgcgctttgcgagcgccagccaatcggtgcggcggcgggcccatcctgatttgcatgtccgacgacccctcaacc

SEQ ID NO: 288128 - DNA, 122 bp, Homo sapiens
ctcgcggcccccgattctgcattggctcaggccccgccgggcccgaaaggcgacggtttccggttagtggaatcacggtcccagtcctcgcgcggttcctcagctccgcctggtcccttacg

SEQ ID NO: 288129 - DNA, 122 bp, Homo sapiens
cttatgcttggggttgaatcctagtagggagatgagcagtagagtttctaagacacaacccgcagaggagaaaatatacttcttcaaaaggaaagcagaaataaggctcagaattgagcaaa

SEQ ID NO: 288130 - DNA, 122 bp, Homo sapiens
ttctgatctgagttagtgtttgtcaagtgcagtgccggccttaaagtaggctaggccaggcgcggtggcctgtaattacagcagtttgggaggccgaggcaggagaatcacttgaggccagg

SEQ ID NO: 288131 - DNA, 122 bp, Homo sapiens
actttgggggccttggagcagctggccagggtgggcacctggtccctcagcgccaagaatcgcgaacgcaggtcattccgcctcttgcgctccaggaagttgtgattcttcctcttggtcac

SEQ ID NO: 288132 - DNA, 122 bp, Homo sapiens
tcctccccatcttttctctggcaaaggacatccagaaatactagactggctttaataacacggcacaaacaaacaaacaaaaaaatggcaatgcccctcaacaagcaataatggccagactg

SEQ ID NO: 288133 - DNA, 122 bp, Homo sapiens
tattcctggagcctcgagatgtgggcactctgtgccctctggtgtcagcctgtagaatggcgtcacctagatcttgggaaaggagtatgggaagagtagatggagaaagcccaagggacaag

SEQ ID NO: 288134 - DNA, 122 bp, Homo sapiens
ggagatgtttcagcttggcacagtaacgatgacgatgtgtatagggcgcccccagttgaccgttccatccttcccactgctccacgggctgctagggaacccattatcgaccggagcggtct

SEQ ID NO: 288135 - DNA, 122 bp, Homo sapiens
gaaacaatgtccaggctgtaacacagggagaggaaaacaaaacaaaacaaaaagagcctacgaggatccttgatttaatgatactgagttcagagactggggagaccaaggtatctagaatt

SEQ ID NO: 288136 - DNA, 122 bp, Homo sapiens
cccagcgactgcgggaggcatcccggagccggccgggcggggcggagtcgacgctcggcccggcctctgctcacctcatccacgggagacggaagtcttggccctgctccgctcccccgaga

SEQ ID NO: 288137 - DNA, 122 bp, Homo sapiens
taccagagactctgggaaatggacaaggtggggggccccactctttctctcctgcagtcccgtagctggggcctccttccttctcagggtctccccagcccagtccccttgctcccatccca

SEQ ID NO: 288138 - DNA, 122 bp, Homo sapiens
ctcgtccggccgcgaccagcgcgtgggagccgctcttatagtgaccaccagcaaggacagcgcaggtgatgcacctgtagctacccgggcatgcgcactgcccgcctcacctttcccaccgt

SEQ ID NO: 288139 - DNA, 122 bp, Homo sapiens
tttttttttttttgcatacaccccctccccttgctcaaagttggggaataaaatttggcccgtccggggctcgcgggctgggccgcaggcgccctgcgattccccgcttggggctatctcac

SEQ ID NO: 288140 - DNA, 122 bp, Homo sapiens
aggcctggttccagaagattccaggtatcttgcctctttgtctggtgaagatgaacacagcgggtcacctgggtttgggccttctgattatgcctgggaatatgaagaatgcagcattgttg

SEQ ID NO: 288141 - DNA, 122 bp, Homo sapiens
agagtggtccaaatgtcttcttgttgggagatcgtggccccacccgctcgccgggagccccgaggggcctcatcccctgaagggagcccggacagttaggggcacagcctgccgctatcgtt

SEQ ID NO: 288142 - DNA, 122 bp, Homo sapiens
agcccgaggcgctgggcgctcgctcgctcgctggacctaccccgcctccagccctcgccccgccccaccgagcaagagggcggggcctacccaagctccgccctggaagagagacaggggcg

SEQ ID NO: 288143 - DNA, 122 bp, Homo sapiens
gtaaggttctgagggggcggactcgccgccgaccgacggcgggttgggccaataagaatccggagaaagccgaccgctacctcacagagccccgcgaccaatgggcagcctagggggcgggt

SEQ ID NO: 288144 - DNA, 122 bp, Homo sapiens
aataatgttagaaaatgcatgagctaatgggtgtgttctaatgtgatgttttcatctattcgcttatacagaatgtggagagtaaaacaattctgggtgtaaaagtaggttcacattggcca

SEQ ID NO: 288145 - DNA, 122 bp, Homo sapiens
cggcggcgcgcggacggttggtccagttctccggcctggcggcaggcaagtctagctcggcgctgtcggatacttggggtgagcggaaagcatggcggggacctccgcgccaggcagcaaga

SEQ ID NO: 288146 - DNA, 122 bp, Homo sapiens
tacaatggtctgaagtgttgccaggagggagggcagccccaccctttgtcatgcagaagacggagcctggcttccccaaccatccccacctgggtctgcccagattgggcttgagatggtaa

SEQ ID NO: 288147 - DNA, 122 bp, Homo sapiens
cgcacaacaacagtgatattggcaattattattctgactttataggtcagaaaataagcccgagaggttaagaaacttgccaaaggtcacacagcttgtgtcagaacttagctgcgaagctg

SEQ ID NO: 288148 - DNA, 122 bp, Homo sapiens
atttgtccagtgtcgtttaatctagtttaaatgatggccgtgtcagctcctcacactgaacgcttacccgggctgcccaaagtacaaagtgtatttaaaaagttggtaaaattaaaaaagga

SEQ ID NO: 288149 - DNA, 122 bp, Homo sapiens
cggggtcggcaggcggaggcggggccaggcgggggcggggccaagggccgcagagcctggcgcggagccggcgagattttggtggggtctcacctgttgcgtgactcccccacagtccggcc

SEQ ID NO: 288150 - DNA, 122 bp, Homo sapiens
tcggtttacgggtcgcctcctcagaagacttgctccctcttatcaccacagtgctcggcacgtgccggctgcccagtcagattgcacgggacaagtcactctcttgccggaggactgaaggc

SEQ ID NO: 288151 - DNA, 122 bp, Homo sapiens
agagcatcttggtctaacttgtctgcacaaaagggcatcattttctaattctcccaaggacgctgtttatgccagcagagaccctgggtgaagcctacatagggtgggctgggctccctgcc

SEQ ID NO: 288152 - DNA, 122 bp, Homo sapiens
aaaagcgggaccttcgcatctttgctgccaaaagacagcccctcctaaagagtaaaggcccgaccccctgcacgccctctgcctgcaccgcacgtgcttggttttccccgcccgggtactgg

SEQ ID NO: 288153 - DNA, 122 bp, Homo sapiens
ccgtgcggaccccgctccactcaccccgcctgggggccagaaccacctcccaggggcttccgccagtgccgcagttgctgaccccaggcaaacctcgccgcctcctgccccggcgggcctgg

SEQ ID NO: 288154 - DNA, 122 bp, Homo sapiens
atattcatcaccctcaaaagtttccttatgtctctccataatctctctctcccgtcctctcgcttttctctcccatcgccaggtaaccaataatctgctttccataactatcagttaccttg

SEQ ID NO: 288155 - DNA, 122 bp, Homo sapiens
tcagtaaaagaggaggacactgacgagtggcgacttggttcacggggttctttgcttcctcggtggcggaggggcctggggcctctctccagcacctctgcccttccgcagccatcgagttg

SEQ ID NO: 288156 - DNA, 122 bp, Homo sapiens
gaaccatgaactgagccgccgagtggcttcataccagggctcttctcccagctgtgcagtcgtgaccaaaaccacttgggcttgagtctccgtggcctctagagtgaagtgcggatggaaca

SEQ ID NO: 288157 - DNA, 122 bp, Homo sapiens
tatgagggtgggcacaatgggcgtccagaaaagccaatcaacagccgtaggtgccaactccggaggacgaagggaaccaataggaaggaagtcgaggtaaaaacagaagaagcagtgtgtgg

SEQ ID NO: 288158 - DNA, 122 bp, Homo sapiens
cccctcccttgttggacttgcgcgccctggcgctcggaacctccggcgctgtgcccaccccgctctagctcgcgtctcccgactccaattaggtcaggctcggagtcccgcggccgcggctc

SEQ ID NO: 288159 - DNA, 122 bp, Homo sapiens
ttgccggggcacaaggaggacatttccgtctcttcctggggaggcgcttctggcaccttccggggcggcctccggctgtcttcgcccagcccgccaggcggcgtcagggctccgggggcgcg

SEQ ID NO: 288160 - DNA, 122 bp, Homo sapiens
tcctgcttccagctgctgcagcgcgccttcgccgccaaagcatccagcagccccctgctccggcccagcatggcgaccccgacccagacccccacaaagggtgagcgtcgtttggggagggg

SEQ ID NO: 288161 - DNA, 122 bp, Homo sapiens
tgaagcctctggattcccacaccttactgttgtttatgctattcacctccttcttatactcgtcacaacttataattatacattcattagcttgatccttttttttttctttttttttttga

SEQ ID NO: 288162 - DNA, 122 bp, Homo sapiens
ttaaaaatatcctataaggatgccataaatcgctccatggtagaagatatcactgggctgcgccttctggaagccgcctccgtgtcgtccaagggcttacccagcccttacaacatgtcttc

SEQ ID NO: 288163 - DNA, 122 bp, Homo sapiens
aaggaaagagagagactttttaataagggaaaaaagagaaaagctagaggggacctagaccgtccagcgttgctgtgtggtgctgtggccaccagaggacagcctaaccacacatgctgtgg

SEQ ID NO: 288164 - DNA, 122 bp, Homo sapiens
tcactcaccgccttataaagaaaaactctacccaacctgctttccaggcctggctttgggcggcgtcaggctggcgcttggcacctgaacaccctcgcgccccccacccgcttcagtcatta

SEQ ID NO: 288165 - DNA, 122 bp, Homo sapiens
tgcattttcaggcaaaccgcagacgccaacactcccctcgctgcctgggttgctgcctggcgtccattgttcacaggcggtcacctgaggggaggccaacgctcggacagctgcgctcacct

SEQ ID NO: 288166 - DNA, 122 bp, Homo sapiens
agctcccactgtcccctgctcactgaaagctcttggtcaatagtggagacacagagttcacgagctgttaccaggcaatatggaaggcaccgtgtggaggggctagctgcagaggctttctc

SEQ ID NO: 288167 - DNA, 122 bp, Homo sapiens
gacgaaccccaggggatttgtgaggctgcaaaatggctgccatttttacctgttgccacgcgatggcgctgtcgcaacaggaacggtagctttcctggccagctcgcctcgcgggcccctaa

SEQ ID NO: 288168 - DNA, 122 bp, Homo sapiens
gccgccgtcgacacccgacacaccccgcgcccgcggacgttaaaggtggactccccgccgcgctgagcgcatgcgcgttcccagcagcctctgcgcctcccgcgcccctaacccgacgggct

SEQ ID NO: 288169 - DNA, 122 bp, Homo sapiens
gaagaatggcggtggcccgagggagcccaagtggagtccgagggccgtgggtggtggagccgggcctccggggctccagggctctcaggccgtccttcccagccaggtggcctcgtcaggcg

SEQ ID NO: 288170 - DNA, 122 bp, Homo sapiens
ttgatgaacgcggttcccggggagactggtacggttgctgtgtgctatggagccgagggtcgtcaagccaccggggcaggatttagtagtggagagtctcaaaagccgctacggactcgggg

SEQ ID NO: 288171 - DNA, 122 bp, Homo sapiens
ggcggactgcaggggccagctgcttggcggtcagggcgtccctgatagacttgcattggtcgtgctcgcttaggtggcagcacccagcccagtgccaggcatacattgggcgctcagtcaat

SEQ ID NO: 288172 - DNA, 122 bp, Homo sapiens
atgggctcagggagctcgaaccttaagtaggtgaggaataaaaaaaggaagaaatgcagtcgttcattcattcatgtatgtaataaatagtacatggccttgaggacaagagagccttcagc

SEQ ID NO: 288173 - DNA, 122 bp, Homo sapiens
gttcctgcacttaagagccactcatcacatgacggagctccctctcaggttcctttacatcgccctgtcagaaatgactttcagggaacagacatcacatcaaatcatccaacagatgtccc

SEQ ID NO: 288174 - DNA, 122 bp, Homo sapiens
tgctgcggaaaggagaggccccgggctcaggccgggcatggtcacctgtgtgactctgtgcggtcacttcagccccccaccttcccgggcccggttcccgtctgagtcagtgctgtgacgtc

SEQ ID NO: 288175 - DNA, 122 bp, Homo sapiens
cagagccgggcgactgcgccgggcggggcagggcggggaggttccggtgcctgagccaatcggagccgcgccccggggaaccgcagccaatcgccaaggagagaggagaggggcgtggccgc

SEQ ID NO: 288176 - DNA, 122 bp, Homo sapiens
aatggtcctgtgatttactgagacagaaaaccctggggagaagcaggttgttggtggtggcgcatcaatagtgctgttcaggctgttgtgattgagatgcccgttaggcaatcaagtggagg

SEQ ID NO: 288177 - DNA, 122 bp, Homo sapiens
cgactttccctatatcgcagagactcatccctctgaccccagcccggaagcactgtccctcggagtccgagacttccacctgggtcgtgtccaaggccccggcgactccccggactcggggt

SEQ ID NO: 288178 - DNA, 122 bp, Homo sapiens
attcctctaaaaccaagtcttcaagaatgggagtccaaagaaacctggaccatcgtgaagcgactgcccccggaacttgagtggccagctccactttgcgacacggagactgtttgtgtgac

SEQ ID NO: 288179 - DNA, 122 bp, Homo sapiens
cccgccccgcccgggtctctccagatcgcattagcgtggggcgagggctcagtgcggcaccggctgctgagggagaggcgtggcggggaggagggtggtgcggggggacgaggacatcgctg

SEQ ID NO: 288180 - DNA, 122 bp, Homo sapiens
gttagccaagagcaagaccctgcctgcagtagcaggcagagacccaacagtaaaattcaccgcactcttaatacacggtttttgccttgctttgattaatgttgaaaacaatttagttatca

SEQ ID NO: 288181 - DNA, 122 bp, Homo sapiens
gagggctgagagccgctccccaccccgtaatttctgttcccagccagtccagatgctgcccgtcagggaccaggctttgagaactgacgtgctgctttaggaatatttcctgctggagatga

SEQ ID NO: 288182 - DNA, 122 bp, Homo sapiens
ctcttcctcaaattattcaccttctcacgctggcgaaaacctggtgttcagctgaagacccggctcttcctggactggcttctcccatcactcctgtcactcccctttcctacccctacgca

SEQ ID NO: 288183 - DNA, 122 bp, Homo sapiens
actacacctattgctagagtatgtcagtgtccagtatagaaggtaacattcacacacacacgctcctcactgcaaatcacctgagctcagaactcctgttaacatgtcttacaactgcagct

SEQ ID NO: 288184 - DNA, 122 bp, Homo sapiens
aagcgaggggccccggcggtgggggcaagaggcgccagcggcacggggactgccgcacggcgcacaatgagaaactaccaacttcagagcgcaggaacatctcaattggcaagaaagagggg

SEQ ID NO: 288185 - DNA, 122 bp, Homo sapiens
tcgggaggaatcagccccccagagcgtgatccggcaggaatcaaccccctagagtgtgatcgggcaggaatcagcccgtagagcgtgatcaggaggaatcaaccccctagagtgtgatcggg

SEQ ID NO: 288186 - DNA, 122 bp, Homo sapiens
aaagtggaggatccggtttgctctgggcgggtctggaagcagagccggcggagggagcgccggggccctgggctgcaggaggttgcggcggccgcggcagcatggtggtgccggagaaggag

SEQ ID NO: 288187 - DNA, 122 bp, Homo sapiens
agatcctaatcttgtttcaaagacactcttcccaccatcacaaagaaaacacaggctgggcgcagtggctcatgcctgtaatcccagcactttgggaggctgaagtgggcggatcacttgaa

SEQ ID NO: 288188 - DNA, 122 bp, Homo sapiens
agtggtgggggtgggctgctggtatataagcctagtgggcaggcccagcagcctcacacccgggtgaggggtctgctggctgcacctgtcggtctcatggctcctgggagcgtcaccagcga

SEQ ID NO: 288189 - DNA, 122 bp, Homo sapiens
tgccatcctgagttctgccatccttaggggccgccaagacctctcttttcgttcctctcccgcctcagaccagcagccttttattttagatcatgtctggaggtgagtagggaggtgggacg

SEQ ID NO: 288190 - DNA, 122 bp, Homo sapiens
tgctttgaaagctccctttcctgtggtatcagtcaagtcacattccttttgatttaaaaacgtttagctattgtctagcttaacttcatcatatcctgctttactttttttttaacggttat

SEQ ID NO: 288191 - DNA, 122 bp, Homo sapiens
aatgcagctgctttcctccaacctgcaccattgaggaagcagccaggttggagactcaggcggagggcctggcagatttcctgagtgctctctgcaacagaccaggcccaccagaggggaac

SEQ ID NO: 288192 - DNA, 122 bp, Homo sapiens
taatacaggtaggcctcaaccaatccattgaaggcctgagagcaaaaactgaggcttcctcgggggaagaagaaactttgccccaagactataaagtagaaatcttggtagggtttctatcc

SEQ ID NO: 288193 - DNA, 122 bp, Homo sapiens
ccgcacccctctgagggcacggccgccccgtcctcgctgaccccccgctgagggcacggccgccccgtcctcgctgacccccctctgagggcacggccgccccgtcctcaccgacccacctc

SEQ ID NO: 288194 - DNA, 122 bp, Homo sapiens
aaggacaatacagccccctttgtgtccctggtatgtctttatcagactatattgcctgttcgtgtttggtctctggatccttcaagggttcaagggacagaaactcacccatcagctcagct

SEQ ID NO: 288195 - DNA, 122 bp, Homo sapiens
atttagtgtcacggcagatgtacaagagcttgataaatggtgaggcacaatttgtgatgacggataattaggcaggcggggatgagggcccaggaaactgttcacaaaacaagaggccagct

SEQ ID NO: 288196 - DNA, 122 bp, Homo sapiens
agggcctccccctgcggcgacaccactcagatctctactcccactactttgggggccttgcggaaacggtgctggtcatcagatctgtgtctactatgctcaactatgactatgtgtgggat

SEQ ID NO: 288197 - DNA, 122 bp, Homo sapiens
gagaagaattatctaagggggaaggagaaggtgctggctatttaaagtgtggttccagaacgcctctgtggcacttgaaattctaaacttggcccagcccacattccacccttgtgcctccc

SEQ ID NO: 288198 - DNA, 122 bp, Homo sapiens
gtcccaaaacctcccccaaccaaccccgtccatggaaaaattatcttctgtaaaaccggtcgctggtgccaaaaaggctggggactacaactccagaaaaaaatttttaaaacattagccag

SEQ ID NO: 288199 - DNA, 122 bp, Homo sapiens
tagggacaaaggcgggaacgcggggatgcgcgacaaaacagataatgcgtcacacactagcgagcaatgcgtgctataaagaaaaatcacgcggtaggggcagagagtgaggggggtaccat

SEQ ID NO: 288200 - DNA, 122 bp, Homo sapiens
gccagggcaccgctgctccgcaccgcatccacacgcacagacatgctccgtttccactcccgctgtggacacacagtcttcgtgttcggaggcctgtgttgtgccctccctcccgctggtca

SEQ ID NO: 288201 - DNA, 122 bp, Homo sapiens
tggacattcggaagagggcccgccttccctggggaatctctgcgcacgcgcagaacgcttcgaccaatgaaaacacaggaagccgtccgcgcaaccgcgttgcgtcacttctgccgcccctg

SEQ ID NO: 288202 - DNA, 122 bp, Homo sapiens
acgacacaaatgccccaagcgctggatgaagcagcgacctaggatggggctggcctggaacgggaaccaagacgcccgcccggacgaaaacgagcagggaaacccgggccggggtcggccgc

SEQ ID NO: 288203 - DNA, 122 bp, Homo sapiens
tgagcgcccagcggagcgcaagggcggggcccgcgcgggccggagacgcccgttcgctgtcggccaaccagcgcctgtctctgaacagccaatgaacacgcgtcttacagccaaggccgggt

SEQ ID NO: 288204 - DNA, 122 bp, Homo sapiens
ctgcagccccgggagaagtccacgtcgctgaagagctcggggaagagctgcaccagcaagcggcaggccaggtccccccctgacaggctctggtccacgatctgcttgagctctgcggctgt

SEQ ID NO: 288205 - DNA, 122 bp, Homo sapiens
agccgtgcctttaccagacgtcggggctgcgaagggcgagtcgcagcaagtaaagcgcagcgctgcccatgcccaggcagattaagccgatcatcgggatgatctgcggggaagagggagag

SEQ ID NO: 288206 - DNA, 122 bp, Homo sapiens
gaggccggtcccgctctcagggagatttgctgagaaagcgcctctctggcaactttttgacgcaaactctccaaccaatggcagggagagaatgattgacacatctaagccagagggaaaat

SEQ ID NO: 288207 - DNA, 122 bp, Homo sapiens
attcccagcattcagtacacgaaaggtggtgacggcacttgtggaaacacagcacagccccgcagtggcttcactcctgaagtctgtgctccaaagggaatgcaggctttcccacagccggg

SEQ ID NO: 288208 - DNA, 122 bp, Homo sapiens
atacgtgtcggggtctgggtacgtgcacatacgtgtaggggtctgtgtgcacatgcgtgtcgggctctgctgctgtctgcgcgctgcggccgctgggtgcgcgtgcgcatgcgcgctggcct

SEQ ID NO: 288209 - DNA, 122 bp, Homo sapiens
tagagcactcccgaaatctctccatgcgctgctgggttagtatggggtggagggtgacgccgcagggacagggctggctgtctgcttctctactgctgcggacccctagagacacagggtgg

SEQ ID NO: 288210 - DNA, 122 bp, Homo sapiens
tttttttttcccccatagacggagttttgctcttgttgcccaggacagaatgcaatggcgcggtctcggctcactgcaacctcctcctcctgggttcaagcgattcttctgcctcagcctcc

SEQ ID NO: 288211 - DNA, 122 bp, Homo sapiens
cactgcctgagccgccgcccgcactgaagccacctcctaaaccaccgcccatgcctccgccgtaacctcctccatagccacctgcggaggcggaagtcgtgctgctgctgaccacggctgtg

SEQ ID NO: 288212 - DNA, 122 bp, Homo sapiens
cacttgtgaaagtgcgcccaaggacgcaggactttcctgaaccagaaaaatccctgctcgcgagtgtgcacatctccgcttagagtgcagaggagcaaacagcagaaacttcccccggctgt

SEQ ID NO: 288213 - DNA, 122 bp, Homo sapiens
tgtagcgaggactcccagagttgggagacgttgtacgcttactgggacctaaatcccgcacgagttcccacccaagtgccgccgccccagcctacgcacgcgcattcgcaccgtctccagcc

SEQ ID NO: 288214 - DNA, 122 bp, Homo sapiens
ctggaacccgggaaaggggaggacggggaggccccggagtccaggatcccgagcccagggcggaaaagtttggtacgagtctgggcaaatgttccagcgactggggtccctgaaaagggggc

SEQ ID NO: 288215 - DNA, 122 bp, Homo sapiens
gaagccgtccttccggttgctgacgtggaaggcagacacgggcgggtggtgggacacctgcgtgcagggaggcggctctgtaaacagccccggaaacaggtaatcccaggaagcgagagccc

SEQ ID NO: 288216 - DNA, 122 bp, Homo sapiens
cattccacatttagacacaaacaaaaggatttgtcccagacactcaagaacaagccaggacgaagccctttcccgccaaaccacgaaggccgggaaataaacagcgcctgcccaggctctgg

SEQ ID NO: 288217 - DNA, 122 bp, Homo sapiens
ctgctcttaaaccaccgtctgctcactggggtgctgtgatggtctgcaggtgggtggatgcgaggccctcagccagaggaacagccagtggagcctgaggatgctgagctcccaacacgaca

SEQ ID NO: 288218 - DNA, 122 bp, Homo sapiens
caggggactggagggacgcactgagcatgtgcagatcagctcggtggtggctgccgcggccggaggcgagggcccggtgctgatgcgaaccgccggctcggcctcagcccgcgcgtggtcgg

SEQ ID NO: 288219 - DNA, 122 bp, Homo sapiens
gttaattaaatacatttgtttggtaaaagcaactaaaaatacttgcagcatcgtgagctgcggagaagagctggctaattaacgcctggtttgtttgggatctggaatacatttccatgccg

SEQ ID NO: 288220 - DNA, 122 bp, Homo sapiens
ccccggccccggcgcctgattcagtgcttagtaattaatttggcgtttcagaatggtcagcgggctggataatgggtgcattcatcccccgggctaatctgaacagaggtgggaagaaaggc

SEQ ID NO: 288221 - DNA, 122 bp, Homo sapiens
atcaggctgggcgtggtggctcacacctgtaatcccagcaccttgggaagctgaggtgggcggatagcttgaggttgagaccagttcgagaccagcctggccaacatgacgaaaccccatct

SEQ ID NO: 288222 - DNA, 122 bp, Homo sapiens
ctaggaaatcctgttctgctcccaaactccgggatcccaagcgggccccatactctgaggcggcctgcatcacgtgcgcgtacccagcccggagccaaagccctgtaccccaaggagcaccc

SEQ ID NO: 288223 - DNA, 122 bp, Homo sapiens
aggtcaaagaaaacacctgtgctctcatcaaaattaaaaactgctctctcacagaatactcgcaaagacatttatcagtaacacagaacttgagaagaaattattttgaggagcccctgcaa

SEQ ID NO: 288224 - DNA, 122 bp, Homo sapiens
acacatacccatgtagatgtgagcttctcgagtgcaagaactggattgtatttagctttacgtcacctgtgcctagaacagcttctggaatgtagtaagtgtatagttatgttacatggatg

SEQ ID NO: 288225 - DNA, 122 bp, Homo sapiens
cagaagtacttagcacttgtcctttacgcagccaggtcacagttggtaccggctcaccatcggtgtcacaagaaaaccttgcagactcgccctcgtagacggtcatggaccgtggctttgtt

SEQ ID NO: 288226 - DNA, 122 bp, Homo sapiens
agctctcgggatttccccgcggggctgcggagagtacagacaggaagcctggggacccagcgcctgaccagaacttcctcgggggaggctgcaggggagcaggcgcatcctgcacagaacgc

SEQ ID NO: 288227 - DNA, 122 bp, Homo sapiens
ccccggccgaaaccctgctcttcgggccctacaacccgacttctttagaagccgattggccgtctcaggcccgccccgaggccctgccactggagtgtccccatgaaatccggtggctgctg

SEQ ID NO: 288228 - DNA, 122 bp, Homo sapiens
taggaagtaggctgacaaaggagtaaaatatgatattaataagttttgttttttcttccccgttttttggcagaataaccaagtgctgggaattggaagtggttctacaattgtccatgctg

SEQ ID NO: 288229 - DNA, 122 bp, Homo sapiens
cgcagccccctcggaagctgctaggcggaagtagaagttcagaagagggctaggcggagccgagcccacatccgggagaggagagcggaagtggcgttggtctggccggagcccttgggtga

SEQ ID NO: 288230 - DNA, 122 bp, Homo sapiens
tatctttcaaatagagcatctatggtatctattagaataataattctgtcatgttcccaacgtttaaggatacgtaagattgccacaagcctaaatctggaactatgactaaagatctgtgg

SEQ ID NO: 288231 - DNA, 122 bp, Homo sapiens
tgtaacaacctagaaggccacttcttagaacaaagaaatcaccctggtgttcgggcccgacgggattttgtgttagggtagattttgtcagcagcagcagagatccagcacaaaccagccta

SEQ ID NO: 288232 - DNA, 122 bp, Homo sapiens
ttttcagaggatgacaaccataacgctcaagttctcaaagaagcagagctgacaaaaagccgagggagcggggctaaaggaagggttcatgaaagttacattgacttgtgccttcattttaa

SEQ ID NO: 288233 - DNA, 122 bp, Homo sapiens
gacttgtagggtagcccacagtacccaggacggtacccctttgagcacgttctagtgtcccgtcccagacacccctccatcccaggcaaaccaggacagctggcagccaagcctttagctca

SEQ ID NO: 288234 - DNA, 122 bp, Homo sapiens
ataagccagcttgtgcagtctgctcaaatgccctgtggaggaggtagctttctaaccattcgacagatatttgtgcagttgtagagagaaggcagcattttctggcttttccaacatgttaa

SEQ ID NO: 288235 - DNA, 122 bp, Homo sapiens
atagctgtgcaaacttcctgctccgcttgtgaatagctctgagggttaaaacactttgatcgatgagttaaaccccacttctttcactttcacccactgattgtagttatacccttaaataa

SEQ ID NO: 288236 - DNA, 122 bp, Homo sapiens
tagctccttttaaatttttttgcttcccctttttgcaacttctaaaagttgagtgccctgcggctcagttccggagcctcttctctccttccacttttttttttcccttagagtattaggaa

SEQ ID NO: 288237 - DNA, 122 bp, Homo sapiens
atcccgactccagacggcctgaattctaatcccgactccagacggcctgaattctaatcccggctccagacggcctgaattctaatcccaccccagacggcctgaattctaatcccggcccc

SEQ ID NO: 288238 - DNA, 122 bp, Homo sapiens
gagcgcttgcacgaaaggaaaaaccccaggccgtgtgaagtctaactttccccgtcctctcggtcaggcaatcccaccggggcacctgtctaaaaacaccccgcctccgaacgcgcgctctt

SEQ ID NO: 288239 - DNA, 122 bp, Homo sapiens
tttcttttttttttttaattttttttaattttttttttcagtgttttggtgctggtggagcgaactcacgcccctagccagccttccccgtgactcttgccaagagaactcgtacaccggca

SEQ ID NO: 288240 - DNA, 122 bp, Homo sapiens
aacagcggaagctcagtcagagggagcggggagggagggcgcatgaaagcctgccattggcgagcttaccaaaggcatctgccagtgggacttcaatggaatgtgaaaccaaatcattttca

SEQ ID NO: 288241 - DNA, 122 bp, Homo sapiens
agtgaacatgtaaaattatctgggaagtcccaaatctgaaccagcagcagatacggggggcggggctcaggggctcagcctcggtagttcaaaggggttcctttaactctaaaggctgagcc

SEQ ID NO: 288242 - DNA, 122 bp, Homo sapiens
gcaaataaatgggtggaatagatcaggaaagaataacagctgcattattagaaaacttaccgtaaacagacatgattgctagtgccatgccaagccatattgggacctcaggcaaaaggaaa

SEQ ID NO: 288243 - DNA, 122 bp, Homo sapiens
gaccaagtgtaagttccggtgctcaaacctgagcggccgactacaaatcccagagtgcctcgcgggcgccgtctccacggcacttgggtttcagggccatggaatcgcaagcccttttcgca

SEQ ID NO: 288244 - DNA, 122 bp, Homo sapiens
ccgggggagcggggaagaggataacattccctcaaatttagcaggtggtttgacgcccctcgtggtggtgttttacatatccagaggggaagacaatagtactatttttgatagtccaattc

SEQ ID NO: 288245 - DNA, 122 bp, Homo sapiens
gtccctgggcctgggcggggacgccaccaactgccaaggcctgtgtataagggcagccgccgccttagccacagacctgccccgccatgacccggctgacagtcctggccctgctggctggt

SEQ ID NO: 288246 - DNA, 122 bp, Homo sapiens
tcaccatttgtcatttgcaccaacatacaataggaaaacacattttccgacatgcctcagcgtgtccaggatgagatgcaccctcactactaagccgcattacacgaaaatgtgtgaaatgc

SEQ ID NO: 288247 - DNA, 122 bp, Homo sapiens
gagtttaattttaacacagtagacagagcagggccatcatcagtgccgtcgggcacccttcggatcaggaccatggtgcctcacttcctaagaccccgaaggagctgtagggggaggcagtg

SEQ ID NO: 288248 - DNA, 122 bp, Homo sapiens
ttatcaactccatgtttagtggcgtcatattgagaggtgacagcgggccagctggagttccgggtgggcatgggcttggcgggcctgcactcggagcagccggccggccctgccagccccgg

SEQ ID NO: 288249 - DNA, 122 bp, Homo sapiens
ggacagccgtgcggcaggagcgtgggcggccagggtccaatgggtccggctcacgcggcgcggtgttccctcctgcaggtgatggagctggcgccactgggctccctgcacgcgcgcctaac

SEQ ID NO: 288250 - DNA, 122 bp, Homo sapiens
ctcctcgaccatcaccacagactgccggttggcgaggaggccgcagagaaacagggcgagcgggggcgtcagcagcaggcccaggccgtagagtgcattgtagtgcaccaggcagggacagt

SEQ ID NO: 288251 - DNA, 122 bp, Homo sapiens
ccacacctccattaagctgtccaatcggagagccaatatcgcccaggggcgtggcctgggcgcccgacgggctgcaggggtacgcgggctggagtaggttgggcagagtaggtgtccaaata

SEQ ID NO: 288252 - DNA, 122 bp, Homo sapiens
cggtctcctgtacatattagcgcgcagcattaatcaggccgcagcctctgcagtgctttccgaggggagtcagagactagggctgggaatgagaccgggccttttcgggccactagagccgg

SEQ ID NO: 288253 - DNA, 122 bp, Homo sapiens
tatgaaatcatctgacagcagatatatcctgaagtcatagccttagcaaactgcctttctcgccaacacactcaacaccccgtggttcaaacatctatacgtctgatagaaaaacttggaga

SEQ ID NO: 288254 - DNA, 122 bp, Homo sapiens
ccagcaccaccggggtggaggaggtgagtgtgtgcagaggcaggcgcgacagtttataggcgtcgtactccacttggtacttgcagcaagggtcaaactgccaggagatcccatagagggtg

SEQ ID NO: 288255 - DNA, 122 bp, Homo sapiens
cttccttgagcctcgccaagatgtctctccaaggccctcccctccacctctggccttggacgttgggtcgctcgatcaccctcgaggcgcccctcggaacctctccccaccccacagttcct

SEQ ID NO: 288256 - DNA, 122 bp, Homo sapiens
tggcccccagtacttcagaatgtgacctcatttggaaacagggtggttgcagatgtaattcgttcaattaagatgaggtcatactgaaatgcatgggaccctagccccatatgactggtgtc

SEQ ID NO: 288257 - DNA, 122 bp, Homo sapiens
tacaaaaatcagctggatgtggttacacgtgtctgtaatcccagctaattgggaggcagacgcaggagaattgcttgaacctgggaggcggaggttgcagtgagctgagattgcgccactgc

SEQ ID NO: 288258 - DNA, 122 bp, Homo sapiens
agattaaatgtttgtaggatgcttgagttcttcacaagtctcacgtcacttagcgacggtcgggaactcctcagtggtagtttcgggagccattcattcattttattcatttcatcattctt

SEQ ID NO: 288259 - DNA, 122 bp, Homo sapiens
gtggaggcagtgaggattccgggggctgctggcttatggggtagaggcgtcagcctggggcggcgggagggtcctgggcactcgggatctctctaataattggtgctaatggcctgttgtat

SEQ ID NO: 288260 - DNA, 122 bp, Homo sapiens
ctttttataataaagttatgccaaaaatacagcaacaaatacagaaaaagtattaacaaacggagaagccccagatacacgtacagtaacaatacaaaaatgtgactggtcaaacagctcaa

SEQ ID NO: 288261 - DNA, 122 bp, Homo sapiens
tgtcggcggcggccactgcaagaagacatagccagagttcaaatcggtctgccagcaccccggggacacactgccttcctgctccctcgggtcccacgctgcctccctgacccctgccagct

SEQ ID NO: 288262 - DNA, 122 bp, Homo sapiens
cacattgtcatgagttccatgaaggaaacaccctgggtgatgggagagctctgcggggagcgggggggttatctcactgggaaagctctgctaaggaggtgatatttcagctggggagtaag

SEQ ID NO: 288263 - DNA, 122 bp, Homo sapiens
ctgccgccgggcgggcgggctgcagccgccctccgcgctcgcctgccagctccctcgccgcgcgtccgtcctccgtcctcccgggccagccagccagccagccagccgggccggcggcgggc

SEQ ID NO: 288264 - DNA, 122 bp, Homo sapiens
acgctgtagccttcgagaacggttgtttcggctcctgttctgtgggcggctgaggaccgccggctgcccggctcggagaagaacaggttagaggaggcagctccagcccatgcataatcagg

SEQ ID NO: 288265 - DNA, 122 bp, Homo sapiens
cggggacgagggaccaggatggggattcgggggctggtagccgggctgtcgcggatccagcgcgtccttggaaagtaggatggcgaggccgggcacgttcttaagtacgctgagactagcgg

SEQ ID NO: 288266 - DNA, 122 bp, Homo sapiens
attggcaggtcctcgattatcggcgagtcactgaggttccgagaggggcgtctctgctcacgcaaacagctacccagccgcctcccacggtctgacctcagccaaggtgacgcggcttaaag

SEQ ID NO: 288267 - DNA, 122 bp, Homo sapiens
gcgcccgctcggctgggctgcctatggagccggccgggcgagctgcactgaggaatgcgccggggaagaaatctgctccgacacgttctctgtagctgcccggccgagaatgaagcaatcac

SEQ ID NO: 288268 - DNA, 122 bp, Homo sapiens
aatatatctgcagtataaccaagcccacgttggctttgcctccccagcgggtcctgtttgcgccaggggcagccgaggaggggatctgctgcccttgccacccagtgcctccttccctgtta

SEQ ID NO: 288269 - DNA, 122 bp, Homo sapiens
ggttctctctccaccttcaatcgccatgatgagctcaccatggaccgcaccaactgatggcggaaacttaagtatttcttatttctcattaaaacattcagttaatctttttctctcttttt

SEQ ID NO: 288270 - DNA, 122 bp, Homo sapiens
gagccccggggagagactgggcctccatggggggctgcgactcagaggaaggctttgacccggctgcgggaagcgaggacgtaagtggtggtggcggtggcggcagcattgcccagaacatc

SEQ ID NO: 288271 - DNA, 122 bp, Homo sapiens
tgccccttctccagccatctaggtcccctgtactctttccctggggatggagctgggtgccggtgcaggcatcggaggagcggtgccggggaacccgcctcctcacctcttgcccctagcac

SEQ ID NO: 288272 - DNA, 122 bp, Homo sapiens
ctgcatttgtttacaccccgaatcttgaatcacaatggggcagcttgggctgcccaggcccggcgaggccgggctttctcctagacactgaagtctgttctccgacccaagggacacaagaa

SEQ ID NO: 288273 - DNA, 122 bp, Homo sapiens
ggatcacgtcatctcctgctcctcacagatgcgggaggaaaaacggaggctcccagggcccggttaactcgctctcttgacaaagaacctcctggaccggactccagccaggcccctctgag

SEQ ID NO: 288274 - DNA, 122 bp, Homo sapiens
ctaaagcccgcgaccctccggctaccgccgccgctgccaccagcccgggttcccagcccccgaaacaagcttcttaagaactgagagggcctgatctcatctctgcaggtcacaagcactga

SEQ ID NO: 288275 - DNA, 122 bp, Homo sapiens
gctcgttcgcttgtttgttttcgggggttggtttctttctttttaaactcagttatcctccgtcagctcccccacccccccccggcaccctcgctagtccccagccctctcccctcccccag

SEQ ID NO: 288276 - DNA, 122 bp, Homo sapiens
cacatgcaacacaaaaaggtttacatgaccactaacgctaacggagcacttagtacttgccgggcaacaatgtaagatcattacaacaaccctatgaaatcctacatattaaatacaataat

SEQ ID NO: 288277 - DNA, 122 bp, Homo sapiens
cgggcctcactgttaatagtacagtatttatcagcagctgccgcggttaagaggaagccacggccccctgtagtctgtacctcctaagatggatgatttagcttgcgatctgttcaagatgg

SEQ ID NO: 288278 - DNA, 122 bp, Homo sapiens
cacccgaatactgcgcttttccgaccggcttaaaaaacggcgcaccacgagattataagccgcacctggctcggagggtcctactcacagggagtctcgctgattgctagcacagcagtctg

SEQ ID NO: 288279 - DNA, 122 bp, Homo sapiens
ctgcaagcggccgagcggaggcggggacgcagggccccctcccagctgagagcactgggacgcccaccgcccctttccctccgctgccaggcgagcatgttgtggtaattctggaacacaag

SEQ ID NO: 288280 - DNA, 122 bp, Homo sapiens
caaaggccgatcccctctgccttctgcttcctcagccatgaccatgggcgcacgtgggcgcgagggcactttgtggcccaggacaccctggagtgccaggtggccgaagtcgagactgggga

SEQ ID NO: 288281 - DNA, 122 bp, Homo sapiens
ttcccaaagaagcgactagggacccaagtttaaaaattcctccccccacccaatgcgagacgtggccagatcccatccaacacacggtttaattttcatggggctctgggatcaaaagaaca

SEQ ID NO: 288282 - DNA, 122 bp, Homo sapiens
gggcgacaacagtgaaacactgtctcaaaaaaaaaaaaaaaaaaaagacattcatattcacgtttcaatgctggctgaagccctatagccaagattcagaattctggattttgaaatccagt

SEQ ID NO: 288283 - DNA, 122 bp, Homo sapiens
ccttttcaccagaccacatccaataacgtgcagagcatcattgagagcagggttgagaagcgaaccaagggtgtctacgtgccattcgggggcaaaagcatgatcacctttatggatgacct

SEQ ID NO: 288284 - DNA, 122 bp, Homo sapiens
caagacctgcagggacccagccggagctcggcgcgcccaggccccgccccctccgcgaggcgccaatcagagctaagcacaatgcagggggcggggtccctctgcagctccgcaacctgcag

SEQ ID NO: 288285 - DNA, 122 bp, Homo sapiens
gaaagggaaagaaaataaacagtttaaaaatgcctagggaagtcccggtgcggtggcccacgcctgtaatcccagcacttagggaggccgaggcaggcggatcacgaggtcaggagatcaag

SEQ ID NO: 288286 - DNA, 122 bp, Homo sapiens
cccttctgagagcaagcaattcctgcctgtctgtgagaccaagcagacaagaatgccaaccgccagcagccccagcccctaactgtttctaagtcagactaggacctgttcagaacctggca

SEQ ID NO: 288287 - DNA, 122 bp, Homo sapiens
tggtgggttgagcgccttcttccagttggggattaagacatgacttccagtggtacaggccgtaaggaaacagccatccagagaattcaacagctctttctccgctcttcaatacaacatga

SEQ ID NO: 288288 - DNA, 122 bp, Homo sapiens
gtcaatcatgtaagtcaaattttcaaacacctccggagaactgttcctaaaatgatgtttcgaatcacaccacaacagtgcatataattattaaaattttccacttttcagaggatatcaat

SEQ ID NO: 288289 - DNA, 122 bp, Homo sapiens
ggcgggggaagggtgcgggggcgcatggggtgatcctgattcggctcccattttcccgaacgggcaccctgaggctcctggcccggggcatggtgttagaaatcatagctgcggagaagccc

SEQ ID NO: 288290 - DNA, 122 bp, Homo sapiens
ccaaacagagaggggccgccatgaaccctaattgtttgcttggagtaatcaattattctccgtttgtgtagccatgtgaggataataagcagccaccatctgggcggctccaggaggctggc

SEQ ID NO: 288291 - DNA, 122 bp, Homo sapiens
gccccctggcggccattacggatttccgcctccctcacagaaggcagtcactgcaacgtgcgtggcctcagttgcgtcatatccggcccttgcgatcagggcttgaggaacccgcgccatga

SEQ ID NO: 288292 - DNA, 122 bp, Homo sapiens
ggagatagcctggcccggaagcttctctgctgacccggaagcagagctgtgcagctgaggcgccgccgtggagccgccttggagccaccgccccctcgccgcttcgccgctgcgttggggaa

SEQ ID NO: 288293 - DNA, 122 bp, Homo sapiens
gggcaggcacccgctgcatcggacccacaggaggtgatcggacagatctgagccctggggcgctcatccctccagctggggctcttgccttgtctccagctgcccagactggcggaatgcgg

SEQ ID NO: 288294 - DNA, 122 bp, Homo sapiens
ctgcggttgctgcagccccccctttggcgggtgccattgtagccgaggtcggcgctgaagcggtgccacagatactgcgtggtgagcgggccctgcaggaccaaggcaaagttggccaggaa

SEQ ID NO: 288295 - DNA, 122 bp, Homo sapiens
tcatgatccacctgcctcggcctcccaaaaaagtgctgggattacaggagtgagccaccgcgcccggccggtagagtttgtagttctgaccaaagcaccaaaccataaagggctcccctctg

SEQ ID NO: 288296 - DNA, 122 bp, Homo sapiens
acgccgcgccagacctctatctcaatgttataacaaggctcaatactcagctaaagtgagcgtcaaatttttatttttattttttcccccgtgacagggtctcgctctgtcgcccgggacgg

SEQ ID NO: 288297 - DNA, 122 bp, Homo sapiens
ggggttcttttttcagatttgaagacaacctaaacatacgaaacagtatctgcgtcatgtcgtaaacagatttccttttatttttccctcaattcctcctcttgcaaagaaatagagttagt

SEQ ID NO: 288298 - DNA, 122 bp, Homo sapiens
aggcagacctgtccaccaccccttgttggtggaaagctactccctcctccctttttaacacgagaccagcacactgtaagggtgctgtggggcctgcaatgatggctgtgagctgcaggact

SEQ ID NO: 288299 - DNA, 122 bp, Homo sapiens
tcctgcagagttaaaaagaagacagggggtcctggatactacttggcaaaggagaagggacgatattttcagtgggtgctgctctagcagggctctgcaagccttacctgcaggagctccct

SEQ ID NO: 288300 - DNA, 122 bp, Homo sapiens
cctcctgaagctcatctcctcttgtttctttcttccttctctttatgctggctgctctcccggccacttgctacacgcctccaatcttcattctctcccagtcccgcaaaggcttttccccc

SEQ ID NO: 288301 - DNA, 122 bp, Homo sapiens
ccaccagcggataggcgatctcgttgtagatctgctcggtgacgtggtccacgtggtaggcgccgtcgaaggtgaactgcttgggcggctcgtcggcggcgcccgggttctggatgcagcac

SEQ ID NO: 288302 - DNA, 122 bp, Homo sapiens
ttctgggggagctgggagcagtacaggatggaaccgccaccctctccttaaaacccaacacgagttaccgtttcttccccctgtccctctgctagggtgccttcctatttggatcatcactc

SEQ ID NO: 288303 - DNA, 122 bp, Homo sapiens
gcgccactccgcggcctaccgcgcagatcctctacgtgtgtcctcgcgagacaagctcaccgaaatggccgcgtccagtcaaggaaacattgagggaaattttgagtcactggaccttacgg

SEQ ID NO: 288304 - DNA, 122 bp, Homo sapiens
gatgctggacaccggaagcgagccctagaattatggcgacctccgcgacgtcgccgcacgcgcctggttttccagctgagggtagatgcggttactatgtggaaaagaagaaacggttctgc

SEQ ID NO: 288305 - DNA, 122 bp, Homo sapiens
agtaatggtgccaattcaagtggtgtcagatggtttctacctgtcctccctgaccagggccggccttggggcagcaggagagaaaaagagcccgttggcaggtgcttgatcccagttgtgac

SEQ ID NO: 288306 - DNA, 122 bp, Homo sapiens
ggtggacgtgagcggcaccgggaccctatcccagagctaccactacgaggtgtgtttgaccggagactcaggggccggcgagttcaagttcctgaagccgattattcctaaccttttgcccc

SEQ ID NO: 288307 - DNA, 122 bp, Homo sapiens
tgattccttatcatcacacacgttttttaaaaactgcggacaggccgaaagaggaggagccgccacaaagcccgccacgtcttcctaaattggtttaccgcctgaaggcattggtgccccat

SEQ ID NO: 288308 - DNA, 122 bp, Homo sapiens
cacatggctggaggagcgtctctccgccactgcgcacattttgcagcctgcaccggccaacggtgagtcctctaggaagctctctcaacgtggcgccccatgcctgcctctggccagggctg

SEQ ID NO: 288309 - DNA, 122 bp, Homo sapiens
ctacgatggtaaccaaagctgattgactgggatgctttgaagaggaacaagtgtagtatccggtgtcgtttcttgccactgatgatacaaaagcaaacagaatccgtatcatagttctgttt

SEQ ID NO: 288310 - DNA, 122 bp, Homo sapiens
gcggcgctgctggccgggctgggccgctcgtgcgcggggctgtgactcaccggccggcgccgcagccccgcaatctgttgataactcggtcccagctcggccgctgccctcgcgaatggaga

SEQ ID NO: 288311 - DNA, 122 bp, Homo sapiens
ttatcattgagctcagttctgcacaaacaagaatgtgttagggagcaattggtatattgtcgactggtttggaaacaggcagcaagaagcccctttgataaacactcctctctgacaggtac

SEQ ID NO: 288312 - DNA, 122 bp, Homo sapiens
cccaaacaggtattattctctcttaaaggaaagagaaggaaccaagataagggccctactcgaagtttttcagtaacagggtcaagacaggaaaagaaagctccctgtcaaggtctatcctt

SEQ ID NO: 288313 - DNA, 122 bp, Homo sapiens
ccggcgccgccacacctggccccaggatggcaaaaatggtctcctcttccgcggagaaagcgtcctccgcggcgggcccggcgccctgcgtggagtgcggcacgcgagcgagcttctccttg

SEQ ID NO: 288314 - DNA, 122 bp, Homo sapiens
tcagttcccagattcctgctcggctgtgacctctggcaagcattcttccatgctcctccccgaggttatcaccagggccactgcaggcctgctatggagtcctaactgcactgtgaggtctt

SEQ ID NO: 288315 - DNA, 122 bp, Homo sapiens
ctggtctgcggcattggaaacttcatctttatcgctgccctggtccgctacaagaaactgcgcaacctcaccaacctgctcatcgccaacctggccatctctgacttcctggtggccattgt

SEQ ID NO: 288316 - DNA, 122 bp, Homo sapiens
tgccagcctccgctgagagcgccaagacattacagcaagcgacggtaggagagcttgtaacgtgaagcaccaccacacctctgtacttcaaacttaaccacagagaccgactcccaaaccag

SEQ ID NO: 288317 - DNA, 122 bp, Homo sapiens
gcctgcgttcttgccggtccatgtttggattagcatgtgagtttaaacatagtgctgatgcggcgattcttctagaagcacatccttctctgagctgaattgcttcatcacacacttccttc

SEQ ID NO: 288318 - DNA, 122 bp, Homo sapiens
cctgccatgaatcagagccaccggaagagccttgggagcacggagggtgaaagtgaaagccggccagggaagtactgctgtgtgtacctgcccgatggcacagcctccttggccctggccag

SEQ ID NO: 288319 - DNA, 122 bp, Homo sapiens
tcctcccgacatcactgaggaagaaatgaggaaactatttgagaaatatggaaaggcaggcgaagtcttcattcataaggataaaggatttggctttatccgcttggtgagcaactgttggc

SEQ ID NO: 288320 - DNA, 122 bp, Homo sapiens
ctcgggcgtggacagtggcgtggagagcacctcggacgggctgagggacctcccttccatcgccatctccctctgcgggggcctcagcgaccaccgggagatcacgaaaggtaccgcgggcc

SEQ ID NO: 288321 - DNA, 122 bp, Homo sapiens
tgttttctgggtttctttttttttcttcttcttctttttttgacaagagtttcactctgtcgccaggctggagtcagtggcacgatttcggctcactgcaacctccacctcccgggttcagg

SEQ ID NO: 288322 - DNA, 122 bp, Homo sapiens
tgaaaccagatgctttctgagtgggtccaaaatgagagccccaactcaaagtaaaaactgcgcattctttatccatcattcaccaaatgtttatttattcattcaccaaatgtttactcagc

SEQ ID NO: 288323 - DNA, 122 bp, Homo sapiens
ctctgcggatcaatggggttatgggcactttgctccctagctgaaagtgtttttcccccgcgtctttcagcagccttgggcggttaagccaccgtgtttcagatattggttagccctaaccc

SEQ ID NO: 288324 - DNA, 122 bp, Homo sapiens
atccaccgcatgcagcaagaggcccagcatgtgctgttcctcagcaagaaccaggccatccggcagccagaggtgcaggcagctcccaaggagaagtctgagcagaaaaaagcaaaaaaagc

SEQ ID NO: 288325 - DNA, 122 bp, Homo sapiens
cctcgggggccaagacagctgatggccgcatccgggggtgtggacagatgggaagaggagcgcaccagtcaatgcgtgagcccatttccggcaatcagcgccacgacggtaccaacgtggag

SEQ ID NO: 288326 - DNA, 122 bp, Homo sapiens
taaaacaggcctcactaagtatttttgtgtacttttttctttgttactgtcatccattgtcgttccattaggttatttggggcaggctaacaggacttacacgatccttcctgagaggtccc

SEQ ID NO: 288327 - DNA, 122 bp, Homo sapiens
ccatggccccttgagctccatctcatcattattgtattcctgttatacagatgagggaaacggaggtataagtagtcaagcaacttgcccaagatcacagagctggcgagtgtgggtcccgc

SEQ ID NO: 288328 - DNA, 122 bp, Homo sapiens
ggcgcggacgggggaggggcgtggggctacgctctaccgcgacttcggccgcactggggccgacacagcaatcggtgccgcctccgccgccaccgcctcggtcacctctactgccgccgccg

SEQ ID NO: 288329 - DNA, 122 bp, Homo sapiens
ccttggaaacacccccgcctcaccccgggccggggagcggctggagcaaagatcctggggcgcagataagtgtgggctgcccatgtggagccccctgagcagagggaagcagcggcgggcgg

SEQ ID NO: 288330 - DNA, 122 bp, Homo sapiens
cacctcatcctcacaatagctcattgcacttggcatcccacactatggagtcggtttttccgagatctttctttagtcaatatggtggcaccttgcgtgatcttttttttttttgacggagt

SEQ ID NO: 288331 - DNA, 122 bp, Homo sapiens
cgcgtgggaccccagcccccacctgcaggcatgcacgaccacgataagcttgtttctctgcgagctgtgccggatggtcagctggatctgccccagtggagactgtcccagggtcgtcccgc

SEQ ID NO: 288332 - DNA, 122 bp, Homo sapiens
atttctagacaagacttgcagggccgcccgtcacagaaggaaaaataaaacagtctgacgcgctagttcaggctccagcagcagccaagcatctcgccagaccccgcggcagagagcagggc

SEQ ID NO: 288333 - DNA, 122 bp, Homo sapiens
gaggctgccagggacccgccccgcacaaaggtcgaccccgctgcgccctgggcaggccgccgtgaccgccctgcgtgttcccagggagcctccaaggcccctccccggccctccccctggca

SEQ ID NO: 288334 - DNA, 122 bp, Homo sapiens
ggcagtgcgtgggctgagacgtttccgggggtcctctgaccggggatggagcagctactgcgtctttataggtggaggaacattgctttgtaagtaagctcccagccttgcagtggcttgac

SEQ ID NO: 288335 - DNA, 122 bp, Homo sapiens
ctctaactggtggcgcgttggcggaggccgacgaaagcctcgggtggggcgtgagcgccgcggggcattctggacctgctttgccttaggctgtgcctaattcgaaaccaaagcgcgggacg

SEQ ID NO: 288336 - DNA, 122 bp, Homo sapiens
gccagatgctccggccacctcaacctaccgcgaagacgcggggcaccaagcagaagacagcggccaaagccccgagctgggagtcaggagacctgcgtctagtccgagccctcccgcgggcg

SEQ ID NO: 288337 - DNA, 122 bp, Homo sapiens
tcccctccaggcagatctggatcgccggcgcctgggcttagggaactggggcttggagcccgcggtccacgggcgcaggggcggggcgggcgggggctgctgaagaagatccctccccacca

SEQ ID NO: 288338 - DNA, 122 bp, Homo sapiens
acctcccgcgttcaagcaagtctcctgcctcagcctcccaagtagctgggattataggcacgcgccaccacacccagctaattttgttatttttagtagagttgaggttttaccatgttggc

SEQ ID NO: 288339 - DNA, 122 bp, Homo sapiens
gctgggcttgttttgagacggaggtcgggggcccccagcgtctctagactggggtggagccgggaagggtcgtgcgtgagtgggggacagtgtgtctcgctcaaccgctgtccgcgcagctg

SEQ ID NO: 288340 - DNA, 122 bp, Homo sapiens
aagttgtggctcgcgcgtcttcccaggactcccccgcgccggagaggcccgcaggaccgccgagcccacactccgctcccgcccgggccccgctcccccgcgccgccttggtacgctccggc

SEQ ID NO: 288341 - DNA, 122 bp, Homo sapiens
gttttggttaagtgtataacctgaaaacagggaatccatggacgaagcctcctataatggcgaatactgctcctattgataaaacgtagtggaaatgtgctacaacataatatattgtatag

SEQ ID NO: 288342 - DNA, 122 bp, Homo sapiens
ctgtgcagcccgtggttttacagggcccagagaacctttggaggcaggaggagctgtactcgcattctggctccgtccgtttaccagctgtgtgaccttggcaactgagggcctcagtttcc

SEQ ID NO: 288343 - DNA, 122 bp, Homo sapiens
gaaccaagtgaagagggcagtcggaccgattcaacattgacctctgctcttagatcagggcgttctcgtatgaaatcccattttccatggagctcttgggaatctcggagacagagttatcc

SEQ ID NO: 288344 - DNA, 122 bp, Homo sapiens
tggctctgggtgctagacggccactccagccgggcaggctgctgagcctggcctggatggcggccagtgctatatgaccctgacatccccagctccctgcaccagggcacagccctcagccc

SEQ ID NO: 288345 - DNA, 122 bp, Homo sapiens
gtgctgggttactgtaaaccaggatgagagagccacagccagagagccacggttcattctcgcactggtcatgtgaaaatcacacccccacagccttgccttaggctttgaaggaccccttc

SEQ ID NO: 288346 - DNA, 122 bp, Homo sapiens
caagctgagggcagaggaggcctccctgcaggactccctgtccaagctgagcgccgtcaacgagagcctggctcaggacaagttggatctgaaccgccttgtcgcccagctggaggaagaaa

SEQ ID NO: 288347 - DNA, 122 bp, Homo sapiens
gacacccatgagtctaatgagatcaagtggcctgagtgggttgaagtccttggatcagaccgtggaagctggaatggagagagatttcggaggggcagccagacctggtgaggaggaactgg

SEQ ID NO: 288348 - DNA, 122 bp, Homo sapiens
attgagaatgatatctttttattttcgaattagttattggtatatgttattggttatatacggatctttaggaacccttccttatgttaccttagtagttgagttgttcatcattctccagc

SEQ ID NO: 288349 - DNA, 122 bp, Homo sapiens
ggagcagatgtgagtcattcatgttagtataaaaactatggaatgaaacccattatggcccggaaagcagtgtaaagcagcatatggagcaaatgcaagctggaagcaggaggaagctgtga

SEQ ID NO: 288350 - DNA, 122 bp, Homo sapiens
gctaatctgctgagcctggagattgtccttttagaggtttatgttctggattccagaaaacggtcaaacagcgaataaatgcatctttatatttgtgtccatcttaacctggtcaaggaaaa

SEQ ID NO: 288351 - DNA, 122 bp, Homo sapiens
gagcggtgcccagccgcctgagcaggactggagtcttctcagctgggccctgggagtggacgcctccgggaagggatgggggtaggggctctccccaagactctgttagggctcagcccatg

SEQ ID NO: 288352 - DNA, 122 bp, Homo sapiens
caaaacaaaacaaagcaacacatgcataacaattatttgaatccagcaccagaaactccccgagggccttacagcacctttaactacggctcctttcccgccctaaactcccgaggtcccgc

SEQ ID NO: 288353 - DNA, 122 bp, Homo sapiens
agcggcgctaacgtgactgactaactaaccaatccaaagtctcaatctccctgagaggggcggagcgtacccgggccagccctcgccgccgattggtgatcgacctcagggttgcaggggcg

SEQ ID NO: 288354 - DNA, 122 bp, Homo sapiens
tgctgctctgttaccggggccccacctcccttggccccaaggcatctctgcacaggtctccgattggtgcacagcacagcctggccttttagggactgttgtcgcgcgtttaaagtgatagg

SEQ ID NO: 288355 - DNA, 122 bp, Homo sapiens
ccagaaggacctgccaactttcagggtgggagagtgggccatgttcccaaagaatgcctgcgtggtttactgagcctcactgactttggaaagcaaagcatgtgagtgcttaagcccacttg

SEQ ID NO: 288356 - DNA, 122 bp, Homo sapiens
tagggcgagcgcagctgcaggggacccagggggttgagggggagggagaggggccccaagcgtaacaggagggccaagggggtcttcctgaccgggagccacccctcccctatctttgcccg

SEQ ID NO: 288357 - DNA, 122 bp, Homo sapiens
ggcgccgcaccctcgagtggccctggcctggcaggcctggcagggtatgcggctggctctcgaaacttccctcggggatctcttgtctgctcccagaggctttccgtcgcttgtggtcaggg

SEQ ID NO: 288358 - DNA, 122 bp, Homo sapiens
aggacccttaccctctagacatggcctcggtcccctgcaaaccccagccccgtagccctgcgaggttacagacagcctaaacgccaccaccacagggcctgtgccgtgcccctgacccgggc

SEQ ID NO: 288359 - DNA, 122 bp, Homo sapiens
tggccgtgggtatttcaagaacacaaattgcccgctccctcatcagaagcagggccagagcgtgtctggggctgtttctggttgctatagagatgggccccaccctgaagttcccgctggga

SEQ ID NO: 288360 - DNA, 122 bp, Homo sapiens
tttcatgaagatttgggctctgtcctcagagcaacaggaagcccactgtgtacattatcccgagcaacaggcattacattactctggtcccagcgtggagaatgagttagcgggggatggga

SEQ ID NO: 288361 - DNA, 122 bp, Homo sapiens
cccgtgccccttctccgtgctgtttcctagggctgtgtcccgggcagccacccctgttcgcgctggcgcttgagggctgagatgagcaacctggtaaaatgagttcctggattgtttgcttg

SEQ ID NO: 288362 - DNA, 122 bp, Homo sapiens
gaggctgaggcaggagaatggtgtgaacgctgcggggtggagcctgcagtgagccgagatcgcgccactgcactccagcctgggtgacagcgagactccgtctcaaaaaaaaaaaaaaaaaa

SEQ ID NO: 288363 - DNA, 122 bp, Homo sapiens
ggttacatcaaaatgcagaagagagtctagagagtttgcccgcgccccacccagtttccccgttattagcgtgtgccgtttgcatggggcatgtgtcacagctactaacccgatacgcatgc

SEQ ID NO: 288364 - DNA, 122 bp, Homo sapiens
gcccgtgcgtcgggccaggctcagtaacgccttctccaagtggatggcggggtggacacgcgtcccggcgccccgggctccctgggatatgtagttcgcgacaggacgagcggaaatactgc

SEQ ID NO: 288365 - DNA, 122 bp, Homo sapiens
tccaggcggaggaagcagcgtgcgcggcgggtgtggacgctcctggagcgaggcggggggcggcggcggtgaggcctagggagggcgcggtccagggtcccggtgcctggctgcggaattta

SEQ ID NO: 288366 - DNA, 122 bp, Homo sapiens
gattcaaggaagtgtagcgcaggagatctgttgaatgacgagcaagtaggctcaggacggcgtatccggggaattctgggaaatgtagttcacacgctgcgcggggtaggggcacttccgct

SEQ ID NO: 288367 - DNA, 122 bp, Homo sapiens
ccttgcagttgattgtggagccctgacaggggcgtttcagagaaagtcaggagctgccttcgtgtgtctggatgaaggggccacggcaagatcctcctggctcaggggttcacacctgggca

SEQ ID NO: 288368 - DNA, 122 bp, Homo sapiens
tgggtcgctcagtctcccagccgagctgctgccggaaccccggctcctgtgcccggcgcccgcccgggccagaagttaggtttcgaattcactaaaggtttaggattaatagttcgtgaaac

SEQ ID NO: 288369 - DNA, 122 bp, Homo sapiens
acggggaccagcctgggcggcagtatttacggtaacgaaagccagctgtatttacggtagcgagggctggaccggcggcggcatttacggtaacgggggccgggctcgcggaggcccgtcgg

SEQ ID NO: 288370 - DNA, 122 bp, Homo sapiens
ggaagggaactgaagactcaaggaggtggcccaggacacttgctgtgctcactgtggggccggctgctctgtggcctcctgcctcccctctgcctgcctgtggggccaagccctggggctgc

SEQ ID NO: 288371 - DNA, 122 bp, Homo sapiens
ccgccgcagcggagggggttgccctgggtctcgtttcctgcccgggatgggattgattcacggtcccagagagggaaggggaagggggcggggctggaatggaaaccagattagagacggga

SEQ ID NO: 288372 - DNA, 122 bp, Homo sapiens
agtaatgctttatttataaacacagagggactcacaggccatagttttcccacccctaatcggccctttcaattaaaaaatagaagctgggcttatgacaaatacagtccttggccccagtt

SEQ ID NO: 288373 - DNA, 122 bp, Homo sapiens
atcgaggacgccgagaagtactccttcatggccaccgtcaccaaggcgcccaagaaggtgcgggggctctgggtggcggcgggggctcgggctccggcctcgcggaagggacgcgagcaagc

SEQ ID NO: 288374 - DNA, 122 bp, Homo sapiens
ttctgggggcttccgtgtgcacctctgtgcctccacgtccctcctcacacggtgactttccgatgatgcgcctgcctcccctgtccatggataatgaattcacccaggacagggctttgtct

SEQ ID NO: 288375 - DNA, 122 bp, Homo sapiens
acaatttatttagcccgacatctagccggtctccggcaggaccctgcaccgcgtcgggatcggacccttccgctggggcggcctcctgcgtcaaggccagcaggaaccttcctgtcgccctc

SEQ ID NO: 288376 - DNA, 122 bp, Homo sapiens
cggagggcggggcctgatcttcgcgacagccgggagggggcgcctctcccagccctcggccgtgtcccggtctgactcgcccccgtctgctcagcgctatcagcctgcagctggcacacagg

SEQ ID NO: 288377 - DNA, 122 bp, Homo sapiens
cagcagccttccggctgcggagctgctccaggaagtctcgggctccggaggtccctctgccgcccctaacccctgcggcgcccagtgccgcgcagagccgcattcgccctcctgcaggggtg

SEQ ID NO: 288378 - DNA, 122 bp, Homo sapiens
ttccctccttcccctggcctctggatgcccacgcctgcctcggaccacaggcctcagccccgcctccgagcctcatgcccgctctgcagcactcggccctagctccccaactcagatcgcgc

SEQ ID NO: 288379 - DNA, 122 bp, Homo sapiens
agggcgagagaagagtgctcgcactcagggatgtgccccagagggcgtggggtccggttccggccacgaagaacagcctctgtgtgagttgcaggactgaggtcctctgcaatttctcaggg

SEQ ID NO: 288380 - DNA, 122 bp, Homo sapiens
aaaaatacatttgcaaaaagagaataatttcattttcactgattcaaaggtctatcttttcgagtattataaacttacatagtacaaaaagattggtaaaagggatgagaaaaataaagggc

SEQ ID NO: 288381 - DNA, 122 bp, Homo sapiens
cgtatctggcaacggaagtggagttacgtggaaggcggaagcgtctagagctatttcccccgtttttgctagagaccaaggacccggaataagcactgagcctgcggtaccgggcctccccg

SEQ ID NO: 288382 - DNA, 122 bp, Homo sapiens
gggatttgggctaaattcctggcctggcccacaaagaagaccaagcggtcagtcccattccgtcccatcctgatttacaggaactcacaccagcgatcaatcttccttaatttgtaactggg

SEQ ID NO: 288383 - DNA, 122 bp, Homo sapiens
cacgtcccaagtgctacgcggaggattagagcaggcggtgcgctgggggcgggagcagcgcggagcccggctcggccacaccgatcgcccgccgccatgggctcctcgcaaagcgtcgagat

SEQ ID NO: 288384 - DNA, 122 bp, Homo sapiens
tggtttgagaattctgtctaatccccatggtcactatctcattcttctcattatctcaaccgcccctttcattccccatctcctaatcagtgataccttaccaactgttcctcggataattc

SEQ ID NO: 288385 - DNA, 122 bp, Homo sapiens
taacttgactaacttagtaacagatgtttagcatacattctctttttctaagtgaagaatcgcctggaatttcttgaaacacccttatacatgcataaaactgtaggtggtatttgtgtaag

SEQ ID NO: 288386 - DNA, 122 bp, Homo sapiens
cctcccagctggcccttgaacgacggcacgtggtaatccgccactggccccaggggccggcgttcacagggtggcacgcatgccctctcttggccctcgctcggacctgccctcactcaccc

SEQ ID NO: 288387 - DNA, 122 bp, Homo sapiens
ctagagtgattttctcatttgaaaatctgcccatttgcccatttattctcaaacttgaatcgtctgcacaaggtcacagaatgaatttgaagtcagctgtctgcccaggaaccactcttgct

SEQ ID NO: 288388 - DNA, 122 bp, Homo sapiens
acagggaagcagccggatggtaagtctgtgggcccgtcctcccttcgctggcccagatttcgggctccgactcctacctggagtgtgaatggcagtccttgacggacagccttcaccgtttg

SEQ ID NO: 288389 - DNA, 122 bp, Homo sapiens
cagagcctccaccatcatcactcgccgggactctgcagagcctccaccatcatcactcgccgggactctgcagagcctccgtattagtcagggttctcctgagaagcagagccaacaggata

SEQ ID NO: 288390 - DNA, 122 bp, Homo sapiens
tcccggggtcccctcataacggccctgcgaccttgtgcaagttggttaacttcagcttcacgttttttccgtcgccacacgaggatgccagtaccgcccgcaccagcagccagtactccgct

SEQ ID NO: 288391 - DNA, 122 bp, Homo sapiens
gcggcaccgggagaaagtggcggtcagggatggagctgctgccatgacaaccccggcggtcggggcccgcgcgcgtcggggctgctcccgggaggaaggcggcgcggaggccgggggcggcc

SEQ ID NO: 288392 - DNA, 122 bp, Homo sapiens
cagatatcaaataaaagatgaaataaacaggaaatccatagaacgtgaacaataaggaaccgttcaggatggccaaaccgccgtctgcgctgttttctcgccagggctcaggcctgggaacg

SEQ ID NO: 288393 - DNA, 122 bp, Homo sapiens
catagcaagtaggctgaacatcagcatattttatattggttccctgagaccgaatccccacgaggcattgtgaatagggccagatgatacctacacatgtggttggttgtgttagaacagaa

SEQ ID NO: 288394 - DNA, 122 bp, Homo sapiens
gttataaacacaactctgttaacagaaaatactgaactactgtcaagtctactacctatacggtagttattatcagatgagaagtgcaaagaattataaaatctattcaactaattacttga

SEQ ID NO: 288395 - DNA, 122 bp, Homo sapiens
aagggttgggagacagggccatggggagaggagccgccgctgccgctgctgcctcggggacgctgcctccccgtgggcccagtccctgccttatacccaggtccagggagggcgggggttcc

SEQ ID NO: 288396 - DNA, 122 bp, Homo sapiens
ccactcgccacggaaaatggtcacacgcttttgtcctcaagccgaacactatcagaaacacggggtccctggaagccgccatcttggccattggcggtggcgcacccacccccgtgctactg

SEQ ID NO: 288397 - DNA, 122 bp, Homo sapiens
cacacatggcagtcatggcgcatatgtgtctgccttccctctcctcctctccacatgagccgccctttttggtgattcagctgatgttggttgcttgtgagcatccagactgctcactgttc

SEQ ID NO: 288398 - DNA, 122 bp, Homo sapiens
accagcagcgactggccccctccaggcagggcgtgaggatggcaattccaacagggccctcgggcctctggtgtcccccatggtgcagggggatgacaaggtgtttcgccgcgcgccctcct

SEQ ID NO: 288399 - DNA, 122 bp, Homo sapiens
cccggagcccagagagctgcagtggccccctccagtccccacgtccccacggggacgccccggaggcagctccttcgtgctgtcttggcccctggctgctgccctcgcccacggggtactca

SEQ ID NO: 288400 - DNA, 122 bp, Homo sapiens
ttcctgattgacattgtacttcaacctctcaactctgagttctagtctagtatcaccagacgggaaaggctctttttcatactttaatttgtgtaaagctgagaacctgaggccgggcttat

SEQ ID NO: 288401 - DNA, 122 bp, Homo sapiens
gcctgacttccggcaccgccccgctcccccgcgcggtgtttcaaagagcctgagcgactccgtgcagcgaaccgcgtgccctccgccacctgttcctggcttctcatttaatgaagttgcga

SEQ ID NO: 288402 - DNA, 122 bp, Homo sapiens
gtctcagtaagtcatcactctcttacattggcccccgatgattagactgttgattttttacgtggccccagtgaagctgtctatgcttcaatcctgcttcatagcaaaagtatggctcctag

SEQ ID NO: 288403 - DNA, 122 bp, Homo sapiens
gggagctgggtgcggatgtcttcggagccgatgaagatgctctccaggtggctccaggttcgctggacctcaaaccagatggagatgacggagtccgccgtggacagcttctgctgccagct

SEQ ID NO: 288404 - DNA, 122 bp, Homo sapiens
tgccaaacccgtgccccagaacctcgatttctccccagacaccaactccaagttcctccacggggatgtgggatttcagtttatgctcttgcgtccctctgcagccacaggccgcagagccc

SEQ ID NO: 288405 - DNA, 122 bp, Homo sapiens
cctgtcctcatttagggccgtgggtatccaggcttgagggtggggcctttgctggggaatcgccctcttctacccagtatttccctgtcttctgtccatatcagcaactcactcaaacctta

SEQ ID NO: 288406 - DNA, 122 bp, Homo sapiens
gcggctctggggaaggggccagatattgaatttggggcctattgaaagacctcagggcctcggagcagggtactcagcccctgggtgctcctgctggggagcctagaggctcacggtgcctc

SEQ ID NO: 288407 - DNA, 122 bp, Homo sapiens
caccaccgggaccccaggtccgtagccttgagggcacctccttcctcttgcgggaggccccggctcggcctgtgggcagtgctccctggacgcagtctttctgcacccgcatccggcgttct

SEQ ID NO: 288408 - DNA, 122 bp, Homo sapiens
atataacaaggcagttagttataaatgaacataaccttttgagacctttggatgatggggcgtggagccgcaccacacttgcggccatggcagatcctgtttctcgtcctgtggagggagca

SEQ ID NO: 288409 - DNA, 122 bp, Homo sapiens
gccctacctcagtgcatctctgcagggccgtaccagctcccaagcttccctgcaggattgcggaggtcttcgctgcttctgcatcactgtttagcatctccttctgtcccatcctatgcctc

SEQ ID NO: 288410 - DNA, 122 bp, Homo sapiens
ctagtgttgtaaatgttaaggatatcttgaatgtgtttacatttggtagttattaacacacgtctgcaggtaaacatgatttttctggttatcctttgcctttaggagagaaaaagaggcaa

SEQ ID NO: 288411 - DNA, 122 bp, Homo sapiens
tcccaggggcagagaagggaggaagagggagtgtctgagggctgaaaaatgcagtcgactcgccctctgctggttaaagatccgaatttgtcgccgccaaaacaacggggaatgagaaagca

SEQ ID NO: 288412 - DNA, 122 bp, Homo sapiens
ttccttcagttatttcaaatgtcgcctctttctactcagctgttgaagtcaaaaatctggcgtcattcttgacctcttcttttacctcaagtctcaaattcagtccattgccaaattctgtg

SEQ ID NO: 288413 - DNA, 122 bp, Homo sapiens
ccggtggtctgggggagaggctgggcctggcgcgggacgaggcgaagcgccggtggccgacggcttctgaggaattatcttttacttggcgccacacggggcggggcctcctgctatgctgt

SEQ ID NO: 288414 - DNA, 122 bp, Homo sapiens
agctctgccagccttcatctgccacccttggactgggtggagcttgtggaggccctgggccgcccgtcgatgcctcccattgggggtcgccctcccagtgcccagttccctgctgggcactc

SEQ ID NO: 288415 - DNA, 122 bp, Homo sapiens
gattcagggaagcagaggcaaaacagccttggagggtgaaacgtctaggtggggtcggggcggggttggttcagacccccaaacctgcgctgttgatggaatcaggggaacaggcggtggag

SEQ ID NO: 288416 - DNA, 122 bp, Homo sapiens
tggagatgagacatgtgttttttgtgacagtggatctcctttctagttagaaacttactacgagtaagttttgaaatcagcctcatttcttgaactcagcatacaggaagaacagtgcctcg

SEQ ID NO: 288417 - DNA, 122 bp, Homo sapiens
ggcggagcggggagaggcgcgggaggccgcggcgggcggcccgggctgggcgtggaggagcgtcctccccgcgttctcaggcctcggcccgggctgcccgcctggaccccgttgcggggtcc

SEQ ID NO: 288418 - DNA, 122 bp, Homo sapiens
aattgaggaagaaccagccccaatgtggtcatgccatatgacactgcagaacccctagttcggaatggagtcaaaactgaaaagataaggcaaccaggctgatttattgtctgggtccctag

SEQ ID NO: 288419 - DNA, 122 bp, Homo sapiens
gcagggactgagggaggggctcccgggtctggggtggaccccaccattgggggaagcaagcggagggagagcctcgagggcagcgtcccatctgcaggggtgcgcggttgggggcggtgggc

SEQ ID NO: 288420 - DNA, 122 bp, Homo sapiens
ggcaagctgtggttgagggtggttgggtcagcaggtaagagccttatgaccagctctaaacgcctccacggtgaggagcacctcgagctaacagaccaagcaccaaagggtggaacagctca

SEQ ID NO: 288421 - DNA, 122 bp, Homo sapiens
cttctccgtgggtgctgtgccccgggccctgcagcctcagctgggtatcctgcggtacttcgcctcctacatggagcagcacctcatgaaggtgtgagggctggggctgtggtacattgaaa

SEQ ID NO: 288422 - DNA, 122 bp, Homo sapiens
cgctgaagcaccttctctttgtgttccccattcccttcgagttcatggcgatggctgaatcggtgaacttgtctttagtagcgtagttgaagtcagcatttcggaagtgaacaagcatgaca

SEQ ID NO: 288423 - DNA, 122 bp, Homo sapiens
aagcaggaggctccagacagcaggagatggaaacggggcgttgggcaaggacggtgccgtcgtgtggtcactaggtggcgatgcggctccgtgctacccgccccagatcgccccgagcctct

SEQ ID NO: 288424 - DNA, 122 bp, Homo sapiens
gacgtgacatcaactccaggtcgccgggcgggcgccgggcgggcgcatgcgcagagggcgcgggcaggaagctccaccctcactccaggaagctctggcttcgtttgtgaaacccgacggga

SEQ ID NO: 288425 - DNA, 122 bp, Homo sapiens
ctaagtctcaggaaagcgttagctacagaattctagattcaaaagaaatccaccaaaaaacgctgtggaggactggttttgcctaaaagaaagagcagacctgaacttgactcctcctacgc

SEQ ID NO: 288426 - DNA, 122 bp, Homo sapiens
catacatactcaatcccagctctgcactggaaagataaagacagtcttggatttcagtggcggccttcttgtaccacgtttggttttgtttgtgctgaagttttggactcttggttagatgt

SEQ ID NO: 288427 - DNA, 122 bp, Homo sapiens
tggccttctcctcacacacctttcaccgtgaaacgggcattcgcccgtgtgtgagttgatcggcagtgatttctcttccctggaagtgacccagaatccattcctgggcggctggcgtccag

SEQ ID NO: 288428 - DNA, 122 bp, Homo sapiens
gacgccgagcggagctctcggagctctcggggctctaggggcctggggctagctgctccgcggcgcggggagctccgggggtccaaggaggagccgccgccgccgccgccgtgacgctgggc

SEQ ID NO: 288429 - DNA, 122 bp, Homo sapiens
actcgcctgtccgccccagagctcgctttccctcccgggcggctgtaccgttgtgggctacgttcagagaagtcccactattgccatgagcagggacataatagagtttaaaggccgccgta

SEQ ID NO: 288430 - DNA, 122 bp, Homo sapiens
ggttccaatatcttggagcctacgtcctcacttcttcaagagtggcccgtagaccaacagcgaggtcatcacctgggtgcttgttaaaaatgcggaatctcaggcccaaccgcggatcagaa

SEQ ID NO: 288431 - DNA, 122 bp, Homo sapiens
gtttcttctcccgaaccgcttgccacgtgtccaagccaaagctgacgtgtttcagcagggcgccgccccctcccaggccccgccccggccccccagacccctcaccgtgtagtgtatgtgaa

SEQ ID NO: 288432 - DNA, 122 bp, Homo sapiens
ctcgcgccttcgccctgggtaggtgaggccgagaaggcaaccgcgaaaaggaggcggaaacgcctcctacccgacccccgaaaagttgaccgcgaccccgcctcacatggcccctcccaacc

SEQ ID NO: 288433 - DNA, 122 bp, Homo sapiens
gtgtctgcccagctccacaaggtgcctggcactgaggatgtagaaaacacagctctttgccgtttcagaccttgcctatggtacagctcttgactccgtgaggacatttcttacattttaag

SEQ ID NO: 288434 - DNA, 122 bp, Homo sapiens
agagcccgaaagctcccggggccgtgtcttctgggaaacgcgccaatgccctctagtgggcgagctttgaacttccctgaggccctacactgacctgagcaggggaattaaatctccggagc

SEQ ID NO: 288435 - DNA, 122 bp, Homo sapiens
cacgggaaccccagtttacaggggagccggctgcctggcatcccggtgcggccacagaggcgtccttgtggaaggagcctggggaccgctgcggcccatcaagtgtgctgcacgccctccgt

SEQ ID NO: 288436 - DNA, 122 bp, Homo sapiens
aggtgggggggcggccaatcagggagcagcggccgggggcggagctgggccggggcggggcgaccctcgggaggccgggccacccgggaagcctctgctgccgccgcaccggcccgcgcggg

SEQ ID NO: 288437 - DNA, 122 bp, Homo sapiens
gacggtggacactgtgatgcggacggtggacaggcagtgtggacggtggacactgcagtgcggatggtggacaggtggtgtggatggtggacaggcggtgtggacggtggacaggctgggtg

SEQ ID NO: 288438 - DNA, 122 bp, Homo sapiens
ttattcctcctcctgttcctatgtggaactccccaggctgcaggtaaggggcaagaggtacgggattccttagctatttgcaaggttggggagggactactgctctttctcctaggagcctg

SEQ ID NO: 288439 - DNA, 122 bp, Homo sapiens
catgaaaagatgctcagcctgtgagggacacgtagggtggacgtgaggcgcctgtgtggtcggcaggaaggagccgaggtggtggagcgtggggaggagccgaggtgatggagcagcgtggg

SEQ ID NO: 288440 - DNA, 122 bp, Homo sapiens
accgtcgcttgctcgtgtgcacatcttgccatgcgacacccaagccacacgcaggaatcacggtccatctcaggagctcattgttcagttcctctggatgctcttcattctgtctaaactgg

SEQ ID NO: 288441 - DNA, 122 bp, Homo sapiens
ctttgcacctcgcatctgagcaggattgttattcccagtgtggcctccccttgacacccccgccaggactgcatacgaggtgggggtgcccagcacaagctggccggggtgagcctgtcctg

SEQ ID NO: 288442 - DNA, 122 bp, Homo sapiens
tgggattccaggcgtgagccgccgagaaacggatcgcacatggtaatttttgcagcaccacgggttaaatactgtgggccctgaacaccattttcatgtggattccatgatcctcaatgacc

SEQ ID NO: 288443 - DNA, 122 bp, Homo sapiens
gagagagggaggagccatggcaacaggtgccaaaataatcacctcaccaagtctgcgctgcgccctgctggcagcgcgcttgcgcaggccgagctgcccgccatgattggcccgccccgagg

SEQ ID NO: 288444 - DNA, 122 bp, Homo sapiens
agggtccctgaatctcccagtgtggcagagaaagtgaaacttggtcaccgatgcctggaacgtgaggtcatatctagtcagtgtccatcaaagagaatatataaaggaccagaagtttcaag

SEQ ID NO: 288445 - DNA, 122 bp, Homo sapiens
cgagaggagggcaacagagccagcatcttgccagggccccggaggaggggttccccgctacgcctgtgccggaggagttccagtcaccgagcgaggggcgcaagggtgggtgcatcctgcgc

SEQ ID NO: 288446 - DNA, 122 bp, Homo sapiens
gggccagtcggccccaatgcccttaccgccagggtttcattcccacctaccccagcacagcgcaggcgcagaactgcgctccgccgagccccaccagcaggccgcaactgcgcagccgcaac

SEQ ID NO: 288447 - DNA, 122 bp, Homo sapiens
cggcttccttcccggacccctccttcctcttcctaccaggaagggaaaaggctatatccgcgttacgaaagcgaggagaggtccaccaacaggtccttaggaaaaaaaactgagtggctctt

SEQ ID NO: 288448 - DNA, 122 bp, Homo sapiens
gcccgaggctcagcccggatctgcagttgccaggtcagtgcggggcccggagtggattcgcggggcggggcggggcactgcccgcgcccggagctcagcagcagctgcccaggggcgggggc

SEQ ID NO: 288449 - DNA, 122 bp, Homo sapiens
ccccttcaaaagaattcccaaacagatgatgtttgatgttccggacctcgcagcatgatgcgaaagaaagatcatgggttttgaagtaggttagtgcagacgcctactctttgggttatttc

SEQ ID NO: 288450 - DNA, 122 bp, Homo sapiens
atggatagaagtagaaacaaaacttggaaaaaaaacaggcaccaggtctaggagagttggcgctaatgagaagcctagacacttaaaaacttcactggcttcatggcaaatctattcctgat

SEQ ID NO: 288451 - DNA, 122 bp, Homo sapiens
gtcctgctgcttccgtcacatttacaccagcagacacggacacttccatctgtccccattcgtcatcactgtgagatgaagctaagagttcgattcactaagttttatatagccagtaccat

SEQ ID NO: 288452 - DNA, 122 bp, Homo sapiens
ctgccaaagataagtgagccagagcagggcattcgagttttatgtgcctgagaacgaagacgagccatagtacccattaagcttctctgcatgagggaagctttcaaaagacctattacagt

SEQ ID NO: 288453 - DNA, 122 bp, Homo sapiens
gtgatatgtaggggcatggggctggcagcagcttctggagggggcctgggaagggtgtttcgaaggtcttacaggccatctggtggatagcagacccccgcagccatctgcagcagcagtgc

SEQ ID NO: 288454 - DNA, 122 bp, Homo sapiens
agagccacttaaactgtgcattaaaaagaggaactgcggagaggccgccggcaggccgggcggcaggcagtcatcattctcgttgaaatgcttttagtgtggagaaaagttgctggattcgg

SEQ ID NO: 288455 - DNA, 122 bp, Homo sapiens
aatacttaaggcactatggcacttagctttgaagtgacacgaccctgtcttccttccgcccgctggtgggtaaccagtgccttccctgtaacggtaatgctgcagaactgcaaccttttgta

SEQ ID NO: 288456 - DNA, 122 bp, Homo sapiens
gctcagcagaggaaccacagcaatagaatcaggagattctctagcctacaaagcctaagtcgactctcatattcatgtcatagtctttctctttagcacattattcttttactgtaagacag

SEQ ID NO: 288457 - DNA, 122 bp, Homo sapiens
gcctgaaatacccccagaaacagtcacagaagaagaatacattgatgagcatggacacaccgtggtaaagaaggtattgtctagtatatcctaacagggttgattacaaacttcctgtttaa

SEQ ID NO: 288458 - DNA, 122 bp, Homo sapiens
aaagtctattccagctctaagatttgggttttttacaataacaataaactatacgttagacgttggaagcaattatccctaaagtctattccagctctaagatttgggtattttacaataac

SEQ ID NO: 288459 - DNA, 122 bp, Homo sapiens
tcccgcagatcagcagcgtcaaggaccgcaagaaagccgtcctgtccgacatcggtgtctcgggtgagccccacccagcaggtaccccctgcacagagtctacagagggctgtcccggccat

SEQ ID NO: 288460 - DNA, 122 bp, Homo sapiens
agctcccggcgctgcccactgggtacggatcaacaacaagatggcggctagccgagggggcgggggccgggcgtcatagtaaccaggactgcaaagaacccgcccccgagggggtgctatcc

SEQ ID NO: 288461 - DNA, 122 bp, Homo sapiens
acctccgcgatgccgggtgtggtggctcccgcctgtaatcccaacacttcgggaggctgacgcgggcggattgattgagctaaggagttcgagacccccgtctctacaaaaaaattttaaaa

SEQ ID NO: 288462 - DNA, 122 bp, Homo sapiens
acgtcaatgaaaagcacggagtttggcgcaaagctgcctctttcccttgtgcaactacagcgcagacatacattcttattcctggatatttaatagaaacattgactctgcttctgagaatt

SEQ ID NO: 288463 - DNA, 122 bp, Homo sapiens
ttcagcacggcctcagtcctcgactgcaggtctctctcgttctccagctctgcaaacaggcgtctggacacggcctggaggcggcccacagcggccctgcagtggtgaacggacaggccggg

SEQ ID NO: 288464 - DNA, 122 bp, Homo sapiens
gatccacccacctcggcctcccaaagtgttgttgagaggtgacaacttgctagcagccctcgctcgctctctctcggcacctcctcggcctccgcgtctgctctggccgcgctccaggagcc

SEQ ID NO: 288465 - DNA, 122 bp, Homo sapiens
ttaggcctgggctctgggagcggaaattccggcgacagcagggcaaaacaggagctgattcgagctggcagagctgggccatggaaccggtagagacctggacccccggaaaggtggcaact

SEQ ID NO: 288466 - DNA, 122 bp, Homo sapiens
ggctgtgcgggaaggggcgggctggctcgggtcctcctgcgagctgcggccggcgcctaacgtgcagaccaggccccaggccgaggctttatcctggaaccaccagtgtgagagacagcttt

SEQ ID NO: 288467 - DNA, 122 bp, Homo sapiens
ggacgccatgctggacacctacgacctggtatatgagcaggcgatgaaaggtacgtcccacgtccggcggcaggagctggcggccatccaggacgtggtgagcgtggggacggctgggtggc

SEQ ID NO: 288468 - DNA, 122 bp, Homo sapiens
gcctcctttcactgatgccacctcagatccacctcgtcagaggaggcagagggaagactccgaaggaggaatagaggggtgtgtcccacggggcttcaaatcctcatgcaccccgttttcca

SEQ ID NO: 288469 - DNA, 122 bp, Homo sapiens
accccgggctgccagcgcctgtcacctctcccagagccgagacaaggcagttggaggcagcggtggcaggggctgcaggagcaagtgaccaggagcaggactggggacaggtgagggctccc

SEQ ID NO: 288470 - DNA, 122 bp, Homo sapiens
ggacccccaagacggaagaggatggccgcggcggctctgaggagattttggtcccggcgccgcgcagaggcgggcgacgcggtagtggcgaagccgggagtgtgggcgcggctgggtgagta

SEQ ID NO: 288471 - DNA, 122 bp, Homo sapiens
ggctgtctgggagggcagcgtgggtgtggcggaggcaggcgtgaccgtttgccgccctctcgctgctctagaccaggtggaaactcaagcctgcactcgggaacagaaccgcatctgcacct

SEQ ID NO: 288472 - DNA, 122 bp, Homo sapiens
ccaaaatgaacatggcatgctggtgacagtccaattttctgctaacagattgtggcctatcgaaacccggcgctcagctgatttttatttctgccagagataattcagcgcgggaggagcgg

SEQ ID NO: 288473 - DNA, 122 bp, Homo sapiens
aataaattacttaaggccacatgaatttgaagttaatacaggtgagcatttctatagtctcgggaaaaaattttttttaacttttttttttttgagacggagtctcactctgtcgcccaggc

SEQ ID NO: 288474 - DNA, 122 bp, Homo sapiens
agtacccagcggcaaactttagtttttggtgcagttaaggtattgccactaagaaatcgtcgtctctgagaaatatcgaggcttggaaggttgtacagtgcttccaccgagaaagcacctac

SEQ ID NO: 288475 - DNA, 122 bp, Homo sapiens
caaccgcagcctcgtcgacttgggcctggtaactgggcaatgcggtctttcgcggccagtcggcttcttagccctgtacttagtacctccccggccgcgtgagcctccctctcccaacccag

SEQ ID NO: 288476 - DNA, 122 bp, Homo sapiens
caccgctcctggacccctactgccttctgggctcctaggcttgcggaacagatcaggagtcgccggcattggggtaccaggaggacgcgagctgactacctgactccgggcggcgcaggacg

SEQ ID NO: 288477 - DNA, 122 bp, Homo sapiens
gcactccggagggtctcttgcttgaagcacatgatctcctggaggctgaccctgagatcccggggggttgcaagtctttgtcctggcagaggaatggagagatgcttcccaaagcagtccca

SEQ ID NO: 288478 - DNA, 122 bp, Homo sapiens
acagaacgcggatgagggcagcgaaaggccacccagagcgcagtggagagtggactcaaacggggcacccaagacgatcgcagactcggccacgagccccaagctcctctatgtggatagag

SEQ ID NO: 288479 - DNA, 122 bp, Homo sapiens
cgaccagagagtctggcgccagctgccggcaacggatagaggggctgtgtcatagacgtccgacgtgtctggtaaggccagagcgcctttcctcggtcctcctagacatggtgtccgctgac

SEQ ID NO: 288480 - DNA, 122 bp, Homo sapiens
gtcaagcagatgccatattgatgcttgagtgaagttacaagaaatatttttggagctttgcgtgtttttgtgctaatagtcctaatatttgttcaaaaggtgttttttctccaaggatgtag

SEQ ID NO: 288481 - DNA, 122 bp, Homo sapiens
tgacactctagatcactgattgtctccgcggaagacaaggcctagggggcaggggtgattcgcccaaggtcactcagcaatttagtagcaaagctgggcctaaaacccgggctctctaactc

SEQ ID NO: 288482 - DNA, 122 bp, Homo sapiens
cgtgggaaataaggacgagtgaaccaccagcttgtccttgaggagtacacggtctagtagcggacacagggccagttagacagccacagccccacgtgtccaatccatcactgaaggacagg

SEQ ID NO: 288483 - DNA, 122 bp, Homo sapiens
gcaagtgtcatctgcagacattaagtgcagttgaagtgagattcatagcttgcccaaagccgttttgactgcaagtactgtccttgcagcaagaaacagcacctgttttgttccaaaacagc

SEQ ID NO: 288484 - DNA, 122 bp, Homo sapiens
ccagggagggagaaaggtgaggcctagctccatggagacaggaaaccaagcagtcactgccggacactgggtcccagagtaggctgaggggacagtgggatggggcggacatgggggcctga

SEQ ID NO: 288485 - DNA, 122 bp, Homo sapiens
gagtccctcgaagctgcccagtgacgcatggcccgtgcagggcaggaatgcactggcgtgcggcacagcctcctctctctctgcggctctgcctgacgggcacttggcagatagcgtgtaag

SEQ ID NO: 288486 - DNA, 122 bp, Homo sapiens
ttcggtggcaacatgctgtcgtgatgccgccctcctcggcaggagggccctgccagaagacgactcccggggtcctccgggctcccacgcacgtgtgggcacagcttctactcaccgtcggc

SEQ ID NO: 288487 - DNA, 122 bp, Homo sapiens
gaaagcccgcgttaccgggcgcgggactcagctggcgtcagggcgctggaaatggactcccgcgcgctcgcccccgctctgccggaggacccagcccgggctaattggcgctgtgaatgatt

SEQ ID NO: 288488 - DNA, 122 bp, Homo sapiens
agagcgcagccagctcgcgggccccggcgtgctgcgcgccccagcggcaacaagacgcctcgtcctcgtccagctccagctgctggcccggccagttctcggcgcccgccatggccactcgc

SEQ ID NO: 288489 - DNA, 122 bp, Homo sapiens
ctcccggcagtggcagacggggactgaatgttaatcgcatcccgagtgagtgtgtgtgtgcgagaacacagcgagtgtgtgagtccctcccgctccagctcctccaagccgcggccgccgcc

SEQ ID NO: 288490 - DNA, 122 bp, Homo sapiens
acacagtgctggcatatgcttctgggtaggcctcaggtagcttttactcatggtggaaggcgaagtgggagcaggcacatcacatggccagagcaggagagagagagaaagagagagagaga

SEQ ID NO: 288491 - DNA, 122 bp, Homo sapiens
ctcggggcggggctagggggctttgctgctgtatccctggaacggtgggcggggatgtgccgggcagagagaactgaggtgtaaaagagggagtcctcacgaacttcatgtgtgagatttgg

SEQ ID NO: 288492 - DNA, 122 bp, Homo sapiens
gtgaggttgccactactcgtctccaaaaaggctactgactcgggtgcgagtaacagagatcgagactcagttcccagggccactccatataacacagtcatcaaaaagccaacagatcacag

SEQ ID NO: 288493 - DNA, 122 bp, Homo sapiens
tgctttaatcacgtgctgtacccccaaagcccagacagtgcctagcacacacgagatgctcgatgaatagttattgattgaatagattagacatcaacgcaatcaggctgttcacctaggga

SEQ ID NO: 288494 - DNA, 122 bp, Homo sapiens
ttctcaaggaaacctctgattacctgaagttggtgtagtaagagaggggcacctcctctgcgctgctgctcatctcaggggagcctgattgcccattctctgctgatctctgccatgtctga

SEQ ID NO: 288495 - DNA, 122 bp, Homo sapiens
agcaattctcttgcctcagcctcccgagtagctgggattactaggtaaatgccaccagcccggctaatttttgtagattacaggcatgagccgccatgcccggcctttttttctttatctta

SEQ ID NO: 288496 - DNA, 122 bp, Homo sapiens
cggggtagtcggaggaggcgaggttttccggggtgccgtaggctgtctcgaaaaactggtcgaaagcctgtggcaggacgccgttcctgcccacggtgctatagaaattggacgagactgcg

SEQ ID NO: 288497 - DNA, 122 bp, Homo sapiens
gcggggccagagcgggcggcaccgcctcctccccgctgtctgggtcgcaggccttagcgacgggctgttctccggccccgccccattcccaggctccgccccccgcccctcttcctcgtggc

SEQ ID NO: 288498 - DNA, 122 bp, Homo sapiens
ggctgcccccgtgctccctgccctgggcttcagtcctggagaggacccggtttctcaacccgtgcatcgttggcactttgagcgacgggactgtcctgtgcgttgcacgatgttcagcagca

SEQ ID NO: 288499 - DNA, 122 bp, Homo sapiens
cggggaccccgggacgctcccgcctcccctcggaaagaggacggagatgcagattctccccgagcgttggtttgggagtctggactcttaggtccagtcccagcccagtgatttgttgggag

SEQ ID NO: 288500 - DNA, 122 bp, Homo sapiens
agacaaacatctcagggtgctgggcaaaagactcccgggcagctgtctgccctgagagatcggggacgcctcatcttaggagagggagccccaccaggtactacacaccaaggcctcatgtg

SEQ ID NO: 288501 - DNA, 122 bp, Homo sapiens
gggacagcggagagcctgcggattgtgaagccgaggaaggctcggcttggttttcctacccgctcctcagttctggttgatcggaacttaagtgtctttgagcctagcacaggccatccgcc

SEQ ID NO: 288502 - DNA, 122 bp, Homo sapiens
gggttctgtttgtatttccagccatgtgtctctccagattatttgaggtttttgcttctccgcttcacattccacctgagagaccccttagtgtttgacaatgttgctgtccaaaggctgaa

SEQ ID NO: 288503 - DNA, 122 bp, Homo sapiens
atgacaggcagcagaaagcgtttccatgtaaattcctacaaagctctggctctcttgctccggcttctatgattggagcctggaacacggattcgaaggaccttcagtcagaaaggggacct

SEQ ID NO: 288504 - DNA, 122 bp, Homo sapiens
gacgttagttgctggtgtacacaactcaggacttcaatgaactccagtcctagagaacaacgtgacaaacaagtggctgggtctatgctgcagtctcaactaggggttcatagcctgaggtc

SEQ ID NO: 288505 - DNA, 122 bp, Homo sapiens
tgccccacgggcctgtgcctaccgccctgagccgtctgcaggacccagctctttcctgcgcgtctagaaaggcattagcgagagccaccttgggagactgagaaaatagtcaccaaggacgc

SEQ ID NO: 288506 - DNA, 122 bp, Homo sapiens
aggtgatgtggtaataaagtccaagattctgccacataagtcgggtcagcaagtcggtggcgaaaagagggccacgtcccagactttctgggaggaggcgggacaaaggggcggggcgagcg

SEQ ID NO: 288507 - DNA, 122 bp, Homo sapiens
agagagttattttatcaataccagcgctcctctgtccccaaatccagctagggaaggtttcggaggcctcagctacttgagagagggtagagacgatccttcctcgcctatctacccagcca

SEQ ID NO: 288508 - DNA, 122 bp, Homo sapiens
cttgatctcctgacctcatgatccgcccacctcggcctcccaaagtgctgggattacaggcgtgagccaccgcgccaggcccctcctactggagatttaaatggagatgtcaggtgggcgtg

SEQ ID NO: 288509 - DNA, 122 bp, Homo sapiens
gggtcaaaggtgggagtccccgggccctagtggtggatgtggccaatggtcccctaactccgcagaggcctcccctgctgtgaatctggggttacttgatgcttccacacaccaattgtgtg

SEQ ID NO: 288510 - DNA, 122 bp, Homo sapiens
tttcgagcagtttttacggaggcgtttgctacgtgttctcagggcggcacaggagcatctcgcctgcacatgggaagctgcctgttttatgccatcgatagaagagatcgaaaaagaaatct

SEQ ID NO: 288511 - DNA, 122 bp, Homo sapiens
gtatgtgtgtacctcactactcatggacttgcttttactgtgacacatggaagctcaaaacgctaaagtgcaaaggtcacaggtgactagataaatgataagcaaacaatgtggttctaatt

SEQ ID NO: 288512 - DNA, 122 bp, Homo sapiens
tgcctctccgcggccagggaagcggccaacgaaggtcagccctggggagggacccagcctcgtgttccgggctcgcgcatgctctgacttcgccttggggcgcccatggcagtactgtcgcc

SEQ ID NO: 288513 - DNA, 122 bp, Homo sapiens
tttgctgcctccccacagttgttgctaagcttcaccatcttgtctctcttctctggtcaccgaccatattttttcccccgtttctctcttccccatttcaaaaaagcaagaatttttaaaag

SEQ ID NO: 288514 - DNA, 122 bp, Homo sapiens
ttagcaaccaaaatgcccatcaatgataggctggataaagaaaatgtggtacatatacaccgtggaatattatgcagctatacagaatgaaatcatgtcctttgcagggacatggatggaac

SEQ ID NO: 288515 - DNA, 122 bp, Homo sapiens
cttcctatttcagaactatccccaaacaaaaacaagctaagggtagaataaacaccttgccgggtctgatcgctgatgggtcttttccagctaagaatttcatgttttctcttttagatcct

SEQ ID NO: 288516 - DNA, 122 bp, Homo sapiens
aatgaagcggagccctttcagctcacggtggactgtgttggtgcgcgggtcaggctttaacgtgcctagtggaaattgacagtctgagaactgggacataaacaaaaatgtcagtccctggg

SEQ ID NO: 288517 - DNA, 122 bp, Homo sapiens
tgagactttgccttctagctattgatatatttcttttcaaaagtccgtttgcgctcggcccgctctggttcaggtctggggctttgaaccggggcagggaatcctggcgcctgctgcgggta

SEQ ID NO: 288518 - DNA, 122 bp, Homo sapiens
gaagattgctccccaaaacggcatcaggttacttatcccaattgtgtggttcagttgctacgccagtgatgagcaaataaacaggaagtagaagcacaactattcctaagctcaagaagcag

SEQ ID NO: 288519 - DNA, 122 bp, Homo sapiens
aaacattttacaagaatttcttatgtttttttctgtttgttttttgatcagtttttcacacgtagcccattgttttgttaggatttagatgtaaggtcatgggagagtcaggatatacttag

SEQ ID NO: 288520 - DNA, 122 bp, Homo sapiens
cctgcgcgcggactggctcatcgcgctccttttttctcccgcctagtcagaggatttggacgaatagtgggagagagagaactgggcttctgccaatcgttggaatcgtgggcggggctgga

SEQ ID NO: 288521 - DNA, 122 bp, Homo sapiens
ctcttctgagtccccggagctcctgaatggatgtggttgccccggaggttcagtgcgccccgctcacccagcaccagccagggctttccttaaaggcgtggaaaggagcgcgcacaaggcgc

SEQ ID NO: 288522 - DNA, 122 bp, Homo sapiens
gggctgcggcgcccacggcagcgccagtcacagccacagcccaggcccgggtcgggcagccgtggggagcccagctccggtttgcatatacacaatgcacgcccggggctcgtcctatcacg

SEQ ID NO: 288523 - DNA, 122 bp, Homo sapiens
tacctgatgaactgagccctcccaggggaagacactccccaggcctgggcagggcttacacgcgcactctctctcttctttccctttttcttcccaccgcaagcactgatgaccctgttgaa

SEQ ID NO: 288524 - DNA, 122 bp, Homo sapiens
cccaaagtgctgggattacagtcgtgagccaccgtgcccggcccagactgtgaccttattcggaagtagggtccttgctgatacaattagacaatgaagtcatagtggattggactgggccc

SEQ ID NO: 288525 - DNA, 122 bp, Homo sapiens
cccagtcactggtgcagtaaccacagccgaggagctggatcgtgagaccaagagcacccacgtcttcagggtcacggcgcaggaccacggcatgccccgacgaagtgccctggctacactca

SEQ ID NO: 288526 - DNA, 122 bp, Homo sapiens
tcaaatctctcttcatttccaggtatgctctgctgggtgtctccaagcctcacttgtctccgatcttctgaaagtatcagccacggattggctgtgtctggatccagagtgatgtggactgc

SEQ ID NO: 288527 - DNA, 122 bp, Homo sapiens
gaggaagaggatgccagctcaggcaccagctgaggtttggcatttgctggccgcgggcgccgacctccagggggcgccgtggcctcgcgctgtccgggccgttgcatttccgggcactgggg

SEQ ID NO: 288528 - DNA, 122 bp, Homo sapiens
gttgccttcctcgaaggattaatttttattatgtactttttttgtccttatgataataatcggtgacatataaagtaatagctaatgaaatagttaggttattagagtttggtcctatattg

SEQ ID NO: 288529 - DNA, 122 bp, Homo sapiens
gggaagtccggttgatcttgctgttacccgggtcttaattggccttttcagtcattaggacgcggatccatgttgctgcgggctacagagtgggtgtaaaccattctcatatggactctttc

SEQ ID NO: 288530 - DNA, 122 bp, Homo sapiens
ctgtgttttgactcagcgagctcaaagtgggagggcaggagagctcgctttttaaaagatcgacagcgccatctaccggtaagagcgcccaactcccttgctaaggatgatatcattatgct

SEQ ID NO: 288531 - DNA, 122 bp, Homo sapiens
ttctctccgctccagtccattttctacactgctgctagtaggaaactttctaaaaacccacgttttgccactcctgtcctcaaacatttttaatggctccacatcatctacaagataaagtc

SEQ ID NO: 288532 - DNA, 122 bp, Homo sapiens
ctcaactccagcgctggtctcctctcttcagagtttggacacataaggcccaagatacaacgtaagggggaaaaagagaagaaaaaaagacaagttgagtgctcaatgaggaatgttaaaaa

SEQ ID NO: 288533 - DNA, 122 bp, Homo sapiens
atactgagcttctgtgactccagcacatgctgctgatactgttgagctcaggcagagaaccgtgtgagtagtgtggctttagacgagtccagaggagtagaggggtcagagaagacttcaca

SEQ ID NO: 288534 - DNA, 122 bp, Homo sapiens
aaaatctcagatccacccaaattaaatgaacaactattatctgcagagcctagtattatacgtgaagtgttaccatataaattacactctgagcacctccagcttttctgctatgctgtggc

SEQ ID NO: 288535 - DNA, 122 bp, Homo sapiens
ggttgtgattgtggctggggctgtggttgtggttggggctgcagcttaggcgggggtgctcgggtgaagaggggggacccagggagcatggcgcggctggccccgtgctcccagaaggcgtt

SEQ ID NO: 288536 - DNA, 122 bp, Homo sapiens
ttacatgagaaagaactgagtaggaagaaagagggagtgcagagaggtgaacagagtgaacgtatacacattgggttgaatgaagggttcccaaaccaccatgtgattggggagcacaagat

SEQ ID NO: 288537 - DNA, 122 bp, Homo sapiens
caggcacacaggcaaaatcaagttctacatctgtccctgtgtatgtcacttgtttgaatacgaaataaaattaaaaaaataaattcagtgtattgagaaagcaagcaattctctcaaggtat

SEQ ID NO: 288538 - DNA, 122 bp, Homo sapiens
tagagagccctttcccagaaagcctgagacccgtgtctttagtccagtggccatgctagtcgcttttaactggccgacaggtgcccggtatttagcccccgttctaaggaaaaataggacag

SEQ ID NO: 288539 - DNA, 122 bp, Homo sapiens
gttattcagcttttattcagctggttattcagttgttttatagacggtcttggccaggcgcggtggttcacacctgtaatctcagcactttgggaggtcaaggtgggtgaatcacctgaggt

SEQ ID NO: 288540 - DNA, 122 bp, Homo sapiens
gacgggatttcaccacgttggccagggtggtctcaaactcttgacgttaggtgatctgctcgcctccgcctcccagagtgctgggattgcaggcatgagccaccacgcccagttttataagt

SEQ ID NO: 288541 - DNA, 122 bp, Homo sapiens
gagctgcgtgtggatggggtacacacccgagtggtggggggccacagcataccccaggtccgtgggaatcccatgctcctgggaatggcatagactctcaccaggacctggtgaggtttggg

SEQ ID NO: 288542 - DNA, 122 bp, Homo sapiens
gctccttgcggttcagaagcacatctactgcctggttggaacccaaggcttttataaaaccgtagagaaatagagctctatgtatagagaaaatatacatgttgattaattgtgtgactctt

SEQ ID NO: 288543 - DNA, 122 bp, Homo sapiens
gggcagggagaagggcagctgggatggaatgtcatccttcccttaagcactggattctcacgaacacatatctgccacctggtaatttcacctcactagctccatgcatcaatgtatttaga

SEQ ID NO: 288544 - DNA, 122 bp, Homo sapiens
ccgccaaagccacatgaatcgtggtctcttcaattaacgagatggcagtaatgctgagcacgggtgaggccacaacctcctggcacccgcgtccctcgggcgtccttcctgttcttcgtgtg

SEQ ID NO: 288545 - DNA, 122 bp, Homo sapiens
ccccgacctgtcccctgggatctcctggacttcccccaaatccagcaactcaagggttaacgctcagcatggcaggagggctcaggctcccccattgccaccagccctagtactgccttcag

SEQ ID NO: 288546 - DNA, 122 bp, Homo sapiens
ggtttggttatttcccctggtaccaatccccgccttttcccagaaatcacttgactttcccgaaaactcagaaacacaccctttggctgaaaaatagcattaagcaatcggtgaaattcccc

SEQ ID NO: 288547 - DNA, 122 bp, Homo sapiens
ctccgcgtacagtcaggtaaaagcacgaagcactagtcacggtcctgcccagacttttcacgcagaggtggaaagttgcagaccccgagccgggaggggcgcgagcccaccctgaagcccag

SEQ ID NO: 288548 - DNA, 122 bp, Homo sapiens
tccgcgctggagcggattgctggcatgtgacttctgacagccggaaatttgtaggtgtcccgcgagtttaaaacaagccatatggaagcacaagtgcttaaaaataatctcctgccagccca

SEQ ID NO: 288549 - DNA, 122 bp, Homo sapiens
accaggttcatgggatgtaatacggagcaagagtcaggatgctggagtgctctgagtcaccgttgggtggccactccccacccgcagcccacctgggcagggcgagccagggacgcaggcga

SEQ ID NO: 288550 - DNA, 122 bp, Homo sapiens
gcagagaatgggctggtcatggcagcctcaggcctgggccctggccccagggaaacagctcgttagttctgatttggacgggacattgacaataggtcaagccatatgcacaagtattctct

SEQ ID NO: 288551 - DNA, 122 bp, Homo sapiens
ccgcccccccgtggccattcttctggtggggctatggggcgggtgcggcgatggaccgggcgggcacagaacaggtgggtgcaggctgggtgtccggcgctgggacacaagtgctctgtgtg

SEQ ID NO: 288552 - DNA, 122 bp, Homo sapiens
ctcgggttccgggctcagtgctccgctcctgtgggagggttggggtggttcggggcctcccgcgcgcccccagtcgctcaccgaggcgcagacacatgtcggctccgcgctggtcccgcccc

SEQ ID NO: 288553 - DNA, 122 bp, Homo sapiens
aggccaacattccgattcaggaaatacagagaacgccacaaagatactcctcgagaagagcgactccaagacacataattgtcagattcaccaaagtcgaaggaaaaaatgttaagggcagc

SEQ ID NO: 288554 - DNA, 122 bp, Homo sapiens
aatggtgggggtaggggagatgtattttcagcttgttgagccctgcagcctcgctccagccgagggctcccaggctggcctggtcccgccagtacttcctgtcgtgtggagcagctacctga

SEQ ID NO: 288555 - DNA, 122 bp, Homo sapiens
cctacagccgacctgacctagtaggcccccagccctccagagcttggggtattgcagagccgccacaaggcctgccgggagtagtagtttgtatagttcgcagccggccagggcggagccgg

SEQ ID NO: 288556 - DNA, 122 bp, Homo sapiens
aaggggtgagttgtcatctcattctcagaacaaagctggatttccagttcagaccccaatcgggcccatcaatacgaggggctggacccgcacaaaagacatgcggattgtctggggctgca

SEQ ID NO: 288557 - DNA, 122 bp, Homo sapiens
ggtgctatggcaacctattgcaccatttggtagcgcctgtgtgcttaaccgcatgagctgcgcctcttcctttcctataaagactcagaataagaaaaacagaagtacaccgaagagaagaa

SEQ ID NO: 288558 - DNA, 122 bp, Homo sapiens
ctttcaggagtgaggatctgatctgctctgtttttctcactgaaaattagtgccctcggccgggcacggtggctcacccctataatcccagcactttgggaggccgaggtgggcggatcacg

SEQ ID NO: 288559 - DNA, 122 bp, Homo sapiens
aacaaacatatgctttcattcctgagttcctcatattgtttatttacttgtgtttacctacgttatccatgcacaaaagatttgagccatcttactatcatgacaacacatcctacactgta

SEQ ID NO: 288560 - DNA, 122 bp, Homo sapiens
acccgcagaccggccaatcccgccaggccgcggcccagtggcgccggcgcacaccgaagacgacaccagccatccggccaatcccgccccgccgcgccccgcaggcccgcccactcctcgct

SEQ ID NO: 288561 - DNA, 122 bp, Homo sapiens
cgcgccgcgcctcactccgcaggggccgcactgcccacactcaccagtcccaacacaagtcgcagaaactaaccaccgacaccaggcaagaacaagacgcgcaagagctctccggggcgctg

SEQ ID NO: 288562 - DNA, 122 bp, Homo sapiens
gggatcttgaatcaggaagctgattcaagtgctggccatctgaacgcatctgcccagaggcgcccctgcaggggggtgacccacctgccgggcctgggccgctctgtgcacgagcacggctc

SEQ ID NO: 288563 - DNA, 122 bp, Homo sapiens
gcggggctcctagtgggcggggctctggggtggcggccgttgccgggctacgggagagcgcggagccctgcgctgggaggtgcacggtgtgcacgctggactggacccccatgcaaccccgc

SEQ ID NO: 288564 - DNA, 122 bp, Homo sapiens
cttttcccacagcctctcgaactttgtgcaagaatgtggcctagggaggccagccgtgcgcgggcgggccgaccaaggttgggggacaggcagggcaggacttgccaggtgtccgtcctgtc

SEQ ID NO: 288565 - DNA, 122 bp, Homo sapiens
cgtagcatcgataaacaccagctcttaccggaccgttcccttatgctgggaggaaagaaacgatttggatttcctctgtctagaagtccagctatctgcatgtgtgttcagaggacgttctc

SEQ ID NO: 288566 - DNA, 122 bp, Homo sapiens
tctgccttggcacagatgttcttattgtcctggaaagaaataccaaattccctccccaagcgtgaagcgaggatactctgggacttagcctccaaggacagagtcgccttcccagcccagtt

SEQ ID NO: 288567 - DNA, 122 bp, Homo sapiens
cgggctcacagaagagacggtgattgtgatctgctactaggaaaaagttctgggatagttcgggctcccaaaaggcagcttcctgggaagctcgtaggttttagcaccccaatccataggtt

SEQ ID NO: 288568 - DNA, 122 bp, Homo sapiens
agtttcacaggaatttaagtcctactgttgttgatatgaacacacctcaccttgactgaccgttcgctgttacgagtggctcttcttttccacatgccggatttctttcttcgttttcacct

SEQ ID NO: 288569 - DNA, 122 bp, Homo sapiens
gattcaactgaaggagcagggatgtgggtcctttttggctcccacatcctatgatggagtcgttgcctttgttatccacatgagcacagcaggttactgaccacaacttttcacagcaagaa

SEQ ID NO: 288570 - DNA, 122 bp, Homo sapiens
agcccaccccggacctaaggggaagcgtaggaacaattccccaccctgcaacacagtacacgtcgcccttcctcttcccctagcacacattccgactgcgaaagccattactgccggcgcgc

SEQ ID NO: 288571 - DNA, 122 bp, Homo sapiens
ctgggaagggagcccgggagtctgacctgcagcccttgttcctgcaccagagccgagacccggagctgcagggaaagagcctgaccgtcctgaaccacggccctgctcccctcccctgcccc

SEQ ID NO: 288572 - DNA, 122 bp, Homo sapiens
gcaaacccttcgtcagcagctcattgagccgaccacgcacccttccttcccacggcagagcgggagctcctgggtcagcctccctgccaaagtctgttcacagcagccccgagctggcgacg

SEQ ID NO: 288573 - DNA, 122 bp, Homo sapiens
tgtttccattctaacctcaataccctggctatactcgcctccaccaccaccatcccccgacgccccaacacacctcaagtcaattctcagcaggctaagtaaagcaaatgagccctgctatg

SEQ ID NO: 288574 - DNA, 122 bp, Homo sapiens
tcccagcatgccccggtctcaggggcggggcgcagttcttgcgggaggagcggggcggtgcgctcctggccacgcaggctggaaactgtagctctcaacggttccccgcccgttggtggcaa

SEQ ID NO: 288575 - DNA, 122 bp, Homo sapiens
ccgcagttgctagggcagctgcgcgctttcactggcttggttgtccgtccatcttactctcgtcaccgcctccgggctgtcgcccacccgcccctcctgaaaggtcgctgtcaccacagcca

SEQ ID NO: 288576 - DNA, 122 bp, Homo sapiens
aatgcatctaacttggaagacaaaaagtataactgtctttatttgcagattacaccaccccgtgtatgtaaaatcttaggaaatttaccaaaatacctgtttgaataaataaatgaattcag

SEQ ID NO: 288577 - DNA, 122 bp, Homo sapiens
ctcacttctgagtaaattctcacaaacgcgaagatggtgggagggcccagcgcagcattccggagatgcgcgtgcaggaagcttgcggtggatctgcgtgctgcagctcccatgactgagtc

SEQ ID NO: 288578 - DNA, 122 bp, Homo sapiens
cgcgcgcacgcgcgcacacacacacacacacacacacacacacacacacacacacacactcgacagaaccctctgatactctgagaagcccaaggcacaaagcccccctggggtgggcggaa

SEQ ID NO: 288579 - DNA, 122 bp, Homo sapiens
ataatgcttgtagagcgttcggcacagtgtcgggttatactgtaaacattcagtagttggcgctagttattagagcggtgttcctggatgagccacctccatgttgagcctgtaaaactggc

SEQ ID NO: 288580 - DNA, 122 bp, Homo sapiens
cggctggtgggttcttttagcattgaggagacacgtaggcccgcgatggttcatgttctccgtggggcttagaaaggagtaccgaagtttattaagaggaagtcagaagagtcaaacgggtg

SEQ ID NO: 288581 - DNA, 122 bp, Homo sapiens
gcgtgggcagcttgcctccctgctctggctgcttttaagccagcaaacgtgagctgcgagcggcacaggctgaggcaacggagccgcttccctgcaaggtttcatcagtgacggccagagtg

SEQ ID NO: 288582 - DNA, 122 bp, Homo sapiens
tgattacgtgagtgaagaggtgtggtaccgagtcattcagatcgtcatcaaccgggacgacgtgcagggctacgcggccaagactgtgttcgaggtatggcccgcaggatggcaggaaggat

SEQ ID NO: 288583 - DNA, 122 bp, Homo sapiens
gggggtctgcggtctgagcgcccccagcggtttcctgggcggcgggtttttcgagggaagcggaggcagcggaggatgggggggagcagcggagaagaggtgggcgcctggcgcatgctgac

SEQ ID NO: 288584 - DNA, 122 bp, Homo sapiens
gtcagagctcgctgggtggaccagcagcattttctgctcggcattcccaagaaagcatgtcgcctactgtatttctgcctcttccatcacctcaggttcttcctggcccattgctcatccct

SEQ ID NO: 288585 - DNA, 122 bp, Homo sapiens
gttacatttttcatcctagttttaatagacgtctgtcatttttgcaacccattgtctagacgtcttttttccagatagaagactagcctgaattatctttcagaaacaacctgtccacactg

SEQ ID NO: 288586 - DNA, 122 bp, Homo sapiens
agtgactaacaccgtcaggataatctaaaactacgaatactacctgactccacaagggtacggtgtattctccagttttagcatctgccttaaaaattacctcagagttaagcactgctggg

SEQ ID NO: 288587 - DNA, 122 bp, Homo sapiens
cgtgaattccaagacagtattaaactgatgcatattttcataagtccggaccccagggaacgcatcctccagccctcggcgcggagcgggtgggcgcggcgagccgccggggcgaagcgggg

SEQ ID NO: 288588 - DNA, 122 bp, Homo sapiens
gggactggggccgggaccgggaccgggacagggaccaggactgaatttcaggctggacttcggggctcggcgtgcccgcagcagcagtgctgctttgggcacaaggcctgcagcctgcagcg

SEQ ID NO: 288589 - DNA, 122 bp, Homo sapiens
gtattgagttatatggaagtgcaggtagatgtggatgcatatgactggtgcttaaacgcacgcagtgccccacaccacaggagaaaaacacacagttacagacagacaattaggtccaaagc

SEQ ID NO: 288590 - DNA, 122 bp, Homo sapiens
agcaatttcagatcctaggaaacatctcccgtgcagacacacaaacacacggagtgaatgcggcatcccacaaatgggccctttatttctgaactgccaccactgcacggataaggccactt

SEQ ID NO: 288591 - DNA, 122 bp, Homo sapiens
cccagcccggggacgctcgtgtcgggcttctagcggctggagtgctgtgcttggagacatcgcccctctctctccagttgctgcttcccggtgcagcttgcccggggagctggggactgtgt

SEQ ID NO: 288592 - DNA, 122 bp, Homo sapiens
cgggcgggcaggcaggctggggtgctgagcgtgagggcgcgggctcccggctgtgtggctcgtggcgcctggctccgtgcaatccctgccggcactgccggctgcccgccttcctccaggac

SEQ ID NO: 288593 - DNA, 122 bp, Homo sapiens
agaggcagagggactgggagcctgccttcagcctcaggcccctgctgggctctcagcgcccggaggcatttcaagagggctgtggatttgttgttttgtcttgttgtgtttgtttgcttgtt

SEQ ID NO: 288594 - DNA, 122 bp, Homo sapiens
caagttccctcggaggcccagcaaactcatgctggcccgtaaggctcacgagagcgtcctcggccctccatcggtacctaaaattactctaagtccactcagcgaaccagagtcctggaacc

SEQ ID NO: 288595 - DNA, 122 bp, Homo sapiens
aatttactcacaccattgaggtttcctccaggtgtgagcacagctgcagacacaccttgtcgcttcagtcaggacacaggacagagtaaaatgggaagaaaccacagtcactgcagaaaggg

SEQ ID NO: 288596 - DNA, 122 bp, Homo sapiens
gccaggccaggaccacacagtccccagactcagctggaagtctacctgctggacagcctccgccaagatctacaggacaaagggagggagcaagccctactcggatggggcacggactgtcc

SEQ ID NO: 288597 - DNA, 122 bp, Homo sapiens
gcatcgcgggcggcgcctgttccgccctggtcgctaaggacgctgaaggctgtttctgggcggggaccaggtttttctccactgcctaggcaatggacccaggctctggctgccaacgggtg

SEQ ID NO: 288598 - DNA, 122 bp, Homo sapiens
gacggagctcaatttcgagagtatggtgccagcgcccgggctaatctagtcctctctactcgctctttttcccctcctcctcctacttctcctctccctcctcccttccctcgggtcggcgc

SEQ ID NO: 288599 - DNA, 122 bp, Homo sapiens
cctgcgcgagctggcccatgtgctgcaatccaagcaccgggacaagtacctggtgaggggcggggccatcaggagtccgccaatgagagggatgtagggtccagatgggcgaggctaatcac

SEQ ID NO: 288600 - DNA, 122 bp, Homo sapiens
attaaacgaaggtaatggatactaaaggcgtaacaggtattgtaactattttactgttatcgatgcttttgaggttacttacctcgcttgtattcgtatggtgggaatactaggcgcatacc

SEQ ID NO: 288601 - DNA, 122 bp, Homo sapiens
gatagatggaagcttagaaagtgagaatgctggacttggattaggtactcaccttctgatcgcagacattaagaatctgcttgtcatgaggcatgatttcttgtaggatgtaggctcaatat

SEQ ID NO: 288602 - DNA, 122 bp, Homo sapiens
acgcctccactgacatcatctgcggattcccgccccgaggtttctaaatccagacattcccgtttggctgagcactctaggcctacatccatgaagctaggagagcgacactcaaagactgc

SEQ ID NO: 288603 - DNA, 122 bp, Homo sapiens
gctagtggggcaggaaagggtagccgagggtcagagtcccagggccaggcgggcaaagcgcgcaagacaacgtggccgcgtccgagcggatgccggcggcagcgtaaaccccaccccagcgc

SEQ ID NO: 288604 - DNA, 122 bp, Homo sapiens
ccccgcgcgcgcccctcgcagcctggagccggagcgctggctccgcgcggcctggagaggcggagaggcctgtccaccgccccctctgccgcccacgccccgctgcgggtcggaggagcagc

SEQ ID NO: 288605 - DNA, 122 bp, Homo sapiens
ccctgaagtgcagacttcctcccatccttccccaggaagattccctggtctgtggggtagcgagtgttggggtggtctctccttccctcccatgcttctagattcctctgtagggtcccggt

SEQ ID NO: 288606 - DNA, 122 bp, Homo sapiens
tcaaaacaattgcctcgagcggcagccatcatggatttaaaggggcagtaccggcaagagcggcagccacaccggcagattgcaggtgagtctttgagggtatcctggggctgaaggttaag

SEQ ID NO: 288607 - DNA, 122 bp, Homo sapiens
gcttatggacccgagactctgagcaaggtgcccatcaccgtgcggtgaggctgccagtggcgcatgctcaccaaaacctgctgtcccatctgcccaggacaggcacaccccatgtgcacaac

SEQ ID NO: 288608 - DNA, 122 bp, Homo sapiens
ggcagatgtgacaccctgaggagaatgcaggtcaacctccctgcttctggggtcccagcccggaagctaacacaggaaagtggctgctgacggggccaaaagcccgttttgtcccctgccat

SEQ ID NO: 288609 - DNA, 122 bp, Homo sapiens
ttcatatcacaaaatgatatttaataataaccttggggtaaatcatgaattttttttctacgtgtgagtataaaagacaaaagttgaacagcatggaatctcattgccaaattattagtgaa

SEQ ID NO: 288610 - DNA, 122 bp, Homo sapiens
cgcggctccacagggcgacggagatgggcagcagctgctcagctccagttgctccaggcgcgcctccagcttctgcgccttgtgcagcacctgcaggttctcgattgctgctcgatgcggag

SEQ ID NO: 288611 - DNA, 122 bp, Homo sapiens
ccttgatagcagaggagtgaccagaggaaacagtgcactgggctttaacaatctttcctacgtagtatgaagcagcagctgaccaaaaaggaccagaagcattgatggcagctggcgagtct

SEQ ID NO: 288612 - DNA, 122 bp, Homo sapiens
agaacggaagagagagagctgcacttccgaaccgcagagacccggcgccaggcagggcgacgctcccacccgctccgggctagactgtccacacggagcagaggcgggcactccctccaccc

SEQ ID NO: 288613 - DNA, 122 bp, Homo sapiens
cgctcaccaccgcacgtaactcgatttattgacactagcccttacggagagtctgcaaagcgcgaaccttgcatgccccccagccctgccgctgcatggctgaccatacttcctgcagctcc

SEQ ID NO: 288614 - DNA, 122 bp, Homo sapiens
cggggactccgagccgggggtccgtctacccggattatggttgtggaacttttcacgccacggtagtgagtctgggacagtttaccctcctgtccgagacgccatctctccatcctttcgcc

SEQ ID NO: 288615 - DNA, 122 bp, Homo sapiens
atttcgcaaggtctcatactcaccagctcaggtgcttgttacataagaaagctctgccggcggagtgccaaaaattcagctcagcattttctgcctccctgcagtggtcccaaggaatggat

SEQ ID NO: 288616 - DNA, 122 bp, Homo sapiens
caccgccccgtggaacccaccggcaaccctcacacacgttccagtatcactgctctatggcggtgggctctgcaccaggctggaccacagaaggccatggtcgcttcagttgtataaaacac

SEQ ID NO: 288617 - DNA, 122 bp, Homo sapiens
gcctccccttccttgaacaagtcaagcccattgcagcctccagaacttcgcacctgctgtcgcctcccttcagagcgcgtttctttcagggattcccgtggctggcttttacttatcctcag

SEQ ID NO: 288618 - DNA, 122 bp, Homo sapiens
agcgcccgggccctgctgaagccgggtctagcatgtgccgcggctccccggcggcggcggcggctcctctgcagcagcctcagcagcagcggccgccatggccaagcccagcgtggagctca

SEQ ID NO: 288619 - DNA, 122 bp, Homo sapiens
aagccctacaggaaccggtttccctggttaggaggtatccacccggctcaaccagggtctcgacttccttggaaaagaccaaggcagccgtacgctgctggaacgccggagtgcaaaggctt

SEQ ID NO: 288620 - DNA, 122 bp, Homo sapiens
cttcagaagcccatccctccacaattgaacatcaagcaaatctcacaagccagcaagagccgctccaggccacttacattcaggctcccgctcctccgccatcgcttccttccctccagctg

SEQ ID NO: 288621 - DNA, 122 bp, Homo sapiens
ccaacatatttatttcctttcctttggatatttacccagtagtgggattgctgaatcatccggtagttgtattttcagttttctgagtaaactccatactgttttccataatggctatacta

SEQ ID NO: 288622 - DNA, 122 bp, Homo sapiens
gggtgacagagtgagaccctgtctccaaaaaaataataataaataaataataaaaattaacgcaaaatattgcatgatgagcaaaacatcaaaataaagatgggatcccatcctgcactttc

SEQ ID NO: 288623 - DNA, 122 bp, Homo sapiens
ggggaggttctttcctcttaagaaaggcctgtgggagctgatgctatggcactggggtgccggccaggagctgcagagctacgcatgaataaaaagaggctgtgctcaggcggcggcgtggc

SEQ ID NO: 288624 - DNA, 122 bp, Homo sapiens
tcagagtaagtggtcctctgtcatgatgggcacatagcttgtcttgctagtgaaggatctcgtcaaaaagttagtttagagagctttctctgggacatggtaaaagacaacctggaatgaag

SEQ ID NO: 288625 - DNA, 122 bp, Homo sapiens
gataacctttttctgattggagtgttccatactttggaagacataatttgtataatcgcacggttactgacggaggagaatctatgtgattcagtccatgtgcacaatgaaaatcagcatat

SEQ ID NO: 288626 - DNA, 122 bp, Homo sapiens
cttgtgggggttctccgtcaggtagttgacaatgtggggctggttggtgcaggcagccagcgacaggggcagctcccctgcgggccagggtgaagggtgggaggtcagcgaagggggcccag

SEQ ID NO: 288627 - DNA, 122 bp, Homo sapiens
tcatgctgctgacccactttaggaagctctcctttaggagttagcatgtctctgagcagacgctggaccagtatgttctggagaccatacacttcccatcccagaacagatgctgctccctg

SEQ ID NO: 288628 - DNA, 122 bp, Homo sapiens
agggtggctgagccccagctccaggaaaccggccctgggtggacaggtggtcccaaaggccggccatgctgcagaggcttagccaccctccctggcccttcctggagacccattcagcccag

SEQ ID NO: 288629 - DNA, 122 bp, Homo sapiens
ctacggcggagactccacatttctaagaagctcccggctcgtgccgacggggctgctccgcggaccacttagagaatcccgttcagggtggctcatttcgctaccagaacaccaccatagcg

SEQ ID NO: 288630 - DNA, 122 bp, Homo sapiens
ttattttaaaaataaagaaaatttgttgccccctcaacggcgcggagaccaggggcgacacgcggcccagggctggcaagttcagggcgggcggctggggactgacgcgtggcggtgggatg

SEQ ID NO: 288631 - DNA, 122 bp, Homo sapiens
gtcccggggagcggttgcagggcggcggcggcggccgggtcatcagaagcacagtggagccgccccctgctttgggaggagcaaaagagcctctcgcttgcctcccgctcgagctccttctc

SEQ ID NO: 288632 - DNA, 122 bp, Homo sapiens
gacaggtaaatagttaactaccggcatgggcataaatactgcaacagaactggacttgatcgggcacattcccggccaggggtggtagagaaatcagggtgcttgctggcatctgttgggtg

SEQ ID NO: 288633 - DNA, 122 bp, Homo sapiens
atgaacaccttccatgcccacgctccttcagcttaactctgctcacaaatggggaatctgcgtgcaaggacactctgaggcctccagaccaacttcccacccaagcaattatttgtgcagtc

SEQ ID NO: 288634 - DNA, 122 bp, Homo sapiens
agttgctctgtgcctagacgtggctcgccaatctgtctcactggtgagaccgacctgatgcgcacctgccgagttttatgtgacccccttacagcagcttttctcccgggttccaatccctc

SEQ ID NO: 288635 - DNA, 122 bp, Homo sapiens
tgaattagcaaagaggctggagagaaggttggcgccagagaggatacaactgattataaacgctctcctgggttttgggccaccactgccctctaggggacacatggaaaataagcaaagtc

SEQ ID NO: 288636 - DNA, 122 bp, Homo sapiens
ccctccgcgaaggatcccagagagcccggcgccaaccttagttgtttgtgaccaggggagcggctggaaagcagactgaatttttagaatgcgctggatttgcatattgttttgcataaaat

SEQ ID NO: 288637 - DNA, 122 bp, Homo sapiens
tgaggaggcaaagcatgacaagtgccacaagagacctgcacactgctctggatggtaaagcgacgcaaggagggaagaaggtatttgcaacggcctcccagatcggcgctaggaccccgcca

SEQ ID NO: 288638 - DNA, 122 bp, Homo sapiens
tccattagttaattaggggtactgctctcccttcctagtttttccccaaaaaggatacttcgcctgtggaagtctgagcaggttggttttaatttcccagtctattattttaagtgttaggg

SEQ ID NO: 288639 - DNA, 122 bp, Homo sapiens
cagaaaattgtttttgaacttagagaaagctcaggttgcaaacaccctcttgccggtacccgcagactcttctcagggtcttggtgcaggaactgccaagcagatagctcatctctttgtgg

SEQ ID NO: 288640 - DNA, 122 bp, Homo sapiens
tattacttacaacaaccctatgaaataattattattatgcccgttgaacatgtgaggcaacggagagtcacagctgttaactatctttcccaaagttaaacagctggtaaatatcaaactgg

SEQ ID NO: 288641 - DNA, 122 bp, Homo sapiens
cttttcctgatcgtcaggaccctaaagaatggccgagccttgggggaacgagttggcgtccgcagctgccaggggggacctagagcaacttactagtttgttgcaaaataatgtaaacgtca

SEQ ID NO: 288642 - DNA, 122 bp, Homo sapiens
gaacccgggtctgtctgcctccctcaggtggttcctgtggcactacaggtggagatcagacgtcttccgggggagatgccccaccctgggtcccaggctctcacttggggctacgcgaaccg

SEQ ID NO: 288643 - DNA, 122 bp, Homo sapiens
ctgtcccagggcatggtttccgtgtgtgttaaccatgagtcctcctcattgtacactctccgcactctcttttttctgcccgtccgtcagttcacccgtccgtccatctgtcccagggcgtg

SEQ ID NO: 288644 - DNA, 122 bp, Homo sapiens
acattattacttcacatccagttcaatttataaattaagagaggtgccatggggcgggcacggtggctcacgcttgtaatcccaacactttgggaggccgaggcaggtggatcacgaggtca

SEQ ID NO: 288645 - DNA, 122 bp, Homo sapiens
ctggaggccccgccccctggccgcgagcgcacctcggccccgctcccgaggccctacgggcgtggcctctgtcccgggtcccgccccccagcactccggaacagcgcgctcgcagcgggagg

SEQ ID NO: 288646 - DNA, 122 bp, Homo sapiens
tgaaagggagaaggactttgtaatctttataatgattgattagactttgaattgggagcccgtatgtgtaagttatgctactgtttggtcagcctgctgccaagtcagttaccagcaagatg

SEQ ID NO: 288647 - DNA, 122 bp, Homo sapiens
ctgtcttaagtgggattgtgtcaagacctcactatctcgcctctcctccctggcgctatccgtgggctctccgtgttccctccggcctgtgccttggcaaagctgtccgctccggagcgggc

SEQ ID NO: 288648 - DNA, 122 bp, Homo sapiens
cgggtgattgggggcattgtactgccgcaagcgctgcgtgtcacgccgcaccataccaggcgctggcagcatgaggggcatagtccactttctatttcgttaatgacaatctgtccttggaa

SEQ ID NO: 288649 - DNA, 122 bp, Homo sapiens
cacacagagataaaaacgatgaggagagtgtccgcgaacatagtgctcatctcgcaccttcgtctctgcactctcacccgccagggggaaagcgctctacagccaggaaaagtgaagcgaaa

SEQ ID NO: 288650 - DNA, 122 bp, Homo sapiens
agttaagacatctgaatacagatatcaaggaggcagctgaacatgcagatgtgaggctgacggggaagaggtcaggccaaaaaatgtaaactaggagttagcatacggatggaatttaaaac

SEQ ID NO: 288651 - DNA, 122 bp, Homo sapiens
aatccccagaacccaaggccctggccctcttcctgagtagatgggcctttctcttagagccggcctggaaggaggggcaagtaggcaggagatatctcttgagctgttgctgctgtctcaat

SEQ ID NO: 288652 - DNA, 122 bp, Homo sapiens
aagcaagattactttaaagtttttggaaaggaaaaataaagaaggagaaatctgtgtattcgattttaagacacagagctacgtaaccaagactgtgtaatttggcagaaggatagtcacac

SEQ ID NO: 288653 - DNA, 122 bp, Homo sapiens
gacggccggcgcaaggtggactacatcctggtgtaccatcacaagaggccctcgggcaaccggaccctggtcaggagggtgcagcacagcgacaccccctctggggctcgcagcgtcaagca

SEQ ID NO: 288654 - DNA, 122 bp, Homo sapiens
acctcaggtgatccgcccgcctcggcctcccaaagtgccgggattacaggcgtgaaccaccgcgtgcctggcccgcctggaagccattctatggactccctgcaaacttgcaaaaaggaaaa

SEQ ID NO: 288655 - DNA, 122 bp, Homo sapiens
tatccattcatcagctgatgggcatttgggctgtttccgctttttggctattacgcataacgctgttacaaacatccgtgtatgcgtttttgtatgaacatatgtttccacttctcttgggg

SEQ ID NO: 288656 - DNA, 122 bp, Homo sapiens
ggcggctggtgccattcccggatctcggcggcaggggccggcaaacttgaatggagagggcgaactagagagggtggggggcgtcttctcccaggtccgggtgaggagccgcagcaagctcc

SEQ ID NO: 288657 - DNA, 122 bp, Homo sapiens
gaaagccactgaggcagcggcgtagccggcggaggaccactgtgacgaacttgtgtcctgcgtcaacagtgtgtggaacgttggcgacttcggcgctcgagctgcactcggctgggctcttg

SEQ ID NO: 288658 - DNA, 122 bp, Homo sapiens
tcgggaatattatgttgcatagagcgatgataagaattagcggaaaaaatgcatgtcagtcgcttaggaggagactggcaaaccctgaatggatgcatgctgtagagtaagaaaatcccctg

SEQ ID NO: 288659 - DNA, 122 bp, Homo sapiens
tgtcactcgtctcgctgccaagcacagggctgaggtgcggagggaccactgagaggacttcgctgcgtgtcagctcagctctggacggcgtggaggaggtggttggcgaatagtgaaatgta

SEQ ID NO: 288660 - DNA, 122 bp, Homo sapiens
tcctctggcctcctcggatccccccaccccttcaccttaccccaggggtgacactcagcccggccttaatccagcctggaggaggacgttttgactctgctgtcatgagcctgtcagcgggc

SEQ ID NO: 288661 - DNA, 122 bp, Homo sapiens
atgttgggatgctgaaagggggcctggatttccatctgcctgcgcatctggtgctccccacgccctcctctatctgagacttgaaggccttgagggccacgatgaaatggcttgtcttcttt

SEQ ID NO: 288662 - DNA, 122 bp, Homo sapiens
tttttttaaacggggttgatggaaagaaaaatattaaatagcacaagtgaggcacagttacgaccaaaattgtgaaggtgggatgtgaatgacaggcgatggggaaatagtcactgcacaaa

SEQ ID NO: 288663 - DNA, 122 bp, Homo sapiens
cagcgtgtgactactcccccaggtggttatggagagggtgtccggtccctgtcccagtgccgagaaggaagcctcccacgactgcccggcagggtcctagaaattccccaccctgaaagccc

SEQ ID NO: 288664 - DNA, 122 bp, Homo sapiens
aaaaaaaatccagccagcccagaacagatacagaatctgcagggatggatcaccactgaacgttccctgccctccccagtgttctgaacccgagtcttttctcatttcactcgcaggtggcg

SEQ ID NO: 288665 - DNA, 122 bp, Homo sapiens
aagccggctggtcaggtggctcctggggaatgtcagatggggcacagggtcagaggcccccgtgtcttcccctggcggccacctttccgctggggcccaagggtggtctgtccacttgggac

SEQ ID NO: 288666 - DNA, 122 bp, Homo sapiens
ctctcttggtcagaacataacgcacgggtctggcttccacgtggtcctggacaccatccccgccatgatgagtgccctgcggatggtgtggatcatctcccgacactacaacaaagacgaga

SEQ ID NO: 288667 - DNA, 122 bp, Homo sapiens
acctcaagatctgcccgcctcggcctcccaaagtgctgggattacaggtgtaagccactccgccaggccagttctgacatttttaagaaagattaggctgatgctatggtaactcagttatt

SEQ ID NO: 288668 - DNA, 122 bp, Homo sapiens
ctcacggaagctaaaagagccccagcaaccacccgcctgggccctgagctctctccaaagcgggaggggattcactaagaggttgctcccctggcattgaactcagcatcctatactggtcc

SEQ ID NO: 288669 - DNA, 122 bp, Homo sapiens
gagaaagttattacatacataagaacacatttactttcattttatttttctcctacagagcgtcctatatttctgtaaactggattacagggtacttagaagaacgagcttgcttgtcactg

SEQ ID NO: 288670 - DNA, 122 bp, Homo sapiens
cggatggaccggccctgcccctccggtcccggtcaggaccccgcgccgcgccccgttcaccgcccgcggccccgccccgcgccggcacgtcacaaaacaaccccaaagccgggggaccgggc

SEQ ID NO: 288671 - DNA, 122 bp, Homo sapiens
tcaggaggctaaggcaggaagatcacttgagccccggagttcaggcactctaaactgtagcgcacaatgattacatctgtgcacgccaacctgggaatcacagcgagaccccgagacctcgt

SEQ ID NO: 288672 - DNA, 122 bp, Homo sapiens
taggccgggtcaactatgactcttgacgttgactcattctccttaggcgagtgacttaatcgctcggcgtctcagcttttttatttatgaaccaaaggtgatgatacacttacctcacaagg

SEQ ID NO: 288673 - DNA, 122 bp, Homo sapiens
aaatcctccccctcgggacctgccatgaaggcagacgggctggcccggaaggcccccaagcgctgggcccaggcgtcccggctcaggggccccatggtgaggcgcgcgggcccctgcgcagg

SEQ ID NO: 288674 - DNA, 122 bp, Homo sapiens
ggaactgtagtggtttggaaagcatgtttctatcttaccaaaggaggaacagaagatgaccgaccacaaaatttgaagaagatagactgattaacctgggggataagagagattttctaagc

SEQ ID NO: 288675 - DNA, 122 bp, Homo sapiens
actccggcccctcctgctctatccacggcgcccgcggctcctctctcggactcgcggcgtcgctgtcgaacctcacgaactgggtgtcgtccacgtagcccactgagatgaagcggggctcc

SEQ ID NO: 288676 - DNA, 122 bp, Homo sapiens
cgggaaaatcgggtcactcccaccagaatactgcgcttttccgacgggcttaaaaaacagcgcaccacgagattatatcccccacctggctcggagggtcctacgccacggagtctcgctga

SEQ ID NO: 288677 - DNA, 122 bp, Homo sapiens
ggatggaaggcgtcgaggaccggaggaattaatccgatgtggggaaggcggacggggctacgaggaaaaaagagggggcaatgtacactcagccttttcatcactcggcggggagatggatg

SEQ ID NO: 288678 - DNA, 122 bp, Homo sapiens
cctgggggctccctccagggctgggtgagcatccccagtggggccgtggagagctggcagcgaggctgggtgtgctcctcaccaggtccggtccgtgcagcgcactctgtgcagagagtggg

SEQ ID NO: 288679 - DNA, 122 bp, Homo sapiens
cagccttgcagggggtgggagaacacagctggtcccctgggccaggctgaggccacctgacgctgtttactcagccacttaggaaggccctgccttcgggcacagccccctgtccaacatac

SEQ ID NO: 288680 - DNA, 122 bp, Homo sapiens
cccgttagcaggaagcctaacagtcgccccgacgctagtgagggacccaatctgagtccccggccagccgaatcccagccgtgtgtactgcatgctcagcactgcccgacagtcctagctaa

SEQ ID NO: 288681 - DNA, 122 bp, Homo sapiens
acagccaagaaagagctagcgcggaggctttcctttctggctctgtaacgatgaagcaagcgcttactcaccccaacccacttgcttctcaggacggtttccatgcagccgccgcggtgaac

SEQ ID NO: 288682 - DNA, 122 bp, Homo sapiens
gcatcggctccagtggggccacctccctccgcttccctctagttcttgggcgatgagtcgcggggttcgctcacccaaagccacagcgaggagcagagacagggacttcatggcgctgcgac

SEQ ID NO: 288683 - DNA, 122 bp, Homo sapiens
ttcggccggcgccgggctggcagccattggaggaaggtctgtcacagggaggcccaatcacggcccgctcaggagcgcagctcggcctacgattggctagcgcggcggctgccccctccgcc

SEQ ID NO: 288684 - DNA, 122 bp, Homo sapiens
acctgcgcgctgcagcgtctccttcccgttctccaggtatctgcggagccactccacgcacgtgccctccaggtaggctctcagctgctccgccgcacgggccgcctccaacttgcgctggg

SEQ ID NO: 288685 - DNA, 122 bp, Homo sapiens
ggaattgtagtcccgggccggaaacgcaggagacgccagaaacccaagtttgggacggcgcgtcccaagggtttctggaagttgtaacctgtgctccgagtgcgtaggcgcaggaacccttc

SEQ ID NO: 288686 - DNA, 122 bp, Homo sapiens
ttacagcactatcagtaggttcattatgaaccgcagatactgactgggattgttttctcccgtaacctttgactaagatgatgcaagactacataactaaacttttacctacaccaggtatt

SEQ ID NO: 288687 - DNA, 122 bp, Homo sapiens
gaatattgaaaaattcgtgaaggtgctttaggcccgagctgttcttcctggaagactcggcggaggggaacaggaggagcggcctcagcaggatgactcccactggctcctgtcccgcagtc

SEQ ID NO: 288688 - DNA, 122 bp, Homo sapiens
ccggtttccagacacctcggagtgtgagacccccgtctccggggtgggggtgcggacgggcgatctggggacccgaccacaagacgagcactgtgcctctttacctgtagccgccgcccgcc

SEQ ID NO: 288689 - DNA, 122 bp, Homo sapiens
taataggagaaaacaggaactgggaaccccacggaccaaaactcttcccattaatgaacccgcaccctgagtcaggattctccggtgacggccctcctgtggtccctgcacaatctgagaga

SEQ ID NO: 288690 - DNA, 122 bp, Homo sapiens
gatataaccatccctgagatctggcatatgtttcgccaacttcttatctgtctccgatgccgtggcactcacagcaaaaggcgacattcacttagaactctccgtgggaaacacctctttga

SEQ ID NO: 288691 - DNA, 122 bp, Homo sapiens
ggactctgaggctaagtgccaggtttccattctgtccccatatgcacacaggacgtcagacgagctagtgagcctcgtgcctctgttccctcacctacggaactggggtgataaaactacct

SEQ ID NO: 288692 - DNA, 122 bp, Homo sapiens
gcgggcagcaggaaggcaggccgccggccccccagacttgtctcctagggcaccgtcccgcgggtgcccccgtggccgcccagttccggcgtccccccagcccagctctcagtggccatgca

SEQ ID NO: 288693 - DNA, 122 bp, Homo sapiens
gctcccagactcttcgggcttgggggcggagtctggcgaggggtggagcttactgacggccgggcggggcccccagatagctgaggcttttcaagcagggctgctttcagaagttagctcgc

SEQ ID NO: 288694 - DNA, 122 bp, Homo sapiens
acgaagtgaaccaaaaaaatactaggtagtctcaaaactgaagaacaaggcctgaataatcggaaatagccaaaggacatgttggtgattgtgctattacagaggctagttctttataatag

SEQ ID NO: 288695 - DNA, 122 bp, Homo sapiens
ctctcaggtgatccatgcagggattctgagcattcgtcggcgcctccccaggggctgctgcgccccctgcttcccgcgcgcccaccacgcacgctgctctgggagcagggccggcggcgccg

SEQ ID NO: 288696 - DNA, 122 bp, Homo sapiens
aatgtgcatagcagcgttattcacaggagccaagaagtgaaaacagcccgaaagtccacccgctgacgactccataaaccacacatggtctgtccatgcaatggaatatgaccagccacaaa

SEQ ID NO: 288697 - DNA, 122 bp, Homo sapiens
gagacctccccactgttccaagggctcttggatggcccttccccggctggctgcggatggcgtgtgctgccaggggccgcatctctttagtgtcctttagtgacaacattcccaggtctttt

SEQ ID NO: 288698 - DNA, 122 bp, Homo sapiens
acgcgctcacctccgggaggccgcacttgcccttgtccgcgtacggcgacagccccgccgcgtaattcaccgacatcctcgactgccccacgggaacaataaagtttcccttgttgaggccg

SEQ ID NO: 288699 - DNA, 122 bp, Homo sapiens
acttttagagacaaaagcagaacatacgaaagtgtatttcactgctgagttcttaagaggcgtacaccgtgtggttataacgtgcgcaactctgtcccgggcaactgaacttatttttagcg

SEQ ID NO: 288700 - DNA, 122 bp, Homo sapiens
cactgctgtgtcttgaggaacatccagtacacctgacatttccattagaacagtgggacccggataccactggcaggaagtccatcttcacagctgccaacccatctgtcaaacccgcagtc

SEQ ID NO: 288701 - DNA, 122 bp, Homo sapiens
cataatcttatgacatgagggaaggaatattaaagccgttctgtgggttattatctctaacgttcccaatagaataggctttgccagctgggtgtggtggctcatgcctgtaatcccagcac

SEQ ID NO: 288702 - DNA, 122 bp, Homo sapiens
gggggggccgggccgcttggtaacccctccctgtccgggcctcgccgctcagtacgggggcggggctagccggctgaccccctggcctactcccggcctccggctccaggcccttcccggat

SEQ ID NO: 288703 - DNA, 122 bp, Homo sapiens
gagctggcgcagctgccctggtggcagtggctgaagtggcggcggcttcggcggctgcggcggctgcaacagcttcgggctcggggttttggcggcggcgccggcgggctaggctgcgcggt

SEQ ID NO: 288704 - DNA, 122 bp, Homo sapiens
ctcctcctcctcctcctccccgtctgtccgtccgtccgtccgtccgcccgcccgcccgcccgcccgcgcttccgtcctgtccagccgccagtcctccagcccgtgtccccgctccgcccgct

SEQ ID NO: 288705 - DNA, 122 bp, Homo sapiens
cagtgtgaattagttttataaactacttctccccagagtgtgttttgtaaatgagggccacgaagagaggaattagtcagattctagaatacgtaaatgagagcagtgtttaggggttttgc

SEQ ID NO: 288706 - DNA, 122 bp, Homo sapiens
tccctgcgcgaggcccgcatcactgagaagctggagaagcagcagaagatcgagcaggagcgcaagcgccggcagaagcaccaggtacgctccggtggccccaaggccctgcagcccgccca

SEQ ID NO: 288707 - DNA, 122 bp, Homo sapiens
cttccaccagaccgtttttccttcatgtaaattaactttctgtccagaaaagtgttgttccgctgctgtggagacctgatctctggaaatgttcaaaaaatttagagtcaaaagggctaatt

SEQ ID NO: 288708 - DNA, 122 bp, Homo sapiens
ctgggacagcgggtggccagaggtcaccaggctatgggggcaaagaatctgggcgtgtcccgcgggggcggggaggggcgggggcggggcagcccttcagtgccggtttgcagtgggagggg

SEQ ID NO: 288709 - DNA, 122 bp, Homo sapiens
aatattgcctctgtgtaatgttctgagaccattcagagcccggttaagaaaacacagcgacgactctcctcagagctggggctgttgattttgttaggtgagatcacttgaggaatataaaa

SEQ ID NO: 288710 - DNA, 122 bp, Homo sapiens
gcagaggcgaggggtgggagcgccggctccaggcggcggaacctccgcactgggctcgcgcgcttccggccggcgccttttcccagggactccgccaacccctcgcacccccgcgcccccag

SEQ ID NO: 288711 - DNA, 122 bp, Homo sapiens
gcgggcgggcgggcgggctagcgccgggtcggccacgccctcgcccgtggcgggcgctggcgccgcggccccgcccacacgcaggccccgcccacactcccggacctggggttcgcggccgc

SEQ ID NO: 288712 - DNA, 122 bp, Homo sapiens
agggcgaggaggagccttaaaggagccgctacatgctttttggccattttcccctgagagcggcctcggagatggctgtgactgtcctaagctgggagctgcaagggagaattcctgtcatt

SEQ ID NO: 288713 - DNA, 122 bp, Homo sapiens
acctcctcacctactcagggacccgtcccaagtggacccgcgcacaggagcacgggaaaacgagtcctgtggtgacacctcgcctggagactcagagctgcggaaactacaactcccacaag

SEQ ID NO: 288714 - DNA, 122 bp, Homo sapiens
aactgactttgcttcgctctcattagccggtggtcctccaggaaagcggggccgcctctccgctgtgctctcataggcccaggttcttgcgttcgtgtgtccttctctcactctgattggcc

SEQ ID NO: 288715 - DNA, 122 bp, Homo sapiens
aagactgagttcttgtccaagctcacgcagctggtaaagtcagcactgagaactgaggtgcggagatagtgcagccagcccaggccacctggctccaaaactggaccagggtcattgggcga

SEQ ID NO: 288716 - DNA, 122 bp, Homo sapiens
accattccttgttcctatcacccagcttacctaagaagaacgtaacaaccccagacaacacgtctgattcaatttgccccggagtacccagaagggcagcaacccagcaggtgaggcaatga

SEQ ID NO: 288717 - DNA, 122 bp, Homo sapiens
cccgcgagccccgcaccgccggccccgcaccgccagccccgcgagccccgccccgccccgcgcgctcctcgcattggccgagtccccgcggccacaccccctaccagattggggccgctatt

SEQ ID NO: 288718 - DNA, 122 bp, Homo sapiens
ctgggattgctcctgtttctgaaagggttaactcatccaagttagagaatgatccatcttcgacaagacaaacaattatatttgttgatccccaaaggcaaccaacaatgcacctaaaaatg

SEQ ID NO: 288719 - DNA, 122 bp, Homo sapiens
ccgagcacaccttagaaatcccaccttttgtgctcaacgtggccgggtccccggggacgccgttggcagctctccatggagcaacagtgccacccagtggtcagtcctcgcgatgccgccgc

SEQ ID NO: 288720 - DNA, 122 bp, Homo sapiens
tcaccaggaactgattggccagcactgtcatcttggacttcccagccttcaggactgtgacgaataaattgctattgtaagccacccagtctatggtatctttgttatagcagcttgagcca

SEQ ID NO: 288721 - DNA, 122 bp, Homo sapiens
tttatctgaagctttggtttcaagcatttcagtcacaacactcccaattgaggagtgccacgggagtgtgaagagagcttcagatgtcaaacatttcctagaacctggtatttacaaagctg

SEQ ID NO: 288722 - DNA, 122 bp, Homo sapiens
cgacgccctgggcctgcacctctccagctcctcccacggggtccccgtagccccggcccccgcccagccccaggtctccccaggccctccgcaggctgcccggcctccctccccctgcagcc

SEQ ID NO: 288723 - DNA, 122 bp, Homo sapiens
caccggaggaaattattgaaaaatggcgggagattcccctcctcccccgggcccggccaacgcacacactaacttgctcccccgtggcgccggtggcgaatgctccaataggcggagagctg

SEQ ID NO: 288724 - DNA, 122 bp, Homo sapiens
gcttcgtgggctacagctaccctgccgccgtgccccaggccctctcagccgcagcacccgcgggcaccactttcgtgcagtaccaggcgccgcagctgcagcctgacaggatgcagtgaggg

SEQ ID NO: 288725 - DNA, 122 bp, Homo sapiens
agtctcctgctagtctgactcctgaagcatcagcccttgtcatactgtattgactgtgtacgtgcctttcaccttgagcatgcttcaggatttttttttaaaccacagaacttgaatacatg

SEQ ID NO: 288726 - DNA, 122 bp, Homo sapiens
aaaatgaaattactgacaaagtttgctcctggaccatatgagagagtccaagtactgactcggctcaaaggaaataaaaccgaaaactcttgatctcacccaaaataaccattctgcaccct

SEQ ID NO: 288727 - DNA, 122 bp, Homo sapiens
ccacggacgcccggacggccggccggccagcagtgagcgagcttccccgcaccggccaggcgcctcctgcacagcggctgccgccccgcagcccctgcgccagcccggagggcgcagcgctc

SEQ ID NO: 288728 - DNA, 122 bp, Homo sapiens
gcggagtgccgcgggttccgcgcctccagccccctttcgaatgtcaaacccaaggaaccccgacaggatggaaatgtcgcatcactaaattgtctcaaaatgtctattttagaaggataatg

SEQ ID NO: 288729 - DNA, 122 bp, Homo sapiens
cacgggcgagtgctactgcgaggagggcttcacaggcctggactgtgcccagggtgagagcggagatgtgccctcgggccgccggactcttctttccaatgcaccatttaaccctcaattac

SEQ ID NO: 288730 - DNA, 122 bp, Homo sapiens
atgtttgggagaactgtgttcggacccaatctagtgctaggtgtgctaactgctgctgggcgacagagcacgcagggccctctcagcaggcagcgcgcgtagggactcactcacacctcagt

SEQ ID NO: 288731 - DNA, 122 bp, Homo sapiens
gctagagtgggctcaggtcccaggcacccagggcttaagccttgatgttggagaggttctcggagggaggcttgggccacctggagggactgggcactctgagtagtaccctctgggaggct

SEQ ID NO: 288732 - DNA, 122 bp, Homo sapiens
ggtgcgcctcctgtgcgggaaagagaccatggtgaccagcaccacagagcccagtcgctgcgagtacctcatggagctgatgacgccagccgcctgcccggagccaccgcctgaagcaccca

SEQ ID NO: 288733 - DNA, 122 bp, Homo sapiens
ggagctctagagacgatgaaggggagagcatctctgctcagaagaagctttcatgggcagcgactgaaagaatgaggcccagaggaatttctaggaaatttccaagaaaggaaattcaaacc

SEQ ID NO: 288734 - DNA, 122 bp, Homo sapiens
ctccgcctcccattggctgcgccgcgcgtcatgtcgactaagttgggaactttgctggagcgaccgagagcctggagggaggaggcagtagaggagggagagagaaggaaccagggaaggaa

SEQ ID NO: 288735 - DNA, 122 bp, Homo sapiens
aggccgggggagcggccctgcgctgggggacgcgcgggaggtcggcggttcacgcttttccgtggcctctttgaaaatcacctccccagattcggtgagatcagttccccaatccgggtcac

SEQ ID NO: 288736 - DNA, 122 bp, Homo sapiens
gctcagctgctcattcccagcaatcaagaggggaggactggcccctgctaccagcccagccggcagtcatttgattcatccacacttgctagggaaacagaggcaggaaaaagcaggaaagg

SEQ ID NO: 288737 - DNA, 122 bp, Homo sapiens
gagttgggggacaggagctttaggggccagagtgcttgaaggcgcgtgtctcaagggagccgcaaggcccccgtgaagaggaatccccttttcctcctgagctgtggccggactgggtgggg

SEQ ID NO: 288738 - DNA, 122 bp, Homo sapiens
tggtgagtaatctagagagccaggggccgcctggggtccagcttgaggcctcctagctagcggaccgaacgtctgggctgtagctctagctagggatgggacttcttgcttcccggaatttg

SEQ ID NO: 288739 - DNA, 122 bp, Homo sapiens
ttttggtgcgactggccagatagagcagccccgtcttacctcttaatagcagaactgggacgtattcccttcatgccctgaagctaagtctagctttctctctacctacctgtcacagaata

SEQ ID NO: 288740 - DNA, 122 bp, Homo sapiens
tgtgatccgcctgcctcagcctcccaaagtgctgggattacaggcgtgagccaccgcgcccggccctgaagaatttcttttagcatttcttgtgtaggtctcctggaaaaaaaatctgattt

SEQ ID NO: 288741 - DNA, 122 bp, Homo sapiens
tccgaggcagctgcagcctggtctccggccaccctcctctgcagcccgacccacaccgtgcgggaacggacatccagagaagccacctcatttcagcgaggctgtccccagagaatatggag

SEQ ID NO: 288742 - DNA, 122 bp, Homo sapiens
ctgtgcacactgccggtcgccctggcccttcccaaacgttgtcaccccgcctcccaacttcgcaattgcgattcccagcccaggaggtgtacagattgaatgactcgctacttggtgggtgg

SEQ ID NO: 288743 - DNA, 122 bp, Homo sapiens
atgtccttaggaaagtgagtagggaggttgccatgacccaactcaacctgagcctgacctcgacttcctccccctcttgtgagagtctgggacatgtgcagccatatgtagacttttcatag

SEQ ID NO: 288744 - DNA, 122 bp, Homo sapiens
agacactacaggcatatcttgttttattgagccttgctctattgcacttcacagctatagcgtttcatacaaattgaaggtttgtggcaactctgcatcgagcaagtcatctggcaccattt

SEQ ID NO: 288745 - DNA, 122 bp, Homo sapiens
caccgacgccccgcccctgaccgccgatgcccctcccacgccggctgcggtcgccctcggcgctgcctgagagagtttgcgggatttcaagggtgacttgatttcgcctgatcctggtcggc

SEQ ID NO: 288746 - DNA, 122 bp, Homo sapiens
tctgcagtcccagcgtgtgtggatcgtgtggggatgtgtcatttccctgcacacaggtcacgcctgtgcagacagcctgcatgggcactgcacacaggacctggtacacagacccctccctg

SEQ ID NO: 288747 - DNA, 122 bp, Homo sapiens
catcccgcagcccggcaagtgggcgctggtgcgcagcctgaaccaggcgttcaagacctacgccgtcctgccggtgaggcccgggccaggaggggagaagggagggggagggcgcctcgccc

SEQ ID NO: 288748 - DNA, 122 bp, Homo sapiens
actccagctcctgcgtcccgggtgcccaaaagagcagacgactaaatctggtgtccgctgcgctcaggcgtgacgttctccgacgtggtgagcgcgaccgagccgtgcaagccgtgcaccga

SEQ ID NO: 288749 - DNA, 122 bp, Homo sapiens
tcagaggaaatgagagagaaaattaaaaagacttctccacacattcaaagcattagattacgtttggacagtacgtttcagccagttagaaatgttggccatttgtattaagtgaaactaat

SEQ ID NO: 288750 - DNA, 122 bp, Homo sapiens
tttatagtcaaaagagagcctcagccttttaaccaactttctgtgtaaacatgaaaattccgggctggatttgttccactgtgaattttagctcacacttgcccaactggattatccagtaa

SEQ ID NO: 288751 - DNA, 122 bp, Homo sapiens
gaagtttcgaagctgccaataaaaccctttaagtggcttgtgattcagtgcctggagttgcggggatggcattggtaaatgactctaatgcccaaagaaaaatattacaaatgccgctgtct

SEQ ID NO: 288752 - DNA, 122 bp, Homo sapiens
gcgcggcagagggcggggcgggaggcagagggggcggggacagaaaggtcaggggcgtggcgaaggtcgctgctttcctgctacaacgggcctactttagctaaaacagaaacgtaaggcca

SEQ ID NO: 288753 - DNA, 122 bp, Homo sapiens
gcagaaacactggaagagtttgctagaaagtgtttccctctgggggtggggccggcctggcgctccccagcacgtgcgcgcggtacctggagaaggtcctgctgggacgcctttccttcctg

SEQ ID NO: 288754 - DNA, 122 bp, Homo sapiens
gtccctcctggcatttcttttctgtcccaggcgcagagatcctcttctgggcgtctgttccggctatgagaagctctccgcaccctgaaagggagtagaaaaacagaggggatgggaaaggg

SEQ ID NO: 288755 - DNA, 122 bp, Homo sapiens
gctggaggcgccgccggcgacccccccctaggcctcgcaggcgctgcctccgcctatccccgctgaccactctgcgcccccgcagccgcgggtctccctgcctagtccgcgcaccctgcccg

SEQ ID NO: 288756 - DNA, 122 bp, Homo sapiens
gaaatgctatagagagccaatctccagctgcaggttggtgggcctggcactgaccagatgcgggtagctcaaagcaccgagcgatgcaggcgccgtttctgcattgcctgcagcctcttctg

SEQ ID NO: 288757 - DNA, 122 bp, Homo sapiens
atgagaggcactgttatctgcaaagcaatttaactttttttaaagattgatttgaaccaacggtatgaagctggctccttagaacaatggaaaataattggtttaaggtgattcaaaaatac

SEQ ID NO: 288758 - DNA, 122 bp, Homo sapiens
gctgttatttccaccatcgacaattgtttcttttccatcaaatgacacttcctgacccaccgacctcaaaggatttgtgagaagaaataagataagttgtcaaacaagagaggaaaaagtaa

SEQ ID NO: 288759 - DNA, 122 bp, Homo sapiens
tcagtccgccacttggctggacctgtgatcttttgtacagtagtctgtttagcgcagcctcggtttcgttgtctgaaaagtggggttaatgttctttgccctgcggccttccagggttgtgg

SEQ ID NO: 288760 - DNA, 122 bp, Homo sapiens
agtccggagttcttattacaacccctgctgcctccccccgtgaacatcttgcacaggcgacgtgcatttgttctaatgaacgaacaaatagtgacacgttactattagctagagtccataca

SEQ ID NO: 288761 - DNA, 122 bp, Homo sapiens
gggcccggctttctctctgcttcccaggcgggcgggggccccgaaggggagcgagggcagcgatggagcccaacttggacgggctctctcggtaaacagagatcaccacaggggcctgagcc

SEQ ID NO: 288762 - DNA, 122 bp, Homo sapiens
tctctcccaagcaggggtgttgtccttcacaggggcttccacgtctctcccgggcctgtccgcactctgggcagggctggcacctggctattccctcaatctgggccctggggccatggcaa

SEQ ID NO: 288763 - DNA, 122 bp, Homo sapiens
gtccatcacaatgccagctatggccagaggcgtacagggacagcacggcctggatggccacgtatatggctggggtgtgaaggtctcaaacatgatctaagtcatcttctcgcagttgtcct

SEQ ID NO: 288764 - DNA, 122 bp, Homo sapiens
acaccacagaagttaactgtaactataaatacaacagaggcaggacagggtgaccatgtccggctccagcctggtgctcactctttggctgggcttctgcagaagggaggacacctgagacc

SEQ ID NO: 288765 - DNA, 122 bp, Homo sapiens
gagtgctggtaccagatgttgagggggctgggcttccacttacggaactactgccctacacgaaaattgaaacaaaggaaatcaaaaaaaaagatacaacaaaatcaaaggagacacgggat

SEQ ID NO: 288766 - DNA, 122 bp, Homo sapiens
cgctttattgtgttaacccatttgcgtgtcaagagctattgggcgctttctctgcctgtgcgttgcgggccgcgggaggagggctgcggtgccggccggtcacctccgcgggcgccgcccgc

SEQ ID NO: 288767 - DNA, 122 bp, Homo sapiens
attcttaaattggcggggcgagcaaaggtcgtggagaagaccccgggaagctgctggagccggcagaggaggaatcccaggttttgcgcggaactggccactgtaagtggttcaatgtgcgc

SEQ ID NO: 288768 - DNA, 122 bp, Homo sapiens
gcttttccctcttggtgcacgaaaggaagacgcctgtgggaaatcgaacagacaatcggtcgccgttcgtgaatcttagagatgagagtcgtcagtacatgaccaaaagccgtgttcggctc

SEQ ID NO: 288769 - DNA, 122 bp, Homo sapiens
tgggcaggattaatcaatatcctgtagctgggtgggattaatcgatatcctgtagctgggcgggattcatcaatatcctgtagctggaagggattcatcaataacctatagctgagtgggat

SEQ ID NO: 288770 - DNA, 122 bp, Homo sapiens
tccaacctcagctccccggcaccgcgaccctccgtgcagtgcgagcccccgatgggcgcgcgcccccacctgcgctccagaaggccgaagggggcatcccacttgcagggcgggtcacccgc

SEQ ID NO: 288771 - DNA, 122 bp, Homo sapiens
gagtgggcagggcacccagtgacacaactgccaagacagccccgggtgaaggttgtgccacggagccccaggcagtccagctgggacagggagctcttccagaaggccccgctggtgccgcc

SEQ ID NO: 288772 - DNA, 122 bp, Homo sapiens
gcaggtgctggagcagcccccctggaagtgatgcagcatccaggaagacggaggaaggggcggagaaggacctctgctttccaggctgccttttatactgcctctggtcacctgacgtggaa

SEQ ID NO: 288773 - DNA, 122 bp, Homo sapiens
tccactgagccagagaggatcgaacagtgcctgccactgctgggggacccactgggattgcggtgtggggtgccccagttggactagggggcctgttttccagggaagattcagagcaggag

SEQ ID NO: 288774 - DNA, 122 bp, Homo sapiens
ccctgcccagcgcccggctccctccgagtggccagcagcgccctctggtggagactggctcggcctccgcggcactgcattcccacggcagtggtccatctagtccccaagtcctagaggag

SEQ ID NO: 288775 - DNA, 122 bp, Homo sapiens
ctcaaggtcacagcagaaggttgatggcctgcttgatgattctgcagagtcccgagtgctcgtctgttacctctcttcccctgctccagtcacgatgggcacagtctccccttgccacatcc

SEQ ID NO: 288776 - DNA, 122 bp, Homo sapiens
ggcgcaggcacctccagtagagggcttgtttttaaaatccatccgaaagggccaatcagacgcggcagtctgagtgcgcaggcgcggattggtccgcagctacttagagtgaccaataggcg

SEQ ID NO: 288777 - DNA, 122 bp, Homo sapiens
acaaaaaagcgggagcggggccgagggaggagggcagcctggcgtcttgccgcgtgtgggcgggggcacccctggattacctagagtcagatgtattatccaaaggcctgcttctgaagccc

SEQ ID NO: 288778 - DNA, 122 bp, Homo sapiens
atgattggcgcattcttccgtccttcaaaggggcgggttctagagtcagttttgcctcagcgggccctgggattggccgacagcggtttaccggtggcttctattggcctcccgggccgtcc

SEQ ID NO: 288779 - DNA, 122 bp, Homo sapiens
tggatttgcgcctcttgggacatcgtgcatctcaagaattaatcagacatcgaacgggtgcggtagctcaacgcctgtaatcccatcacatcagacatcagagccccgggttgtgtttctgc

SEQ ID NO: 288780 - DNA, 122 bp, Homo sapiens
cctttctgcagagtgaaattttgcagtggagggatagccctgctgcatacctagagaagccgaggacatcaatgaggaaatcaaacaataaaaggaagagatgccaaaattgcaatttgcct

SEQ ID NO: 288781 - DNA, 122 bp, Homo sapiens
cggacaagtgtccaccaacgcggcggtggtggtgagaagtgagtgccgggtgggctttcacggggcacctcccgcctccttttctcttttctgctgcactcactttgctgtcttgcagggtt

SEQ ID NO: 288782 - DNA, 122 bp, Homo sapiens
gcagaagcgtcatgctgtccttcgggatcttgttcttctccttggtggagatcatggtgccgcgggcgccgcaggccgtggctggaggggagaaagcggcgctggaggggggcgcgcaggcg

SEQ ID NO: 288783 - DNA, 122 bp, Homo sapiens
ctatgcccagcctgtaactttgaaattagttccgaaaagtttggatctttccatttatgtcgggaattgttaaggctccccacctggtggtgattgtggacactcctgacaccatcaaagcc

SEQ ID NO: 288784 - DNA, 122 bp, Homo sapiens
acgtcaatcaaggaaaaaaaaattttttttctgtgccccgcccacctcctaacgcccccccgcccccccaatctagggccgctctcgcccttcggattggctcgatgcgtttttccccgaat

SEQ ID NO: 288785 - DNA, 122 bp, Homo sapiens
gttaggaagaccagggtggtctgtgcccggtgccggcgcctgcccacccgcaggctgacccgcgcctctcacatctgtccttggcgacgtcgtcacctctgctgctggcgacgagtgcctag

SEQ ID NO: 288786 - DNA, 122 bp, Homo sapiens
cgcccccgtgacgccttgcgcccttccaggtgtaccaggacaacgtgtacgccgcgggttcgcagttccactcattcaagaaggtgctcatggagatggggccgccctacgccgggcagcag

SEQ ID NO: 288787 - DNA, 122 bp, Homo sapiens
gccgccgggttcaagccgcccagtcaagggccaggtggttaccgtgcattttgcagacgtcgtgagagaacagcatgtgggagctggtgttcaccttgaacaactgtgacgtcatccaggcc

SEQ ID NO: 288788 - DNA, 122 bp, Homo sapiens
tggcacagaaggcgcgtgcccgatggggatggcaggagagtctgtgcatggtgggcaacccgcagaacgactttcggccctcggcagtctctcttggctctggctttgcagactcccatcct

SEQ ID NO: 288789 - DNA, 122 bp, Homo sapiens
cctggttcagatgaggggtgagagacattgctcctccaccccacgtgggtctaagaaactcgggaggagaaagtaatcgtgaaacgccgcacgggggaggggtgagaagggccgagaaacgc

SEQ ID NO: 288790 - DNA, 122 bp, Homo sapiens
accccccagctctgagcgccacgtggcctggctccgctttcccagggtctgggcagtgggcgcggccggggtctggtctctgagttgacggggaactgagggtgggcagacttgagacgtgg

SEQ ID NO: 288791 - DNA, 122 bp, Homo sapiens
cggatcacggctgcggtgatcgagcacctggagcgtctagcgcttgtggacttcggcagccgcgaggcagtggcgcgactggagaaagctatcgccttcgccgaccggctacgcgccgtgga

SEQ ID NO: 288792 - DNA, 122 bp, Homo sapiens
gggagacgccccttccccaccccttaggggattgttccctacacgccatcctttaccattcggacactggtgcaggatggagaccctggggtctccgtttaagttctcaggcttggagagaa

SEQ ID NO: 288793 - DNA, 122 bp, Homo sapiens
ctaagcttagcagcaggctgcagatctctctcctgggagcggtgctgggtaggggtggcacggatctactgctccagctctagcaatttatcctgcgtggctggcaggccggctctcccggg

SEQ ID NO: 288794 - DNA, 122 bp, Homo sapiens
atcatggcgtccgagggtgggtccaacgggcttcgagtgttcgggagataatgcacacttcgcagtggatcttctcggggccccgagcgttgcccgcccattaggtggcgccggtcccctcg

SEQ ID NO: 288795 - DNA, 122 bp, Homo sapiens
cttcctgtccctggggaccactgagtgcatcctcctgacagtgatggcctttgaccgatacgtggctgtctgccagcccctccactatgccaccatcatccacccccgcctgtgctggcagc

SEQ ID NO: 288796 - DNA, 122 bp, Homo sapiens
cgctccttcctgcgggctgcctgggcggtgactgccatggctgcaggtccgcgcgcggggcggagtcccgaagatgcaacggcagaagcagctcagggataagtgctgacggggcggggcat

SEQ ID NO: 288797 - DNA, 122 bp, Homo sapiens
ccacttcccccagcccgaaagctgggccagataaatgtcagtctgggccccgacccacagcgccaggcacacacaccatcagcttggggaaggcaggcggggtggggtggctgagttctgag

SEQ ID NO: 288798 - DNA, 122 bp, Homo sapiens
tccagccctagccctggtgctggggcccagcctgggggcgaatggctggcctgggcccaacggaccttcacaccttctcacactgtgggctggcaccaccatatagctgctccctggattct

SEQ ID NO: 288799 - DNA, 122 bp, Homo sapiens
catcgaaaacttcctgaacacgaccagtaagaatttgatctcgagcttccgaactccaaacgcctgggcaagaattcagcaaagcgcagcaccgctcacccgcacttcccccagctagcggt

SEQ ID NO: 288800 - DNA, 122 bp, Homo sapiens
tacaatgacggtacaacttacattgatacaagcaatttggccagaatttatttacaatgacggtacaacttacattgatacaagcaatttaaaagtatgatcttatttctgtgtctgctctg

SEQ ID NO: 288801 - DNA, 122 bp, Homo sapiens
gagtggacggggctacagaaggcagcgcaggcggaggctgggcactccaacatatggacacgcggggcggggaggaggcacgtgcatgggaaccttctaaccgtggtcaagcctcgggcagg

SEQ ID NO: 288802 - DNA, 122 bp, Homo sapiens
acagataatgtcaaaactcctcagatacctcctgacctgctagatggctctctccaacaccgcctcaagggattcgttctctctgttttaggtccataggctgaattaaagccacaaaccca

SEQ ID NO: 288803 - DNA, 122 bp, Homo sapiens
gtcgttctcatcggaactgaggtccagcacattgcctccactttggcttattgtggttcacgggtaactgtcatattacatggtacttcactacccaggcactggcattcaatttttgtggt

SEQ ID NO: 288804 - DNA, 122 bp, Homo sapiens
cgcgcaagtccccaagagctctcagaggttcctgaccctgagcgttaaagcccttcctcgcggatgagacccttggtgcgttccacccgcttgggggctgagactcgccaggacgcactcag

SEQ ID NO: 288805 - DNA, 122 bp, Homo sapiens
cggagacgggagcaaaacacagagaatcggggctacaaagccggtgggcaggtttggctacgctcaaaccgggcagtgccgcggtttaggcgtctccttccttcccagcgactgcacaaaat

SEQ ID NO: 288806 - DNA, 122 bp, Homo sapiens
cctggagctccggctacagcgagagacaaagaccccgccaaacccggaagccgtccagtccgctccagctgcatgcctgattggacggtttccagcccagcgtccctggttggataatgctt

SEQ ID NO: 288807 - DNA, 122 bp, Homo sapiens
gtgaaaggtactcctgtgtggatctggaggtgttcacgtaagctgctccggagagtgaagcgccgtccacacaggtggcaggcatagtactttggaaagctcccattcctcttcatgatgct

SEQ ID NO: 288808 - DNA, 122 bp, Homo sapiens
ttttaccactctaaactgcttttagagggtagctcgatctaacaccagaaagagtaggggcgagagcaaggaggaactcccgtatcaaagaaaaacaactccgaaaccgttccttccgctgg

SEQ ID NO: 288809 - DNA, 122 bp, Homo sapiens
gctgagcattgaaggccaccaggggttcagctctggaggggttcttattgctagattttacgtcaatgtaggtcagcactggggcctgtccatcctctggacctggactccttctagaagta

SEQ ID NO: 288810 - DNA, 122 bp, Homo sapiens
gtttttttttttcttttgctgcgccagctgggaccccataagacaagaatggctgatctgcgactcctccctcttctctcttatccctattgattttcctctttgcatctgcctcacccact

SEQ ID NO: 288811 - DNA, 122 bp, Homo sapiens
gggtcatttgcatgagaacagattcctttgtgtaaagttggcctgcctgttctctgtccacgtttatagtccttcaagtcttcgtgttgggttgctaggcagatatgaccctggcttgcaaa

SEQ ID NO: 288812 - DNA, 122 bp, Homo sapiens
tttttaattcgctatcctcgggaccctaattagaattgggctgcccccttgcggtctctccgacgtcctatcttcaaccagctcacagtccttgggccctgctctcctctccattgtactct

SEQ ID NO: 288813 - DNA, 122 bp, Homo sapiens
gttttagtgaggagcagccaggaattgtttttcttttctctagttgccaaattcttgtctcgtgattaaagtatttttataacaacaacaaaaaaagatgtttaaacagaagaaaaaattca

SEQ ID NO: 288814 - DNA, 122 bp, Homo sapiens
ctgtatctctttgtctctccctgtgtgtgtgtggggtctctctcagtctttgtccctctgcgtctctgggtctctctgtctctgtctccctgcgtctctctctctctgtcatctggctcttc

SEQ ID NO: 288815 - DNA, 122 bp, Homo sapiens
aaagcttcaaagtgttcatatgaaaaaaagaaaaaaagacaggatatagttctgtgccgtcgtaggctgcactgtcaccgttctagaccggctgactgtaggtcagatgggagtgtccttcc

SEQ ID NO: 288816 - DNA, 122 bp, Homo sapiens
cgaggaattctggagcatgaattataccacaaggttagtcttacttggagacgaggggaccggtattacataagccctgtcaataagtcatgggtggttggctgccttcagggaagtggctt

SEQ ID NO: 288817 - DNA, 122 bp, Homo sapiens
gccctggcaccggtgatcgccgctagcttttttttcagccgagcaccctgtccttgaggccgagcccatccgcttacacaggccagttacttctgctgtattttgtggccgcagagaacctc

SEQ ID NO: 288818 - DNA, 122 bp, Homo sapiens
aggggcctagttgagacacaggtgaggtgaccctcaggagaatattttcaacctgaggtccgagggagtgggcctgaggcctaaatagaaagatcctctttcttcagggaccttggggattt

SEQ ID NO: 288819 - DNA, 122 bp, Homo sapiens
tgcgcagccccgccctgcggagggcgatcgtccccacgttggggccggggggcagggacccgacgtccccaaaatctcagctggggcgcagccatcctgggagagaccgggcgtggagatgg

SEQ ID NO: 288820 - DNA, 122 bp, Homo sapiens
gaccggacttttacagatgagcatgcgctcccacctccaggatggtagtcggtatgaacccgcggtgcagccatagtcccgtgagctgcccacttcctgccctggccagtggttcgcctgct

SEQ ID NO: 288821 - DNA, 122 bp, Homo sapiens
tggtggcgagcgggcctcgggtatttcaagctttaaggctccactgggctccctgggggccgtttcttccttgcttcttccttgcctcctgtcataggattgggctactctttggacctgat

SEQ ID NO: 288822 - DNA, 122 bp, Homo sapiens
gtgccgaccgtgggcttcagctaatggcgacgcgtccatatggcccctcagtgcggcagacgcccccaccgcaccagtgcacgaggcactcgcggagcctgtggggcgggaggtgtgcggag

SEQ ID NO: 288823 - DNA, 122 bp, Homo sapiens
ggggcggtgggcggatgcctacccgagagaccaggggagctaagtgattgatggagcttccggaagtcttggcggctgtaccagcgctaatgttcctccttttcctgaggtggagtgggccg

SEQ ID NO: 288824 - DNA, 122 bp, Homo sapiens
gccctgcctcgtgctaggcgtcggggaacccccaagggaaccacggggaccagagcccggcggtcatggcgcttgctcttggaggcacataaagggcttcatttcagatgatgaaagtgcaa

SEQ ID NO: 288825 - DNA, 122 bp, Homo sapiens
cgcgtctgctccgaattccttctcgggcagcgaccgcaaacacgatcttattattgttctcgcgcgcgctcagcatcccccccccgccccgcttcccgcttcccgctcccctccccttccct

SEQ ID NO: 288826 - DNA, 122 bp, Homo sapiens
atggcacccgcgcacctgtgcccgccgagcgagggcgccccgggcccgcctcccgcatggcgctctctccacagagcccgagcgcccctccgaagtaggggacacacccctcctcccactgc

SEQ ID NO: 288827 - DNA, 122 bp, Homo sapiens
aggcgcgtgggaagcggctggccatcttgaaggcgcagacgatctggaaagaacgcacggcgatacaggagatgcagattgtgaagcagaggggaaagagggcctggcggcagaggcaggtg

SEQ ID NO: 288828 - DNA, 122 bp, Homo sapiens
tcccacagagagggcagctctggcaggggcaggggccactgtgggactgggacgaaggagcgactccctagcgtcctgcaaggcaggcgcagcgtctcctattctaggctgcagaacccgag

SEQ ID NO: 288829 - DNA, 122 bp, Homo sapiens
cgagtcccccgccctccaccccgccaggcccaggagaattgataggcgggccccgaagcacgtcttcccggaaaccggacttcacccgctcccgggctgccatccgcggctgggtgacgctc

SEQ ID NO: 288830 - DNA, 122 bp, Homo sapiens
tgaggaggaaactgagctcagagctgttgcctcccgggcgcggtcacacaggaccagaggcgccttagaactagggcataggctggctcctctgtgggattcaaatgctctcctgctaaacc

SEQ ID NO: 288831 - DNA, 122 bp, Homo sapiens
atctctggacctggatgactggccagttgagcttatcaagatgatgtcatccattgggaacgagatattcaacagcgtctgggaagagagcagccaggggcggatgaaacccttagtagact

SEQ ID NO: 288832 - DNA, 122 bp, Homo sapiens
ttctcccactgcgccaggccctgccgccgccccaacagcgtggatgtccagggctgtgggcggacaatggccctgatgtccaaggacagacaacagagggtgcggcgaacaggtccccactt

SEQ ID NO: 288833 - DNA, 122 bp, Homo sapiens
ttgagaggtttgggctttgttttcaatacataagaatgataaaaattagtggtatgttagcgctgcaggtgatagaaaaagagcagccattcctctggagctgaaaagccagaatcagcaaa

SEQ ID NO: 288834 - DNA, 122 bp, Homo sapiens
aaagagggtggccctgctggcggtcagggcttccacgtgggaattccgggagacgccatccgcccctaaggagggctcacacacgcgcagtttcttcctcggggaattgcacgtgcctggcc

SEQ ID NO: 288835 - DNA, 122 bp, Homo sapiens
tgagcacagtaacttggaagaatctacatttcgtacattttttttaaagtgcaaactttacggccaaagtccaaatgagaaatcaaaacaggcttccagacagtgaattatctttcagggca

SEQ ID NO: 288836 - DNA, 122 bp, Homo sapiens
atccgcctggctgctgctggagccccaggctcgtgaatcgcctctgcgtcccgtcccctgcgttgggcagcttcacctgctcatcctgctcggcctgggtgtttctgctcctaagcgccccc

SEQ ID NO: 288837 - DNA, 122 bp, Homo sapiens
cagaaggtgcagttccctgcccgatttctcccagccccgcgcagcccctgtccccgcccccgcccaggtaccccggcagagcttcccagggttgcctgtccctgaaccttgccccccgggta

SEQ ID NO: 288838 - DNA, 122 bp, Homo sapiens
gtgtgtttgttcagtacaacagaatcattagtccttaagtattctcggcttactgtctcacggttagtttacagtttatgaaccattttggtaactgacacctggaatgtactgacttgcat

SEQ ID NO: 288839 - DNA, 122 bp, Homo sapiens
cccgccgcctcccctgcgtccccgccccgcgcagccgccgcgctcctgcgctccgaggtccgaggttcccgagatgaaggtctggctgctgcttggtcttctgctggtgcacgaagcgctgg

SEQ ID NO: 288840 - DNA, 122 bp, Homo sapiens
gggaaacgggcggagcctgggctctagaaaaaactagccagaaggtggggcacgcggagccgcgacggagcgagcgcagcgcggtctgcgtggcccaacggacagcccgaggcgtggcgagc

SEQ ID NO: 288841 - DNA, 122 bp, Homo sapiens
gcggtgggtagggtgcagggcggccggcgcagccgaggccgcgtgcggaggcggacgccgcgcccagccagtgcccacagcagcgcggtcagccaggcgccggacccagcttcaggtaagct

SEQ ID NO: 288842 - DNA, 122 bp, Homo sapiens
gcgcttccgaacgcgcaagcgcagtaggcccagtgcgtgctggcccggggtggcaggagccgcagaggcttgggctgcaggtaggtgctgcggcgaggggtgagagggcgaaggggcgaggg

SEQ ID NO: 288843 - DNA, 122 bp, Homo sapiens
agttgtgggccgccaccatgtggggatatcagctcagctgggatgggcctgtcaccctcacgcaggatccctggaatcacacagcacggccttctgtgtccggcgtctccctcggggaggtg

SEQ ID NO: 288844 - DNA, 122 bp, Homo sapiens
ccagaccttttttgaaagggggtttaaccttttaaagacacagtacaccaattatcacttcggaatagctgtcactcccagcgcaggaagccagtcccatgcctaaaggcacagtaggcttg

SEQ ID NO: 288845 - DNA, 122 bp, Homo sapiens
caggtttgctgctgcgctgtctgcttggagattaaaatgaaacgtgacttctaggtgagacgaatctgtgtgtctttgcattcctgagaccctcataaatcgattctgcagcttctccggtg

SEQ ID NO: 288846 - DNA, 122 bp, Homo sapiens
atcagacagtgatcatttcaggatatgtctttttttttttttcctccccctctgtcccagcgcagacggcatctctgtcgcgagctttcggctgaaaaaaaatccctcacgcccttcccagg

SEQ ID NO: 288847 - DNA, 122 bp, Homo sapiens
agaaggcagaagtaattcaaactttgcacactcctccagctaagaaaatacaggtggagacgtcagccccatttctacatcagatcctgtggcctaagtcttctcccttcccttatccactt

SEQ ID NO: 288848 - DNA, 122 bp, Homo sapiens
agatccaccattcccattgttgtgcttgggtttaactgaatgactgcatttgaaagccaccgctgtgctgttgtgaacagtagcaggagctcatgtattgttcagggtccccaagaacaact

SEQ ID NO: 288849 - DNA, 122 bp, Homo sapiens
cgagctcacaggccgcgctcgcccgcgggcaccgccggcagccgccgcagccgctgccgccgccactgcttcggctcctcggctgcgggagaccagaacaaacagcccagccgccgccgccg

SEQ ID NO: 288850 - DNA, 122 bp, Homo sapiens
tcatgttgctgactgtcatgattcgggctcatttgtaatacggcctctgtgtgttgaggtcgctgtagacatccgacctctgaccctggagctcctaaaggaatgggggccatcagtggaag

SEQ ID NO: 288851 - DNA, 122 bp, Homo sapiens
agagctgggtagtttagccaaacggcaccccctcgagttcactgcagacccttcgttcaccgtgtcacacatagaggggttctgagtaagaacaaaacgttctgctgctcaagccagtctgg

SEQ ID NO: 288852 - DNA, 122 bp, Homo sapiens
ccctccctcttctgtcccaccttcctgtgagccgatgagaaggcctgggtccccctctggcggtgctggcaggaagttcaaagcctggggcccctggcctgcctgtgggaaccttcacccca

SEQ ID NO: 288853 - DNA, 122 bp, Homo sapiens
agctggcttgaaaagcagcacctactttattatttaagagttcttcaaatattgacttttcgttttcaaaacaaagtaagagtagaaaacggcactgtttgtaaccaggagaaaaccacaac

SEQ ID NO: 288854 - DNA, 122 bp, Homo sapiens
aggacgtctttatgaagcctagggcagtagtggaactgccatctttggaaggatacctgacgtggtagatcagagagccgggagaggtggggagctgtcggagaatctcggctgcgctatcc

SEQ ID NO: 288855 - DNA, 122 bp, Homo sapiens
agcccatcacctttgcggggaagatgcacttcgtgccctggctggcgcggccgatctttccgccctgggaccgcggctacaaggacccaaggttctaccgctcgccccctcttcacgagcat

SEQ ID NO: 288856 - DNA, 122 bp, Homo sapiens
tcccatataacagcccagggaatcctgatgactgcatgcaaaaggaccaggaatggcctccgaatggtggagaggggaaagcaacagaagggacggaggggaggtgccaggacctccagcaa

SEQ ID NO: 288857 - DNA, 122 bp, Homo sapiens
gacagcgctgcggagtggagacgctgcaggcccatttacggctggggagacggaggctttcgcttgggtcttcgggaagccgagctcccagcgccggccgcggcggtcccgccctcgcgccc

SEQ ID NO: 288858 - DNA, 122 bp, Homo sapiens
cccgctgctcaagtccagctgtctgccacggtagtgcaacccttggcggacgacccaggacgcgttgacgcggcagtcgcgccatctcttcttgcctgcatttatctgcgctgtttgaagcc

SEQ ID NO: 288859 - DNA, 122 bp, Homo sapiens
aggactgtgggggtctgccctggtcgtgctcccaagagaggcactgctttctgcagagtgcgtgggcaactgccagctgggggagcgctcaccaggggaaaggggagctctctgtggcttag

SEQ ID NO: 288860 - DNA, 122 bp, Homo sapiens
gagagcttagaacgccgtggatatcacggaagtggcaccaacggggagagtttaaaacaccgtggatatcatggaaatggcaccgatggggagagcttagaacgctgtggatatcatggaag

SEQ ID NO: 288861 - DNA, 122 bp, Homo sapiens
aggttctgtggagggtggaatgcgctcgggggagctaggcctccgcacccgccttcgccgcgtctctagcgtcgacctgatagccgcacccaccctccgctgcactgtctggggcaactggg

SEQ ID NO: 288862 - DNA, 122 bp, Homo sapiens
ccgatccgaggggccccagtttgttcataaagcactcatggcaggttctgacatctctgccgcgtgcagcctggtccccggcaggcaccctctgagtttgtccctcactgctccccttcccc

SEQ ID NO: 288863 - DNA, 122 bp, Homo sapiens
tctctttgaagcagctgttccatttctaggaaacgattctacagaggtgctggcctggggcgcagaggcacggacaggccaggatgtgcctggtagggtcactactgcagcaaaagccgaaa

SEQ ID NO: 288864 - DNA, 122 bp, Homo sapiens
agccccacttccggccaactgcccgctacttccgcctgctgcgcgagtgacggatgcggccgaggctcaaaagactctgtcagcgtttcccaaggacattttccactggaggacgttgttga

SEQ ID NO: 288865 - DNA, 122 bp, Homo sapiens
gatgggccgcagccccgtccagagggggactgaggagcaaccccgtgccctgcccaggaacgcgccccagccccagggccacctgtctgctcccaacaaggaaggctgcactgacaccgggc

SEQ ID NO: 288866 - DNA, 122 bp, Homo sapiens
gggccaacctgtggtgtccgttggcagctgcgccgttatcagggcctgggatcggcccagcgagctcaaagcacaaggactcacattcaaaaatcactcttcggcatattgacacttcagtt

SEQ ID NO: 288867 - DNA, 122 bp, Homo sapiens
gagcagcagggcgcaggccagcagctgggagagatgcatggtgccgctggggtcgaggggcgcacacgggcggcagcgagggcgcgcaggtcggcgggcagaccagcagggggatgcggagc

SEQ ID NO: 288868 - DNA, 122 bp, Homo sapiens
cttcacttctgagccagcgagaccacaaacccaccagaaggaagaaactctgaacacatccgaacatcagtaggaataaactccggacacgccgcctttaagaacggtaacactcaccgcga

SEQ ID NO: 288869 - DNA, 122 bp, Homo sapiens
tatacattgtagaatgatcaaatcaagctaatttaacaggctcatcaactcacatacttacgatttctttgtgatgagaacatttaaaatctatcttttagcaattttgaaatatgcaatat

SEQ ID NO: 288870 - DNA, 122 bp, Homo sapiens
aagtccacaaaacagaagccagaaagtagagacaggttacaacactgctttaaacttgctcgcagttctggaaaacaatcaactccggtttccacagccagttagaggagtaagctgaacac

SEQ ID NO: 288871 - DNA, 122 bp, Homo sapiens
tctgtaggtcttttcccagatatgtatttttctctctaacttctaactcgctgaagtttccgcccatgtgacttccagcgtgagttaccagaaaccacaagagagagagagagcgtgcaagc

SEQ ID NO: 288872 - DNA, 122 bp, Homo sapiens
tgctgcccgactggctggcaagatgaagctctccctggtggcggcgatgctgctgctactcggtgaggcgtggttcgaggacaaggaggaggacgtgggcacggtggtctgcgtcgacctgg

SEQ ID NO: 288873 - DNA, 122 bp, Homo sapiens
aagacggagcaggcggaatagggtggcagctcacagccctgaacatacaggggattcctgcggccccacatgggcacagccttctcacagcacccctcaacacgcacagcggtgggcttgtg

SEQ ID NO: 288874 - DNA, 122 bp, Homo sapiens
tccttaacacgacttaaatattttggagagtccattctcctcatcgtatttgctacttctcgatcccttacagccctcttttttgggggggtggcgggtcactcacccaggctggagggcag

SEQ ID NO: 288875 - DNA, 122 bp, Homo sapiens
ggtccccccacgtccccagtccacgcttctcccctaggggcgagaggagacgtggctccacgcggccactagggggcgtcaaagtccatgcccttaaaaagccaggaaaacggggagggaag

SEQ ID NO: 288876 - DNA, 122 bp, Homo sapiens
ttttttaataagaaattttgtagaaccttctataggcagtcgttttacagcggcgaagaacggaacccggcagatgacattgaataaatgttgagtggacaactttgttcttttcctcttcc

SEQ ID NO: 288877 - DNA, 122 bp, Homo sapiens
gccaccgagtttctccagtttcttttctcgctacctccttcccgcccccgcccagctccgcggctccagacccactcgggagctcgctctgccccttggcggcaagcgccgccagtgcccct

SEQ ID NO: 288878 - DNA, 122 bp, Homo sapiens
gtgaactctgcgcccactgaggcattcgaggtacggatgtgtccgcctagtactcggagacgaaggagagagagcggggatatgcgctccagctctgctaggctccagggctctcacccttg

SEQ ID NO: 288879 - DNA, 122 bp, Homo sapiens
tgcgcaggcacttgccgcgcagcagctgcagctcgggcagcgtggcacccagctccgactcgcccgccttggccaggaacaccagcgcctggttcagcgccgcctcgtccaccgccagcagc

SEQ ID NO: 288880 - DNA, 122 bp, Homo sapiens
catcttcttaagcaggcctacattcgtaatgcatgggttgcgggtgggaggaggaagggccgggcccccccggtaccagggcactggctctgtcctggctgtgccccccactggctgtgtgt

SEQ ID NO: 288881 - DNA, 122 bp, Homo sapiens
gttcacctggctaaggcggggcgcaggcgtgcgtggttgatggcaacgaggaggtcagaacgcagcgcttttctccactgcagaaatcaattccagtcacctttcaaggtccagctgaagag

SEQ ID NO: 288882 - DNA, 122 bp, Homo sapiens
tggagcagcagaaaggagtggcactccctactcccacccagcctggtgattcaagggtctcggctaaagctgttcagccccagggctgagtgtgtttggggctgtgacaccctctctctggg

SEQ ID NO: 288883 - DNA, 122 bp, Homo sapiens
ggtcttcacttggccatctttggcctctgtcatttcactgttaatgagagctgctggcatcgtaggtcctaagaggctgagtcccagagcaagcttacagacaaagagatgcaggcagcacc

SEQ ID NO: 288884 - DNA, 122 bp, Homo sapiens
ccagcctggggcgcccgcttgggggcggagctcccggggcgcccccaggatatgatagggcgctctgctccactcgcgctcactcattggccggcaggacagtctgtccccgctcctcctcc

SEQ ID NO: 288885 - DNA, 122 bp, Homo sapiens
cagttaaccccctgtccattcttccactgcatttttaggccctaactgtgccgtttgttgcggctccacctgtagaagcgtttgccgtgagcgtcgcccttccttgtcaggcacatcttggg

SEQ ID NO: 288886 - DNA, 122 bp, Homo sapiens
tgtttctacatccgtaaatctgtccacatttatgccatgaattcctttttactgaaataccgtaggactcactaccacaataagtacttaagctgaaagagtttctaatgggagccaagtaa

SEQ ID NO: 288887 - DNA, 122 bp, Homo sapiens
accttgtgatccgcctgcctcggcctcccaaagtgctgggattacaggcgtgagccaccgcgcccagccaaaaaaagtttaaattagtcggatgtggtggtgtgcacctgtagtcctcggta

SEQ ID NO: 288888 - DNA, 122 bp, Homo sapiens
cggaaactgtaacacgtttacgcaggtagtgtcagagcctaacaattcgtggttgtaattcgcagtatcattgcgtgccacagtcctgtttctgcagaaattgagaggtggaagagaatgat

SEQ ID NO: 288889 - DNA, 122 bp, Homo sapiens
cgggctttttgatttccatggaggtggcaaatgcgtgcagagcaggtcccgttcccaccacggctttggttccacacaaagttgcctgtttggggggaagctccacgaaggacactttggga

SEQ ID NO: 288890 - DNA, 122 bp, Homo sapiens
gatcagagagcaacgcatgactatctgcgtgtgcttctgtgactacgcggatgttgtgggcggctacatgcgtgcgggggcccggcgagctgggcaggtgccccctccggggccgtgggatc

SEQ ID NO: 288891 - DNA, 122 bp, Homo sapiens
atattaagaggagcgaagatctttattttatgcttttttattctgtgagttttaagtccacgttcacataaaagccatgtgttttatttgttgtctctcttggctaggaatatttaaatgta

SEQ ID NO: 288892 - DNA, 122 bp, Homo sapiens
ctgggcgcaaagcatgcagactctcacccctgcggcttcctggagaaccacttcctaggccgcgaacggaaactcatgctgaccagactcagcaggctggaggggcccaacccgcgctgggc

SEQ ID NO: 288893 - DNA, 122 bp, Homo sapiens
aatacggttcactgcggcctagaccactggggctcaagtgattctcccgcctcagcctcccgagtagttgaatgaagctgctccatgaagaaagaccactaactaaacatgtaagaactcag

SEQ ID NO: 288894 - DNA, 122 bp, Homo sapiens
caagcgtttttggcagctctcatcagtgggatccgcattaatagtgaaacggcatcatggcgcttcccgcagttcgggattgttttgaactttcatctagagcgtattgtgggtggggaagt

SEQ ID NO: 288895 - DNA, 122 bp, Homo sapiens
aaatgggactgaacccttgcaaatttactaaaataaaattgttaaacatgatgcacaagacgaagattttaataaagtgaaaagacaggaaacatacttactaatgattattggtttatttt

SEQ ID NO: 288896 - DNA, 122 bp, Homo sapiens
tctggccactagccatattttaatacactgcaatgcgttctttctttgaactgttgactacgcagttgttattgtctccaattctctagggagtttttcattgtaactatattagatcacag

SEQ ID NO: 288897 - DNA, 122 bp, Homo sapiens
tgcctgaaatatgaaatcgtcacaaagcggcgtggaagaggcagtagtgacaccgggtcccggaccgaagccaggggccagggaggcttcccggaggaggagacacttgctatgagtcctgg

SEQ ID NO: 288898 - DNA, 122 bp, Homo sapiens
ggcccttcgcagcgggcgcgctgtcagacctcagtctggcggctgcattgctgggcgcgccgctctcgtctgatccctgctggggacggttgcccgggcaggatcctttacgatcccttctc

SEQ ID NO: 288899 - DNA, 122 bp, Homo sapiens
tgtgcccggtgaggcactaaggccccacctcccactgctggctcaggctggcccccaacacgggcaggcacagtaaacctgctccatcactcccacacctcggtccagatggctccgtggta

SEQ ID NO: 288900 - DNA, 122 bp, Homo sapiens
tggtcggcttcaatgagaaagttgtactggctccaagctcttcggtgtccaggacgtacgcgtcttggatccacggaagggggtcatcgtatgggtgtctgaccctcttaggagcctgtttc

SEQ ID NO: 288901 - DNA, 122 bp, Homo sapiens
tgtgcagcacaaacacacatcccgagtgacagaagccatttcactgccagagactcttagcggccttcagttctcttgagctggagccactgggtcttgtatgaaagctcaccagacatctc

SEQ ID NO: 288902 - DNA, 122 bp, Homo sapiens
aggaggttatgagaggagtgatctgcacttcctgacccggctcaggaaacagtggctgggcgtgggcagccttgggtacataaggaagtgacttcagccgatcatggaataagaggatgtaa

SEQ ID NO: 288903 - DNA, 122 bp, Homo sapiens
gcccgctcgccggccagctcgggacagcgcggccctctccccaccgccccctttcctccccgcccgccccgcccccgcagcgccggccccgcccccgaaccgcccctccccggagcgccagg

SEQ ID NO: 288904 - DNA, 122 bp, Homo sapiens
acccacttggttgaaatgtctcaagttccacaaccctatcccacactgccactattatgtcgtttgttgaaggtcatttgtcctatagaatatactattctggattttggctggttgcttcc

SEQ ID NO: 288905 - DNA, 122 bp, Homo sapiens
ccagggaggggaggcccgggtcgaaggcataggcagaattggagccctgggttgccaaagcgtcgcagctaagaagccggagcccaggctagtaccggcggggcggggcggggcggggccgg

SEQ ID NO: 288906 - DNA, 122 bp, Homo sapiens
ggaacagagggaggcgcctctgctcatgcgcatacggagagccggggctgaaggggcgggcggccgcaactctgcgaggaccgggtgaggtcccggtcccaccccccggggcgcctcttttg

SEQ ID NO: 288907 - DNA, 122 bp, Homo sapiens
caatatggctttttgctgctgtggctctttgcctctgaagccacagctttttgcccctgtcgccacgggtttttgcccccgtggctttttgctgacacggctttttgccgccgccgccatgg

SEQ ID NO: 288908 - DNA, 122 bp, Homo sapiens
ctgagcggtcgcgccctcgagggagccagctgggccatggccgcgaggcaggggtgagaccggcggccacccgtgagccctccgcacccgcaccatgcagaagagcgtgcgctacaacgagg

SEQ ID NO: 288909 - DNA, 122 bp, Homo sapiens
cacccaaagccggcagggagggtggtccggggcgccggggacacagccgggctggggcgccgcgtcagagccaagtaggcgtctcctgtcaggtccagaggtctgagcagtggagggagact

SEQ ID NO: 288910 - DNA, 122 bp, Homo sapiens
cgctgaagaagcatcctgtcgccatgcctgcccccgggagcttccgttccccagaggccgcggcattcccggtgaagccagactgcccggctggaagagcctcctccctgaggagtggcccc

SEQ ID NO: 288911 - DNA, 122 bp, Homo sapiens
aaagtgctgggattacaggtgtgagccaccgcgcctgcccctttttttctttttttgagacggagtctcattctgtcgcccaggctggagtgaggtggggagatcccagctcactataacct

SEQ ID NO: 288912 - DNA, 122 bp, Homo sapiens
catgatgggaaggggtggtgggacaggctttattatattggccttcctttgaagtccaggcgcaaatgaccagcattaacattaaaacgaagttcctaagtctgccagaacagactctttgt

SEQ ID NO: 288913 - DNA, 122 bp, Homo sapiens
ataacggtgttcgtcatcaggaccccaagtcatgatggaaaggttaaattattttcaaaacgctcaattataagaaggcagaggagcggattataacgaatacacataaaaaaaaatttcaa

SEQ ID NO: 288914 - DNA, 122 bp, Homo sapiens
tgttggagcatcctatgtcgctttggagtgcgctggatttcttgctggtattggtttagacgtcactgttatggttaggtccattcttcttagaggatttgaccaggacatggccaacaaaa

SEQ ID NO: 288915 - DNA, 122 bp, Homo sapiens
ccaccccctcctgggccggagctctctgaaagcaaacttgagcccaaggaacaggactcccggccacgaaccccatcactgccgtccctgctgctgtcccagagtgggctgaaggctctggg

SEQ ID NO: 288916 - DNA, 122 bp, Homo sapiens
ctgttttcttatctctagcagacttcgttgtaaccgaaggctggccaccccgggaagtctcggacaacgacgtgtttcttgaggtactttcttcctcatcggacaactcggactgcatcttt

SEQ ID NO: 288917 - DNA, 122 bp, Homo sapiens
gtgtggctgccctgtttatgtttttgccccatgttcagagtctgacctccaacagacttccggggctgcaggcaagggctgaaaccagagctggccgctggccaggagctgagaaccaagcc

SEQ ID NO: 288918 - DNA, 122 bp, Homo sapiens
ggggcggcttgagggggtggtgcccaggccacaagggtgacactggcagaggcctggaaccggctgtaccagcttggctgggcccccgccctccctgtctggcccaatctccaccccgtgct

SEQ ID NO: 288919 - DNA, 122 bp, Homo sapiens
tcttcctctgcctggccagagagcctgaggattgtgaaattggaccaggatagctccctccgggcagggagaggactcagtgagtccctctactgcgtatgggggaggatggtgcttcaggg

SEQ ID NO: 288920 - DNA, 122 bp, Homo sapiens
ttgctcttttggctggttgagcccagaccacagggagtgcatctgagtcctcccttcacacggcatctgcagaaaggcagggagtgagtttccagccccaggtatgccctctgggagtctgg

SEQ ID NO: 288921 - DNA, 122 bp, Homo sapiens
ttgtaaatttggagctgccgcgtctatgcagggcaaggttagggaggggccaggcctctgcgaaatgacctgttggctttgattccttggtgctgggcttaaatacagagcccatagggagg

SEQ ID NO: 288922 - DNA, 122 bp, Homo sapiens
ggcgcgcggaggcgtggcagggggcgtggcgttgcgggcctgcggatgtgggacggcgtgcgcctgcgcaccagctggttttttctccttgggcggtttcgcgcacgcccccagggctgaca

SEQ ID NO: 288923 - DNA, 122 bp, Homo sapiens
ctgaaacaaagtaaaagtctgcccccagccttttagtctttgatgagcttctcatgtaatcgacatagcctggaaaatctcctggaagaagcgcctggtggtacagacagtgcctgccgagg

SEQ ID NO: 288924 - DNA, 122 bp, Homo sapiens
tgacatttgaatacctgccacagaccacttctcctgcttaggttgctatacttcgggtcacgtaactactacaaccctggacaaaatgaaggacttggtacctgacccagaagccagtcatc

SEQ ID NO: 288925 - DNA, 122 bp, Homo sapiens
tgcggcctctcctaagcctatgggagcctgggccaggctgaccctcaaggctgacagccacgatcccataggtgaaggcaaaggcgtggcagctaggaacacccactacacccccactcaag

SEQ ID NO: 288926 - DNA, 122 bp, Homo sapiens
cattggtaccacttttgccttttggcttcagatctttggcttggagcactgtgacctgcacgtgggttggaaaccacttttgggcttgctcggacagcatcatcctgtcctgtttctctgcc

SEQ ID NO: 288927 - DNA, 122 bp, Homo sapiens
gtccacgtgcagaaaggtgctgagtgctgagcccggcaatgcccagttccacaccatccacgtgcagaaaggtgctgagtgctgagcctggcaacacccaattccgcagcgtccacgtgcag

SEQ ID NO: 288928 - DNA, 122 bp, Homo sapiens
ggcttcttttcgggggggaaaacaactgccctcccttccaagttgaggacgaccttaaagcgtcgcctagtaacctcgtttccgccgatgtgattggatccttctcgcgtccctcccctagt

SEQ ID NO: 288929 - DNA, 122 bp, Homo sapiens
gtcacacagctaataaccagtagagccaaggtctcctggggactccctccaggggtgtgccgggctttgaaattcatatactgtatttgtctcaagttgtcttgactctggtgacagaagtg

SEQ ID NO: 288930 - DNA, 122 bp, Homo sapiens
agattccggcactgggtgccgcgctctctcccccagcaccgcgcccgcgcccccggctcccggactgggcatgctcagtagccgcccgcttcgtgctcccagggaagcctctgcacgccctc

SEQ ID NO: 288931 - DNA, 122 bp, Homo sapiens
agcattaaggtatttcgaaactgccaagggtgctggtgcggatggacactaatgcagccacgattggagaatactttgcttcatagtattggagcacatgttactgcttcattttggagctt

SEQ ID NO: 288932 - DNA, 122 bp, Homo sapiens
cgggtccgtgcgtaccatcgtctgtcctggttgtgtctctgtgttctccatgtgagagggcggggagggccgaccagggctgttgaggctcaggttcctcgcgaactctgcagggactcctg

SEQ ID NO: 288933 - DNA, 122 bp, Homo sapiens
aggactttaaaatatcttagaagtttagcagttcatcctatgtcacagagtttctgtgtgcgatgtccaccatgtcctgttgtacaacccctcagttaagccaggagggtgcctctcccctc

SEQ ID NO: 288934 - DNA, 122 bp, Homo sapiens
gcctggcccccccatcttacaaaaataggggaaccttgggactgccccttcccccacccccggctcccgacccctcagctccacccaagcgccccaagtagcttcggaaactccgtttctct

SEQ ID NO: 288935 - DNA, 122 bp, Homo sapiens
gtggggtttgagggaaggaccaccacaggatccaggtgtccgtcatccagtaacagcatgcggtgtacagactctggcaggagcagccctctggattttccactgcaggtgaatgaaagtga

SEQ ID NO: 288936 - DNA, 122 bp, Homo sapiens
aggtttagcagagagaatctaaacaatgacccttgcaaacacagcaaggataccgacaaacgctggaaagctcagctgtggagttttagtcgtggctgagtttaggtggccttgcttcaacg

SEQ ID NO: 288937 - DNA, 122 bp, Homo sapiens
aagtcatgcttcgttgtactagcaaaggaaggacatgctgtaacctcacgtctggcgtcccggcactttgggaatgtcaacatttatcagccttgttcacatctagtcctcctccaacaaag

SEQ ID NO: 288938 - DNA, 122 bp, Homo sapiens
tcgaccataaaagatggccgccccccagaagcagccattttagaggcctaccctcagggacgcattctctttctcaaggatgtcccttgctgagaaaaagaattcagcaacatttctcccat

SEQ ID NO: 288939 - DNA, 122 bp, Homo sapiens
agaaagagtttcattacaaccgctacctgacccgaaggagaaggatcgagatcgcccactcgctgtgcctctctgagaggcagatcaaaatctggttccaaaaccgtcgcatgaaatggaag

SEQ ID NO: 288940 - DNA, 122 bp, Homo sapiens
cttccaccgtaagagttaccgaaagctcggcgtccgtgatggggtagagggcttccgaggcgatcgggcagtgtcagtcttcagccgctaagccgagaagatctgggaaggagtcagagagc

SEQ ID NO: 288941 - DNA, 122 bp, Homo sapiens
aagaaacgcatctgggagcagttcagctggagccccgcacaggcagtgccacggtctaggcggggcaggcccctgccccattcacggaccccgcgcctgcctgcagcaccctcacacgggtg

SEQ ID NO: 288942 - DNA, 122 bp, Homo sapiens
cccctggcttccctcgcgatcctcccctggcttccctcgcaatcctcccctgtcctgagccgggcatcccagagcctcccgcagagtcccaccccaagcctggaaacttccacgctacagcc

SEQ ID NO: 288943 - DNA, 122 bp, Homo sapiens
gaatcacatcaggagacacctaataacaggttgcctcactacaactgagttaagctcaggcgatgcgcttggtaagtgcctggaacacagcaaacgcaaaataaatatgatctattattaac

SEQ ID NO: 288944 - DNA, 122 bp, Homo sapiens
agactcagctgtccccgaggcaagacgcagtttgcatgttggccaaggttattatcttgtcgcccctggaagccgagctcctcccagaaagtccaggatcaaagtggactcaggcagcggga

SEQ ID NO: 288945 - DNA, 122 bp, Homo sapiens
tatacctatctaatttaaaaaagaaaaaaaaattgtagagacagggtctcactgtcttgccgagccaggctgttctcaaacttctggcctcaagcagtcctccagtcttggcctttcaaagt

SEQ ID NO: 288946 - DNA, 122 bp, Homo sapiens
agtctggcccgaggagaagccggcccggggggaactctgggacagcagttctgggatgtgcgcacaagacgctgcggagcgccagctccacgggtcgagctgttgacaccttgggtgtttac

SEQ ID NO: 288947 - DNA, 122 bp, Homo sapiens
atagaagggggagagcaaggaagtaaggcctcagactcaatgacacagctccctgacaatcgctccattccttcagcaggatgtacacagagatataactttctacagcatccactgcagct

SEQ ID NO: 288948 - DNA, 122 bp, Homo sapiens
tgagggtgacagtccaagccacgagggcacctctggcacaggcgtgactccacgagccggcgcttaaagtgaaacaaatgtgaaaaaaatgccccttggaggggataacgtaccagacccag

SEQ ID NO: 288949 - DNA, 122 bp, Homo sapiens
tggtcctcctgcgtgtcctcccctccactgcctgcatggggggcgcggggagtgaccaggcgggggcctcaccgccccagggccgttgcctgctcagaccttgcaggctgtggagcaagagg

SEQ ID NO: 288950 - DNA, 122 bp, Homo sapiens
agcccttcccaagctagttctcggatcagcgggttggaattggttgtatcattcagtagccgacgggctgtctcagagcgtagggctggggacacctggtaagaggcaaagatttgccctag

SEQ ID NO: 288951 - DNA, 122 bp, Homo sapiens
aacccatcccctccgattcccctcctcccccctctctccctggtgtcaactcgattcctgcggtaactctgagccctgaaatcctcagtctccttggcggggaagattggctttgggaacag

SEQ ID NO: 288952 - DNA, 122 bp, Homo sapiens
gtcacttagtggccatctcggtcatcagaccgactgtcgcggtgttgcagtgcttctgttcgtctaacccttattcgacttaataatggccccaaagcgcaagagtagtgatgctggcattt

SEQ ID NO: 288953 - DNA, 122 bp, Homo sapiens
tcgtgccctgattggccgacggggcgcgcgcggcctggaggggcggggcggacgcagagccgcgtttagtctatcgctgcggttgcgagcgctgtagggagcctgtgctgtgccgcgcagtt

SEQ ID NO: 288954 - DNA, 122 bp, Homo sapiens
ggaaaaatcctatggcagagcagcttcaggcttcagtgtgaaactatcatagtctgggcgcggtggctcacgcctatagtcccttcactttgggaagccaaggtggggcagatcacctgaag

SEQ ID NO: 288955 - DNA, 122 bp, Homo sapiens
atggtgccatctctggcactgtcctctcctggcaggacagcggggagcacagaaggcctgcgccggttccctccagtctgtccacgaggcacaggtccgtccccaaaggccccgcttctcaa

SEQ ID NO: 288956 - DNA, 122 bp, Homo sapiens
gttcttgggattacaaggttttcaattctcctcttctattagaatttcaagtagccagttcgcaaagggacgagaaccttgcctccgccgccgccgcgcaactctcggtggcgcatgaatta

SEQ ID NO: 288957 - DNA, 122 bp, Homo sapiens
ctgataaaatggggataacagcagtatctttctggactgatgaaaaagtcaagctagacccgctttgtgaactgaaggttgcatacctgctggttatttaagtctctctctttgttttttaa

SEQ ID NO: 288958 - DNA, 122 bp, Homo sapiens
atccttgtcccctgctttgcctttaaaaagctgcttgtaacaaagggtgaacagagcacacgtctaaggttacttgggtctgagtcttccaggcaactgtcctcactttggctcaagtaaag

SEQ ID NO: 288959 - DNA, 122 bp, Homo sapiens
tgacctcgtgatccgcctgcctcggcttcccaaagtgctgggattacaggcttgagccaccgcgcccggccaactattatggaaatttttaaacacacacagatgtagagagagtagtgtaa

SEQ ID NO: 288960 - DNA, 122 bp, Homo sapiens
gctatttcaaatacaaaacctgttactgaaagagatgagcctttggcccctggatgatctcgtctatatgccatggcttcacaggagcaatgagcacaagccccaagctctgtaatattttt

SEQ ID NO: 288961 - DNA, 122 bp, Homo sapiens
tctcattaattttcaaaacttccaatatccttccaaataattcccttttgcttacgttagcgagtactagtttgttagccagtgttagtttctgttgatcctaaccaaaaaaccctaactga

SEQ ID NO: 288962 - DNA, 122 bp, Homo sapiens
agccggagaggaggctgttgttcggcgcagccacgggcctgctcaggatgtccgtgatcccgtggggggttccggcggccagctgggggcccagccctggggggctgagcttgtagaaggag

SEQ ID NO: 288963 - DNA, 122 bp, Homo sapiens
gccggcggctccctgctggggtcagtttccttctgtagcagcgaggatgctccaaggtgacgacaagaaacagggcgtgaggagggtaagaggccctatgggcactgtagtcttgtgatggg

SEQ ID NO: 288964 - DNA, 122 bp, Homo sapiens
agcctagtgaggttcccagttggaaaaagaaaaacaattctttctggctggctgaagaaacggctccagcaaggagctggcaagtgtgtaagtaaacacagctccagccggcacagtcgggc

SEQ ID NO: 288965 - DNA, 122 bp, Homo sapiens
ctctatagcattattgtttctagactcccctcccaggagcctccctgacatgtggcctcacgtacagcaggccacagccttgggtcattccttcattcatgcatgggggcacacaggtacat

SEQ ID NO: 288966 - DNA, 122 bp, Homo sapiens
gaacaacccatggtggcgaggggagggggacaaaaacccggggtgggcaaaaagcggcggcggcaaaaagctgcagtccaggaaacatcacttactgtccctgctagtgttgggaaagaaag

SEQ ID NO: 288967 - DNA, 122 bp, Homo sapiens
ggcccctttaatttaagttccctagtttcccctgggagatctggccaagaactacccggtcggggcggaacgacatccggtaacgcccctcacagttcacttccgtcctccacctgcgtctc

SEQ ID NO: 288968 - DNA, 122 bp, Homo sapiens
gaattccccgccaagttgaaaagttgaacctgcctcccaaactttctcctgtagtccagacggggacgccctgagggagcgtttgtgtcagtaatgggaaatctgcaagctagacggaaatg

SEQ ID NO: 288969 - DNA, 122 bp, Homo sapiens
ggagactaccagggctggcggtagctgggcgtggtcgggtcgggggcggctgtgggcggccggcaggcagcgcgcggggcagccctcggcagacggccaatggcggcggtgctcggggcgct

SEQ ID NO: 288970 - DNA, 122 bp, Homo sapiens
gctgttgcagcaacattaaaatctttggaaatttgtagggtggtagaaggggctaggaaacgaagaaaacatcttattaaaaataaaagcgatcgggccaggcgtggtggctcacgtctgta

SEQ ID NO: 288971 - DNA, 122 bp, Homo sapiens
ctccatctcggggctgatagcataatcagaatagctaacattactgagtgctcacttccccggggttcaatcctcaggacaggtctatcaacggaggggaggtattgctattccccatttta

SEQ ID NO: 288972 - DNA, 122 bp, Homo sapiens
cgtagcagtcacgtcagaccgggacacttcctgtttagagaggactataaaactccggtccggtaatcacttggggctgacgccattttaggcctcatcccgcctgcacccaggcactcatt

SEQ ID NO: 288973 - DNA, 122 bp, Homo sapiens
tgattggaacataggattcatttaaggaaagtttggtttaaaaagttgaacaattgattgcggagaaacttgaatgacaggctaagtgatagggagcataaaggagtttaggtgattttttg

SEQ ID NO: 288974 - DNA, 122 bp, Homo sapiens
tgaggccactgccaggtacaacttctatgtgaaggcagaggacatggaaggcaagtacagcgtagctgaggtgtttatcacactgctggatgtcaatgaccacccccctcagtttggaaaga

SEQ ID NO: 288975 - DNA, 122 bp, Homo sapiens
ccagccccgcgctcccgctcgccgctgccgccgccgccgccgccgccgcctccgccgcgccgccccgggcccgcctcgggccccacggctccgaagccatgaacttccaggcgggcgggggg

SEQ ID NO: 288976 - DNA, 122 bp, Homo sapiens
tcagtgcctcgtcctgccgtgccactcatctaacacatctctgtggaaggcggtgttccccgctccttcagcttttctccaaggctgcatctcacagcctttcctcatgactaaccttgaat

SEQ ID NO: 288977 - DNA, 122 bp, Homo sapiens
tgggcaggtcagcaaggctgagtcgcagggaacaggaggggcctctccaggatccagggccggggcccttggaactcagcagtttccggtttgataggggagggatcaatcacacagatgta

SEQ ID NO: 288978 - DNA, 122 bp, Homo sapiens
agcccttttcgactgtgagctgcggcagctgagcagaggcggcggcgcgggacctgcagtcgccagggattccctccaggtgacgatgctctggttctccggcgtcggggctctggctgagc

SEQ ID NO: 288979 - DNA, 122 bp, Homo sapiens
ggccacggacgagctggccaccaagctgagccggcggctgcagatggagggcgagggcggcggcgagaccccggagcagcccgggctgaacggggcagcggcggcggcggcgggggcacccg

SEQ ID NO: 288980 - DNA, 122 bp, Homo sapiens
ccgacggcagctcccaggagatgctggacttcatgcgcgagctgcatggcgcctggctggcgctgcccttccacgacccctaccggcagtgagtgggggtcctgggggggcgggggccgccc

SEQ ID NO: 288981 - DNA, 122 bp, Homo sapiens
cctctgctactgcatcctgacaacaagcctggcctggttctgcagcaagaactcagtaaacgctccccacaataacacagtaccacaggcacagtgctacgcgcgaggcctgcaggtggcca

SEQ ID NO: 288982 - DNA, 122 bp, Homo sapiens
cagggcgcggggctgtgggagggcgcgaggccgtgtgtgggtgcggggctgggtgcaggccgtgggtgggcgcggggccggggctggcggggcagggcgcaggctgctgcaaggcggcctcg

SEQ ID NO: 288983 - DNA, 122 bp, Homo sapiens
acccgtgcctggaggtgacggcggcggcgctgcggcgggagcggcccggctcggaggagccgcctgcggagcccgtgagcttctacacgcagcccttctcgcactatggccaggccctgtgc

SEQ ID NO: 288984 - DNA, 122 bp, Homo sapiens
aatccaggcggtgaaacgagcagcaacagccccagggacccgggagctggaggccgcagccgcgcgagaaccgccgggttgccggggcgacgcttccggctggcgcgcgcagccccgggagc

SEQ ID NO: 288985 - DNA, 122 bp, Homo sapiens
gggattgaacccggggcctcgtgcatgctaagcacgcgctctaccactgagctacacccccgtactgaaacggttctctcgagagtatattcaagatcagaatctgacccttttgctaggtt

SEQ ID NO: 288986 - DNA, 122 bp, Homo sapiens
attccaaatataggttattcacaacatgtttgttataaggcgaggcatatgaattcctgtcgtgtctttctttacaaacatgtcaagacttgtgaacccttaatgaaatgcagcattttaga

SEQ ID NO: 288987 - DNA, 122 bp, Homo sapiens
acgccacgaggcgggggctcggtccgggcgcagagccctgggggagggggcgcggagtaacgaggggctggggagaatgagtttgccgttgatttgcccaagttgtttcctctggctgcgcg

SEQ ID NO: 288988 - DNA, 122 bp, Homo sapiens
cgccttgtcctggaaatcaaaccaggccacccaagaggtaggatggctccaggttctccccgggagaagccgctcggacaggcgctgtgccagagggcgccgtgaggctcacttactgcgtc

SEQ ID NO: 288989 - DNA, 122 bp, Homo sapiens
ccagccagatcccgcaggacactctgcagccttaacgatgtcccagagctcatcccacctcgaagcaaggcagctgggctctctgagggctgctgccagctgcaggctcccagacactcctg

SEQ ID NO: 288990 - DNA, 122 bp, Homo sapiens
gaagggactctccttaccgttcacagtaatcgttccagtcgtctgcgggaccccgacgagcgtcactgggtacagaccagattcagccggaagagaaagcgccgcagggagagactcgaact

SEQ ID NO: 288991 - DNA, 122 bp, Homo sapiens
tcgtcgaggctcccaggtagccgggatgggtcacagagaagccgctgtgccggatctgctcggtccagtcgagctggctgaggctgtgttcccccaggcgcacccagtacctgctgccggtg

SEQ ID NO: 288992 - DNA, 122 bp, Homo sapiens
agcacttgggcagcataaaaacaggacagagtatacacaagtttaatttaacatttactccgtgagcttcaaggagcaagaagatccatgagagagtaactgtgtttttggatatctgctaa

SEQ ID NO: 288993 - DNA, 122 bp, Homo sapiens
gtggctcagtggataccagtgagtctggctctaggaacttggtgaggccaagagcctgtccgagggatccagtgacttcattaaagatgcaccagcctccccagctggcacagtgcccagga

SEQ ID NO: 288994 - DNA, 122 bp, Homo sapiens
tctgcccggcgtgccttcctcactactcacagccagcaccgtccagggaacggtttattccgaagcatctttgtgtgtgtttgtttagtatgctgggatactgaaaaaggaggtgacagcct

SEQ ID NO: 288995 - DNA, 122 bp, Homo sapiens
gggaggaaagtccccctcagccgcactcgggcccccaacccggccaaggggtcgccaactcgcggcactttctgcctgtttgttttcgctcagtactcacagtttagatgctaagccggctc

SEQ ID NO: 288996 - DNA, 122 bp, Homo sapiens
tgcattaatcttgcactgacaccctctttatgctgttggaaaaatcgaaatgccaggaggcgggaggcagggagaatccctcatcagcaacgtttatggtattgacttgcatctcattgact

SEQ ID NO: 288997 - DNA, 122 bp, Homo sapiens
gcaaagaggtgcatgcatgtttcacaccttctagaactcagagtaaacctagctcttcaacgagacattctcttaagtcccagactcctcctcctcctggagttcagggcagccactcctaa

SEQ ID NO: 288998 - DNA, 122 bp, Homo sapiens
gggtcttctctacagctgacaggccaactcaacctactgccaaccaagacctgactggcacgaggaaaggtaatgctgctgaaacacttggagaaagtgatccttttcacagtagttagttg

SEQ ID NO: 288999 - DNA, 122 bp, Homo sapiens
agaagcagggctgggtgacttttgctacggtgggctgcaacactgtctggcttctcaaagcgcttgccgcagaattcacaggggaagcgcaaggcagccaccgtctctgcatgcttgcgctg

SEQ ID NO: 289000 - DNA, 122 bp, Homo sapiens
ctcggttctgggtcgcattgcccgagggggctctacgcaaagtgaaatactcacagttcccgaaacccacgttgcttgggcgcctccgtcccctcacttttcccgagaccgccggccgcagc

SEQ ID NO: 289001 - DNA, 122 bp, Homo sapiens
cgactcgctgctgaggcctcacaggccgttccctgctgccgcggctgccatctcctcctgcgcctctggttggttctggcccctctaactggacctgtctgtctgtaggtggaccaggtgct

SEQ ID NO: 289002 - DNA, 122 bp, Homo sapiens
aggcgacaggcggggacagggtctgggaaaacccgctaggcaccgaggcccagagggcgtcgggcgtccccgcaccgagtgccgcccgccgcgacccgggaactgcctgctccccggacgcc

SEQ ID NO: 289003 - DNA, 122 bp, Homo sapiens
tacagcgttaacagtctgaaccggagcataacgatcggctgtctcaggcgtttcatggcccgggacaggcggctctcttcttacagattacagggaactcacacaattaaacagcataaaca

SEQ ID NO: 289004 - DNA, 122 bp, Homo sapiens
gctaggaaggagccaaatgggactcctctcagatctgctggaaggcagagccctgctccccggcacagaccacactgccttcctccctggagtgtgcagttggaagcaccagatgctctagc

SEQ ID NO: 289005 - DNA, 122 bp, Homo sapiens
gtgacacttgaccgcgtctgccggcccctccccttgtccgtcccctccgcgccgctggcgcgcgccttctgaatgccaagcattgccataaactccggggacaaaagcctgggtcacaaaag

SEQ ID NO: 289006 - DNA, 122 bp, Homo sapiens
gaggtgtggaaagcgagagtccagaggatgggcaggaggatgaaggcttatggtggaggccgacccagccaatgacagatcaaagccaggagcctgctgggaagggatggtagaggctggag

SEQ ID NO: 289007 - DNA, 122 bp, Homo sapiens
gactttgttctctggccttaaaggtgaagagcccggcgctgaaggccacagacatcacggcggatttcacagagggccgcgttccgggagcgggtggccaggcggtggcggacgccccacct

SEQ ID NO: 289008 - DNA, 122 bp, Homo sapiens
gaggatctcaggaagatccacaaagctgcgtccaggggaacgaacgtgtggaagctgcagcggagcctcctgctcaagagtaaaggaccggtctgaaacctacaagaacaggtgtcgggggc

SEQ ID NO: 289009 - DNA, 122 bp, Homo sapiens
ggcgcgggcctgggcggccagccccggcgcacagccgcggccggggcgcgcggcgcggggcggaaaagcctgtttacacagactgcacaccgcctggggaataatgcagtaaaggaagtgag

SEQ ID NO: 289010 - DNA, 122 bp, Homo sapiens
gtttagtccatcttggttatggtggatgcttctggagtgagttaagcacaggaaaaggggcggaacactcacccaaaccaggatgtgtaccagagagggctccattgtctacagctctcaag

SEQ ID NO: 289011 - DNA, 122 bp, Homo sapiens
ggggtgggggcgtgttcctgtatccttcgcccaggccgacttcagactgctgagcgtttgcggacaggattatctcgtgttttctattgtttgtttgtttgttttgagacggagtcttgctc

SEQ ID NO: 289012 - DNA, 122 bp, Homo sapiens
cttcaaccagaacttcatcctgaccgcccaggcctcacccagcaacacagtgtggaagatcgcaagtgactgcttccgcttccaggactgggccagctagtgggggtggcagaggtctcttt

SEQ ID NO: 289013 - DNA, 122 bp, Homo sapiens
caaggtaaattacccaaatagaaggcaaactgcccagggctgtaattaacatacaatatgcgccgagagggaaaggttaatgctaactccggtcctaagtacaaagatcattgggagtcagg

SEQ ID NO: 289014 - DNA, 122 bp, Homo sapiens
acacaagttgatgttccctcatttagaaggcaacttagaaatacattgatctgcccagcgcggtggctcacgcctgtaatcccagcactttgggaggcaaaggcgggcgaatcacgaggtga

SEQ ID NO: 289015 - DNA, 122 bp, Homo sapiens
cacacaccatgttgctcgtgattctcccgggatacacaccatggcaggtggcatgggagacgatggagaggttgaggcactggagcagatccgggaatgggtctggagagagaacatgcgtg

SEQ ID NO: 289016 - DNA, 122 bp, Homo sapiens
cgtggagaaccggcccaagattgatgccttcctgccagcctggcagctctggaagtggttcggcaagcccacccaggtgagcaagctcgcgcccgggcacggccgaggggccgggggccttg

SEQ ID NO: 289017 - DNA, 122 bp, Homo sapiens
cctgatcagggaacctgggttctataactgcttctactactgatttgtcctgtgacttcgcgcaccaaatttaggcttgtaaattaaactcccagatttctgttttccattttgcagctcta

SEQ ID NO: 289018 - DNA, 122 bp, Homo sapiens
ccgggccactcccccaggtttccccttcgcgtccccgctgggtcgacggtcgggttcgcgcgcctgtccttcctgttagtcagcttactcatctgtggcccccagagtggcttgggtcaacg

SEQ ID NO: 289019 - DNA, 122 bp, Homo sapiens
gttctaccaggtgcgtgtgggagcctggccggccggggagggtgcgctcggcaggctgtgcgacgtcccggggcggggggccacagtgatttgtcagccccagttagatggccagcctcccc

SEQ ID NO: 289020 - DNA, 122 bp, Homo sapiens
tccaggatgcctgatcccacgttgtccatgggattccaggatgcctgctcccacactgtccgtgggattccaggatgcctgctcccgcaccgtccatgggattgcaggatgcctgcttccac

SEQ ID NO: 289021 - DNA, 122 bp, Homo sapiens
tttcattttgtagagattaagaggcgctcgtagcagaacggccttgccttcagctggtggcgaggataggcaatctcatggaaaagttggaagagaatgagaaaaccaaagacagaaagatt

SEQ ID NO: 289022 - DNA, 122 bp, Homo sapiens
aagaaatgagaaactagcagtgcattgttcagaaacgcggagacttctctcaggagaaagcgagaagcaagcgtccaactctggggtgcagaacccggggcgggaggacgggcccggactgc

SEQ ID NO: 289023 - DNA, 122 bp, Homo sapiens
atccaatcctgttccccggcgaatgcggggcgggaccctagcggccttcagtccaattcccgcacctttgaggcccaagggggagcgagccggtgctgctgcaggctgaggctgcggcagag

SEQ ID NO: 289024 - DNA, 122 bp, Homo sapiens
ttagcattgcatgcatctatggacccagttccttgcatagacctagaagctttctctgaacggaggtagctcttggcataagtccatgggagaaaataattctctcagatgctaaaattatc

SEQ ID NO: 289025 - DNA, 122 bp, Homo sapiens
tcatttgttctggcaccaagtaaagagtaaatacgccatggaagacgccatcaggttttccgtccacctctcctactgccccacttctcccagaccacacagcacatcagcagccatccttg

SEQ ID NO: 289026 - DNA, 122 bp, Homo sapiens
ctctggaccttgagccacctgtttctctcccctgcactcaccgtggggccccgttctccccgaggccctgacttccccgacaggccctggtgggaatgaagcagagagaacattacccaggg

SEQ ID NO: 289027 - DNA, 122 bp, Homo sapiens
cctggattttgcaaggtacgttttactgcatttgctttatctcacatctgtccttctatccgtctgccctcaatccatcctcaggatacgtacaagctctttgccagctcctacagggattc

SEQ ID NO: 289028 - DNA, 122 bp, Homo sapiens
aaaaaaaaaaaaagtccatcttcaccgatgccagcggtatgctcgggcaaaccaccaaagcgctggttaatttatgggaatttaacccatcattggctctcaacaataaccaaaggagatca

SEQ ID NO: 289029 - DNA, 122 bp, Homo sapiens
gaagagggcggaaggagaacccctggactggtcctcaccgagcactacaggtggcagagccgtgggggacccgtgggttatgagattcagcggtgaggggtagcggtgtggataaaagtaga

SEQ ID NO: 289030 - DNA, 122 bp, Homo sapiens
tccttctaccttacgatgcggctgtgtgttgaactccgtttcaaaagatgacagctgctgcgttactcctaaaagtccacccacctccacactgagaatcacccagatgacatctgaaacaa

SEQ ID NO: 289031 - DNA, 122 bp, Homo sapiens
gtcgggcaggtccagcaggtccaccatgtagagcaccagggaggggccgggccgccgcaacgcggcgctcaccagctccaggtactgctcgcggctcacctgcaggcgtagagcgcgccggt

SEQ ID NO: 289032 - DNA, 122 bp, Homo sapiens
gccgtgccccggggacctgcgcgagatgatcagcatgtacttgcccgccggcgaggggggcgacccggcggcggcagcagcggccgcggcgcagagccggctgcactcgctgccgcagcact

SEQ ID NO: 289033 - DNA, 122 bp, Homo sapiens
actgcgccgccggagcgacgggcttcgggtcggtgcaaggcaggcgcacggggaagggcgcgccgcgcggccgccaccccaccatgctcaagcgctgcggccggcgcctgctgctggcgctg

SEQ ID NO: 289034 - DNA, 122 bp, Homo sapiens
ccctgccccgccccatccactcctgttcctcacaaccaggagcctggagggaacacagagcgatgcaagcctggagaaaaggccccgatggcccccagaagacctcttcagacagcatgtga

SEQ ID NO: 289035 - DNA, 122 bp, Homo sapiens
aatacactttctactgctacagtaaacatagtctttgagagggtagaatattagctggagcgtggactctgggcatggactctggattcactctggcctgggtttagatctcagtcttgcca

SEQ ID NO: 289036 - DNA, 122 bp, Homo sapiens
ctgggcggcagtatttacggtaacgaaagccagctgtatttacggtagcgagggctggaccggcggcggcatttacggtaacgggggccgggctcgcggaggcccgtcggttcggtccgctc

SEQ ID NO: 289037 - DNA, 122 bp, Homo sapiens
aagccactggagacttctctccaagttgacactctgccttatgaatactgaaattcaatccgttttaaacccctttctttggcttgtcatttggcccacatttttcctgtcttatcctccag

SEQ ID NO: 289038 - DNA, 122 bp, Homo sapiens
gttcggcggaccgagaggttccgcgcccacttcgcggcccagaggactgagcccggcctccggtgcaaggaaaccccagaggccggaactagaattgcaaattttttttcaccccggattcc

SEQ ID NO: 289039 - DNA, 122 bp, Homo sapiens
ttttgaaatatctcaaatatggatgagttaaatttatcacatttctgccatgcatgtgcacgtgtatgtatgcatgtgtatatgaaatcatacaacttcagggctgtgtaggaaactctgga

SEQ ID NO: 289040 - DNA, 122 bp, Homo sapiens
ggattggtcccacccgccagccccctagtcagggcttgggctaccccaaatatcagaagtcgttgcctcctcgtttccagcggcagcagcaggtgaaatcaagttgtttaccctctaagggc

SEQ ID NO: 289041 - DNA, 122 bp, Homo sapiens
cacagttctggagacacagtagagcttctgtgtctgcaaatgaccctctgtgggcttggacgtaacatttcccacataaggagcctccagaggccatgagtcgtgccctaactgtcccgcct

SEQ ID NO: 289042 - DNA, 122 bp, Homo sapiens
atgtctgcgggtttctgtgagggcgtgtggttctccctgtgggtccctggcgctctgttccggtttctgtctgtccctgtgggtctctgcctcccccgccccctctccctttccgcggcact

SEQ ID NO: 289043 - DNA, 122 bp, Homo sapiens
cggggcgcctgtcatttgtctacaacccattttccctgggccttctcctccggcttcccccgcatgaaggagtttgctgcgaagcacggaattccagcaacgctgggaaatccacgcaggcc

SEQ ID NO: 289044 - DNA, 122 bp, Homo sapiens
aaacaggtagtgacttaggtgagaatactgtgaggatgagtggtagtagtggtgagaagtcgttaggccatggatgtatttcataggactatccaagagaactgcagctgaattggagtgta

SEQ ID NO: 289045 - DNA, 122 bp, Homo sapiens
gaacacctaaaacccttagcaactcagccacctgctcctcactgctgccccaaggccctccgggggaaccatctggcctcaacacaagcagtcagaggccttgctccccacgggccgccccg

SEQ ID NO: 289046 - DNA, 122 bp, Homo sapiens
aagtctccagagagaaagccctcgtgcttgtttagatcaaagatccagaccaagtggcctcgcttgaggtcagccttgctgttacaaaacagaatgatccccaggcaaagggctcagagcca

SEQ ID NO: 289047 - DNA, 122 bp, Homo sapiens
caggactgagttaaatctgaaatctctccgcattcatccagggagtcgaccagtccagtccgaggcgctagtcacgttgttgtgccgtcttaactccccagtttggtcgcttcaaaatgcta

SEQ ID NO: 289048 - DNA, 122 bp, Homo sapiens
ctcctgcgcacgcgcgctgcggagccggacagttggtggtgctggcttggcccggctgttcgtctccgcgccttgctccgaagcgcgcgaccgtggcgcgacacgccggcgcacaggcgctc

SEQ ID NO: 289049 - DNA, 122 bp, Homo sapiens
tgattctctggggcaccttcagttcctaaactgaactgaactgagatgaaattggcaggccgtttgacatggtgaactcaggcagaggagatgccacatagccagggtttttctattacctc

SEQ ID NO: 289050 - DNA, 122 bp, Homo sapiens
ctcgctccaatcccgcttcgcggggttcgcgccggggggcgggagggggtgaattatccccggattaatcactccggagccgcttctccgccgctccaaatgctgggggtggaggcgcagct

SEQ ID NO: 289051 - DNA, 122 bp, Homo sapiens
accaaaccttacaaatttcactcacccgtactctagaaagaaccctaggaagagtttaggcgggcgcgcaggtgacgtcacacgcacgctgacggttcagctccacgcatgcgtgcaggatc

SEQ ID NO: 289052 - DNA, 122 bp, Homo sapiens
gtccatctctgcttccttgatcctccagcactgctcccagccactggctcctggaagggccgtcccgtggaccaatggcagtggaagcaaagctgagacacccacacttatatgctcctgac

SEQ ID NO: 289053 - DNA, 122 bp, Homo sapiens
aggatgtttctgttttcagcagaacagacgcagcccccgagtcagtgccgtcagaagacacgtcagtcaattcagtggaaaacacttccagtgtgaggcgttcgccggcgccccttagacgc

SEQ ID NO: 289054 - DNA, 122 bp, Homo sapiens
tcccagcctttctgtccattttcctgatgccactttgcttctcttttttcttctgacatccgttatttagtaatttatatttatatttagacctcagtataaatttaagtaactattagatt

SEQ ID NO: 289055 - DNA, 122 bp, Homo sapiens
cttgaagtcaaatctggcacaatttgatagttacttaaggtcttcagccagttatcaggccgtatgtgttaatataaattatagagtaacttgtggtacacttagctcagggccctatggga

SEQ ID NO: 289056 - DNA, 122 bp, Homo sapiens
tgccttttactggttgatcctggaagagttttttgattcttttgtgtctcaactttctcacgtataatgtaggttaaattatactaatttacctcttggggttatatgaggattaatttacg

SEQ ID NO: 289057 - DNA, 122 bp, Homo sapiens
acttgactctgctgatgagtgatgaggtcacagagttgttaaaggaggcctcattagatgcgctctctgacagggaagttggcataaggtctgtttctttgctgggtcatattttacagtgt

SEQ ID NO: 289058 - DNA, 122 bp, Homo sapiens
gtctgcctagctgtgcccagatgccccctcctggagggcccggcctaagcctcctcccgacgcgttcactccctgccccaccctaaaggggctggcgctgtctctccgtcctagaaggggct

SEQ ID NO: 289059 - DNA, 122 bp, Homo sapiens
ctgtctttcaggacatggcacgcgctcggtctcggtccgggcctgtcactcaggacacggcgtgcactcggtctcggtccggtcctgtctttcaggacatggcacgcactcggtctcagtcc

SEQ ID NO: 289060 - DNA, 122 bp, Homo sapiens
gcattgtagagggtatttgtgaattagccagaggtcagattataacctctgaagtcccttcgaactctaattctgctcctgcatctgggtcagctgactcctggcccaatgcactatccatc

SEQ ID NO: 289061 - DNA, 122 bp, Homo sapiens
ggccccgggggccatttggcaacagaattgtgactatgactgacccagctgccctgtgcccgggtctctccctctggcagagtctcactgggtccgtatgtccaagactgctgagggggagt

SEQ ID NO: 289062 - DNA, 122 bp, Homo sapiens
acaacgccaggtggaggtggtctggagaaatccggagaccgcctggattgagttctactgcgattggaagggagattccacagcccacatactttggactttaattaaggtcagcccctcca

SEQ ID NO: 289063 - DNA, 122 bp, Homo sapiens
catcacatctttgtctgtgtctctacaaaacatacgttgctgactgggtgcggtggctcacgcctgtaatcccagcactttcggaggccgaggcacgtggatcacctgaggtcaggagtttg

SEQ ID NO: 289064 - DNA, 122 bp, Homo sapiens
tgccggcaacgggattgtccatcctgcaagcccttcgactgcgactggaggctctgagcccgggtgagagagcagggccggggcaagttgcggggcccagggtgggcgcggagggaggatgt

SEQ ID NO: 289065 - DNA, 122 bp, Homo sapiens
agagcctgagatcaaagctgcggagggtgggtcatcatctgagcggcttaacctaacaaacgacagcctttcaaaacttgtgactcgggcttgtggtttatgtttatttgcccttggaggac

SEQ ID NO: 289066 - DNA, 122 bp, Homo sapiens
ttcgtggccttcgctgccaagctctggagcttcttcatttaccttttgcgggggcagatccgcacggtaattcagtaccaaactgttcgatatgatatcctccccttatctcctgtgtcccg

SEQ ID NO: 289067 - DNA, 122 bp, Homo sapiens
tgtgtccggagcatacagtcctgacatgggtggggacccatgatccattcattcagtcatcggacagaatgcatccagggccaccctgcttgggctccgggctagacttttttttttttttt

SEQ ID NO: 289068 - DNA, 122 bp, Homo sapiens
catagcgttcgaagagcctcttgaagtcctcctccgtgatgtcggtgggcagatttcccacgaagaggcggcagcgctgcgtgtacgtcttctcgcccggcttgaggaaactcttgatgtcg

SEQ ID NO: 289069 - DNA, 122 bp, Homo sapiens
agtggattaagctcagccggtagaatgtgtaggcaaaaactcaggccagaggtgcattcacgattcatgggtatttcttggcacttttctagaccttagagtaacaaaaatcttttttcttt

SEQ ID NO: 289070 - DNA, 122 bp, Homo sapiens
accttcctcaatccttctgaaaccagatctgggttcaggtaacagggtaacagaccctcccggtcttcctttgctgtgcaagatacagcaccagccacagggcctttcctacatcctgtctc

SEQ ID NO: 289071 - DNA, 122 bp, Homo sapiens
ccaggtgcgcggggctgggatatgagccagtcactgcctttgtgcctttccttctctctccgctgccgggttcaaccagcggacagtgggggaacggcgggcaggtcggtggagttagatga

SEQ ID NO: 289072 - DNA, 122 bp, Homo sapiens
agcgcgcatcgcgcaccccagggtagcagcgcaggtctggggctgcgccacagccgcgcccgcagagctatttttagccgctgcagccagcctagccaccagacggggtgggcggcatccaa

SEQ ID NO: 289073 - DNA, 122 bp, Homo sapiens
ggtgacagctaaggaccagcataagcaaagagagaagtagaaggcctaggacaggcaaagcgtaagtgaatagctcaatatgactttcaaagagtacaaaaggagtgggagaaaatatgttt

SEQ ID NO: 289074 - DNA, 122 bp, Homo sapiens
gccatctctaccttctgactcctgctggggcctgagtgtccccatagtgcccatagctgccgtgtacggggtacagcctgggccactacgaggggagaagggggctgggcgcaggcctgtgt

SEQ ID NO: 289075 - DNA, 122 bp, Homo sapiens
ctagagctcaagtaaccactaccttaactgaaatttgatgttaggtttcccttgttcctccgaatggttcttccacactcaaaataattgaatggttgagttggttaagcaaagagttatcc

SEQ ID NO: 289076 - DNA, 122 bp, Homo sapiens
gaggccgcagctggaacatcggagcgtccatcgcacgtggcagacgccgtgtgagggagccggggtgcacaggctggagcaggagccccccggttaacagaacctgtctgtgcttctccgat

SEQ ID NO: 289077 - DNA, 122 bp, Homo sapiens
acagtcgtatacgggtctctctcttcaaaggtgcacgcagtctgattgatccctgtgcctcggaatccgtgctaaataaatattgagtcggtgaatgaatgaacgaacgacaaaaggcaagg

SEQ ID NO: 289078 - DNA, 122 bp, Homo sapiens
acagtgtgctgacacttggtcttctcctgaaattcccaaattcactgaatggtaccatgccgatctctgagaagttatgttgcaccactgtgaaggtctagatgcaagcttggctccctcag

SEQ ID NO: 289079 - DNA, 122 bp, Homo sapiens
ctccaagcctcctcttgtcacccggccctgcactatccggaaaaggggaatgggcagaggcggggatcctgtcagcccagcttaaagctgtctcagttaatgtcaggccgggggaggaggct

SEQ ID NO: 289080 - DNA, 122 bp, Homo sapiens
acatttttggttgtggatcatctcctaaacataaacttccagagaacttcttcagtcttccgtatctcataattccataagcagtccctcaactgacatgtctgacttaagttgatctctcc

SEQ ID NO: 289081 - DNA, 122 bp, Homo sapiens
acctcaggtgatccacccgcctcggcctcccaaagtgctgggattacaggcgtaagccaccgcgcccggcctgacagcttttatccagaaaactgtcgccagtaaaggttcccgtctcagta

SEQ ID NO: 289082 - DNA, 122 bp, Homo sapiens
gattgctccacgtttagtggtgctaagttcaaataattcacgtggtgagaaactgacttccgtaggagtgcggctgtgcgtgcgtgccgcggaaatcccgccttccggcgcctgcggttgcc

SEQ ID NO: 289083 - DNA, 122 bp, Homo sapiens
ggctctcccaacactgccggccggtcccaggctctggtcatcagaagggtggccccagaccggtgcccagcccaggcccccaaccgaggccccaggagccgtttcatccccccgtgtttatg

SEQ ID NO: 289084 - DNA, 122 bp, Homo sapiens
gctgaactaatgttcattctcaccaacagtgtataagcgttcgcgtttctctgcagcctccgcaatatctgttgttttttgacttttaaatagcagccattctgactggtgttagatgatat

SEQ ID NO: 289085 - DNA, 122 bp, Homo sapiens
cactaaaaagggaggaaaatctcaattctgctagtttcgatctggaatacaaacgacaggcgccaggcttcccatctcacaatgagtgccttggagagatggtggtgtgccaggggtggggg

SEQ ID NO: 289086 - DNA, 122 bp, Homo sapiens
tcacctaaaagtaattaaaaagtcaacacagctgtgcggaaaaggggactctttcgagtccgcccagttctcaatcagaataaaccgtcacaaggccagtgagggcgggcggcgctcgcctg

SEQ ID NO: 289087 - DNA, 122 bp, Homo sapiens
tgccaggcaggcccgcactcgcccgcggccgctaccttgttagtgggcaccgagcggaggcgcttgaagatggtcaagatgtcctgcttgctggggtcccccatcgtcagctgtgagccgcg

SEQ ID NO: 289088 - DNA, 122 bp, Homo sapiens
ggaaggcagagcagggataactgggcccaagatgccctgaacctgataagaggtggcagtcgagtccctcaggactccagggcctggagacttcagtacagggctctgagaccagtacaggt

SEQ ID NO: 289089 - DNA, 122 bp, Homo sapiens
ttccccctgatctgggcagttccagccaaatggatttcctgctgaagcccacctccacgccgtgctcatgccacctcttccaccctcatctccacatgcacacctctcgcctgcccttcaag

SEQ ID NO: 289090 - DNA, 122 bp, Homo sapiens
gacagcgggtgtgtgagcgtgtaggagtgcttgggttgtcctcgcccagctctccatccccggagggagaatggctggaggggggctggtggttgccaggaggatcccctctcttttgctaa

SEQ ID NO: 289091 - DNA, 122 bp, Homo sapiens
gcaggctggtccgggacgctgcgactgcagccggcaggaacccgcgcgaggggaaaggggcgctgggaccaggccatgggatgcccaaggcacccctctcaagtccaagggaataaggccag

SEQ ID NO: 289092 - DNA, 122 bp, Homo sapiens
aattcgggaacccagcgcgggctgcagaggccccagcaggagccccgcctcccggctcgtcgacggattcgttcttggccctgccaatctgattctcagctcccagaacttcacgatttaga

SEQ ID NO: 289093 - DNA, 122 bp, Homo sapiens
ttcttgatccaggtgttgttgacttttagtctaagatatttatgtctcaaataagtagagcgttttaaagatttcttcaaggttttgagaacaggaaagacagagtgctttttagcattgaa

SEQ ID NO: 289094 - DNA, 122 bp, Homo sapiens
gaagtgaggagcgtctctgcctggccgcccatcgtctgggatgtggggagcgcctctgcccggccgccctgtctaggaggtgaggagcgtctctacccggccaccaccccgtcagggaactg

SEQ ID NO: 289095 - DNA, 122 bp, Homo sapiens
cacgctcccccgggagtgcttccgggacagggggcggggtcgccggaagtggccgtccgccgtccgctgctcgttgtttaagcggctgacgggaaggagaagccagagctccagcggcgccg

SEQ ID NO: 289096 - DNA, 122 bp, Homo sapiens
gcctgctgcgcacggtggctgtgctgtgctttccagagacaccaaagatccagcaagccccggtttgtgtcgagtgtcacgggaatggagatgccttaaggctccggcttggacggcctgtt

SEQ ID NO: 289097 - DNA, 122 bp, Homo sapiens
cgagctgccttccctcctcaaagtgtggagaaggagcgcgggggagcgtggcgacggcagcgcctcctccgccaccaaactcctggggctccgcgggggcttggggccacctcctcctgagc

SEQ ID NO: 289098 - DNA, 122 bp, Homo sapiens
acacactactgtgcctggccaacttttaaaatttttttcatacaggcagggtctcaccatcgagcccaggctggtcttgaactcctgggctcaagcagtcctcccgccttggcctcccaaag

SEQ ID NO: 289099 - DNA, 122 bp, Homo sapiens
ctggtcctgctggcagacaccctcatgaggacccaggtgatccaggagacctgtgagcgccgcaatcacatcgaccgggctctggatgccaccgagattctgggcatccttcacagctgcct

SEQ ID NO: 289100 - DNA, 122 bp, Homo sapiens
cttttatgactatgaatgaatggtttatgttcccatcaaaggtcaactcctgtgcttgtgcgatagagcccacctcctttgccttctcaagtttattgctatgcagttttctatatgtctac

SEQ ID NO: 289101 - DNA, 122 bp, Homo sapiens
ttctgggccaagggcgcatcgaggatgtgacccactccctggccaagtgtgaggccggggcgtggcggctgatcccactgctcggcggggcactttcctttccaggcagagaggagccctgg

SEQ ID NO: 289102 - DNA, 122 bp, Homo sapiens
ggaggtgtcagggaggggtaggttggggaatccagataccccttattctggggagctaatcggcctgggaatggaaaaattaagagaaaggatttccaggccccagctgaaaatggttaggg

SEQ ID NO: 289103 - DNA, 122 bp, Homo sapiens
agcctgaaaagggtgtgtagctggtgccctgataataagccggggatgaagacaccagaacgaagggtaaatggatgccaggtggcaaaaccacacatgcccacccttctggttgctaagca

SEQ ID NO: 289104 - DNA, 122 bp, Homo sapiens
acccctggaaagttgggcgggctttgtgttagctccaactctggggcttttgtggaacctcggagagggaggaattcttagatttctgaaagttgtgcgaaacggaccccagaggcctggaa

SEQ ID NO: 289105 - DNA, 122 bp, Homo sapiens
ctgctttctacctgaatttccagggccaacgccacaagtcagggagtgccgtttccggggcgcccagtaaacctgaccgccttggaggggtggcgccggttccataaggaagctcggccatg

SEQ ID NO: 289106 - DNA, 122 bp, Homo sapiens
caagcaccacactccagcccagcagggccacgtttccaggcaagccgtggtgtcaccaggcggtggacacaaattcaggcctcagagttagtcacggtcaaggtcatgggcttctagctctt

SEQ ID NO: 289107 - DNA, 122 bp, Homo sapiens
cccggtccatccctccccggccccgcgtggcaagcaccgcaggttgaggcgcccccaaaccgaggaagagggtttgggagcctgtgactccaaagccctctgcaacttcccggccccacagc

SEQ ID NO: 289108 - DNA, 122 bp, Homo sapiens
cagataaatgatccaggctccattagaacccatcactgaccttggaagctgctggagccacgattcagtcccctggactgtagataaagaccctttcttgccaggtatagtcaatagctgga

SEQ ID NO: 289109 - DNA, 122 bp, Homo sapiens
ggcacgcagacactgccagcgcatggacaccgtcaccatgaaggcgctcgcgctgctcgccgacctgcaccccaggtattggcccagtgcatgccgacaggcccaggccagggacttgggcg

SEQ ID NO: 289110 - DNA, 122 bp, Homo sapiens
ccagctggcagcgctggcggccggcgccctggatgattgtgccgagacactggaggacctcgacctctcctacaacaacctcgagcagctgccctgggaggccctgggccgcctgggcaacg

SEQ ID NO: 289111 - DNA, 122 bp, Homo sapiens
ggagaagaccggggcatgttctgtctggccgcagtgtccacggggtcagcgtaatttagccggctctgctgggcttggttcacaggtccgactgctggtcacagttatccgtggctgtcggt

SEQ ID NO: 289112 - DNA, 122 bp, Homo sapiens
gcagggattcattgagcctattatgagggcggtgctggcagctgtttccgcccttttcctcggaacttcaggcaggtgtggctgctccacccagtctggggccccaagccgggaggactcac

SEQ ID NO: 289113 - DNA, 122 bp, Homo sapiens
aaaagtgtaactttgagacctggcgtggtggctcatgcctgtaatcccagcactttgggacggcaaggcaggtggatcacctcaggctgggagttcgaaaccgcctgaccaacatggagaaa

SEQ ID NO: 289114 - DNA, 122 bp, Homo sapiens
agcctcacctgcacacataaactattgagaggcatgagcccttggaactcagatgtacatcgccaaacccagagatgccagtgacattgagactgacagccaacacaggctcaaagcacatg

SEQ ID NO: 289115 - DNA, 122 bp, Homo sapiens
gagtgtgcagtttgttgcgatgtggcacccggctccggcattataaagggcgccacgagtcggcattgtcaggcggcggcaccgcgcgggacggagcttggctgttggtcggtgggttcccg

SEQ ID NO: 289116 - DNA, 122 bp, Homo sapiens
gtactaagtgctatggggaaaaataaaaccagaaacagggactgggtgtgccgcgtaaggcgattcattttagggagatcatggaaagtctcgctgagctgataacatctgaacaaagatac

SEQ ID NO: 289117 - DNA, 122 bp, Homo sapiens
tggagccgggaagggtcgtgcgtgagtgggggacagtgtgtctcgctcaaccgctgtccgcgcagctgggcccagatattgtgccccaccccggaattgcgtgaggggcccacaagtcaggc

SEQ ID NO: 289118 - DNA, 122 bp, Homo sapiens
cggcggcggagcggagtgctcgggttgcgagctgaggactgggattcgcgcgcagcttcccgcggtctgcttgccctggagcggagggggagccccagcctcctgcggctccgagaagcttc

SEQ ID NO: 289119 - DNA, 122 bp, Homo sapiens
acctatgcaactgccctccacagcccctgctcacagcctcaaattcctcactcaaagtgtcgcccatcggccgcagcgtcagcaggtgcttcacctgccgcattttgagcctcacctcagcc

SEQ ID NO: 289120 - DNA, 122 bp, Homo sapiens
gcaacagggcagacctgcctgattaccgctggaccaagaccctgtcggagctggacctggcggtccctttctgtgtggacttccagctgaaagggaaggacgtggtggtggcatccaacggc

SEQ ID NO: 289121 - DNA, 122 bp, Homo sapiens
gatagagagagggagaaggaaaatccggtggggagccaccagcagccacctgacaagacccggctgcagcaatttttagagtgaccctttgccgtcccactggataaggcaggccgagcctg

SEQ ID NO: 289122 - DNA, 122 bp, Homo sapiens
gggggcctttcccagggccgcccagagaccctctccgaaagtggccctgccctagcggaccgagctcctatcttgccacccacgggctgcgccaagaacgaccacctctcttagcctcggtt

SEQ ID NO: 289123 - DNA, 122 bp, Homo sapiens
ttatgtaaccagtttatgcaagggcagccggcccgcttacataaggggaggccgggccagcgcccagctggggagggggaggctcttaaagggaccggcgtcccccgcggctccctccacgg

SEQ ID NO: 289124 - DNA, 122 bp, Homo sapiens
ccgaggtccggcctccagcggcgcgcaccggcctcgggccctcctgggcgctggcgggctcgctcctccataaataaaatacagggcgtcgactttcgcaagtgaccccgaggagcctttct

SEQ ID NO: 289125 - DNA, 122 bp, Homo sapiens
gtgttccaccatcaggaagctcctcgatgcgactcagatcacatctgggtcccacattcccgctgaggccggcagttccggcaactttggtcatacggatggagacaggtattataacctta

SEQ ID NO: 289126 - DNA, 122 bp, Homo sapiens
ttggtttaccattcatttacctcagtttctcctcgtgtgaaatggggatgataattgtaccgcagtaagaagtagatttcgttacatcttttactttttgaaccataagattgtttatccat

SEQ ID NO: 289127 - DNA, 122 bp, Homo sapiens
cgggcgccgccggggaagcgaggcctttgggtctgagggtccgagcggctcccggaggtgcgggcggagataggagaccccccccgagcctggggggggcgcaggaagggggcgcgcggggc

SEQ ID NO: 289128 - DNA, 122 bp, Homo sapiens
agcttcgaggtcttcagcgtccccgtctcggtcaggtcgatggcgatctcactcaggctgcgtgctgcatggattttggactggaatggaaagggaagcaggtcaaagaagtgacgctcacc

SEQ ID NO: 289129 - DNA, 122 bp, Homo sapiens
aggaggtccacaccaccaattgagatgtacctgtgctcatgacttgacattgtggtgggccggctacaaccctccccacccctcgctttcactaaataacaactctcttctctccatcattt

SEQ ID NO: 289130 - DNA, 122 bp, Homo sapiens
tgctgtgatgtcatagcctgcccaggctctgccaggaaatgcccatgagggctgggaccacgtccttcattcaacaaactcgtgcagaagggagacagagatgggagcaaatctctcccggg

SEQ ID NO: 289131 - DNA, 122 bp, Homo sapiens
gattcctcaacccaggaaggtggccagcgcgtcctcctgagcctgggtgggaaagcttggcgcccggaacctttgtactcgcccttccctgtgctcgggcactattgggcgttacgcgaggg

SEQ ID NO: 289132 - DNA, 122 bp, Homo sapiens
tttggggattctagagaacgcagaactacgtgtctaaaaaggacagcgttccgtgtccttcgatagctcagttggtagagcggaggactgtaggctcattaagcaaggtatccttaggtcgc

SEQ ID NO: 289133 - DNA, 122 bp, Homo sapiens
tctgggtcattttctggagacccagatttcaactccaaggggatgaggttccctcaaagccggggtggtagggccagctccctcatcaagagttctgaggctccactgtgatctatgctgtg

SEQ ID NO: 289134 - DNA, 122 bp, Homo sapiens
atctcactcgccttcgagttctgtgattttccacatgttacctcccgttctgggtatccccgactagtataacttttcagaattctgtgaaaatagagcagtgacaataatggccaccacgt

SEQ ID NO: 289135 - DNA, 122 bp, Homo sapiens
catcaggtccagcttttaaagtgtcctccacgttgccaccgtttactgtgcagtgagtgccggtcccaggtttagggtaacggggacccgcatcaagcccggagcatctgcggcagagctca

SEQ ID NO: 289136 - DNA, 122 bp, Homo sapiens
atggtcaaatggaaggagtttaattcttaaccagtctataactttttcagctagccttcccgctaggcaaatacctagaatgagttgggctctttgccaaactttttttttttttcctttca

SEQ ID NO: 289137 - DNA, 122 bp, Homo sapiens
gtcccggagcctgttccgaggctcagggagctgctaatacccatgtgatcagtgtaccagcgcccaaggtcatggggaggatggcaggaagggagggtagagccagagtgggaaagctgtga

SEQ ID NO: 289138 - DNA, 122 bp, Homo sapiens
caaaaatcttcttagccctaccttcagaatctgtcaacaatatgactttgtgaggcactacgaagttccaagtctgaagctaccatcacctaggtccaagctatcatcgtcaaattttgcct

SEQ ID NO: 289139 - DNA, 122 bp, Homo sapiens
agagaagcctacaagatgcagccgggaggtgaacagcagagaggacaatgcatccttcagcgtggtggagcctcagggacagatctgatgatcccaggaggctctggaggacaatctaggac

SEQ ID NO: 289140 - DNA, 122 bp, Homo sapiens
agcaggtggcgcagaagggagaggggagcgaccctggggaccgactctggggaccctcgccgaagaggtaggaaacgggggactgcacgttcctgaggccacttcacacttattgagcaaaa

SEQ ID NO: 289141 - DNA, 122 bp, Homo sapiens
tccatttctgctgcttgggagctttctccttaaactaagctttgtctttctttctagtcacgtttccttctttcccttcccggtattttctgccagctgacgcccacgcctttcctagaagg

SEQ ID NO: 289142 - DNA, 122 bp, Homo sapiens
tgcaggggagcaggggccgctggccgggaatcgcaagccggtctcctgtacatattagcgcgcagcattaatcaggccgcagcctctgcagtgctttccgaggggagtcagagactagggct

SEQ ID NO: 289143 - DNA, 122 bp, Homo sapiens
ctgacttgccggtcctcggctgtgatcacaaacaggtacatgaggtccccgtgcatcttccggttccccgggggcgggttccatccgctcatggtgagtactttcaggcactgcaagggctt

SEQ ID NO: 289144 - DNA, 122 bp, Homo sapiens
cccagaacagagaccagactgagagacgaggttaggaggaaacaggggacccaggaaaggcggctagattgcaaacgtacctacacagctctgagtcaaaggctgtcagtcatctcggctca

SEQ ID NO: 289145 - DNA, 122 bp, Homo sapiens
ggtcccccgatcagcatgtggctcctggcgctgtgtctggtggggctggcgggggctcaacgcgggggagggggtcccggcggcggcgccccgggcggccccggcctgggcctcggcagcct

SEQ ID NO: 289146 - DNA, 122 bp, Homo sapiens
gttgcaacacccccgagagacacccatgcctgtgaatatgggcacaggtaccaggaatatcgctgcccgggaatactcacagggttatatgcagaataggccacgaggatgtcacataattc

SEQ ID NO: 289147 - DNA, 122 bp, Homo sapiens
cattgttctgctccagcattcttaactttccctttctctcatcgggccttcagtttgtcccgttctaaccgcccggccgtctcaatgcgatcacaggagggacacggagatcgaggagggcc

SEQ ID NO: 289148 - DNA, 122 bp, Homo sapiens
cgtggctgcggtgtaatgtccgtggctgcggtgtaatttccgaggctgcggtgtaatttccgaggctgcggtgtaatttccgaggctgcggtgtaatgtccgtggctgcggtgtaatgtccg

SEQ ID NO: 289149 - DNA, 122 bp, Homo sapiens
cctgaactcaggtgaattcccttagctcattaccagtgtctctcagagagcaagttaacacggaaatgcaagtgtcaccagcgttgctgcagatgaccatgacttggcgcttacctctccct

SEQ ID NO: 289150 - DNA, 122 bp, Homo sapiens
gtgagctgcccgcagcgccgtcccattctccccgctgcccattgtgaaaagctgggccagcgcttccttgtcgtaatttttaactacctgttataaaatttatgggtgggtttgtgaaaaga

SEQ ID NO: 289151 - DNA, 122 bp, Homo sapiens
gcagactggagggacgcagccgggagcccaggaatgctgctgtctagaggctcaggaggccggagattgactctccctggagattccagaagggaccagccctacagacacctttattttag

SEQ ID NO: 289152 - DNA, 122 bp, Homo sapiens
gcgaacgaaggaagtgagtcagagaacccgggggtggagagaagaaagcaagcagctaaccggaaaggtctgaaaaagctagcgccggaagttaaactgcagaaagttgttccctagaatga

SEQ ID NO: 289153 - DNA, 122 bp, Homo sapiens
agccgcgattcttaacctgaactccacttcgcaatcacctgggacgctgcggaaaagacacggaggcccagccccactaatagatattctgattctgttggtctggaatgggaaccgcgcgc

SEQ ID NO: 289154 - DNA, 122 bp, Homo sapiens
ttccaaccctgtggccgccaacgtgctggggctgaggggtcttgttctggcattgtggtccgatgggagacagacacgtgggtgggttcttaaatacaacacacgaccacagtgcgacacca

SEQ ID NO: 289155 - DNA, 122 bp, Homo sapiens
aagggtcttatcttttctaatccataccactgactggagattggctcccacacacatctccgtgaccgcgtggccactgcctcctaagggtcttatcttttctaatccgtatcacggactgg

SEQ ID NO: 289156 - DNA, 122 bp, Homo sapiens
cctccacaagaagtaaactgggtgggtaggaagaggtgaaggctccctcctcagggctgccgggaccgcctcgagggcttgtctgtttaggtcccaattcctcccggatccgtacattcaca

SEQ ID NO: 289157 - DNA, 122 bp, Homo sapiens
gcgggggccatgaccgtggagcagaacgtgctgcagcagagcgcggcgcagaaggtgaggcgagtccgccagccggcgggccccacttctccttccgacgggctgtcctctcccgctgcggc

SEQ ID NO: 289158 - DNA, 122 bp, Homo sapiens
attaaaagaggagtcaggcagaggggactccctgttcagcctttaccgatggggcaggctcggggcagctttgagacaggcagcgccaaggtcgcccagattcccgacaagctccgcgcggg

SEQ ID NO: 289159 - DNA, 122 bp, Homo sapiens
cagagtcggccccgagctcagccgcaccgtcgctaggcgcccctctgtccgtgggagtgacggaggacacgtgactcctggctgtgcccgctaagccgtgttcagcaatcctggtggttttt

SEQ ID NO: 289160 - DNA, 122 bp, Homo sapiens
ccaacggggtgtcccacgattcagttcgactctcacactacctgcaggtagcgcagaccccgcaggctggggctccgtcccacaagctgcccctctgcaggcgaccgtcccaagtatcgggt

SEQ ID NO: 289161 - DNA, 122 bp, Homo sapiens
gcccagggcacagggaaccacggctgcttctctccgaggtttgtggcctgagaaactctccgctgcgaatctgggctggcctctccgggaagccttgaaactcaactcccgggtgggccagg

SEQ ID NO: 289162 - DNA, 122 bp, Homo sapiens
ggagggtgagtgtggcctttgggatccatagggctctgctgtcctcaatcctcaccactccgtattgggagctgggcagagctcagtcttagcaggtgctgttgggacagaaatcaatggga

SEQ ID NO: 289163 - DNA, 122 bp, Homo sapiens
caccgacgtcgccctccgaggcctgggcttccagcagggagagacccggacacctgtcatcgcttctcggtggatccctgaaatgttgagttgtggagtctgggcagctgagatcgggcagg

SEQ ID NO: 289164 - DNA, 122 bp, Homo sapiens
gggactcttgcacacatgtgtggataccctagttattcatacccccatacataaatcccccgtggccaactctttggcttggaaagtgtatactagaggcacagttgacccactggtgttca

SEQ ID NO: 289165 - DNA, 122 bp, Homo sapiens
cagcagggtgataggcagccccacgccgctaaccaccctgctgcctggggacctgctcagcggggagtccctgtaggctctgccatcatcagcaccaggagagccgacccctcccgggaccc

SEQ ID NO: 289166 - DNA, 122 bp, Homo sapiens
ctctgttgtccaggctggagtgcaatggcaggatcttggctcactgcaacctccgactatcgggttcaggcgattctcctgcaacctctgactatcgggttcaagtgattctcctgcctcag

SEQ ID NO: 289167 - DNA, 122 bp, Homo sapiens
gggcggagcctccaggccggggctggcggggagtccaccctgggggccgcgcccgctagtcgtcgcccactcgaccctctgggctcagcccccgggcctcgtcccagctactaccccagctt

SEQ ID NO: 289168 - DNA, 122 bp, Homo sapiens
gggtgcaggcccacaccacctcagcagcctgcccggcagtcctcttttcccaggttttggcgtttagacaacccacctgagtcctcagccttgtcccacacagcaaggtacaagggaccgga

SEQ ID NO: 289169 - DNA, 122 bp, Homo sapiens
cagaatcgcctctcgggggtcgccgggtgtctcccactcccccggcctcgggacggggcccgcagtccgcagcctctcccgtggaaaccgggcctcccgtccctgtgcgtcgcgagcgggct

SEQ ID NO: 289170 - DNA, 122 bp, Homo sapiens
tgggccgcctcagagggccccacgtctgaactgtgtgctgagcacaggtgaggtcacggacgatacctggatgaggcactgcaagggtcggcccgcgtagcgaatgcttcttttccagtcct

SEQ ID NO: 289171 - DNA, 122 bp, Homo sapiens
cagccagcagagggaaggaccagggacggaaggagggaggggagccccccgtgggactggcgggtgcacaggcggggggaacgctgcaaaaacacagctgtaggttcataactaagcacact

SEQ ID NO: 289172 - DNA, 122 bp, Homo sapiens
ttgttaatctttaatttaattaaagaatttatcccccaaataggaaagaaagcagcggagcggctaaagcgtcatttgatttttctgtcgatgacttgagttgcctttgaagggggtgaata

SEQ ID NO: 289173 - DNA, 122 bp, Homo sapiens
ccttttctatcaggtttagtgcatcttttaaccagccgaatggagtcctttacaaactgccgacttggctcaacaaactgcattacctgatccatgactgcctgtttaaaacaaaaaagata

SEQ ID NO: 289174 - DNA, 122 bp, Homo sapiens
gggcgagctggagcactagtggagttggcgggaaaggcacggctgcgggcgccccctgtccgcacggaggagccgaagtcccgcagggtggggtccccgcctgcgccgagagggccacctgg

SEQ ID NO: 289175 - DNA, 122 bp, Homo sapiens
cgcatcgtgcaggaactgcagcttggtgcggcggcccataatgggcacagagaagggcagcgtgacagtgcggttgaggaagaggtagccgttatcggccgtgcccttcatgttgcccgcgc

SEQ ID NO: 289176 - DNA, 122 bp, Homo sapiens
ttggtcccttcactcacatgcggtgccgtggctgccatctcacgtggccagcgccgtcatcggtaattagcagtgatgacagtttctgccgctcatgccgccctctgagcccagcgctggga

SEQ ID NO: 289177 - DNA, 122 bp, Homo sapiens
gaccccgttccaccacgagctcctccagcgcccggggctccggcgtaccctacgcctctgcgctcgcggccccgccccgggcctcccgtggggctttaatgacataagcaactttcctcgcg

SEQ ID NO: 289178 - DNA, 122 bp, Homo sapiens
tcttcagcctgactgggctggagaggcggtgcgtcctcctggccggggggcgggggccgtcgcgctcacgtgacctttgctcatggcggcggcggcggcggcggcggtgctggtggtgctcg

SEQ ID NO: 289179 - DNA, 122 bp, Homo sapiens
ggagaaagagagtgagtattgccaagggaggcacagggagagcgaggctgctcagcggtgcggcaggttttgaacccaagtgtaaccactacaaagcctatgatttagtggacagaccacgt

SEQ ID NO: 289180 - DNA, 122 bp, Homo sapiens
tggtacacttggttcagcagcctggggaatgtggggagatgtgtgcctgcacagtatcaacgttatcagctgccctgttcatgtcgcctctccctgaaggacactttcataacacagtaaca

SEQ ID NO: 289181 - DNA, 122 bp, Homo sapiens
gaagtacttggccaggccatgcgaggcctatatgagaagaatgtgagtcttttctgaaagcgaagacctcgatctgtgatataattcgagttaatacaatgtagaaatgtttggtacagcct

SEQ ID NO: 289182 - DNA, 122 bp, Homo sapiens
tgtccctaaagtagtggtagtaggcccacttcttagggaaatgtatcaaaatcactgaggcgaaggcaaagttttcaacctataggtcctctcaatccttcctgtattcagccactgatgct

SEQ ID NO: 289183 - DNA, 122 bp, Homo sapiens
aatctcctgcttccagcccgagcggtgctgggggccgcagtctgccttgagggctttcaccgccaccatctcgccagtgccgtcgttggtcggatcgtagcagtacaagctgaccttgccga

SEQ ID NO: 289184 - DNA, 122 bp, Homo sapiens
ggggtctgccccaagctgtgcctgcttccggagccgcaataagaacggtcaattgagatgcggctttcaggcatttgtttaggacatgcccatggcggggcttctaaaggggcttgtacggc

SEQ ID NO: 289185 - DNA, 122 bp, Homo sapiens
gcagtgacagtcccaggggaaggggcctcaactccagcagctcagaagccctggagagcacgagggcacaagagggtgaaccaaattagcaggtgatccaaatggcatatggtctggcctgg

SEQ ID NO: 289186 - DNA, 122 bp, Homo sapiens
ttcctcctttgcggaaatgtccgtagaaacgcaccttttttttttcctgccaggacaaaccgccggcgatatccgttcatgtgaaagtgtttactaacattctctgaagactcactgggttc

SEQ ID NO: 289187 - DNA, 122 bp, Homo sapiens
ggctcggccatggcggttccgcacgaaccggccctgcctggcacggcctcccctccgctccgccccaacccaactcccaggtacagccctgctggcccccaaaggcagagccggccgggcgc

SEQ ID NO: 289188 - DNA, 122 bp, Homo sapiens
gtctccggggcaaggaacgtctggaggagaagggatggggaggagggggtcttggaaagccggtgcccagaccaggggtccgctccacctcccgtttgcacggaccctgggtgccagcctcc

SEQ ID NO: 289189 - DNA, 122 bp, Homo sapiens
gtagtggaaagctcataacctttggattcaaatgatcctagtttctgtaccatttattagcgttgtgacctaggacaagtacctcacttctctgagcctgtttcctcctctgtaaaataatg

SEQ ID NO: 289190 - DNA, 122 bp, Homo sapiens
gagagagaggaaagaaaaagtatcttgctttcgaacaaacaaaaaggaaataaaaagacccgataatctcaaaaggttacttgctgcttgaaatttttgattcggtgtattctacctagtaa

SEQ ID NO: 289191 - DNA, 122 bp, Homo sapiens
gtgagaggctcccaatgcaggtggcgccattctccttaggttgaaggatgtgttccaagtcgcccggcaaggggactgcagcagggcgttctgggcaggcgggaggggcccagaggcacgtg

SEQ ID NO: 289192 - DNA, 122 bp, Homo sapiens
taagcttaggaatagtcctgagaagtggctgataaagtgccggctggcagcccactcccccgtggctgccagcgccaagtgctcagaaatcaccaggttaaacaagtctgcagaaaattcaa

SEQ ID NO: 289193 - DNA, 122 bp, Homo sapiens
cgccgctgcctgggttcggttacagaagcggccggccgctcccccctcgctttcctgcgccgccccccaaagttggcagcccttgtgtttggccctgccccgaggttgtccgttgagattat

SEQ ID NO: 289194 - DNA, 122 bp, Homo sapiens
agccttgccctagttttgcacttttgaaaaagttgtgacaacaggaagacagatgccgggcgtagtttggacactttaaaactgaaccatgaactgggaagtgttaactgcagttgagcgca

SEQ ID NO: 289195 - DNA, 122 bp, Homo sapiens
tccccatacccatgtttagcgtgactgtgatgatattgagagacattgtggaatctgtgacgctgctgaaggatgacgtctgtggtgggaaaaggagccagagtgcccttcaataacccagg

SEQ ID NO: 289196 - DNA, 122 bp, Homo sapiens
cccccaggtgtgtgggaccccagagtacatcgcgcccgaggtcatcctgcgtcaaggctacggcaagccagtggactggtgggctatggggatcatcctctacgagttcctggtgggctgtg

SEQ ID NO: 289197 - DNA, 122 bp, Homo sapiens
ttatacatataactcatttaatgtatctctcctgcatttttagataaagaaactgaggcacggagaggttaactatgtcacaggctaagtagaagtgaggcacacatttgaacccagatggc

SEQ ID NO: 289198 - DNA, 122 bp, Homo sapiens
ttgtttctcacactctctcacacacacaatcacatgcaggtgcacacatactctcaaacacgtatacatgcactcacacacatgcacacacgcatgcacttatacatgttctcacacatgct

SEQ ID NO: 289199 - DNA, 122 bp, Homo sapiens
gaggctacactgtgcagtttcagggaaagacaaaaggctggattcagtctgaactcagcccgcacatgaagcagctgctcaactagctggagctccaggccagctcttgggctcccaggtca

SEQ ID NO: 289200 - DNA, 122 bp, Homo sapiens
gaccacttcaccaaggaaggtatgaacctctccattttacaggcccagttcaaaaagcaacgacaaaaatcaacaccagcaaacctttatggagttctaattattgacctggcctgccaggg

SEQ ID NO: 289201 - DNA, 122 bp, Homo sapiens
agagctctcgttttgtccactaggtggtgctgccttccctttgctactttagagtcctgccgctaatgtaaattagtctcgggactgccttgggtgactttgctgtttttgccttattctgt

SEQ ID NO: 289202 - DNA, 122 bp, Homo sapiens
ccaagcttcacacccatctcccgggccactcgggcggccacactcatggcagccactctccggggttgggtgcaggcaatcttcatacccttgtttgtataaccctgaatgacaaagaaaaa

SEQ ID NO: 289203 - DNA, 122 bp, Homo sapiens
aggctagactcaaattcctgggctcaagcaatcctcctgcctcaacttccctagtagctgcgactataggcacacgtcattgctcctggcttaaagagaactatgagtaaatattggtatag

SEQ ID NO: 289204 - DNA, 122 bp, Homo sapiens
taatcccgtcccccccggcctcctcacccctggtctccgcgggcctcagctgtctcctcgcggctccgtgtcccgcaagctgctgccggccggccccgcccacttcccgtccctggccgccg

SEQ ID NO: 289205 - DNA, 122 bp, Homo sapiens
aaaaagagctcaggggaaatacaaatccaaaacgcttcctagtttctctccttagagaatcggcacccttatatctattctgacttcctaggatttctaatcccttgtctcttcccttttta

SEQ ID NO: 289206 - DNA, 122 bp, Homo sapiens
aggtcctgacattccacagtgtcctggagaccaaggatgggaaactgtcaaccttcagaacgtccttctccctcagctggagggagcatggcagtgagccaaggagacgggaccctctgctt

SEQ ID NO: 289207 - DNA, 122 bp, Homo sapiens
gaccggagtggctggaactctgggtggcggagccgctttggggtcagagttcctaggagccgggtctgtggcaggggcactggggggagctggactgacagggggaggtactgctgctggcg

SEQ ID NO: 289208 - DNA, 122 bp, Homo sapiens
atgaggggggctgcgggagctgcgggggcctcctccagggaggacggttgcagggtccctcggccgccgcccactcccgggggcgttccttcctcccagctgcgcccggagcgcctgctgcc

SEQ ID NO: 289209 - DNA, 122 bp, Homo sapiens
cgggtggacagcgaccctcctcggccgcgtcccctcgtgggtttcccccaaccaataattcgtcccgcctcccagctgagcccgaagccaatcgggtcgtagatctgcacctttctatcccg

SEQ ID NO: 289210 - DNA, 122 bp, Homo sapiens
ggacggtaatgagggcacctcagcttttcacatgcctgagtggatggtgagttcactggtcgttttgtttctccttctgtttcttgataatgagaggcaaccatttctgacgggtgacaagg

SEQ ID NO: 289211 - DNA, 122 bp, Homo sapiens
gctccttatcttggtgccacagtagatctttggtattcaggttaattaatctcacccaagcgtgccctttgcttcagagaagtatttctcacacttggctttaacagaacatcaggtccagg

SEQ ID NO: 289212 - DNA, 122 bp, Homo sapiens
tgactacaagccggctgacatggtgccaggaatctcgtcatgaacatatggtgttctcagcgcaacaagaagacatctcttcttgaactgaagagtgagggtgaagaaaactttccctgaag

SEQ ID NO: 289213 - DNA, 122 bp, Homo sapiens
cttaggtacctcttccaaaagacttttaagaggtttgataagcatagcaaaagtgaacgacggaggatacaagaaaatctttgatccaggagtagtctctctgaagcattgcatgacctttc

SEQ ID NO: 289214 - DNA, 122 bp, Homo sapiens
catgccaggcagaatggttaacacaaaataaatgtcaatgcaagagagcgttctgggaaacgttttcacctggagtagaatatgcttaattaatgacctcgaaatgaaaaggtctgataagc

SEQ ID NO: 289215 - DNA, 122 bp, Homo sapiens
acaccaggccgcagcgggggcgccggggacagggctggcccaggccctcccaggacctgccggtctcacctagcgcttgcttcccatgcgtatcgtgggcagattgtttccccctcaccctt

SEQ ID NO: 289216 - DNA, 122 bp, Homo sapiens
ctgcccactgctgttccatcttaccaaatactcagtagcgtccggagagggacctcaacccggttacttccctgggtgtgcagcacgtggccagcgtctcatagtctagattcttgcatcag

SEQ ID NO: 289217 - DNA, 122 bp, Homo sapiens
ctccccagggaaagtcttaaggaggtccttccatgcataaagcacacaccccatgtgcttcgtgttggaggtcacagatttgacttctcatcgatttatcaataggaaatttgctgaaagca

SEQ ID NO: 289218 - DNA, 122 bp, Homo sapiens
gtggtctcaggcaggggttgaacgtgaagctaagtcgttggtattagacgactgcaggttcgaagcctgcacctgccacttactagtggtgtagctttcaaagacttacttaccttctcctt

SEQ ID NO: 289219 - DNA, 122 bp, Homo sapiens
ggcgcgccggacgagctgctggccttccaggatgaaggcgaggagcaggacgacaagagccgcgacagcgccgccggtcccgagcgcgacctggccgagctcaagtcgtcgctcgtgaacga

SEQ ID NO: 289220 - DNA, 122 bp, Homo sapiens
ctttgctatggggtggagggcagaggttaaaggtctcagccagaccctttcctctctgggcgaaaacaggaaaatgaaaacaggaaaataactggtatatgaaaagggatgattagaagtca

SEQ ID NO: 289221 - DNA, 122 bp, Homo sapiens
gtcgtgcgaccgttgctgcaggtggtccaggcttgggaccttgacgcgaggcgctgggtccgggcgctgcggcggagcccagtgaaagtggtgtttccttccggagaggtggtggaacagaa

SEQ ID NO: 289222 - DNA, 122 bp, Homo sapiens
acactcccagcatggacggtttcaagccccaacgccgctacacgcacgctcctgacatcacgaattcacactgggacccacgtgatctcggttcccaggtggtaccgctcttgtagaaatat

SEQ ID NO: 289223 - DNA, 122 bp, Homo sapiens
ctcatacacggttttcgaccggttctggggcagaagcagggggcactggcgcaacaggctcgcttccgtcaccgccatggctcgaagtccggagaaacacagaaaagctctagacctgctgg

SEQ ID NO: 289224 - DNA, 122 bp, Homo sapiens
ctctcttatatggaaaatggaagataataagtaattgactcaaataatgtaaaagaacaccgagtatatagtaactgggaacaagaattgaaatctaggggttcagaatccagagcccccat

SEQ ID NO: 289225 - DNA, 122 bp, Homo sapiens
aacgtcacctcgatctgaggaactcccctgggtgctggagggattccagtcaggtcaaaccgccccagcaggttgttgtcctttgtcatggccctctcgccctcatacacctggatcagcac

SEQ ID NO: 289226 - DNA, 122 bp, Homo sapiens
taatgtactatctgaaccgtgtgtgtgcgggggacgcgagcagcagccgcctgcttctgccggctggagttgcttaagttgccacgacaaccaagggcccaacgatgtcctcacaagcagca

SEQ ID NO: 289227 - DNA, 122 bp, Homo sapiens
cagctcctcagacgtcaggtggcttttgtctgttacactctgggaaggagcccatccccacgacacaccagcaccacaggaccccgagtgtgtggggtgccgagccagctcaggattgtcac

SEQ ID NO: 289228 - DNA, 122 bp, Homo sapiens
gggcctgcccctccgagatctggggccgccagggggtccggctgcttctgctgctgggctcggggcggggaaagggttaatttccatgcaaaccgggagccgtggggcccaggggcatcacg

SEQ ID NO: 289229 - DNA, 122 bp, Homo sapiens
aacttgaactccatgtcagccaggatctgcctactgcaatcatcttcttttcttagctcccggagctttctctcagtggacagaactgccctccagctttcctgagctctttccacacaggc

SEQ ID NO: 289230 - DNA, 122 bp, Homo sapiens
gtgatcgattaaactctaacaacagacaactgaggtaacgtccactcttcgaaggtgtgtcgtccaccacgtcaggaccaaagtccaagctctccccgtaccctaaggaggccagaactcgc

SEQ ID NO: 289231 - DNA, 122 bp, Homo sapiens
aacgccagccggctccattctgctttccccaaagccaccgattattagcacatactcccacgtcctctcctgaaaggccatcccagcctcggactcggcctctggctgctccccacacccct

SEQ ID NO: 289232 - DNA, 122 bp, Homo sapiens
acttgcgcggccgggaagcttgtacgcccaagatgcaggatgcctgttaatcggagcaagcgggaggacgaaaggaaaccatgtggcaggagatgggcccctctgtgtgcgcagctggactc

SEQ ID NO: 289233 - DNA, 122 bp, Homo sapiens
aagatgctgttgagggccctggagaaacttcagcagaacagggcctctccccttgcaggccgagccgggggccctgcgccctccccctccgcccagctcggccaagggcgcatttgctgagc

SEQ ID NO: 289234 - DNA, 122 bp, Homo sapiens
gtgtgagtgtgtgtgagcgcgggtgtgaggcggtgcgcaggggcgggcggaggcgctgtccggccccggccaggcgccgggcggggagcatgggaaggggctagaactgctcgagcccccca

SEQ ID NO: 289235 - DNA, 122 bp, Homo sapiens
cgtcgctgcagctgccagcagctcctgaggaagtggctcgaggccctgtggcgggccaggcgtgcggtgggcccgcagccctcacaccggccccggccgcacacaggaggcgcaatcagcag

SEQ ID NO: 289236 - DNA, 122 bp, Homo sapiens
cagatgcgtccggagtttcttctggggggttcgtggtctccctgacttcaggagtgataccgcagactttcaccgttagtgttacagctcttaaaggtggcgcgtccggagttgtttcttcc

SEQ ID NO: 289237 - DNA, 122 bp, Homo sapiens
agctttctttgtttttagcccttcccgccattttggaaagggtaacttgcagtctctccgcgaagtttccaacttctgtagtctttgagaaccttacgaacgcttcaagcttaaactgaagg

SEQ ID NO: 289238 - DNA, 122 bp, Homo sapiens
cctgccatgggctcctgcgcgccggagcctccacgaggagcgccactccctgctacatggcgcccagtcccatcgaccgcccaaaggctgaggtgtgcgggcacacagcgcaggactggcag

SEQ ID NO: 289239 - DNA, 122 bp, Homo sapiens
ggccgcttggtaacccctccctgtccgggcctcgccgctcagtacgggggcggggctagccggctgaccccctggcctactcccggcctccggctccaggcccttcccggatccccgccccc

SEQ ID NO: 289240 - DNA, 122 bp, Homo sapiens
tactaaggacaaccgggcaggctgaggtcccaacgtggatgatccgagttggcctcgcgccggggctctgcagccactgccctgtgcgctcagcacctctgggggcgatcagggcccctgcg

SEQ ID NO: 289241 - DNA, 122 bp, Homo sapiens
aacgctgtgccatttcacggcagtgaaaggcccgggaaggatcccctgccattgtctgcccgcagccacagtgctattaccaacgtacgttttattctatgcgtactataaacccaacgatg

SEQ ID NO: 289242 - DNA, 122 bp, Homo sapiens
tgtctcaggggagggctgtccccaggctcctctggaccagccttcccaccatctgaaagtcgttcccagctctcctgagcctcaagcccgctgcccacgccactgtcccggcgctgcctgct

SEQ ID NO: 289243 - DNA, 122 bp, Homo sapiens
cccgccccgacgtggcagcgctacccagtcaggcgaggtgctgcctgcgcgtgggcgggacgcatgcgcgtagggagcacgtagtgcgcgtgggaggctccgccttttcggtcctgggaacc

SEQ ID NO: 289244 - DNA, 122 bp, Homo sapiens
cccggaccacgcaaccttgggatcggagggtggttgaggccttgagggaagaatggaaggcggccttgacttctggtgcttccacgcccttcagatccagagcccagagcgtccaggctgga

SEQ ID NO: 289245 - DNA, 122 bp, Homo sapiens
gggttttgctatttgatgaccggaggctaacgtgccaaaaataaatcacaactgcaaacccgggaggcaggccaaggctccgcagggacagggcatggagcccagtctccgggcggaaggtg

SEQ ID NO: 289246 - DNA, 122 bp, Homo sapiens
ataatattactgtttacttttcctattatggtgctcttttatttttaagttacttcaagacggttctgagatacaaaaatgagtaagatatggtttcactaatacaaccacgattaactagg

SEQ ID NO: 289247 - DNA, 122 bp, Homo sapiens
gtggagaagccaggattgttgccctagagttacagtagataaaagtacctcagagaactgcgggggctcccaacctggacgcttgcaccggagtattaaatccagctagagaatggcatgtg

SEQ ID NO: 289248 - DNA, 122 bp, Homo sapiens
gggcacgtgggcgaatgtctggtggccgggtgagtggaacccgccgcccagtccttgcagcgggctctggtctagtgggtgaggatccctggggaggtcccaactccggtgcagcgtccgcg

SEQ ID NO: 289249 - DNA, 122 bp, Homo sapiens
aatataatatccatgaaggcacggtcttgttttcttcaatgccgtatcccctgtgcatagcgtagtacctgacacatattaggtgttaaatatgtatttttatgaagaaataaatgtgaagc

SEQ ID NO: 289250 - DNA, 122 bp, Homo sapiens
tctcgcgagacaccgtctagcacttcccgcccgtcagtccttcacagtgcccgaatcgcccgctggtttaagtgcagcctgtcaatcagagcagctctcgaggccccgcccaaggccgtgct

SEQ ID NO: 289251 - DNA, 122 bp, Homo sapiens
ggaaaacatgcatagaaatatgtgagggaggaaaaaattacccccaagaatgttagtgcacgcagtcacacagggagaagactatttttgttttgttttgattgttttgttttgttttggtt

SEQ ID NO: 289252 - DNA, 122 bp, Homo sapiens
ttatatcctttcagaattcttggtgggagtagtgacccatgcctacaatcccaacactctcggaggtcaatgtgggaggatcatttgagcccacgggttcaagaccaatctgggcaacatgg

SEQ ID NO: 289253 - DNA, 122 bp, Homo sapiens
gccctgccccctccagctctgtcccaggccggggtgcacaagagcccccacctgcccgcccgccgccgtgtgcttcacgcagagaccaggctcacaccagcccaagagccacctgaggattc

SEQ ID NO: 289254 - DNA, 122 bp, Homo sapiens
ataaaactcagtactatctattggtaatggatgcatatatgtatgtacatgtttttgaaacggattggaaggatacagaccaaactcttgatagtggtcacctgtgaagagtggagaaggga

SEQ ID NO: 289255 - DNA, 122 bp, Homo sapiens
aaaaagaacaagattttcagattttcacatgattttcataacagaaggtattcgtttggccgggacaggcctaactctggaaaacaggatgggttgaggccctgaagtgtcaaaaggtggca

SEQ ID NO: 289256 - DNA, 122 bp, Homo sapiens
tgcgtgcctgcagtggaaggggcgcctccccctaggggcggaggtctgacgggcccttcccgtgctctgtgccgcaggtggagtatgcctacagcgacaacagcctggaccccggtgagtag

SEQ ID NO: 289257 - DNA, 122 bp, Homo sapiens
gacaacttcagcagctcatgtcccgagtgggacgggcaggcccgactgggagctccagtccgccggccgcacaaagactcgcacgcactgcctcggcccgccccgcggcggccgctgtcccg

SEQ ID NO: 289258 - DNA, 122 bp, Homo sapiens
caaactgctcagttcctgcggtgtccagaatttccagcacggagggggaagagtccacttcgatctctttgcggtagaaatcttcaatggtggggtcatatttctcaatgaaagtcccagtg

SEQ ID NO: 289259 - DNA, 122 bp, Homo sapiens
tgggtgaattgtgtctgcttccccaggaataggggtgggaggcctgaagcccctggggaccggtgggggcagacagcctgagattaaacttgatccatagataatcccccaaatccagaagc

SEQ ID NO: 289260 - DNA, 122 bp, Homo sapiens
ttgggcccccgcaggcctgatggaggaaccccgctttggttaaggcttaaaggaggcgcacgggactgactcttcctatggaaaatcctgcacagggagatcaaatcccagcctcccagagg

SEQ ID NO: 289261 - DNA, 122 bp, Homo sapiens
ctggctctgatgtttcattatgtctagttccagtcttagcatgacaatttcttcctgcaacgtactattttcatgcaagaggtctttttctttcttataactaagagaaagctaagtaaaca

SEQ ID NO: 289262 - DNA, 122 bp, Homo sapiens
cgtagcaattgcttttattgctgattagatcaaatttatcagtgtcgttgcctactacgacgtttgttactgtttcctggggtcgggggtggttgtgattggagttgccctaaaggggagaa

SEQ ID NO: 289263 - DNA, 122 bp, Homo sapiens
gttccgcccccagggctcacctgcttgaggaaacaggaactgcctcggggcagccagccccgccccattgacgtgcagaccttgaatcgaaacccaggctcctgcaggcactggcacagcta

SEQ ID NO: 289264 - DNA, 122 bp, Homo sapiens
tccagcgcccaggcccgacccccgcgcctcagcccccgcaggcgcgacgatgagaaacgccgtgggagaaagaaacaaagcccgaaccgtgcgcctccgtgacccaaggcaaaggcggcagg

SEQ ID NO: 289265 - DNA, 122 bp, Homo sapiens
gcacgcgcacgtgccaattcgcacctgagggttccacctgccagcgcggggacttgcccgcgttctgtccccagcatgagatgcagaccgaggccagggagcccttgctttgggtaggcgcc

SEQ ID NO: 289266 - DNA, 122 bp, Homo sapiens
tcattcccaactgattatgacctttcaggatgtcgtcaagtgatgctttcagttgtaacacgtgacttggtgctgtccctgctggtctaagtagaactgtagattcatatgggctggtgttc

SEQ ID NO: 289267 - DNA, 122 bp, Homo sapiens
cccggcgctattccggccaggaggcgggaggcggttgccggctgcgcgccgaagcctgcgcgccagtcctccggccactgctatcgcccacggccgcaccatggccctaaaggccgagggcg

SEQ ID NO: 289268 - DNA, 122 bp, Homo sapiens
tcgcctggctgcagcgcctagtcgttaccgttttgtgcgtagtgtcatgagtatcatcgacgtggtggccatcctgccttattacattgggctggtgatgacagacaatgaggacgtcagcg

SEQ ID NO: 289269 - DNA, 122 bp, Homo sapiens
gttgcgagcgatgctggcgaacttgcgggccacgttggccgcagggcgcatgccagccggcgtggcaggcacaatctcaatggctgtcacacactcattgcctgtctgcttcgtcacaatct

SEQ ID NO: 289270 - DNA, 122 bp, Homo sapiens
gctgcatccagctgcaaagaggcctgctgggaaaagagctgatgccacagggaagaaacgcgacccccacgggccctgctggcctctccaaggccccgaccactggacgcagaggaagccgg

SEQ ID NO: 289271 - DNA, 122 bp, Homo sapiens
gtcgactccagaggcagtacttggactccggaccggattgactagttaaagcagggctcgcggaagcagctttccctaagcctcgcccacccgagtgcctgtcagttttccgttgccatagc

SEQ ID NO: 289272 - DNA, 122 bp, Homo sapiens
ccaccctggccgggttcttgcctggcttgtgcgtccttgtgacaattcctgacacggatgcgcaccgggcagtggcacgtccaggtgctgtgcgcgcccgggcccacaaagctcctttggac

SEQ ID NO: 289273 - DNA, 122 bp, Homo sapiens
ggacgaggaggcggagaggagtctgtgtgcctgggcggcgggcgaggactcccccatgctcgccaggagcgcgggccaggagggctcctgctgccgccgctgctgctgctgctgctgccgct

SEQ ID NO: 289274 - DNA, 122 bp, Homo sapiens
gacgccggtggctccccaccaattccacgacagggtaggcctcaccgatggtgggaggctcgggtcctcctacaactagaaccttctctagaaaggcagatgtcaactccagcaccctccag

SEQ ID NO: 289275 - DNA, 122 bp, Homo sapiens
cttcagcacaaaggactcatctgctgctttggatgagacccttctagatgaattctacatcgaacttgaccagcagctgaatgacctggagtcctgtgtgatgcaggaagtgggggtgatag

SEQ ID NO: 289276 - DNA, 122 bp, Homo sapiens
atatcggaggcccaggcattcgagggacgtgcagttgcatcacggagagcctttgggaaccgtctggggtcttggcggagacatttgtgtttcgggggcagcgccccttcctacatccagga

SEQ ID NO: 289277 - DNA, 122 bp, Homo sapiens
gggggaagagggcggcagtccagatggcgcgcaagtgagtgccaggccgcgaggatttgccgccgggacccagggcgcactagctaggtgcgccgcccacccgcggcctcacgggggcgccc

SEQ ID NO: 289278 - DNA, 122 bp, Homo sapiens
cagataagtccgactgtagagctaggatttaaaccaactgcacctcatttctgcaacagtcgacataacattctgcttctccttgtatattccctccacttaccaatctaaagtttcacagt

SEQ ID NO: 289279 - DNA, 122 bp, Homo sapiens
cagaccctctgaatcttctccctacctgtagcccaacagcctggggctgttcctgatattcgctataggccgctggaacaggaggctctgtggcctccctgtgtcccccacagttgtggcaa

SEQ ID NO: 289280 - DNA, 122 bp, Homo sapiens
agagcggagatggaggagtaattcagggggtctaccagtttaggcagccagaaagctcctcggaaggaaggggcgtgactgccaaggcagctcctgggcaaaggatgggaggtaggggaggg

SEQ ID NO: 289281 - DNA, 122 bp, Homo sapiens
cgggtgggcttgcagctgtgacgcttatgtggacacctcagtgtcgctggtggttcacctcggcttcccagtttatttattgacgtcaacaaataaatgttgaataaggaagaagagttaga

SEQ ID NO: 289282 - DNA, 122 bp, Homo sapiens
tggattatgaaaggtttcacacatccaaaaaagtaatataacacggccatgtaccctccccgagtttaacagatgttgacatttccccacatttgcctcactcctctgtttttaaaacagat

SEQ ID NO: 289283 - DNA, 122 bp, Homo sapiens
accttccagcctagccatgatcctcgggactgtgagtgtctgtggtttgctctgtccctccgagcctgaggggctcccacccaggggcctggactggtgtagaaaggttaggctggagggct

SEQ ID NO: 289284 - DNA, 122 bp, Homo sapiens
gccccgcccgcgtcctctccagtgtccccaccgcccggttacctgtgcgccggcctcctgcgccgcctctagctccgcgctctccagcgtggcctggcggctccgctcctcggcgaggcaca

SEQ ID NO: 289285 - DNA, 122 bp, Homo sapiens
cctttcttctaccccgcttctccttctgcgtgttactcttttttgcttagaaatagtttccgattgcttttcccaccgaggtctaccctagcagtttcttcctcagtattctgatgtagccc

SEQ ID NO: 289286 - DNA, 122 bp, Homo sapiens
gcagcgagcggctgggctcgggcgacgagggctggaagtcgatccgggtattttggaggtcgaggttcttgagcatggccacgatgagcgtgtgcagggccgtgaagttgacggcgcccacc

SEQ ID NO: 289287 - DNA, 122 bp, Homo sapiens
cgcgcccgccgacctccgcgaggagctgggcacacagctgcgcacctgtaccacgctgagcgggctggccagccaggtggaggcccatcactcgctggtgctcagccacctcaagactctgc

SEQ ID NO: 289288 - DNA, 122 bp, Homo sapiens
cgccatggtcctgtgctggctgctgcttctggtgatggctctgcccccaggcacgacgggcgtcaaggactgcgtcttctgtgagctcaccgactccatgcagtgtcctggtacctacatgc

SEQ ID NO: 289289 - DNA, 122 bp, Homo sapiens
atcatctccgcacacctggtgagagaggggccccggttggtgagcagaagctagggtctgcgtggcgtgggatgaagccaggacttggagcttcatctactgcttacagagagcatcactgc

SEQ ID NO: 289290 - DNA, 122 bp, Homo sapiens
gctactcttcaagagctgagcagtgcacctccgcagccaccacagctggtgaagtcaccccggatttatagctaggcaggagtgaacagagtgccggctctgaactctggtccgccctcaga

SEQ ID NO: 289291 - DNA, 122 bp, Homo sapiens
gtgtggggcacagaacgtgaaattccaacaggtgccacaagggggcgaaggctctggccgcgggaggcctccagccctcactcaccggtcctggcctccacagggactgggccgtggcgttt

SEQ ID NO: 289292 - DNA, 122 bp, Homo sapiens
gacgtggacggctggttctggttgtattttaaatgaaatctcatcccagcgtagacaccacgtctggaattacgatccaccctgtgatctgtcacttttatatacacacaggggaggggacc

SEQ ID NO: 289293 - DNA, 122 bp, Homo sapiens
ccgtatactttgccgtagagaagttaaggatgaggaacaggcaccaagaacaaatcccagcgtaaggctccctttaagtgcggctcccagggttacgtattcccattgcctacaggcgaggc

SEQ ID NO: 289294 - DNA, 122 bp, Homo sapiens
agcttctctggggagggtggtgggcagggagtctgggagagggaggacgccttctcctcccgtctatatccctcttgctgtcattagatctttggagcagagaaggggtggtttgacgatat

SEQ ID NO: 289295 - DNA, 122 bp, Homo sapiens
ggagctctcaggggacacgaaacctgccggaggcctgatcctgcgtgtcctggggctctccgtgggcatttcctgtctgcgtggagaggcacagccgcagcgggagccggagcaggtggtgt

SEQ ID NO: 289296 - DNA, 122 bp, Homo sapiens
gcccggaactaggacctgcgctcctggaccgcggcggacatggcggctcagatcaccaagcgcaagtgggaggcagaagaatttgcagagcagatcagggcctacctggagggcacgtgcgt

SEQ ID NO: 289297 - DNA, 122 bp, Homo sapiens
tggtcccaagcagcactgccattcctcacaacagatttatttcagcatgatttggtcgggcgggggggatttaggatgagttgagatcccagtgatcttctcgctaagagtttcctgcctgg

SEQ ID NO: 289298 - DNA, 122 bp, Homo sapiens
ccggctgtccgcgctcgggcagggtggggcgcagcgggcgtctgtcctgctagcggggatcgggcggctggacccaagagcagggcacgtgcgcagcgacgcggggcggccccgccaggagc

SEQ ID NO: 289299 - DNA, 122 bp, Homo sapiens
gctatgtgaatgaacccacagtccataagacctcactctacctaaagctatataagcattcgcagcagcttctggaaagatgccacttctgtgctttattggctgggggaggggaggggtgg

SEQ ID NO: 289300 - DNA, 122 bp, Homo sapiens
tcccgtagtaatcaatgcatagctacagctggttgaaggggaccaaatccattgaagaggcgatttggttccattttaccagctctagcaaagcattgtagtgctgctagtttggaatccaa

SEQ ID NO: 289301 - DNA, 122 bp, Homo sapiens
ttgtttttactttatttatcttaggccctcagctccctgacgtcctgagcctccctgtgacgctctggccttctctgtacctcagagtgcagaaccacagacggcttcggctgtgcctaggg

SEQ ID NO: 289302 - DNA, 122 bp, Homo sapiens
gagtgccaaatgccacataagtggcacaggatatgcttccgtggcctgctcagacctcaacggccagatctctacggcttgcttttagaaatccacttgcctatggatgcctcactcccagt

SEQ ID NO: 289303 - DNA, 122 bp, Homo sapiens
atgcagtcacgctgatgtcacctgccaggtaacgggactcggcagggaactcctctgggacgtccactcggggactccggggaaatatggcttctggctcgtcctcggggctccccgctggg

SEQ ID NO: 289304 - DNA, 122 bp, Homo sapiens
ctcataacttgttcctataataagatcagataaactttgaagatattggatgaatatgaacgaaggaagaaatgaatggatagatgaaacagaatggtgactacattcaccatattttagtt

SEQ ID NO: 289305 - DNA, 122 bp, Homo sapiens
aggggactggagggacctggacagttttgaaggggaatttgagagttgaatttgagtgtgcgcttgtaaaggactcaaccctgccagtcgcggttcaagatcagggttggctgtaggtggga

SEQ ID NO: 289306 - DNA, 122 bp, Homo sapiens
gggcggcgctccgcggaggctccgcccctgggcgggctgggagcgccggcctgggcggagcgcgtccctgaagcgtaagtcccgcccaccattcttttgcagctaccggttggcccagcctg

SEQ ID NO: 289307 - DNA, 122 bp, Homo sapiens
gcccgcccgccagctgctgctgaactgccgcctggtctgcagcctctggcgggacctcatcgacctcgtgaccctctggaaacgcaagtgcctgcgagagggcttcatcactgaggactggg

SEQ ID NO: 289308 - DNA, 122 bp, Homo sapiens
ctaaaccttgcttttttttctccttgaatcttcttcattcctatggatgggtattccttgcgttgaatatgactagggaagaaagggtctccatatgactagggaagaaagggtctccatac

SEQ ID NO: 289309 - DNA, 122 bp, Homo sapiens
cgaggggactttcggcacttgcctctgcccgtccctatcccccactaatgaggcctttcccgagctctaagtttccccagaagatgtgccgtttgtcatagaagcactcacagcatttaagt

SEQ ID NO: 289310 - DNA, 122 bp, Homo sapiens
tgccgtgcaatcccagctcgcagttcttgctccgcgtgtactcacgggaggactcgcaggcgttaccgccttcccgcgtgccccgcccaccctcccgagcgtctttcggcgcatgcgcggac

SEQ ID NO: 289311 - DNA, 122 bp, Homo sapiens
ggagccgggcaggggccgcgcctcggaccaggacggaggcctggggaaggcggatctggccgccggagacgcggtgcgggtggagacgagggatttggatttccgcgggcggctgtacggat

SEQ ID NO: 289312 - DNA, 122 bp, Homo sapiens
aacagcaactgtactaatatttacagagcgtttatctttaaatctgtgaccagcccaaaccgagccttggtgtctcttaaaagaacaaagggagcacagtgttcctgaatggcactgtcact

SEQ ID NO: 289313 - DNA, 122 bp, Homo sapiens
aattaagaaactccgccaggtgcagtggctcatgcctgtaatctcaacactttgggaggccgagccaggtgtatcacttgagcccaggaattccagaccagcctatgcaacatggcaaaacc

SEQ ID NO: 289314 - DNA, 122 bp, Homo sapiens
aggctacacagaattaagcctgctctttgaaggtggggagatgttatctcatccctcaaacgttgcttgctacaaacaccgcccagagaaatggactgataaagagctggacattggagtgg

SEQ ID NO: 289315 - DNA, 122 bp, Homo sapiens
tgggatggtcttccggtcggtgttgccccgcaggctgctgcaggttaaaggccagcgctgcgtggaacttttttttttctctcctcccaaattgagccgtttgaaatgcctagggagttttt

SEQ ID NO: 289316 - DNA, 122 bp, Homo sapiens
gtgttgatattcactgagcaaagaaagaaaaaacaaggaagtcaacagtaaggaaggaaacgatgttattattgaactgattcttaccttgtgtatgttagttttggatcattaagccactt

SEQ ID NO: 289317 - DNA, 122 bp, Homo sapiens
agtttcctactccatcgtagcgagcgacctgaagccgcgggagattttatcctacgtgtccgtgagcgcgcagagcggggtggtgttcgcgcagcgcgccttcgatcatgagcagctgcgcg

SEQ ID NO: 289318 - DNA, 122 bp, Homo sapiens
cggctgccaggaccgcgctaccagcccgcgcggcctctgccaagggcccgctgatggaggcgagggaattagctgattttgcagaagcagataggaaaagccgctgccatggctaccccgcc

SEQ ID NO: 289319 - DNA, 122 bp, Homo sapiens
ccgggcctctgcacgtgcggttccgtctgccgggaccttccctccaccatctgcttggtccgttcctacttggtttccagatcccctggggcatccttggtcttctctggtctccccgacga

SEQ ID NO: 289320 - DNA, 122 bp, Homo sapiens
tcggctacgcgggtttcccccactcgctcctctccagcctccccttccgggttctcgtcccgaagcccgctgggaattgaagtccgggcagccacggactacatcccccagaaggcagcacg

SEQ ID NO: 289321 - DNA, 122 bp, Homo sapiens
ggctcctgcgaggtggacaactacaccgcgacagtggaagtcaccgagctcgggagcggacgggctcggagggggagaggcagccggcagaggagcggccgggggaggaggggacagatgct

SEQ ID NO: 289322 - DNA, 122 bp, Homo sapiens
gccagggcctggcggcgtggccccggggcgcgcgggcagccacggcggcctcgcaggccccgagcccccagtgcgggggtccttgtacatgaacaggaagtgctcgcccagccccaggaggt

SEQ ID NO: 289323 - DNA, 122 bp, Homo sapiens
tcgctcggttccttccaatccaaacgagaggcttctgattgtttattctcacaccagagccgtgaccgagacccagaggtccgcttccggccacggccgaacagctgcaccgtgcgtaccgg

SEQ ID NO: 289324 - DNA, 122 bp, Homo sapiens
tacgccctcccgtgacttaacttcgcagtcatctttcgcttcttcccgggagtcggcgagcggtttcagtgggaggtacctcgaagccgagaggctgcaatgtaacagcttgtggtgacatc

SEQ ID NO: 289325 - DNA, 122 bp, Homo sapiens
aagacccagcatgcctgaccccagttattgagtcccacggagacaaatgaaagggggccccgagaggaaaaggggcttgtcccaagtcaccatggcactcctgacagagctgggtctcaagt

SEQ ID NO: 289326 - DNA, 122 bp, Homo sapiens
gggcccgcccctctgagccgcggcgtcctgtgggaaatgtagtcgccggagtcaggagggcgggccgcgaaggaggtggagagcgccggggcggggccgcaggcgacccggccagggcaaca

SEQ ID NO: 289327 - DNA, 122 bp, Homo sapiens
gccctgatttaggggtttactagagagtccttaaacttcctagaaagctcatcattgtaacgctttggttgaatgcttgcaggacaactgttcccttccatattggcatgtattttctctct

SEQ ID NO: 289328 - DNA, 122 bp, Homo sapiens
tgagccttgcagaaaggctgccctctgacccagctttctcggtgcctccaggtggagaaccggcccctgcctggccacacacagcttcgactgcctggctgccccacccccgtgtcttttgg

SEQ ID NO: 289329 - DNA, 122 bp, Homo sapiens
tgtactctgatcgcctttacagagagaacatctgggcctcagagacaccagaacacccagcggcccgcgtccagggagtctagaaccttgggctcccgcgcacacccaggccaggtcctggc

SEQ ID NO: 289330 - DNA, 122 bp, Homo sapiens
actgagccgcccctttgttgtccccagccccccgctgccacacagccaggctgaccagtacgtcctcagctgggaccagcagctcaacctcgcctatgtgggcgccgtccctcaccgcggca

SEQ ID NO: 289331 - DNA, 122 bp, Homo sapiens
ccagtgacccgccagcatccgactcccagcccacaaccccgctgcctctctccggacactcggccctcagcatccaagaattagtagccatgtccccggagctggacacctacggcataacc

SEQ ID NO: 289332 - DNA, 122 bp, Homo sapiens
cagtctctgtccttcgacccgagccccgcgccctttccgggacccctgccccgcgggcagcgctgccaacctgccggccatggagaccccgtcccagcggcgcgccacccgcagcggggcgc

SEQ ID NO: 289333 - DNA, 122 bp, Homo sapiens
ttgttgggcatcttgccttcccaggggaacctccacagggacaggtgagccagcaagatccgtctgtagggccagtgggcctagctctcgccagacgtcttcccagaggtccatgtgcagtg

SEQ ID NO: 289334 - DNA, 122 bp, Homo sapiens
tacaattcatggcctctctctgtctctttttcctcctttagggattcctgacaaggagaacgtgagtagctactctctctgcctatcttctaaaaattgttataaggtaaaaaataatcatg

SEQ ID NO: 289335 - DNA, 122 bp, Homo sapiens
ccccgggggccacgaagcagcgtttgccccagaacccagtcaaggcccagggcaggtgtgcggagagggccggggccagtcgtgggaagagggtgtgaggcgccccttcctctgggatctcc

SEQ ID NO: 289336 - DNA, 122 bp, Homo sapiens
gatccggtgtggtgacaacggagcgcatccctgtgcaaggcgaagaggctgcgctcccgacgcacttggccgcagcgccaccacgtgttctcaggcgtctgcacattcccccggccaggcat

SEQ ID NO: 289337 - DNA, 122 bp, Homo sapiens
tggtgagagcaggagccagagagggagggaggagacaggcccctttaaactaccagatctcgcatgaactaacagagacagaactcgcttatttccatggggacacatcaaaccattcatga

SEQ ID NO: 289338 - DNA, 122 bp, Homo sapiens
agcgcagggggcgcagagccggcgctggccaatatgcgccgcatgtgatacctttgagggcgcggcgggggagggtagcgtcaaatttcaaaaaaaaaaaaaaaccaaacccacacagcccc

SEQ ID NO: 289339 - DNA, 122 bp, Homo sapiens
atcttttaccaacttagaaaccatcatgttacttttcttttagttgccggtggcgggatacggtgagctgatgtatctcacacgtggctcaggatgagacacagaggccccgacaggcaggg

SEQ ID NO: 289340 - DNA, 122 bp, Homo sapiens
caggtccccactcaaccggtgcccaccgccctggcgcgcgtcgctccgcgattaccggcccgccaaacagtccccgcaaagtccaccctccggggctcccggtccctcaggtcccgcgtgcc

SEQ ID NO: 289341 - DNA, 122 bp, Homo sapiens
aggtgtggatgggctgctgctccaccagctgtttcatggccaggaaaatgcggaagctctcgtccgagctcaggccgacgccggcctgctcgaagtagaaggcagtctccatgatgttgggc

SEQ ID NO: 289342 - DNA, 122 bp, Homo sapiens
ttactgaagcaatgcacaagaggtcagagctttgggggaatttattgagagcaggttttgcgtaccaaaagggtgttgggcttgcatctgtcattggcaggtgtcactgctggtggtctctt

SEQ ID NO: 289343 - DNA, 122 bp, Homo sapiens
atgcccagtgtctggccaaggtacgggcggagggtaataggtcggagaatttgctcctggcgccggcgcggaagggtcgaggtgtggagggcagtgatttctcaggtgcggagggcagtgat

SEQ ID NO: 289344 - DNA, 122 bp, Homo sapiens
acatcattgatgtccaagctttagcgtgcatcaggatcacccgagggtcttgttcagactcgactgccaagacccacctagagagtttttggttcaggaagcctggggtgaggcccaagaac

SEQ ID NO: 289345 - DNA, 122 bp, Homo sapiens
tttgaaaggatgcagcttgcaaaacgcacacactgttgtctcttgtcattgccatccacacggcctttgaaagtagagacaatacctcagagataagctcccagggacgaccatcattcatt

SEQ ID NO: 289346 - DNA, 122 bp, Homo sapiens
gaactccacggcaggaggaaagccgagctcccttaagagcatccgccttggaagcaccatcgctgcccattttccacctggcttccctgtcccggggctgcacgctgctcctgcatcctccc

SEQ ID NO: 289347 - DNA, 122 bp, Homo sapiens
cgtcccactaactgcacacaggtggtccccggggccagagagccgccggcgctctctccccgaagaccacgccttcgcctccagccagtttgcttggggaatcagaaaggtgcccagggccc

SEQ ID NO: 289348 - DNA, 122 bp, Homo sapiens
atagaacagaccatctcatatatccctacacccctgcttcgaaatatgatttctcaggaccgtggccagtcgcttttcttggatctcggttttctcatctctacatcaggaggctaaaataa

SEQ ID NO: 289349 - DNA, 122 bp, Homo sapiens
tcctctgcccagacctgggggctccaacacctttcgctaggtctggctctggcctctgagcgaaccttccgtacagtatggcggctcccgaagccccgcccctggacagagttttccgtaca

SEQ ID NO: 289350 - DNA, 122 bp, Homo sapiens
gtgccgcgctcagggcgctcccctgggtcctagaggcggtcggacgcagcagcagggagtcgggagctgcgcgcctccccgccggttcgagtccccgtcttgggacctgcggccgcggggct

SEQ ID NO: 289351 - DNA, 122 bp, Homo sapiens
ggggagggcgacggagcgggtgaccttccggaggcgggagcgagcgaggaggcccgggagcgccgagcgtcgccgccgccgccgccatgaacaactcgggcgccgacgagatcgggtgagga

SEQ ID NO: 289352 - DNA, 122 bp, Homo sapiens
ctgccagctgccaccccagagtgccctgtgcctggtaacgatcgttctcacagtcatggccgtagggaaggctctttgtggttcctgggggacttcgtgagattgcccacatgagcatttct

SEQ ID NO: 289353 - DNA, 122 bp, Homo sapiens
ttctccaggacatggtgggcgggtgctatgagttttcctgttctgcagatgaagaggctgcggctcaggaatatgaacaacccggccaaagccacaaaacaaggaagcaccggcagggccgg

SEQ ID NO: 289354 - DNA, 122 bp, Homo sapiens
aagcaaaggtttggaagggtgagggcggcggtttgcgatccccgcggcagagccttcttgcgtttagggctgtcctagcatcccgagggactcggtcctgtcacgtttcgccctatttgggg

SEQ ID NO: 289355 - DNA, 122 bp, Homo sapiens
ccagggagcgggagggggtgatctcctcccccgggccctgctgcctccagctcaccctgtcgcctgatgtctaaataaggtgcagaggcacactcccagcagctaaaaataaaacttccgct

SEQ ID NO: 289356 - DNA, 122 bp, Homo sapiens
tcccttgtagcaatcagaggaacatcctctgcctaggattcccaagctccctgaacctcacgcgacagctggagcccaggctgcgtccgctttgaggttcatccgagcctgggcagttcggt

SEQ ID NO: 289357 - DNA, 122 bp, Homo sapiens
gagtgtttgggtggagccgattcaggcctgcgtcgggctcaactgacagggcttctttgacgctgtgtgaattcgagtgattaaaacggagactctttcagaagaagtaaaggaaggagact

SEQ ID NO: 289358 - DNA, 122 bp, Homo sapiens
agcctgtcggttaccgcggggcggggagtcccggggctggagtgaggtacctgagccgggcgcgcagcagaaagcccacgttggccgctgcggggagcgcggcgtggagaggcgggagaccg

SEQ ID NO: 289359 - DNA, 122 bp, Homo sapiens
tgggagaagccccagcagtgtcttcagtggtgggtgaggtggagaataaatctcattctccgaggtccttcataacctttagggctgcctgactgttgtgtgagagccacaaactttcccta

SEQ ID NO: 289360 - DNA, 122 bp, Homo sapiens
aaggcgatgctgctcatccaggccagtgccttggaggatactcatgtgtctcgggacacacgtctcttctggagacacgggagggccaaggtcccaggaagtataatccacccaaatcacaa

SEQ ID NO: 289361 - DNA, 122 bp, Homo sapiens
ctggtgagtcatgccctgcttagataagcattaatcaaggtttaatgcatgcttgatgaacgaccttattctaactaaatccagcaagctttcagctctagagtaaaaaacgctatacttaa

SEQ ID NO: 289362 - DNA, 122 bp, Homo sapiens
tctgcgatcggtccaatcaggcgcgccgtcggggacgcagctgcagacgttcaaccttctcgcgggattttcatttctcgcgtctgccgtacttggtttcgcttcgctagtcccagaggccc

SEQ ID NO: 289363 - DNA, 122 bp, Homo sapiens
agagcaacaatgagtgttcccaatggactgggttggggactgggccggtcccaagaaggccgtctggtaaaaagctgcctcgagcgccccctggagtcaggccgggccggctcccctccaaa

SEQ ID NO: 289364 - DNA, 122 bp, Homo sapiens
agtgaagagcagggcagggagaaccccagtgagtcagtgcccagtgggctctgtgttgtgcggcccagatctccctttaggaaaggaaagctgattgccccagatgctggaggggttgtcag

SEQ ID NO: 289365 - DNA, 122 bp, Homo sapiens
gagcccagggcagcacagcctcagtgctctgtttgttgagaggcagtggctggctaaaaacgaacatgtcaagcctgacagattgcctaggtttgaattctggccacttactaggtatatga

SEQ ID NO: 289366 - DNA, 122 bp, Homo sapiens
cccgttgtccccacttccctctgctcgccggcgtcccggtcccctgccgcgctcttggcccgcctgccgacgccccggctcacctctagcttgaggcgggcgcccctcacccagcccgggca

SEQ ID NO: 289367 - DNA, 122 bp, Homo sapiens
aagcggagaaagtgacctagagattgcaagggcggggagaggaggctctcaataaataatcgtgtaaccttcttgtggttctgttcttgctcggcccagccagagtctggctctttccagaa

SEQ ID NO: 289368 - DNA, 122 bp, Homo sapiens
ggtgccaaaagaaactccccccaaaaatcaaacaataacaccagagtaaagcccctagggcgagataaggagttgcaacaaaacaagcggaaactcgagaagcgctaatgcttcaaagggtc

SEQ ID NO: 289369 - DNA, 122 bp, Homo sapiens
taggggcgaatccgagggggcggagcagggctcggggtgcggtcgggggcgtggccggggcgcgctgcggccatcttgggggcgggcccggggcggagacgagcccgaaggggcggggcctc

SEQ ID NO: 289370 - DNA, 122 bp, Homo sapiens
atcattgttcccttcgctccttttcttcccgaggaatcccagcgtgctgcgccgatggaacgagttgatgtgcacactaggtatagggatgacttcatccccaaacgaacgcagccgactct

SEQ ID NO: 289371 - DNA, 122 bp, Homo sapiens
tgcgcactaagcctcgccgcctgccttaggagtggagcgggaggccggagtgggcatgcgcgactttgtaggcgcaccgctactctccgtgtaggggcgctgctcgcctttctctgcaagcc

SEQ ID NO: 289372 - DNA, 122 bp, Homo sapiens
tttgctgctatagccgctgcttagcaaagccggtaaacatgaggttgtaatcgttgaatacggcactctggcaaccgagacgctgaaaggctgccttttccgggatgaagaaggactgtgtg

SEQ ID NO: 289373 - DNA, 122 bp, Homo sapiens
tcgctgcgcgtgggggaggcgcggagcgcgcgcaggtcaccatgactaagcagagccgggcgcccgccgtgtcacaataaaagtccccgggccctggcctcaggcggtagggaccgctgagg

SEQ ID NO: 289374 - DNA, 122 bp, Homo sapiens
ccgctggctgcgcaggagctaggcgggaggcgaggtgagggtcgccgctcgctcactcctcgctcctgtttttggggggggggggcaaaggcggggtctctttttgcaaaccaatgacacaa

SEQ ID NO: 289375 - DNA, 122 bp, Homo sapiens
ccgggcgggggagagaagccctctggacagcttctagagtgtgcaggttctcgtatccctcggccaagggtatcctctgcaaacctctgcaaacccagcgcaactacggtcccccggtcaga

SEQ ID NO: 289376 - DNA, 122 bp, Homo sapiens
ggaaggtgttttgctttttccctgagcaagaatgccgagcagggaagcacctccaccccgcgttcctaatggagcttgctctctgcagactggctgtgagcccaggtttacagaagttcact

SEQ ID NO: 289377 - DNA, 122 bp, Homo sapiens
cacccccagcgcatggagaagaaactgcatgcagtacctgcggggaacaccgtcaagttccgctgtccagctgcaggcaaccccacgcccaccatccgctggcttaaggatggacaggcctt

SEQ ID NO: 289378 - DNA, 122 bp, Homo sapiens
cctgccggcctagagtatggagggggctcccggacattctgtcctccctgtgccccaggtcgcatcagtgagggaagttctccctccagctgaccggggtccgtgcagccaccggagtgcac

SEQ ID NO: 289379 - DNA, 122 bp, Homo sapiens
tatgaccagctttgtggccttggtcaagtcacttcctccatccctttttgcctttataaacggagagccttgggctggaagccatggaagtcgctccagtggaaagacggtcagagctggga

SEQ ID NO: 289380 - DNA, 122 bp, Homo sapiens
gcccccacacggactggcgccctctgcaggtcccgcggctcccggcccgctcagcgcctccggaggtctcacccaagccctatcagctgggtccctacgggcctcaaagcgctggcccagcc

SEQ ID NO: 289381 - DNA, 122 bp, Homo sapiens
attaaatacgctcttccggaagcaccgacaaacaagattaaatgagcttggattgaacctcgtagcggcccgtagtactcctccttcccgccatcctatagatgaaaggaagaaaaggaaaa

SEQ ID NO: 289382 - DNA, 122 bp, Homo sapiens
aaaacctccttttgcattccatagaaattgacagaaaagcacctggccggaagagcggaacggtcggcggcaccccccccagcccccaccccgcggcctccgtgggacgggagagtctgcgc

SEQ ID NO: 289383 - DNA, 122 bp, Homo sapiens
ctaactgatcgaaatcttccattaaacaacggttgttctctccccgaagggagagtgcaccgttcctggaagtactgcaataccaggtcgatgcgtggagtggacggagcaagctcctattc

SEQ ID NO: 289384 - DNA, 122 bp, Homo sapiens
agctgagttcacacctgtaactgtttggaacggctcctgcagcaaggcagggctcggtaacggtcgctcattatttctgtagcatggtccgctggcttagtgcaggcaaacgggtctgggtc

SEQ ID NO: 289385 - DNA, 122 bp, Homo sapiens
tgtctcctttcctttgctacccctcccgctccagccatgcctgcttcccccaagaccttccgtgctccaggcccaaactccaaagccagcaacttagacaagagtcctctggctttggaaag

SEQ ID NO: 289386 - DNA, 122 bp, Homo sapiens
tccagccggaaggtctctccagccccatcaccagatagcgcatagccctgggttcccagacgcccagcatctgcatcacgagcaggctccagtgggtagcgggtgccaaaagctgtatgctc

SEQ ID NO: 289387 - DNA, 122 bp, Homo sapiens
cttgcattaaaatgacagcagtcaccaaggcactgggaggaaacacgggccaggggaaaacgggccggctgtattttagagaaatcacaagcacacacatgggctacaagagaaattatatt

SEQ ID NO: 289388 - DNA, 122 bp, Homo sapiens
tgggggaaaatggggccccgttttccagtacacaggccaccccaggaagaccgcgtcgggcgctgtgtgatctggagagtgcattctgcggaccgaggtcctgcttttgctcgccccggacg

SEQ ID NO: 289389 - DNA, 122 bp, Homo sapiens
tattttgtaaaactgacatcctaacactggcacctagaatacttttccatctgagtctaacgtaccccactgcctctaatacggcccgcactacgatgagctacttcagtgggtgggaccaa

SEQ ID NO: 289390 - DNA, 122 bp, Homo sapiens
aggtctctcaaggcattttcctgtttctctctgccgaagggtctgaagggggccgggatccgggtagcagggagtgaccctggtgcagattccagtccccgaatccctcccatgcggtctct

SEQ ID NO: 289391 - DNA, 122 bp, Homo sapiens
tccgagtcgctgaacgcggcgctctcctggcgaggctggaggtcgggaaccctgcagtgtcggacccgagctgacagcaagccactcccgctacaggctgacagggaaaaagagaaccaact

SEQ ID NO: 289392 - DNA, 122 bp, Homo sapiens
tccccttgctgcctcccaactttactctgcagctatcaggatgaggctcccaatcctgttcgctgccctgctctggttccggggttttctggcagaggtaaggtgggcatgggggagcaggc

SEQ ID NO: 289393 - DNA, 122 bp, Homo sapiens
catccacagaacttaccgacctgactgagagcgccacgtgcaccaggctcacgtcctgagcgtgtgcccacagcccttggagtgtttacaagaatttccttggttcgatcttacatgtattt

SEQ ID NO: 289394 - DNA, 122 bp, Homo sapiens
ttcacctaaggagccgttcccagcggtggggctggcaaaatgaagacttgtctttcttgccgcaatgacaagtgagttcatacaggaaaaatgctttggaattacaggaagaatcaagaaac

SEQ ID NO: 289395 - DNA, 122 bp, Homo sapiens
ggcagtgatgtcacaaagagctggaggaggatggctggagggaggagtggggtgaggctccgggaggggattcctggcttctcccaggccttctagaaagatagagctctggtccatcagtc

SEQ ID NO: 289396 - DNA, 122 bp, Homo sapiens
ctgcctgtaggaggctccctgggcaggtgacgcctcagaaaccgggcgagatggtgaccgcgggccattggtcagctggggagggcctctgccagggagctcctgagagcagcccccacact

SEQ ID NO: 289397 - DNA, 122 bp, Homo sapiens
aggaaactgaaaccaaaaaccagtgtaagcaagtaaacatctaaactgtttcaggagccgcgtagaaggaacgcggcggtgtgccccggaagcggaagtagattctcctatagaaaggctgg

SEQ ID NO: 289398 - DNA, 122 bp, Homo sapiens
gccacctttatgaactgtaacactcaccgcgaaggtctgcagcttcactcctgaggccagcgagaccacgaacccaccggaaggaaggaacagctccagacgcgccgcctttatgagctgta

SEQ ID NO: 289399 - DNA, 122 bp, Homo sapiens
ttttaaaatattgtgtgttggtacccgaggtcggagtggagatttttctctattctctcacgtgaatctaaaatccgtcccagacctcgctttcctggagttctctctctccgctgtcctat

SEQ ID NO: 289400 - DNA, 122 bp, Homo sapiens
ccatgattgggtgcagatgctggtgggctcccctggtacacctctactgggcattgagctcgtcccaggtggggtcacccccagcctggcctaaggaggagagtggaggagtaagacagctg

SEQ ID NO: 289401 - DNA, 122 bp, Homo sapiens
aggacaggctgaggacttctggtctgttcggtacttgaactgccagcaaatttcaactcccgcttgccattcaacatcatggatgatccgaagagtgaacagcagcgcatactgcgccgcca

SEQ ID NO: 289402 - DNA, 122 bp, Homo sapiens
tttttcaatactgggtctcttgcagagttgcagtggcggccacctggtcagtgaaatcagcgaattgaaaaaccactgacttcattaacatgtctaaagaggcaggctgaaaaaactgaaaa

SEQ ID NO: 289403 - DNA, 122 bp, Homo sapiens
agcagccgggccgcttcccggcgggaggcgggctgcgaatgggaagcgggaggaggaggccgggccgcgggctggttctatcacccccttgggagcccagctcttcacctagctctccggcg

SEQ ID NO: 289404 - DNA, 122 bp, Homo sapiens
tccccaatccccctattctctgtgagcgcagaaaacaaaatggggcaccctttggcttcccgcccccccccccgccccccgcaaaccttcctattgccccctcttccccgcacccagtgctc

SEQ ID NO: 289405 - DNA, 122 bp, Homo sapiens
ttggatgtgacacacacaaatagcaaagtagcaaaagtttattaagcacagtaacactctcggagaggggagagtgggctaagctctgtgaaatgagatcggcgtcagtttggtgtactttg

SEQ ID NO: 289406 - DNA, 122 bp, Homo sapiens
attggtcaacccaaatgacaactcgccaactgattggctactctcacttcacctttgctccgcccctttccctggcactctcttccgcctccttcctgcctccctgtcgcgtgcgcgtgacc

SEQ ID NO: 289407 - DNA, 122 bp, Homo sapiens
cccgccatgcctgagcctcccctgcccccgtgggctcctgtgtggcctgagcctccctgacgagcaccgccccctgccccacggcgcccagtcccatcgaccaccctagggctgagaagtgc

SEQ ID NO: 289408 - DNA, 122 bp, Homo sapiens
ctgggcacctcctattggccaagtgatgttctgcagaatacctgggtggaaggataaatccgatctgtttcgagccttgggaagctcacatttactggattttacaagaaaggctcagaaca

SEQ ID NO: 289409 - DNA, 122 bp, Homo sapiens
tgttgagtgcccaatcctgatgctcacctgcaggctcctgcagtcttggttccatcacttcgcctcctgcagggccaggagagcctttcaaacagaaagaagagaccgcagctcgggcaggt

SEQ ID NO: 289410 - DNA, 122 bp, Homo sapiens
agcaggggattgaggagaccggctgggactgggaaatgggcattcgggtcgcatgcccaccgcagtggcccagagcccctgtccggaccgctaacaagttgcttagcaacccgccgcccggc

SEQ ID NO: 289411 - DNA, 122 bp, Homo sapiens
aaggaaatcagtctaggtgatgaccacagctgtcatttactaaacacctaccacacctagcgcatgtcatttactaaatacctaccacatgtcaaattcagtattgcaaataatccttcaac

SEQ ID NO: 289412 - DNA, 122 bp, Homo sapiens
aggcagcccggcatttcccttcagagagttgctggggatgcacacctgctctgggacagccggagtgcgcaacccgcacttctacacgcgcgcgccgggcaacatagcgcaccgcgggtaca

SEQ ID NO: 289413 - DNA, 122 bp, Homo sapiens
ctattgctttgctgcggggagccccgtaccttttggtccagagggacggctggaaggtaacgtgaatttgtttttattccccccagccacttctctgtgctgggtcccctctgtcttgctga

SEQ ID NO: 289414 - DNA, 122 bp, Homo sapiens
agccccatctcagtagtggtacagcagacacaggtggtccccagaaggcaggtggtcagccgggctggggtagaagtgaggtggagcatggagaggatgtcgaagcctccgtgcccatccac

SEQ ID NO: 289415 - DNA, 122 bp, Homo sapiens
ggtgctactgacccgggcaggcagccatactgcagagcttagtctgcagctcaggaccctcgcaggccttgccgccgtgctgggggggcacgcaggtccgcatccggctccgggacccccgc

SEQ ID NO: 289416 - DNA, 122 bp, Homo sapiens
cgtaggttggtcatgtctgcccttaaaaaacaacagctaaatattgcaagagactgttggcgtctcacctataaatcctagatgatgttacaggtttcatttgcagattcaacttttaaacc

SEQ ID NO: 289417 - DNA, 122 bp, Homo sapiens
taaccaattcataggtcttaaaatgcatgccatttcttggtagcatgatgaaatctccaccgtcccattctgtcttgcccaggatatgaatccccccttgcccaacaaattcatgctgtcta

SEQ ID NO: 289418 - DNA, 122 bp, Homo sapiens
cctggccgcaaaaacacatacattaacgtctaaagacctgcagggaagacaagacttttccgcctgggacacatgaaagacatcgagctaatttccttaataaatgaagagctcttggaaac

SEQ ID NO: 289419 - DNA, 122 bp, Homo sapiens
gtggtacccatctcactccacccctgcctggtaactagagcagaggtcccaggccagccccgctagtgtctgtctcccaaggcctgggcgccctctggtggcctttggacccagatgagggc

SEQ ID NO: 289420 - DNA, 122 bp, Homo sapiens
ccaagaatggcatcctcgagccagtagcagctaaatagccaccaaaggcaggcaagaagccggcaaagccattgcccagcaggcacaggaaggagacgtccatctgagcagcctccgtggcc

SEQ ID NO: 289421 - DNA, 122 bp, Homo sapiens
ggtccgcctggatcctgcacacccagcccggtggctcctgcccactcagcggggccctgacgccctacatctcctctgtgagcaaaagctctcttgttgttagagagacttgcggaagccac

SEQ ID NO: 289422 - DNA, 122 bp, Homo sapiens
cagccagttttccactgatatttgagagctattcctttgggttaaagctgtgccctgtagcggggaatgtttattccattatgtcatttggccttcatgagaatgtgcttatcatgttatat

SEQ ID NO: 289423 - DNA, 122 bp, Homo sapiens
tccattgggttgatggctaagtctgtgggccactccaggtgaacctgacaatgaagacaccgatactcaaatgactggcaagatgcccaccactaatccatcccatagcccatgtagcccat

SEQ ID NO: 289424 - DNA, 122 bp, Homo sapiens
ctaccacaaaaaaagtccaaaaggaattaagttaattacaacttcaattgtgttcaagatcggtctttgtggttctttatatctgtgatttatatatcttcaaagagagtcttaagtgtctt

SEQ ID NO: 289425 - DNA, 122 bp, Homo sapiens
gcgcgggctctccatggcagatggtgaccaaaatgggcttgctggcaggctgtgctgccgcgccgccctccctcgcacacactgatgtgtacacaaacacagcccggccctccgtgccttct

SEQ ID NO: 289426 - DNA, 122 bp, Homo sapiens
ccaccaatgtggagagggcgcccccggtgtggggtccagctctggacactgcttggcggccgggttcactttgagtttttaagttttctttgctgagcttttttggttgttctttttatttt

SEQ ID NO: 289427 - DNA, 122 bp, Homo sapiens
cataaagcagtcacaaaagggcccatcccaggtggtgccattgtaggaggcccctagagtcgtcagattcacagacagaaagtggaatggtgggtgccaggggctgggagggactgggcagt

SEQ ID NO: 289428 - DNA, 122 bp, Homo sapiens
cacacgaccgctgacaggtgtgtggggggaggaggcagcggtaccagatgggccacaggacgcacaggcagcgctcggtgctcatggcactcagaaagctcaggcctgtaaagtatagaaag

SEQ ID NO: 289429 - DNA, 122 bp, Homo sapiens
cgccttgtgacgtgaggcgttttgttcctcccactccagacactggacgctcctagcaaccggctagcagctcggtttccaaggactgtaacgccttcaaccgcccgccgcgatagagtgcc

SEQ ID NO: 289430 - DNA, 122 bp, Homo sapiens
acgctggctgctcagcaaactcagccttggttacggctgctgcctggggcatccagcgaacgcagcgccaagagcagcagcatctacttctggaacagagcctggctggtacttttcagccc

SEQ ID NO: 289431 - DNA, 122 bp, Homo sapiens
gcagagccaggtgaggaaggaagccacggtcccgtgaagcaacctcagctcagaagcacacggagggtgcctggtgttcctgtccatgcagcctcagcctagcagctgccaaaagggcgacc

SEQ ID NO: 289432 - DNA, 122 bp, Homo sapiens
tcacacacagtaagggacaaagaaagtgtatccccttccaaagatccgcccaccaggccccggacccataatcaaagcctgatactgggacaatggacccagcggccgggccagccctcccc

SEQ ID NO: 289433 - DNA, 122 bp, Homo sapiens
gcgctgctcactgtggtgaggttgacacttgggccctgggtttcacttgcaggtgctgggcggcggagagccccgagaaggaggaggagagagagccagcagccaacccctacgacttcagg

SEQ ID NO: 289434 - DNA, 122 bp, Homo sapiens
ccccgtgctgacgagttgggccacctacctatccctggatggcctgtgcctgatgggtgacggcccagcgcaggggccccaggagtgctgggcagcctctgagcaggtgggagaccactggg

SEQ ID NO: 289435 - DNA, 122 bp, Homo sapiens
ccgtgaacttgcacttgcacttgggcagggcttggtggagacattccacgaggcctgggccgggttagctccacttcggactggaggatccactcacgatggcacacgtggctggcaggcag

SEQ ID NO: 289436 - DNA, 122 bp, Homo sapiens
tgacttcagagtgagacattctttgctttggcatctgtaattttcgatccacaagcatagcgtgaaaatacttatgctttcttagtagcatttcagacacgaataagttaatacttgtcctt

SEQ ID NO: 289437 - DNA, 122 bp, Homo sapiens
tctcagcaaggcggaggagagctccgccaggtggggatgtggggcagcctcacagggccccgtgctgggcctggtatcgggacagcacggcgcggtagtgggacagctcctggcgcacggcc

SEQ ID NO: 289438 - DNA, 122 bp, Homo sapiens
gtgcagttgttgttgtttcagcccaagcatagtcatttcactggctaagcttgacactgtcgctggtgggggagagagggatctcggggcctggagctagggtgaacttttttggttgagat

SEQ ID NO: 289439 - DNA, 122 bp, Homo sapiens
aacgtgggaacaaaagcagcgtcgggtgggagccggaatggggcctggatggagagcaggcgccaccctgggaacaaagctggttcagcccgtctgcagctgtcgctgccagttggggccac

SEQ ID NO: 289440 - DNA, 122 bp, Homo sapiens
atccagggacctggttcccttcactttcttcctctccattccttaggacattgtcctcctcgtcatagacagacacatcacaggcccgtccttgttctgactcctgagaaagggaaagagag

SEQ ID NO: 289441 - DNA, 122 bp, Homo sapiens
tgctgcagtcccggccccgccttacggacttcctattggcccagacagcccaacccctcccgttattgggcagtgttctccgtcactcctcgcccctaggctctggactcctccctgtgccc

SEQ ID NO: 289442 - DNA, 122 bp, Homo sapiens
ccgtggccactaaaaaactgcgggaagcaggaaagagcacaacaggtttctctctatttccggtgtattgtatcctcacgtttccggagattgacgttgctcttgtgttctcgcgagaggcg

SEQ ID NO: 289443 - DNA, 122 bp, Homo sapiens
agcatctccccctccccaggcccgctcagcagggaagtggccgctcaagtggtacgcacccgaatgcatcaacttccgcaagttctccagccgcagcgatgtctggagctatggggtcacca

SEQ ID NO: 289444 - DNA, 122 bp, Homo sapiens
cgtccccgtgcacggcaaagcgccggaaggcctcctccagggcactgagctcaggggatgcggctgccccctcaccagcaccctccgattccagcgacagcctcttggctgcccggtccttc

SEQ ID NO: 289445 - DNA, 122 bp, Homo sapiens
gccctttgcattcagcttcattcaactaggaactttttctgcaaatcaaggaaagcttcccggaggaagtggtgcctaagctgtgctctgattcacgtttagaagctgaccagacaaagaga

SEQ ID NO: 289446 - DNA, 122 bp, Homo sapiens
ctccccctcaatacacgctcacaccctcctcaagatggcggcggcggcggcgggggactccgactcttgagacgcggatgcattctccgtggaagacccagtgcagaaggtgtggggcggcg

SEQ ID NO: 289447 - DNA, 122 bp, Homo sapiens
ctacgtggcattgctctgtttttcacatgttcgtttttatttttttggtcatctcctcctcggtaggagtgatagtagaagggaagctcaccaggcagggatttctgtctgttttgtgcgcg

SEQ ID NO: 289448 - DNA, 122 bp, Homo sapiens
gccgctgtagcaggtcatagtggtcccgggggtctctattgaaaatgtcagggtccacgacgtccatccctgggggcctgagctgggcctgcgcccaggggccagcagggcctcagggctca

SEQ ID NO: 289449 - DNA, 122 bp, Homo sapiens
ggcccagggtaccaccgggccactcaacacaaaaacgccctggcgcgtgcaaaatacgaacgcccacagtttgtcccaaccccttgaaatgaaaagtacacctggaaagcccaagatagcac

SEQ ID NO: 289450 - DNA, 122 bp, Homo sapiens
cctagatctgcggctacataatctgcacagtcatgagaagctatgcctgctcaggacttgcgctcttcctccgggaaaggagaatcataacttaaatgatggccgtgtctttcagctctaaa

SEQ ID NO: 289451 - DNA, 122 bp, Homo sapiens
cacggccgaaagggaagggggctggcgaaggggaagacaggcttccgggcgccgcggcgccgagccctcggctgccccaactcctcaggctgcccggcaagttgcgccgggtccccgggctg

SEQ ID NO: 289452 - DNA, 122 bp, Homo sapiens
aaaatatcatctgaggcaccctgggtcccaacccagcagtgttgaatcagattctccaggcgagagcacagggaatttccatctaaacaatgttccaggcattataattgccttaaataggg

SEQ ID NO: 289453 - DNA, 122 bp, Homo sapiens
gccccttctcctcctggccacattctgccactggaccccagctgagtagctgggaggctccggtccctctgagctggcaaggccccaccgcaaacacaaagccggccacatccctcaggccc

SEQ ID NO: 289454 - DNA, 122 bp, Homo sapiens
cccctctcactgcgggggcgcgccatttcgcgcctccgggccgctcggctgccccaggggcgcctggcaaacgtggagtcgctcggttttggaggcatgctttccaaactttctaattcaca

SEQ ID NO: 289455 - DNA, 122 bp, Homo sapiens
agagtttacaaacaactgacttatccttgtcaatctgtggaaatgagaaaataaaatcagcgtctggccttcgtgggatactcataacacccgaatgaggtccagagtaatcctagatcggg

SEQ ID NO: 289456 - DNA, 122 bp, Homo sapiens
caggacgttttattcttctcacctgggattcagagaggcagcggccaaggacagggcccccgccgaggccaccgggcagcgtccaggtctcggcctttgggaggggagcagcgggggagggg

SEQ ID NO: 289457 - DNA, 122 bp, Homo sapiens
tgggggacctggctcatcagggagggattaacgcggctcgggcaatcctgcgctaaagcccgctccccccgccgccagcaacgccgcggagccgccgcaccagcaacataaatattagatga

SEQ ID NO: 289458 - DNA, 122 bp, Homo sapiens
tgtgtcaacaccccacacatgttgtcacacatcatttcagggaaatattagcactgtttgcgaggctctaccagggaaggataactggaagctcatgcctggatttctcctggcccctgctc

SEQ ID NO: 289459 - DNA, 122 bp, Homo sapiens
ccggaagaatgtccggattggacattcggaagagggcccgccttccctggggaatctctgcgcacgcgcagaacgcttcgaccaatgaaaacacaggaagccgtccgcgcaaccgcgttgcg

SEQ ID NO: 289460 - DNA, 122 bp, Homo sapiens
cgaggaactgtccatctgttttccacagcaactgcaacatttttacatacccatcggaaacgtcattgggctcgaacttctctgtatctttgtcaacaattgttgttgtcctttatttttat

SEQ ID NO: 289461 - DNA, 122 bp, Homo sapiens
ggaagcggtgggtccggctgggtttaggtgcaggagcggtcgcccaggtagcggcgggtccggcaggatttaggtgcaggcccaagcagctttcactgctcctgctgcacgcgagctcctgc

SEQ ID NO: 289462 - DNA, 122 bp, Homo sapiens
actggggaggaggtgggaggatcgctcgagcccgagaggttggtcggggcctcagtgagccgaaatcacgccactgcactccagcctgggcgacggagcgagaccctgtctcagaaagaaaa

SEQ ID NO: 289463 - DNA, 122 bp, Homo sapiens
tggcagagaggccctctcatcccttccagttgggctacagaggaagaggcaaagatagggcgtaccgttggtggcctgagtgtggttggaacgctggatcaaggtattcaagttgttgttca

SEQ ID NO: 289464 - DNA, 122 bp, Homo sapiens
gcgcaggaagccagagtggaaaacagccaggaattatctataatttcagtctctgggtggcgtgtcggttttttctttgttttgtaaattttctgtaataaggtatttgttttacagtttaa

SEQ ID NO: 289465 - DNA, 122 bp, Homo sapiens
ccccaccccagcagagggcattcaccgggtgggtgagcgcggcacgcgagggaaatggaccggctgcgaggctgcgcgcggccgggcgggccgagctttatacctgggccttgtccccctgt

SEQ ID NO: 289466 - DNA, 122 bp, Homo sapiens
ttttgaaaatatctctctgggggcattgggagaacagattcggagcattgctggaatggacgtggggaactattaaagaggtttttgctggtcattcaggtatgaaatgatggataggagag

SEQ ID NO: 289467 - DNA, 122 bp, Homo sapiens
ccgccgaagagaaaaccctgccgacagcccttccgatctcgtcagcgattgggccgggaccgtcccacaattactcttgttgctgggctcggaaatagggagcggtgctaggttgcgcgtgc

SEQ ID NO: 289468 - DNA, 122 bp, Homo sapiens
gtgtcactgcgggttcacctaccggcctcttcctctcgcaggtggcatgcagtcggcgctcgccgcccgcccgcaaagaaacggcaatgcaaacttcccagcctgggaaccccgctgcttgg

SEQ ID NO: 289469 - DNA, 122 bp, Homo sapiens
ctgtgtgtttggaggggactgagccccaaagcttcgcagtcttccttgcggacccgggcacgtcttcttccctgcagtctcctgggtttccatgacccggtccgggtggatgctggggctgc

SEQ ID NO: 289470 - DNA, 122 bp, Homo sapiens
aaggactttcaggtaatcagagttcatgggccctcaaaggtaaattgcagttgtagacaccgaggatggttgacaacccatggttgagatgggcaccgttttgcaggaaacaccatattaat

SEQ ID NO: 289471 - DNA, 122 bp, Homo sapiens
atgaatgtcagttcaagacagcaagagctcaggactgcggagatcgcatctacatcctgccgcgctctgtgccggcacagggtggttgcgaaaatcgtgcagtctgaattgattcaaggcct

SEQ ID NO: 289472 - DNA, 122 bp, Homo sapiens
gcggggcctctggagcggggaggggccgagggtggcgttcgggcgccccctgcgggtctccgccactgctacgttttgacctcgtagggcagctccggagctcgctccccgggcaggggctg

SEQ ID NO: 289473 - DNA, 122 bp, Homo sapiens
cctgaggctggctctcagccaggagacctgtgcttctcaaacgggagcgattgcaccccccggggacatgtgattgtgtcaggaaacatcttccatttgtcacagcttggtcgggtatgggg

SEQ ID NO: 289474 - DNA, 122 bp, Homo sapiens
cggcgccgggcgagcagcgcgtcggtgcccgcggtcggggcctcggctgagggcacgaggcgggatcgactgggctcttacagcggccccacctcggtctcccgccagcgcgtcgaaagcct

SEQ ID NO: 289475 - DNA, 122 bp, Homo sapiens
cgccgacgccacgggacttggaggcaggggcggggtccgaccgagccgccccgccccgcccgggccacgtgacttcacctgcttgccccgcggccccacgaaaagttggcccgcggcgactt

SEQ ID NO: 289476 - DNA, 122 bp, Homo sapiens
cattgaggggaacaagggatccctgcatccaaagtcaggcgggagcacaaacagggagggcgagcacaggaagtgggaccgcgatgatggacgacccctgaagcagcagctccctaaacccg

SEQ ID NO: 289477 - DNA, 122 bp, Homo sapiens
gaccgacctcgcccggcagcgcggggccacctcaccgcgagctcctcccgcagcccggcccgggtcacctcgactcgccaggcttaactcaataaccacaacaccggaaaaggaagcaaagg

SEQ ID NO: 289478 - DNA, 122 bp, Homo sapiens
tcacgacacacactcagtgtttgagaaatactaggggcagctggaccccatgcctaaacacgtaccgacgcagggcacgatggaaggccccactcactctggccccactgcagtgggaaccc

SEQ ID NO: 289479 - DNA, 122 bp, Homo sapiens
agcaggtcagggctccacccatgcctcacattccatccacggccagcctcccggggagatcgccaggctcagaaaggcctcccagcagcctggcacaggaggttacggcgaggatggcacag

SEQ ID NO: 289480 - DNA, 122 bp, Homo sapiens
tgttcagtctactccttctttgaaatctctgcttggttttcatttgttccaagaagtaatcgctccttctacagactaagttcctgtcctcctttgtagttccatgacaaccaatatttatc

SEQ ID NO: 289481 - DNA, 122 bp, Homo sapiens
ctgatgctacattcctccacagcagggagatgccttttattttgttcttcttccttataccgtcaaattccaaggatagaaaattgcatttccctgggcctgtgaaaagggatccctccctc

SEQ ID NO: 289482 - DNA, 122 bp, Homo sapiens
aattctggggaaaatgccaattgaaggaaccctgcctatacattttattttctttttcttcgagacagacaacctcaaaataaggtccaaatattggttccttcaaatggtgtcaaaaagaa

SEQ ID NO: 289483 - DNA, 122 bp, Homo sapiens
caagttcctgcgccacccaatcccctcgcggcccagactccctcggggcccgccccttcgcgcgtcattagcaattccgccatcttgaagtgactctgtcggggactacaaatcccggcata

SEQ ID NO: 289484 - DNA, 122 bp, Homo sapiens
ggcgaaacctcgcggttcctcttcccttccctgctgagactaagacgtggacaggggccgcgcagatccgggggaggctcccaaattggaaccaggcttctggctgcccccttccctcccgc

SEQ ID NO: 289485 - DNA, 122 bp, Homo sapiens
gcagaagtggagatgagcaacaagtccccttgggggttgatacaattgtttaggctgagccgtatggggcagagataaaactggtgagtctgaggccagagctctccattcattcattcatt

SEQ ID NO: 289486 - DNA, 122 bp, Homo sapiens
ctcgaggggggccaggtggtggcccaggggcgacagctgtatctggccacaggctcagcacgaccaggaccaggcggcaaacacctgggggcaggataaggcagagagctcaggctggactc

SEQ ID NO: 289487 - DNA, 122 bp, Homo sapiens
atcaacagaggcaaggcatgaagctcaggccatgtagacagagtggtgttgcccaaaccgcgttctgcatctttgaaaatgcacacgtgggaggcgccactctcatatctctccttggggga

SEQ ID NO: 289488 - DNA, 122 bp, Homo sapiens
ccgctgccgccgccgctgcctggatatagtgcggcaagagcggagcttgcagtcactttgcgaggaggagcgcgcgggctgcgggcggctggggcaccgcgggagcggcggcggcggctcta

SEQ ID NO: 289489 - DNA, 122 bp, Homo sapiens
ccagtgtaatgaaaactgtcagtagtaacctccaagagctgctgtgtgctgcagatggtacggctcgctgttaccttcccagatctgtgaaggatcaaatgaacatccaaaatcaggggggc

SEQ ID NO: 289490 - DNA, 122 bp, Homo sapiens
aactcccagcataccaggcgcggcgcgcaccgccctgccccttcctctggggttgcgaaccgcccccgagcctggtacaggctgggattgtagtcctgcagccttgtggccgaagggctggg

SEQ ID NO: 289491 - DNA, 122 bp, Homo sapiens
tgtcccgagagcccggcgctgagaaagggacctcagggggcaggggggactgcacttcggcggcggagggtggagcccggcccggaaacttccctcagaaataaacagaaacgcaaagacaa

SEQ ID NO: 289492 - DNA, 122 bp, Homo sapiens
gcgtgcacacaggcaccgaggtgcgactcgctgagtctcaggctcaagctttaatctctgcgaagttgggcggctccacgggctcgcccccgcccccccccgccccccaatatataaaggca

SEQ ID NO: 289493 - DNA, 122 bp, Homo sapiens
cctcaaagattacaccctcttaggacaggtgcgtgtccctggtggcctgggctgccagctcgggaaggaggaggtggcaaccgcacccgggcggccgagtgcttaataatggcagttgccct

SEQ ID NO: 289494 - DNA, 122 bp, Homo sapiens
acttccacgttttatggactgaaggtgctttcataacagctggtgatgatgagccagaggcgggctataaacagagcggtgatctggtcctgaacactcaggtctcagcccccacccacaag

SEQ ID NO: 289495 - DNA, 122 bp, Homo sapiens
ttgcttgaacctgggaggtggaggttgcggtgagccgagatcatgccattgcaacaagagcgaaactccagctgggggtggtggctcaccctgtaatcccaccagcaccctgggaggccgag

SEQ ID NO: 289496 - DNA, 122 bp, Homo sapiens
agtgatatagtccaaatgctctgtttgagtcgcgggccctttgtctcacacgggcgagtccggggaattctgggaagtggagtccacacgctctgtggaggctcgagcacttccggtcccca

SEQ ID NO: 289497 - DNA, 122 bp, Homo sapiens
acagcaggccgttattgataaggacatttcatacctaacaagggccaggtgacatttcctcgtggctgcccgtagggatgtgggctcagatgtgaaccgaatggagagaaagagacgattgt

SEQ ID NO: 289498 - DNA, 122 bp, Homo sapiens
tccggggccagggtaggtggggagaggagaacattccctcaaatttagcagttggtttgacgccccttctggtgttgttttacatatccagcggggaagacaatagtactatttttgatagt

SEQ ID NO: 289499 - DNA, 122 bp, Homo sapiens
aggcatggcccggcctcggagctctgcggccccgaagccgcctcacccggggctgcagctcggagcccaaccaagagctcacggctggcgccctggatgggaccttcccttcctggctcgcg

SEQ ID NO: 289500 - DNA, 122 bp, Homo sapiens
tgagtttcctaagctcttgtcattcattcaaatacttattgagtgcctgttactatgccacgttctattgtaaatgctgatgctgcaatttaaacagggaagcaaaaatacctgccctctgt

SEQ ID NO: 289501 - DNA, 122 bp, Homo sapiens
gccgggctcgcagggcgcgctcctaacccgtccccagcggctcgacgctgtggatcccgccgccctccagccccggctccggcgccgactcctgctcaggctcctgctcctgcccccggccc

SEQ ID NO: 289502 - DNA, 122 bp, Homo sapiens
gtgtcactggagccaatgcagaagacaccacagagaccggaaggcagggcaagggcacctcgaagacaacaacctctccaaatggtgggtttgaacctacaaccccaccacaagtctataga

SEQ ID NO: 289503 - DNA, 122 bp, Homo sapiens
ctgacaagtctagcttcggttcccgccggcctcctgccccaggacagcttggaaacggtccgatcaggtggggcttcctcttgaaatttgggccccaccctgggaagcagccgcccttagac

SEQ ID NO: 289504 - DNA, 122 bp, Homo sapiens
cccgggctgtccacacacacaaaaaccacagtctccttccggccagctgggctggcagcccgacctgcctcccaaccgcattcctgcctgtgtagcaggcggtgagcacccaggaggggcac

SEQ ID NO: 289505 - DNA, 122 bp, Homo sapiens
tctctactaaaaatacaaaaaaggtctcttccgtgaggagcgcagaggaggtcgcggcgccggaggccccagaaggctcgaaggcgccgcgggctggggtcggtggcttagggagcccgtcc

SEQ ID NO: 289506 - DNA, 122 bp, Homo sapiens
acgtgtgtctccggtgtgcataggagcctttgatcattcctgcagccatttatctttgctcgcaagtttcattcaacaaattaccgagtgtctgggatgcgccagggccgtactggggctac

SEQ ID NO: 289507 - DNA, 122 bp, Homo sapiens
agcatgtccagcacccagcacgcaaaggcctcctgcagctcatgaacccagagaagcagccgcctcacaccaccctgcccccgcccctgcccctcagctgcaaccacctgcccactttttct

SEQ ID NO: 289508 - DNA, 122 bp, Homo sapiens
ttctgaccgtgcggctcaggagggcctccacgtcttgccgcgcctcctccttttgcacggcggtaggggtattgaaggcgattttcaccatagtgaatcttcgggctgcgcggtaaggcgct

SEQ ID NO: 289509 - DNA, 122 bp, Homo sapiens
cacccacaaggtgctcccttccccctagcctgaatctgctgctccccgtctggggttccccgcccatgcacctctgggggcccctgggttctgccataccctgccctgtgtcccatggtggg

SEQ ID NO: 289510 - DNA, 122 bp, Homo sapiens
tggtcgccagagttatagggccccgcgttaagtccatgagcttccgtgagggtactctgccggttttgctgcggaagtcacctcgtggcgtaggggagaggtaacaccgagaagaggcagcg

SEQ ID NO: 289511 - DNA, 122 bp, Homo sapiens
gatatccacaatctagttccaacttctgtgccaatcaggacacacgctgtgtgacatcaacgctctggacaccagctctctttcatggagttctgaattccattccacttccagatatattt

SEQ ID NO: 289512 - DNA, 122 bp, Homo sapiens
atcatacccagccctacgaaaaaaaaattcaccctgtcggaccaggctggtgacatacttcgctggcgcatctccttactcactcttacttttccgacccctcaccattccctctcctgtgg

SEQ ID NO: 289513 - DNA, 122 bp, Homo sapiens
ctgtgctgcagcctgggcaacaaagcgagactctgtctcaaaaataataaaaaataaggccgggtgcggtggctcactcctgtgatcacaagactggcaggccaaggcagacggatcacgaa

SEQ ID NO: 289514 - DNA, 122 bp, Homo sapiens
agagtcaaacggagattcccttatattcctgctctcaggtgcgggtccgagtgacaagaacgttcacgtatcttcgggagagaacgaaaaggtgctcgggtctggcgggggcggggaacgcc

SEQ ID NO: 289515 - DNA, 122 bp, Homo sapiens
cagatgacccggagcccagcgggcctcatctcccacgggtgatgcttccaggggttctggcgggagtctcagccgaagagagctgggctgggccccagccccttgagactctggacacctga

SEQ ID NO: 289516 - DNA, 122 bp, Homo sapiens
taaacaaaaatatataaggtacctataaaaagttacattttcatagaagaatactgccaacgagatcctgtatgcttttacattacaaatctcagtaatttcacccatcactcctggtaata

SEQ ID NO: 289517 - DNA, 122 bp, Homo sapiens
agaagcatcaaggtcaacgcaacctaaggggctcctctgatctttttgcggtaggtatttcgccagacttcaatgggcgggaaccgagtggggggcgggaaagttgggggaaagagggtgga

SEQ ID NO: 289518 - DNA, 122 bp, Homo sapiens
tgcatgagtcttgtgccctccggagctgcttctggcagtagagggaggaggcttaggagacgccgtgtgtcagccttttagcgtgagtgccaggcacgtaccctttaaagcagacgcattct

SEQ ID NO: 289519 - DNA, 122 bp, Homo sapiens
acctcgtgatccgcccgcctcggcctcccaaagtgctgggattacaggcgtgagccaccgcgcccggccttaagtaaattcttgtgtctaaccactttataatcggagccgttgtgcgggga

SEQ ID NO: 289520 - DNA, 122 bp, Homo sapiens
ggggcttggacattttcaaaagtggtcccaggtggggcactcctaggtactgctttacagcgtatctggcactttcacacaagggatgtcccagaactcttgctaagtacaggttctaatcg

SEQ ID NO: 289521 - DNA, 122 bp, Homo sapiens
taacattctaacataaccacaaagagtcctgatgggatttggagttacactgcctgggttcgaatctcaattccgccactgccattcgcgcgttttctattgccagccaccttactctcccc

SEQ ID NO: 289522 - DNA, 122 bp, Homo sapiens
ttcccgccttagagaagtgagttgaaatataccttttaaaaacagcaacttggcctggcccggtggctcacgcctgtaatcccagcactttgggaggctgaggcaggcggatcacgaggtca

SEQ ID NO: 289523 - DNA, 122 bp, Homo sapiens
gagtgcatacacgtgcctgtgtgatgcactcttagctctggaagctggcttcataccacccgacggcatttgctctgtgactgcctacgggttggggtacgttccctcccccgccctgccac

SEQ ID NO: 289524 - DNA, 122 bp, Homo sapiens
gaaattatgtatatgcttggagatgtgtagatattcattggtatgttcattccttacacacgtcatgagtttctgtacattgtgataagctaataatgggaatcctacctaagatttctgtt

SEQ ID NO: 289525 - DNA, 122 bp, Homo sapiens
tgctttcgacttttagttataatgttgtctttgactttttttagcctccacagtgtttagcgctgtgctacacatgtatatatgtggctgtgtgtgtttgcatgtgggattgtgtttgtgta

SEQ ID NO: 289526 - DNA, 122 bp, Homo sapiens
ctggttttttttgtgtgcgtgttcaccagcctgctcacctgggtagcagggtgggagggccgggtggggatggctgcagggaccccctgggccggctctgggtgctgctgctcccaggagag

SEQ ID NO: 289527 - DNA, 122 bp, Homo sapiens
cgtctcctacccaacaacctctacaacataccctcaaacacactacacaggccccccagccgcggtcttccctggacttgctgtgcctgcgccctgcgctacacaggcccccagccgcggtc

SEQ ID NO: 289528 - DNA, 122 bp, Homo sapiens
cctgtgggggtctgaagcctcggggtccccgcgtggggtctgaggtatcagagtcccctccgttgggtctgaggtctcggggtcccccatccccgggatcggaggtccggctccccggagca

SEQ ID NO: 289529 - DNA, 122 bp, Homo sapiens
ctgttgttgaaagcaccgtgtcctcgtcaaggctgagcacggcgtctgtgatgatgttgtcgtagggcagaaaacggctgctcataacctgggaggaagtagaagtaggcagtggggaggga

SEQ ID NO: 289530 - DNA, 122 bp, Homo sapiens
tcacaccaggacgtccccttctcctccctctaacttccactgagaatggccggccgtccacgggctccacgcccctagccagggctacagtcctcacaacctggcttgaggtctgagctacc

SEQ ID NO: 289531 - DNA, 122 bp, Homo sapiens
gtgaaggctgtgaggagagctctgccgcggccctgcggcattctgggcaccccgggccctcgctggcgttttacactgtgcagtttaaagagctcctgctccttacctgcctcccctgcatt

SEQ ID NO: 289532 - DNA, 122 bp, Homo sapiens
cattacatgtatctgccctccaaaacatctaaatttatttcaaaagaattccagagctgccgtaaatacaccacagaaattgcagagggagaggcagccttgcctatcatgataagaccatt

SEQ ID NO: 289533 - DNA, 122 bp, Homo sapiens
ctgcggcttctcccaatgataaactctctcaaagagaaatgccaaacgtgccttgtgtgccgggcggcctcactgagtgctgccagcttccccggccactcctgcacagtggatccaccctc

SEQ ID NO: 289534 - DNA, 122 bp, Homo sapiens
gctctctgggttcccagaaccctgtgggagggctgggtcgcgcctgcccccttttaaacacgaggcttccatggaagcttcttgccggaggctggacactgaggaatggacaggatcaacac

SEQ ID NO: 289535 - DNA, 122 bp, Homo sapiens
aggcggagcccccttggagtttggctccctcccagaagcagtcgaggggggtgaggatcacgcacggaaacagcttctcaatcatctgccagggataccccgggccacgtcagtcctgcccc

SEQ ID NO: 289536 - DNA, 122 bp, Homo sapiens
cggctgcggtggggccgggctggaggccgcgggtgaggcctgtggttaacctcgcgctgccgaggtcttacctcctcgagtccagtctgattccaggccgcttccaggccggtgcccagctg

SEQ ID NO: 289537 - DNA, 122 bp, Homo sapiens
tcaattctgccgcagtcctgggttttcctccctcccacggggcctgggagggaactgagacgggctctgtccccgtgcagggcagtgaggatgtgctcacccgccacaggcaggcgtcagtg

SEQ ID NO: 289538 - DNA, 122 bp, Homo sapiens
aagtcacgcagtagtactcggagcccggggtagaacctggacttcaaatctctgcactcccggccgggtggtgggcgcatatcctgggtagcctctaggaagcgctagacacatgtaagtgg

SEQ ID NO: 289539 - DNA, 122 bp, Homo sapiens
ggaatcactcttagtcacctcagtgcctttctctcttcgttgcaagggacactcaagagtcgggtgcccagccaaggccaacacggcgcagtggcattctattcagcctgctgtggaaaaaa

SEQ ID NO: 289540 - DNA, 122 bp, Homo sapiens
tctaggaggaaactctgaatcctaatctcaagaatgtaagtctttgcgcagtttccaaatcgagtccatttagcagctttcttcggagcccgggtaccccaagtggcaacttaggaactggg

SEQ ID NO: 289541 - DNA, 122 bp, Homo sapiens
agtctggatgggtgagtgtgtgcacacgtgggagcatttctccccccattccacctgcgccgcatcctgagtccaggttcagcattttcatagcgtgtcatccctcccccagaagtcttgag

SEQ ID NO: 289542 - DNA, 122 bp, Homo sapiens
ccccgcagcagccccggcaggcaccctccagcggccgtgggcgcctggtagctatggaggcggtagaggtggaaaccaggcctctgtcttcacacaggaggaactccaggccctcgtttagg

SEQ ID NO: 289543 - DNA, 122 bp, Homo sapiens
ccttcagggcatttcctctgtagtatggcactttcatctgtagctttaagtaccttaaagcgtctcctgtgaacatcttagggaaatgttaggttcagaactaaagtgttttgggtggtttt

SEQ ID NO: 289544 - DNA, 122 bp, Homo sapiens
cctccgcacccagacacgtccccagagcagcgcaccaccccctccaaacgtgatgcagaccgggggatgactaaaatgacctctcaaagtcgctaagatttagagtgagtcattggctcagc

SEQ ID NO: 289545 - DNA, 122 bp, Homo sapiens
aaacacccaggaggaaccatctattgtcctgtcctgaagggagttcctcctagatctggtcggacctttgtgtggtaattaattaagattccctgttaggaaacctgctgggttaaggattt

SEQ ID NO: 289546 - DNA, 122 bp, Homo sapiens
gcgcctttggactccagtgccttgaaatcccacagacctgggaaccgagtcagggatgcccggccgggagaacgaacgggcgggcggcgggtggaccaggacctgcgtccggccccacctct

SEQ ID NO: 289547 - DNA, 122 bp, Homo sapiens
cccaaagtgttgagattacaagagtcagacaccgcactcgacctcaaaactttgacttctcgttggactgatcttttcctagatgccattattttatttatttatttttacttttaattttt

SEQ ID NO: 289548 - DNA, 122 bp, Homo sapiens
ggctctctttccgcgctgcggtcagcctcggcgtcccacagagagggccagaggtggaaacgcagaaaaccaaaccaggactatcagagattgcccggagaggggatgcgacccctccccag

SEQ ID NO: 289549 - DNA, 122 bp, Homo sapiens
cgactcttagatgtaggagttgtgttagatcttgtggagcatcttaaggacaaaatcacgcgggaggttaaatgcctttcgtatggtgggcatggtataatagagaattgagcttcgaggtc

SEQ ID NO: 289550 - DNA, 122 bp, Homo sapiens
tccccagcagaaggaggttttcaacaagtgggctcagagcagtagcagcagcagactgggcggcaacaggactgtccacagtaggatgggcggcagcaggaggcctcggcgtggtgcagctg

SEQ ID NO: 289551 - DNA, 122 bp, Homo sapiens
ccatataagaagctgccaaacagtttccctgtaccatttgacattcccatcagcaacgtacgaggttccagttcctcttcattcttctaaatactgacaaaatttagtactgtcagtatttt

SEQ ID NO: 289552 - DNA, 122 bp, Homo sapiens
tcgagggtgggggcccgggccgggacgggctgtgggcggagccatgggggagagcccaggcgcttgcgcgagctccgcccacaaagacttgtggtcactagtgcgctggtgcgtcacagggc

SEQ ID NO: 289553 - DNA, 122 bp, Homo sapiens
tgccacctctgcaggtgttacaggacatgggcttgccgacgggtgctgaaggcagggactcgagcaagggggaggactcggctgaggagaccgaggcgaagccagcagtggtggcccctgcc

SEQ ID NO: 289554 - DNA, 122 bp, Homo sapiens
ccttttccttacgttttgtaatttaaaggttgcgaggggcggtgttgaagaatgtgtgggcgaacatcctgtcacttacctagagatgttctcacgagagcttgcgcctaccaggatcggcg

SEQ ID NO: 289555 - DNA, 122 bp, Homo sapiens
gggcgagtgctcaaagccgggcagcggctaggggaagataggaggcgggcgagccgcggccgcccttttgatccttcgtggcttcgccttatcagaagcgctttcggtgacatccgcacaaa

SEQ ID NO: 289556 - DNA, 122 bp, Homo sapiens
gggaggggttttcgggggacctatgggggacgagggcggggagcccgaagccgggaattccgcagttaccgagagtttcgaggagatgatgggcgtggaggtgggacagggggaccaaacca

SEQ ID NO: 289557 - DNA, 122 bp, Homo sapiens
gtctctcctcctgcctcacgccctttcctgctcctttaaatagcagacacactactctggcgcccccacttccacaaccagaaaatccagcccaagaactactccctaaatataatgcccat

SEQ ID NO: 289558 - DNA, 122 bp, Homo sapiens
cattttctccttgataatgtagttctggtcattttttccttgataggtgattgaagcctccgatgttgtcctagaggtgttggatgccagagatcctcttggttgcagatgtcctcaggtag

SEQ ID NO: 289559 - DNA, 122 bp, Homo sapiens
ggcgtggctggcgacgggtgggggcgccagcgggtggagatcgagcagcccgagggagcacgttcgctcttctcccggacccagggaccaccttccttccctccagtgggcgcaccgccgcc

SEQ ID NO: 289560 - DNA, 122 bp, Homo sapiens
tggattcctgaggcctggctcagttaataggagacaggtccgctggcccaagcaaagatgcgggtgccacgagggccaggcctcggccaagccctgctggggtaaatcccagcagcccaggc

SEQ ID NO: 289561 - DNA, 122 bp, Homo sapiens
gagccaggacgggaaagcgtcctgtcggctggccatgctgttgcttgcgtctcgaatcttcggttctcgaggaagtgttgacagtgtgatgctaatgtctgcttttcttggcgttgggtaga

SEQ ID NO: 289562 - DNA, 122 bp, Homo sapiens
gggatccatcggaaacgcaaaactactttttccccctgctggtcactgtgaggaactgcacgtggtggaactaacctgtaagtaaggattccttccctctaaggagagaagcttggggtctt

SEQ ID NO: 289563 - DNA, 122 bp, Homo sapiens
tcatcatttcatttactttacatggggtaattattttgaattttataataatgaacacaacgtaggtaatttttgccgtcaggcaaattagtgagaaaagatacatatttgtgccttctgtt

SEQ ID NO: 289564 - DNA, 122 bp, Homo sapiens
ccggtgcttccgacggggcccgagggccgtctgacctttccggccacggggcagcagttgcgtgagcaggaacaatcgccccagtgtgcaaggcacaagcggccttttcttcctcaccgggc

SEQ ID NO: 289565 - DNA, 122 bp, Homo sapiens
ttgaaaaacgacagtgaaaagcaaccaaggcatctcggcagcatgctgctgactagttcacgcagttaccaccaaagcgcatggacgggacccagagcatgagcgtgtgcccactatcgggg

SEQ ID NO: 289566 - DNA, 122 bp, Homo sapiens
ttcccatttgtcttggatcagctgatctagaccatgctcacctgagtggctcttgccctgcgtctttgggtgtgaagtttggctgatctagggcaggctcagctagagtgggtctgttccat

SEQ ID NO: 289567 - DNA, 122 bp, Homo sapiens
ttgatattgaataccagataccactatgtagtaagtcttttaggatgattttaatttagtcgtgcgtcattttctgattctcatcattgggagatcttaaatcttagcaagcattagcaata

SEQ ID NO: 289568 - DNA, 122 bp, Homo sapiens
ctcgccaccaggcaaatgttgggagtcccaacgatttttcccgtggaatgcaccgagggtcgccatggatgtgcctgcaggggctgtgagtatcaggcagatttatcaccaagcgagagttg

SEQ ID NO: 289569 - DNA, 122 bp, Homo sapiens
gttatctggatttagtcagggcccattctccctgcttccccctctgagctgagacacaaacgcttgaaaagcttaggcgaggaagaagggaaagctggcagactgcaatgaggaaagagaac

SEQ ID NO: 289570 - DNA, 122 bp, Homo sapiens
cagatgtaggtggtagctgggtccctgttgcggctcattactgagaagcacatcagaggccgcggggtgagggttggggctgccgggcggcaatgctgagctttgaacggggcttttctgca

SEQ ID NO: 289571 - DNA, 122 bp, Homo sapiens
cttcagtttgtcaaagtggacaaagcctacgacaactgccagtaccagctactaggcatccgcagtctttccagttggtggtactggaggtccctacccaggatttccgtggattccaaggg

SEQ ID NO: 289572 - DNA, 122 bp, Homo sapiens
gcggccagaggagaggctcggaagaagggaggaacccgcagagcgtgcggcgcgagagggcgcagccaagcctgcgcaggtgccccggctctggcgccccacctaatcttgcgcgtgcgcac

SEQ ID NO: 289573 - DNA, 122 bp, Homo sapiens
tttctctaaatcgccacttccagcctgccatgcgactgcagcttttaatagtaactactgcgctctgatgaaaaagattgttgtttccgtaacgggaaaagtagctccaatccaaggacgct

SEQ ID NO: 289574 - DNA, 122 bp, Homo sapiens
gccgctctgggaaggaaagtcgcccggaatcggggtctaagtggccagggcactgccaggcgcaggccagccggcgcctcagccgaccacgcgcccgctctcatcggtaccaccgagggctg

SEQ ID NO: 289575 - DNA, 122 bp, Homo sapiens
gatggcagctgctagaatcctcgctagcatcgaacatccaagtcagagggcactcagagtcgtcagcttcctccagcattgccttacccggctgtaggggttaaaaagctgtggcaggtgct

SEQ ID NO: 289576 - DNA, 122 bp, Homo sapiens
tgaaacccctcttggccagtccagccagcaatgacctcctcctcatacccaaacccaccccgcatgggcttgccattcactaggctctgtgaccttgtcggagccttagctgcttcaatggg

SEQ ID NO: 289577 - DNA, 122 bp, Homo sapiens
gcagagcagatagcggcaaactcctccacagaggcaagcccggagtcccctgtgcactggcggaggctgctcagcccgagtggcactgcacaggctcctgaaggcagatgaggccccggaga

SEQ ID NO: 289578 - DNA, 122 bp, Homo sapiens
actccatgcccctccccctccccgtgcaatagtccagcgcccaccgactcctgctcccagcgccagccatccgcacggggcgcccccaccacgcgccactcctcctcacgcctcgctcccac

SEQ ID NO: 289579 - DNA, 122 bp, Homo sapiens
acccctcccctcttctttccttctctccctccctctctcgctggctccctcgctcgctctcgtgtgcctgttctgcagctcagtcaagtacagccgccctcggaaagtgcaaagcagccacg

SEQ ID NO: 289580 - DNA, 122 bp, Homo sapiens
cccgctcacctgcgcgctctcaggacctttgccgagtccagggttctcaggatagctcctcggattcccccaagccccgcccccaagaccgcctggcccgggagtggagtattgtcaccacc

SEQ ID NO: 289581 - DNA, 122 bp, Homo sapiens
tccaccgcgggtgcccaggaaaggcctgtggggctctcctccccgcgctccacacgccctcgcatcccaccgaggggccagcttctgcctgcacgttgctgaaactggcctggaggttctga

SEQ ID NO: 289582 - DNA, 122 bp, Homo sapiens
cacatgatttgctttctggctgatgtatctctattcctaacgcagagctcaggcatcaatcggtaaacatgaggaagagatagatgcggctctatctatctagtgtatgggagcagcatgtg

SEQ ID NO: 289583 - DNA, 122 bp, Homo sapiens
tattttcttttttatgggtgagttttctttgtaaacaactagataaaataaactgaataacgtaggaatgatctctgcattttgttaaatatgcagctttattcatcccactttctgttata

SEQ ID NO: 289584 - DNA, 122 bp, Homo sapiens
gtcacaccctcaaatttcggctccacatctaggttgttgtccctccaaacgcctcagatccgccaagatgcaagggcctggatccagttgagcggcaaggtctttgagaaaagacttcattt

SEQ ID NO: 289585 - DNA, 122 bp, Homo sapiens
gtgactatgcttagagacagggcttgtgaggatgtaataaaggttaaatgaggtcacaatcgtggggccctgaatcagtagggtgggtgcacttagaggaagagacaccaaagttttctgtc

SEQ ID NO: 289586 - DNA, 122 bp, Homo sapiens
ccgccgcctccccagtccgcctccgccgccgccgccaccaccgccaccgcccccggcagccgccacagtccggcccgccccccggagcccggctctcataggccccgagccgaagcccagcc

SEQ ID NO: 289587 - DNA, 122 bp, Homo sapiens
tgtaagaaagaaattactttgagctaaagtcaggttactgtggtgtggaagtcaagcaagcgtggaaatcaagcaggcttggtgcaagacatagattctgagctggactcagggttggattt

SEQ ID NO: 289588 - DNA, 122 bp, Homo sapiens
ggcccaggccagaggtctcagctggggtccccccagtttgctccatacaaaacgcctaaccgttccatgctcaccttggcagcctccttatttcgggtaaggggtctcagaaacacgtgttt

SEQ ID NO: 289589 - DNA, 122 bp, Homo sapiens
gagggaatttcaatgcattcttccattcacgtatttatttattcacagattcctatcaggcgaaggccgcctttcctggcctcccccacaggcccgccagcgattcgtccttacaaggctag

SEQ ID NO: 289590 - DNA, 122 bp, Homo sapiens
gaagcttcagccttcagggagccggccagccacagtccctctacttcagagtttatcagacgcgggcactgcacgtcccggggctctctactccacacacgttagcaaacaggaagaaaagt

SEQ ID NO: 289591 - DNA, 122 bp, Homo sapiens
ccaagagagactgggcccacacttcctctgtccagcatagaagtgaacacaccactcactcggtcctggccccggcagcattccgacggacttgctcttggccccacatcctggaacccact

SEQ ID NO: 289592 - DNA, 122 bp, Homo sapiens
gcggagttggcggcttggagagctcgggagagttccctggaaccagaacttggaccttctcgcttctgtcctccgtttagtctcctcctcggcgggagccctcgcgacgcgcccggcccgga

SEQ ID NO: 289593 - DNA, 122 bp, Homo sapiens
cctcaccctaacaccaatatatactcttagtctgtaagagaaagggctcctgaccgaaatcggccaggagcgcctctcaggttttaactaaagaaaagctgtctttaactgccagccgcgtt

SEQ ID NO: 289594 - DNA, 122 bp, Homo sapiens
gcctgctcacgctgtgatgacaacgtggagtttgtgcctcggcagctgggcctgacggagcgccgggtccacatcagccatctgctggcccacacgcgctacacctttgaggtgcaggcggt

SEQ ID NO: 289595 - DNA, 122 bp, Homo sapiens
ccgcttcctagagaatcagagaatggatgcgcgagctcgctgctgacgcactaccggccgcgccaccattcttccggtttcagaagttaaggctggtgtcctggccccagtccacctctggg

SEQ ID NO: 289596 - DNA, 122 bp, Homo sapiens
agacttgctgaccaggcactggccacgttgaacatggtgtgagcggcccaggccctcctccgtcagatgggcctggagcacggggtgggcgagcaggtgcagccacgagggcttcaggagct

SEQ ID NO: 289597 - DNA, 122 bp, Homo sapiens
cggggaggggacgaaactgctgaatccagcagatagcttgtggcggggtaatcctcggtccggccccatacaggacagaaataaaatcgccatttcagctccgggcgcagctggaggaggct

SEQ ID NO: 289598 - DNA, 122 bp, Homo sapiens
ctctgcagcctcatggttagtggtaggcccagaggaggccaagggcagtaggcaagacaacggatagagaagagtagtgaattccagctatgtggagtttccagcttggcgaattccagcca

SEQ ID NO: 289599 - DNA, 122 bp, Homo sapiens
tcacagagccctttctgcaagtcttagagggaccagtgggaggtgtgcacacaggggctgcgctggcaggagtgggggcctggcacacccccaggtagatgccctgcccgttaacgcccaag

SEQ ID NO: 289600 - DNA, 122 bp, Homo sapiens
tacctgtctgccctggtttgtagattgatttgtctgtctggacaaagaccagactgtcctcgttcttaaccatcactgtggtccgcttcttaaattcttgggttggtcctttcacttggaca

SEQ ID NO: 289601 - DNA, 122 bp, Homo sapiens
tcacgcttccgccccacctctcgcccattcccggacagtcacagccgtggaacaacgcagcgtgtggacacagccccagggaagcttgactctgcctggtccccatggcgtgcggtggctca

SEQ ID NO: 289602 - DNA, 122 bp, Homo sapiens
ggggcctgagtgagccttaacctgggcgagggctccagggctggccgggcatcgcagctccgagtcttggcccagcccggctcaggatccccttctgtgaataacagggggatgaggcagac

SEQ ID NO: 289603 - DNA, 122 bp, Homo sapiens
agcccggcgttacctgcagttcggcccgcagccgcttgttctccgtgtccagcttggcctcgcggcggcccatggacaacaactcctggttcttgctgacgcgaaagatctcgtactccttc

SEQ ID NO: 289604 - DNA, 122 bp, Homo sapiens
actctcctgaccatggtggccacgccgaggtgcgggtccgcggggtgctctggaggggtgcgcgctgctcgcgaggagaggcttcaccaacacggggctttcatccacagcgagcgcagagc

SEQ ID NO: 289605 - DNA, 122 bp, Homo sapiens
agggctatggtggcaagctttaggaccttgtgagcctgattcacccggtaatctccacctcggaacgccctttctccccgctgcagagcatggggctgggggggagtggagagaaccctgcc

SEQ ID NO: 289606 - DNA, 122 bp, Homo sapiens
gctctcaggactccacagcccctgagtatttgactcaaatcaccagtccaatatccctcccgttaccagtgaggaacctggggcccagagaagaggacggagtcttgcccaaggttactcat

SEQ ID NO: 289607 - DNA, 122 bp, Homo sapiens
cttcctcgtcgcctacgtttttcatgccaaaaagttagcacagattctgatttctttcaccgtaggagtctgcatacaattaaatgggaggcaaaagaagcccactcttaagagtggggctt

SEQ ID NO: 289608 - DNA, 122 bp, Homo sapiens
aggcccttaggcgctcagagcgggcgggccctgtgaggcggaagtggcgggctctgtgggcggaaggggcggggcctgggagtgtcgtgtgcggactgaagggaaggctgcgggagtgtgct

SEQ ID NO: 289609 - DNA, 122 bp, Homo sapiens
gggggagcggcagcgagagcagccctctccgcggtgaatgggaaagtgggtgggagtccacgagagggctccacggtgccttgacgtgcgctgtcatatgatacctccgctgcctcgaaata

SEQ ID NO: 289610 - DNA, 122 bp, Homo sapiens
agactgcattttgacaactgtgttcttaagccggccacagaaggaaaacggtgagtgtcccgcctcacccggcccccaatccaggcaccatatggcatgggtgtaggccagctgcctgtctt

SEQ ID NO: 289611 - DNA, 122 bp, Homo sapiens
taatttgttttgagagtaagaatgagaactacctggttggagagaagttgcagaaaaatacgtctttttgcttctggtatcctgcaagaatggcaagagaaaaaagaaaaatagatctggaa

SEQ ID NO: 289612 - DNA, 122 bp, Homo sapiens
tatctcccttctttccttccctgagaaacgcttcagttctttccataatgaaatacctaacgtatctgcacaatgaacaccccccagaatcctcaagactcctccacagccacctccccgca

SEQ ID NO: 289613 - DNA, 122 bp, Homo sapiens
gctccgcccgcccggacacgcccggcacgcagtgggcaggcccggcccggcggggcggggcgggtgccacggtcccctcaggcgtccgctccccactgctggccccagagtgcgcccggggg

SEQ ID NO: 289614 - DNA, 122 bp, Homo sapiens
tgtttaggaaagtggtttcttcttagatcgggaagaaatggcagcccttttgggaaaggccggtctgtggtaaactcaccagcaaccagggtggaagtgccagaaatattcgcgggaagctg

SEQ ID NO: 289615 - DNA, 122 bp, Homo sapiens
ctcaaaatgtctgaagcttgagacaccaccatcagaagggaagggtaaagcaaaggagaacggactgggcaagcagaggagactagaaactcaggtcagcccagagagaatgaacatgtcct

SEQ ID NO: 289616 - DNA, 122 bp, Homo sapiens
tggagaccggatcttcctcgcttgggtactttcctctcggtgtgtgtttctggccggagccgtttcgcgacggcccgggcgccccgccccaaccttccttccctagaccctcttctctccct

SEQ ID NO: 289617 - DNA, 122 bp, Homo sapiens
gtgtgatacaagggccctgactcatcttgagctcaacttagcatttagatatatctggagcgggatagaggcagggctctggggaaagaactcaccttcagggaagaaggaatagagactgg

SEQ ID NO: 289618 - DNA, 122 bp, Homo sapiens
ctcatgtcctgcggatccttcgcccccgacgcgccccccaacacacaaacccccagaatccgcccccagcctacagcgcgacgtcagcccgccccagccgacttggaggtctcgggtctgag

SEQ ID NO: 289619 - DNA, 122 bp, Homo sapiens
ctgatgggaaggtaaaacttcggaaaacagcttggccatttttaaaagttaaatatcagccgggtgtggtggctcacgcctgtaatcccagcactttgggaggccgaggcgggcggatcacc

SEQ ID NO: 289620 - DNA, 122 bp, Homo sapiens
gctcaactccacctccagagagccattggtgtagaaaccgaagctgttcagctggatgtccgctcgcttctccccctgccggagaccaaggaggcagaggcagttcagacctctttccgcct

SEQ ID NO: 289621 - DNA, 122 bp, Homo sapiens
cctcacctaccagtacctgccctacatcagctacctggtcagtcgctggtttggcaggcccggggctgggaaggctgaggacctgagggccggcccgggctctcttggtgccagggggtctg

SEQ ID NO: 289622 - DNA, 122 bp, Homo sapiens
ctaggactggggtgatggttctggaggcggcgagggaaggtgtgaggcgaggagacctctcgaatcgcgcccgccccgcccagggccggattggctcccaacccaccctctttgctccaggg

SEQ ID NO: 289623 - DNA, 122 bp, Homo sapiens
aatcaatcaatctgtgctgcatgctggcccccactggacagtggctaattgatccattcacgagggaagacgcagatctgacaggccgcgcgcagttccacacagccgcgctgggctcccgt

SEQ ID NO: 289624 - DNA, 122 bp, Homo sapiens
ttaacatccccactctccaaaaaacgttctctagcctttaaaggtggacgcggtggctcccggccgactcaggcgtaattagtcacatcgggacggtgacactcttctccacctcctcactc

SEQ ID NO: 289625 - DNA, 122 bp, Homo sapiens
gggcccgttacagttcctgccttggcggaaactcgggcccaggtttattcacattctagccggcttgaggtgacgattcagctgctcagaaattgacaaacaagtccaaaatgatttcactt

SEQ ID NO: 289626 - DNA, 122 bp, Homo sapiens
ctcctctgaccgagagcacgggtcctgctctgtcccctcttcccaggaaaggtggcactccgggtgcacacccaccacccccattaaagcgggattgaccagaagagagaggccgaatggag

SEQ ID NO: 289627 - DNA, 122 bp, Homo sapiens
gggaggctgagggtttatatagagagacgctgagtgatgattggttccttgctccatgcgcggcgctgctggaaaaggactcctcgtatctaccgcgctgctgtgtttgttgccccttaaaa

SEQ ID NO: 289628 - DNA, 122 bp, Homo sapiens
ggcttgcacccttgctcggaggaatgcagacgtcttcctgaaatacctgcacaggaacagcgtgaacatgccaggaatggtgacgcacatcaaagctcctgaacagcaagtgaaaagtgagt

SEQ ID NO: 289629 - DNA, 122 bp, Homo sapiens
tgatcacgggatcctggttagttttgctcagggcagctcgcttgacctggtgacaaattccgcttcttcctggggctttcctttttcctccagaaagtcttgtgctcatggtttaggaactt

SEQ ID NO: 289630 - DNA, 122 bp, Homo sapiens
gggttttgccttagtcccgtgcgtaaccctccgcctcaccctcctcaaatagtcctcaggcgtgcctagaaatggtccccgcttcgctttattctcaaggaggtgggaggaggttggagttt

SEQ ID NO: 289631 - DNA, 122 bp, Homo sapiens
agggacgtccgcggcggtggatccatagaggcctgcacgcagcaacctgagctcttgcctcgtcagagggagtttgactgaggggcatgaggcggagggagagaaaccgaggccactttaag

SEQ ID NO: 289632 - DNA, 122 bp, Homo sapiens
taagtttagtttagacagcttctatgtgtcctcggagatagataagcccctcaaaaggggcgcactgtgaccactgctacctcccctaggaagccaaaagctgagaatgggatatgggctga

SEQ ID NO: 289633 - DNA, 122 bp, Homo sapiens
acggaggtttaatgtgaagcatgtgagcggggctcagtttacaggtacgcgggccgatggcgaagagcgctgtcaagcggcctcgaggatttcggggggtttgcgccgccgaggaaacccta

SEQ ID NO: 289634 - DNA, 122 bp, Homo sapiens
gaaccgcaagcgcatgacctaccagaagctggcgcgcgccctccgaaactacgccaagaccggcgagatccgcaaggtcaagcgcaagctcacctaccagttcgacagcgcgctgctgcctg

SEQ ID NO: 289635 - DNA, 122 bp, Homo sapiens
caaggagttgtgacatgctttagcaggcattggaaaacaagtgaattaagtctctgagcacgggactggcaggaagaaagccaaggtcaggagccaagacacagaaaggactagaaagtttt

SEQ ID NO: 289636 - DNA, 122 bp, Homo sapiens
tcgatgtctccctttcctggtgctgtgtactttgagcgctcgacggaggtgatgtcctgccgggcctctccactgtgacgtctccatttgctcctcggtcattactaagtctttaggggcgt

SEQ ID NO: 289637 - DNA, 122 bp, Homo sapiens
gcccgtgggcccggcctcctcgcagctcccggggccctgctgccactcagccccacccggcgctgaacccagcctttgactcaccaccgcccgacagaatgcagaactgcgagaggaagagc

SEQ ID NO: 289638 - DNA, 122 bp, Homo sapiens
caagtcgccagtggtgtctggggacacgtctccacggcatctcagcaatgtctcctccaccggcagcatcgacatggtagactcgccccagctcgccacgctagctgacgaggtgtctgcct

SEQ ID NO: 289639 - DNA, 122 bp, Homo sapiens
ctgctctgccatctcacagatgattccttctcttcccaaaactctctaggaataggtacccgtaaacttctctagctgacttcttagttttttattagcctgacctcaaaaatattcttaga

SEQ ID NO: 289640 - DNA, 122 bp, Homo sapiens
tccacgtgtggactctgcgttcgcgggcgcggtgacccccgcggggatttgttggtgccccgagactcactgagttgcgggggccttggagacctccaggtctgaaaagttagctctagaga

SEQ ID NO: 289641 - DNA, 122 bp, Homo sapiens
agaaaagcagtagattgtgtgtaggggagaaagtgtgtgtatgtgtgtcgggtgggggggcgggaggtgagtcagaaactgagcgcttccatcagaagtgtctggtgtttcacagtaactgc

SEQ ID NO: 289642 - DNA, 122 bp, Homo sapiens
tggagagaaatccaggtactcactagactggtaccttctgccaccatgggggagcttttccggagtgaagaaatgacactggcccagctttttctacagtcagaggctgcttattgttgtgt

SEQ ID NO: 289643 - DNA, 122 bp, Homo sapiens
gtgtattttagaatgcagttgctgatgctaacagtaataagcatgacttcctgcttcattcggtttattacactaggaaagagcataaatcccaaaagctgcctgcttgaacgccaatctca

SEQ ID NO: 289644 - DNA, 122 bp, Homo sapiens
ccctggtctccctggctttgacttaggagtcggcactggaagacacagctcaacttgaaacgtattttcccacaagttgcttacttattccaacctatcccatctgcctagtctccaaccaa

SEQ ID NO: 289645 - DNA, 122 bp, Homo sapiens
ctgtctgatagggtgaggtaatagtactatatagactgacaggtgtcaagcagcagagcacgttcatagagcgtatctagaatttgacagcctgaacttgttttgatttcattttgagtatt

SEQ ID NO: 289646 - DNA, 122 bp, Homo sapiens
gaaggtgccttaaatatcatccaatcagagacgctgggctgggaaccgtccaatcaggaacgcagctggtgcggatagggcggcttccgggatgtggcggggcctttgtctctcgctgcagc

SEQ ID NO: 289647 - DNA, 122 bp, Homo sapiens
tgagctagcaagcaaggcttgcactagcttccaggcgcagtcacgcagtttcacagcaggcgcggttccctcggagcacccagagctgccctgcggtagtcagcagttgtgctgtggctgca

SEQ ID NO: 289648 - DNA, 122 bp, Homo sapiens
agttccccaaggccatcagctatttcttagcagggcatttgaggcctctgcacccagcttcgttcatcctttaaggtaggtctcacatggcatgaactctggatgtagctgccaactcagct

SEQ ID NO: 289649 - DNA, 122 bp, Homo sapiens
aaaacagtcaagagactcggacgttgaaagccagagatgacactgagcatgcttttattgcggcctaccatctttaagtgggacatattgattgatgagtgattgcctgtccatacactctc

SEQ ID NO: 289650 - DNA, 122 bp, Homo sapiens
agtataccgctgctctctcaggggcatttggatccccgttttgggtcgtaaaccagctgtcgagggaggggtggaatggcacaatgtgacttaccgcgattaatggtatcaattattaattg

SEQ ID NO: 289651 - DNA, 122 bp, Homo sapiens
gaaagataaagaacttctccggagcgaaaaagctgctaagaatgtatccaaaactccgcacggtaaggactgaggacggtcaaaagaccaccaagagttaaaaccatgaagctgcgtagtac

SEQ ID NO: 289652 - DNA, 122 bp, Homo sapiens
aattgggctgaatgccagttacacaagtgtgttttatattgtgaagattcatcattataccgctaggacttacacttttcaatatgtgtgctatacctcaacagtttaccttaaaaaaaaaa

SEQ ID NO: 289653 - DNA, 122 bp, Homo sapiens
caaactaactaacaacaacaacaaaaaacctgggtgtggtggcacacacctatagtcctacgtacttaggagactgaggtgggaggattgctcgagccagggcagtcaaggctgcagtgaac

SEQ ID NO: 289654 - DNA, 122 bp, Homo sapiens
catggaccgccccgacagcctggactgtagcctggacaccctgatgggggacctgctggccgtggtggccagcccgggctccggggcctgggaggcgtgtagcaactgtatcgaggcgtacc

SEQ ID NO: 289655 - DNA, 122 bp, Homo sapiens
tgatttatctttatctcactgagagccgggacacagcagcaaatagacccggtgccttcccgagtcagcccctttcaggcgagggtgacctcctccctctcagagcctccccatggggtctc

SEQ ID NO: 289656 - DNA, 122 bp, Homo sapiens
tgaggctctgcctctggtttcctgtgcctgggctgcagggcttaggagcttgctgcagctcgtttgctgtctttccttttgcatggccgctctctgatctccaatgcgtgtctcttgggtct

SEQ ID NO: 289657 - DNA, 122 bp, Homo sapiens
attctcataattttttttaaagtctttctacaatctccatgtaaaccactgtttcaaattcgataaaactcaaactccataaaatacctcctcctgtcactggcaccatcttcttaatcaca

SEQ ID NO: 289658 - DNA, 122 bp, Homo sapiens
tgtaaaacaagtaagatacagctcggtctgcaagctgttcccatttaatttggttggacacgagttatggtttctttctttttgcttgtttgttttgatacagggtcttgctctgtcagcca

SEQ ID NO: 289659 - DNA, 122 bp, Homo sapiens
ggcggcgaggcagaggcgctcctcatttcccagacggtgaggaggccgggcagaggcactcgtctcttcgcagatgggatggcagcggggcagaggcgctcctcatttcccagatggtgagg

SEQ ID NO: 289660 - DNA, 122 bp, Homo sapiens
ccttgtggtggctcttggtcttctggggcagaagcacgccctgaatgttgggcaggacaccgccctgcgcgatggtgacttcgcccagcagcttgttaagctcctcgccgttgcgaatggcc

SEQ ID NO: 289661 - DNA, 122 bp, Homo sapiens
caatgtgcctccggagggacatattttctccaaccgaccacgttcggggttctagcctcacgggttgcctctaaccctagcttcctacccccacaaccttgttcagccgcctccctataccc

SEQ ID NO: 289662 - DNA, 122 bp, Homo sapiens
gaagaccgcaccccggaagcaccccgcagtctcaattcgcagtgcgcagtccgcagccgccgcacgtccccaaggcagtgagggcaccgcaccctcaaggaaagccaccacacgcccacccc

SEQ ID NO: 289663 - DNA, 122 bp, Homo sapiens
acaccgcctccatccattggggcggatgggcgaaactcctggcctgttgtaagcacagtccgtagccgggtaaacccccaggagggtcgagaaccccaggtcctggcgcccccggctcgaga

SEQ ID NO: 289664 - DNA, 122 bp, Homo sapiens
tctatttatgaagtctccagaccttgggccggcacgcgtgacacggcacttcaggctccacgcacagaatctcgcagatagttgggactaagcgggctctatcgctcagggcgacaggcccg

SEQ ID NO: 289665 - DNA, 122 bp, Homo sapiens
tcactcctgacgccagcgagaccacgaacccaccgggaggagcaacaactccagatgcgccgcgttaagagctgtaacactccccgcgaaggtccccagcttcactcctgagccagcgagac

SEQ ID NO: 289666 - DNA, 122 bp, Homo sapiens
ttgggcggtcaatgggactgggcgccctggagcagggggcggttcccatcagggaggctccggcgcctgggagcccacaggggcgggtgggggaggggggcagtggcttgggccacgtgggc

SEQ ID NO: 289667 - DNA, 122 bp, Homo sapiens
caaagagcggagctgagggtacccggtttgaagtcgtgcgggtcggaggactgccgcctccgctaccgtcttggacccctgcttaccggccgccgcggggacgagctcgggtaggcggcagg

SEQ ID NO: 289668 - DNA, 122 bp, Homo sapiens
gtgagcaaggcccagtgtgtgcggagaactcacatttaagaaggagtccattgagccggacgcagtggctcacgcctgtaatcctaacactttcggaagtcgaggcgggaggatcgctctga

SEQ ID NO: 289669 - DNA, 122 bp, Homo sapiens
cctctgtatgcgtgtttctcacatgtcctctcctgcagcctgcagctggcaccctgtggtcgagatctagccacctatttcctgggtgggtgccttagtgcccccctcactgccatgcctgc

SEQ ID NO: 289670 - DNA, 122 bp, Homo sapiens
ctctgtctttctgatggccacacagttctgtgcctcataacattaagaaactgctacaaacgaaaagttctttgacaattttaacttagtttgtagcatgtactatgttgctacatacagct

SEQ ID NO: 289671 - DNA, 122 bp, Homo sapiens
ggcccaacctccaacactgggaatcacgtttcaacatgagatttggagggaaccaacatccgaatcattttcatggtatgtcaggtgagatgtgccatggaaaaaaataaagccagaaagtt

SEQ ID NO: 289672 - DNA, 122 bp, Homo sapiens
gcatcgagtgttcacttaaatgaccacttggccctacactgcagcctggattcgcagccccggcccacctgcatggctaaggagttcaagctgcacaacaacagaagtttcagatgaacaga

SEQ ID NO: 289673 - DNA, 122 bp, Homo sapiens
agagaagaacctgctcatttcctcttaagtaggcagggaagcactaacgtccagcagcatcggaaacccgtaggagcgctctcggcagtgcagggtgaggggacagtccatgtagtcatgag

SEQ ID NO: 289674 - DNA, 122 bp, Homo sapiens
ctggctccctctggtaaatgaggctgcggatgtcgcagagctacgtgactcctccgggggcgtggcctgcatgccccgccctgaccacaccccctccccaggactggtgtccggggcaagac

SEQ ID NO: 289675 - DNA, 122 bp, Homo sapiens
attctttaactgaggtggttaaatggccctgaaaagagcctttggagacaaagcagccggcgacccgcggagggagggagggagggagcgagcgagcgccaggtcccggcagggactcactt

SEQ ID NO: 289676 - DNA, 122 bp, Homo sapiens
caaagaactgtcctccttctcccgggatctcagagaaaattcgcctgagttcagtgtccacgtgacccaagctctgaatgcggtaacgtgcacggagagataaggatgtcaccatgagcaag

SEQ ID NO: 289677 - DNA, 122 bp, Homo sapiens
gctgcatgcggaagtctgggccacacctggtatggctcacctcaggatcaccaccggtcccgccagtcgccttcctgttggatttattttcaaagagggctggggccacccaggaagggtgg

SEQ ID NO: 289678 - DNA, 122 bp, Homo sapiens
ggccgacgggccccgcccttcgccgtgccctggaatgtgcggccaggcaaagccacaggacggacgcaaccatctgcggaaaggataggggggaggaagacttaacactgcaacaacaggta

SEQ ID NO: 289679 - DNA, 122 bp, Homo sapiens
atggagaatatgccttttttctgactgcttaagtagatgagtgcttctgttatctacctccgaggtgtatagaaagctgtagtgcaccatcttgttaatgttttctctcacaaaacaaagcc

SEQ ID NO: 289680 - DNA, 122 bp, Homo sapiens
tccccctggagggtaaaactgtgaacgtttactccttgggcattctgggaagtgtcccaacggtcggtggggttgcgggcacttccggtcaggcaggcggatccggggaattctgggaaatg

SEQ ID NO: 289681 - DNA, 122 bp, Homo sapiens
aggccctcagttagtttccacaacatgggagggttcctcctccgtggtctcgcccattcgcgttcccacccaccctccccggatgtgacgaccctgggctcccactcccccccatgagagac

SEQ ID NO: 289682 - DNA, 122 bp, Homo sapiens
agcggggaggaagaaacagaagaaagataagaatgaggtggtcaggttgggggaattaagcgaatattctcttccagggtgagtcctcacactggtctcatgcccatgatgagttgcacacc

SEQ ID NO: 289683 - DNA, 122 bp, Homo sapiens
ctgtttgatgctgctgttgttgcccattttttccaggtgagctttgaaggcctggatgctcgcagccccatctgagaaccggcgcacaggggagaaacgctccgtagggaggtgcagagtgt

SEQ ID NO: 289684 - DNA, 122 bp, Homo sapiens
ccggcgcgggtgggagtgggggcgcggcgcggaaaaccccagggaaggaccgggtggacacgggacgggaggggggtgacatcctcccacccgggggttagaaaaggtccgggtggtagttc

SEQ ID NO: 289685 - DNA, 122 bp, Homo sapiens
tggccccagcgcggccagctcacagtaggtgctcgggcagcgtttcttcagggacctagacggcctggagaggaagggccccagcccagccgcccgggcctctcacctggctctcggggcgc

SEQ ID NO: 289686 - DNA, 122 bp, Homo sapiens
gcatgacaaaagccagtcactttgacagagaaaagtgctcctgatagcaacttgagtgtccggcgacagcgcaacagtccggcaggggctgggaggccatgtctgactcacatgcttgcctt

SEQ ID NO: 289687 - DNA, 122 bp, Homo sapiens
cgggcgtggtggtgggtgcctttagtcccagccactagagaggctgaggcatgccaggtgcggtggttcacgcctgtaatcccagcactttgggaggccgaggcgggcggatcacgaggtca

SEQ ID NO: 289688 - DNA, 122 bp, Homo sapiens
aaataaataaatgaaatgaaataaaataaaataaaattctcttctcttagctgagattaacgaagtggttaacaagtggttaacaagtggtttcttctaccagagtgtgaggctggttgtgt

SEQ ID NO: 289689 - DNA, 122 bp, Homo sapiens
gtgtcactcgtataaaaacctatgctttgaaggttctcgtgtgtctcggcctgcaggtctcgctcagagctgtgtccctgaacatccaccctgctggggtggcttgacgcacttctgtgcaa

SEQ ID NO: 289690 - DNA, 122 bp, Homo sapiens
gcactcagtttaacacaaatacctagtctttgtacactgatgtttgatgttttgtcttctcgaccatttaagcttttatttaagacaaaatctagtaagcatttatctactaaacagtagca

SEQ ID NO: 289691 - DNA, 122 bp, Homo sapiens
cacgcaaaccatgtctccacacgtctcaaacggtagcagagggagtaccttggctgctggcgaaggagtaagccacgcgggctgaaggagcaggcctgccccacacaggcgttactcctccc

SEQ ID NO: 289692 - DNA, 122 bp, Homo sapiens
gccactatgcccggcagaatcaccaaagatgtctgaaccagggagtgacatgaccagaagcgatggatggattggggtggggactgggcaagagggaggaggcaggaggagtagctagaagc

SEQ ID NO: 289693 - DNA, 122 bp, Homo sapiens
taggtaaccccaaagatctctcagccacattgtcatagagcaaaaataattcagaagccccgatttttgcctcaggtctctttctcctaacacagacaacttccagcacttcatttccttaa

SEQ ID NO: 289694 - DNA, 122 bp, Homo sapiens
tattgttaacgataaaaggcaaagactttccaggacccgacccctcgcttacaagcctttcgggaacttgccctatacccccgaccccagtcaccttcagatttaattccacagacacgccc

SEQ ID NO: 289695 - DNA, 122 bp, Homo sapiens
tgctctgtcatctatcacacactgctttgtgtaagaatcttcattggttggatcataatccgttacaaaataggactcccaacttaggaaacaaaacatttgtaatatgattgaagactcct

SEQ ID NO: 289696 - DNA, 122 bp, Homo sapiens
ggcatctgcgtcctgattggcaggcatatggcccaatcgctatggtgggaaggcgtgccccggcccgcccactgttttccttggtgcgtttctctttaaatgcaaataagtgcaggcgtggt

SEQ ID NO: 289697 - DNA, 122 bp, Homo sapiens
attacgatcattgttctccccttgcaaaggcttcagttttgattctttcatggaggaagacgtaacttcaagttaaaagcagcaggcgcaccgctcacccctggacgctgaggctagacact

SEQ ID NO: 289698 - DNA, 122 bp, Homo sapiens
gggaactggggctgtgcgcagtgcttgcgggccagcgcgagttccgggtgggcgtgggctcggcggactccacactccgagctgccagccggccccaccggccccaggcagtgaggggctta

SEQ ID NO: 289699 - DNA, 122 bp, Homo sapiens
gcgtgagccactgctcccggcttattatctccattttaaaagtcaaggaactggggcttacggaagttaaagaactagctgaagattaaagacgtaaaataccgacttggatttttttccca

SEQ ID NO: 289700 - DNA, 122 bp, Homo sapiens
gcggcggctattacctgcgtccgaggagctgcggcggggttaggaccgcagtgagctcctcgcagctgcggccgcccaccgacgcaccccacgcctggccgcagccccagcctctctgcgcc

SEQ ID NO: 289701 - DNA, 122 bp, Homo sapiens
cagtggagcccagcttggatctgccaacactcagctgattcatagatcaatgacaataaacgactgttattttaagccactgaatttttggatgtttgtcatataacattttgtggcaatag

SEQ ID NO: 289702 - DNA, 122 bp, Homo sapiens
gattccatcgtccagctgtataatgaaaacagagttctcagagaacaccggagactcccccgacttgcctgtatcaagtttctagaggtaagcggtgaaaatccacaatatgaagtcactct

SEQ ID NO: 289703 - DNA, 122 bp, Homo sapiens
tgcccggggtcctgaccaagaactcccgccccaccagagaactggagtccagagctgggacgccagccaggctggagcagggattcttctggagagctgagcgaagaactgcaagtcctaac

SEQ ID NO: 289704 - DNA, 122 bp, Homo sapiens
tccatgaaagcgcacttccactcctgggccaccgcctgcgcctcgcgcgtgtccacctcccgctgcgtctcatcgcacttgttgcccacgagcatcacggggatgtcctccacgctgccctt

SEQ ID NO: 289705 - DNA, 122 bp, Homo sapiens
tccctgaggagagtggtttaaacggtgaaggctgcggggcgtcgccggaagtgtcgtaaacgtcggatatccggttcttctgggcgctaagggagctgacggagagggccaccgcccagcaa

SEQ ID NO: 289706 - DNA, 122 bp, Homo sapiens
ccctctggcatcctcagctcttgctaggtccacagtctctctctctctctctctttctctcgtcaagcaagttcttcactgagcaatcccagggggccacgaacctcggttccagccaagct

SEQ ID NO: 289707 - DNA, 122 bp, Homo sapiens
ccttcccggttaataaaatgccctgtacgcttcacgtgggtcggggactggggtgagccgcgcactgcctcgcctgcagtcgggaaagcctgcccgcccgacctctccgagccaggccgcgc

SEQ ID NO: 289708 - DNA, 122 bp, Homo sapiens
ttttttggttctgcacagtcacgagctgtggcatccccgggggaaaggtccttgccattgcgggggctgttctttttgcccacacggcctcgtcaactaggggatgccccatgcattgctca

SEQ ID NO: 289709 - DNA, 122 bp, Homo sapiens
gggcgggcaggcgggaggcttagggtgggtcgcggtcgcggcccccgccgcaggccctggcggcggcatcgtgaacatagacgtggagttccacatccggcacaactacccctggaacaagt

SEQ ID NO: 289710 - DNA, 122 bp, Homo sapiens
gaattttgaaaaacctccatacctgtgcagccgccaccatcgcggtggtgaggacggaggcggctctggagcttacccctggagtgcgtgtggttagagaagccttgagactcgggctccca

SEQ ID NO: 289711 - DNA, 122 bp, Homo sapiens
tgagcctgcctgtgcctttgagccgatacctgtgtgtgactcagggacgagtctatgagccgatacctgtgtgtgcttgggtgtctgtgtcgtggtgtgtccctgcaagcgtttgtgcctgc

SEQ ID NO: 289712 - DNA, 122 bp, Homo sapiens
gaattcatgccgaggcccggatcagttccctgcctggaagagtgggcagagcagagggttcgtcaccacggctccatgcggtactcccacgggcgcttccgtgcagggtggcaaggcgggag

SEQ ID NO: 289713 - DNA, 122 bp, Homo sapiens
cgttgcttctgcgtatctgcgggtgtgtgcctctttgtattgtagcctggagtcagtgctcgcttctgcgcctgcaggatgtccatgtgtctgctgggtgggtctgtgcctttgggctttgc

SEQ ID NO: 289714 - DNA, 122 bp, Homo sapiens
ggtaccaggcccagctcccttggggacatctgctggttgggggatgtgggctgtgctgcacgtggtctggccctgggtgtgggtgctgtgtcggtctggagaaggactgccgtgctccttag

SEQ ID NO: 289715 - DNA, 122 bp, Homo sapiens
tcctggagctccttatttgagccatggaaagttcaggttcaacagatggcaggtttatcacgtgcaggctgtgccctcacctcttttctggctagaagaaagggttgcctctgccttgaaaa

SEQ ID NO: 289716 - DNA, 122 bp, Homo sapiens
actgggcactgaatcatcggacaacctcgacagagcccccctcggccctcgggagagcggcgggcatcaccgacctggctcttacctgtatccttcccagcctgtggctgccagggtagcga

SEQ ID NO: 289717 - DNA, 122 bp, Homo sapiens
ggctctgatatgagtcagttacttaacttctcagagtccgtttcctcatctgtaaaactgcgcgaactatatcaccaatagcaaagatgaaatgagacagttggtaaagtgccaagaacata

SEQ ID NO: 289718 - DNA, 122 bp, Homo sapiens
ctgaacactgctttacagaaaacacctcccaccctctggcctagctaaagtctcagggctcgggcaagctagacagttgcctagggcagccggctgtttagtgattgtttattatgggagtg

SEQ ID NO: 289719 - DNA, 122 bp, Homo sapiens
ccaagtccggctgcagccttttcaccgggatgggcccggctcggcgttccccggaggctgcgggcccgcccccctgacgtagctgcccatacatggtgtaacttcctcgccgcgcccaggtg

SEQ ID NO: 289720 - DNA, 122 bp, Homo sapiens
aagattgctttctgcctcagtttccctttatccacatctctctcagttttcctctatccacggattctctgtgacaatgggcaagtgtaataaaaacactgatttcataaacaggatcagaa

SEQ ID NO: 289721 - DNA, 122 bp, Homo sapiens
gggcactgcgaaacatgattggccttgcggcctgtctatgcagccgctcaacccttccggcggtccaggccgctcaccttaaggacgcagagtggcgtcagatttggagaagcgccggggac

SEQ ID NO: 289722 - DNA, 122 bp, Homo sapiens
cacttgccccttcccactagagccccaggtggcacggatgggcagcctccccaccgctcacgcccatgcaccttggcacctccggagcccgcaacacatgcttaccccactgacctcttttc

SEQ ID NO: 289723 - DNA, 122 bp, Homo sapiens
aaataggccagcagggaccagggtctctcagaaccagctttcctatcttcttccaaaggccggaattgagaaggtttactccagcccacataattgagtctctgggctgtcaaggacgcatt

SEQ ID NO: 289724 - DNA, 122 bp, Homo sapiens
cctagacgctggcatacatagatcactattttctgccatgtggtatcttttaaacacacacgattgttttgtgcagaaactttctatttttacctctcataagtgtcctgtgggttctttcc

SEQ ID NO: 289725 - DNA, 122 bp, Homo sapiens
ttactttgcaggccatctgtgatggcaaggaaaaagcaactatgttcacagtgaaatattcgtggaataggttaggccatttcagtagacattgcagttagttagcaagaaccacattgtct

SEQ ID NO: 289726 - DNA, 122 bp, Homo sapiens
atgggcatggggagggcagactgggcagcagctgtccccgtggactctggtttacctaagcggaggggctctccagcgtgaaacccctttccttgtgcccatgtcacaaaggccacagctaa

SEQ ID NO: 289727 - DNA, 122 bp, Homo sapiens
tgttatactctcaccagcgaagagatacgttttctctcagattctgtcctgcctttgttccggagattctgaccccagtgatcaagtgagcttttcatcctggcatgatgtttcagtgtttg

SEQ ID NO: 289728 - DNA, 122 bp, Homo sapiens
gaggaggaaggggcttggagcgactacggggggatgcggaggtaggtagtggtctccgggcggggaagaggaggggtttgatccccatccccggggttctcccaaacccgatctctctttcc

SEQ ID NO: 289729 - DNA, 122 bp, Homo sapiens
ctgtgaacatcccagttttcactgggataaaagtataagagtatgattgctgcggtgtatcggatagaaactgccaaagagtgttttccatagtggttgtactattttgcattcccaccagc

SEQ ID NO: 289730 - DNA, 122 bp, Homo sapiens
cccaagtcggagcggcgtcccctgctgagccccgagcgccgggtgagaggagggcgcgcgcggcccccacccagggccccgagattccagacccagccccgcgaggggcaccccgagcgcgg

SEQ ID NO: 289731 - DNA, 122 bp, Homo sapiens
tgccgtgcagatccaggggagttggaaggtcacaggagttcagcctcaggtcaggcccgacggggcatgtagttagaagttaatgacagttgaaacgtgggtcagctggttcctaggcccgt

SEQ ID NO: 289732 - DNA, 122 bp, Homo sapiens
atcttctaaggaactttattatagatctgtttacttaggtaaagcatatacaggaagatgcgggaatcataataaatgcttatgaagcaaaactaaatgcacctgtactgctacatccagat

SEQ ID NO: 289733 - DNA, 122 bp, Homo sapiens
gtcgaggagagctctgtgccgggaccgcgaggcgatccagaccagatgggggacgaggggcgcgtatgaagcttgtagaagaggttgccggtgaagagcagcctgtgcgctgcacaccctgt

SEQ ID NO: 289734 - DNA, 122 bp, Homo sapiens
ctctccgagctcggcttgaggcgggcgcgggctgagagtccggggatcccgggggccagtcgcggccgggacatcgggcgctgcggccggggacccgctgctgagatagacaggtgagaaag

SEQ ID NO: 289735 - DNA, 122 bp, Homo sapiens
ctctactaaaagtacaaaaattagccgggcatggtggtgccgcctgtattcccagctacccgggaggctgagataggagaattgcttgaacccgggaggtggaggttgcagtgagccgagat

SEQ ID NO: 289736 - DNA, 122 bp, Homo sapiens
ctgctatgatttcaggcaggactcaggccccagaagcagggagcggacctctgcctgggccgacctcccctcaggccctgaggcgcagtgcccagggctcctgaaactttcatgggctcgtg

SEQ ID NO: 289737 - DNA, 122 bp, Homo sapiens
agcgaagggtttccccagcctccttaccttgagtctgttaggttttctggagattggcttcgttggagcagagggtaccgctacctcgggaaaatgacttagtgcctaggtgtcgtggccac

SEQ ID NO: 289738 - DNA, 122 bp, Homo sapiens
ttggagtattagcattcacattagccactgattcagctttttctccaagactgctcttctcgtccatgacttttgggctttctgctactggagatgccttggcaggaagcattgaacccaat

SEQ ID NO: 289739 - DNA, 122 bp, Homo sapiens
cactccccctcccacccaccgagctgagagtcacctggtgtggcctctgtggggctgtcccgccatcaccgtggccacaggccacagtgctgcaatgttcacttcccttgttattgcatgcc

SEQ ID NO: 289740 - DNA, 122 bp, Homo sapiens
gttccctcaccccagcttctccagtcgcccccttacgcctcccccttgagcctcccgccccgccagccctcggacgcatgggcccctgggagttgtagtgtaacctgcagtgcactgaggcg

SEQ ID NO: 289741 - DNA, 122 bp, Homo sapiens
ttcagttgattctgtgtgtgtgtgtgtgtgtgtgtgtgtgtgtgtgtgtgtgcgcgcgcgcgcgtgtgtgactaatgtactgttaatgtactgtttaggtcaggacatttcttaaaaggaat

SEQ ID NO: 289742 - DNA, 122 bp, Homo sapiens
cggcgttagggcggtgctttctggccacgtggtctggcggccgattgtgcttctgggctccgcggggctacctgccagtgattttgtgcgcctagtatgtgccagaacgttatttacaatga

SEQ ID NO: 289743 - DNA, 122 bp, Homo sapiens
agacagttcacatgccgtaggattaaataacaaggatgaattaacaaggcccatcaagcacgcagcatggtgtctggcacacggaaaatgctttgtacatgttacctattattttggggagg

SEQ ID NO: 289744 - DNA, 122 bp, Homo sapiens
aggcctgccccgcccatcctagtgtgccttctctgcggtgcttagcgcctcctcctacagcgcctcctcagagcgcgcctcccctgcagcgcgccttcccagagcgcgccttctagatgcgg

SEQ ID NO: 289745 - DNA, 122 bp, Homo sapiens
cccattcgtgtcaaagagagcatccttgatccaaagacacaaactacaaaagggcacagccgggactaggaccccagttgtcccgaaggacctgttggccgccagatagtggttgaaggaag

SEQ ID NO: 289746 - DNA, 122 bp, Homo sapiens
aaggcttcttcgatcagtttagcccacactgagccctctggtctctaaatattttgtgctcggtgtctcatacttagcactcaatgctgtatgtgacttagttacactgtcccaagctagat

SEQ ID NO: 289747 - DNA, 122 bp, Homo sapiens
ttattagtcacatccttcttggtgtgtggtgtgacccttctatcagggcagggggaatgtcgggccttgtgcagaaatcatttggtgcgggaaacatcaaccaccacccagagattttcatg

SEQ ID NO: 289748 - DNA, 122 bp, Homo sapiens
acacagtggagcacaactggactttctgtaggctagcccggaagacagacgactgatctccgaccctgccacaggttcctggaaagactctccaggaaatggaagatactgatttttttttt

SEQ ID NO: 289749 - DNA, 122 bp, Homo sapiens
gggaacacagaaagatagagacccaggggactcccgcagagagggcctcttgggcttcagcgcagaggaaagtttcccgggcaccccctctcctcccctgccctccgccgcctgggccctgc

SEQ ID NO: 289750 - DNA, 122 bp, Homo sapiens
atttcgaaattaaccaacataaacaacaacaacaacaacaacattcactacccattccctcgttaggttggaaaaccagtctgaaaaaataaatacaatctgtgaccatgaaaaggagcaat

SEQ ID NO: 289751 - DNA, 122 bp, Homo sapiens
gaagacccctgaagggctgctccgcgggctgcgaggcgagtgtgagctgggaacctctggcgccctgctgctcccaggggcgtctagcaccggccacgacttgggggacaagatcatggcgc

SEQ ID NO: 289752 - DNA, 122 bp, Homo sapiens
cctttctgagagcgggctaggccggcactggagaggccggagcctttggaacaaaccgtgcggaacgcgtccaggggccttcccgcccagcctttgccagatctctcgtgcggttcgggcaa

SEQ ID NO: 289753 - DNA, 122 bp, Homo sapiens
tcatcgctgccacggggggcgtgcgattggcccgaggttatccagaagcaccaaagctggcggcacccgaccccccggccggggacggagaggggctgactgggttggttttgatctgataa

SEQ ID NO: 289754 - DNA, 122 bp, Homo sapiens
gagaaaggcaccccgccctccgtccctggtggctgccgggctcggggtccgcacagaccgcgctggaaagggatagtccgggaagatgcgcgtcccacgcaccacactgcttggaggtggag

SEQ ID NO: 289755 - DNA, 122 bp, Homo sapiens
gggacagctatgaccgttgaacttgcagaccctggtccaccttcttggagtggaagccagcggtgcagaaggggacccctgaggcgcagaggcaagtaacagtgccaggggagtggtcaggg

SEQ ID NO: 289756 - DNA, 122 bp, Homo sapiens
aaggctgacggcaagttaacaaaaagaaaaatggtgaatgatacccggtgctggcaatctcgtttaaactacatgcaggaacagcaaaggaaatccggcaatttgcgcagtcattctcaaca

SEQ ID NO: 289757 - DNA, 122 bp, Homo sapiens
gggctgtctctagctgccttcagggctttttctccctaaaggcacttgcagtgcttcttgcggattaaggcagaaattgttttcctgcaggagaacacaagatggtgaagaagctggctgtc

SEQ ID NO: 289758 - DNA, 122 bp, Homo sapiens
gcctttcgagcagtactccccgggtggccaggacacccccagctccagctcctcaggggacgactccgtgtttgcccacgacctgctgcccccggccccacccagcagtgggggctcgcgga

SEQ ID NO: 289759 - DNA, 122 bp, Homo sapiens
caaactactctgaaggatgttaggaggcctgggttcccaccactcccttgattgacatgtcgctaaggtctgttggctttctctgacctcctgtgggtggggctgagtatatctgcttgttg

SEQ ID NO: 289760 - DNA, 122 bp, Homo sapiens
cacacacttcagtatctaggactcgggaaaaaggacactaagcagattatgactccatttcgggaattaaatcaaaactcaagactatctcaatttggcttctgacgagagggaaaggttaa

SEQ ID NO: 289761 - DNA, 122 bp, Homo sapiens
aacttccctggtggctgacagctgcgtggacattcagcggccctacctttttccgtcaggcgccagcagcccctctgtgtagaggtgagacaggccaagctgcagcttctagacgagacgcc

SEQ ID NO: 289762 - DNA, 122 bp, Homo sapiens
aatactctgatattattccatgccgttccgttgttgcctacaaagttcgcgctggagaaccgcgcaattgcgttacaaaaagaaaaaaatcacacaaaaagacacaatgttttaagaaagtt

SEQ ID NO: 289763 - DNA, 122 bp, Homo sapiens
ggtagattggcgggggagagactgggggtggagaggccatttaaaaggctgttgcaaaatcggttttcctgataaagagctgggctgagtcatctgtggaggagaaaagtcacatccagctc

SEQ ID NO: 289764 - DNA, 122 bp, Homo sapiens
agcagccggcgcagggaggcctcttcgtttaacctctggacccagcgaatgcttccctggcggtgcgtggggactcccggagacctccggccacacggcccccgctgcaggcatcaagggca

SEQ ID NO: 289765 - DNA, 122 bp, Homo sapiens
ttcgcagtccgcggcggagtgagcaacttgctgggtgcgctccacggtttttgttgccggcggctctcgaagacttacacaggctttgcctggccgtaaatatcaaagtgcaaagcagttgt

SEQ ID NO: 289766 - DNA, 122 bp, Homo sapiens
tccccactgcccctggtaccagcgcgctccagcttgtccttcccgttctccaggtatctgcggagccactccacgcactcgccctccaggtaggctctccgctgctccgcctcacgggccgc

SEQ ID NO: 289767 - DNA, 122 bp, Homo sapiens
ccaactgtcatttgtagaccggggataggaacacctgtctcacagattgttacacaatagcgccggtgaagcgcttgtcacaaagcctgacccaggacaatctcaaaaacggagattctgtt

SEQ ID NO: 289768 - DNA, 122 bp, Homo sapiens
gcgggggagccggctggggcggcggccaacagacgccgctgcaagtattcatggatgtggcgcgccaccgacgtgtaagtctggttggcccgcagtgggtagccgtgagcccgcaggtggcg

SEQ ID NO: 289769 - DNA, 122 bp, Homo sapiens
gcacctgttgcaagccagctcctcggagccaggccaagcagctctgcccctagcgggagtcggaggcatgaaactcccttttaggaagacggagtaagaggcaccaccacctgctcctgctg

SEQ ID NO: 289770 - DNA, 122 bp, Homo sapiens
tagtcattaatgcataatgcctcagtcactgcctcaaaaatcaatcttttactgcctcaacgaggaaaaaaaacaatcccactgctctcccaggccctgtagtgtgagtctatcatggccac

SEQ ID NO: 289771 - DNA, 122 bp, Homo sapiens
cacgaagacggttggggtggtttttccccaggaagtaagagggctatctttagcgagatgcgggctgaggcagccctgggggagtcactaccattgcagccctacccagaggtcctgggtcc

SEQ ID NO: 289772 - DNA, 122 bp, Homo sapiens
ggcggggccccctcaggggcctcggccccccacctccacgctccggagctttcggctccgcggctccgaccaggctcctccctcagcgccggctccccgagtcccgactcctcggccccgtc

SEQ ID NO: 289773 - DNA, 122 bp, Homo sapiens
caataattatactgcaagcaaggcaacatagcatggtggttaaggcgcaggctttgaactcggaacctgagtccaaattttggttctaccattcattacctgtgaatccacgaacaagatac

SEQ ID NO: 289774 - DNA, 122 bp, Homo sapiens
tgagaagggtgtggggcggctgcggggacacagacggcaaatgctgagaagggcgtagggcggccgtgtggacacagcaaatgccgaggagggcatggggcagccacgtggacacagacagc

SEQ ID NO: 289775 - DNA, 122 bp, Homo sapiens
tgctgtttggaatattctctcatattctttactggcatcatattaatcggttgatggattcggctagggacactgaattgcactcctgtatggatctgtggatatctatatataatacaaat

SEQ ID NO: 289776 - DNA, 122 bp, Homo sapiens
gtggcaaggggaggggactcgtagtgggaggaggtgggcgtggaggcgacgtgaatcgggcgcgctcgccacctccccgctgccgtgcagagccgtggcactctcgctagagcccaagcagt

SEQ ID NO: 289777 - DNA, 122 bp, Homo sapiens
gctttagctcagcggttacttcgagtacattgtaaccacctctctgggtggttcgagacccgcgggtgctttccagctcttttactgctgaagttcagctccttttccatggggaaccatgg

SEQ ID NO: 289778 - DNA, 122 bp, Homo sapiens
gagggaccagcccctaggatggggcgcctggctgggcagctgcttttgccgcctgcactgcgagcattgggaggtggagaccgcggcctctctgctgtggtggcggggaggcgtgtgccgct

SEQ ID NO: 289779 - DNA, 122 bp, Homo sapiens
ttttatttgatgtttctgattgcctgtgtttaaatctgcctttatctcctttgtgttcgccggtgaatttaaagtgcatatgtagacaggggttaagtgtaaatcacactgaacctatatta

SEQ ID NO: 289780 - DNA, 122 bp, Homo sapiens
gcccaacaggccccagggccttgcacagcaggtactgtaattcagtaaccagtgtggggccgagacgcgtctcagcacctgttctctctcaccagccccgtctctctcccgtgtccccctgc

SEQ ID NO: 289781 - DNA, 122 bp, Homo sapiens
gtctggagagccgggagggtctgcagggcttgtggggggcagtgttctgcaaggggcaggcggcgctggctttggctgcttgtggggtcctcttaggctccggggggcctgcggcggcctgg

SEQ ID NO: 289782 - DNA, 122 bp, Homo sapiens
gtgctgagaaccacagtgtaggatgtttagacaaatgacccatatagacaggaacccaggcgagtccctcatgctcaaatggaaatatttttatcacccagctccttattttgtaaactact

SEQ ID NO: 289783 - DNA, 122 bp, Homo sapiens
gatcatattcctcaccaccaataaatattgtaaagtactttcgctgtagccatgctaacccggggcatctgtcattccggttgctgctattaggaattattggactgaaccactggcagaga

SEQ ID NO: 289784 - DNA, 122 bp, Homo sapiens
ataagctggataaatgaccagagcctctggattgggccttgtagtcctactttgccacttcgtggggtcagggaacaggagtgtgtcactgttcattcagtatgtaaatccatttccaagtc

SEQ ID NO: 289785 - DNA, 122 bp, Homo sapiens
tggagcagtatttcccccaaaggactctggagccattggaggaaatgggagaaacaggtacggagatgccagagcctcagcagtgctggtcccagcagaccttccaccctcgttgagggtgt

SEQ ID NO: 289786 - DNA, 122 bp, Homo sapiens
tgtcagttagatgagtcagcttggtaggtcagagttttgtttgtttgtttcttagcacaacgtattgctgaagctttcaagaaaaccacgattgtaggctttatatcatactgtctgtggtt

SEQ ID NO: 289787 - DNA, 122 bp, Homo sapiens
cttgattatgtactgtcagtattcatttggtgaagttgctttgcaggtgcctttgtgtagcgctggagaatgaagaagttggtgacccgggtaaagtgtggtcaccattccttagctcacat

SEQ ID NO: 289788 - DNA, 122 bp, Homo sapiens
actatcccaagcgtgttccatctgagaactttgccctgctgcctgctctcctagggccgtcggcttctggatggagctcccgctccatgcaggtttgtctctgtgcaaaggcgccctctcca

SEQ ID NO: 289789 - DNA, 122 bp, Homo sapiens
tcttcataatgagtcgcttttgaaaagcccgtgcagcaacagccttggccaaaggaacagcgttctgcttacaacttagctcatctgggggcctatttgcccctggaacttcaggacgctcc

SEQ ID NO: 289790 - DNA, 122 bp, Homo sapiens
agggggatttgcgtttgggggtcagcatatcctcgcactctcccaacattcggggaagggcgtgccttcaggatttggagtagaaatcctcaggcattcggtgctcagtgttgccttgtgct

SEQ ID NO: 289791 - DNA, 122 bp, Homo sapiens
tccggctaaccccctgtgatcaacgccgctgcagctcgggtgcagaaaggcgaggggagacgggaagctatttttaggagaaaaaaataaatctcagcctacctttagaagcgagctgtgcc

SEQ ID NO: 289792 - DNA, 122 bp, Homo sapiens
atatcatcctctttatatacttgagaaccctcatttaaaaacccctttgctgaataatctcgttttgtcaaggccttcattattggtcacatttttaaattctttgatcatttttactggcc

SEQ ID NO: 289793 - DNA, 122 bp, Homo sapiens
gccaagcctgaggtgcctcggattgtggtgcagcccccggaggagcccagaccaccgcggcggaaaccccagacccgcggcaagactttccatgggctcctgactcgggcccggggcccccc

SEQ ID NO: 289794 - DNA, 122 bp, Homo sapiens
cagcactcaccccccggcgggccggagcgcgccaggccctgacccgtgaagaccacggagcggggtaatccacaccacctgtctccacccccggagcaggcacttccgagctgcgtccgcac

SEQ ID NO: 289795 - DNA, 122 bp, Homo sapiens
acgaagcgcctgagggccctggcagcactcaccagggtcgttccagcccagggcagggcccgcggtcagcagaaacaaatgcaagccgaggagcaagcagtacccggccgctcccggcccgc

SEQ ID NO: 289796 - DNA, 122 bp, Homo sapiens
acatccctccggtccaccccagtttttgtctattcttctgtgataggtttaaaactacaccgtttttctaaggatgggaaggtaagatgttaggtgagttattgcttattttaattattaat

SEQ ID NO: 289797 - DNA, 122 bp, Homo sapiens
gggaagggcggttgtgaggcggcagacacgagagagagacagcgagagagcgagcgtgcacgctagacagagagaggcctggtagtagctggggcctgataccctaatccaggaggctggac

SEQ ID NO: 289798 - DNA, 122 bp, Homo sapiens
acggcccggagcgggcgccgccccgccccaccgcgcgcggtctgacgtcacttccgcccgcgacccccttccagacccgctcccgaaaccttgtcgaaggaccaaaggcgaccggtgcaggt

SEQ ID NO: 289799 - DNA, 122 bp, Homo sapiens
atggaagcagaggtgagtgggccccccaacaaagtggtcaccagtccctcatctgcctcccgctgcctgacgcagctccatcctgattctgaaggacatttttggagatgagatcacttttg

SEQ ID NO: 289800 - DNA, 122 bp, Homo sapiens
tccgcggaatccgctaagaccgagactacctgaagtcgctgtggctagcacttccggtaccggccctaaaagcggtcctaccagaaggaagaggaagtgagtccagtagactgcccaggatt

SEQ ID NO: 289801 - DNA, 122 bp, Homo sapiens
cacactcaggaatcgcgcttcaggaatacacaaagcagctgttaaaatatctgggtctggcgggccggccacacagtgggccccttgttccccttgcagacagcggcctcagagcacgtccc

SEQ ID NO: 289802 - DNA, 122 bp, Homo sapiens
agcctctctcctctccccagatccgcgacaggccgcaggcaagaaccagcgcaaccagggcgcgtccgcacagacttggaggcggctgcatgctgctacctgctccagaaggcgtccggtgg

SEQ ID NO: 289803 - DNA, 122 bp, Homo sapiens
tgttctcccctttgtggggagtgtcaaatgctataatagagttctccagtctgaggtcagcgaaagcttctcaaaggagatgatgcctggctaaagggactttctttctgagaaagggatca

SEQ ID NO: 289804 - DNA, 122 bp, Homo sapiens
ccgcccagtcggagcggttctgcgcccctcggagccccgcgggaggcggccgggtgcgcacgcgctcaccacccccacccccggaatccgtcttcgcgattcccgggcgccccagctccagg

SEQ ID NO: 289805 - DNA, 122 bp, Homo sapiens
tctgataaccacttctaggagaaacaatattctgactaatgccattattctacttaatgtcgtgacatcagaacaaccaaatgttgtgactcatagtttgtctcttttgtttagtgcactta

SEQ ID NO: 289806 - DNA, 122 bp, Homo sapiens
gcgggaagtgggggaagtagccagagatctactggatggggcgggtggggctggggcacacgtcggtggccacatgctcctggatacaaatggtcgccttttccccgcaccgccggtggggg

SEQ ID NO: 289807 - DNA, 122 bp, Homo sapiens
gggtggagcccggggcccgcctggtgtccggggccgaggtgacaccgtgggctgggggtgcggtggagcccggggccggcctggtgtccggggccgaggtgacaccgtgggctgggggggcg

SEQ ID NO: 289808 - DNA, 122 bp, Homo sapiens
ccttagcatcaggctcaagcagagcttggctgacaccagctctagacagtgaggcaggtacgtgacaagaacacctacgttttggggttggtgggaaggacaggagttatgcctctggaagg

SEQ ID NO: 289809 - DNA, 122 bp, Homo sapiens
gcccctgatgagccgagattctcccacgaaccctcgggctctggggctcatctgcttgcacgggctctgaggacctgtccagggctggagccgggagctcatcatccgcatccgtgtagggc

SEQ ID NO: 289810 - DNA, 122 bp, Homo sapiens
catttccccccgccagttttagcagacttaggccagcttctcgttagcacttaccgaaaacggggctaaatatagagggcccaaggactgcccctcacccctcctggccccacttgtcctgt

SEQ ID NO: 289811 - DNA, 122 bp, Homo sapiens
acagcgtaaaaacttccaagaacaatgttaaaaaatctgcaaactgtccagttgttcaagcgtcatgaagccccagttttacctgtcaagatgggaaaaaagaatgacaaatgactctagtt

SEQ ID NO: 289812 - DNA, 122 bp, Homo sapiens
taatacgtagagctctagttccttttaagctgctgtatagttttctttttctttttttttcgcggggtggagcagagttttgcttttgtggcccaggctgcagtgcaatgacacaatctcag

SEQ ID NO: 289813 - DNA, 122 bp, Homo sapiens
tgtcctaagtgaattgttctgtttgtaactggaatgtttttgaagtctttggtgttgctccgtgaaaggacatcgccacctggtgctcatgaggtgtctttgcagaacaataaatggcaaat

SEQ ID NO: 289814 - DNA, 122 bp, Homo sapiens
tgggcctggcggcgtgggaggggcagtgcggcgggcggcgcttccggagagcggggcctgcgcgctgctcttccccgcggagcccgcgcagtccgcgcagccctcatcgcaactgggcccgc

SEQ ID NO: 289815 - DNA, 122 bp, Homo sapiens
gcccttacctggctaaaagccgcctttcctctgcgctgctaccagccctgtcacaggtcccggcgctctacctagcgcacctgtcgcgaccaagctgctaacacctactgctcctgcggccc

SEQ ID NO: 289816 - DNA, 122 bp, Homo sapiens
agccgccgggcggactggccctggccgccaatgtgcctttgtttatgtggcttgcgctgccgctgccaacatgcacctaaagtctccgcgcgtcagcgcgcgtcagcggcccgccgcccaat

SEQ ID NO: 289817 - DNA, 122 bp, Homo sapiens
tccagccgcacccggggctgcagaagacgctggagcagttccacctgagctccatgagctcgctgggcggcccggccgctttctcggcgcgctgggcgcaggaggcctacaagaaggagagc

SEQ ID NO: 289818 - DNA, 122 bp, Homo sapiens
tggaggtcactcgacttaggtaagaacagactgactgactgctaggcattttcttcctttcgttcaacaaatatttgtggagtgcctattacgtgccagaagctgttctggacactgagaaa

SEQ ID NO: 289819 - DNA, 122 bp, Homo sapiens
ctgtgcgagctcgagtctggcatccccgcagccgagagccaggtacgccgggcagcgagccgggcctgccccggagctaagccctccccgcctcggggcctcactccctccctttgctactg

SEQ ID NO: 289820 - DNA, 122 bp, Homo sapiens
tgggactggggcagaatcccatcagtgaataaaggctgcagagtgaaggatggtccctggcgagtgtacctgtgtcccagtcttcttgcctgagggcgccttcccacccatgtgaggagtgg

SEQ ID NO: 289821 - DNA, 122 bp, Homo sapiens
aaggccgcgcctcaggaaaacaggatggtagtgaatggcaccgagccgccccagggctgccgccgtcacctcctcggcggctccgagtcgtgcgaggcaggggaccctttgccttcagaaca

SEQ ID NO: 289822 - DNA, 122 bp, Homo sapiens
attgcccgccgcgccgcaatggacaccgtttaacccccccctttcagccggcccgctcgccgggtattttcccaggtagcttagaggggaaccttgtaagacatggaggccgcccttgtgcg

SEQ ID NO: 289823 - DNA, 122 bp, Homo sapiens
tctgagctcggggccggccgggagctgggtacccagcagagggcagcacaggcttgcgttcgtcccggtctgagcgccgtctgcacctgcccggggccctgcagctgcgcagcgcacggagc

SEQ ID NO: 289824 - DNA, 122 bp, Homo sapiens
gaggcagcaataatggggtaaaaataatccaaataaacatgagaacctctgagtgtaatacggttttatgaaggcctgaaaatgtgcactcatctctgaagagtaggaaagaaataagagga

SEQ ID NO: 289825 - DNA, 122 bp, Homo sapiens
acagacccaggggaggcaggaaaatttaggtaaaaggaagcacaaaagttgaagacgaggcgctgccatcaaggctgtggggtttcaggccaagaacaggagctgaggaagccacaagggag

SEQ ID NO: 289826 - DNA, 122 bp, Homo sapiens
ccattggtggaaagaaaaagccggctcgcctttgaaaggctgcctttcttccaggtttgtcgtgaggagctccgcgatgtcctctcaacagagcgccgtttccgccaaaggcttttccaagg

SEQ ID NO: 289827 - DNA, 122 bp, Homo sapiens
aaggttgagtcccgccaatcggagctcacagggggaggctctcccccagctattctgttgcgatccagacaaacaccaccaaaaggaggcaggtttgcgttcaacctgacagctggtcaatc

SEQ ID NO: 289828 - DNA, 122 bp, Homo sapiens
aaggacaaattccagattctccttgtgaagtcttcctttcagttcagaagaaatggaattcgctcttcaacttcaggaagttgaaataaagagttgcttggattttgtgttcacctttacca

SEQ ID NO: 289829 - DNA, 122 bp, Homo sapiens
atgcgggcagtgggctggcgtggatgaggcatggtctctgtgtgcccagcacccggcatacgcccgtcggcacagcccaaacactagcacctcctttcataccgaaaggtaccatgcctggc

SEQ ID NO: 289830 - DNA, 122 bp, Homo sapiens
cccaagggggtggtggcatccagagagattttttatgggataaaaaatagtaagtttgaacgctgacaggaaggatcaaagagagagaagaaattgatgatgcaatagggatgggagagtgt

SEQ ID NO: 289831 - DNA, 122 bp, Homo sapiens
tgttacagagagataatgaaacactcccactgcttggttcctgtccttttcctctgcccacggcccggtcagagctggaagggtcagtctgagagcaggagcagctctggctactgcaacct

SEQ ID NO: 289832 - DNA, 122 bp, Homo sapiens
aagctgagtgctggctgagatcagcaggtgcaccccatttagtgttcacacttctcttaccgagcctgtgatcctgcctccaatccagacttgaccctggttgagcgcgctgacagaacact

SEQ ID NO: 289833 - DNA, 122 bp, Homo sapiens
gagagggaaagcatggtatgacagcaataggggttaggggaatgtgacttgggcagaggtcggactgaacaaagcagagggaaatggcttcaagaagagaggaggaatatgccatccacaca

SEQ ID NO: 289834 - DNA, 122 bp, Homo sapiens
gggctccagagcggggatccccccgcggctccctccctccctcccctgcggagccggctccgccggcgcttgcggctccggaggattccagcgactcgggaggggcgggaggggggtccccg

SEQ ID NO: 289835 - DNA, 122 bp, Homo sapiens
cagctttcgctctccgcataagttttctagcccagggcaagctctcagaacgtgactcctcgtgcctcgctgcccgcccctcgctccccccactcccgccatcatcccttccgcagagttgg

SEQ ID NO: 289836 - DNA, 122 bp, Homo sapiens
gaggatggcagggccacgccccagcccatgggccaggctgctcctggcagccttgatcagcgtcagcctctctgggaccttgggtgagtccacgttgccctgcagccccctcctggcaggat

SEQ ID NO: 289837 - DNA, 122 bp, Homo sapiens
tgaaactttccaaagcctgagttccattatttgtaagaaggtgatgataacaccaccaaccgcattgggttgttggtgatatatatatgtaataattcatatatctgacacataataaatat

SEQ ID NO: 289838 - DNA, 122 bp, Homo sapiens
cctactgagaatcccagcctccccgcatcctttctcaccactgcacaccccatatcccgccgtgggccattagcctcacttatgcaccccggaggaatgatgccacatcattcccgggtgca

SEQ ID NO: 289839 - DNA, 122 bp, Homo sapiens
gtgggagtgggtcaggggaaatgtgtggctcccacgggggccgagtgtggcccccgctgccgtgtctgccccaaggccttcctgccaccttctcctggtaacagatgcccctgtttcgtgct

SEQ ID NO: 289840 - DNA, 122 bp, Homo sapiens
attttgtccccgagagggcccccaacctccgcatcctcttagtggctgtcctggcaggtgcgcgtcctgcggggagttgcgccccgggggctatcgccgagcgggagctgcctcctggaacc

SEQ ID NO: 289841 - DNA, 122 bp, Homo sapiens
gagctacccaggtaccctgacacacacatgcactcgttcacccacgcacttcccacttgccggcctgtgccctgcctagcttcctccaaggcaggtgctcaacatcccacccggccatcagg

SEQ ID NO: 289842 - DNA, 122 bp, Homo sapiens
agaggacaggataggggacctggagtcctgatggaaactccaatgtgctcctcagggcaccgcagccctatttatgcgcagattctgaaggggcttggctgtgaagatgatgttggggcaat

SEQ ID NO: 289843 - DNA, 122 bp, Homo sapiens
taactgcccaggaagcgcaggctgagcctggggccgcgggtgtggccggccacctgcctccgccccacagggctcagcaggtgcctgctggccagcccaggttctgtgaggtggtagcgaca

SEQ ID NO: 289844 - DNA, 122 bp, Homo sapiens
accctagaatgttgctactggggcagtttaggacaggcaatctggtgggagcaatgggtacggggactttttccgctgcagtgacaaagcaagcacactgtcttttcttaacttggggctag

SEQ ID NO: 289845 - DNA, 122 bp, Homo sapiens
tcacatcagagtagcagaggggcaagactggatctgagggcacgcagatgaaaacaggcacgcccatgctgggttttgttatttcacagaataagcactctatggttcccttaaatagtaaa

SEQ ID NO: 289846 - DNA, 122 bp, Homo sapiens
tgtgcatgtcaccgaggaggaggtgagtggggtgggggtgtggggtggggggcatggagccggcgtggaaccagagccctcactcctgcccacacccctcagcagctgcagctgcgggaaat

SEQ ID NO: 289847 - DNA, 122 bp, Homo sapiens
agactgctttatgttctgagcgcgtatgacccctttgcagtggaacagaaactaaaagctcgacggaaactcattctgcaacagtgctttctttgcgtgcatgttggtggctgacaagggtg

SEQ ID NO: 289848 - DNA, 122 bp, Homo sapiens
gaccccaagctgaacagggttctaaccaaacgctcaggagctcccaggtgacagcaaccacgccaccatgaacacaccactgggtctgtactggaatttgggggcctcaaggcttccaggtg

SEQ ID NO: 289849 - DNA, 122 bp, Homo sapiens
ccgatctggaaaaacaacaataacaacaagacagctgctactttcctcagccgtcacacacgctgcccacttcacaactatctccccggccatgaacttgaacttgagagaagaatgagtat

SEQ ID NO: 289850 - DNA, 122 bp, Homo sapiens
tcagatgtgagatccagagtggacacatcaatcatctacacagactggggggtccaacatcgagatcctttcacatcccaaacagttcaggtcttaccctggtctggaaatcaagcacaaat

SEQ ID NO: 289851 - DNA, 122 bp, Homo sapiens
aatgaaggttgaaaaaaacagctcatgtccatacacagaaacagaaactgaaccgaacaccgaaactgaaactgtttgtctcttcctgagaaacgagcaaacctgaaagctactctctcagc

SEQ ID NO: 289852 - DNA, 122 bp, Homo sapiens
acagcatgtcttccccgagcttggtcttgccgcagatgcagctcaatgtgtccccatcggcgcggaccaccttgatctggccgtagccctggcgatccaggggcactgagcggccggagcac

SEQ ID NO: 289853 - DNA, 122 bp, Homo sapiens
tgtaatttgacataattaatgcctacattactgctgataatttagctagttaattaaactcggaggagataattaaggaaaggctactgcttggattgctaattgtttttgtcattatttca

SEQ ID NO: 289854 - DNA, 122 bp, Homo sapiens
tgacttgggcgaggcggagaggacgcgtgtgctggcagatggaggagaaccgagcggagccgagcagctttgccaggagtcttccactactgctaaggacccctcctgcaaattcagactct

SEQ ID NO: 289855 - DNA, 122 bp, Homo sapiens
gcctgcatggctcccagccttgcaggaacagggagacctgctcaagggtgtgtctttccgcgtttgcccatgaggaagcaggcctctgccactgggagaaggtagggtcagaaagacctgca

SEQ ID NO: 289856 - DNA, 122 bp, Homo sapiens
gctcagctgagtttcagggacgtcatcctcctctccctacctggtcactttcccctgcgccgttttgtccaagtgaaaatcaccatgcccacatggcaccttcaccatgagacgcctcgatg

SEQ ID NO: 289857 - DNA, 122 bp, Homo sapiens
agattctgagggagaggacacaagagttcctggatgtccatgggtgtccatctgtaaacccgagcagtttaaagcttctaaatcccaattaggctgctcgaaccaactgagatgccacaaat

SEQ ID NO: 289858 - DNA, 122 bp, Homo sapiens
ttttggttttctcatcattgcaaaccttatcctcccgtttcactgagtggtgctcctatccgcagggttaccaaagatagacctctgagaatcatctttgttcttctcctttactactcctc

SEQ ID NO: 289859 - DNA, 122 bp, Homo sapiens
cggcccagcgactcctcagctcagcctcttgcagactgcggttgtcaagtgccggggagccgagctctacccgcgagcggcagccaatcgccgcgcttccccgaggcgcctcaggaccccgc

SEQ ID NO: 289860 - DNA, 122 bp, Homo sapiens
gctcatctcattccctcaaagaccctcctcagttacagattaggaaacaggcctggggtgcgggggtcaagtaatttgcctaaaatcgtgtggtgaaacaactgctctattgagataaaagc

SEQ ID NO: 289861 - DNA, 122 bp, Homo sapiens
atcaggggaagaggcatctcagggcactcgctgggacctaccggggaataatgtcattaccgtatctgagctctacggctcaggccccggcccagaaccaacatgccccgcagacccaggag

SEQ ID NO: 289862 - DNA, 122 bp, Homo sapiens
ggaatggcagttatccagcaggtctgggtgcatgtataaatagagggatgcgtaagcctgcgtttaatatctagcacataaaccggccaccactgcgtgctacacagtcatgttttcattaa

SEQ ID NO: 289863 - DNA, 122 bp, Homo sapiens
cacaggaccttatgcattgtttgactcctccagagcctttagagaaacttctatcaggcccgcctgctaggcactagtcggggagataatgtagccagggagatgtggcggacagaaagggc

SEQ ID NO: 289864 - DNA, 122 bp, Homo sapiens
tggggacatggccgtgagctctgcctgccgcgggggcgcaccaggggcctggcgacaagacgacacgccgcggtgggtccctgaggcaaccaacccaacaaaagcttcccggcgactcaaga

SEQ ID NO: 289865 - DNA, 122 bp, Homo sapiens
ataataatcgtataacccagttcttacatactaaaatgtgccatccaaacagtccaatgtcgtaaaatttggttataagaaaaatgtgccagggcatttctttccttgctaattctctgtct

SEQ ID NO: 289866 - DNA, 122 bp, Homo sapiens
ttgcttcccatggccattggtctcccatgttcattcccccacagacataacatgaagcaacgtgcaggctgctggctatgttttcagccagttgggcgaataaattactggccaagggaggg

SEQ ID NO: 289867 - DNA, 122 bp, Homo sapiens
gagtccccagaggcaacaggggtacctgagcgccgaggggatcccgagactcggagaaaccggaagagcctgaccccagggagcggagagtttggggtgcgctctcagagctgtgactccac

SEQ ID NO: 289868 - DNA, 122 bp, Homo sapiens
gaaaacaatcagaacaagtgaaattttaagtaaatctgaaaacataaaaattcataaggtcgtttatgttagagtttaagaaacctttagtaaacatcttgtcttaggcttttattttgtgg

SEQ ID NO: 289869 - DNA, 122 bp, Homo sapiens
gtcctttggagctctgaagccaggctttgacttctcctctctagttatgacagtcctgggcggcatcttttcccaaaataaggttgtttcaactccaatgaaaacctattgtttagcaaagc

SEQ ID NO: 289870 - DNA, 122 bp, Homo sapiens
ttagcatttgttgaggctgaccctgcaccaggcccaggataggcggggcttagggaggcccgtctctcgccacgttcccctgctaggggagccccgaggccctctcagtgtcatcctcatgc

SEQ ID NO: 289871 - DNA, 122 bp, Homo sapiens
caacctcctttccaaccatgctcatgtacttgctgggcacgttttacaatttcctgtctccgtgcctttgttcatagtatttcctatggctggaaagttgcttttcctctaccctcccaacc

SEQ ID NO: 289872 - DNA, 122 bp, Homo sapiens
atgaacgtgaagccaccattttagccctgggctacctatctctgaaattattttatctgacgagagaaataaacttctattttgtctcagctactattgttttaggacttggctatgtcaca

SEQ ID NO: 289873 - DNA, 122 bp, Homo sapiens
tacagcaacccagccagatgcagatggccggatgtatagacctgacctggaatcaacctgcgggactgtaggatggtaactctcagactccagtgtgtcccctcatcacccatgcggtcttg

SEQ ID NO: 289874 - DNA, 122 bp, Homo sapiens
taacgtgcattcccagagacaagactgccacctggacacacggctggaaacgggagagctcgtgcctctcagaggagaaaatggagagaatttcaacagtacttatttaaagtttccacctt

SEQ ID NO: 289875 - DNA, 122 bp, Homo sapiens
agagggcaagaggggaacgcgtttccaggtgacgtcgctgcagaggggaagaggcggatgcgtttccaggtgacattgctgcagagaggaagaggaagatgcttttccaggcgacgttgctg

SEQ ID NO: 289876 - DNA, 122 bp, Homo sapiens
gttgctgacgggcggtgggaagagatgggaacctatggggttgaattcctgcccagtcatcggcgcttggctaccccctgctgggcgggaagctcttggcctcagactcacacattatgctc

SEQ ID NO: 289877 - DNA, 122 bp, Homo sapiens
accacctgtccctccgcccacataaaagtcattgaagagcttgtggggctgtgggacctgcgccctctggaggaattccatacacccactcaactctggcaaataggaaattgtcaagtagg

SEQ ID NO: 289878 - DNA, 122 bp, Homo sapiens
caatgggatagggtccaggttcaccaaaggaggcaacaccagcaactgacgaaaccatagcgacggctgaccgaccatgactcgaggtacaagacgtcaaacctaaggctactaatcaacgt

SEQ ID NO: 289879 - DNA, 122 bp, Homo sapiens
ccggcgtcttgtgtgtttcatctcctaggaaacggcgggggcagcaggcgggcctacggccggcccagagagggcgtggcctcgcgggaaatccccgccaattcccgcaggccccgccttcc

SEQ ID NO: 289880 - DNA, 122 bp, Homo sapiens
cggccgaggcccgggccggttcccccgaggcggcgacggagacggctcccggcacttccccgcgccatcttaactgagcccaagcgctgagggcgcctcctcgaccccggtcgtcccctcgc

SEQ ID NO: 289881 - DNA, 122 bp, Homo sapiens
tgagagtccttcagggccagactccgaactggcgccatcccggtgccccgtccctcttggcggccacccaccacttaccggtgcccccggcctcctcggactcttgggaggctgcttgcctg

SEQ ID NO: 289882 - DNA, 122 bp, Homo sapiens
tgctgagtggacccgggtgtaagtctaacgccagttcctgcctgttgcctcttgtgagctcggactgctgatgccccggtgctgctgagcgccgtgcgcagaatggaaacagtgggcctgga

SEQ ID NO: 289883 - DNA, 122 bp, Homo sapiens
tgccaatgccgttccttactggtgtgtatattactgtttttgtccttttcatgcagcctgcggagtgtacctctatagctgtcatttcactcctgtgttttctcggccttgggcgaggatcc

SEQ ID NO: 289884 - DNA, 122 bp, Homo sapiens
ggagcgggcgagttggtaaacagatccggagcgcgtggcgggcgtcagcgcggtggccagcgcgcagaggcgggcgcggaggcggctagaaggtgaccgcggatcccagcttcctgcagcca

SEQ ID NO: 289885 - DNA, 122 bp, Homo sapiens
tagcaatcagcgagactacgtgggcgtaggacccgccgagccaggtgcgggatataatctcgtggtgcgccattttttaagccggtcggaaaagcgcagtattcgggagggagtgacccgat

SEQ ID NO: 289886 - DNA, 122 bp, Homo sapiens
ccatctgcccatcccagaaattcctgcctttggggtggggacaggcggagtgaggctgctcgggtcacactctccgctcctctagcttgcagccctgctctctcctttctgggggaggccga

SEQ ID NO: 289887 - DNA, 122 bp, Homo sapiens
gtaccaagagcacggcgtggtcacccacggtttacgtgcagtgcggctgcacacggcccacgtgtccacgagcagcacagccccagtgaggctaaatgatctgccgaacctgttttccttag

SEQ ID NO: 289888 - DNA, 122 bp, Homo sapiens
gtcctggttgcccctccactgagagttggctgaaacaaagaatttgtcctgtatggaaaacgggagactttgtacagtggcctctctaaaagtacaaaacattcataagagaaacctgcata

SEQ ID NO: 289889 - DNA, 122 bp, Homo sapiens
caaagactccggttccactggcctagggtggaacccaggcatcaggagtttacagagcaacgcagatgattctaatgtacagccaggatggagattcactgcagcagaccctggcacacaga

SEQ ID NO: 289890 - DNA, 122 bp, Homo sapiens
ggcacccacttgctgcagagccggcactgcactggggttcttgggggcggctcctccagacgtctctgcgggttgtcgggtgctgccgagttgggttgggggacgctacaggtagtgggtcc

SEQ ID NO: 289891 - DNA, 122 bp, Homo sapiens
tggcggaagtcgcccagcggggcgctgatcatctcggccgtgaggtccgctcgggaacggcgcttggagtgcaccgagctggacaccagttgcttgaggattggcatcttgctggatgggcg

SEQ ID NO: 289892 - DNA, 122 bp, Homo sapiens
aacctttgtaatgatagaaatgtatatctgcactgtcctatacagtagccactagtcacacgtggttattgagcatttgaaatgtggctagtttaactgaggatctctctctctctctctct

SEQ ID NO: 289893 - DNA, 122 bp, Homo sapiens
ccagaaattgggcggcagtgaggtcgccgcaaggcttcccgtggaccctgcaaaacgtggcgtgggcattgcacaccattgtactgtatggaaacttctgcagaggttagcaccgtgcctga

SEQ ID NO: 289894 - DNA, 122 bp, Homo sapiens
gaggtcaagcagctcctggaaccgcccgcaggactagggattcccgcccccaccccccaacgcttccttctgtcaccccatggccgttctgcttcagggcgactttgtgaagaatgtcccga

SEQ ID NO: 289895 - DNA, 122 bp, Homo sapiens
gtgaggctggagcgcggcctgcctgagtctcctcctgtggtgacaccgagtgcggggatccgggctcgggagcatttattagttcttttacccaaagcttggtcaggagccctgagctgcga

SEQ ID NO: 289896 - DNA, 122 bp, Homo sapiens
ttggccgaagaccagagggtggattttggatctggatcttgaagggcgaactgctagtgtcgccctggtggaaacactcagttcaaatcctgctagcatcagaaaatgcacgattgaggatt

SEQ ID NO: 289897 - DNA, 122 bp, Homo sapiens
gcgagcgaccgttttgaggcagaagcccgatggggcccgtgtccgagcttagggaggggccggagacgcaaacacaggtctcccaggaagcaggcggcgtcacaggtcgctctgcaggcgcc

SEQ ID NO: 289898 - DNA, 122 bp, Homo sapiens
gccagcggcggtcgagccctgtgtgagggaggggtgtgtggcccagggagggctggcgggcggccagcagcagaggcaggctcccagctgtgctgtcagctcacccctgcgctcgctcccct

SEQ ID NO: 289899 - DNA, 122 bp, Homo sapiens
agcctactgactgtctagaatcactcaaggggactggcctatctttacccagagtaggaacgattcttccaaagaccccctctccctttgaatcattccccaatgaggatgcgttctgaatg

SEQ ID NO: 289900 - DNA, 122 bp, Homo sapiens
atgggtcagcacatgcaattttatacccgacaggactatataatgtgggttttaactactcgttcctcatctgtcttaaacatctggccaggatgcgccacccggcctcctcgcagatcctt

SEQ ID NO: 289901 - DNA, 122 bp, Homo sapiens
tggagcacgccagaggcagacgagggcaggactgcggctgtaccgtgggcctggttcagacggctggacgtgcctgtctcaccgtcagcagaggaccttctggcacattctatgtgtgtcta

SEQ ID NO: 289902 - DNA, 122 bp, Homo sapiens
tcattctcctgctaaattttcctagctcgcccacggcgttagtccgcccgccccctgccccgggaatctgaggatgtggttctgatgttctggtccagtcctcgtgcatccattgtctgtgt

SEQ ID NO: 289903 - DNA, 122 bp, Homo sapiens
ttgccgcctccggagtccactgcagaggggcagagtgaatgccggcggccaagtggcctccgggacaggtcctggagccctgctggactcagggtgggtggaggctgtgcctgtggacggcc

SEQ ID NO: 289904 - DNA, 122 bp, Homo sapiens
ctatcttcgaaaaactcctaatctctgagccttcaaggagattgatttgagtgataactccgtctcccacttagcatggctggcctcacatcaactgaaatgccatggtctctgttaattga

SEQ ID NO: 289905 - DNA, 122 bp, Homo sapiens
ccctaccttccctccgaggctgggttcttctaattcctgtagattgcagagcgattcctgcgaatgtgccttctttcattcattctagttcattccacagataattcagctgcgcgcttcct

SEQ ID NO: 289906 - DNA, 122 bp, Homo sapiens
cagctgaatggacccacagagaagctgcgtggaaggaactgtgaatctgccagcacctaccggaacagcacaaaactcagagaaccggaagcagagagtgcaggaggcagaagtgatgagag

SEQ ID NO: 289907 - DNA, 122 bp, Homo sapiens
cagggtcagtgaggccccgcagcagagccctggtgatgaaagacacttttgtatggtacccgaaggcttaacttcactcctgattgtgagtggattgtgtgtggtagtggtggagcccttgc

SEQ ID NO: 289908 - DNA, 122 bp, Homo sapiens
tctcagtttttcttcctttgaagacttttccttcagagatttctccttttctgctgtattcgaacagtctttctcttcttggaaagatctgctgatatctttgttcatgcctttgattctct

SEQ ID NO: 289909 - DNA, 122 bp, Homo sapiens
gtccccgggccctggctggtggaggtgttgtggggcgcacgtacccaggctcaggtgaggcgagtgggcagccggggctgcagctggcgctggccattgaggagcttctgcgcgacagtgcg

SEQ ID NO: 289910 - DNA, 122 bp, Homo sapiens
aatcccgcggggtcctgggaaccctgagaagcgcagagccatccttgcctcagaactttccgcagacccttcgcgatctgcaatctgggggtgaagcaacatggatgcagccagccaaggcc

SEQ ID NO: 289911 - DNA, 122 bp, Homo sapiens
gacatatatatatttcacacacaagcatgcacacacatgtgcacagaagacagtgacccacgttcacattaactttttcaggtctgacctgctgttgtgttccaagtcatttacgttgagat

SEQ ID NO: 289912 - DNA, 122 bp, Homo sapiens
agaaggcttttgttttatcttcctttgaagatgcagatatatcctacttagcggcgacgacggccagcgactccctacaggctgccagtggtgcggacctgggcgggtgccggagcccggat

SEQ ID NO: 289913 - DNA, 122 bp, Homo sapiens
tatctcagcgatgggcacgcgagcgccagcccgggcgaccgcgggggaagaagcggtccacgccacctcaggcccccgccccaggctctgccagctgggggtccaccgcccgcccccggggt

SEQ ID NO: 289914 - DNA, 122 bp, Homo sapiens
ggcacaaaggctggggtgggcgtgggctgggagccggtgtcggctctggcccgggcctggcggagcagccttggggacccagcacccgccctgtgggctcttccccaaagccccggactttt

SEQ ID NO: 289915 - DNA, 122 bp, Homo sapiens
caggaagcgctgagccgccaaatgcgaggcacacacggggcacgggaggagccgggagagcgcaaccaccgaccacagagcagcccgcatatgaacaggcacgcaatgagtcccttcaaagg

SEQ ID NO: 289916 - DNA, 122 bp, Homo sapiens
cccgccaaattatccttaaaaactctgatcccgcccttcggtggaaaagttcagtctgaacgtttagcgagtgctgcctctaaagagagcaatcactacacttacggctgagactttgcgct

SEQ ID NO: 289917 - DNA, 122 bp, Homo sapiens
gagaagcagcattacatttgagagagctggtcacaacccacagtgggtacctctcaggaccgtaatgcagggatccaagagggaaggaagctgtgctctacccatgaaatctggtaatcgtg

SEQ ID NO: 289918 - DNA, 122 bp, Homo sapiens
ttgctactgggtgtgggttttttgccctccccttcaaatcatgttagctccctgtgacaacgaagctgctgggttttgtagccagccttgcccaggaactattagatgtactggtgcttggg

SEQ ID NO: 289919 - DNA, 122 bp, Homo sapiens
cggagggtgtaatattgcaccaagttatgcaaaatgatagccttgggttgggcacggtagcgcacgcctgtaatcccagcactttgggaggccaaggccagtggatcacctgaggtcaggag

SEQ ID NO: 289920 - DNA, 122 bp, Homo sapiens
ggtgagtgttacagctcttaaggcggcgcgtctggagtcgttcgttcctccttgtaggttcgtggtctcgttggcttcaggagtgaagctgcagaccttcgtggtgactgttacagctcata

SEQ ID NO: 289921 - DNA, 122 bp, Homo sapiens
ggacagaaagtggagttttagagtccaaaatgctggtgcctggggtattttctccagattcgtctgcatagagcccagcctcgtcctgcagcttcccctgtgttcctagaggagccaggaaa

SEQ ID NO: 289922 - DNA, 122 bp, Homo sapiens
tatcaaatttaactgggagtcttggatttttgtttgataaatctggcaagcctttccttgcgtcagttttttttcttgctgtcttcatcctgcagcagagactcagaacctcagagtgggaa

SEQ ID NO: 289923 - DNA, 122 bp, Homo sapiens
gctccggaaaccgctgaattacagccccttcagccaatcctcgcccagccccagcctggccgaggcacgccgtcatgcataattcatgaaaggccagctcgttcggccacccagaggtccca

SEQ ID NO: 289924 - DNA, 122 bp, Homo sapiens
tgcatctgtaagtatccatagagccatggctgttcagccttccgcttgtggctccacccccgcccttgttatcatctccccatccccagttgctgactgttaacaggtggtggcaggaagga

SEQ ID NO: 289925 - DNA, 122 bp, Homo sapiens
tgcagcccgagcgctacgagctgtggaagcagggcaaggacctcacggtgctggaccacacgcggcccacggcgctcaccagccccgagctgagctcctggagtgcatcccgggcctcgctg

SEQ ID NO: 289926 - DNA, 122 bp, Homo sapiens
gagttctcccctttccaagaaccagccgaatctccctcccgcagatctgaggggcagagccgcccatccggcggcgccgggccacttctgggcgcgccacccgccgcccgcccaggctcggg

SEQ ID NO: 289927 - DNA, 122 bp, Homo sapiens
ctggggtgagagggattcttccggatgtggccgtgcactgcccagcaggcctggagtgaacgtctgtgtggagtccgggctcccatccagcatcccttaagggtcctgatggctggagctgg

SEQ ID NO: 289928 - DNA, 122 bp, Homo sapiens
ggcaggggaaaggcagaggaggatgaaagagacataaagccagaggcagagaggaaaggccgtgtctattaggtctgtgagatcttcaagtttgtttggggagagccttagctccctggaca

SEQ ID NO: 289929 - DNA, 122 bp, Homo sapiens
cccgcgtccgcagccggcccagctggggagcatgcgcagtggccggagccgggttgcccgcgccccagcaggtagctgtactgcaactgtcggcccaaaccaaccaatcaagagacgtgtta

SEQ ID NO: 289930 - DNA, 122 bp, Homo sapiens
aaggcgacaagagatcacaggctttctaggtctaccgcgcaccccgatgacgtcacgcggcgacgttctctgacgtcagagtttcctgcccaccatctttgtccctggcaaagtgggttttg

SEQ ID NO: 289931 - DNA, 122 bp, Homo sapiens
ccgtgatggagcgacagccccaggctctcagcgacggccgtggccttccagggaagaccccgcctcgccccagagacaccatagcccaagctgctgagccttctgccaccccagcccctgga

SEQ ID NO: 289932 - DNA, 122 bp, Homo sapiens
aagttctgttggggcctatcaccaaggaagttaggtcacttctctaaggttccattacctcggctccttccttcaaagagctccctccccaaaggtctctctgagccattgactgctcaccc

SEQ ID NO: 289933 - DNA, 122 bp, Homo sapiens
cctagcgggcgcggtcattgtcctggcagagcggcgagccggtgagtgtggctgcggggtcgcgcccaccctctacctgtgccgggggccggaacctggccccggggagggcgcggcctcgg

SEQ ID NO: 289934 - DNA, 122 bp, Homo sapiens
ctcttccacctctcctcctcctcctccttctcctccacctcctcctcctcttcttgctctcgctcctgttggttccagcgtgtattatttttaatactgatgcatatgtaaaggtatatttg

SEQ ID NO: 289935 - DNA, 122 bp, Homo sapiens
cagaacaacactgctgtgtcccataataacgctgctgtgtgccacgacaacgctgctgtgcgccacgacaacgctgctgtgcgccacgacaacgctgctgtgcgccacgacaacgctgctgt

SEQ ID NO: 289936 - DNA, 122 bp, Homo sapiens
ggtggtccgaggggcggccgcgcgggggcgggccggaaggcgctcgccaagccgtggctgcggctcattggtccgggcggacatcgctcactcacatatccaatgggaggcggccgggtaga

SEQ ID NO: 289937 - DNA, 122 bp, Homo sapiens
tggccattcagcccaggagttgcagccaggagcagatgtcccttacccaggtgctggcgtcgccactctagcccaaagggagggggacccggagccagagatgaggcggcctcggaggtggg

SEQ ID NO: 289938 - DNA, 122 bp, Homo sapiens
cgaagctcttaccttttagggtggctttcttaaggaccttcatggcgtagagctgcccagcgtcggaccccttcaccttcctcaccaggaacaccttagcaagagaaaacggaacatcagaa

SEQ ID NO: 289939 - DNA, 122 bp, Homo sapiens
cctaggcagagatggtaacgtaggcaccacaggtaggcagggattggtacccctccctggcgtcagaaagaagccaaacaaggagctttctgcagaatgaaacctcctttcctttcagaagc

SEQ ID NO: 289940 - DNA, 122 bp, Homo sapiens
atgggagagggcgtgtgagacccaggccttccggaggcttccagagttaaagcactcccacggacaggagacagaactgcctgtggagaattgcattatagccaagcgccgggatatatatt

SEQ ID NO: 289941 - DNA, 122 bp, Homo sapiens
cacaaaagggagtggtggaaccttggcaagcctgtgagttaagtccctgaccgaggcaggcgccactcggctttagcccatactggcaaggcaggccggtgctgtgagggcttccaaatttt

SEQ ID NO: 289942 - DNA, 122 bp, Homo sapiens
ttggacttctcatctgtatcaccagaaactcaaaacactggaaagctacttagactttgtcgagactaggactagtattccaagaattctaaacctaaccacaatatcattcatacacgaag

SEQ ID NO: 289943 - DNA, 122 bp, Homo sapiens
ttagttgtcatgcacatgtaacactttcattcacttcttaaaggtgatttacatgagcctcgcacagctgagacgtatttcgctgcttactaaaccttgaatgatggtgcgtcattctcatt

SEQ ID NO: 289944 - DNA, 122 bp, Homo sapiens
aatacatttttaatttcctttactgagtggtttgcgacgtggcagcagaccctgtgtgtgcgagcctggttactgatacaaaaagtaaagaatatatttatatttatatatatatatatgta

SEQ ID NO: 289945 - DNA, 122 bp, Homo sapiens
agctttttaaagggcttaaaggatactgaggtataaattttcagacctgtacagtctgtacgtgtaagactaggaagaaatgagtgaaacccaatacaggctcatgcatgggaacacatgtt

SEQ ID NO: 289946 - DNA, 122 bp, Homo sapiens
tggccccctggccacccccagcctcgccacggctcgctccccccggggtcaggccgttaccgccgcgcgctccccccgcgcgccgccccctccccctcccccgccctcccccgggcccgggc

SEQ ID NO: 289947 - DNA, 122 bp, Homo sapiens
ctgctttggcttctcaaagtgctgggattacaggtgtaagccaccatgcctggcctggtacgaaatatttaagatacagttgttaccaagtactgaaatataggtatatctcttgtgttgat

SEQ ID NO: 289948 - DNA, 122 bp, Homo sapiens
ccacaattctcttgaaggtcactgaagacttccatgccactaaatccagcagatactttccgatccttttcttgttgacccttggcagcatttgccaccactgcccccttccaggcttttga

SEQ ID NO: 289949 - DNA, 122 bp, Homo sapiens
gctggggtgacaaatggaaaatcggcaacagggttccgattttctttgccacaggggacccgcctgttgaaagctcgcttcaaaatagaaacggcagcatctcaacacacttcttgcacttc

SEQ ID NO: 289950 - DNA, 122 bp, Homo sapiens
tatccgggccgacccccgcaccccctacttcccttgccctcgctgctctctccttagaggcgactctttggggaagggccagcaatcccgccttccccggccccagtagtcacccactctcc

SEQ ID NO: 289951 - DNA, 122 bp, Homo sapiens
ctgacccaggctgagcgcgcacagcagcgccaggccgcacagggcccgaaacgcgcccatcgccccgtgctgtgccatgctcgggtttcaagagcccacagccagttggacacgccccgtcc

SEQ ID NO: 289952 - DNA, 122 bp, Homo sapiens
ccgagccgcctctcacccggcgaccctggcccagggtccctcgcggggtttggagaggcgcggtgtggggaggcagggcgcccacactgctctccgcctgcactcctgtcacctcctccagg

SEQ ID NO: 289953 - DNA, 122 bp, Homo sapiens
cctcctcctcgccctcaccttggaaagcacgtccgggttggggtcgttctgcagcagcaccgcagccgtgcgcgtgtcgtcgttgcgggccgcgatgtgcagggccgggaggcgcaccttcc

SEQ ID NO: 289954 - DNA, 122 bp, Homo sapiens
gcaatcaatcctgtaatctgaagccttaaaacttaaacatcttcacaagatgtaaagtcacggctcagaagggggccaaaatgcataccaatacagatccctgcgctcactctcactcactg

SEQ ID NO: 289955 - DNA, 122 bp, Homo sapiens
gggatgcgggcggcggatggagtccctgagctggggaggactgtgcagctccctcggtgacgctgagcccgtctgggcattcatgcgatacgcagcgctctttactgcgggtcccatctaca

SEQ ID NO: 289956 - DNA, 122 bp, Homo sapiens
ctattttctgtcttaggacgttttgacatctaggggagcctcgcagacactgggagagaccgccccttccagagctggctagttcccaaagacagtaagtggcttccttgggccatttacca

SEQ ID NO: 289957 - DNA, 122 bp, Homo sapiens
cctggctccaggatgcagccagcttctcttcaagaaactcaaccccggcttgtgttaccccgagggtgtttccaggcgtgcgaggggtgtgaggggtgggactgcacagcgcgtcccagcct

SEQ ID NO: 289958 - DNA, 122 bp, Homo sapiens
gcaactgcacaaagctgttggaagcagatgatgctgtctagactcctggatatgataaaacgtttcagcagcagcagccctcagttgtggcttaaccttcattttgcccttgaccaagagcc

SEQ ID NO: 289959 - DNA, 122 bp, Homo sapiens
acacccacagctgtggccaccacagtgctgggggctgagcagtttgggaatggcatcacccggccgtgaggggctgcaggcacagctggagcaggtacaggaggaactctgtgctctttctt

SEQ ID NO: 289960 - DNA, 122 bp, Homo sapiens
agaaactagaaacaggaacttgctagtgggaaggcactaccacccccagcgctgaagagacgcaatgagaaaacatccttgtgggagcccagtgagagctggagctgaggagaggaagacgc

SEQ ID NO: 289961 - DNA, 122 bp, Homo sapiens
acttgtttatcatttgtttccagcaccctcatgtaagcaccaagaccacaaggctttgtccgtcttactgaccattaaaatctccagtgcctagaatggtcgcattgtagatagatgctcaa

SEQ ID NO: 289962 - DNA, 122 bp, Homo sapiens
agtaaaggaccggtctgaaacctacaagaacaggtgtcgggggctgcaggctgcgggctgcgggaggaggtgggcgggtggggagaagcacccccttcagagttggggcttggggagtgggg

SEQ ID NO: 289963 - DNA, 122 bp, Homo sapiens
tatccatcctccggattcctacctgcttagctcgtaacagcctcaaactgcagagtcctccgtgactcagctcggcccagtctacgcgggaaaatcaccgggcacagatgtttgcaacttgg

SEQ ID NO: 289964 - DNA, 122 bp, Homo sapiens
gctatttttggtcatccttttcaattcttcgcttatttcatcacttacctcctatctgtacggtatggaagaatcttataaaacaaagatttatctccgaagccctctcccaacatatcttc

SEQ ID NO: 289965 - DNA, 122 bp, Homo sapiens
agactctcctctttacgcctttgacatgcaagacccttgtagatatggggaggtgtggagcgtggagccccagaagtcaccgacccagcagacaggctcaggctgtgcacatgggtgtgggc

SEQ ID NO: 289966 - DNA, 122 bp, Homo sapiens
ggccgatgagccagccatggaagtaggggttctcctcatggctgcagcggctggcggcggcggcggcagctgcggcggcggcggcggcaaacgggtagccctcgtggtgcaccaccgggtgg

SEQ ID NO: 289967 - DNA, 122 bp, Homo sapiens
tgccagctgtgccgtctcaggctggccatttagccgctctgtgttcgggtctctcgtccacgacactgggaaaaaccaagcccatctcacgggactggtgtggagattttctgaccttcggc

SEQ ID NO: 289968 - DNA, 122 bp, Homo sapiens
ggtaacagggagtaaagatgactttcaaggtagccaaatgcctcaccatctaaataatgacgcccatcaatgaacaaacaagattcccactgtcccatctcctatccagtgaaacacagcca

SEQ ID NO: 289969 - DNA, 122 bp, Homo sapiens
aagaggtatgagaagcagctggcgcagatcgacggcacattatcaaccatcgagttccagcgggaggccctggagaatgccaacaccaacaccgaggtgctcaagaacatgggctatgccgc

SEQ ID NO: 289970 - DNA, 122 bp, Homo sapiens
ggtatgtacctgtgtggagagcactgtgacccagcaaaacacttcagggctaagaagacacgaaacggtggcatttgccatctgacccggcaggcgctggggcagatgaagctccagttgga

SEQ ID NO: 289971 - DNA, 122 bp, Homo sapiens
ctcaagtgatccgcccgcctcagcctccgaaagtgctgggattacagacgtgagccatcgcgcacggcttagtcccaagattttagagccaagaagcgtttgcaggaggacgtagggaaaga

SEQ ID NO: 289972 - DNA, 122 bp, Homo sapiens
gtaaatggcacacctgacacctggtcaatccaatctcctgggccctatgtgaatcaaatacggcctccttaagcccctctataaaatggaccacatctctccccaaacccagaaatccgctt

SEQ ID NO: 289973 - DNA, 122 bp, Homo sapiens
cgtggccggcctgctttgggaggggaggggcttcccttacagtgctgggctctgccaggacggctgtggggtcgccttacctcggggtatccactctgcagtcgaccagttcccgccaggag

SEQ ID NO: 289974 - DNA, 122 bp, Homo sapiens
ttgtagaacgaggcggtgataacattcttcggtagtgttatcttgaacttcagaagaaaccgctcaactctttagcaactgcttgagggactagcctgtctctcagggttccatccaggctt

SEQ ID NO: 289975 - DNA, 122 bp, Homo sapiens
ctttaggcaagtggcctggggcctgccaagcagcgccgggtccgggtaggggccgggggccgcggggaactttcctcggctgcaccagagacaatgccgggagggcgccccatcggcggggt

SEQ ID NO: 289976 - DNA, 122 bp, Homo sapiens
cttaaaatgcgctcatagaaacggtaatacgatgctctttacttctttaagtcaaatccacgttcctccgggctgcatcctgaagaattaaccgtaggagaaacaataaaggtcctcccgga

SEQ ID NO: 289977 - DNA, 122 bp, Homo sapiens
tggtgtatgattttaccaggcggcactgcttgtgcagggtctggttagtcagatcttccacgtccgagtcttccatccagttgacgctgtaccagtcccccaggtacgtcgacctcttctca

SEQ ID NO: 289978 - DNA, 122 bp, Homo sapiens
gtctctggggcttgctgtcattccttcatctggccaaaaaatgcttcttcctgaaagccccgagtgaagcattctcctggttctaagtacagttcattagctccccggtttcccttttctcc

SEQ ID NO: 289979 - DNA, 122 bp, Homo sapiens
ccctgttcctgtatggtgaggccgcaccacaagccaccaccgccgccgccttctgcgcaacgccaaccgcccgccaaaacggatccttccctgcgcctgcgcaaccaatcctgggaccggac

SEQ ID NO: 289980 - DNA, 122 bp, Homo sapiens
tgacatcttagtcatcgcggtccaaaatttacgcacgcgcctttgagggctcacagagcccgtctctcccggacgaatctcatccaatcagagccagccaggaagccgaggctcagcaaggc

SEQ ID NO: 289981 - DNA, 122 bp, Homo sapiens
ctgactgcccacacaaatgaatgagcattatgcctgcctggtggttattcagcccctgcccgagcatgtccggtgacagggagctgtgtcctgccggcctcgatggcttgttaaggaagggc

SEQ ID NO: 289982 - DNA, 122 bp, Homo sapiens
aagcaaaaagccagaatttaggggaatgtgattccacgctcagcaaacaggggcacctaccggaagtcctggaatgaaaatcattacatagtcctgggtcaacctgcaagagagggagaagc

SEQ ID NO: 289983 - DNA, 122 bp, Homo sapiens
acgcctacgtactcagtcaccagcggaaccctctccaccaggctccgcgtcgaggccctacggggcgtcaatacgcacgcgtactttgtgtcccaggtagctcgtctcttagccatgtacgc

SEQ ID NO: 289984 - DNA, 122 bp, Homo sapiens
gctcaccgcgccgtgacatgagagcagcacgccgcctctgtggtcctcctcccagtgaatcgtggtgaagatcaggcacgtccaggcgaggggcgtgtcacgcaacgccgggcccgccctcc

SEQ ID NO: 289985 - DNA, 122 bp, Homo sapiens
tatgggcctattaaggttttgttatgaaaacaataggaacttaaatacccatgtgaaatgcgccttgcattgaccaacacgaaaggaggacgtttggtattttaaaatagtttattttatgg

SEQ ID NO: 289986 - DNA, 122 bp, Homo sapiens
tctgattggctgctggtgatgtaacacccatgtcaatacttcccagtgaacgcacgtgttcgaccttttatttaaatttccatttcatcacagcaataagacactcggggcggtgcattttc

SEQ ID NO: 289987 - DNA, 122 bp, Homo sapiens
agtgccagacagtgggcgcaggccagtgggtgcgtgcaccgagtgcgagccgaagcagggcgaggcattgcctcacttgggaagcgcaaggggtcagggagttccctttccaagtcaaagaa

SEQ ID NO: 289988 - DNA, 122 bp, Homo sapiens
ggccgttcggcaggtagggccagatggtcccggctcgtccctgcgggtggggtttcccaccggcggaaagcgcaagcccctcccgttctgtccagcgcgctgcccgctgccttaattataag

SEQ ID NO: 289989 - DNA, 122 bp, Homo sapiens
ctcccgcggagcgcagaactagtaccggatccccagccgcttctgaccacacagacggggcggacctgtgtgagcactcactaactgtcggggctggagctgggcatatggggaaactgggg

SEQ ID NO: 289990 - DNA, 122 bp, Homo sapiens
tgctactccagccacgtgagttttccgcctgtcagccaagcaaaatggccttcctgcagtcgcacggccctttggtctctgctcagggcttcggggaccctttccagccattgccctgcacc

SEQ ID NO: 289991 - DNA, 122 bp, Homo sapiens
cgttcagcgcacctccgccatcgactactggaagaccaggcgcacacgtcactacttccgcgcgcccccattggctggtcttcacgagggcccgccctcgccgtcccagctggcctttcggg

SEQ ID NO: 289992 - DNA, 122 bp, Homo sapiens
gccagctgcagacccaaagtccaggcaagttggggctttgaggggcacagagggaacccccggtcatacagtgaagagagcagcaatggacggccacacagtactgcaacatggtgggctcc

SEQ ID NO: 289993 - DNA, 122 bp, Homo sapiens
gggtccttttagcaaagcctgcttcctttcctcgctctgtgtgtggaggtttgatctctgcgtggggtatggtttccacgtgctggacatgattgggcaaaaagtcaacaaaacaggctgct

SEQ ID NO: 289994 - DNA, 122 bp, Homo sapiens
cctgttccattggaagccctgtatgccaggggccagagtccaggaaccacgggagtgccccgtggcttacatgctgtggctctggcctgcctatagggcctggaaaagacccaggccagggt

SEQ ID NO: 289995 - DNA, 122 bp, Homo sapiens
cagtctccattctgaatcaggcctgtggacaccaccccagccttctcttcctggctgttccggaaccacctgacttcaatgctgcctggatagaaaccattcacagagcagaccaggaggtt

SEQ ID NO: 289996 - DNA, 122 bp, Homo sapiens
catcagcagaaagcagaaattatttagaagctcctcacctgtccccctgagttaaatcaacgttgcacttgcttgttatttccatgtatttcaatagctcccagaggagtagttccaagaat

SEQ ID NO: 289997 - DNA, 122 bp, Homo sapiens
agtggaatatttgggccccggagccacaggaatgcgctggaaatctaggagtggaatagccgggccccggagccacaggaacacactggaaatctaggagtggaatagctgggccccggagc

SEQ ID NO: 289998 - DNA, 122 bp, Homo sapiens
ttactattcctggagagagacaacaggaaaccagaagataacccaccaggaaccaccacccgtacagccagctacacatcaaacagcctgatgggcaattctaaggcaggcctagttcagat

SEQ ID NO: 289999 - DNA, 122 bp, Homo sapiens
tgaaggcggccgggtcgatgtaggcgctgatgtcgatggacgtctcgtgctcgcagatgccgcccagcggctccggggcggcaggtggggcgggaggctgcgcggggcccgcgccccgggga

SEQ ID NO: 290000 - DNA, 122 bp, Homo sapiens
tctccggctgccctaacgccctccagctccaggtgaggtcggggagctggggccaaggctcgtgagcgcccctcacccccacgccccccggccgcgggcgctggagccggcggctgcgagca

SEQ ID NO: 290001 - DNA, 122 bp, Homo sapiens
cattagcatctactaattctgaccctcttatagcacacatcctaaccatgaagagttggtcggagcactttcaagacgtcacctgaacattatgtcacctctgcgggatatatgcatctgtc

SEQ ID NO: 290002 - DNA, 122 bp, Homo sapiens
cagagcctacagaacacgaagaaaggactccactggccaatgagaacaccacaccatccccggcagagcctacagaaaatagagaaaggacagccaatgagaacaccacaccatccccagca

SEQ ID NO: 290003 - DNA, 122 bp, Homo sapiens
ggcgggcccttgttcccatcacttgggggatgcggagggtactggagacagcagcaggaccgcggacactcgcacgtcttctgggcgcccccagccccgcgcggcgcccaacatcgccctcg

SEQ ID NO: 290004 - DNA, 122 bp, Homo sapiens
ccttgcatggccttgcccaatgcactgccatctgcctgcatgtggaaactatgcaccctccgcctcctctttcatatcagagtgtcacctctcatagtccctttctgactagttttctgaca

SEQ ID NO: 290005 - DNA, 122 bp, Homo sapiens
tgtgacaggtcattttatatatatattactatacaaaatctggcagggcgcagtggctcacgcctgtaatttcaagactttgggaggccgaggtgggcggatcacttgaggtcagaagttcc

SEQ ID NO: 290006 - DNA, 122 bp, Homo sapiens
cacacgccacgtgacctgatgcgggcttcgtgaggcggaagtgacgcagtgttgtcgtctcgtaggcttgaaaggtaggtgcccgacattagggactgtcgcagcccggggaattgtcccca

SEQ ID NO: 290007 - DNA, 122 bp, Homo sapiens
aactgaaagaacaggctggaggggaccgaacagagcctggcacgtgctccaggagcgcctcgggggctgagcgctggtagaggcggcctctgtctcccgatcactctgcaacacaacgggat

SEQ ID NO: 290008 - DNA, 122 bp, Homo sapiens
gccagggccgccactgccctccttggagcagcgttgcatggctccacgaggaccagggttcgaaaatttgaggtgctgtctctcaagctcggagtttgcgggagcccttgccccgccggctg

SEQ ID NO: 290009 - DNA, 122 bp, Homo sapiens
acaatattttgcgatgtttggaggggaagggtctacagcgttcaccacgttctcaaaatgcgccatggccaccaaagaggtttaaaaaaaattactaaaagacctgctgccctatgaattag

SEQ ID NO: 290010 - DNA, 122 bp, Homo sapiens
ccccgctgtctgtggccagcaaggcactgcagaaactggcggcgcaagaggggccactctcgctgtcccgatgcagctccctttcctcgctgtcctcggccggccgcccaggccccagcgag

SEQ ID NO: 290011 - DNA, 122 bp, Homo sapiens
ggtcacgtggcctccggccagggcttgcgaagccggaagtgtcctgagtctcgaggaggccgcgggagcccgccggcggtggcgcggcggagacccggctgggtaagtgagacggccgcggg

SEQ ID NO: 290012 - DNA, 122 bp, Homo sapiens
ggtgccggcgtttccgcgccctccttctctcctgcgccgtgacctcaaaagggcggcgggcgggggcccctccactccagccctgtcgatcctatttctgaagggccttagggaaggagatt

SEQ ID NO: 290013 - DNA, 122 bp, Homo sapiens
gggaaaaagcatcatgatctctaagctcatatcctcacagctgctgggccaaagaggaagcgtcctccctgtctctcacttgaaaattctgggagggacttgggttgagcatccctgctgtg

SEQ ID NO: 290014 - DNA, 122 bp, Homo sapiens
aggacgcggcgccagagcccagctccggctagttttcccgggggcaggtgtagccttgggcgcggggccgggggaggggcaaggggcgggcgtggggttggactgggacgtgggactcggac

SEQ ID NO: 290015 - DNA, 122 bp, Homo sapiens
ttctcgccgggcgcgaagatgggggtcgcgctgggggcgctcatgctgcaggctggacggcgacccgacctcgatcgcgcgccgcccgggcccgctccctgcaggggcttgtgggccggggg

SEQ ID NO: 290016 - DNA, 122 bp, Homo sapiens
acacaatgaaatcgcacagagcatgggggctattggtttactctgctgccttaaacacgccggcttaaacagagttcgcgcactgacctctctagagtttgcctaataggaattcaatcaag

SEQ ID NO: 290017 - DNA, 122 bp, Homo sapiens
ctgggattttattatcttaagaaccaggtctttgagcaccaataacatttaggactcaaacgttttcaaaagtgaccagagtcccacatcttccttactcccaggagcttggagcacttccc

SEQ ID NO: 290018 - DNA, 122 bp, Homo sapiens
ggtttccgaagtgcaggagcatctggtccgtggccagctgctgctcgatgacgtcatccccgtagatggccacgatggccacgcagatgaaaaggtggaagtagtccgtctgtggaggcggg

SEQ ID NO: 290019 - DNA, 122 bp, Homo sapiens
ggtgtgtgcagttttactcaggtgtgtgcagttttactcaagtgagtgggattagtttgccgctgaattttaatctgtgtaaaatttagtttttatcacagttggcaatgtcttctatcaga

SEQ ID NO: 290020 - DNA, 122 bp, Homo sapiens
tgtagccacttttaagttttatcagctagttcatgcttgcgttgaaagagtggtcgtttgcgctgggtcatcactgtgtagtattggggatacttaggtgagaaaaaaacttaacgctagag

SEQ ID NO: 290021 - DNA, 122 bp, Homo sapiens
ctgcggcatccgcccagaagtgcggctctcggcagccgggcggggcgtgggggcggctcccgttccgatccagggggctttgctctggaccgcaattgctcaggtggtctccgaactcggcc

SEQ ID NO: 290022 - DNA, 122 bp, Homo sapiens
actgaacaaaaccctctacataagggaaactttccaaaaccaggtgtcatttgctactatcgtatttatgtgacaacaaaggaaaattaaaacagacatgtttagagaaggaaaataataat

SEQ ID NO: 290023 - DNA, 122 bp, Homo sapiens
ccgggccggggagatcacgtcccgtgcgtcgggaggcgggggcctcgggctgtgacgtcacgtggccgcgcccctgccgcccagatatctccggcgccgcccgccattttgactccagtgtc

SEQ ID NO: 290024 - DNA, 122 bp, Homo sapiens
cagcactactggttggctctaataggagccctaggtctttaggaataaatctaggaaactcgagtttttcagaaagtcaaccgcttctcgccaaacccaatgattcagtctgaaatttagga

SEQ ID NO: 290025 - DNA, 122 bp, Homo sapiens
agtcatagctcactgtagcctcgaactcctggactcaagctattctcctggctcaacccccgagtagtagggacttcagaccaacagcacctcacttggctctttttaaaataattttttta

SEQ ID NO: 290026 - DNA, 122 bp, Homo sapiens
tgagccgctcgccctcccagcgccccgctgcctcaggacggccaaatcctccccacaccgcggttaacaacgccgcctccactcacgtgcccgtagccagcatggccggcccggcgccgtca

SEQ ID NO: 290027 - DNA, 122 bp, Homo sapiens
agcaatagcttacctttgctcccttcaactcagtaaaaatgagttgagaaatcatgtaggcgtaaatatatgtagattcctgaatgtggtagtattggcaggaaaatatcagaaaatgctta

SEQ ID NO: 290028 - DNA, 122 bp, Homo sapiens
gattggtgcaaatgtgccatctgtcacttgtctggcccacaactaccccttcaagcatgccggtgtgggatgaaacatagaaaacagagcccgggtctgctcagtcctttgttacactgata

SEQ ID NO: 290029 - DNA, 122 bp, Homo sapiens
gccggctggggctctggcgctctcgcaggccccgaggccgacagtcccggcgagggcgggcgccccgcgctccagcaccggctgcctgagcgctcctggagcagcaaaccccagacttcttc

SEQ ID NO: 290030 - DNA, 122 bp, Homo sapiens
tgctggggttgaaggacaggaggtgaagaattggcaatggtgggatagacatggcttccacgaagtttagctaggtagaaagattgatatacagagcagaacccagagaggggctgaggaag

SEQ ID NO: 290031 - DNA, 122 bp, Homo sapiens
caacattctatcccccgagggcacagcttcaggaacggctccgggccggagggcacctctcgcctggctgtgttgtgtctcagggctctgcgcttctaaagggactcaggccagtgggcaga

SEQ ID NO: 290032 - DNA, 122 bp, Homo sapiens
atgcagatcagtcaggttgacagctcacattttcttgcaaaactcttaggaattttcctccgcaaatccctccgcagtcagtgataagtactaaatgccacaaagaaaacaatttcccattg

SEQ ID NO: 290033 - DNA, 122 bp, Homo sapiens
cattgttatgatggccaacaaccaccattgtcctcttttcaggttggccatcatctcctgcgttctatagcttctccccacactgtgtcttttcttgtcatcccatataaaacttccattct

SEQ ID NO: 290034 - DNA, 122 bp, Homo sapiens
actccagcggggacggcgggccgggcactgcgccagctccttcccacctgccttcttccacggccagcccctcaggtcctcctgcccaggaccaggacatctgcccggccagtgaggatgag

SEQ ID NO: 290035 - DNA, 122 bp, Homo sapiens
gtcgaattcgctagtcgtgtccaaactgcgtttagacagggacaagcaagacaatggagccgctttccggataggggacgtggattctacatcctccaccccacgcccccaaccttaaacat

SEQ ID NO: 290036 - DNA, 122 bp, Homo sapiens
tcccatgtgcaggcccctgaaaaactgatctttcctacttcacatgccactctgcaaaaccggagagctttcgagtttccttgctggaggaacagggagtcggcagcccctccctcccccat

SEQ ID NO: 290037 - DNA, 122 bp, Homo sapiens
gaagataagaatgatctagttaggaggctttgacaacagtccgtgagatatatactatggcgtggcctagagatgatgagaagtgatcagatttaggatacactgtaaaggtacagccaata

SEQ ID NO: 290038 - DNA, 122 bp, Homo sapiens
actgttttcatgagctgtaacactcaccgcaaaggtctgcagcttcactcctgaagccagcgagaccacaagcccaccgggaggaacgaacaactccagaagcgccgccttaagagctgtaa

SEQ ID NO: 290039 - DNA, 122 bp, Homo sapiens
cgaggagctgctctatttctagggaggttttggggagactgatcagctccaaggacagaccgctgggaagggaaaaacggcccacatcgaactggatgccggatggaaacctctctgcgcta

SEQ ID NO: 290040 - DNA, 122 bp, Homo sapiens
ggcagaactgggacctggaggcatggcacctccagccatttccttcccaaagaacagagccggtctggaaacttccacccaaaggagataagggccctctgctatgggtcctgctgccccac

SEQ ID NO: 290041 - DNA, 122 bp, Homo sapiens
gtcacacagcacattggacctggcacacaatcctagggcctctggtcctgagccccaacacgtacttgagagggagctgtcccgtctttgaggcagcacaggatcaaggcttactgtgtggc

SEQ ID NO: 290042 - DNA, 122 bp, Homo sapiens
ggagtgcgggaggcttgagcccaagagttctagatcagcctgggcaacgcagggagactccgtatctacagaagaaaaaaattacccagcctagtggtgggtgcctgtagtcacagctactc

SEQ ID NO: 290043 - DNA, 122 bp, Homo sapiens
tctgacttacatttctcccagtggacaccggccagatgcagaaaccaaagagcttggtgccggtactgcctcttccttcttttatagtttgtgcatttggatgtgtttagcatgatctgcga

SEQ ID NO: 290044 - DNA, 122 bp, Homo sapiens
cactcccatcaagccttcttatgtggcatttagccctctctacactactctaaaagaaaacggcccccttctacccaatagtgaaacatctaggtgattattaaagtaagaaataaagtcaa

SEQ ID NO: 290045 - DNA, 122 bp, Homo sapiens
ttctccagggctgacccgaggaaaggacggctcccttggaggactgtgcactccagggttcggctgatcaaccctaacacggtcacggccattctacctcacgtgacttggtgggaggctgc

SEQ ID NO: 290046 - DNA, 122 bp, Homo sapiens
agattcagataacaccgttacatcgaaagttttaatccgtgacagaggaaatattgcttacgcccttaggtaatttcaaatgcacgtatgaaggccgtgcgggtttctgcaggcgaagcaaa

SEQ ID NO: 290047 - DNA, 122 bp, Homo sapiens
gaccagcctaggcaacataaggagactccgtttctatttaagattaacaaacaggccgggcgcggtggctcacgcctgtaatcccagcattttgggaggccgaggcgggcggatcacttgag

SEQ ID NO: 290048 - DNA, 122 bp, Homo sapiens
agaagcttaagttagctaatatataggaagctagcacctacttggtaagggattaataaccgtaaactatttcattgctatgttaatttgggggaaatgccactcttgatttaaaataggac

SEQ ID NO: 290049 - DNA, 122 bp, Homo sapiens
taatggccctgggatacaaagcctaaaataaatcaggggacaggtgatccaagtcagcagcgggtctggggaggaccttacatgctctgcctgcctttcgcacgccgttggtcttagttggt

SEQ ID NO: 290050 - DNA, 122 bp, Homo sapiens
gggctgcctagtctctttagggccacagatgcgccctcctccccccagccccgcgggatacggaggtgagagcactgagatggggaccctgaacccaactgcaggaggacgctggaccccta

SEQ ID NO: 290051 - DNA, 122 bp, Homo sapiens
gctcacgccttgtgctgtttgctggtcttgaaggagacctgcagcacgcgctcgcccaggcgatagccgttcaggctggcgatggccatggccgcctcgtcatagttggtcatggtcacgaa

SEQ ID NO: 290052 - DNA, 122 bp, Homo sapiens
tctttgccacatagcgagcactttataaggtcacttatcgtcccgaatgaatggttaaatcgtggaagccgcaaagaaagccacgcagctttgactcaatacctagcccagtactcaggaac

SEQ ID NO: 290053 - DNA, 122 bp, Homo sapiens
cgcgtccagcgccctggcggtttttaatcaagtagaaaagctgcattataccacttgcttcggttgcttcagtgagaacgaagaaatggaaatgcaaatcccttattagttgtaggaaacag

SEQ ID NO: 290054 - DNA, 122 bp, Homo sapiens
gatacactttccaatcagttcaacttggcaggttcaccaggaagctgtgttatttaaactcggatggtctaggagaactgtagacttccgggtgctagatgattcctgctctggaaactcac

SEQ ID NO: 290055 - DNA, 122 bp, Homo sapiens
gttcatcttatacttccggtcgggatccaggccggggacagtaacctcattctcatcccccgcaacaggcactgcctggggctgcccctgtgcatccttgtactggaccatgaatgagtcga

SEQ ID NO: 290056 - DNA, 122 bp, Homo sapiens
ctgccgggccccagctccggacgtccccgcttgggcatctgctcctggaaggcagcgctccgcagctgaggccaccgcgctgagggcttccaccaggcgcctgactccagcggggcctggcg

SEQ ID NO: 290057 - DNA, 122 bp, Homo sapiens
cgagttgtttgatgagggtgatttttctagggtaaggcacgatgtcttctccgatgtcgtcgatgttcacgtccagggtcccggcactgttgtcggtgatgcccgcatctatgtgggttggg

SEQ ID NO: 290058 - DNA, 122 bp, Homo sapiens
aatgaagcaaattgatagaacatacagtgaacctttttttacttttttgcgatggcgtttcgctcctgttgcccaggctggagtgcagtggcacgatctcggctcactgcaacctctgcctc

SEQ ID NO: 290059 - DNA, 122 bp, Homo sapiens
actccaataacaattcctgcagccaatgaaaacgggcaggctctgtgcgggcagcctggccggaacaccaacaatgaaaacaagggattagagagcattctcagttaatggcttgagtgtca

SEQ ID NO: 290060 - DNA, 122 bp, Homo sapiens
tgggcaacatagcaaaaccccgtctctacaaaaaatacaacgggcgcgtgtggtggtgtgcgcctatagcctgaggcaggaaaatagggtctggaggcagggaacataaggccaattcacac

SEQ ID NO: 290061 - DNA, 122 bp, Homo sapiens
aattgttttccctgacttttcaaaaatgaagtttggcaagcctaagccctgacagccagccgactgtgggaaaacaatgcacctccttatggccccaaatggagcatttgcaattaatccat

SEQ ID NO: 290062 - DNA, 122 bp, Homo sapiens
gacgatatgtcgccaggatgttcatttcatcccacttctgggattttttgctcagctgctcgtggacactcccacggggatgttcggccgacgccaccatagaggaagtcgtagaggtgttg

SEQ ID NO: 290063 - DNA, 122 bp, Homo sapiens
atatctataattttttttcagatttcacccatttctgcagggagaaaagctcataagccacggccctacgcccacctttgtgcccgcagaataaggaaacccgccaactacacaccacagtt

SEQ ID NO: 290064 - DNA, 122 bp, Homo sapiens
cacccactggggaggcggaacctcccttaccggggcaggggaggctgcgggcagggccgacgccctcgtgagcgacgtccttggccccggcactcggtgtccacagcccagctcggacccgc

SEQ ID NO: 290065 - DNA, 122 bp, Homo sapiens
cacattgttggggttgctgccagctgacgacagctggttcacctgcttggacctgagagacgctttctttcctatcagattagcccctgagagccagaagctgtttgcctttcagtggaaag

SEQ ID NO: 290066 - DNA, 122 bp, Homo sapiens
gacaaaagtaacaaacggacttaagaaaacaccggttatatttaatgctcagagagcactcggaataataacctcttaacctcaacgctgactccctcccggacaccacacgcacacaggca

SEQ ID NO: 290067 - DNA, 122 bp, Homo sapiens
ctgatggcaccagagggtgggaagcagggatctgacgcttagcaccgcaggtgccaaggacggcctcctccccacaagggctccgggaggccacaccagagggtgggaggcaggggtgacgc

SEQ ID NO: 290068 - DNA, 122 bp, Homo sapiens
gtgagcccccacgtctgtgactgtttgtgtttgagctgcacgatggcagggggttcctggcgctgttctctttgcaaacactcattgctggatctaccgcagcaggactatggctgccgcca

SEQ ID NO: 290069 - DNA, 122 bp, Homo sapiens
acctgtcgtgaacctcggcttggtggggggctcctgcacagacacggggaaggtggcagacgcgggtgaggactgcgcccgggacagaggcctgtggccgccgaaggacacggggatgccgg

SEQ ID NO: 290070 - DNA, 122 bp, Homo sapiens
attaaaggaaggagaaatgttagtacacttttaattggaaaccgagttcttctttcagagcggcttgtttactcaggattgggcattagaactcaggggaggctctaattgaagtgacggct

SEQ ID NO: 290071 - DNA, 122 bp, Homo sapiens
tctgtctcttagggttacatgctcccggggctcccgcacataccccggcagatgagggtgcgcaggggtgagggcgcagggctgggcgtcccccgcccccaccgtgcagccctcgcccccgc

SEQ ID NO: 290072 - DNA, 122 bp, Homo sapiens
agttgtccccaagccctcctgcctcatatccagagaccagagagcagcggacagttccaacggactttctgtcttaaagggacatgaacgtctcactcagcgtcaccactgtaccagctcag

SEQ ID NO: 290073 - DNA, 122 bp, Homo sapiens
aggttcagcccttttattggctgagtgaccttgtgcaagtcacttttcccctgtaggcctcggtttattctccgtaaaatcagaaagttggcctccgatctccaagcacgcttttcacgacg

SEQ ID NO: 290074 - DNA, 122 bp, Homo sapiens
gttagacattgttccagatactaaagggcagagtgtttcaacattatgccaggaaattgacgtaaaatggaattctgagatgaattttctgagttgactgggcttgacttgataactttttg

SEQ ID NO: 290075 - DNA, 122 bp, Homo sapiens
gtctttgtcggttacagcaatgctgctgctgaatgccgtgggaagcgccatggcttaagccgctggggggtgccgctgcagagcctggtgctgctgccgccgctgcaaaggccaatgctgcc

SEQ ID NO: 290076 - DNA, 122 bp, Homo sapiens
ttcacttacctgaagggaggccttttaatttaagcctgtcgaatcacaggtgctccgaatcgaatcccaggtgctctgaatccgaaattaagacgccctcttattcgtcaagcgagaaggct

SEQ ID NO: 290077 - DNA, 122 bp, Homo sapiens
agaccagcacatgaacagatgccatcaatatcatatgataaatgctgtgcttagaggcagcggggagcggtgcagaccaggatgcgagctcagatgagatgttccctaggagaagcccctcg

SEQ ID NO: 290078 - DNA, 122 bp, Homo sapiens
ataccatcacattaggtgttagggatttaacgtatgaattttggtggggacaccaacattcggtccatgacaaagggtcaggatacaatgtaaggtgaggggagcccagcaggttctctgtc

SEQ ID NO: 290079 - DNA, 122 bp, Homo sapiens
tggccaaatcattttttaaaaataattccatttcttccccaccctttggtcacttcctaacgccggctggggagtcacatgctaagctccaaagtgagcaacagacaccctcgtcccaggtc

SEQ ID NO: 290080 - DNA, 122 bp, Homo sapiens
ctgagcatggccagagagccatcgtccccaaaggcgccccactccatgttgatgcacatgcggcctgagtccccaggcacgcccgccacattccggagctcctccatgtagcaggcattggt

SEQ ID NO: 290081 - DNA, 122 bp, Homo sapiens
agagggcaggggcgaggaacccagggagcgcgcgcggattggtcctctcctcggggcgtgcgctcctgtgcgccaaatgattggtggcaggaaagtagcaggtaaaccggctcccgccgcct

SEQ ID NO: 290082 - DNA, 122 bp, Homo sapiens
ggctcgtggccctaggcgcggcagctgacacgtaagtctcgtcgcccgacgttgtttcggcgctcagaaacaacgtaaagtaaaggggcggggcagcgttttacaaaccgaaccgtgaatct

SEQ ID NO: 290083 - DNA, 122 bp, Homo sapiens
caagaccatggcctagtctaatctagatcacctcctgctgtggttctagacagtgctgcccgccaggatctaaaaccagagcctaacattggttccctggtgcttgggttccaaatcctact

SEQ ID NO: 290084 - DNA, 122 bp, Homo sapiens
ggaggactggctctcagttcatctctgcttcaccagcattggaactggcatagagaggaccggcagggaatgttggctgaacaaataaatgaatgcaggattggatgtgcaagtcctctttc

SEQ ID NO: 290085 - DNA, 122 bp, Homo sapiens
aaaaaaagtgtttactttgccagcggaccttgtcgcaggagtggaggaacggcctggaagcgcacttgtgatctcagcaaactgctgaaatctgtactgattgaggaaaagtatccctgtta

SEQ ID NO: 290086 - DNA, 122 bp, Homo sapiens
accctttcgcttcccgcccgaataataataaaaagccccattggagtgaggcgggggtggcggcggcaaccgcggcgggggtatccggggagactgctgctgtcgctgctgctgatcgcggc

SEQ ID NO: 290087 - DNA, 122 bp, Homo sapiens
caattaacgcaatggacacaggccttaggaggccttttccaggcctttcccctcaaatcacgcctgtcaccatgcgtccttggaagcctcctaacccttccctggcatgtcacgacacctcc

SEQ ID NO: 290088 - DNA, 122 bp, Homo sapiens
ccctccctcttttctcccctgcccccgccgtatcccctccctcggtaggcccccccacaccgtgtgttcccccactgtacacccccccccgagtcatgcgagccctggcgccccccacctcg

SEQ ID NO: 290089 - DNA, 122 bp, Homo sapiens
gggaggaggcctcgggggacaggaggccgtccaaggagcccacggggtggccgctcggggcgcccggcttaggagacttgggggagctgaagtcgaggttcatgtagtcggagagcggagac

SEQ ID NO: 290090 - DNA, 122 bp, Homo sapiens
actgacaattgacagcgacctcttgcaatggcccttccgcctccaccaggagactctgcccgttggtagtaaaagaaccaattagactgggaaaaaaagaagcaacgccccaggtttcaccc

SEQ ID NO: 290091 - DNA, 122 bp, Homo sapiens
ataccacaggtcttctgtggagtagaaacactggtgatgtctcccagtctttttccaactcggagtcactcaaaatagataacatgtagcagtagttattaaaaagttttattccctttagt

SEQ ID NO: 290092 - DNA, 122 bp, Homo sapiens
cactgcacagctgtgttcctttcctggaatgcagttttctatcaggtagcactgagggtccgaacagttcacgtcaaaactatcaggaaagaagaatgaaaaggtaaattaagagaaggcgg

SEQ ID NO: 290093 - DNA, 122 bp, Homo sapiens
ggatgcagcccgcctccaggcggcctatgcgggtgacaaggccgacgatatccagaagcgcgagaacgaggtcctggaagcctggaagtccctcctggacgcctgtgagagccgcagggtgc

SEQ ID NO: 290094 - DNA, 122 bp, Homo sapiens
acggaagtgaccttggcaaaactaccaaacaaaacgcccccctcccctcagctctccggccgagtccctcggcggcagcctcctacacgtgcgacagggacacctgcttgtggtaggtggcg

SEQ ID NO: 290095 - DNA, 122 bp, Homo sapiens
gtgagacaacccatagcaagtgcccactctgcacagcagtgccctggagccaggtagccccggcctccgcccctgctctgcacccacaccctgcggcacctcctggcctccccaccaccctg

SEQ ID NO: 290096 - DNA, 122 bp, Homo sapiens
cgagagaggccagagggtccggcagcagctaaaaaagccacctcgccactgtgaacttgtcgtcactcttggatgtccggagatccacggtgatctcaggccctgggaccggaaaaggcagc

SEQ ID NO: 290097 - DNA, 122 bp, Homo sapiens
ccagcctcagctactgaattcttgaaacaatcctggggggaccggtaattaaagcagacacggagcctttctacaggtttcaaaactagtcagcggcagagctgggattggacggcagttca

SEQ ID NO: 290098 - DNA, 122 bp, Homo sapiens
tggattaaattttgcaaagagaattaaaagccattgttcaaaattagtgaatggtattctcgtgaagaatttatctatgctccattgtagaaaaatgtggtgagagagccaccttgtgttta

SEQ ID NO: 290099 - DNA, 122 bp, Homo sapiens
ccttcatctcctttctttcacaatccacatccaatctgtcagcaagtcctgttgactacacgttcagtatgcatgtgaaacctgatcgcttctcttctccctcactgctaccaccatggtcc

SEQ ID NO: 290100 - DNA, 122 bp, Homo sapiens
ggagcagcgagaagaagaagaggaggaaggacacaaagaggaggaggcggcggcgggcggcgaactgagggcagctcagggggaggaggactcattgtccggtccccccagtccaattgata

SEQ ID NO: 290101 - DNA, 122 bp, Homo sapiens
caggagcacagactggactaagcctcctgggccttgtatgaaaaaggtgttgtacctggccgtttttgccagtaataatcaataaaataaccataataaaaatcaaaggctctgttctgacc

SEQ ID NO: 290102 - DNA, 122 bp, Homo sapiens
ctacctgccccaagacacttgagattgggatgacgctggtgtcaaagatcaaggcttccacgctgagttcagggagttagtttgatgcagcaggtcataggtcacaccagtgagaagactct

SEQ ID NO: 290103 - DNA, 122 bp, Homo sapiens
gcctttgagctgagacttcaaagctgggctgaatttccccgagggtccagaagagagccacgggctggtgtgtcaggcagcggagctgacactcccagaaagcaagatcttcgaactacagg

SEQ ID NO: 290104 - DNA, 122 bp, Homo sapiens
cccctagtggagacgaagggaccagcaacgctagaacagtgacgtccggtagcgtccagccgtcagccctcagacgccacgggctgccggatgtgagtcatcctgacttccgctttgaaaaa

SEQ ID NO: 290105 - DNA, 122 bp, Homo sapiens
aacatagaaaatggagttcgaagaatgagtttcctgtctcctaagacagcttggagggcccgggaacggcagggggaagatgaggggcttcagaatgggaggcagggaaaagcctgcagcaa

SEQ ID NO: 290106 - DNA, 122 bp, Homo sapiens
agtgaaatcctggttgagcaatcagttatgacttctgtctggctgagggtatacgggattcggacaatgtggtaaggaacaaagcatatgatgtagcccgtggtcactaaaagtatgttgat

SEQ ID NO: 290107 - DNA, 122 bp, Homo sapiens
aggagcggcggactcggggcgcggggagtcgaggcatttgcgctgggcttcggagcgtagcgccagggcctgagcctttgaagcaggaggaggggaggagagagtggggctcctctatcggg

SEQ ID NO: 290108 - DNA, 122 bp, Homo sapiens
ctagaaaaactgaagttggcaggatttatattcaagatctgtttcccctatagatgtcttcgtcctctgttcctgtgtcctgtgtcctttgtcttgtttcccctatagatgtctttgtcctc

SEQ ID NO: 290109 - DNA, 122 bp, Homo sapiens
gtggcctgcactgtcatcgtcctcacttttaagaagcctctgcttcaggtcatcaagagccgctgccactggtcctccgtttactgacctggctgtgtgccaagactcgaaattcggtccgc

SEQ ID NO: 290110 - DNA, 122 bp, Homo sapiens
ctgccagcgcctgcatttccgaaattgtgggtttttcccgtgggagctgcaggccagcagcgcccctaccctcagcagccttccactgattgacagaagtcggtgtatgtgaataccccaac

SEQ ID NO: 290111 - DNA, 122 bp, Homo sapiens
gactggtggaaggagcactgcgtaatgaatggtctccttagaagactgcttagtgttagccgggtgcggtggctcatgcctgtaatcccagcactttgggaggctgaggcgggcggatcacc

SEQ ID NO: 290112 - DNA, 122 bp, Homo sapiens
gacttctgttcctgttggatgacccttcctggctctctctgcccatctgccaaatgccaccggttgccccagctgaccccacatcatgactctcctctgttcaaaagccaccccatggctcc

SEQ ID NO: 290113 - DNA, 122 bp, Homo sapiens
ccgtagtggggctgtacaccgctccgttctccatcgcctcgggccggggagcgcggcggccgcagcaaccgcgccgttgacttctcggactccagaagtccccggtagccgggaggcggccg

SEQ ID NO: 290114 - DNA, 122 bp, Homo sapiens
gcctcggcccgtgctccacctcgcggcccctcccgcccgcccccgctcgcatgtctgcgccgccctagccgaggatgctgaggatgaagctgccgctgaagccaacgcaccccgcggagccg

SEQ ID NO: 290115 - DNA, 122 bp, Homo sapiens
gccgtcctcctcgctcggccaccgttggttaccatgggaaccatgaccgcagccagcccccgaggcgagaaggcctcttcatcttgccactcgggtcggcctcccatttccatttccagaga

SEQ ID NO: 290116 - DNA, 122 bp, Homo sapiens
aggagggcttcctccccttacagagttgccacggcaaccaagtcagctctgctcaggagccgccctggacagcaaactgggctgtgctgagtcctgtccaagacgaggggagggcagggaag

SEQ ID NO: 290117 - DNA, 122 bp, Homo sapiens
gcgtgagctggaggggagcgagcgggccgccgggagcgcactgtgtacaaacagaggcggcgtgcgtgtgagtctgagcctggcaggcgcgctccccactcccccggcgcccgcccgccctc

SEQ ID NO: 290118 - DNA, 122 bp, Homo sapiens
actgtaatgactgcaaccaactctgctctttgagtcaattgatattgagttttgattactcgctcatcagaccccagaaaaggtgttggttgatatagacagcaggacggtggccatggaag

SEQ ID NO: 290119 - DNA, 122 bp, Homo sapiens
aagccggtgagcaaacttggtgggacccagagaccagcctgggactctagtgggtgcagacgctacgctcgcggcgggagcggggggcaggaagcaggaagcggccgggaccgcgtgggtcg

SEQ ID NO: 290120 - DNA, 122 bp, Homo sapiens
gcaatgagaggaacccacagagccggtacaggaggactcccgtgttccagcccctcggggcggggccggccacactcctgtggctccccagctcacaccatcgcactccgtgcacttccaca

SEQ ID NO: 290121 - DNA, 122 bp, Homo sapiens
gtctgttgccacggaaaccacactgctgcctcatttattaatggaggcttggtgaacttccggagatactcttagcctgtcctgtaaattcattctagagaaatgcagggtgacttttaaga

SEQ ID NO: 290122 - DNA, 122 bp, Homo sapiens
gagctgagagctggcgaggtcacgagtgccgggctccgggcggggggtggggcagggcggcggggcaaggccggggcgggagcggcgatccgaggccgggtcagcagcgccccctcctggaa

SEQ ID NO: 290123 - DNA, 122 bp, Homo sapiens
tcctatggaccaagcaccaatgtgtctagaaatgagcacatgagaatacagagctgtgtgcgcaactgcttctagcccacctggtgtctctgtgtgaagtagaaaattctcatgaagacact

SEQ ID NO: 290124 - DNA, 122 bp, Homo sapiens
gccagactgacaacctcaggacagccttcttttctgttcccttggaagacatttggtcctcgaaagacttttaaccttttgaacttcagctgggaaggatgaactgcttcacactgaaccca

SEQ ID NO: 290125 - DNA, 122 bp, Homo sapiens
atctgctgccgcgcctgtagcactcccggaactggaactaggtgccagacggtccggaggcgggggccacgtcagcggggccacccagggctcgcggggtcccggtgggtgccatgcggagg

SEQ ID NO: 290126 - DNA, 122 bp, Homo sapiens
gatttcgataagccttgcagttggctgattttcagggaagccgctgcggccagccctgagcgctgggtgtggtctctggggaggagaactcggcacccaggcttcttcaggaacggatagaa

SEQ ID NO: 290127 - DNA, 122 bp, Homo sapiens
ctgagtgtgagggagagggaggggggagctactcccccagcccaggaagactatattgatcggtgaagggattcagggagcctgcacctgcaagtccatatttgaccaacaggtggcactta

SEQ ID NO: 290128 - DNA, 122 bp, Homo sapiens
agttatcttgcaaacttgccatccctgggcatcgtcctgaagggagggatcccggcattccgggcaggacccgcccccacccgcagaaggcagaaaaataattactgtattaaataaggagc

SEQ ID NO: 290129 - DNA, 122 bp, Homo sapiens
tcagctgcagcacgtttcgcgctggggagcctctcctggtgggcgaccgtcatggacaatcgacaagaccagaaattagatttgagtccagaatcaaggacctttaagcagggattggagat

SEQ ID NO: 290130 - DNA, 122 bp, Homo sapiens
ccacagggcggggtgcacaggggctattcctttacatggaaaatatttcgaggtgagttgcgtactttcagtctggggcgttccatctctaacgcgggcagttgctgctctgccctctgcct

SEQ ID NO: 290131 - DNA, 122 bp, Homo sapiens
ctacctggtggtggcgttggcttcggtgtcttcgctcttcctcttctcggtgctcctgttcgtggcggtgcggctgtgcagaaggagcagggcggcctcggtgggtcgctactcggtgcccg

SEQ ID NO: 290132 - DNA, 122 bp, Homo sapiens
ctgggtggcagagaggatcgcagcagacaatacaagcaaaacgcttagcacagcgcctggcgcacagtcagcatggggaacggaagctgctgtcgttactggcggttgtggtctcgtcttgg

SEQ ID NO: 290133 - DNA, 122 bp, Homo sapiens
cgccccctgcgcgtatttgcagaagcacggctggccctggatgggcatgccggcgtctctcgagatctttctgagctgctctgtgaaggacctgcaggagaaggctccgttcactaccgggc

SEQ ID NO: 290134 - DNA, 122 bp, Homo sapiens
actatggagttagcttaagacaaactgagagagagagaagagagagttggttggggccaccggggaggttactgaccaagggcagggaaggaggcatttatttatatttgccttataattct

SEQ ID NO: 290135 - DNA, 122 bp, Homo sapiens
cccccgtagcacctgcagggttttaccagctcacattacaaagccccgtctgaagtgtcccgagcactgtttccattacaaatagccagttctcttgaaagtaaggcaaaagccaaattagt

SEQ ID NO: 290136 - DNA, 122 bp, Homo sapiens
gccctgtgttcctaggccagtgccaggcccacttgaggcgctcactaactatgatatgaacgaatgaatgcttgagtgaattggtccccagaagcggtcagcctctccgccaaggcagaggg

SEQ ID NO: 290137 - DNA, 122 bp, Homo sapiens
ggtgatggggctgtgcaggtagggcaggctgctgggggccgagtgcacgcccacggagaccggaaagctgaagacgaactgcgaggtgggggtggcgggggtcttgccccgctcccgcaggg

SEQ ID NO: 290138 - DNA, 122 bp, Homo sapiens
gggcctgcaggagcgctggggtgagtcatgcctcagccttgtctcagggagctgggctttcgtgtgcctgcaccgggcagtcactggctccagctctgcacatgtgggcagaatggcttcca

SEQ ID NO: 290139 - DNA, 122 bp, Homo sapiens
caaaatcaaaaacagatttctatactaactacccttccaaaggtaacacattagctataccgttaatctagcaaagcagggaggaaaatgaaggagtgcatttgtttcattagtcttttcgt

SEQ ID NO: 290140 - DNA, 122 bp, Homo sapiens
cgcacagccgactgtaggtggtaggcgcagtctcgggcctggaggagctgctcccgctcgcgatgcagccgcagcaacaccgcccggagacgctgcagcgcgggagggatcgggccgccacc

SEQ ID NO: 290141 - DNA, 122 bp, Homo sapiens
tctccccgaccgcagggctggggcgaccagaaaagccagactaatcaggacgagttcgggcgtggaattgggcctgaagccctcatgcccagccaggcctgaatgccccagaccccaccgtc

SEQ ID NO: 290142 - DNA, 122 bp, Homo sapiens
ccacatgagccaggagctaacgcggcctcttcttgtaaatgaagcataactgggctcagtcgggcaggatgttagagcagctcaggaaggagccaggaatagtccctctgttctctggattg

SEQ ID NO: 290143 - DNA, 122 bp, Homo sapiens
tgggaaggagggagtggtagtcgcgggaatgagggagcaagagaaaccctctcaaagtgacgccccaaacaggtccggatttagaattcgaagctaaaggctgttagaaattgggactcctc

SEQ ID NO: 290144 - DNA, 122 bp, Homo sapiens
gacagagtgcggcccttatggaaaacagatggggctactgggaaaagggcagccgcatgacgtgctagagacatgagaaccgagagactgtccttaggtacttgtgggttttgatgggatct

SEQ ID NO: 290145 - DNA, 122 bp, Homo sapiens
ggagtcgaattcaccctcagggactgtccatgagaggcccacagagtcaggggttatatccgtcactgtcagctcccctaggcgtggctccaggggaggcttggaggcctctgtggctgggg

SEQ ID NO: 290146 - DNA, 122 bp, Homo sapiens
gcggccgctgctttaaatcccctcggaggagcggggcggggctgggcactgctgaccaatcggagggtggggctgggcgctgagaaggcggaggcggggcccgcagccagactgggccgggt

SEQ ID NO: 290147 - DNA, 122 bp, Homo sapiens
ctgtaggaaggctcttcttcccagagggtgagtttgggctggaactctagtattcagaaccggaaggatcctcaaacatactcttacccagtcctttcccctgtctctgtcaaaggcagaac

SEQ ID NO: 290148 - DNA, 122 bp, Homo sapiens
caaacatctgaagttgttcatggtaatggcttaagtatttctgattttcaataaagtggacgtaggagttggaaaatctgaatattcacaaaagttgatcgatggcattaaggttaaataaa

SEQ ID NO: 290149 - DNA, 122 bp, Homo sapiens
tgttcctttgaataagaattttagaacatctgcttcttgttttcaggatttgatagataccggtatgctgtgtctcttgactgagtaaatagagtggtgtgatgaaatatgccggctaattt

SEQ ID NO: 290150 - DNA, 122 bp, Homo sapiens
aggagggggaagctgtgggcgcccagggcgtgacaggcgcaggtgagaaagtgagtttcgcgggagcatctgccgggaccgcagacaggtggagaaacgcagtcccaccgcggcccaccgcg

SEQ ID NO: 290151 - DNA, 122 bp, Homo sapiens
ccggccttttggcagcgcggctgccagttaattttctccgttgcattctgcaaacgagatcgcattcagagcccagaagttgcaagctgggaataagcgagatctgaaagacccccaagagg

SEQ ID NO: 290152 - DNA, 122 bp, Homo sapiens
tgagactccctgggcgtaggaccctccgagccaggtgccggatataatcttgtggtgcgccgttttttaagcccgtcggaaaagcgcagtattcgggtgggagtgacctgattttccaggtg

SEQ ID NO: 290153 - DNA, 122 bp, Homo sapiens
gcgccccgttacccggggtcctcgtcctccccgcaagcccatcccctctgcgggcacctgcgctcttgcagtctgcgcttccgtgcgctcacactgaagcccttctcggagccgagcccggg

SEQ ID NO: 290154 - DNA, 122 bp, Homo sapiens
cccacgggactccagagggggtgggtgttgggacaggaagggcacagggtgcttcaagatcgctgataggccgcctgcactcccacagccatgtagctcccaccttctgtcagcttttcctc

SEQ ID NO: 290155 - DNA, 122 bp, Homo sapiens
aagccctcactcctaactagctcagtgaccttggacaggccacataactgatccagacctcgtctgcacacagaggaagcagtggtcagcaggcctctgatgttggtgattctatctacctg

SEQ ID NO: 290156 - DNA, 122 bp, Homo sapiens
catgtggattccatccatgaacgtgaactttttattgtggtttgtccgttccgagcgctccgcagaacagtcctccctgtaagagcctaaccattgccagggaaacctgccctgggcgctcc

SEQ ID NO: 290157 - DNA, 122 bp, Homo sapiens
gtcttgcctgcagcctcagatacatctgaccctgctcctcctctgctccaaaccctcccacggctctctgttgccctcagaaccaagtctccaggtgctatctcctgccagggcctctatcc

SEQ ID NO: 290158 - DNA, 122 bp, Homo sapiens
gacgggataaggcacagttcttgaactgctgccaactctccagaaaggcactgggtacatcggaaatgccttccgggggcctcctagcactgtccggagcatttgtccttcagagcctggcc

SEQ ID NO: 290159 - DNA, 122 bp, Homo sapiens
cagctataaaatagggattagaaacctcaattctacctttcttgtgggtctttgtgacaacgagtaagataatctacatgaaaacattttgtatgggatctgatgattgattttgaataaaa

SEQ ID NO: 290160 - DNA, 122 bp, Homo sapiens
tcttcaataaaacatttagttgctcaagggcaagggtcccatagagtctcaatatgctaacggcctggtgttgcttaataatttagattctgacgggtcctctccagggaggggagcaaagg

SEQ ID NO: 290161 - DNA, 122 bp, Homo sapiens
cacccacgcgtatttgttcaacagacatttattgagcgctcaccacgtgccaacgccgggcgtctgggctctggaggcgctgccacgtggcggatgcgcagtgcccggcggccgggctgagg

SEQ ID NO: 290162 - DNA, 122 bp, Homo sapiens
gcgcttcggcagatcctggatggcgcttcggcagatcctggatggcgcttcggcagatcccggacggcgcttcggcagatcctggacggcgcttcggcggggctggcctcccgcacacactc

SEQ ID NO: 290163 - DNA, 122 bp, Homo sapiens
ggttgccccaggactattttgcatcccacaaggtacccacacaaggtgcctagcatagcacgctacatacactcaacaggtgctcagtatatgtattgcactaggtcagctgaaagctctca

SEQ ID NO: 290164 - DNA, 122 bp, Homo sapiens
atcctcctggggatagcagcaccagccgcttgtgtgcggatcacaggaacccacggcttacggaggcgagtgggctgatcggacttgccctaagcttacccccagggctagcattgccattc

SEQ ID NO: 290165 - DNA, 122 bp, Homo sapiens
tggtggttgaactgaacccacttagaaaactgtcaaaggtttctggactctcaggtgtgccgtctcacatttggtctgctacagcaggtgcttcaaggctttcttctgccaagatttctttg

SEQ ID NO: 290166 - DNA, 122 bp, Homo sapiens
gggtccaggacagaaggcagggccttgggagggccttagggagcagtgccagtgcaggggcggagcctgaaagggaagagggtgtcagggcagggccgggccgggcttggtcagggagcaga

SEQ ID NO: 290167 - DNA, 122 bp, Homo sapiens
ggtttgaacccaagtcttcctctaaaacccatattattgtgtccggaattggtgggttctcggtctcactgacttcaagaatgaagccgcggaccctagcggtgagtgttacagctcttaag

SEQ ID NO: 290168 - DNA, 122 bp, Homo sapiens
cagttgtgacaatagtctctaaacattgtcaaatggtccaaggaaaggggaaaattgccccggttgagaagagcactgctgtaaagtaatgagcctcggctctcctgtctgcacctgtccgg

SEQ ID NO: 290169 - DNA, 122 bp, Homo sapiens
tacttttagtagagagggggtttccccctgttggcgaggatggtctcgatttcttcacctcgtgatccgcccgcctcggcctcctcaagtgctgggattacaggcgtgagccaccgtgccca

SEQ ID NO: 290170 - DNA, 122 bp, Homo sapiens
acattctggttgtaaatgtgcccactgatgtttctataaggtggacagatgcatttgcaccggatatcttcagaactctggaaaagaaagcacatgtcaagtatgcagagaccctgcctggg

SEQ ID NO: 290171 - DNA, 122 bp, Homo sapiens
agcaccgcggagagcgccatctccgggggcggggctggcggggtgggggcggggcctgggcggggcgcgcgagaccccggccgggtcccgggggcgcgcgcggggcgctctcgccagtcccg

SEQ ID NO: 290172 - DNA, 122 bp, Homo sapiens
aaacaacatcagtctattatatacagcacatatcaacaatacatttcactttcaaactatcgcataacccatcctgcagttattcatggatgcgtttagaggaggttattttccccctgaca

SEQ ID NO: 290173 - DNA, 122 bp, Homo sapiens
ggggcctcttaaagtggcaggcgcattatttttctctactcaccagcccggctgggggaacggtgttgtcacggcaaagagcgggtagccctcgcccctggtccgggggatcttcaacaccg

SEQ ID NO: 290174 - DNA, 122 bp, Homo sapiens
gagtcccgcttccctcttgctagaacccagtgacttcatgtcctctattagcaccccaaccgactgccacctcatcaactcgcttcttgatctcagcttggctggttcccagctcatgcagt

SEQ ID NO: 290175 - DNA, 122 bp, Homo sapiens
tgttactttcaatatcgcacggggtggacacgccctcagtgatattgtttctaatttcaacgtgggagaggatgatactacacggaatgcccctaggggtaaaaacactcctgtgatattgt

SEQ ID NO: 290176 - DNA, 122 bp, Homo sapiens
ttgattagcgggggaaaggggtggggatcaggagtgtgaggtgaggggaggaccaactgacgactggctcaatgaagcacaagacattttcttccggaaagatgtcaaacaactgagaaaca

SEQ ID NO: 290177 - DNA, 122 bp, Homo sapiens
cagttggatgtgcctggcacagtaaacatttgtttgatcaaccaagggccatttccaaaacggtggggtttccgtcagtggcctccgagtggctgactccccaccgcccggcatgcgcacac

SEQ ID NO: 290178 - DNA, 122 bp, Homo sapiens
cggggcgtggcgaagaggggcggagtcacgagcggggcggtgagacttcctgcccagtcgcgggccagcctagcgcttcagccggcggctcatttccggtgggggcgccgcgcccagtgagg

SEQ ID NO: 290179 - DNA, 122 bp, Homo sapiens
gacctgggcccagggcatattccactgtcggatcaggagccagagtgggattctgaaatccgctcttcccagcgaggtcagcacggtcctcccctggcagggcctccgtggtgccttggctt

SEQ ID NO: 290180 - DNA, 122 bp, Homo sapiens
taaggaagggccttattgcaaggtgggcccatggctgccttgctcactgccatatccctgcgctgagaacagtgcctggcctgtcagtaaagacttgtccagtgaatgaacatccacaggca

SEQ ID NO: 290181 - DNA, 122 bp, Homo sapiens
taccgaggactgggccgtcagccaaccgacgggttccacacacattccaacccgacatctcgttcccgggatctccaaaacctccgtcctaagaccgcccgcatcccaaccctagcctcagg

SEQ ID NO: 290182 - DNA, 122 bp, Homo sapiens
ctcttctttttctccgagaactctgagggctaccattgcatttgctaatgatgccacagacggtgttgacgttatgaggcttctattactgtattgatttttaccatttttagggggacggg

SEQ ID NO: 290183 - DNA, 122 bp, Homo sapiens
aagagcctgggtgcccttggctctggccctggcccacctcacccactctaaccacccccccgcccagaccagggtggaagcccagatgccccaagctccagccacccacccatcacagcctc

SEQ ID NO: 290184 - DNA, 122 bp, Homo sapiens
catagactgatcttccttcgagacctaaaatcattaacatctggcaagcatttcttattgcgcctctgtcgaaaaaagttattatcacttgataattaaattacatttaaaaattcacataa

SEQ ID NO: 290185 - DNA, 122 bp, Homo sapiens
ggggcccaccccacgcagtcccgccgccgcttcagcccaacagccctcctcacgctggcgcgctccgaggccaagccctggaggaaactcttgactctgcgctagaacctctctgccccttc

SEQ ID NO: 290186 - DNA, 122 bp, Homo sapiens
cgcgctcctcgctgattggtcggcccagtgcgcatgcaggtggcgggcggcatggggccacgccccctgcaggcacaccctccccctcacggactgtccatggctgctgtggactcattggg

SEQ ID NO: 290187 - DNA, 122 bp, Homo sapiens
tgaagccacacgctgactgcgttctgccccctcttcatgcagtgctgcgggctggtgcatcgccggcgagtacgggtgtcctatgtaagtttctattgctgtagaattgcagctgggagctg

SEQ ID NO: 290188 - DNA, 122 bp, Homo sapiens
tgacaactgaatcaataaaaagacacagcaaaagttcaatcagaacagacaccactaatacgactggcctttggggacccacagaagcgtggaactgcttttccatgttaatttctcttcac

SEQ ID NO: 290189 - DNA, 122 bp, Homo sapiens
aaggcattgtgggagtacagctctttcctttccgtctggcggcagccatcaggtaggctgcgttgaggatctttgctcttccatccgcctttgatcgtcttcctcttcagccatccaggtcc

SEQ ID NO: 290190 - DNA, 122 bp, Homo sapiens
aagacatggaacaccttacctgtacagcttttcaaagcaggtaaaccattgttttaattacgtataatttacctaagaaggccatctatgtagttcttcagcaagcactcacttaccataac

SEQ ID NO: 290191 - DNA, 122 bp, Homo sapiens
ttaagagctgtaacactcaccgcgaaggtctgcagcttcactcctgagccagcgagaccacgaacccaccacaaggaagaaactctgaacacatccgaacatcaggaggaacaaactccaga

SEQ ID NO: 290192 - DNA, 122 bp, Homo sapiens
tctgtagatgggaagttagacagcgcgagtcctcgctcgctctgggcctgggctgaggggcgggcgtgaggtcctggtgctgggcgtttgggctggcgacgtggtgcgaggcggccgggctc

SEQ ID NO: 290193 - DNA, 122 bp, Homo sapiens
gtcgggtgagcccagaagtgagagcagttggctgtgccccagtgctgtgtgacccagaggcgccgctcaccctctctgagctggtggacatcataggtggggaagctcaggtcagggcactc

SEQ ID NO: 290194 - DNA, 122 bp, Homo sapiens
ctgccttcaaaaatgaagccgcagatcctctcggtgagtgttacagttcttaaggtggcacgtctggagtttgttccttctgacgttcagatgtgttcggagtttctttcttctggtgggtt

SEQ ID NO: 290195 - DNA, 122 bp, Homo sapiens
acgtgcaggttcgttacatatgtatacatgtgccatgttggtgtgctgcacccattaactcgtcatttacattagtaagctttatatataatgacaagctgaggccgactcatgcaaatggt

SEQ ID NO: 290196 - DNA, 122 bp, Homo sapiens
agctcactatccgttagccagcctaattgtgtttggagaaatattccttgctgtcatccacgttgggcttaatcgtgtcactgccaggcttccagccagcgggacaaactgtgggaagacac

SEQ ID NO: 290197 - DNA, 122 bp, Homo sapiens
agaagtagccttgtcaccagggacgctccgggggcaggcgaggtgggtgtcaggtggcggcgttcacatccgcttggcagcacggccagcgtggcagggcaaggtgcagctgggacaagggc

SEQ ID NO: 290198 - DNA, 122 bp, Homo sapiens
tcctccggttggcctccaggcgcctcccctttgccgggtttgatttgcgtgggttttctccgtacagccctggttttgcagatgggagagccagaaacgcagaaaagttaacttattcgagg

SEQ ID NO: 290199 - DNA, 122 bp, Homo sapiens
gattcgtatgggctccaccgagttccgcttgcgtcaggcgccttcgcccctatagcggggcggccagccgcgcacgggcgagttcatctccaagtcactttttgtaaacgccccgcacagcc

SEQ ID NO: 290200 - DNA, 122 bp, Homo sapiens
ctggtaggtctcacttgtcatttattgagcccaaagtgctgggattacaggcgtgagccacggcgcccggcctgacaccactgttaaattagggagaaagggtttactttctaccagaaagg

SEQ ID NO: 290201 - DNA, 122 bp, Homo sapiens
cctcccgcagcgcgcgcgggcccgacgcctgccactcacccggccccagctcggcgtctccggctccgagcccgcagccttccccaagtcagggctttcagtgacgcctcctcgcagccacc

SEQ ID NO: 290202 - DNA, 122 bp, Homo sapiens
gcggaccctgtctcataaaaaaagaaaaaagaaaacacacaagatgcgcctagttaacaccgccaattggtcactgctagtcgcgattccatatcgggagcttaacaaggtaatgaccttaa

SEQ ID NO: 290203 - DNA, 122 bp, Homo sapiens
tcttggccccgcctcggggcggggctgggatagcccagactcggggaagtccctgtccaccgccctagccggagctgcgccccgccccggccccgcccccgtcccgcccgcgctggctcccc

SEQ ID NO: 290204 - DNA, 122 bp, Homo sapiens
attacaaaagagctggaggagacttttgggggagacaccacggtttcgcgcgggtttacacgtcagtcatcaccataccccgcacttaaagacacgcagcgtggaccgggcgcggtggcgcg

SEQ ID NO: 290205 - DNA, 122 bp, Homo sapiens
ctccgccccactgcgcatgcccgctcgctctctcttccaccgccccccaatcccgggacgcgggccggttcccccgcacagcccggcgccctctgcccccggcccgccttgcttgcaggtgg

SEQ ID NO: 290206 - DNA, 122 bp, Homo sapiens
tgctgacagcctcctctgtcctggccactgtgggcagcgggagcggggggcctcccggcccggacccgtgttcacagcatccatggcactcactgccttctggtcgtcatgtatcgctgtcg

SEQ ID NO: 290207 - DNA, 122 bp, Homo sapiens
gacctcgtgaatctgcctgccttggcctcccaaagtgctgggatcacaggcgtgagccaccgcacccggcctgacactatattatgtatatataaatatattcggccgggcgcggtggctca

SEQ ID NO: 290208 - DNA, 122 bp, Homo sapiens
tgttttatatccatccttttaaacaaatatttaatagcttgggaatgctggcgagagcagcggctcctgtcagcaaggactgagctcacaatttgaaagatgaaaggagatgcgttctaccc

SEQ ID NO: 290209 - DNA, 122 bp, Homo sapiens
cgttatctccaaaaggttcctcatctggctgcttccactcagtgtaatgactttgggattcgtcggtgatgcatgcattcatcagtagtcggttcctctttatggctgagcagcatccgttg

SEQ ID NO: 290210 - DNA, 122 bp, Homo sapiens
gtggcggcggttatgcccggcttccaccttggcagcagccacctaggaggaaggaagccacgttgtccatgccctgcgtgacacccacagctttatgacgtgccgggcgcagggggtgaatg

SEQ ID NO: 290211 - DNA, 122 bp, Homo sapiens
tcagagagacgtggcctgcccacgtgcagtcagcggcatccgcaaccctgccaggggccccgtgacacgcccccgctgcacagagcatgtgaccccagaggccaccctggccacttccagaa

SEQ ID NO: 290212 - DNA, 122 bp, Homo sapiens
ggcttaactcccagttagctttttaatactttctatatgagtagacagtacaggatcacccgacatttatgaaaaaccctttataaatgagagggagagtccaaaacaatagggataaaaac

SEQ ID NO: 290213 - DNA, 122 bp, Homo sapiens
ccagctactcaggaagcagcggcgggaggatcgctcagcctgggggtccaggacagcctgcgcgacaatgtaacattccctcccgcagtctctctcttttttaaatttttaaaataaaattt

SEQ ID NO: 290214 - DNA, 122 bp, Homo sapiens
tattaatacttgtttttgggtacaattgtgataccgagcctccaaggtggtctcaatgatcgtcatcctaaattcttgatgcacaggatctctgagacaataaatgtttattctttaagcca

SEQ ID NO: 290215 - DNA, 122 bp, Homo sapiens
caaatcagacagcgccaggtctgaacctagccagctggggctaagtcaagtaacaactggcgaaacagaaagcttagcaaaggcaggatagcgacaaacacgacctaaagttttctcttcat

SEQ ID NO: 290216 - DNA, 122 bp, Homo sapiens
ctcgaactcctgacctcatgacccatccccctcggcttcccaaagtgctgggattacaggcgtgagccaccgcacccggccaatttgtttcatattctatgttaagccctcacatttatcta

SEQ ID NO: 290217 - DNA, 122 bp, Homo sapiens
cctcctgcccagatggcctggtttcctggagatgtccagctgcctgggactcagagctggcggagagacagggaggcttcacgtcgggggaggagtgagagccacaggccacagccacggag

SEQ ID NO: 290218 - DNA, 122 bp, Homo sapiens
ccagggtccaggctcaccgcctctggtcatgccctagtaacagggctccaggagagctgacggattagttcaagaatggggcagagcccaggtaaagaggtattggaacagccgggcgcggt

SEQ ID NO: 290219 - DNA, 122 bp, Homo sapiens
gacgctctcagtcattctctaactttaggtgcacgttacgtgtgggtgactctcggagcccgtcgctggcttggactcctaaactccaggcggccggcagcttctctccttggatgtctaaa

SEQ ID NO: 290220 - DNA, 122 bp, Homo sapiens
cttcataagtttcaggtatgtgggaagctctgaggaggttcattgtaatttctaatctgccgaggcctatagcctgatttatgtcactgccaatttctgaggctgaagccatttcacatttc

SEQ ID NO: 290221 - DNA, 122 bp, Homo sapiens
aatgaatgtgacgcttgcataatagcattttttggagcactgttagagcaagggagtcttcgcaatgctaaagaaaaaaggaagttaaaaaatttaaggatgtttcactttcaataaaaaaa

SEQ ID NO: 290222 - DNA, 122 bp, Homo sapiens
agagtgtgaatgatgctaaattcctaaggagcctttgagctgaaatagggcatgacatctcgtctcacatctgatgtgtctcagatttccctattctctgtcaccatgagagaatataaaaa

SEQ ID NO: 290223 - DNA, 122 bp, Homo sapiens
cccgccgcggggcccttggcattcccggctgtccccctcgctccctggcagcctattctccggctccccctggcctccccgggccggtttcacatgccaacgccgatttaggcccgaacaaa

SEQ ID NO: 290224 - DNA, 122 bp, Homo sapiens
tcacccctcacttctcctgagtcccaagtaaggaacggagccaaccctggggaggacccccggtcccctctcccagagtatacggagcctgaacctccccacttcccccaactctgttcgcg

SEQ ID NO: 290225 - DNA, 122 bp, Homo sapiens
tgacgctgtgtcggtgagttgaggctaacgatccagtgtggctctcctgaaggcccaccgcgcccgcacctaggagacgcgccccttctgctcatgctttgaggcggggtgacccacacatc

SEQ ID NO: 290226 - DNA, 122 bp, Homo sapiens
aagggaggcagctgcggcaaagttagagcaagtactgcagcagccaggttgggtccgcgccgtcgggtttctgagaaaagggaggaaagaggcggggcctgcacggtgtgtccccgccctcc

SEQ ID NO: 290227 - DNA, 122 bp, Homo sapiens
tagtgtcgcagaaataaagacagaatatggaaggagacaggactgctgactaatctcatacgtacagggagaaggacactccatgcagcttagctccaacatgtgagtgtgggacagaaaag

SEQ ID NO: 290228 - DNA, 122 bp, Homo sapiens
ctcagctggcggccacccctgagcaggcagctggcagagctgcgagctggtaaagatgagcgtcatccaggcagtgtggctctagtctcctggcagtggggtgacagagcgtggaatggctg

SEQ ID NO: 290229 - DNA, 122 bp, Homo sapiens
tgagtgttggaaaggagttgttttaacaactgtctacaaagtgattattttggttgtccccggtggttgcagatctgtaaattcaataactacatctgctgtagttcccaatcgtttctcag

SEQ ID NO: 290230 - DNA, 122 bp, Homo sapiens
ccagcctctcagtctgtctataaaatgagaataacacagctctccaaatggcacgacacccgctaccttttggcttggagacgctgccccgaaggcggaacctccaggacagctacgtagcg

SEQ ID NO: 290231 - DNA, 122 bp, Homo sapiens
cacgcacgcacaggcgcttccaagacgcaagaggcggtgctcgccttagtgtggggaacgcgaggctttgcattgtcccctcgtggtcggaggagtgccctacaggctggcggctaggttgc

SEQ ID NO: 290232 - DNA, 122 bp, Homo sapiens
gccgcggggcagagagtggacgcgggaaagccggtggctcccgccgtgggccctactgtgcgcgggcggcggccgagcccgggccgctccctcccagtcgcgcgccgccgcccccgcccccg

SEQ ID NO: 290233 - DNA, 122 bp, Homo sapiens
tctttttagctagaggggcctgagctagaggtctgggcagctgcttccgcactgtcctcccgcttcctgtttcagcagtggctccgatttcaccaccattgctgcttctccatggttcttgg

SEQ ID NO: 290234 - DNA, 122 bp, Homo sapiens
gtggcacctaagtaagggggcagagagtaaacggcccctgccccacccggccgaaatctgcgatggagggaagtgtgcatgtccgagcaggtgattgtgacaagtcaagagtgagggcagca

SEQ ID NO: 290235 - DNA, 122 bp, Homo sapiens
cctgggtgaatgcagacacatattatctccagggattgctattgtttacctcctgaaggccgtcagtcctttggtgaacttctagtttgggaacaagtagtaccagcccctgacaaccctga

SEQ ID NO: 290236 - DNA, 122 bp, Homo sapiens
gcggtggcgttgagcttgctgtggaggctgagggcactggggttgaggatcttctggtcccgggtgatgttgcccagggaggtgccaaggtacacgactatgcggtacagctccaccagctt

SEQ ID NO: 290237 - DNA, 122 bp, Homo sapiens
agaggatgatgcggggtgggctactggcacgtgagagccagtggcaccgagagggcgccccggcggcgaggaaggaggcgcgcgtgggaggaccaggctaactccgtcacggacgctaccaa

SEQ ID NO: 290238 - DNA, 122 bp, Homo sapiens
tttttccttcaactttccatggatggtaattttccattaagtcctgaccttccaaggctgcgtcttttcagtgtcctggacacactctgagggagaagtgagctttcctgggatttgatctg

SEQ ID NO: 290239 - DNA, 122 bp, Homo sapiens
gatggggccaggaggctgggacaggcattttggagacctcagaagcctgctctgttcaaacgtctgttctggggagatgtcaggccctgctctgaagacagaagacaagccctgcctccctc

SEQ ID NO: 290240 - DNA, 122 bp, Homo sapiens
tctctgtcgtgcagtcggctcctgggattggccagggacgggacaggcgcggaaccactgcgcgcacaggcggagcgcggagacttgtccgtcacgtgcggccgcccggcctctcggccttg

SEQ ID NO: 290241 - DNA, 122 bp, Homo sapiens
ctactgtgagctagttcaggaagcaaggcactaaaaggcattcctaatgttctttcccagcgaggggcagggaaagtctctgactgcaattcctgactggacaggcccagcccctctcctgt

SEQ ID NO: 290242 - DNA, 122 bp, Homo sapiens
ctgaaagctgccgccagcagctccagccctgtcctcaatatgatgtgtgtgtccctgccccgctcaactacagcctggagttactgcgaggagtggtgggaggggaaaaggaaagcagtact

SEQ ID NO: 290243 - DNA, 122 bp, Homo sapiens
aggtcatcaagcaacttggggacacattagtcaagtcagcccccggaacagaggctgagacgaaggtgggggcatcagttgacagctcagcaagggagaagaaaggctgataaccaactgag

SEQ ID NO: 290244 - DNA, 122 bp, Homo sapiens
agcctctacaacagagcagcttcccagacttctccaggaacccagaaacgggatggttgtcggcaaaggttgggagtggcttttcctctggtagccacacacctgagcactacggacaggga

SEQ ID NO: 290245 - DNA, 122 bp, Homo sapiens
aaaagattaagtttctctaggggacaggcctctgtgtatgccagagaaagtaatgttccacgtcagctttttgtgtttcttttggtttcctgtattgcattatttagggtgggatttatctt

SEQ ID NO: 290246 - DNA, 122 bp, Homo sapiens
gcgagggggaggccctggggaccctgggatggggaactgcattgggttccgcggaggtttcggcagtggcatccggggccggggtcgcggccatggacgtggctggggctgagaccgcggag

SEQ ID NO: 290247 - DNA, 122 bp, Homo sapiens
tggagaaagtagatcttgcatcaggttgaactccagtttctttttgctcagtttttcaagcgctgagtttattttgtccctaggcataaagaaatctttctaggaacccctttggttatggg

SEQ ID NO: 290248 - DNA, 122 bp, Homo sapiens
caaatgtttaccattatcaaaactctccctggagggagatgcaactttggctcgcctcaccggcagtaatttaatttttccttcattctgactcggaaatggcagcatttttcaaagcttcc

SEQ ID NO: 290249 - DNA, 122 bp, Homo sapiens
cactgggtgggggggtggggggtggtgattcagagctgtgggtcccggcctggcccttcccgccatggggagctgtgggtcccggcctggccctgcccgccgtggggagctgtgggtcccgg

SEQ ID NO: 290250 - DNA, 122 bp, Homo sapiens
ctaaattgcttcccaatgctgaaatcacttagtgagatacatcaaagaccacagaactttcggtttacaagtaacagacaaagaatactagaaaatttaaaatttttaataaatgtgctttg

SEQ ID NO: 290251 - DNA, 122 bp, Homo sapiens
gtcgccgagtgtgtttgttcccccagtcccggcgacaggtgcctgtgctgtgtgtgaagccgcgagttccagcccgcggcctcccggcccagaggccaacatccaggtgctagacaggtgag

SEQ ID NO: 290252 - DNA, 122 bp, Homo sapiens
gttgcttatggatgagcaaagaaagcagtttcatgagatggaatctactcttggtgaagacgctgtaagcattgttgaaatgacaagaaatgatttagaatattccataaacttggttgata

SEQ ID NO: 290253 - DNA, 122 bp, Homo sapiens
taccatctcatctttgaggatttctctgccttggtttgatgttgaaagcttctttaggctcgattactatactgcacgggtggagagaccgtgagtcaaactccttttgggttgttttaaaa

SEQ ID NO: 290254 - DNA, 122 bp, Homo sapiens
ccccgcccggcccgcgcctccctccccccaatctccgccccccaccccctgcctcccccccgctcccgctcccctgagcccagccagaccccgcgccgcccgcgccccgctcgactccggag

SEQ ID NO: 290255 - DNA, 122 bp, Homo sapiens
agcctggaaggccccctccactttctctccaccttcgcactcctgaccccggaaggactccgccttctccatgtcagactgctgctcagcgccaggcatcagctgggaagctggcgtgggca

SEQ ID NO: 290256 - DNA, 122 bp, Homo sapiens
cccacgacgagtgctctccaggcgctgcaaagagcaggggtctcctaggggctttgagaccgcgggcggacctcgggggagcaggcgtgggacccgatctgtgccggctcagcagggcccca

SEQ ID NO: 290257 - DNA, 122 bp, Homo sapiens
agcatggagcccatgcagggcagccaggaaggacagtaggccatgtagccagaggcccagcggtccacgcaggcccagtgtgtccaaggctgcccgcagtggtcgtgagcacagggccagca

SEQ ID NO: 290258 - DNA, 122 bp, Homo sapiens
gggcccatggcagtaatgtgcgtctgtggatccctttgctatgaggcttgacttcttgatcgggttcacaaggctggtgggcagcctgagatctttgcttatttcctacgtcttctgaaagg

SEQ ID NO: 290259 - DNA, 122 bp, Homo sapiens
tcaaggctctggctgattgactctgattcacctgactccgtggacaggacaagggtggggcggagtgaaccttgtgggtggcagggggttgggacaggcagaggcagggccttcctggtgga

SEQ ID NO: 290260 - DNA, 122 bp, Homo sapiens
aggtgtacgcaggcgcagtggcgtctaaatttgggcccactaaatgcgtcggagcatctccgcgcccaggcggctcctcctcactgcggcaacccgggaaaacttgtgaactaatcagaaaa

SEQ ID NO: 290261 - DNA, 122 bp, Homo sapiens
cccctcccaagagagttgctctgtcttaaataataatactgctaagttgccttcattcggcgcttattgggtacaacataaaatacaaggcactttactcccagaaaccccatcttacaagt

SEQ ID NO: 290262 - DNA, 122 bp, Homo sapiens
cgatgtgaccgatttgagttcgaatgccaccaaccgaagacgtgtattcccaactggaagcgctgtgacggccaccaagattgccaggatggccgggacgaggccaattgccgtgagtagtc

SEQ ID NO: 290263 - DNA, 122 bp, Homo sapiens
cgcctgctcacgccccacttgctgctggtgttggtgcagctgtcccctgctcgcggccaccgcaccacaggccccagggtaagtgcgcccccagctttgcgcccacctgcggagggagggga

SEQ ID NO: 290264 - DNA, 122 bp, Homo sapiens
ggcggcgagagaccagccagaggaaagcggcgcgtggctacgttgttcccggccccctgccggaccgggtgtctggagtgctgatcttgggccaaagcttctgccgctctcccagacactgc

SEQ ID NO: 290265 - DNA, 122 bp, Homo sapiens
cattcacccagcgcattccgccgcccgcaggcttgcggggaaacttccttattattgtgacgccgaaaacggagaaaccccgggtccggcgagaggggctgtgacagtcggagtcccaagct

SEQ ID NO: 290266 - DNA, 122 bp, Homo sapiens
gacaggcgcccggcctcccctcggcggctgggctgacagcccggcagacacaacaccacacgtgctgcgcctcgcaccacaacacccgccggcctgtcagccccgctcgccgcctcagcccc

SEQ ID NO: 290267 - DNA, 122 bp, Homo sapiens
aagataatgtttgcttactccaaagtttaccttgggtcctgttcaacatactgatgaatccgatcctccaacccactcttttatgtaaatatggaaagcaaattctttcaagattatgaagt

SEQ ID NO: 290268 - DNA, 122 bp, Homo sapiens
cacccagaccagtgacgtcaggacgatgctgctcacgacagcaatggtgaagatgcctaccgtggtcccatccttcctgcagcctgctgcgggcaggacgctcagctggctgtgagctcgct

SEQ ID NO: 290269 - DNA, 122 bp, Homo sapiens
acatgagacaacagccctgtagcagaaaatgcaaatctttggatttccgcagctgtacaccgtgcaaagccattttttgcatcatcccacaatttattctctgcagtcaatgtgttaacttc

SEQ ID NO: 290270 - DNA, 122 bp, Homo sapiens
gaggtcgcgccagcccgggcaggcagctttgcaagtccgcgttatatatcgcagtggctgcgcccgggatagctggctgcgccgccgcgcacatgcctaggttcgacgccctcctccctttg

SEQ ID NO: 290271 - DNA, 122 bp, Homo sapiens
caggacacactttgaagcactcggttactgctcagtcagccctgtgtccatggcagcgcacgcagtgttgaggtaaacatcgaaatatggacagactaatgtgccagagtaatgagccatgc

SEQ ID NO: 290272 - DNA, 122 bp, Homo sapiens
cgccgacgccgggagggggcccgggaccttcggggcgctgaggccaggcggggggcgaggcggggcgggccgctcgcgtcgccatggcagcgcccggcccggcatgcttcgcggggccgcgg

SEQ ID NO: 290273 - DNA, 122 bp, Homo sapiens
accagaaggaagaaactccgaacacatacgaacatcagaaggcacaaactccagacacgccgcttttaagaactgtaacactcaccgcgaggtgccgcagcttcattcttgaagtcggtgag

SEQ ID NO: 290274 - DNA, 122 bp, Homo sapiens
aatagtcggtaaaatccaatccatacttcacggtatgaaatgctcagactctctccctagcggagctagtggaagacgctcagcagccttagcataggaatctgtaggtacaagcacattcc

SEQ ID NO: 290275 - DNA, 122 bp, Homo sapiens
tcctctccaccccacactggcccggggcgggctgggcgcgggcccctgcgggtgttgcaacgcccggccagaaagtgggcatcagctgttccgcctggcccacgtgacccgccgagcataaa

SEQ ID NO: 290276 - DNA, 122 bp, Homo sapiens
cacacatggtcacgggcactcatgttctcaggtgtgcttggtcccatccacactcatcaccgcctcccttaccctcacgtgctcattcgtatgtgcagcgcacactcagtcttgcacacaca

SEQ ID NO: 290277 - DNA, 122 bp, Homo sapiens
ccggatgagggcgtgcagtgtgtcacagtggggaacccagccaatgaggcccgagttggtcgataaagggatgacagcgtatctctggatgctggcgcccacagaaaagcagggttagtgta

SEQ ID NO: 290278 - DNA, 122 bp, Homo sapiens
cactctcagtccacttgttttgggtagaattgaacctatgttcagtgtacgagtaaacagcgatccaagcctggccagtcagagcatcccagccatggccacagtaattggcccagggatgg

SEQ ID NO: 290279 - DNA, 122 bp, Homo sapiens
ggtgccctgaagacgggagctaattggtctgggtggtggaccgtcccggggggattggtccgagccagaggccggcgcggcgttgggcgcggctggggagctgtgcttctgagagtaggttt

SEQ ID NO: 290280 - DNA, 122 bp, Homo sapiens
caaaagaagtgcaggtttagttttaatttttaaaatctttattttctgtcttttaaaatgcggcttcaaatctgcaatatagaaaatatatgctttggggaagcccaaaataacagactttt

SEQ ID NO: 290281 - DNA, 122 bp, Homo sapiens
atcattcccattttacagactgggaggctgagcctccgaagcaatccactaaaggttccccgagtcttgagtgggagagcacagggtgaatgatcctgagtgtcctggtcctgcccagtgtg

SEQ ID NO: 290282 - DNA, 122 bp, Homo sapiens
ggctggaggcccttagtatcttatgtcctggtgcgggggacccggaggtgaggcgagccgcggtgaattgggtagatccgaaaaagagggaaaacacccaggcaccgcccgatccccggagt

SEQ ID NO: 290283 - DNA, 122 bp, Homo sapiens
actcaggtgccccagtacctgctggctgctggcttcagtcatgtggcgtgcacccagccccggcggatcgcctgcatctcactggccaagcgtgtgggctttgagagcctcagtcagtatgg

SEQ ID NO: 290284 - DNA, 122 bp, Homo sapiens
ggtgcttacgccttgtatttgtgtcttcctccgtgcccagtcccggctgacgagccagagcgaggccatggccctgcagtcgatccggaacatgcgcgggaactcccactgtgtggactgcg

SEQ ID NO: 290285 - DNA, 122 bp, Homo sapiens
acacctactcgcaaacgtagcaagagaggttgctttaagaagcgggaatcttcagcgtcacgtgaccgccggtctctacagtctgttcacactggccaatcaagagccaggaagcctcctgg

SEQ ID NO: 290286 - DNA, 122 bp, Homo sapiens
ccgcggaccccagcgccagcccccacactcacctcacagggccctgcaaacctcggcccgcgccccgcactcaccccagggccccgagacaccccgcagcccccgacacgcggccccgtggc

SEQ ID NO: 290287 - DNA, 122 bp, Homo sapiens
gtgatgttctcggttagaagctgcgtgtgttttttcggtgatttcactagaatgtgcgttcgtgtgcctgttctctgtgatgttctcgggtaaggggtgctcttttagtctgtcatcccaag

SEQ ID NO: 290288 - DNA, 122 bp, Homo sapiens
tgggagtcatagggaggcctgggagctgagagctgggagcaggcaccagcctattaatgccgccctcctgaggtgggtgcagataagtggccccaggggccgggcccgggctgaggcccctc

SEQ ID NO: 290289 - DNA, 122 bp, Homo sapiens
aggcaaggctaatagacagctcatttcctgcatctgccactccgacgcaccttcttccctcggttccacccctcattcagccaaagcgctctgactgagtcccagaggcctcccgtttgcat

SEQ ID NO: 290290 - DNA, 122 bp, Homo sapiens
tcacagagtatttacactttgtggttcttctttctgtcgctaatccacataagagagatacgtattgtcactctattaaacaacttatttgtggtttgactgtgattttccctgaaccttat

SEQ ID NO: 290291 - DNA, 122 bp, Homo sapiens
aaagagtgacatcactctgtaaagacatgtgttacctaacaaactctggcctgaggacatcgacccttagggaacatccagtgtaattacatgcataaatgagaaacccgcccaaactaatg

SEQ ID NO: 290292 - DNA, 122 bp, Homo sapiens
atttgaacttcaccaaagccatgaaagggtggtcagcatgcacagtcattcgggaaatgacgttaaaccactgtgagattccactccacacccgtcacggtgatggagaggaaaagttctga

SEQ ID NO: 290293 - DNA, 122 bp, Homo sapiens
ccaacaggctggggcctggctgcgcatgtctaatggagccctgcactccagtgtcatgctcgtaggctacacgcagcccacactcacacccaggctggggcctgcccctagggattgctgtc

SEQ ID NO: 290294 - DNA, 122 bp, Homo sapiens
cctttacccggtttcattttcagtttaggccaaaacccccgcgggttggtcggggcagggcggggctcgggggaccgggctgaccgcgggggcggggccaggttctcacaccatgcaggtga

SEQ ID NO: 290295 - DNA, 122 bp, Homo sapiens
taaaaacagcttgaaactaggctgtacttgcctgctgaaatggcatccttaaagcacctacgttgacataaggtgcgactctacaagcttcaaactggctggcggcccctatgagaacacct

SEQ ID NO: 290296 - DNA, 122 bp, Homo sapiens
gttatctcttcagagttgtttatgtaaattgatcactccattgccgccgaacttgtcaagcgacatgtgctgatggtgctttgaccgagagtaggggtacagcgaacttctttcaagcttgc

SEQ ID NO: 290297 - DNA, 122 bp, Homo sapiens
cagccccaggcagatggaggtcccccagagcatgacgagcatgacataggtaaacgtgaccgtcctctccgaatggtacgtcagagcgtagtacagtgagaggtagcggtcaacagtgatag

SEQ ID NO: 290298 - DNA, 122 bp, Homo sapiens
gaggcgggtgagtgaccccggcccggggcgcagatcacttactccccgctccatgcctcacggacggccctggtcccctgagtctccgggtccaagatcgaccccgaggctgcgggacctgc

SEQ ID NO: 290299 - DNA, 122 bp, Homo sapiens
atccatggcgcaatcgcctgtactgccccctctctgactttgcctgtggccaacacaagacgaacgcagcctttctaagggaaatatgccgttacaaacaagaagcctaattttgtctctaa

SEQ ID NO: 290300 - DNA, 122 bp, Homo sapiens
gccctccccacccccaagccccaactccccagcgtcgctgcgcctccgggatgcaactcccgttttccgcgcactccggcggcggtccccgcacacaaaaacagcctctcggaggcgcacgg

SEQ ID NO: 290301 - DNA, 122 bp, Homo sapiens
cagctttccagacttgccgctgccagatgcggttctctgagttctctggttacataagatcggcagggctcagccacgaaccacagtgagagcatgcagctcccccgaaacgcacccccagc

SEQ ID NO: 290302 - DNA, 122 bp, Homo sapiens
gccgccatggcagcggcgggggcagagagacgggtcggcgctggggacaaaatgcctcaacgcgtaacggacgccagccacccgacagggcggggccacggccggaagtggcggagagtgct

SEQ ID NO: 290303 - DNA, 122 bp, Homo sapiens
aaggctgaggcaggcagatcacttgaggccaggaatttgacaccagccaggccaatatggcgaaaacccatctttactaaaaatacaaaaaattagccaggtgtggtggcatatgcctatag

SEQ ID NO: 290304 - DNA, 122 bp, Homo sapiens
cgctggaagtcgcggcggggcaagggccgctcctcctcccgcaggaagccctcgtcctcgcggaacttctccatggcctcctcgcccagctggtagaagcggatctcctcggagaaaatgtc

SEQ ID NO: 290305 - DNA, 122 bp, Homo sapiens
cctcccacatctacccctttcttcctccaaagaacccatggacagaggggctccatagtgcggtgggatccaggtggcatgggaaagtgggtgagttgaaatttcaagcggttgcattgatg

SEQ ID NO: 290306 - DNA, 122 bp, Homo sapiens
tcctgacctcatgatccacccgcctcggcctcccaaagtgctgggattacaggcgtgagccggtttttaaggaaaggagaggaggcagagcttaacttgtttaccaagaatttatatttaaa

SEQ ID NO: 290307 - DNA, 122 bp, Homo sapiens
ggccgctgattggcttcccctgacagtgggcggaacgcggccccggattggatatccattcgccgtccctcacccggcacctgcgtgcactctccggcgtcccaagtgagtggaggggggat

SEQ ID NO: 290308 - DNA, 122 bp, Homo sapiens
ctgaagacagtggctcctgggggtggcaaaagagctttatttacacactgacaaggctcacggggtgtcagctgaagaagtaggtggaacgcttcacctgctccaggtcgaaggcccctgcg

SEQ ID NO: 290309 - DNA, 122 bp, Homo sapiens
aacagagtgaagaaaggaggaagtggaacctcgtcatggtcctcacccacgaggtgggcgcgaggagcaggctggtactggataggctcaatgtggccacaaagcctggtgaggtcacaggg

SEQ ID NO: 290310 - DNA, 122 bp, Homo sapiens
caggaaaaagtgcagacttcttagcagtacgcacttctccagcttctttgctttgcttcccgattcgctgggtctcccgaaaaatgacccacttgcccccaaggttcaggttatttcacacc

SEQ ID NO: 290311 - DNA, 122 bp, Homo sapiens
tcggtttccccaccgctctttggattcaagctgctgcaaagccctccccagcctgggtgtcgagaagttgcttggcccagtcgcatggcacgcccaggcagtggggcccgcagacagcgtgg

SEQ ID NO: 290312 - DNA, 122 bp, Homo sapiens
ttagggaaggtggctgcagcggcaggacggagtccgccgggacgccctgggtctggggtgcgcggggggcccaggaggggacaggacgcgcggggatccggaagagcgggccctgtcgcaag

SEQ ID NO: 290313 - DNA, 122 bp, Homo sapiens
gtcattgggctggagctgtaaactggcgcagaaatgggcagggaacccgcaagcccacaccgcccaagagtcagtgaaacctgagggatcttccccaaggctctgaaccacgcgggacgcct

SEQ ID NO: 290314 - DNA, 122 bp, Homo sapiens
tataccctgctggaggcacaggaatcctcttggaagctttgtctggacatgctttaataccgtccatttctactgttgccataccaagccgctactggtcaccactgtaaatctttctgctg

SEQ ID NO: 290315 - DNA, 122 bp, Homo sapiens
ctacccgctggggctggctcatgcccccaaggggatgcggcttcagcaaagcttctcaaccgtccccatcccagaggggccctcctgcctcagaccagcctcctaaacaggtgcaggatagg

SEQ ID NO: 290316 - DNA, 122 bp, Homo sapiens
ttacaactacctacctaagcaaaagatgttctgtgttcctttgttgctgatttagctgcccgaaatcaccatcttaagatgcccaaaatcacatcttaagaagtgttatgggcacatgaatt

SEQ ID NO: 290317 - DNA, 122 bp, Homo sapiens
tcacctcccagatgaagggcggccgggcagaggcgctccccatttcccagatggggcagccgggcagaggcgctcctcacttcccagacggggcagccgggcagaggcgctcctcacttccc

SEQ ID NO: 290318 - DNA, 122 bp, Homo sapiens
tgatggttttataaggggcttttccctctttgtttggcacttctccttcctgctgccatgcgaagcaggacgtgtttgctttcccttctgccatgactctaagttttcctgaggcctcccca

SEQ ID NO: 290319 - DNA, 122 bp, Homo sapiens
acgcgttgccagggcaaagagggctggttccgccactgagcagcctggccaaaggcttagcgcaggcgcaaattctgcggaccccagagccagagacccaggagtgtggcgtgtgggaaggg

SEQ ID NO: 290320 - DNA, 122 bp, Homo sapiens
accctgggccagttttaactagggcgcggctcatcgcagtgttgattacggagttgctatcgattttcgtggggagcaaacgtttctggagtttacgatgcctgttatcgtttggctgctag

SEQ ID NO: 290321 - DNA, 122 bp, Homo sapiens
cacactgtagtccctcttacttgagttgctgggtgagttcagatttctggagatgttccacggcctccttggcattgttgctcagctggctgaagtagtcccacatcaccgtggccacctgg

SEQ ID NO: 290322 - DNA, 122 bp, Homo sapiens
tgtctggctgaagccaaaatttattctcattccattgtattatatttgtctacttgactgcgaaaagctatgtttaggaaagggggtgtcaataaaagcagttctggtcagaagctgaagga

SEQ ID NO: 290323 - DNA, 122 bp, Homo sapiens
tcctttttgcaggaagtgcctgggctcctggagtgttctcagggctttgatccaggccaccggctccgcaatcaacatcactgatatttcagcaggtcattgacctaattccattttagtgc

SEQ ID NO: 290324 - DNA, 122 bp, Homo sapiens
gatcctgcactcccagctggcactttagggactagcaggaggcgcccgaggccaccttcccgcctcccagccaactgcgtgtcccagccccgggggcaccctccccgacctgccttccgggg

SEQ ID NO: 290325 - DNA, 122 bp, Homo sapiens
gccccctcggcgtcggggctggagttgccgagattctggttgttatggcagtgctggctgcgtctggggagggcgtgggggctgggaactccgcgcccctccgccttcaccccagttgcggg

SEQ ID NO: 290326 - DNA, 122 bp, Homo sapiens
tgaaatcagaccatcagccctgcaactctctccacatagtccagtccattccgggaccaacgcctgcaccctcagacaaggacaacccaaaagtgctctgcggctttaggacagagctcacc

SEQ ID NO: 290327 - DNA, 122 bp, Homo sapiens
agagcttcctctgcaggaacctgagaggcttccaagccacaaagagattttacttcctgccgaacagcgttggctacggctttcttgactcgtccagacctcacgaccgccagatccgagtc

SEQ ID NO: 290328 - DNA, 122 bp, Homo sapiens
aaaagggtttgattggaactctggaagcccggacgcagaaggtgctagggctcccgtcgccgcgagggcgccccgcgcctggagatgggatggtcagttcttcccggcgcgtgcccagacac

SEQ ID NO: 290329 - DNA, 122 bp, Homo sapiens
gtgctgaggactggagtgtggggcacagaacgtgaaattccaacaggtgccacaagggggcgaaggctctggccgcgggaggcctccagccctcactcaccggtcctggcctccacagggac

SEQ ID NO: 290330 - DNA, 122 bp, Homo sapiens
ctacgctcagaggcctcagccgcgcgggagggattcctgtgtctcccacttctacctgcgcgaccttgggcagagtattagcgcttcccagccttaggcattcatctgtgaaatgggaaaaa

SEQ ID NO: 290331 - DNA, 122 bp, Homo sapiens
accatgctctgtggtgaaacgctttggtctcaaaaccacccaagacaaagcacgtggcctcgtgtcccctttctgttaaacgcatgctggggaggcgccagatctccttccttccaccccca

SEQ ID NO: 290332 - DNA, 122 bp, Homo sapiens
tctgatgggagccttatccgagaggtgggtgggagggacgcaggctgccggtgctggtcccgggttgtttgtggtgcagccagcggctggtcactcacatgcagactgagctgacgcttagg

SEQ ID NO: 290333 - DNA, 122 bp, Homo sapiens
ttaacctctgctctacccaacagctgcctgaagccagaagcactgagtgtcagaggccaccgatcctaagcccctcaaaaacagaggccacagggtagctgggatggggagcacaagctcca

SEQ ID NO: 290334 - DNA, 122 bp, Homo sapiens
gccccacacctacggccgccgccaccgccgagggctggagctcgccgcccccatcccccacggcccgcagacgcccggccaagtggcagccgcagccacagacaccaccaccaccaccacca

SEQ ID NO: 290335 - DNA, 122 bp, Homo sapiens
ccacctccgacccactggatcgacagctctgggggcggggcccacaatctgtttttatttcggggcacagcaaatgttgagaaccactgtcgcaggcgggcaaaagcggcactccccatgtg

SEQ ID NO: 290336 - DNA, 122 bp, Homo sapiens
tggtgggggtggcgggtcagggaagaccacagtcccatgatttggggattgagcagtagacgtcacagtgcagtcacctgccagtgcctccggcgagcatctcatcactagattccactgtt

SEQ ID NO: 290337 - DNA, 122 bp, Homo sapiens
gaccctggaggctcctcagtgtgggaatggcagggatggctggtctgcatgaatgtgacacggtagggtctgggtgtaatcctttaaaacatgtccatgaaaagcgacttcccaaggtctcc

SEQ ID NO: 290338 - DNA, 122 bp, Homo sapiens
ctctgtgttgggaggaaaaatgtccttcttcaatttccgtaagatcttcaagttggggagcgagaagaagaagaagcagtacgaacacgtgaagagggacctgaaccccgaagacttttggg

SEQ ID NO: 290339 - DNA, 122 bp, Homo sapiens
gttctttgctcaaaactttctgtggacctaaacacaaaagttacaaagataggccaggcacggtggctcatgcctgtaatttcagcactttgagaggccgaggcaggaggatcacttgagtt

SEQ ID NO: 290340 - DNA, 122 bp, Homo sapiens
tattttgtttttgtttgagacagggtctcactgtgtagtccaggctggcgtgctgtggggcgaaactcatgggctcacgccatcatcccgcctcagcctcccgagtagctgggtctacaggc

SEQ ID NO: 290341 - DNA, 122 bp, Homo sapiens
ataacatctggggtaacaaatctctatcctcaaagctgccatttgatagcatagaaagcacgcacttaaatagtagaagacaataaaaaatgccagagctcctatcagaaatactttgaagt

SEQ ID NO: 290342 - DNA, 122 bp, Homo sapiens
ccaggagccagagcgggccggggagcgcggtcatggcaggccgggggcgctcagctggggcgctcagcgggcgcgcatcggctccgcggccgacccagggcctggggacgccccgacggcaa

SEQ ID NO: 290343 - DNA, 122 bp, Homo sapiens
cttagactgttaacacgcaggcagttaagaaagagaagtaaacttccatcttgtttaagccgctgttaagccactggtatgctgagtcttggtctgagcacctgaacctacatcctaagtaa

SEQ ID NO: 290344 - DNA, 122 bp, Homo sapiens
gacatgtaaatagtctgggaacagcatacagggagtgctcagggctctgacatagggcagcgtggtggactacattgctaaggaaggcatcctggaggaggtaatgcaggcaaagttagcca

SEQ ID NO: 290345 - DNA, 122 bp, Homo sapiens
cactcattttcttattcactcaacaactatttttgagtgttttggatgggtcagacattgcgctaagtgaaaaataggaaggtaagaaaaagaagactctgaagatgattccctccccaaaa

SEQ ID NO: 290346 - DNA, 122 bp, Homo sapiens
agtattaacctccattacacctccagcagcaatgccttcctcggccatggcagtgggttacgggtgaacctgaatcttgaacgcacccaagcctccgcctccgcgcgactcggcggcaggag

SEQ ID NO: 290347 - DNA, 122 bp, Homo sapiens
cgggccctggacctggaggggtggggggggcgcccctccctcccgttcaccggctccaggcggctttgctggtgcccgaagcccccgccccatcccccgctcccactaggctgccctgacca

SEQ ID NO: 290348 - DNA, 122 bp, Homo sapiens
caaggcctcagcgcacctcccggtaagtgctacccgaggttgctggggtgagagcggcagcgcctccgtccacaggagaaaaagcggtcatcagggaagcaataatggctgtttccccaccc

SEQ ID NO: 290349 - DNA, 122 bp, Homo sapiens
gctttttaggtggagtacccgctgcattctctaaagtctttgccaccaccagattaccaacgttttcaccaatttgccacctccctactcctctcctttccaaaagccctcattggaaagaa

SEQ ID NO: 290350 - DNA, 122 bp, Homo sapiens
ttgttagtgggtgcttcgatatggaagggagataaggagtctcctaggcagagaatcccccgtaggagctgtcattcctgggtagcaacaagctgtcagttaatgcctacctcagcctactt

SEQ ID NO: 290351 - DNA, 122 bp, Homo sapiens
agaatcgccctgcgtaaaagtgtcctgaggtcccgcttctgcgcccttcccggcccaagccgaacacagggtcaacctcactctacaaagtcaaccggatagaaatccgccaccccgcgagg

SEQ ID NO: 290352 - DNA, 122 bp, Homo sapiens
tgagtagagtcataaacactgagccttttgtgcaaaatatcataagggcactctgacgctcgttcatagtctggaattaaaatgcagacagctacgcaagtagtatgagctgattatctttg

SEQ ID NO: 290353 - DNA, 122 bp, Homo sapiens
gcttgtctgtcactcaagaaggggcgggcacagctgccggtagaggggaaaaacgccggccgtccccgcccccctagtggaggcctcttaaagaaacaggacgccattcccctgcgggctac

SEQ ID NO: 290354 - DNA, 122 bp, Homo sapiens
acacaatcccagcagaagggtagaaaaatcagtattttacaaagatgagtagttttgtgccggaaaaaacacaggtttcttgtaagacaatgcaaattagttctacttgttctcaaacaaaa

SEQ ID NO: 290355 - DNA, 122 bp, Homo sapiens
cccgctccggtcagccgtcgtgcgttgccatgtaggcgccccgctgaccctgcgcccccccgcccttggacccccatagctgcttgagtgagtccgaaatacgggcctccttccaccctact

SEQ ID NO: 290356 - DNA, 122 bp, Homo sapiens
tgacgtcccatgcctctacggggatgggatgcgatggtgtcaggcctctggcttgggcgccgcccctcggcgacgtcactgggtactgtgacgtcactgggtgctgtgacatcagggcaatt

SEQ ID NO: 290357 - DNA, 122 bp, Homo sapiens
tccctcctgggggcagcacctcctcaaaccttcctagcgctgttcctcctgcctctcacccggcagcctttgccctctggagtccctgccccaagggctgttcaatccggtgtggctctggg

SEQ ID NO: 290358 - DNA, 122 bp, Homo sapiens
gaaggcctggtcaaaggaggccaccaccaccaccgccaccgccaccactaccacctccgccgccgccgccaccactgcctccactaccgctgccacccctgaagaagagagggaaccacagc

SEQ ID NO: 290359 - DNA, 122 bp, Homo sapiens
ttcataactgggatgcaggctctgagcttgctatcctgcagtgggctgaatctttgtgcacgccccctggacagtgcctggtcccctttatgcacgtgcccctccctcccacatctgtgcct

SEQ ID NO: 290360 - DNA, 122 bp, Homo sapiens
aaatttatggattgtttattccgtctacctttgctgtgtcccctggttgtggcatacacacgtgtgggtataaaatcgtaaatcctatgtagtcgcgtagtgcatgcgcagaaggcttagac

SEQ ID NO: 290361 - DNA, 122 bp, Homo sapiens
aggaaccaatctcagttaagttattaatgcactttgcccagactagtaactctcccctgacgttccgcatttcccttgcttctcccggaaacgtggggcgcccaggaatcctaaacttccaa

SEQ ID NO: 290362 - DNA, 122 bp, Homo sapiens
aaacctctagggtgcttgggaagttctaggccctgagtcaccaccactgaaacactagggcggaccaagaaaacttcccgtctcttctctgagcacgaagtctccactgtgtgactaatgtc

SEQ ID NO: 290363 - DNA, 122 bp, Homo sapiens
tccgaggcccagctgcagcccttggaaggctgcacacctgagcgtggtgtgcgctgaggccgggcctcccggggcagccccaggcagcggctggctgcggcaggggtgggagggcaggggta

SEQ ID NO: 290364 - DNA, 122 bp, Homo sapiens
cagaatgacaagcagacatatttggctggaatgcagaattcatggaattgtatatttggacgttggcttaaaattaagtggcttggggccaaattgtggaggactttgtgatatctgatttc

SEQ ID NO: 290365 - DNA, 122 bp, Homo sapiens
gcgtgtccccccacgtgctccccagcactcgcaggacccccgcctccgagcttccctgagcgtgcagcttccagtgagggcagccccacgcacagccccccacaccctccccaacgccttca

SEQ ID NO: 290366 - DNA, 122 bp, Homo sapiens
gggaattcctcccctcctttcccccccgcaccagtcccctagagaggcgtacccgggtcccgcccgccagagcctgagctttgtaccgcccaccaaggccacgccccctaccagctgtgggg

SEQ ID NO: 290367 - DNA, 122 bp, Homo sapiens
ctcccggttcctctccaaacctggtccaggcaccacgcccccttctcactgactagtgatcgccccttttgatgtccaggcctgcctttttggtgacctctgaccctgggcctagtgggatt

SEQ ID NO: 290368 - DNA, 122 bp, Homo sapiens
acacagcctgacaccatcttcagggtgggggtgcccaggccaggtgtctgggggctgcagcgaggccctcgtgaccgtacccgtggtctctgcagtagaggagagtccccctaaagggctcc

SEQ ID NO: 290369 - DNA, 122 bp, Homo sapiens
tatgagctgtaacactcaccgcgaagatctgcagtttcactcctgaacccagcaagaccacgagcccaccgggagaaacaaacaactccagacgtgctaccttaagagctgtaacactcacc

SEQ ID NO: 290370 - DNA, 122 bp, Homo sapiens
tctccaggatgggcacctgctgctcctgctgccgccgcggggccgactcagtgtggagcccggagatgtggacgcctccggccactgtgaccctcagccacctgctcaccaccacgtcagcc

SEQ ID NO: 290371 - DNA, 122 bp, Homo sapiens
tcgttgctttagtgagtgaatgttgacctaagcgtcacttcgcctgtcttgagtctaggtcggggagtgggttcagttagccaatcagagaacgctgatggggcgaccagtatatgctcatg

SEQ ID NO: 290372 - DNA, 122 bp, Homo sapiens
ccaagcagcatagaggataggagcagcatgtcccctggagaggatgaaccggtcgttgtccgggtgttctgggtctgtctgtttatacttcatcgtgtggaagaagaggacagacacgacct

SEQ ID NO: 290373 - DNA, 122 bp, Homo sapiens
agggaccgggcctcacacggaggcctcacacggagctgctcacggagtgctcactgcatccgagaaacctgcgcttcctgcagtgtgaagaagctttgcagagcattcagggccccttgctc

SEQ ID NO: 290374 - DNA, 122 bp, Homo sapiens
cgggcgggagtcactgtccaccttgcttcgccagggtgttatcgccagccagtccccttccgcatgcccaagggcagcctcaggaagcgagcccaccaccgtcggcccagcgcctgttgatc

SEQ ID NO: 290375 - DNA, 122 bp, Homo sapiens
atcacctgcccctggtgtataatgacaatctctaacatcctttgacctttttactgtgtacgctgtgcttggtgctttacttcagctacttgcagtggaaaagaagaagggcttggtgcctg

SEQ ID NO: 290376 - DNA, 122 bp, Homo sapiens
acggtgccgagggaaggggcggggcgaggagaaggggcagagccgagggaagaggcggggcgagtccagctccaggaggaggagcgttactatgggaaccttgacaggtttgtgagcagctc

SEQ ID NO: 290377 - DNA, 122 bp, Homo sapiens
ggggaatggggtgtggtcacgtggggttagggccccctccaccccgcttgctcttcgcaacggaaattgctactggcctcagaattccctgagcaaacgttgcttctctatctccttactcc

SEQ ID NO: 290378 - DNA, 122 bp, Homo sapiens
ttgattgattttctaatattgatcatttgcaaaacaatacgcatatatactgcccgagaccgatgccacaagtcaacatgatagtcggccacatcgctttagagacacccctcatcctgccc

SEQ ID NO: 290379 - DNA, 122 bp, Homo sapiens
ggctgctcacagctgctgcagctaaagataggcgtgaagggcacacgccttggggaaagtcgtggggagcggtcctgtctcgggccatggacacaatgaggtcactccgcttcatttctgca

SEQ ID NO: 290380 - DNA, 122 bp, Homo sapiens
tgtgttttggaggctggctctgggcagggcactgcgcaagacagttgggcacttagcccacgggccagccctgctccccaggagtggcagattcccacacacttcctcctacttagagaaaa

SEQ ID NO: 290381 - DNA, 122 bp, Homo sapiens
ctggaggcccagcaccccactcttgcacctgcaccagctctcctggcggggagcaggtcccgaggggccgagtgcacctggaggcccagcaccccagtcctctgcctgcaccagctctcctg

SEQ ID NO: 290382 - DNA, 122 bp, Homo sapiens
acactgactcgagcatcaggcgtcccgcaggcgacagtgggcagaattcccaaagaacctcgggtcagtttacccactcgcagaccttctcccgagggggagcgcgcccctgctccggcgcc

SEQ ID NO: 290383 - DNA, 122 bp, Homo sapiens
ctataagcacacgccaccacaactggctactttttaaaattttttgtagacagggggtctcgctatgttgcccgggctggtcttgaactcctgggctcaaatgatcttcctgccttggcctc

SEQ ID NO: 290384 - DNA, 122 bp, Homo sapiens
cttctggatcttcttgtaaatctttctgctttctggaggtccagagagaagaataatatgcgcttgttttgttccaaagtaggtttctctaaggccataggtaacagtgcggggggttgggg

SEQ ID NO: 290385 - DNA, 122 bp, Homo sapiens
tgtgtgacctctttaaagaccctgcttctagtaggactcacactggggttagggctccatcgtcagaattttggaggatgtaattcagccctaacagatggtgctgctagggacgttgtgaa

SEQ ID NO: 290386 - DNA, 122 bp, Homo sapiens
acgcgacccgcttccgggtttgtgcgaatctgctctctggggacagaagccaggcctgggcgggacccgcggggaggtaggcggggcctgagcgaggtaggggcggggcgcgaggcggagag

SEQ ID NO: 290387 - DNA, 122 bp, Homo sapiens
gaggcggcctgcggccgagcggccccgatcttcagcgccctccccgcgccggaaggggcgcgcgacctcccgcgtcacctccgcagccgcgtcacctcctcgcgggctctgcctgggccctc

SEQ ID NO: 290388 - DNA, 122 bp, Homo sapiens
ccacccaaatcttgctgaatagagtgatttatcttcaggcctactagccggcgacaggagcgcacctcctcccttctcctagctgtcccgggtttattcattccctgagcctgaatcctgat

SEQ ID NO: 290389 - DNA, 122 bp, Homo sapiens
cctcccgactgcaaagccagcctctttcctttcctgtggtttctgaaacggccaggataccgcctggtatttcttgctaccaaacaccacgcaatctgactttttccagcaagaccggtccc

SEQ ID NO: 290390 - DNA, 122 bp, Homo sapiens
tatagtgatcggtggactcggcgacttcaggcttgcagagcccctggctgagcatgtagccggtgttgcaggtgccgcagcgggtgcggttgtctggtgcgcatgtcaggcaggcagaggcg

SEQ ID NO: 290391 - DNA, 122 bp, Homo sapiens
gaagccgcaggtgtccgtcttgggataactgcggagggagccaatccagcccagcttgggcgggagcatcgcgtgccctggtccagtggaacgggagactggccagcgagcctggactctga

SEQ ID NO: 290392 - DNA, 122 bp, Homo sapiens
gacctgctgcccgatttccactgcaccctggcacctgtgctcatccgccgcttcaaagaacgcgaggagaacgtcaaggctgacgtcttcactgcttacatcgtgctgctgcggcaaacaca

SEQ ID NO: 290393 - DNA, 122 bp, Homo sapiens
caggcttgggaagcctgcggcctggcccgcctggcgccgccactggacacactgcatgcacgtcccatgcccgcccgcccgcccgcccgcccgggcccagcttagcaacagcgatgggcacg

SEQ ID NO: 290394 - DNA, 122 bp, Homo sapiens
ctctcgcttgagtctgctcacagcccagacctgcccaaggctgactgttttcccatctgccggagacacgggcgtctagctcgtacctcgctgtgttcaccattgattaagattcagcattt

SEQ ID NO: 290395 - DNA, 122 bp, Homo sapiens
aaatagacttttaaaattacaaataaaatctgtacatcaaggatatttttaaggctttcccgtgtgcatgtcactatgtagacaatgaagaggaattgccaagagaggaaccatcatgtcag

SEQ ID NO: 290396 - DNA, 122 bp, Homo sapiens
ttaatgttcttattcaaagccagctgtgtcccagtcatagagaataaactcgagactccacgcctgcccgcccctgcgttaccctccatctaaattgctgccgcggggcctgatccactttt

SEQ ID NO: 290397 - DNA, 122 bp, Homo sapiens
ccgcgcgccacaaagccgccggccacgcgtcgcctcctctccaggcgcggggacccgggccgcaactgcaggaatcgacgctaggtcggcttccctggagcgccctccccagccctgtccag

SEQ ID NO: 290398 - DNA, 122 bp, Homo sapiens
catccggagttgtttgttcctcccggtgggttcgtggtctcgctgacttgaagaatgacgcggcagaccctcgcggtaagtgttacagctcttaaaagtggtgcaaagccaaagagtgacca

SEQ ID NO: 290399 - DNA, 122 bp, Homo sapiens
ggaggaagcagttcgacaccaggggctcagctctctgctgggtgaaatgacgttgcttgacggatgagagcacccccttcctccctcctcccaaaaacactccagcctggataggcaaatga

SEQ ID NO: 290400 - DNA, 122 bp, Homo sapiens
aaaactgccttcatgtggctcaaaataagtttgaataaactgaaagataaataaaatgcacgggggacacccaggaagagagctgatgtgtgtgagcttggccaaaagacggcttttggact

SEQ ID NO: 290401 - DNA, 122 bp, Homo sapiens
aaaagaaaaaggtcaacccttggttcttatagatgctcagaacatgttcttgggggaaaacgctgaaaggtttgctttgggccctactgggcctggggaggtctctggagaagagcttgggg

SEQ ID NO: 290402 - DNA, 122 bp, Homo sapiens
ccaagatgtcttccccaaaatactttctctttagattagctccttgagccagtgccatagcgggagctcccatttcagcccggatgcagctcacatcactgctgcacacagactcccaaggg

SEQ ID NO: 290403 - DNA, 122 bp, Homo sapiens
ctgctgtgcctggccccctttgcccacttttaaattgggttatttggcactagcccacatcgtgaaaccctgtctctactaaaaatacaaaaattagctgggatggtggcatgagcctgtaa

SEQ ID NO: 290404 - DNA, 122 bp, Homo sapiens
ggctgacccgagccgggtgctgccccggcacccgctcaggtttttccagcgttctctgggcgttcatgtggcgagctaggacccggattattctctctgtactcccgttccctagattttcc

SEQ ID NO: 290405 - DNA, 122 bp, Homo sapiens
tgcggcgagtggtccagaccgcggggcggaagtgaggggcgcggccgcgcgtccggggcgcgtctacccctcgctcccactcggctccgcgccgcgaccacgcgccgccctcctcgttctag

SEQ ID NO: 290406 - DNA, 122 bp, Homo sapiens
gccacgcccgctctgagcgccactggagtcacgattgcatctgaaggccacgttaagaagcgtcaccgtttcaacagcaccacgtcttccaattcgtgagcacaggacgtctttccttttat

SEQ ID NO: 290407 - DNA, 122 bp, Homo sapiens
tctgtaagggggggcttgggaagttagtaccctgacccctttctcctctgtccttcctatcgcctgcagactcccagcagcaaacccagcaagaagagagagggcaagggggcccagagcag

SEQ ID NO: 290408 - DNA, 122 bp, Homo sapiens
gttctccaccgacaagaagttgctgttgtgcatccgctgcttccgcgacatgcagaagtgcgtacaggggacgcgaggggagggggctgggggccgctggagcgggcctcacccgccgcctt

SEQ ID NO: 290409 - DNA, 122 bp, Homo sapiens
cgaacagcacttggcgcagctccagcagctgcagcagatgcaccagaagcaaatgcagtgcgtgcttcagccccaccaccttcctccgccccctctgccgcccccgccagtgatgccggggg

SEQ ID NO: 290410 - DNA, 122 bp, Homo sapiens
cgggaagaggccttggcgggacacgtgctctggagtaaggcttggttaaagctctggcatcggttttccacaccacgccaaagtagacaaaggtaagctgccggtggcgccacatttcaggg

SEQ ID NO: 290411 - DNA, 122 bp, Homo sapiens
gagagacctgggggctttgtgacccagctgtgtttcactttagctgtagtagcacctcctcgcccaaggcagtcattctccctcccctgcatccactgggccaagaagttacccgtggggat

SEQ ID NO: 290412 - DNA, 122 bp, Homo sapiens
aatccccagaggcctctgcggtcacttccactacccaccctacacaccttctgtgtgtcgcgttaatgtcagaagcacttctgtttggtggccccggctggttaggctggttggcacccagg

SEQ ID NO: 290413 - DNA, 122 bp, Homo sapiens
agcacactctgtgcagagactgggcggccagcctgcccttgctgtcgctgacggtgactgcgggaggccaggttgtttttcatcattcagaacattgcctgaagcaggtccaccgtgccgtt

SEQ ID NO: 290414 - DNA, 122 bp, Homo sapiens
attgttgtgggcatgagatggcagaaagtgggatatggaaaatgttgccgtgcgccattccgaatactactgtggcttccctgcagcattactttccatattggctgttttccatttcagga

SEQ ID NO: 290415 - DNA, 122 bp, Homo sapiens
caactcatttgccggcgtatacctcgcgctcgctgggaagcatttgcacaggctgcaaagcgcagcgattagagacccgcttccaaataaaatcaccgtggagagactacattttcttttca

SEQ ID NO: 290416 - DNA, 122 bp, Homo sapiens
tatagcttagaagggttagggacttgctagagctcactaatacgtggtgaaatcaggcttcggcactacccaatactgcctcaacaggggactttgtataagtgacccaatggcagttgggc

SEQ ID NO: 290417 - DNA, 122 bp, Homo sapiens
tgatacatattattgcatttcataaaacttaagattagaaactttcaagtaagggtacaacgggtatcttcagaactttaacctaagcacatcaacggaatttttctagggaccacagagag

SEQ ID NO: 290418 - DNA, 122 bp, Homo sapiens
gctgaacccccttccaaaagaaaactgagcgagggtctctattgagacagcatctgaagccggcccgcagccacagcgtccacgtgctcgtaactgcaccaggaactgccagccgcggtgag

SEQ ID NO: 290419 - DNA, 122 bp, Homo sapiens
tccgtgtgtatatgacatcagttacatgcggatccgtgtgtaaatcacatcggttacatgcgggtccgtgtgtacatcacatcggttacatgcgggtccgtgtgtatatcacatcggttaca

SEQ ID NO: 290420 - DNA, 122 bp, Homo sapiens
cggccccagcgccctggggtgcaggcggagccgactctgggacacccccgcctgcatttgcggttctggttatctggaaccctgacgcagcgagagcaattggcaccactgcactctctctc

SEQ ID NO: 290421 - DNA, 122 bp, Homo sapiens
tcctgcatgagggtgcactatctcatcatcagcaggtgggacgcagaggctggaagagatcggatccgtccacagagaccacagggggaaggtgcttctgtatttcatgattccatggaccc

SEQ ID NO: 290422 - DNA, 122 bp, Homo sapiens
atctattcccacccttgctttaaactcttccatagctcccacctgccagagaataaaatccgcctttcttgccctgcatgttctggctgctcttgacctccctgccttccttgccctccacc

SEQ ID NO: 290423 - DNA, 122 bp, Homo sapiens
atcagttatttaaagcacgcaaagtagcctcacacggtggctcactcctgtaatagcattcgcggaggccaaggcgggaggatcacctgaacccaagagttcaagatcagcccgggcaacac

SEQ ID NO: 290424 - DNA, 122 bp, Homo sapiens
ggagaaagtggctatgagaattagagagacaaagggtgtgcttgtgggaatgggatgtaacgtcagagcaggttcaaccttacagctgtgcagtccagttagtcaaatattaatgagtcaat

SEQ ID NO: 290425 - DNA, 122 bp, Homo sapiens
accctgtgcgcgccgggagcttcgcccggagcatcgcagcatcgcgcagcgcccggagcccggggccctcacagctccaccggtgcccggagcatctatctccccgcgggcggtgctgccac

SEQ ID NO: 290426 - DNA, 122 bp, Homo sapiens
tgccaggcgtcatgccgtgcatgcggcggtggcggttgagcttactgctctgggcgcaggcgtagttgcagaactcacaggtgtaggggcgctccccggtgtgtgagcgccggtgcaccgtc

SEQ ID NO: 290427 - DNA, 122 bp, Homo sapiens
tttattttaaaataatgctataatgaatgacactggattcttgcctttccccccattaaacgctaatggagccttatcttacagttggcaatgtgtagatgtgtatgccttagaagcagaag

SEQ ID NO: 290428 - DNA, 122 bp, Homo sapiens
acgtccctcactctccgcctccgaataaaatgtttttataaggaaatactagggagaacccgggcccaccgactgtatgttccaggtatcctttctggggtaggtaagtagggggctgtgtt

SEQ ID NO: 290429 - DNA, 122 bp, Homo sapiens
catggcagcgccgtatttacctgtgtttgtgtcaatcccagcgaggcggccagctcggcgcgttccggcaaggcgaggtactgagtcttctgaaaccttctctgtaatgcggccagctgaaa

SEQ ID NO: 290430 - DNA, 122 bp, Homo sapiens
ccagccggggccagtcgggagcgaaagtgcgctgagctgcagtgtctggtcgagagtacccgtgggagcgtcgcgccgcggaggcagccgtcccggcgtaggtggcgtggccgaccggaccc

SEQ ID NO: 290431 - DNA, 122 bp, Homo sapiens
ggccaacagcacccacccagtttacgcttgattcgaggaaccttcactcccgaggggcctcgccgaaaagcagctccttcgctcccgaagccgctcccaatcggccaactgacaacccttcc

SEQ ID NO: 290432 - DNA, 122 bp, Homo sapiens
cggggcaggattgactgcgcaaccctgcggcccctgtgctctccgcggcctctgcgaccccgccccgccagcctctccgccgctgggctccaccctcccgggctctgctgtagtctgagaac

SEQ ID NO: 290433 - DNA, 122 bp, Homo sapiens
aagaaatcagataaactgaattccattttctgcaggcagaatactggcatttacttgcatcgtctcatggtcagagctaacttatcatgatctcagccatgtgccagtcatgctgtaggtca

SEQ ID NO: 290434 - DNA, 122 bp, Homo sapiens
cgctccccgccagccgccttccccagcagccgcaggtggtgccagccactccacagagcccgagggatgatctagcctgattcctgcgtgtccgaaagaacttaacgttttaaaggtgattg

SEQ ID NO: 290435 - DNA, 122 bp, Homo sapiens
gggcagctccgcctaagggcgcggcccaatctgagggttcgtcgcccccgcgtggtcagacgtgggaatggcagcttctgaagctctatgtgtggtgcctttctggggctcaccaggtgcca

SEQ ID NO: 290436 - DNA, 122 bp, Homo sapiens
tcttccggagtgctctgggagccaggccagggtgtgagggaggtgcagaggcatccggggcgggagcaagccccaggttgtgacaggtgcaggtagacaacgcccataaacagagatggtcc

SEQ ID NO: 290437 - DNA, 122 bp, Homo sapiens
agtagcattatctggagccccaggcttccatcaaaactgataagattggcatgcgcagggcggctgggaacgcgccaccctgggtgtctataggctcatctggccctgctgataggccctgc

SEQ ID NO: 290438 - DNA, 122 bp, Homo sapiens
cagtggggtgggaagggagatcctaccgcgtacctggaagacgggagaacaggggtgtttcggtgagtagtgctctctctcagtccgcacggcagccttccagcaaatcgggattttatgcc

SEQ ID NO: 290439 - DNA, 122 bp, Homo sapiens
ctcgatctcctgacctcgtgatccgcccacctcggccttccaaagtgctaggattccaggcgtgagccaccgctcccagccggaagttttctataaagctttaattattctgtcttcaggct

SEQ ID NO: 290440 - DNA, 122 bp, Homo sapiens
tctgacagaggccccatgttggggaggtaggtgtgggggctcggggaggtgtcaggacagcgggatggacgtgggtccacagagctgactatcacagccgctcaggatgcagccgtggtgtg

SEQ ID NO: 290441 - DNA, 122 bp, Homo sapiens
acctggggcgcccctatgggagctaggggactagaaaccctcgttcgctgtccccgggggcgggccctagggtcagatgctccgcggagtgctctccctgctgcgcccaggttggtgctctc

SEQ ID NO: 290442 - DNA, 122 bp, Homo sapiens
ttcagaaaagtattacaaaagtttttttttttttgttaattctcagcagttataaaataccggtactacattatggtttggtctgctgtaaaagaaaggagggaacaatagaaattgtttat

SEQ ID NO: 290443 - DNA, 122 bp, Homo sapiens
cctcgcagaccttcctttctgccccgccccagccccaccaaacctcctgccgcggccaggcgctttctcggatccagctgtggctggctgccccggccacctctccaaggggcggggcctgg

SEQ ID NO: 290444 - DNA, 122 bp, Homo sapiens
gcgacacttttccggggcttctcattggagagcaagcctgtcaagtgctttctgttgtttcggaggcggggcctgctgccctgcctgcactccgattggccccgcgggccgtctacctctgg

SEQ ID NO: 290445 - DNA, 122 bp, Homo sapiens
taggaccctcggagcgaggtgtgggatataatctcgtggtgcactgttttttaagcctgtcggaaaagcgcagtattcgggtgggagtgaccagattttccaggtgccgtccatcacccctt

SEQ ID NO: 290446 - DNA, 122 bp, Homo sapiens
tccgggggccttcgtccccggctctgacgttcaaggccagggtcgttctcagaagaaaggcgcctgtgaacctgtcagggcacagaacccaaagccttacaccgggaggtggagccaccggg

SEQ ID NO: 290447 - DNA, 122 bp, Homo sapiens
atccatcccccatgctatacatcatctcgccaggctggcacttcatcaagggccatgaagcggggacatttgcatcctcttcctcgggctgcaccaaggcggagttggtggagacatctgtg

SEQ ID NO: 290448 - DNA, 122 bp, Homo sapiens
aacactcccgaaatgcagtgtaaataactgataaaaatgcaggctgcggccaggctcaggcgaccacccatccccagccctcatccccattcggactctctctccccttctgcctctaagtc

SEQ ID NO: 290449 - DNA, 122 bp, Homo sapiens
gaaacaggagtcttaccagggtcatgctgagtgtacggcccatgacagcatggaacaggtcgtgtgcagctgggccagacacaacaaaaaattcacagatgaaaaggtattcgcggcaggaa

SEQ ID NO: 290450 - DNA, 122 bp, Homo sapiens
cttgaatacacgaagttcctcctatagtcattggctctgctgcctctgatgaggcacttccgtgttccccacatttgaatttgctcccgattcgagagaggcaggcatccgcggcagcagct

SEQ ID NO: 290451 - DNA, 122 bp, Homo sapiens
gcgtttgcgccagcctcccagactagcctggggtgctgaaatgggggcgggcccgagccacgggttggggcggggtctgatgcgcgccccgccccgcaacgccccgcccccccgcgcctacc

SEQ ID NO: 290452 - DNA, 122 bp, Homo sapiens
cagtccttgggaagcacaaacatgtgagaatccaggttggctctatgccctacccagtaacgtagccccaaatctctgccttagctgacatgggggcacactgaagtcttgtgaagggtaga

SEQ ID NO: 290453 - DNA, 122 bp, Homo sapiens
gtgtggcatggtggccccgggagacccaggtgacctgcggctgacccagcccaccacccccgctgcccacccctcagccttggtgcccaggccgctccccctaaacaggtccactcgcctgg

SEQ ID NO: 290454 - DNA, 122 bp, Homo sapiens
actgaagagaggaggcggccgttgggaactgaggtgggcccagggcttgagctgagttggcgagggtggaggtggtgccggtcccacgccgtggtggggaccgagctgcgggctggagggag

SEQ ID NO: 290455 - DNA, 122 bp, Homo sapiens
tgagtgaacgggtgggcgtgaaagtctccagtgccccagaagtgagtgaacggtggtgggcgggggtagggcgagtacctcctttaaaacaacgattcttaacccatttcgtgccacgggtc

SEQ ID NO: 290456 - DNA, 122 bp, Homo sapiens
acaaccagggacgggctaagccaggattgagagcagaatgcccggagtacctgcacctctcgccactcagccaccgggccctgtgtgagcccggccagggttcagtcagccctgtcctgtcc

SEQ ID NO: 290457 - DNA, 122 bp, Homo sapiens
cgggtcgctaccgccatgatccgcacgtagtggtcaaggctgaggttgtatgaatgtggacgttataaccctggctccctctccctccctatgctgggctcccctcgatccccaggcggtgg

SEQ ID NO: 290458 - DNA, 122 bp, Homo sapiens
caccaccccgcaactcactgggagagtcagtctgttattttccccattgtctgtatcccacgaaagaggagcccactcctaaaggggaatatgagccagttttgcttttctacacctgccgg

SEQ ID NO: 290459 - DNA, 122 bp, Homo sapiens
ttcaactgtggctcaggcagcactctccctccgcgtggtgtccgagccagcagggccgtccggccctcctgtgttcatcagaacggctggctcgcgttagtcaaccgccgcttcgcgcgaca

SEQ ID NO: 290460 - DNA, 122 bp, Homo sapiens
agcatgtgggaaaggctgccaaaattgttcatgtaaaaattacatcaatgctgtcttcctcggtgctgcctatgcagctggcagccatctcttcctccacatcatggcctccctcagactcc

SEQ ID NO: 290461 - DNA, 122 bp, Homo sapiens
tgacatgtgttaaactgcagccccttggcctcacagtactactggatcagaatctccttacgggggaatgcaggaatctgtgacttttttgaggtttactggtaattcttataagccctaca

SEQ ID NO: 290462 - DNA, 122 bp, Homo sapiens
ccaagattcctaatcttttgttctgtttcatttccccgttaggagttgtaagacgttcatcgccgtgttatccttgagtaaaggtgagtattaggtgcgagagccttttgaatgcctcttcg

SEQ ID NO: 290463 - DNA, 122 bp, Homo sapiens
atttgaggaaacagccattcacgaatgagaaacacccggtcctggcttgtggtttgtcaacggaaaaaaaacagactatgtaaaatacagaagtgtattcagagccgagtaggagagacctt

SEQ ID NO: 290464 - DNA, 122 bp, Homo sapiens
tggcacttggtcatcctcctataagtctctggtcagctcctcctcctgttttccacagcacggcaagtactcaaaatttgttaaatgaacaaaagaatgaatgaatgactttaagcacttcc

SEQ ID NO: 290465 - DNA, 122 bp, Homo sapiens
gggtaaggggtgggcggggaagaggggggatccccagcaggggaaagggactgggcggggcgcgaagctggggctgccgctttagcctccgtccagctcttatctgggtgcttcggcagcta

SEQ ID NO: 290466 - DNA, 122 bp, Homo sapiens
tgcgtggccacttcccagcagccagatttaaggccaggttaggataaatctcttgtgcctcggtttccccttctgtaccccaggatcacattacccaccccccaacactgttctgcagaatg

SEQ ID NO: 290467 - DNA, 122 bp, Homo sapiens
aaggctgaagttactcagtagtcagggaactaggatctccgtgaagatctgatgtgcagccgtggctggatccaggaaccctgaagacattatgctaagcgaaatgtgctagacacagaaag

SEQ ID NO: 290468 - DNA, 122 bp, Homo sapiens
acaggcagaggggtcggggctggagcgggggagacacagggcactgtgggagcccagaggcggctgtctcctggcctagcctgacagtcagggatgccttcctggaggagaggacacccggc

SEQ ID NO: 290469 - DNA, 122 bp, Homo sapiens
ggggcaaagtgagcaggaaagggatctgcaaagctcacctcctcttggccaaggcggcctcgcgctggggaggcggctctcgcgctggggaggcggctcccgcgctgcagccctgctccggc

SEQ ID NO: 290470 - DNA, 122 bp, Homo sapiens
ccgacgtgccagaagccctggctgccgcctggaaagaggccacgtgggcagcggtgggcacgggcgactggagtctgggagagaggtaggggctgcggtcgggaggagcagaggcggccagc

SEQ ID NO: 290471 - DNA, 122 bp, Homo sapiens
ggcccttgtgggaaacgggaaaacacgtcttggttttcccgctggaaaaacgcaaaattccggatgctgtgcccggagggagcgtgggccctgggctcacccacaacgaagaccttcagcaa

SEQ ID NO: 290472 - DNA, 122 bp, Homo sapiens
taatgaacacctaccaagtaggcaacccggtgctaaacccaaaagggctggaaagagaagcggagacagcttctgcctctggaaagccattcagcaggcaaggtggattcagcaggcaaggt

SEQ ID NO: 290473 - DNA, 122 bp, Homo sapiens
ctcgatcccgtgacctcgtaatccacccgcctcagcctcccaaagtactgggattacaggcgtgagccaccacacccagcccaggaatttcttaaacaggacaaaaatagtcaggcgtggta

SEQ ID NO: 290474 - DNA, 122 bp, Homo sapiens
agcactctggaggagtagacagggaaaagcaggagaaaatccacagcgtagcacaactcacggtgccagcctaccatgcttcataactatgtgcaactccaacaagactgcatagaaaagag

SEQ ID NO: 290475 - DNA, 122 bp, Homo sapiens
aagtaccttccttgcatgctaaacaactgaatttagtcacaggcatttgccagcctcttccgtgctattgtatgatgtcagaagtttatgttctgtcaataaagggtcttccagcaggctgt

SEQ ID NO: 290476 - DNA, 122 bp, Homo sapiens
agcataaacatagctgatattattggttgtggcttaccctccatggccattcaactgtttcgtggctgaatgtgaaatagcaaaggtatctgacttataagttgctgagagaaatgattcca

SEQ ID NO: 290477 - DNA, 122 bp, Homo sapiens
tgtttatatagtttacaaagagtaaacccccttatcagttagggaatggtgggaacattccggtaatccaagttcccagacactagccaaagcccagctttaaaatcagggctaaggatagc

SEQ ID NO: 290478 - DNA, 122 bp, Homo sapiens
tgaattgaggtttccctccagtcttgtgtactcacctctctggaggttcttggtggggcacggtgagataggaaggcttgcccagctgccactccctaaagtgggactgaagagtggtgaca

SEQ ID NO: 290479 - DNA, 122 bp, Homo sapiens
ccccagctgtcatcccgcgccagccgccccggattggccgcctggggaactggtgagcagcgggactgaaaggccattggtcgcggcagcaaacatgctaccctgctggataactgaaaaca

SEQ ID NO: 290480 - DNA, 122 bp, Homo sapiens
agtagtcgaagaggctgcacggaggtcccggcctccgtgagggcggtgggttggagagggcgcctggggcctcaggaccctgctccctcccgggattgtgggtttcctgccccaagggtttc

SEQ ID NO: 290481 - DNA, 122 bp, Homo sapiens
gctctccagtgctcccagggcggaccctcagatctctgctagactcatttccctggttcacggtgaaataagtaaaacgaggacagtccggggtactctgaacatagctgtcaggttatcac

SEQ ID NO: 290482 - DNA, 122 bp, Homo sapiens
cgggcgtgcacgcgtccttacacgctgctgtacacagtgcacacacagaaggcgtgcgtacgcacacagttcttcatacgatgcttacatgcaacatgcacacacaacgtgcacacccagcg

SEQ ID NO: 290483 - DNA, 122 bp, Homo sapiens
gaatgactaagatgaaaggaagatgaaaatgcaggcttctctttctttatgtctatgctccgctctctctaaagttatgtttgtccaagacttgagaaaacaagcaggggctcagatttcag

SEQ ID NO: 290484 - DNA, 122 bp, Homo sapiens
gggggagagcagggcaccgagctggggacgtgtcagggacgaagcgagggtgggcgagcgcggaccgctgggaccccggggctcagtgccgctcaccgggggtgaccgcgcgcccagccccg

SEQ ID NO: 290485 - DNA, 122 bp, Homo sapiens
tgctgggaggcccagttgcaaacaggaaagccttcgttactggtcttaaatcatgaccatcggaacccttgggaatttcagatcaggctatcacatttgaataatctgatgctgggccttgg

SEQ ID NO: 290486 - DNA, 122 bp, Homo sapiens
cctcctctgtaaaataggtcctaaccacattcctctctcatgtagcatcatctctcaagtcgactaaggctggcaccaaggggaaccactctgtttgctctggccttccttgccccaaatgc

SEQ ID NO: 290487 - DNA, 122 bp, Homo sapiens
ctgaagtgccagcaccaccagcaccagatcctccgccgccacaccgcactgaggacacgccggccgggccgcctcgtctcaagttgtataaagttgtctccgtgtcccctcctccctctgcc

SEQ ID NO: 290488 - DNA, 122 bp, Homo sapiens
ccccggagacccacaattggtccaaaaagcgtaaaatcagcaatcaaggggggcctggctcgttagcgcaggggatccgagctgggcaggacatgtgagatagtcacagttttccagagatc

SEQ ID NO: 290489 - DNA, 122 bp, Homo sapiens
ctgctcccggtggaatcagccccctttctgattttacacccaacacctgcaagcagggctcgcgcagaggctcaggcagccatgctcgtggcacgtgggctgtcgcggctgctcccagtgga

SEQ ID NO: 290490 - DNA, 122 bp, Homo sapiens
attccaccccctggagcttgggcttggtcttccctgcgggtccctgcgctgacattcaggcggggagccaggaggcctggcgcgcctccagagcccgccgggggagccgggcgagggttctg

SEQ ID NO: 290491 - DNA, 122 bp, Homo sapiens
ctcttttaggccccttaagtgttaacagcaagaggcctggctgagaccaggcgtctgggccgctttaaatgccctggccttcagaggactgaggcgagcacagccataaaaccaggggacgt

SEQ ID NO: 290492 - DNA, 122 bp, Homo sapiens
cctgccgcagctccgccggtcactcaggcagaacggggtatgcaaatggcctggagaggccgaggccgaacactgcgcccattgtcccgggcgctcaaagcgccgagcagctgcgcagactt

SEQ ID NO: 290493 - DNA, 122 bp, Homo sapiens
ctattggaggaaggagacgatttaattgatcatgtcttcaattcctgtccccaccctccccgggcccctctgtcctggggggccgtggcctcgcgatgatctaggctgtgacagaggagcac

SEQ ID NO: 290494 - DNA, 122 bp, Homo sapiens
taggggtcatgatcatctgcttcggaatttaaattcttggattgaaaacacaaccctatgcgttattagcttagtgactccaggaaacatcctccacctctcattgtgtacttcgtacatgt

SEQ ID NO: 290495 - DNA, 122 bp, Homo sapiens
ccgtgcaccggcggcgagcgctcaggggcgctggggggcgctcatacgggttccagtcttcgctccgccggcggccgcaccgggagctctccggtctttgtcagccccctgcacgccgcccc

SEQ ID NO: 290496 - DNA, 122 bp, Homo sapiens
cctttgaacactcctcatttcagaagctttgcttctgttgcaaccaaacatgacacttagcgtgctgagcaggaaggacaaggaaagagtaattcgcagactgttattacaggcccctccag

SEQ ID NO: 290497 - DNA, 122 bp, Homo sapiens
ttccacccagcctggctgtccagtgagtacagagtgacttggctcccccgtatagtgcagcgagaatgcaggagaataggtcctgacactccaggttgagttaagcagtaaaatggaatggc

SEQ ID NO: 290498 - DNA, 122 bp, Homo sapiens
catccatattacatctgctgctctctttaagcccttccctggagcacaccatctagtttccgtagtaactactacaatactattgctcctggagtagcaggaagaaaggaaatgcggaagag

SEQ ID NO: 290499 - DNA, 122 bp, Homo sapiens
cgcgtgtgcgctgaatgacatgtactccacctgcatcttgacctccagctacagaggccacggggcgtggacagtggttaccaccaggaggtgcccctcggccctgccagcccagtgcgggg

SEQ ID NO: 290500 - DNA, 122 bp, Homo sapiens
gatgggcgctttccatgcctcgaaaacaaccaggtgcaggatggagacacaggactgaatcgcggagaggtgcatcgcagggcacagcgactgggccgggagcgacctggctctcggaagcc

SEQ ID NO: 290501 - DNA, 122 bp, Homo sapiens
acggcatccccgcgaacacccaaaggactctgagtggctccgtgccaggcctatcagagccgctgaggctgcacggcacccggccccgccccgggcctcatccccatcctaggcgggcactt

SEQ ID NO: 290502 - DNA, 122 bp, Homo sapiens
tattgtcctcctcctcattacatttgaatatagattgccactgtgcaatgccttcgacctcgctctctatttgtgaggtttaggagttcttcagacaaggtgatgtccacgtgcactcctca

SEQ ID NO: 290503 - DNA, 122 bp, Homo sapiens
gggccagctgggaaggcactggcttccggtgagcgacctcagcttccattttggcatcgccgcttttttccccaggcctgcctcaacgtccccctgaaagccggcaagcctggggtcccgtc

SEQ ID NO: 290504 - DNA, 122 bp, Homo sapiens
gtaaatgctccctgcttcccctttctgctgcctgtttgcagctgggtaaggaaggcttggcgtcctcggggtggggtgtccccaggccaggaggctgacacccgcagagctcaggggtgtgg

SEQ ID NO: 290505 - DNA, 122 bp, Homo sapiens
gggttttgtgtgtgtgggagtggggtgtatgtgtgtttcttatccgagacacctccgggtcgtttgcttggaaaccggctgagggcccgcacagcctggagcatttggttggaaagtgaggc

SEQ ID NO: 290506 - DNA, 122 bp, Homo sapiens
aaacactcaagggaggagagcagaagtacttccccttagactctcctctctaaggtctttcgggagatatcttaaaatggtcactgtcttcgtaaaaattttaggctggaaaggacagaatt

SEQ ID NO: 290507 - DNA, 122 bp, Homo sapiens
ctcgccgcgcggccccggatcctccctgcgcgggtttccgtggcccccgccgggctcttccgttccctcccgcggcctcgaccaggccgcagcccccagcccaggcgaccgactcgccaggg

SEQ ID NO: 290508 - DNA, 122 bp, Homo sapiens
gcaggagctgtggtagctcacccacactgcaatccatctgctgactcaacttgctagtatcgggcagcagccaggaccacagctcctccagctcctttgtgaccttttccttcagcttcttc

SEQ ID NO: 290509 - DNA, 122 bp, Homo sapiens
agaactaaaatttcactacagaggacattttactccaaactgttgaagacagtgctttctcgttcacagaagaggcttttctagcggcacgaaagaatttggaagcggcagtgttacggtaa

SEQ ID NO: 290510 - DNA, 122 bp, Homo sapiens
cggtctacgtagattttaactttttatggctaaaattctaaggcacctttctttaccttgcgagtttgtctagttcaagtggcacatgagtacaagtctgagatgaacacgtcaagcccctg

SEQ ID NO: 290511 - DNA, 122 bp, Homo sapiens
acccaggtgagtctagcaaatgacaaggcccaacggtcaaaaccgcctcagtaatgcgctcgtccaaagcacgcacttaacgctcaatcctggtgtcgcgtcccgttgccaggcaacgaaag

SEQ ID NO: 290512 - DNA, 122 bp, Homo sapiens
gcgctcgcgcggggtgaggttggaggcagccgaggagccgcacagggcagcgcctgccgccgccgccgcgcccatcccccactccgacggccacgagttcgggccgcgacgtccccatggca

SEQ ID NO: 290513 - DNA, 122 bp, Homo sapiens
catgataatcttgtgaagctataattaatatccttatttttgcagattaggaaactaagacgtactgaggctgggtgcctggttcaagatcatatagctaacattattggacatgcaaatca

SEQ ID NO: 290514 - DNA, 122 bp, Homo sapiens
aggccgcagtataaccgcgtggcccgcgcgcgcgcttccctcccggcgcagtcaccggcgcggtctatggctgcgacttctctaatgtctgctttggctgcccggctgctgcagcccgcgca

SEQ ID NO: 290515 - DNA, 122 bp, Homo sapiens
cgggagcccgccgcgagggggaggctcagacatggcgggctgcaggtcccaagtcctgcccggggaggaggcagctaaggcccggcgagaagtcgagcacagcagctgctggcccaggtgct

SEQ ID NO: 290516 - DNA, 122 bp, Homo sapiens
ggtagggcgcggcggggctcacaggaacattcctgttctcctccccatggagattgtgctcgtcgtgcacggcttcccatccgccgcggccgcccttcgggtaaagaagaagaccgggcggc

SEQ ID NO: 290517 - DNA, 122 bp, Homo sapiens
attagcaagtgaaattaagagactgtgtttcaccaagcctgaaacatgacttgcaagctccggatggtctaaatattctagccatattctggtaatttaatatatggcttcagggttctaag

SEQ ID NO: 290518 - DNA, 122 bp, Homo sapiens
aagggagtttaggtggttccggtctggggagaagacgtgcagggtttcagatgcgaaagtcgcacccaaccgcttcactcgggctctaggccatccgcaggggccctgcttccttccacctg

SEQ ID NO: 290519 - DNA, 122 bp, Homo sapiens
cttggcccagccccacttccaggagacgaccacaaagcccagcacccaccctgttctggccgccccctgtcgtggcctcaaagtcaggcttgccctcccggcaccctggcccaggaggcctc

SEQ ID NO: 290520 - DNA, 122 bp, Homo sapiens
cgccgggttttctctggacacgaatgctccgggggtaggaggcgaatgacactggcacggcggggctccggagccaagaggtgaccaggctggctgggcagggctgagtggctgggccgagc

SEQ ID NO: 290521 - DNA, 122 bp, Homo sapiens
ggctagcactggatggagctggagggtcgtaggggagagatctccaactctctctgtgtccgtgtggagggctgcagagcctgcagggtgacctgcttccccaaaggccaacagcattggcc

SEQ ID NO: 290522 - DNA, 122 bp, Homo sapiens
gactcccggggcctctgcacctggggacactggacacatatgtgcccatgatgatgaggacggtgcccacgaggaagcccaccaggccgatggccaggcccagggcacagaccagggtctcc

SEQ ID NO: 290523 - DNA, 122 bp, Homo sapiens
aaaggcaaccaggtggcctggttcttaaatcttaaagcaacagttccaaagttgagagcccgcattgcactctattgcacagcctgacaggagaagggacgaggaagttcagaacctggcaa

SEQ ID NO: 290524 - DNA, 122 bp, Homo sapiens
aggcggcaatgccggggaccgatgcccaggacggccctcacaggcggcaatgccggggaccgatgcccaggatggcccttgcaggtgacagtgctgggtaaaacccgaaagaagagcgggtg

SEQ ID NO: 290525 - DNA, 122 bp, Homo sapiens
gccggtcccgagccggacaaggcgccgcggcgactcaacaagcggcgcttcccggggctgcggctcttcgggcacaggaaagccatcaccaagtctggcctccagcacctggccccccctcc

SEQ ID NO: 290526 - DNA, 122 bp, Homo sapiens
aggctcacaggcccggcagcggcccccagaggccgggctgggaaaagcagcgggcttcagcggatgaacaaggttaccacgggaagtgtaggagccaaggccgcagagaatggggaggctcc

SEQ ID NO: 290527 - DNA, 122 bp, Homo sapiens
ctcccggtcgtcatcaggcgccgctctcgcgagagctggggcgccgcgagcctcgggcctcgcccacacgcccggcccgccccgcctccagatcatgccccgcccacatgcccgccagtctt

SEQ ID NO: 290528 - DNA, 122 bp, Homo sapiens
gagccgagggagagtttggggacgcgcggaagcggcgtgacaggcccgggtccctgggcccgcttttcctgccgcgctggtcacgccaggcgacacgcccccgcttcccctcaggctcctct

SEQ ID NO: 290529 - DNA, 122 bp, Homo sapiens
gaatccgttgagggcgcagctcggccttaaaaacctgtacttgcgattctaagaccagcgcgggttttccgtgccccaccttgtctgccggtggagactgagcagtcagcccgctgtaatag

SEQ ID NO: 290530 - DNA, 122 bp, Homo sapiens
cacacagacacgcgcttccacacatgcacacgcgtgcgcacacacgaatgtggatccgctcgatgggaacctgaccccctttggtgcaactagggcgcgggcatcattaggacgctttttac

SEQ ID NO: 290531 - DNA, 122 bp, Homo sapiens
gctgttacctgctctgctgcagctcctggagtcaaggtgaacctgaaacccagcccctcccggctaagtaaacagaagcagaggccggctcaagctgatgaatattcatcatgccagaaatc

SEQ ID NO: 290532 - DNA, 122 bp, Homo sapiens
gctcggctgccgcgcgaggagcgcggtcggcggcctggtctgcggctgagatacacagagcgacagagacatttattgttatttgttttttggtggcaaaaagggaaaatggcgaacgactc

SEQ ID NO: 290533 - DNA, 122 bp, Homo sapiens
gtgacaggcttggaagagaatgtggagggagtaagggaggcgcttgctaactgcccctgacgctgacagagctctggagaggtcagtgcagcttctgagttagctgctccttagcctggata

SEQ ID NO: 290534 - DNA, 122 bp, Homo sapiens
tttgccatatttcaggtctggagcccaacagagaaagatcctgagggctgcaagacttgccggcctcacctccagtaggcagctggagtgaggaaaaacgaggcatggggtgaaagggatag

SEQ ID NO: 290535 - DNA, 122 bp, Homo sapiens
cttctgaaacgcgaagagcgtccagcagagtcaggtacttaattaccaaagtaaacaactcgaccacaagggtctgcaagcctggagaggactttttcccccccccaaacaaaaaaggagag

SEQ ID NO: 290536 - DNA, 122 bp, Homo sapiens
cgcaccatgggtagcagcgaccgctctcaggagagtgtgggcgccgtgggtagcagtgaccgctctcaggagagtgtgggcaccgtgggtagcagtgaccgctctcaggagagtgtgggcgc

SEQ ID NO: 290537 - DNA, 122 bp, Homo sapiens
actcgaataacaaccttagcaaactgcggaaactcctacagacaaaaactcaggtgtgggcgcagaagggccggggatgcgctcggtcaagacttgaaggtccggggcttgggccctgtgtc

SEQ ID NO: 290538 - DNA, 122 bp, Homo sapiens
tcgtcacagtctcctctgtccaatccctgtgcctggcgccgggcgcggctaccaatcagacggctgaaaccgcgttgggttgcatcatgtgcccctggcttggtgacagcggggaggggcgg

SEQ ID NO: 290539 - DNA, 122 bp, Homo sapiens
aggcaaaacctggtgcttgagcactggcccctaaggcaggccttacagatctcttacactcgtggtgggaagagtttagtgtgaaactggggtggaattgggtgtccacgtatgttcccttt

SEQ ID NO: 290540 - DNA, 122 bp, Homo sapiens
cggggccccaacgcgcaggcgcggtaaccacggcggcagtgtctagtgaggatttgaaatcggtcgcgcgtgcgcaccggcgacacggcccggcgaccgaggccgcgcttcctcctgccgcc

SEQ ID NO: 290541 - DNA, 122 bp, Homo sapiens
tctcggtgcaaagaaatcctgtcacttgcgaaagcattaaagcagtgtttagcttccccacgttccttttccttttgctcttcaacacttaaattggttgtcttgaatgctttaccagaagc

SEQ ID NO: 290542 - DNA, 122 bp, Homo sapiens
acaggcaattgcttcaaacaagcgccctccaagggcgtaagctagaggggcccgggcgggcgctttcccgtggaccctcccacctcgcgggtagaggaagtccttcagttcaggcacaaccc

SEQ ID NO: 290543 - DNA, 122 bp, Homo sapiens
aggggtcctgggccaaggtgaactttaattttgtatgtatgcagaaatggaaaaatgatccgtggcctctagtaaagatcacctcctcagtaagactcgcatggcaatgggatggatgaagg

SEQ ID NO: 290544 - DNA, 122 bp, Homo sapiens
caagttccccaacttcaccttccgggacatcgagtttgagctcctggactacggaccaaacgggatgctgctccctaaagaagggaggctggagaaggtgtacgatgccctcaaggacgccc

SEQ ID NO: 290545 - DNA, 122 bp, Homo sapiens
ttctgaggccttcattttggggtattgttttctgatgcccaacatatctgagctgctgaacgaagggtagctgctgaaccactcccacggtgacttggaatggcttagccagccggccttgg

SEQ ID NO: 290546 - DNA, 122 bp, Homo sapiens
ctcgcagtagggcaccctactccagccccgctgtggttacctcttcctcccactccagggcgccctgccaggccggggacctccgggacctgatcagcacgtaccttacccgcgccgaggtg

SEQ ID NO: 290547 - DNA, 122 bp, Homo sapiens
cctgtgtatatttaagcgagagtttgatgaaagcaattcccagacttcagaaacatcctccggaaacagcagccaagaagggccaagtaatgtaccaggttagtgattcagaatggaatttc

SEQ ID NO: 290548 - DNA, 122 bp, Homo sapiens
cgccgcgatgcaggagagtttcggctgcgtggtggccaaccgcttccatcagctgctggacgacgagtcggacccgttcgacatcctgcgcgaggccgagcgccggcgccagcagcagctgc

SEQ ID NO: 290549 - DNA, 122 bp, Homo sapiens
acgccttggaacccacggccgccactgccgccacaggtgcctcacagtgccctctgtcctcgctctgggaatcaaaaccccggttgggaactgaggcttccgaactgcttccaaccctggac

SEQ ID NO: 290550 - DNA, 122 bp, Homo sapiens
cttacccgtcccccggccctgatgcgcaggcgcgcgcgcacgcacatacgccgccgctgacgcccgccccggagacctgcacgacccgtggcctggaaggctcttttccttcccttttagag

SEQ ID NO: 290551 - DNA, 122 bp, Homo sapiens
gccagccaaccaatggcgcggcagcaactcgctgactggcacggagtttctccatctgtgcgcgggggaaggggccagagagaggccctagcgatggagcctggaattaaggtgggcatcgg

SEQ ID NO: 290552 - DNA, 122 bp, Homo sapiens
ggcgtgcggagcgggcgacagtggcgtgggatctgcctctctgcgagcagctgggagcggcggcggcggcgccatgagcgggggcaccccttacatcggcagcaagatcagcctcatctcca

SEQ ID NO: 290553 - DNA, 122 bp, Homo sapiens
gccgcggactctgggccattgacgacccaggacaggagagttttctgcgggccagggcggcggaggcgggacttccgcttcttcgtgtgacgtcatctccgtgggccggtttggccctgaaa

SEQ ID NO: 290554 - DNA, 122 bp, Homo sapiens
gctccctcagctgcgtgggtttcaagctgacccaggcgccaccaggcagccccgagtgggcgagtcaagtgcaacttcaaggtcaatgtgcctctgactggggcctggagagctgccaagaa

SEQ ID NO: 290555 - DNA, 122 bp, Homo sapiens
acctctcgggctcgtagccggcctgcagcagtcgggcgctgtaccgctgcgccgccgtctcgtgtcccgggtgttgccgggctccgggctccggaacagcggcggctccgcctccctgcagc

SEQ ID NO: 290556 - DNA, 122 bp, Homo sapiens
acactgagacccgggcctggctgtctcaggcggctcccatgttggctctgggtacagccccgggaggcgtgtccagggccgtgttggccgcctcccctggagccactcacctgtttgctttc

SEQ ID NO: 290557 - DNA, 122 bp, Homo sapiens
cctttctatttcacacaggtactcccatgggtacatatccgctagggcaagggcccacggcgccacactccacaggaccatctccgaggctggctcaggatgcggcgccaggggcactaggc

SEQ ID NO: 290558 - DNA, 122 bp, Homo sapiens
tcactacttagatagaaggtggaaagaatttgctaatgaataatccgatgtgacccgaggcgtccaatgagtctgtgtctgcttcaagtcagtgtgaactcttcactggcgagcccctgaca

SEQ ID NO: 290559 - DNA, 122 bp, Homo sapiens
tcatacagaatattcaagaactaattaaggagttttgttatggtagtactttgtaaccagcgtcctaacaatagtagcaaaataagttcagacaaagctttggtgctgatgtctcattccct

SEQ ID NO: 290560 - DNA, 122 bp, Homo sapiens
acagctttctgtggttggtgaatatgctggtacattcatcaagctctcaacagacacacacgcacacgcacacacgctcaggaatgcatgtttttattagtaatgtgtctgacttagcagaa

SEQ ID NO: 290561 - DNA, 122 bp, Homo sapiens
taccactccaggagggacctcatcctcgtcgaggggtatcacaaatttcttccttgctggcggccctgagggctggggcaccccctctttgtccttcccagggtccatctggagcctgaaag

SEQ ID NO: 290562 - DNA, 122 bp, Homo sapiens
gcaccccaggctggggcagtgggtgggggcggggacagccctgcgccgaggaccgggcgccgctcccgggcaccggcacacgcccggacggctgggtggaggctgcacctggccgtggtgcc

SEQ ID NO: 290563 - DNA, 122 bp, Homo sapiens
gcgctgttggggactttgggctccgtgctgttgatgaattccagcagctcatccacatctcggtggtccacggcgggctccccagggatcccgcccagggtgccccccttcatgggcagctc

SEQ ID NO: 290564 - DNA, 122 bp, Homo sapiens
aaaatggggatgagaacacagtcgtcgcaggatcgcagccagaattcgtttcattcaacacggtgcctggcacttctatgtggacctgcgggcagacgcggcgacattcaacagagtccagg

SEQ ID NO: 290565 - DNA, 122 bp, Homo sapiens
cttttcaacactattccctttgacctactggccatcttcctcacagccctcagatatcaacgggcacaaataagaccaactcaatttccacttgaatttacaaccaaaagcctgctgagttg

SEQ ID NO: 290566 - DNA, 122 bp, Homo sapiens
tagtcaaactagttgtttgtgaccctgtagacaaaacaatgatctaagactgaccttcgccggttctctaactggcggctggggggcagtgtagaccttgcccggacagtcatcatctttga

SEQ ID NO: 290567 - DNA, 122 bp, Homo sapiens
tggggtgtgaggaaagaaggtggaaaaatctgaattctgttgccagcgtctgtttttcctcgtcaggaataattgacgatgtgtgcgagatttctgcaggcacagctcggattacttgaggt

SEQ ID NO: 290568 - DNA, 122 bp, Homo sapiens
ctgtgtggcatgcatgtggcaaggtgcccggtatgcaatcactcaactgccctgccttctcgacggaggtgggattgtccaggtgttttatcatgtccctgtttccggtcacacactattta

SEQ ID NO: 290569 - DNA, 122 bp, Homo sapiens
ggccccaacgcagcctatttatagggtgggactgcgccgtgattggtgcccgtcagtgcccgcccctcgcgccctagcgccccctgcgcgctgccgagggtttcgcccagtctcagaaggca

SEQ ID NO: 290570 - DNA, 122 bp, Homo sapiens
tcaaacgtgaattttggaccgacacaatctcatgtagtgattgttctgcttcctgtgttgcgccacaacaaatttccttgggctacattttccctcagatttgagtaaaagatttgaggtca

SEQ ID NO: 290571 - DNA, 122 bp, Homo sapiens
aatgcagagacacaaccagacagataagacagacttagggagtcagggcctcaccagtcacgtctgggtctggcttggtctcgccttcagcaacattcccatgggcactagtcctagggaga

SEQ ID NO: 290572 - DNA, 122 bp, Homo sapiens
tcaggctgcatgtgggatagtggggcactggaagtcctttggcttttattgtccatgacacgtaaagtccctgaaggatttggagcctccagggatcactccaggtgcttggttgtgaacag

SEQ ID NO: 290573 - DNA, 122 bp, Homo sapiens
ggagttgcattcctgctttgacaacaagacatctttgtccatctgaactccctttcctgccgaagaactcagagaatcatgacagagaggataggcagagtgtgctgctgtggacccgtgat

SEQ ID NO: 290574 - DNA, 122 bp, Homo sapiens
gcgctctcctttttggtgtcttgcaggagaggcagcttccccccttgggtccaacaaacccgcgtgtgacgctggccccaccgtggaatggcctggcccccccagccccaccacccccaccc

SEQ ID NO: 290575 - DNA, 122 bp, Homo sapiens
gcctgaaaccacctcttatatatgggtcctttctacacatggtgtttagccaagaatttgcgaccccacctcccaggaccttggttcctccccactgtgtgttctctggaagggagtggagt

SEQ ID NO: 290576 - DNA, 122 bp, Homo sapiens
cacccttctagaatgtcacctcatagaccctccccttcacacttggaatccactttacagcgttgacctattcattctagaacctggacatgacaataggatgaggttaaaagagcaccaga

SEQ ID NO: 290577 - DNA, 122 bp, Homo sapiens
ctgttttcagacaggctgcagtgagctgtggtcgcacaaggctgcagtgagctatggtggcgccaggctgcagtgagctatgatttcaccaaggtgcaatgtggctgttaccacagctaccc

SEQ ID NO: 290578 - DNA, 122 bp, Homo sapiens
gtcactctaccctgctggaggcttactctgtagcccggctagccagaggcgcccagtgggcgggagacggcgtagaggaactgaggaaaggacaagggcggagagagagaagctggcggcac

SEQ ID NO: 290579 - DNA, 122 bp, Homo sapiens
cctcttcacacccagctcttgtctgtaagtggcctctgcaggagcaaaactgcctcaagtcggcctctccaggcccagcctcctgcttcccgagggcatgtacaggcccagcctctgcctca

SEQ ID NO: 290580 - DNA, 122 bp, Homo sapiens
gggattgcacattgcagcttcttgctgtctccaggaaagactgagtaactggggggcccccggggctggcacagaggcccaggcagaggccgggcttgcctgaggttgtcgtgtagcatttc

SEQ ID NO: 290581 - DNA, 122 bp, Homo sapiens
ggttgctggagggcctctcctctgtgcactcgcggtgcggacccaggccacggacagtctcggcaagtccgttacacactgaaagaagacctaccactacctcgatacgagggaacacagcc

SEQ ID NO: 290582 - DNA, 122 bp, Homo sapiens
ggggctggatgcctggacccgaaggtctgaggaagaaagggggtccctgataggccactgcggccattgagacttggggtggggcccaagcctccattttgcaaggccctcccctccccacc

SEQ ID NO: 290583 - DNA, 122 bp, Homo sapiens
gcagccgcggatcgctgttgcatgctgatccggggaggcggcggtggcgagcgctccgggcggatgctggcactcaggcttcgctgctctctggatgctgctcaacttctagcccaagcgca

SEQ ID NO: 290584 - DNA, 122 bp, Homo sapiens
catctccagtgttgtcttccccgccaagcccccaactcccggacctccctaagtaaactccgaacctcatagctgtgaggaacccactcatgattgcccaaatgtcctgctcttggcatctc

SEQ ID NO: 290585 - DNA, 122 bp, Homo sapiens
atgccgcagccagactgcatgtgttcaaatcctgactctgacagacactggctgtgtgcccgaagactgttaacttgacttctttgagctttagtttcttccatctataagatggacggagt

SEQ ID NO: 290586 - DNA, 122 bp, Homo sapiens
gatgtggcgtgtggcgcaggcgatgtcggctggcgtggcctcctgccaggcagtgggatccgctgaaaggcagagtggaaagttaacactgttgaatgacagatcgcaaagttgaaatctga

SEQ ID NO: 290587 - DNA, 122 bp, Homo sapiens
ggaattagatttgcattaacaaaatctggacaaggaggattgtacgaagcactaccctttcgggccaagaaagctgcaggctgaacccacgtgacttgggtagcgctggtctcctgtcggct

SEQ ID NO: 290588 - DNA, 122 bp, Homo sapiens
cagcttccccgtggctctgccactgcagccaccaaccctgcgggccccggagcgagaactcggcacaggagagcagcccttgtcccccacgacggccacgtccccctatggagggggccacg

SEQ ID NO: 290589 - DNA, 122 bp, Homo sapiens
tcagcccagcatctaattacatcttctgtcagtcagggcctgagagggtggggttttaaacgttatccaatcagcgacgctgggctgggaactgtccaatcaggcacgcagcttgagcggag

SEQ ID NO: 290590 - DNA, 122 bp, Homo sapiens
tggggaagtgaaacagattatttccatagtgtcttaaaaccccagaactctgcgttgctgcgtctattgacatgaacacctgtcaaacctgcaactcatagctcagtattgtctcagtccaa

SEQ ID NO: 290591 - DNA, 122 bp, Homo sapiens
cgtcctcgagcagtgaggccggggtgaggcaggcctccaggggcgtagtgcttccgaggtcgcaggggtgggaggacggggacgccaggtggctgaaggccggcggggcctctcggtagctg

SEQ ID NO: 290592 - DNA, 122 bp, Homo sapiens
tcctggcacccatctgcagctccagtgcgaatcccaaccccgacgctcgtcgccgggctccgtgaatgtttgtcacatgtctgaagaacgtatgaattacataaccttcttcccactccacc

SEQ ID NO: 290593 - DNA, 122 bp, Homo sapiens
aaaacatattgaacaaacacattccattaattaacatctttcagcttttctttatattgccgctgcttttcctactatattaacctaactggggctctgaacaagatcatccattgagggtt

SEQ ID NO: 290594 - DNA, 122 bp, Homo sapiens
agaggaagcaaccacctaggcaataccttcctattaaatgctaccaaactccagaaagagcgtgccttggctttgtgaggagctcagaggctctgagaggccccctgtgggggagcgtgttc

SEQ ID NO: 290595 - DNA, 122 bp, Homo sapiens
aaataggagtttatttttgtactatcccgagctggctaaggagagtcacgtagctgtgggcggggtcttggggatgaggaggggtacagcaggcagggactatgctgaagtggagctggctg

SEQ ID NO: 290596 - DNA, 122 bp, Homo sapiens
atagtctgggtcggggcctccttgtcctgtgggggcctctgggccacaagaacacaggcccgagccccggcgagctcgcgggcctcccaccagccgtgctcaggctgcacttctgcacccca

SEQ ID NO: 290597 - DNA, 122 bp, Homo sapiens
tctgaaggagctgccaggacaggggcaggtaatgagtgaaggcagcagctgcggtcccgccgaacgggactcctggcgcagcgcggggaggaacgtaggcgctggcagcacagcagcccgtt

SEQ ID NO: 290598 - DNA, 122 bp, Homo sapiens
tccttctcctgctccacttcccccgaaggcctttattccacagattggatttgaattttccgccccggtagctggcggggagccggcctcgctgaaggtcagccgttcccgggtgcgtcccc

SEQ ID NO: 290599 - DNA, 122 bp, Homo sapiens
ccgactacggcggaatggagagaatgtgcgcatgctcggcgggaatctgcgcatgctcggcgggaatctgcgcatgctcggagagaatctgcgcatgctcggccggaatctgcgcgagctcg

SEQ ID NO: 290600 - DNA, 122 bp, Homo sapiens
ttctctcagacccagctcttggtaccagcaacatattgggtccccagctccagaggatcccggggtgcaaagggtgagacctcctgaatccggaccaccctatgattttcacctgggctgcc

SEQ ID NO: 290601 - DNA, 122 bp, Homo sapiens
ggggcaccggcaagctacggaacaggtggcggggctgcagcaccccaatgaccgatcaaccgcaaaggccggaaatgcgtcagccgttctgagcccactggctgaagccaggcaactctttc

SEQ ID NO: 290602 - DNA, 122 bp, Homo sapiens
tattgtcagtctccttttgtaggtggggaaacggaggttctaagaagttaagccccttttcgaagtcacagtcagacaatgcagtggttagctcctagtccctctggcttcaatcttagaat

SEQ ID NO: 290603 - DNA, 122 bp, Homo sapiens
gaaatccagcccaggcttcctgactagcagagctgagattcaaaccacatggtctgactccggggctgggtccttcatcgctacatcacattacatcacaaaattagtgcttttgataaaaa

SEQ ID NO: 290604 - DNA, 122 bp, Homo sapiens
ttatgccactctgaagacttagtccctgtcccaggccacccagagaccccacagccaatccgagggagctttctctgcaggctgtgccaagataacaatgagagagacacatgcctgccaga

SEQ ID NO: 290605 - DNA, 122 bp, Homo sapiens
tcagttcccaggcctgctgctagagttccaggtttgccagagctggtggaacacttctctcgctgaccagcaggtgtctccactgaggcatccacctcatcggcgggcctccctgtcctcct

SEQ ID NO: 290606 - DNA, 122 bp, Homo sapiens
ctgactagcacagcgccagctaggaagagcctagaatagcgaccaactggcaggccaaaccgtcccctgcccctgcccctgcctcggagaagcgggcccctgcactcacccgcttgtagatg

SEQ ID NO: 290607 - DNA, 122 bp, Homo sapiens
tattctttgcgaaaacacacaacagaaactttttcctccagcccagatgtagatctcagacgggatatttttttttcctccctctccggataatttcgtttctttctctctctctctctttt

SEQ ID NO: 290608 - DNA, 122 bp, Homo sapiens
ttcaggtaggcctgtgcctttttcagcgggctgcagttctcctgcttggcttgagtcattcgcatttcctgagagctgggtagagggggagttgtggaggagcccattctgaaactgatctg

SEQ ID NO: 290609 - DNA, 122 bp, Homo sapiens
gagctgtagggcctggaatggcccaagtggagcctaggctaatggaagtctggcctggcccgcaccctgtcccccgggactcctggagtcggggtagggcagggtctaggcttcgacctttc

SEQ ID NO: 290610 - DNA, 122 bp, Homo sapiens
taagggcttacagctctaagggggtccgtgtgagagggtcgtgatcgattgagcaaccagcgggtacgtgactgcgggctgcacgcaccggtaatcagaacagagcagaacaggccagggat

SEQ ID NO: 290611 - DNA, 122 bp, Homo sapiens
agcacatatacacactgaaaactagtttaaatagcgtggaacatttccctgtaagaagtacgttaaatgcagtttcttgaacgtgaagccatttcaacgttacaaaatctgtcctaatattg

SEQ ID NO: 290612 - DNA, 122 bp, Homo sapiens
gagcctgtgactctccagcctatgtccggtggggacagatgcagctctgtccagtcaccacgatgctcccttccctgctctctggacccctgggctccaggatcactgcctggggcccctga

SEQ ID NO: 290613 - DNA, 122 bp, Homo sapiens
atttagtaggtcggggtgggcaataggctgagactctgcatatctaaaactccagggtgacgttgatgcaggcccttggacccactttaagcatcaaggccataaagggctggcaaaatctc

SEQ ID NO: 290614 - DNA, 122 bp, Homo sapiens
gcaaggtgtggggaatccagctagtggtaaaggatgaggaatgtagctcgtcatttacaacgtgcattcactacaaccctgggaggtattacctcagttttaaaaaaggagaaaacaggttc

SEQ ID NO: 290615 - DNA, 122 bp, Homo sapiens
gagctgtgcggctcctggtgagaggcacacttatctgggatgcagtctggggagtcctggcgaggcagcttccacctgctggaggaggggccggggcggagctaagatgcggaggagggtga

SEQ ID NO: 290616 - DNA, 122 bp, Homo sapiens
cgaactcctgacctcaggtgatccacccaccttggcctcccaaagtgttgggattacaggcgtgagccactagtggctcctggccggcgttggatatttaaaaatctccccagccaaggttg

SEQ ID NO: 290617 - DNA, 122 bp, Homo sapiens
tgtcctggttcctggtatgtttcccctgccttcctgcatagcagaactgcagatctagctcgatgagcaacagacaggttattatgaggaaaaacataacatgatgcatgtttcgcttacca

SEQ ID NO: 290618 - DNA, 122 bp, Homo sapiens
ttttcagtcttgttgatagctttctaactgagggcatttcacaaggaaagaacattttcacgtctcagtttctgcatagatgggattgggtagagaaaaaccaatgccctgagatacagatg

SEQ ID NO: 290619 - DNA, 122 bp, Homo sapiens
tcggtttcatcggcgccgggtccctacgcagaccagcggcggttgctgggcgaccagacgcgctgtccaagcgccgctcacgagaaatctcgcgacatcgcaggctgctccctccccggtgg

SEQ ID NO: 290620 - DNA, 122 bp, Homo sapiens
agagtgactgcatctcattgccattacatgcgttctatatattcgatggacatacacctgcgtatgtatatccaatatgtgtgcgtgtgagcatgcgtgtgcgtatgtgcgtccgacatacc

SEQ ID NO: 290621 - DNA, 122 bp, Homo sapiens
acctgggcggagaggggcagagccatgggcccggccgggccgcgggagcgggagagctggcggcggggggcgcggggggcgcggggggcgcgggggtccggagctcgctccccgcagcccac

SEQ ID NO: 290622 - DNA, 122 bp, Homo sapiens
gtcgtcattggctgagcgcctcgtgacgtcactctgaggcgcctcatgcggcgccgcgcacgggtcccagagccttctgggtagcggtttaaccccgcctcttgcgtcggcgccttcctttt

SEQ ID NO: 290623 - DNA, 122 bp, Homo sapiens
ctcctccatttttgtgccccccacccccagcgcgtatttattgtattttaatttaaaaagcgacaccttcaaaccctgcgcccgaggcggcggaggcgccgtcacccgcagccgcgagagcc

SEQ ID NO: 290624 - DNA, 122 bp, Homo sapiens
tgtggtgctggacgagatcaccttcaaaggaagcgtacagatgagagcagcccaacaactcgtattgagacatcccaacatagagtcatggaaattggaaggatccaagaaaggagactaaa

SEQ ID NO: 290625 - DNA, 122 bp, Homo sapiens
tcacctcatttttcggtaaacgaaaccacctaaagattaggtggtttcttggtgcaacatcgggtttgagactgcagaaaactaagtctggaaattgggccatttgttccccggggaggcag

SEQ ID NO: 290626 - DNA, 122 bp, Homo sapiens
ggtcctgagccctgccccgtggggaggtggctgaggcccagcgagaatttgagtgcggcacgggcaggctggcagtgctgggggacccggcacaccctctgcagctgctggcctgggtgcta

SEQ ID NO: 290627 - DNA, 122 bp, Homo sapiens
tccctgctgtgcacgcatcagcatcgtgctcctttttgtagctgaatgctgtcccctgcacggatagaccacattttgtctgttcatccatggatggacacgcgtggcttccaccctttccg

SEQ ID NO: 290628 - DNA, 122 bp, Homo sapiens
gaagagctggaagaagagcagcagagccgcagagggtagcctggctcgccccagctccggcgtcctccactcgaggtctgctcctggccgcgggtgaagccctgcgtgcttgacccacccta

SEQ ID NO: 290629 - DNA, 122 bp, Homo sapiens
ttgggtgtgaaggtgcgcgggctccttattccctttcctctttctccggttggggtccgccgacttggcctaatgcatgctgtgaagggctttcttggcagctgagagaactcgactctgcc

SEQ ID NO: 290630 - DNA, 122 bp, Homo sapiens
tgccgaccccaaggcccaagtgtgggcctcgaacccagctcgacacaggaggggtggcctcgagccccgcacccgcaatggaaaaggacacgggcctcacaggctcctggggtcttcactga

SEQ ID NO: 290631 - DNA, 122 bp, Homo sapiens
accccgaacagtgcctcacatatagtaggtgcttggtgtttgctgaatgactgggttaatcggtaatgaatgatggtcaggtaggtgggagccaagcctacaaaagattttaaaaccatcct

SEQ ID NO: 290632 - DNA, 122 bp, Homo sapiens
ctctggctgcaacctcgagggcaggagcgctggctgcagtcggggcctgagaagcctgcccggcacacacacacgccctgcacgcagcgcccacggccttggcagtccccgggacaggatgg

SEQ ID NO: 290633 - DNA, 122 bp, Homo sapiens
ggctttttaccccccgccgccgcggctttctgcccgccccggctttttgcacccccgccgcggctttttgccccctgccgccgcggctttttgccggccatggctttttgccccccccgcca

SEQ ID NO: 290634 - DNA, 122 bp, Homo sapiens
gaaagtcggctcagccgcccgcgttccgggggacactaggtgtcgatcacctgcgcgggtcggggatggggctatgcaaagggtgactcaccagaccgaagtcgttctcagccttggaccag

SEQ ID NO: 290635 - DNA, 122 bp, Homo sapiens
agtgactaagatgtgtgcattgcttcagagacatggaggtcactggatacttggcagggccgtcttgtagttgctacaggagctgagaccggataggtgggcagggcactgcagagaagagt

SEQ ID NO: 290636 - DNA, 122 bp, Homo sapiens
agaaccaactggagaaccaactcgtggagagctcgggccccatgactcagtctgacccgacgctggcgaatgctgctgaggaccctgaaaacctgcagggaccctgtcccaggccagcgaca

SEQ ID NO: 290637 - DNA, 122 bp, Homo sapiens
acttcctggaagtttggaggcacgggaactacattgcccaaaaggcgcagcgccgcgaggcggcgatccctgaccaatgaaaagaggtctgcccgagcgtgcgacacgcaatgggcgggact

SEQ ID NO: 290638 - DNA, 122 bp, Homo sapiens
gcggctgggggcggctgaccgaggggcctgggcccaagaagctctgctttatgaagacaccgggcgcagggaggtcctccagttcccccatcccactgtgagtgtccagaggtggaagagaa

SEQ ID NO: 290639 - DNA, 122 bp, Homo sapiens
tgacattgagcagaatacagacaaattgtcaggcagttgggtgggatgaaaaagatgggacgacagccaacactatcaaaaggacctgagttcatgaatatctgggctagctcagtgaagct

SEQ ID NO: 290640 - DNA, 122 bp, Homo sapiens
tggaggtggggccaaggctgccatggaaaaggagctttagcgcaacgcctgcagctgactcgtgttttgcattaggaagcgtttcactgcctaacgacggatcacctggcccagcctaagga

SEQ ID NO: 290641 - DNA, 122 bp, Homo sapiens
atgcctcgagtcgtggatggaaacaaggtcccaggaccattgtcctgagcctcctttctccgtgctctacctggggaatgcttgactatcaacccacagaagctctctctggagcctcactg

SEQ ID NO: 290642 - DNA, 122 bp, Homo sapiens
gcatgtaaagtcttctgtctctcctcggagttggcggaggcggcaactttccattctcgccgccgggggccgggcagcagcgggcgcgcgggtcagcgctcagcacggcgggcagcgccgcg

SEQ ID NO: 290643 - DNA, 122 bp, Homo sapiens
taatagcggctcttgccaaggctgactcttaaagcctctcctccgccttgtgatctgcagcgcacgtcttattatggggtgcattatgcagacgccagccctgtgatgggacaggcaacccc

SEQ ID NO: 290644 - DNA, 122 bp, Homo sapiens
ggattaaaacccaggcttgtctggtttaaaattgcttgttgtttccactttggtcagcctcgcttacgacagctccgggagaagtctctggagtccgtgcgagccggcggatcaggtctaga

SEQ ID NO: 290645 - DNA, 122 bp, Homo sapiens
gttgccagtaacaaccaagctgcagaatattaatttgcaattgaatcaactggtcactttcggaaacttcctgtcggtttttgcagggagtggcaggagctgaggaaggggtcggggtggcc

SEQ ID NO: 290646 - DNA, 122 bp, Homo sapiens
ggattcctccagtagctgtttccgctgggtttgagcttgttttatatgcttgttcagatccgtcatttccgccactatcttttctttaagccttgtctctacctttgttagcttctctggct

SEQ ID NO: 290647 - DNA, 122 bp, Homo sapiens
gcaaagaggaaactgaggccaaaaaaggcttaacagcttctcccagaccacatcgcagaacggcaggaagacagaggaaaatgccaggccctgaagtcacatcacctgcccaggcagatgcc

SEQ ID NO: 290648 - DNA, 122 bp, Homo sapiens
tcacctgaacccaattcctgaacttttaaatctgtttggaaatgtttgccttcaggggtacggaaagcattctttacattttgaacacttggagagaagcaaattgaaaacaggactctgct

SEQ ID NO: 290649 - DNA, 122 bp, Homo sapiens
ggggtccgtgtctgtgtccgtctcaccctcggcgaggtaccgcttctccctcatccagctcgaccccccattggggccgaacacataatcatctctgtcctgggagatgctgaagccacttg

SEQ ID NO: 290650 - DNA, 122 bp, Homo sapiens
gggactcttcagggagagcgttttcctcatcaaagcaaactgcaaaatcgcttctgccggcgtggacctgatgagagtcggtcgtcgtgagggacaccctctgttccctaacgtcccccgct

SEQ ID NO: 290651 - DNA, 122 bp, Homo sapiens
agccacagtgatgtcaccagccacttctgaatcccttctagaactttccagggaacctgccgagtgtgcagggaggaaggagatgctgtttcccccaatctcaattcctttctccgccttat

SEQ ID NO: 290652 - DNA, 122 bp, Homo sapiens
attcttttctgggtgaggaaaatgttctaaaatttacttatggtgatagttgcacaacttcgtgaatatgctaaaacccgttaaattggacactagctggctgaacttgatgggatgtaaat

SEQ ID NO: 290653 - DNA, 122 bp, Homo sapiens
gagtaattctgagatttctctgattctctctctctatttctagctggatctcttctctcacgggtcctcattcaaatctatcatttccagttttccacagcccccacccttccctacttact

SEQ ID NO: 290654 - DNA, 122 bp, Homo sapiens
gagcaggggaggccctaggggcggggcttggcgggggtggggtcttggagggtcgcaggtcgcggcgctggggatggtgggagcctgcgcagctggctgggcggtctctttctctctctcct

SEQ ID NO: 290655 - DNA, 122 bp, Homo sapiens
ttttatttccacccttagggaccgtgcctgccaagctgcctcccgggcgccccgccaccgcgggctcgacgctgcaccctgccaggaccagggccaggacagccacttatcacctccccgct

SEQ ID NO: 290656 - DNA, 122 bp, Homo sapiens
taccttttctgcctagctattgttgatcacctttgggatgattgagttggtaaaccctaacgaggaaatgccctgaaagttacatcacattgtctgaggattaggaagtgcctttggggcca

SEQ ID NO: 290657 - DNA, 122 bp, Homo sapiens
ggacccattgtcacgtgcacacaggaaacgcctttattctgagccctcagaggtcttctacgctatcattcgaggctgagttttctgggtaatgtagttccctaggcaacaaggagggtaaa

SEQ ID NO: 290658 - DNA, 122 bp, Homo sapiens
tctccaccccgcgaggaggggcagctccggagacccggtcttcagcgagcggggtcttagcgccggggaggtctacttccttttggggttgccattttactattattattgccttttttttt

SEQ ID NO: 290659 - DNA, 122 bp, Homo sapiens
gcgctgtggaggcctcgtgcccaacctgcgctcaggcgagtgccagctggcggcggtggacggtgggcaggccggcagcttcctctactgcaatgcccggagcccactgggcagccgtgtgc

SEQ ID NO: 290660 - DNA, 122 bp, Homo sapiens
tgagggactgctctggctgggagctgttggacgggcacagggcggtgccgtgaggctgggcggtcccacctggctcatggagcagctatgggagaagccgggcgtggtgaggcgtacgatct

SEQ ID NO: 290661 - DNA, 122 bp, Homo sapiens
gcagacctgagccagttctcctggggaccaaaatatctcacctcccagatctaagggtcccgccaggagtgacgaaacgttcgaattcctgcgagaaaagtggcaggccaccaggccctctg

SEQ ID NO: 290662 - DNA, 122 bp, Homo sapiens
ccgaaatagaaataatacctgtctcacagagctgttgaaaagctccactgaaataatgaccgcaagtgtgaactgtaaagcaatgtaagtagtatttattattaaaaggtctctactgaaag

SEQ ID NO: 290663 - DNA, 122 bp, Homo sapiens
ccggccagggagcagcgcaggaggcgtcctgcccgactccaggcttcaggccagccagaccggtcccaacctgtccctgggggaactagatcatttctggctgcaggagggggcgaggggca

SEQ ID NO: 290664 - DNA, 122 bp, Homo sapiens
ttgcaatattctgtagttaacaccatccgcaaagctaggaccctgctctcatgaagcttgcgttccagtgagtgtggctattagcaacactaccccaaattaaaaattatccgccattactc

SEQ ID NO: 290665 - DNA, 122 bp, Homo sapiens
gcctgttcctgcagccggctgtgactcaaatgcccgcccccctcagaggcgagccctgcgcgtctgcagtatttggaccgaaggcacccggcaagggcacatggcaccctgccccacctgct

SEQ ID NO: 290666 - DNA, 122 bp, Homo sapiens
tcctgccggtgactgtttacaagagggaagtcagcggggcccccaagaggtcgctggtggcgcaggaaccgcatccagattgtaaagaacgggggaaggaaaaaaaaagaaaacacccagaa

SEQ ID NO: 290667 - DNA, 122 bp, Homo sapiens
ctgttttgaaaaataaaacagccgtgcacggggaaggatccctaagaatttataccgatacgttaacagttattatctctgggtggtaaaattcaaggtcatttttattttcttgttcatcc

SEQ ID NO: 290668 - DNA, 122 bp, Homo sapiens
agtccagggggagccggcaggcggcctcctccccgagccggaggagctgcgcggacgcagcggcttccaggccaccccaccccgcgccagcctgcacctgtgccgcctgggtgtcttccccg

SEQ ID NO: 290669 - DNA, 122 bp, Homo sapiens
accaccagactcctcagcactcacgggagaagagcactaaggacaaaggggcacttaacacgtgtaaaagggcaatggctcctaataaaggataagatctgttttctttttattttattttt

SEQ ID NO: 290670 - DNA, 122 bp, Homo sapiens
aaaaggcataagggcaacacatttccgtatttaaataagatgtattaaaaacaacaacctcggggctaagtgcttttaaaagacacacaaattacctatcctctgactgaactttcagaaaa

SEQ ID NO: 290671 - DNA, 122 bp, Homo sapiens
gaacatctccagagattcctgttttctgggaggtgccagaaattagcaaacaaactacaacgaacaataaaccggctctgtgattccttatacatttttgcttctgaaatatgccggacagc

SEQ ID NO: 290672 - DNA, 122 bp, Homo sapiens
aggagaggtcttgggggcggggccggtagtatcggggagcctctgatggaggggcctggccgggggcgggatccagaaggattgaggggtcgccggaggcgggatttatgcagggggtgttt

SEQ ID NO: 290673 - DNA, 122 bp, Homo sapiens
gcgcagagagccactactcttacctccaccaccgttaagatgaagcctttccacatttcccgacactccaaggtctctacctggggaacaaaagaaaggaaagaatccaagtcagtgagcct

SEQ ID NO: 290674 - DNA, 122 bp, Homo sapiens
cccccagaggagaggggtctctcccgccacctcagcctctctggtagtggaagaagccgccggtccagatccctcctgcctgtgggaccgctgtttccctggcaaccagatgcgcgatgctt

SEQ ID NO: 290675 - DNA, 122 bp, Homo sapiens
gtgggggctcctggacacagcccagagggccctgtaccgccgcgtgatgctagacaacttcgcacttgtggcctcgctgggtaaggtcctagatactccatgaaatgggcaactgataacaa

SEQ ID NO: 290676 - DNA, 122 bp, Homo sapiens
ggctgatttcatctagggacttaccacctgtgatcagcaccaaaagcttaggaatcccctcggcagcccggtagccggctgaactcgtgaataggttgttacgaacaaagtctagagcagag

SEQ ID NO: 290677 - DNA, 122 bp, Homo sapiens
tagtcactaacagaaaaaaaaactaatttcactttcgatttttaaaaaggggtggttttgcggaggaaagcagaagtatacctgaagtttccgtacacactaattttagggaacgctttcta

SEQ ID NO: 290678 - DNA, 122 bp, Homo sapiens
cgtggtccctgtgccatcttaagatgagaattgccctctgggttcacgctgctatgatcccgattccagcaggtctaaggagaatggatcataaagaatttcccattctgagtggagactgg

SEQ ID NO: 290679 - DNA, 122 bp, Homo sapiens
aaatacacaaaacagtggtatatgtttaggaaagcaaacattttttaaaagtgcaaagtacgcatgggaataattcccaacaactttagaatgataattactacaaggaaggagagaaatgg

SEQ ID NO: 290680 - DNA, 122 bp, Homo sapiens
atttaaaaggcaccaaaatcctagaagtcctaggagggcgtggtgacgcaagcaggtgaacgctggccgatgctgacaacccactcctgacgcgcttccggtgcgacgctgtctctccatgc

SEQ ID NO: 290681 - DNA, 122 bp, Homo sapiens
ggacaactgttactgttcttccgtggccaaccatggcggccaccagccctacccccgctccggccactttccctggacagtgccctcgcaggagtactcacacccgctcccgcccacaccct

SEQ ID NO: 290682 - DNA, 122 bp, Homo sapiens
tgagtgtgcatgtgtatgaacatgcatgttgctcagagcagtcaagtttaagctcacatacgctttgaaaaatggcagtggaggatattttatattgcattgttttatattgcaaaattttt

SEQ ID NO: 290683 - DNA, 122 bp, Homo sapiens
ctaaggggagggccaagactcactgggcgtcctcgccctccagcaggcggcggtaggtggcgatctcctgctccagccgcgtcttcacgtccagcaggatcttgtactcctggttctgctgc

SEQ ID NO: 290684 - DNA, 122 bp, Homo sapiens
ctggaaaccgtccaatcaggcaggcagctggagcaaagaggacggcttccgggtttggcgcggcctttgtctctcgctgcatctggagctctaggtcgcctcttcgctactctgtgtcctct

SEQ ID NO: 290685 - DNA, 122 bp, Homo sapiens
tttaacttttctcttggcaggtccagcagctttgaagatcagagtgcatcttccagctgacgatctcttcggtcggggacaatgcattcgattcgcacggtggagattaaagtccccgagat

SEQ ID NO: 290686 - DNA, 122 bp, Homo sapiens
cgatcagccccttcagctgatgcaccagctgcaggctctggaagggcgtgacggctggagcgtccgcgccagccaccgacccgttgcccgccgaggcctctgcgctctggttggcgggagtt

SEQ ID NO: 290687 - DNA, 122 bp, Homo sapiens
tgggccatggtctctggggtaggacgggatgaatgagaggggatgctagaaaagggagcccgcccagatcctcttctgggccaccacgaagagttggaaccttatattgatggacaggattt

SEQ ID NO: 290688 - DNA, 122 bp, Homo sapiens
ctcaagcaatcctcctacctctgcctcccaagtagctgggattacaggtgtgcaccattacgcctggctgattttaggaatttaaaaccagactacatctttgctaaaagtttcttttcacc

SEQ ID NO: 290689 - DNA, 122 bp, Homo sapiens
aagtgctgggattacaggtgtgagccaccgcacctggcaaaatgctgttctttaagtcagcgaactgaaaaagtaaaagactgctgggtgtggtggctcacacctgtaatcccaacactttg

SEQ ID NO: 290690 - DNA, 122 bp, Homo sapiens
tggacgctctgtaccaatcggaggctggagcgggccctgagaggcgcccgactccgcccccgcactggccctgcccactgcccggtcagcctcgttgctatggggactggtgggcggtgagg

SEQ ID NO: 290691 - DNA, 122 bp, Homo sapiens
aagaatctgggctcatctgtatattttgccctttagaaagaggaagacacaatgctaggccgggcgctgtggctcacgcctataatccaaacactttaggaggctgaggcgagcgaatcact

SEQ ID NO: 290692 - DNA, 122 bp, Homo sapiens
ttaacaaatttccccaggtccgggccaataattgcaagtaagactcatgcctacaatctccgcgctttcgaaggtcagagcgggaggatcgcttgaggctaggagttgaagaccagcctgga

SEQ ID NO: 290693 - DNA, 122 bp, Homo sapiens
gtcatgggatgaaagcacacgtggatggatcagccggctgaaagcagcctttagaaccatcgcattgcatatccccaagtcgaacgcgcagaaccggtgtcatctggtacttctgtgctgcc

SEQ ID NO: 290694 - DNA, 122 bp, Homo sapiens
tctgcatccagtgggctgcatggcttgaggctgtgcctagctctgggttcacaaagaagccgcctgggttagcagaggcccatgagacagcagtggcttcaccagagggaggaagtcaagaa

SEQ ID NO: 290695 - DNA, 122 bp, Homo sapiens
caagtaaaaaagacatccagaaaggacttatggactttctgccttccactaaagatttgtcgctgatctcctaaaaactgaaaataaagtcttcattaatgtgttcataaggtatcaatttt

SEQ ID NO: 290696 - DNA, 122 bp, Homo sapiens
ccacagtcacagctgctcttgggagagagttaggggagacagcaccttctgcagcagcgacgtgaattttagtgaagttggaggccaccaaactaccgactccaggggaacagccagagaag

SEQ ID NO: 290697 - DNA, 122 bp, Homo sapiens
ctgcgcgagtgggagggctgggcttctcgtgtactcctcaaactctcgcgaggcttcgggcggctttcttcccgagggcggcacgagggctgggcggtggggtgcgggtgcccgggtgaggg

SEQ ID NO: 290698 - DNA, 122 bp, Homo sapiens
tagtatggcttggctgctgaatcaccagtgtgaaaacccatccctggagaacgtggagcccgagatgacatgggtagccactgttggtggaaaaagcagaaatttttgaagagtgaccaaag

SEQ ID NO: 290699 - DNA, 122 bp, Homo sapiens
cggagcgtgcaggaaggagcccgagtcggcgtaggcggcctggcgggggctcgcggccagcgccaggctctggtacatcctcccaggcgtggtcttgacctgcagggaagagggacaggtgt

SEQ ID NO: 290700 - DNA, 122 bp, Homo sapiens
gcccaagcttcttcagttcagacacatggttttagtgaatagaagtcactctaccaaacccgggtactcttcaaacatgccttgctccgtatgcaggcaggcaactgcacccctgcttcctg

SEQ ID NO: 290701 - DNA, 122 bp, Homo sapiens
ccgcagcccggtggggcaaccctgactcggaccgctcgggagagccccaggagaggccagcgccgcgcagcagccgccccgctgcgcccacctccccggctgctcccggagggctcacaaag

SEQ ID NO: 290702 - DNA, 122 bp, Homo sapiens
gtagaacactcaggctttcagcaaggacacctcattgggtcctttctcactgctatagtacgcgggtggctggacctacatgcttcctgctgtggctgtctcggaacccgtggtcctccgct

SEQ ID NO: 290703 - DNA, 122 bp, Homo sapiens
ggcgcgagcagctcgggttcttctcgtagaacgacctcatggatgcccagtaggcagcctcgtagtcgtcctcgtcctcccgctgctgctgctgctgctcggacagagagttgcggtccagc

SEQ ID NO: 290704 - DNA, 122 bp, Homo sapiens
ctccccagcgtcggtctctcaaggcccctcccaatgggggccaggcggagggtgggccctcgggcctgtggactgaccccggggttcctgggcctgggggcggggatccctgtcccgggctc

SEQ ID NO: 290705 - DNA, 122 bp, Homo sapiens
ccttctctaataccttgtttgagatggagatactgattaggacacgccacagtgcctggccgatggtgtttcttctgagtactgagcattttcacaaattaaaattccctttaagaagtaaa

SEQ ID NO: 290706 - DNA, 122 bp, Homo sapiens
aagcctcctcctcctgcatctggctgctccctttggggcagcctggtccgcctctctgggcgccaggtgcgtctgcagcgctctcctggaggccggctgcaggttcattagtgctcacaata

SEQ ID NO: 290707 - DNA, 122 bp, Homo sapiens
aatctcagggtcctgatctctaaccccagcgagttctcggggatccctgggcagctttgccgctctgatggctctgcttccaggctgttcatctttggctttgagcctcaggattctataga

SEQ ID NO: 290708 - DNA, 122 bp, Homo sapiens
gaagcccaaggggtagcgtgtagggggttttttatgcgggaggagctgcctcctgggcggcggggactttctgtctcagcctgtctgcctttgggaaaacaaggagttgccggagaagcagg

SEQ ID NO: 290709 - DNA, 122 bp, Homo sapiens
agacaggcagccccacgacctcagcatcgacatctacagccggacactgttctggacgtgcgaggccaccaataccatcaacgtccacaggctgagcggggaagccatgggggtggtgctgc

SEQ ID NO: 290710 - DNA, 122 bp, Homo sapiens
taaacacagaatcactgctacggtaactataactactactgtgcatttttattcctgaaacgatgttctttctttcacctttcaaagtagactaaaaggtaggaggtctggaaaaagctcta

SEQ ID NO: 290711 - DNA, 122 bp, Homo sapiens
aaatgaggacaggggcaatccctaccctaccaagtcattgggagtgaagacatgatgacacggtgattgtgaaaagattttgtcaatcgcaccagcattaagggtgcccatctccaggttcc

SEQ ID NO: 290712 - DNA, 122 bp, Homo sapiens
acgtaaaaacgtcctgggggtgatgagggcagcatctgaaagggctgggggagaggccatcggagacacacccggctccagtgtccgtccaccgtgagcccgtggctgccccgtgggccctg

SEQ ID NO: 290713 - DNA, 122 bp, Homo sapiens
tctactccctctttgaagacgttggttaaagccttaaagggcttcttggttttggccgggcgcagtggctcacacctgcaatctcagcactttgggaggccgaggcgggtggatcacgaggt

SEQ ID NO: 290714 - DNA, 122 bp, Homo sapiens
cccagcccaaattctcacaagagggccgactccggccagagcgcgcccctctttgtgcctcggtttgcccacctagaggtcagtcccgcaggcgtggcgggtacatctcagggtcggcagaa

SEQ ID NO: 290715 - DNA, 122 bp, Homo sapiens
agcttctgcgcaaggtggcagagctggaggacgagaagtccctgctgcacaatgagacctcggctcaccggcagaagaccgagagcaccctgaacgcgctgctgcagagggtcaccgagctg

SEQ ID NO: 290716 - DNA, 122 bp, Homo sapiens
gtggccgctgcccgtctccgcaaggctgtcgtgtggggcgctcctctgctgtgaccagcgcggtttgtgtgattccgctcccccgctcacacccacctgtttcagcactgttttaaatagcc

SEQ ID NO: 290717 - DNA, 122 bp, Homo sapiens
ctttaccaccttggcgaattcttgccgggacctacatattaaacagcacttgcacacagacgcctcaagtcgtcctctttagagtcgtcacttagacctgcaaggggcgggggaccagtgga

SEQ ID NO: 290718 - DNA, 122 bp, Homo sapiens
ccaccctcacagccctctgatgccagtcctgctcccaggtcatgccagccccatcttacccgtctggtttttgagtttggacaagctccactccagctgctctacccaacgcatatcctgct

SEQ ID NO: 290719 - DNA, 122 bp, Homo sapiens
ttggggctctatagcctgctgttccccatagatgtcagggactgatctccctcgcactcccgtcccatggtcacccaacctccatccccaccgccaggtggataagctccctcctgggcctt

SEQ ID NO: 290720 - DNA, 122 bp, Homo sapiens
cgtccttgcttggagatgcaccaaatccctcctgggtggcggcatcactggggactgggacgcagccgtgagtgggacagactggtcagcaggcagcagcttgtcctggcatgtgacccctg

SEQ ID NO: 290721 - DNA, 122 bp, Homo sapiens
gcacacacgaacctcgtttttccatatctggaacatcgccagagccacaacgcgaaaccacgagcctgtagctgctctggggacccaaaacaagcacccaggttgtaggtggtccccgacgt

SEQ ID NO: 290722 - DNA, 122 bp, Homo sapiens
ggggacattcgggcagaccaccctgtgcaaaggctgtgacgttgccactctggaataacacggtcaccaacgtgtagagaaccctcagcctgcagggcgatcccacaggtcagcatggcttc

SEQ ID NO: 290723 - DNA, 122 bp, Homo sapiens
gactcagtctttcccccaggtagagagaatccgaggctgtttctgccgctgaaatctgagcgggagagcatcccgaagccgcctgcgtggagcgagcagcccccgcgtcatgggccagaggc

SEQ ID NO: 290724 - DNA, 122 bp, Homo sapiens
cgaacttctgacctcaggtgatctgcctgcctcggcctcccaaagtgctgggattacaggcgtgagccaccatgcccagccagttttctaagcactttgaaatttaaatgcactctgtctgt

SEQ ID NO: 290725 - DNA, 122 bp, Homo sapiens
gctggctggcttaccagcaggtggacacgatgtgcctgcatgagtgatcagccaagtgaccgactgacagtcagacacacagacccattgcgggccagctcgggctgtgggtccctagcccc

SEQ ID NO: 290726 - DNA, 122 bp, Homo sapiens
gctgcacgcggcctccggggcggcggccgcccggctgctgaagcccgagctgcaggtgtgcgtgttctgccggaacaacaaggaggcgatggcgctctacaccacccatatcctcaagggcc

SEQ ID NO: 290727 - DNA, 122 bp, Homo sapiens
atgtatgcatatctaaagtacagcatttaattctttaccttgtctatgaaccgttgttcacgtgtttatctgctgaccctctctccactattatcctatgaccctgacgcatccccctctcc

SEQ ID NO: 290728 - DNA, 122 bp, Homo sapiens
tcagccagcctatttcccaactgccgcagagcagagaggatcaatttttattaggatcctcggcaagtttgctctgggccgctttaatattgagcagtggcataatctcgggacctaaactt

SEQ ID NO: 290729 - DNA, 122 bp, Homo sapiens
cagaaggaaattacgtatgaaatataaaatatcacagcagtcctcccttacctacagttccgcttgctgtggtttcagttacccacagtcaacctcagtctgaaaatagtaacatggaaatg

SEQ ID NO: 290730 - DNA, 122 bp, Homo sapiens
aatgcttaggatttgtccagaaagaaagatttccctcaagaagtggggattttggaaggtcggggaatgttatggttagtctagaccttgatatatgcttcaacagggtgtggcaaaccttg

SEQ ID NO: 290731 - DNA, 122 bp, Homo sapiens
agctcggacctgatggatctgatgtacctggcagaaagaataaaaacctgtggatgtttccgtgagtggcaggattggatggtccctcggaaaagaaccaatcagcactggagctgaaggac

SEQ ID NO: 290732 - DNA, 122 bp, Homo sapiens
ctctcccctccttccaccctgagacgtgtcatatagctgcctcaggccctgtgtttctcacgtaaaacctgtgctgatgacaggttcattttcaaacacaggaaggatgtccagctcacagt

SEQ ID NO: 290733 - DNA, 122 bp, Homo sapiens
ggaggatcgaccagcctccgcccccacccccgccgccacctcctgccccccgcggccggacgccccccaacctgctgagcaccctgcagtacccaagaccctcaagcggaaccctggcgtcg

SEQ ID NO: 290734 - DNA, 122 bp, Homo sapiens
aagcctatggatcccttctcagaagaatgtttttcaatgcacaaaatagaataatacatacgcagaaaaccaaggttcaaatcctcactttgccacttactggctgtgtcagcttagacaat

SEQ ID NO: 290735 - DNA, 122 bp, Homo sapiens
tttggacagagacggtcactcaccgtggggtcttcttcctcatctgccatcccactagcacgccaactcacagcgtcctgccggctggctcccagctggttacactacttccgccgcctcac

SEQ ID NO: 290736 - DNA, 122 bp, Homo sapiens
ttccaagaatttaggcttccaaatctcggctaggccctactaacacccttaagatttcggcggtggggtggggggaggcagggttagagggtttctttcttttttccttcgtctacccgccc

SEQ ID NO: 290737 - DNA, 122 bp, Homo sapiens
tgtccctggctggtgtctgtctttaccttgaactgccctaagattagaatttcttgtaaacggtgacttaattattcgcctgcatccttttacaacgtcgggctgcttccccctgtgctcag

SEQ ID NO: 290738 - DNA, 122 bp, Homo sapiens
gacggcaaaggtattggggatcacacggaaactgcatgccacctcccggcctaagagttccggaaagttggagcggatgaatcagactatcaaaaatagtactattatcttccccgctggat

SEQ ID NO: 290739 - DNA, 122 bp, Homo sapiens
catcagcacaacatcaccagtgacgagagcctccccaagtggttgacgggaaggatggttcggtcctccagaggcggtggccttctcttcctcgatgacattgccgggctgcaccttgtgag

SEQ ID NO: 290740 - DNA, 122 bp, Homo sapiens
ggacacagctgagtgattctggctgaacaatgaggcctcactttcctggctacatttcaccgactaaaattctctagccttatcgggccagaaaatacggatgtccccgggcagaggttgga

SEQ ID NO: 290741 - DNA, 122 bp, Homo sapiens
cacctgcgaatgttcagtgcaccttccgcttcctggctctatttcagtcaaacctgaggtcgtagtgaaagtcggtgaggaattctttggaacttcctgattggctgtgtccttgcctcctt

SEQ ID NO: 290742 - DNA, 122 bp, Homo sapiens
ccaacttcaaaacagctgtttgctttttagtcgcacaggccttgcttgagtaattaaagccgcgtggactggctggttttgcatttgaggggagcatttttactttatcgcggagcagaagc

SEQ ID NO: 290743 - DNA, 122 bp, Homo sapiens
tgttatatcgatctgggcaggcagcaagtcttccaaagaaagacttcctccacctccgcccggtcctcccacctcggaggactccaggctgcccaggggcggacccctggggcccaggtgag

SEQ ID NO: 290744 - DNA, 122 bp, Homo sapiens
agctggcggtcaccatggcaatgcgggagctggtggaggccgaatgcgggggtgccaacccgctcatgaagctcgccgggcacttcacccaggacaaggcccttcggcaggagggattgagg

SEQ ID NO: 290745 - DNA, 122 bp, Homo sapiens
aaccggaggtgaagttggtagagaccattcagggaagacagggacctttccgggacatgacgatataaacagcagttacagtaatagcgagagacgaatcttcttgttgcttaaatgagaac

SEQ ID NO: 290746 - DNA, 122 bp, Homo sapiens
tacactcactttcctctcccaccttggctacatctagtctttcatgactcattcccctctcgtgtgccctgtcagcatttggctaccaggaatcagtagaataatccaaacccatcccattc

SEQ ID NO: 290747 - DNA, 122 bp, Homo sapiens
acctcgagttgctggcacgtcaaagcaccctaaggtgacctacccggaaaccactgtccccgaagttagtggggcactttttaaaggacaacactttttacccgtcgatattgttgtgcgta

SEQ ID NO: 290748 - DNA, 122 bp, Homo sapiens
gggagctggcaggggtcgagagtgctgacaggggtcgggggtcactggcagggctcggcgcgggggaagctggcaggggttgcggggggtgctggcgggggtcggggggagccggcggggct

SEQ ID NO: 290749 - DNA, 122 bp, Homo sapiens
ccgcgcttcgtgtggtcgctcccccaaccaggcgggaccggagcctcctatcaaaccggacgatgacagacagactcttttaaccttagatgagaaatggacaaaatggagcttgtgattct

SEQ ID NO: 290750 - DNA, 122 bp, Homo sapiens
ccgcctcctcccgctgctgccccagcgctgtcctacccccggtcgcgtcgccgaggcagccgccacaggtcggtgctaccttctgggcaccgaaggagggaactctcctttccccagccatt

SEQ ID NO: 290751 - DNA, 122 bp, Homo sapiens
tgggttgtgggaagagaccggggtcaaccagggtctgcctcgcctcactccagcgacctccgaccggtcccggacaatcaagaagttttctgccatcccgtgacggaccagagcctgatagt

SEQ ID NO: 290752 - DNA, 122 bp, Homo sapiens
gtttacagagcagcggacacgggaagcccatgaatacggaggcagcatcgcagtgaaagacggtggggtgcggtgtgcaaggagagcctttgaggcagtcaggaaaacaccagggtgtgagg

SEQ ID NO: 290753 - DNA, 122 bp, Homo sapiens
aaggagtgtgtcagacggggatgagagctttggagaaccacgaagctggggagacagcagcgagggcagggctgcagcatcatatccttgggtcagggaaggcctctccagcagggaaaacc

SEQ ID NO: 290754 - DNA, 122 bp, Homo sapiens
gctgcacagctccacgatgtagcttagaaagtaaaattagagtttgttgccacttaatgtcgactgaataatcccctttatgaaatcagcctgcagacccagagagtctgtcttggcaggct

SEQ ID NO: 290755 - DNA, 122 bp, Homo sapiens
ctggcaaaggcagccttgcagctggggccagggtctgtggtgctgatccatctgctgggccgtcacctcccgagagagcgtgtgttcctccaaccacgcgtgtcttagcaccagtctctggc

SEQ ID NO: 290756 - DNA, 122 bp, Homo sapiens
agtgcatctatttcgattaccacagcgttttttcccattcatgggttaatatagtgaattcgattgataaatttgtacgtttttaggttcgattattaaaacttgagacagcgtctcactct

SEQ ID NO: 290757 - DNA, 122 bp, Homo sapiens
tgcttatggaaaagctgcatagatggcccaataaccacccaagacagaaagcctatatttcgatgatttgcaaaaggatgaaatgacattgtcattcagtttattagattactgcttcttat

SEQ ID NO: 290758 - DNA, 122 bp, Homo sapiens
cctggtattaagccttttgagtcttaagatgacaaatccctagggatcaggtggttttcccgcacgaactcttgtcaatgagaaatccctcagccccttttgtcttgggtctcacagctcca

SEQ ID NO: 290759 - DNA, 122 bp, Homo sapiens
ctgcatggccccggctgctgacatgacttctttgccactcggtgtcaaagtggaggactccgccttcggcaagccggcggggggaggcgcgggccaggcccccagcgccgccgcggccacgg

SEQ ID NO: 290760 - DNA, 122 bp, Homo sapiens
gctccagctccggctccccctatataaatcggccatttgcttcgctccgccccgcagcgccggagtcaaagccggttcccggcccagtcccgtcctgcagcagtctgcctcctctttcaaca

SEQ ID NO: 290761 - DNA, 122 bp, Homo sapiens
agtggcgtgtacttggatcgtctgtgaaatgaacctcgtgttgggaaggctgtgtagacgcggccattcgccgttggaagggcatcttgccagtagagctgttccctttcttctatgtttag

SEQ ID NO: 290762 - DNA, 122 bp, Homo sapiens
gagccttttgtcctgagctggggaggctgacagtgaggactccttggaggaggtggaagacgtggacatgttactccgggtgctgcctgtactggagaaagacaatcggttgatcccatcca

SEQ ID NO: 290763 - DNA, 122 bp, Homo sapiens
gtttggccacgccatctccctgggttagagactgcacagtgtcctcgccctggactgccacggggactcggtaggctggagagccatcagggttcgtcacgaacacctgtgatgtggggtgc

SEQ ID NO: 290764 - DNA, 122 bp, Homo sapiens
caaacctttctctgtgcttaccccaatcagaatgccacagtcatgtctctactttctaaacgtggatcaggggaacgctgttttaaatcttggctttgcatctcctccctggttagcaagtt

SEQ ID NO: 290765 - DNA, 122 bp, Homo sapiens
cagaggagaaagtgacttgcctcacgctgcccggttccacccagggaccttgtgaagagacgcgggaaggctggcagaaaggagaaccgtccttcctgtggaatactcccgagatcgcacca

SEQ ID NO: 290766 - DNA, 122 bp, Homo sapiens
aatgattcttgtaaaaccgtgagcagcagaaatgactaaactgccaaacgtttaactcggcgtcaggcgctgccctgaatgccttaaccagccatttttacacataaggaaaatgaggctta

SEQ ID NO: 290767 - DNA, 122 bp, Homo sapiens
ctgtccctgcacccagcctctcccagcacatatggtcagtgaggactgttctgagagagccggggcagagttgctgcaccaccatgcaccggccctgctgatggccgcctcctgctcctcct

SEQ ID NO: 290768 - DNA, 122 bp, Homo sapiens
cctggccaatattttttaattaaaagattttaactccatctggctgggtgcggtggctcacgcctataatcccagcactttgggaagccgaggcgggtggatcacctgaggtcaggagttcg

SEQ ID NO: 290769 - DNA, 122 bp, Homo sapiens
ataatgttgctttccagaggaaattttcttttctttaatgatcttaactagttctgagaacgtaagggaaaaaaaatctacttctttcactacttccattcagtttaccagagttccctggt

SEQ ID NO: 290770 - DNA, 122 bp, Homo sapiens
tcagggaaggacatgtgactcaaggcaggccagtgaagtgcaattctaggttagactggccgggaaggagcggccgtgttttctgttgatggatgctgctgccctctcctcaacctctcacg

SEQ ID NO: 290771 - DNA, 122 bp, Homo sapiens
cgccgcctggagcccctctgtcttgggtggggctggggctggggctcaggctctgtagggcgtgtggtgatccccgagaagacgggagcgaagtgggcagggactcagaaacccctgcccag

SEQ ID NO: 290772 - DNA, 122 bp, Homo sapiens
atgcaccaaagatccaaatcaacaaatcaacggatacttgtctccctggaatgtcgctagcggagtgtcacaggcttgatccttggcttgtaagagtttgtaatgcaaacacaaaacacctg

SEQ ID NO: 290773 - DNA, 122 bp, Homo sapiens
cagagggcggggcgcgcgggggctgggctggcgggaggcgggccaatggaggctcgggggcggggccggcgggcggacgggcgggggtgcggagggggcggcggcggcggcggcgaacaaag

SEQ ID NO: 290774 - DNA, 122 bp, Homo sapiens
ccaggactggctactgcgtacatccacaggttcactaacgggggcaaggtaagccggcttcggcccgggggccgactccacgggctgatttccgaaaagggtggtgggcagggagaccgtca

SEQ ID NO: 290775 - DNA, 122 bp, Homo sapiens
tttagaaacactctacaaaacattgaccagcactccttaaaactatcaaagttatcaaaacgtctgtgaagctgtcacacaccagaaaattctgcttaaggggacatagtaactagaatatg

SEQ ID NO: 290776 - DNA, 122 bp, Homo sapiens
tggtatggggtttgagattatgcagtgatttcatttgttgccaagtcaatattattatggcgtggaatgggtgctaaaagccttctcaaattattaggaagtttgaaggcagaacaggtaag

SEQ ID NO: 290777 - DNA, 122 bp, Homo sapiens
tgcagaacacagccccagcaggctgcaatactgcggattgctcccctagattagcatttccgaaatctatttctcccatctctccaggcaccacagatttccccccaacaaagtcagcgttt

SEQ ID NO: 290778 - DNA, 122 bp, Homo sapiens
gctgcgcccctgagcccaagtctccactcaccggccttcccttgccccctcacctgcacgcgggtacttttagccctgggcaagccttgagccaagcgccgagaccaaacccgggaaattaa

SEQ ID NO: 290779 - DNA, 122 bp, Homo sapiens
gcgccagtggccactactccgcgggctgacggtggcggcgctggcagcgcggaacgcgggcgcctaagccatggcttcctcagggagagctgagctctgggcgctgaacccgctgcgcttgc

SEQ ID NO: 290780 - DNA, 122 bp, Homo sapiens
ggcaacacaatgcaaggaggaggacggcgtctacacgggagtaaaagcaggccagcccatcgggcgctggaagaaaaggcacccccgtgcttagaggcccactgatgaccagaggggctgtc

SEQ ID NO: 290781 - DNA, 122 bp, Homo sapiens
gtacattatttatgctcaagaacagcagcacagaggttaagtaattcatcctccctcccacggtaagtggctatttctgtagtaggatcactgtacactctgtggtgggtttgatatctgca

SEQ ID NO: 290782 - DNA, 122 bp, Homo sapiens
cctcctttctgtacaatctgggcaaaccgactggtgatggcaagagtggtgtcaatgaagcggtctacacagctggagagacaattttcagtgcgagagtctaggcgattccctggcttctc

SEQ ID NO: 290783 - DNA, 122 bp, Homo sapiens
cacagcagctcttctcataggttaatttctgaaagcccatttgttctaaatccaacgtgacgcctaccgagctgggtacaacattggtttgtttcataaaacagcccggggtgtttgggact

SEQ ID NO: 290784 - DNA, 122 bp, Homo sapiens
tcctgaatgggattagtgctcttataagaagaggctagagagattgcgggctctctctgccgtatcaggacacagcaagaaggtggctgtctgcaagccaggaagtgagccttcatcagaca

SEQ ID NO: 290785 - DNA, 122 bp, Homo sapiens
cgagccacctccctccttccctcctctcctccctgccccctgtctctgtcactcaccgggcgggccaggccgggcagccatggctgagacactcttctggactcctctcctcgtgggcaagt

SEQ ID NO: 290786 - DNA, 122 bp, Homo sapiens
tcccaaatggcgtggggtggggggggaggtacaccccctgtgatatcgttcataatatctcggggaagagagggtgatattacttctcatatcacggagggcgtacacccccctgtgatatg

SEQ ID NO: 290787 - DNA, 122 bp, Homo sapiens
agcttgcagtgataggaagagaattctcatcacccaggttgcaataaaacgtgcctctcccgataccagtaaagcccactccggagatttccagagactgttggaaggcagtggaaggtaaa

SEQ ID NO: 290788 - DNA, 122 bp, Homo sapiens
aagagggctgcctggcctccctgggccgctggtacagatcacacacacacacagattaaacgcagcccgtttaatgatggggcccagactgcagtggctcaagacaggacactgcggaaagc

SEQ ID NO: 290789 - DNA, 122 bp, Homo sapiens
aacaatcactttctttaaagcaaatcctacagctggtcaacaccctattccatctgtcatcgagaaagaaaatgttaaaatagacttaaaaatattgctttgttacatataataatatggca

SEQ ID NO: 290790 - DNA, 122 bp, Homo sapiens
ctcctatagggctggccctgctcagcagattacatagctggagcttttcccagaatcctccgacacgatgagctcccactgacactgggcacaggcactggccttcctcagctcctggaaac

SEQ ID NO: 290791 - DNA, 122 bp, Homo sapiens
agttcgactgccaccaagactatacatgtttgcggctggctccctgccatttgttcattccgacagcctccctgaagtctggttctcatctggtccttcctaaggccatttgctttgtgata

SEQ ID NO: 290792 - DNA, 122 bp, Homo sapiens
catccgcccagggtggcgggattcccagcacggagaatcgattgctatcgtctgctgtcccgcgggcacgatggagcgctcctaccgtactctccacttttggtgtatttggaacgtttcat

SEQ ID NO: 290793 - DNA, 122 bp, Homo sapiens
cttcttcagctttgaggagcagccaccgaggcagcctctcagatgccacatcacaccccacggtgaaactgtgtcaccttctggccactgggcgggccacacaggagctgcggtggtcatcc

SEQ ID NO: 290794 - DNA, 122 bp, Homo sapiens
tttggggccacagaacaatcaggcgcgcatggctttttctccgggagatgccgctgaaaacgcacaagtcgccatctgagctgcaagagtcagccccaaattgtgtcctttcattttagggt

SEQ ID NO: 290795 - DNA, 122 bp, Homo sapiens
ttggtggagaaggtgtctgcaaagagccatccaccctcttgaactaagcccttgtaaatacgattgtgtgcacaacacttcctagcacttcacctttacaaggtgctattaatgcccatttc

SEQ ID NO: 290796 - DNA, 122 bp, Homo sapiens
cctctaggttctagcctacctacccgcgtgccgtccggggttgtgaggccagtgcgcttgcgccgcggctgttccctaacttccaaatcccgtcgcagaatctcgcgcgacgtacttttttc

SEQ ID NO: 290797 - DNA, 122 bp, Homo sapiens
gagctttcccttttatttattttttattatttattttgagatggagtcttgcactgtcgccggggctggagtgcaatgacgtgacctcggctcacggcaacatccaccttccgggttcaagc

SEQ ID NO: 290798 - DNA, 122 bp, Homo sapiens
cacttatcatatttaatgtgcctatggggcatccaaagagtgatatcctgtagagaactgcgtacgtaagttaggggcccagagtcaagatcttaagtggaaatacagacttgggagtccat

SEQ ID NO: 290799 - DNA, 122 bp, Homo sapiens
ccccacactgcgagatcatggcggtggaggggagtcccgcatcctgacccccggccgccgcgcactggggggccctcaacctctgggttacttgggggcacgcagtagccacccacggggca

SEQ ID NO: 290800 - DNA, 122 bp, Homo sapiens
gagactgaaaaggttactttaacaaagggggcggggttaacttaacgtagatgtttaactcgtatacagatgaacattccagttgatcactctgaagctttttggctaaagcgtttgggttt

SEQ ID NO: 290801 - DNA, 122 bp, Homo sapiens
ggagagtcgggggagtgggactgtggacccggtgcagggagagtcgggggagtgggactgcggacccggtgtaggcacttcctcgtggtcttgatatgtaggccctcccctcgagcaggatt

SEQ ID NO: 290802 - DNA, 122 bp, Homo sapiens
gttgaatgtgcattgggtgcagcaggggtgagagggtggagtgcagggaggtggggccaccgcctgcaggagagcctgcatctaacgtctgtcctgcctcagcgttttccaggacaccccat

SEQ ID NO: 290803 - DNA, 122 bp, Homo sapiens
taggatcaaaaatcatctcgtccccagacatggctgcggcttgagtgggcttggcacggacgggaagtcagacgggtcaaccccagaccccggctgcagcgctgctcctgccggtacctctc

SEQ ID NO: 290804 - DNA, 122 bp, Homo sapiens
ttctgaaccaaagaatatccagaacgccacctccaatcctataaatatgaatcttttaggcgttttattgatccttttcacctcggcacacacattaagatgaattaatcactggaagatgc

SEQ ID NO: 290805 - DNA, 122 bp, Homo sapiens
ttgtctcttaaataagagaacgaatttcatgtaccagggttccgccctcatgaccttccacgtacgagggtcccgccctcatgaccttccacgtacgagggtcccgcccgcatgaacttccg

SEQ ID NO: 290806 - DNA, 122 bp, Homo sapiens
agtgcccaacttttctagttttggctgaagaagacttcatacgctgacggatctagtttccggtcctgatttttgaaaaacgcagcgctggccttgtgcacacaccacccaaaacccaggac

SEQ ID NO: 290807 - DNA, 122 bp, Homo sapiens
gtggacgggggaggggcgacacgccccaccctgagtgaccaccagcccctagggacccggcgtcccgccccccacccaggaggccctcctgggcctgctgagaccggaaggcggggcccgac

SEQ ID NO: 290808 - DNA, 122 bp, Homo sapiens
ggtcacgcgcggaggggctgggcgggaggctgagcggcgccggggggccgggagcggggccgccggggacggggccagagagagcccctttcctaggacccggtggagcgcccccaccgcag

SEQ ID NO: 290809 - DNA, 122 bp, Homo sapiens
gcgagaagtggaaaattctatcttgccaaagaaagtgtgtcttagtttgttccggctggacgattggtggacacgctgggccttggctgtggggagaactgacctaaccaggggagctgtag

SEQ ID NO: 290810 - DNA, 122 bp, Homo sapiens
tttattccttgcaatccttcctatatgtctctgccagttgaatcttccaaagtggtgactcgaccacgtgaatctcctctggtgactttaatggctcccactgtctgcgaaggcctttcaaa

SEQ ID NO: 290811 - DNA, 122 bp, Homo sapiens
tgggaagggggtgaggactgaaaaactacctattgggtacgatgtacactactcgggtgacgggtgcactgaaatcccagacttcaccactatgcaattcatccatgtaaccgaaaaccact

SEQ ID NO: 290812 - DNA, 122 bp, Homo sapiens
ccagctaatttttgtattttttgtagaggcagggtttcaccacgttagccaggctagtctcgaactcatgacctcaagtaatctgccagcctcggcctcccaagtgctgagattacaggcat

SEQ ID NO: 290813 - DNA, 122 bp, Homo sapiens
gctagactttccacaatgtggcagataatcctacttagtaaatagtgttcccacatgacacgtgcctttctaggcattcatgcaggtgaaaaatagattacaattatctggccaggcacagt

SEQ ID NO: 290814 - DNA, 122 bp, Homo sapiens
gatggggcctggaagggcctcgggcgtgggaccgcactccgctcgggctccgcccgctgacgtttttatgggataatataccgtttcgctcacgcaggcctatttgtcagtgggctgcccct

SEQ ID NO: 290815 - DNA, 122 bp, Homo sapiens
tgcaatcaaacctctgtagcaaatcgtacaattaaaacacccgcaggcaggtgtgggcgacgccagcagcacacggggaagctgggcacgtggggcggaggcagctgcctggtttccatgtg

SEQ ID NO: 290816 - DNA, 122 bp, Homo sapiens
aagatccattccgacctgaagagaaaccgcagctcattagccaaatgcatgagcctcaggcgcgctggaggtgagactaacctctagtcccccgtcgaagccagagagcagtaagagggagc

SEQ ID NO: 290817 - DNA, 122 bp, Homo sapiens
aaaagaagcctggtgaggccaggagtcactgcctgcagaaccccagcccgactttccctgcgcactgggatcctgctggaacctcagctgcaacatgagctccgcagccaggtcccgcctca

SEQ ID NO: 290818 - DNA, 122 bp, Homo sapiens
tggggtgcgggtgcggggtcgggggccagggagaggcctagttgcgtcgaggggggcaagcgcctggaggacccggcgcccgctccaggccctgcccctccaagtcccccgccccgcgccag

SEQ ID NO: 290819 - DNA, 122 bp, Homo sapiens
gcctgactgtctgcttgttttgcctaccatcgtgacatctccatggctgtaccaccttgtcgggtagcttatcagactgatgttgactgttgaatctcatggcaacaccagtcgatgggctg

SEQ ID NO: 290820 - DNA, 122 bp, Homo sapiens
gcccacgcccgccaggccgctcataccatcgatggcgatcggcgagaacctggcgatgagcgacaggggactactttgggggtcacgcgggctctgccctgaccccccgcatgcttctgacc

SEQ ID NO: 290821 - DNA, 122 bp, Homo sapiens
ttaatcttcatgtctggtagttattattatcatcatgaccactactactattattgtcctcgtctcctctgatttaggcctcactcttcatcatagttgttctgtgtgtacaggatacctat

SEQ ID NO: 290822 - DNA, 122 bp, Homo sapiens
ggcgatctacccgcctcggcctcccaaagtgctaagattacaggagtgagccaccgcacccggccgaacctcgcatcttaaaaacacacagacacacaaaagctctagagagcctcgcggag

SEQ ID NO: 290823 - DNA, 122 bp, Homo sapiens
aatagattcacgctgcctgcgggcagtcctgcaagacgatcgattcacgctgcctgcgggcggtcctgcaagacgatcgattcatgctgcctgcgggcagtcctgcaatacgatcgattcac

SEQ ID NO: 290824 - DNA, 122 bp, Homo sapiens
cgctgggcgccgtcacagagctccagagtagcctctgtgcagcggaggacaactgctccccgacttctgggttcagtcaccacagtgcggacctagcgctcaggagcctctcctacaaataa

SEQ ID NO: 290825 - DNA, 122 bp, Homo sapiens
ggcgggggccggcctgggaaagctggggccgtggctgtttatgtaatgcgaccccaggcccgaaacggcctcgggcgagtaggggcgactgaaaagctgggagcccacgtagtaaaacccag

SEQ ID NO: 290826 - DNA, 122 bp, Homo sapiens
gacgcttcctcaagcccagccttctacagagagtgtgaacggtacagccccggcctgacccggggaccttcagcctggacacccggcagcttctggagtttgtcagtggaggcagaggggat

SEQ ID NO: 290827 - DNA, 122 bp, Homo sapiens
aaccttgggcaccaggacttttcctcccgggccttgttctctgcctcacactcaatgtgtcggagtctgactccagctcctctgagtcccttggcctccactcagatcaggaccagaagtcc

SEQ ID NO: 290828 - DNA, 122 bp, Homo sapiens
cgggcccacggcggggcgccgagcggctggcggtgcctgggccagatgggggcggtggcacgggcccatggtgggctgcgggtggcccgggcccgcgaaagtgtcgccgggggcaggcaccg

SEQ ID NO: 290829 - DNA, 122 bp, Homo sapiens
ctcgatctcctgacctcgtgatctgcctgtctcggcctcccaaagtgctgggattacaggcgtgagccacgatgcctggcctgtaaagccatttaaggcccacctaggtaatccaggataaa

SEQ ID NO: 290830 - DNA, 122 bp, Homo sapiens
ggaggcgggaggagggagggcgtcgtgctgcgtgtctgggtctggctgtgtgtgtttgcgcgcgtgcgtgcgtgcgtgcatgcgtgtgtttactgcgaggaggcatgcagccttatggaagc

SEQ ID NO: 290831 - DNA, 122 bp, Homo sapiens
tctcaggactgaaagctgccaccagggcgcctttggaaatcgtcgtaattataacccccccggcctgggcgctgagtccttcccaccagccagcaggcactgaccgggttgcagatcgggag

SEQ ID NO: 290832 - DNA, 122 bp, Homo sapiens
gaggtctcagggcctctgatccccagtacgatgacgtgaggggctgcgcaaggaggtggccggggtcagcaagcaggtcaccaacaggggaggggaccctgccactgggactgggtttttga

SEQ ID NO: 290833 - DNA, 122 bp, Homo sapiens
tttccaccaccaacagtcgggtcccccaggcttggctcaggacgctctgcagagcggccccgggagaatgcggctcctccattcgccaccaccggaagttctgtctttcactctcctatggg

SEQ ID NO: 290834 - DNA, 122 bp, Homo sapiens
tgtgctcaattgcagggtcctcgttctcgagtgtgcagagggcggtgagagctcaactctcgtccccacctcccacccgcagctccccgggtgggtgagggatgccctggactggggatagc

SEQ ID NO: 290835 - DNA, 122 bp, Homo sapiens
ctcacccccacttctccatccagcaaagccccgaccagaattgggtctcttggcgccagacgttcgcagctgcagcaccaagcaaagttatcattttagaattcaggggagaggaattcgtc

SEQ ID NO: 290836 - DNA, 122 bp, Homo sapiens
agacggggattcaccatattggccaggctggtcttgaactcctgacctcaagtgatccaccgacctgggcctcccaaaatgttaggattactggcatgaaccacggcgcccagcccatccga

SEQ ID NO: 290837 - DNA, 122 bp, Homo sapiens
gtcccagcgctgatctctgcaggggcggggctgcgtgtgcggcgtcatgacgtaagcgcacgccggcgcgccggaggggaggaatgcggcaggcggaaaacttaggaagagctggatgcctc

SEQ ID NO: 290838 - DNA, 122 bp, Homo sapiens
ttgtctcaaaaaaaaaaaaaaaaaaagaacctaatatcctaatgtaataaagtagagaaccgttgccacagcacccaccaaagtgtgtctctcattgacaagctcaggtacttgtttgtctg

SEQ ID NO: 290839 - DNA, 122 bp, Homo sapiens
cactgcactcacccaggaatcttattttctagcagcagctgtcatctccctcattgtccacgattaaacagaggaatattagcaaagggtctcaatgcatctgctgaacccaaatcttatag

SEQ ID NO: 290840 - DNA, 122 bp, Homo sapiens
tcaccagcatcctcacgctgcgggggcaggcccaggccccgccccgcgtcatctgcaccgcgaggaacctctatggcgccaagagcctggagctgcccttccagggagcccgtgagtggcgt

SEQ ID NO: 290841 - DNA, 122 bp, Homo sapiens
accttatctacagaagctggcagaggggagctgttcggacaaagccccaacatctgcctgcgatgaggcaacttccaccaccactgagaaaacgatcttgcactcaaataaatcccacttaa

SEQ ID NO: 290842 - DNA, 122 bp, Homo sapiens
ctttaaaaagaggaaatgtttcttgcactcagggagggaggggccctgatgaccccactccgaacttttgagtttagcttggtgtgaaagtagtccacccaaatgaatcactggaggacaca

SEQ ID NO: 290843 - DNA, 122 bp, Homo sapiens
caccagcggtccgacagggtcagctgcagctggggcttgggcagcttgagctgctgctcccggaccgtgtacgccagcacctgctggtccgagtgctggggatagggctgcgtgcccagctc

SEQ ID NO: 290844 - DNA, 122 bp, Homo sapiens
ttgggcctcgtggaagcaggcgggaggggcgggcgttgcgctgcgggggtgcgggggtgccgcttcacctatgcctctgtgttcctggtatactgggcatggtgtggtgttggagaaagtgc

SEQ ID NO: 290845 - DNA, 122 bp, Homo sapiens
agaagggggttccctgttcccagagtctgcagccatcagcaaggaggaccaggaacccggcgactgaggtgcttccaggtggggacaagcccctcttggtctcagccacagcaccccttatt

SEQ ID NO: 290846 - DNA, 122 bp, Homo sapiens
gcagctgctccaaagtggatgtcaactacgcgtttctccatgcaacaggtaaagactcagcggggagccccggggcgcccctgcccctctctctgccccgcccaccgcggccggtgcgggtc

SEQ ID NO: 290847 - DNA, 122 bp, Homo sapiens
tgtcacctgcctcaggccgcgctcggtggggcgggggccaccagctgaggcccctcctgccgcccagacagctcggccccctgcggccccagccctgcaggctgagatcccgcaacgactcc

SEQ ID NO: 290848 - DNA, 122 bp, Homo sapiens
tcttttcccacggtattacatgctatttcctcagctcagttttgttgaaaagcttgtacccggaattgatcagaaagttcagatcgcacctacttccaattctcattttacagagctagaag

SEQ ID NO: 290849 - DNA, 122 bp, Homo sapiens
gatggactccatttcctgagggggcggcagtggcccgtccccgggatcggcctcggccaccggccacctggcgccaggaagcttccatccctgcaaaggagaaaaaaaaaaaaaagagtgga

SEQ ID NO: 290850 - DNA, 122 bp, Homo sapiens
cctgaatgtcatgctcgtaggcacagtgtcggcgctgcagggcctcggcagcgttgaggtcgcggccagtcccgtccggaagctgctgctgcttgtgctgcacccgcgccagggcttggcgt

SEQ ID NO: 290851 - DNA, 122 bp, Homo sapiens
cagcaataaccctatttatgcctgctcctactaccctcttccagcacacacagggttaaacgtcaacataaatagctttggacacagttatgaaggtagataaagacagtaaactccgaatt

SEQ ID NO: 290852 - DNA, 122 bp, Homo sapiens
cagattcatgtttaatagaacgcccttctgaaatgcatccaaaatagagaagctttctcccgaactgcaaaagccataaaaatgcaaaatgcttctttaggaaaaactgaatcaaaattacg

SEQ ID NO: 290853 - DNA, 122 bp, Homo sapiens
acggctgtttgtttttgcacacggcacgcggaggcggggcctccagccccaatagtgacgcgctctctgcctttcaccaggcgcccaagcctgacgaacagaaaggcaaaccaatgagattg

SEQ ID NO: 290854 - DNA, 122 bp, Homo sapiens
gcgcctctgctgggccgcaaccctgtctgggaggtgaggagcgtctctgcccggccgccccgtctgagaagtgaggaaaccctctgcctagcaaccgccccgtctgggaagtgaggagcccc

SEQ ID NO: 290855 - DNA, 122 bp, Homo sapiens
taattccagtgggggaggcagctggtgctgaaaggaattgggggacagtataggaatgttcgggtgactactgattaatgtagtgaagatgatctgtcacttgccagaccaacaggagttgg

SEQ ID NO: 290856 - DNA, 122 bp, Homo sapiens
cctattggcattatgtggcaaattagtcatgccctgaccaaagtatttgtcacatttattcgagaagactacctcctgctgaccctgggccaggtattgctccggagggtgttactcgttag

SEQ ID NO: 290857 - DNA, 122 bp, Homo sapiens
tggcctcaaaggcactgtgtcgtctgactcctctctaactctacagttaatcctgtgttacgttctcttggtcattgatctttttctgcccccttggatgtatcatgcttcctcctgcccca

SEQ ID NO: 290858 - DNA, 122 bp, Homo sapiens
gctggcctcggcccctccccctccccgcgccccgcacccctcccctgaatccccaggccacgtggagaggacacaacaaagccttccccgcctccgaggcggacccgaccctcagcaccgac

SEQ ID NO: 290859 - DNA, 122 bp, Homo sapiens
tttccgactcggaggctgagccaaacagggaatctgggcctgcccactggggcaggctcccgggcttgggagggacagaagcgtgggaggctggcaatgctcccctccctgcatcgggacca

SEQ ID NO: 290860 - DNA, 122 bp, Homo sapiens
attgttttatgaccaaataagagtgtcagagaatacatatcttgggcaggtcccagaaagcgtctgccatctcccccactttaattctgtgtactggcctaagggcaaacagctggcaggaa

SEQ ID NO: 290861 - DNA, 122 bp, Homo sapiens
ttcctagtcccctgcccaccaaactatacttaataaaccctaccctccaaattctcaggacggcagatttgagaaacatctcctgtccttggctggccctgtgattattaaactctttcttt

SEQ ID NO: 290862 - DNA, 122 bp, Homo sapiens
ggaagacagtctcttgctgtgaccttcaaggatatgcagactaaccatctcatgtgtgttcggagctcctatgtacctaaactctaagattttgaagggcttgaggttctgtggttgcaaag

SEQ ID NO: 290863 - DNA, 122 bp, Homo sapiens
tgagtgcacaaatgtgattcagagagaaacgtgcatctttttctttgctgctggacttttcgaagggaaagaatagagcttgctgatgggcgagttggtccatcgcctttagggtatgtcca

SEQ ID NO: 290864 - DNA, 122 bp, Homo sapiens
cctcctccccgaagggagagattccaacgtgcttcccgatgggtcctaaaaccgacctgccgggagaaggcaactcccccccaacccttcctgaacccctatcctctctccttttctttcag

SEQ ID NO: 290865 - DNA, 122 bp, Homo sapiens
ctcaagggaggaagtgcctcccttggtatgtttgggagacatttgacttggtatccatttcgggcagtagtgggtaaggaaggtgtggcattcaagagtctgccctgcaccacctagtccag

SEQ ID NO: 290866 - DNA, 122 bp, Homo sapiens
gttcctggaaaccacgaggctggcctcagtggctcagctgccacaatggtgatctctgggcgcctagtggacagaagcctcagtgaggttttgcagaatggtaacaagctattgtctatcta

SEQ ID NO: 290867 - DNA, 122 bp, Homo sapiens
caaagggaagtggtcttcataatttcttatgacactctccagtatttctgcctttgtgatcggctccttcatttgatacttgaagagcagaaactgcaccaaatcagtcaccttttcatcta

SEQ ID NO: 290868 - DNA, 122 bp, Homo sapiens
ggactcttcccacccagcggccagcgctcctccggcccgacctggcccccgtctccacagcgactgccgctctgatccacaagctgccctcattctcccgtggagcaggcggcaccctcacc

SEQ ID NO: 290869 - DNA, 122 bp, Homo sapiens
acctcgtgatccgcccatctcggcctcccaaagtgctggcattacaggtgtgagccaccgcgcctggccctgaaggtctgtttttaaatgagtttggctgctgcaagaactggccaaatgac

SEQ ID NO: 290870 - DNA, 122 bp, Homo sapiens
gcagaacaggggaaaaacagaaactaggttgagataggggcctcggccgagttgcgagggcggcggcggcgcccaggtatcccccttcctccagctccagggccatcgagccgtctcggcgg

SEQ ID NO: 290871 - DNA, 122 bp, Homo sapiens
gaaactggggacttcctgaggtcatgcttccgaaggtgggacgtcctcactgcatgccaccggccgacaggaagcatggctggcccagccctccggggatggaaatccactctactcatgac

SEQ ID NO: 290872 - DNA, 122 bp, Homo sapiens
tttctttttggaaacatgatagcggtctcgctggtgtgcgcaccaggagcgttgcggccgcggcttcctcctgcggcgaatctgccgttgcatcacagtggctagtctcagggcccgcaacg

SEQ ID NO: 290873 - DNA, 122 bp, Homo sapiens
ggctcctcgaccatgggcagcataggcacaggggcccgggcggggtggtggcggcggggccgcggtcagcagcaccagctccgtgccagtccgggcccggaagcgctcagcggcccccacca

SEQ ID NO: 290874 - DNA, 122 bp, Homo sapiens
ccactcccactctagaatcctgcttttatcccagcatctttgctttctatgttgctcagtcgccctatgtctgctttttcatttttcctgttcctcgtctcctttctcccccaaccccgttt

SEQ ID NO: 290875 - DNA, 122 bp, Homo sapiens
gccggtgctgcgtgtactgcggcaatgcgccgacaatggcagtccctggggagggactcacgaagggacgagagaaaagatcttgtccactgcatccctccaggaaggcctcctagttcctg

SEQ ID NO: 290876 - DNA, 122 bp, Homo sapiens
gctggtcaggatgggctaaaagcctgaccttcagattggcccagatgaatgttgttggggcgggggaagtggttacagacttttgggtgaagctggcggtgcaggaaaaactttagttctga

SEQ ID NO: 290877 - DNA, 122 bp, Homo sapiens
ggtggtctttcaggcaaacagtggcagctcttgagatgtgggctctggtactttattcaacgttggtttttttcacatgagccagcccatgagagattctgagagcaggtggggacagtaaa

SEQ ID NO: 290878 - DNA, 122 bp, Homo sapiens
cagacggaaaacagccgctgtgataaacccaaggccgaaagccgtctccggggagcagctcgcatggcacctgggtgacctgacagctttctgacctgaagccaccatccggaatgtgattc

SEQ ID NO: 290879 - DNA, 122 bp, Homo sapiens
ggcggtgactggggtggagaaaggcagccgaggggagtggccccaataaacccacccgcccgcagggctttgcatgggtctgagtgaaggagcctttccaaatgtggatcagggcctgtcac

SEQ ID NO: 290880 - DNA, 122 bp, Homo sapiens
ctgagttctgtgaatcattctagcaaattatcaaacctgaggagggagtgcgggatcctccggacaggacagaagttgtgggaaacctgaggacactctaccagcaattggcatctgcagtg

SEQ ID NO: 290881 - DNA, 122 bp, Homo sapiens
gattggggtcagtggagcccgtggatttagccacgaggggacatgactggagccctgtcacgcgcaggtgtgcgtctccgagagctctttcaatataagtgcgggagaagatttatgctgca

SEQ ID NO: 290882 - DNA, 122 bp, Homo sapiens
gctggcctggtgctgggactctgggggtttagctctgggagactcccggtgagtccaggtcgtctggctgggtatccgctggcttactctctctcggttgtcctctccgctggggagggagt

SEQ ID NO: 290883 - DNA, 122 bp, Homo sapiens
acttggcctgaaagctggctctcacatgaatcgtctctttggatgaatcatgtctctcctcggaagctgctttctcatcagcccaaatgacaggacccagagagttacagcttggtgtgctt

SEQ ID NO: 290884 - DNA, 122 bp, Homo sapiens
aggacgggcgacctttgtaaagcagcctggctgggagcttggctttggcttgtcaattcccgtgggcgtgtgctgtggcggcgaagaacgtgtgggcattctgaccgtgccatgaccaaaac

SEQ ID NO: 290885 - DNA, 122 bp, Homo sapiens
ctctgttccctcttatccatcatctcatgcccgagtcacatctttgttgttggtgcctggcggctattctgcagaataccttgggggaaggtctgcaatgtgcccaaagaagccttttgtgt

SEQ ID NO: 290886 - DNA, 122 bp, Homo sapiens
ggggctgggcgcctctggccattggctgagcggggcgggggtggggcgaaagcggggccccgccctttccacccaagctggcctcgagcgggctgcgggcgccaccgtcggagcgcgcgggc

SEQ ID NO: 290887 - DNA, 122 bp, Homo sapiens
tcccggacaggaagccatggctcgggagcctggtggcggccctgatctgggcgggaccagcggaggcctccgccagggagcctgggctcggggccttgggcagtttgcctggtgccccttcc

SEQ ID NO: 290888 - DNA, 122 bp, Homo sapiens
cttgtgacctcggccagtggcagccttttctgagcctgtccccttctctgtaaacctggacgtgtttgatctacgctcgcgtcccggcaggaggcttccagcctgcacattcctgggggccc

SEQ ID NO: 290889 - DNA, 122 bp, Homo sapiens
taccggccgcgcacctggtctccagggggatgttgctgttgagcagccagttctcctgggcgtgggcaggctcctgggcgccgccggcagggggctctccggagagcgagtggtccgtgggg

SEQ ID NO: 290890 - DNA, 122 bp, Homo sapiens
tcgagctgcactcggctgggctcttggcagcaccctgtgctctgagggtgtcttgcccgccgggcgccgtggctcacgcctgtaatcccaacactttgggaggctgaggcgggcggatcact

SEQ ID NO: 290891 - DNA, 122 bp, Homo sapiens
aattcttacactcctttgcgtctattaaaccaagaggataagcaacctggtaatttagcacggtcatgagcatttatctacacagtgggctccaaatgggtgtctgaaggtgagttgagtgt

SEQ ID NO: 290892 - DNA, 122 bp, Homo sapiens
tctccccaggccctgcactgggccgagggtgcagcaacagaagaagcccagtgaccagagcgcagggccccgcccctggccccagagcccccgcccaggacccccgccttccgcttcaggct

SEQ ID NO: 290893 - DNA, 122 bp, Homo sapiens
cacattaccattatgtggtattactatgagtaaaaatgttctaaatgtcccaaaagtatccgagtcacctgcaggaccgaaatggaggagagagcacagcactgcctgtccagattactaga

SEQ ID NO: 290894 - DNA, 122 bp, Homo sapiens
cgcggacgcccgcgctcccgtcccgactgcttgccagccctgcgcctacggagagcgtcgcgtttccctggagacagccccgccccatgcccgctgccactctccggctccgccaatccccc

SEQ ID NO: 290895 - DNA, 122 bp, Homo sapiens
cgagagggtcatgggcccaggagtgcacgtctaggagttgatggggtaggcctgagggttcggagaaggtgcggtcggggaggagtctcgcgattgagtttgtcggggcgggcgggaagctg

SEQ ID NO: 290896 - DNA, 122 bp, Homo sapiens
ggcagcctaaggacatattaaccctcctcagcttgaacaggattttagcagaagctgcagcgtcatacactaaaacaaaagaaataaccttctccccatactttcttttaactccatctagg

SEQ ID NO: 290897 - DNA, 122 bp, Homo sapiens
cggtacgcagcatggctccacgtctcgggccagcttcacgtctgattggatgaagtgtcacgcagggagcctctcagcaaacctacctgcgttgaaggtgactggatggtcccgttgcgtgg

SEQ ID NO: 290898 - DNA, 122 bp, Homo sapiens
ctcatagaacactttctgtctatgccattcatttattcaatagttattgaacatctgcaacgactctgtgtcagacattaaggaagcaataaggaaaagaccctaccctcgtgatgtctgta

SEQ ID NO: 290899 - DNA, 122 bp, Homo sapiens
cagcctccccttccgggttctcgtcccgaagcccgctgggaattgaagtccgggcagccacggactacatcccccagaaggcagcacggtcaagcttggaggtggggtaggaagcaaattag

SEQ ID NO: 290900 - DNA, 122 bp, Homo sapiens
tgtcgggaatccaagttccacaccctcagcgggtgacccggacgggcccctcattcagaacggaaagtggacttcggtcccgatcccccttcacgggccccgactcccgctgccaagacagg

SEQ ID NO: 290901 - DNA, 122 bp, Homo sapiens
ggcgcagaccccgaggcccagggagcaccgggtggccggcggcctgcaggctggcgagggcgtcgggcggcgcagggcaggccagggggcgggggcgtctggggccctggcgtggcgcccgg

SEQ ID NO: 290902 - DNA, 122 bp, Homo sapiens
atctgagtgctgaggctctggagcggacagagaggaaatgacggctgtgaaccacacgtccggctcagccattttctaggcggaaaaaaggaagcccctttggctctctcctccctttgtcc

SEQ ID NO: 290903 - DNA, 122 bp, Homo sapiens
cacctcgccgttgcctccgcagtgagcctatggaggaggaaaatcagcgggcgagcagcccggtgcttgcaaaagctgggagaggatgatccataggcaatgagtgtctctaagagggcggc

SEQ ID NO: 290904 - DNA, 122 bp, Homo sapiens
cttcatctacaaaggaacatgcacaataatgcagcattttttttttctgagactgggtctcgctctgttgcccaggctggaggacagctgtgctcactgcagcccccacctgccaggctcat

SEQ ID NO: 290905 - DNA, 122 bp, Homo sapiens
cggcggcggcgtctgcgggaagctgtgtgtctccgcagtgacgtgggcgggccgaggactcggtgacgtcagagggctgtgtgtagcgatgtgtgtggggttcggagccgcgccggcacagc

SEQ ID NO: 290906 - DNA, 122 bp, Homo sapiens
tcgtggaagaaggaaggacgccaaagccccacaggcctggcaccagtgatgtaaacactccgccaccttcagcctctgtcccgccgggccccaagagagggacccagatggctttctcctga

SEQ ID NO: 290907 - DNA, 122 bp, Homo sapiens
atctctctctggacttgcaaagtggccttatgcgttctctttctgcctccacctttggtccgtgcaacccagttccaacatgcgattccagatgatttctttaaagatacaaatgtgcattt

SEQ ID NO: 290908 - DNA, 122 bp, Homo sapiens
catgttttaagccagttaagtttgtggtaatttatacacctattaaaatctaagacaatgcgtttctcctaatttcttccgcatatgtctctgtgtgtgtgtatgtgagacagagaaagact

SEQ ID NO: 290909 - DNA, 122 bp, Homo sapiens
cgaaatgaatcgccaagtctagaggtcacttggacgcctggcagtgaaacatgccgacctcgaggccctgagttttataaaaaaaaaacccagtgggcttcacggctacccctgcaaagacc

SEQ ID NO: 290910 - DNA, 122 bp, Homo sapiens
tttcttcactactgtatccgcagcgcctggaacagtgagtgacatagtaggcacccaaaacgtcttttcatatgctgccaataaaccatagctgatcctggctttgaggctgaatgacccag

SEQ ID NO: 290911 - DNA, 122 bp, Homo sapiens
cagctagggttcacggccactggggcagaggagccgcgagaagatgtgggtttttggttacgggtccctgatctggaaggtggatttcccctatcaggacaagctggtcggatacatcacca

SEQ ID NO: 290912 - DNA, 122 bp, Homo sapiens
ggcactggccgaagatgctggtttgtcctcaagggcaacctgctattctcctttgagagtcgcgagggccgggccccactgagcctggtggtgctggaaggctgcacagtggaactggccga

SEQ ID NO: 290913 - DNA, 122 bp, Homo sapiens
ccatgactgattcacaggtctttggacaaaaacggcaacacttgcatattcaatagtcatcgattataagatacatctggctttcagaaatgttacaatatcatcaaaaagtatggcttact

SEQ ID NO: 290914 - DNA, 122 bp, Homo sapiens
gaagcccgtgagaaacgtgcggaagtaccagtgcaactctggctggccttaaggcttccacgttgggggactgaggccaactctccttgctcctggctggggcatttgcacccaccgctcat

SEQ ID NO: 290915 - DNA, 122 bp, Homo sapiens
gccagtcgctccgggaacagcccctgcagactggtccaactctccaaaggctagggacaccggggcagccttgtggtggggtagaggacgagctcctaactgcaagcaaagtgctgagtaga

SEQ ID NO: 290916 - DNA, 122 bp, Homo sapiens
ctctgcttctcattccgcccagggccagcccgggcccaggggtacctgctgtgcgtctggcgccgaggtgggccccgaagacccccaagcccgcccagggattcccttcccgaggccggagc

SEQ ID NO: 290917 - DNA, 122 bp, Homo sapiens
cctctcagcctcggtgagtacccgccgtggggaagggtcctggggacccactggaggccgcggcccgcagcagccaggggccgagccacggccacggacgccctggtgtcccggtccgtgcc

SEQ ID NO: 290918 - DNA, 122 bp, Homo sapiens
aagcccagtatgtgaagcagataaaagctgagccactgtggggcagagtgtgctaatctccgaacccagatggcccctaaagagcccctcaaagctccaggactctccagagaagtctgaaa

SEQ ID NO: 290919 - DNA, 122 bp, Homo sapiens
tgaggcactttacttcacaaaggatatggcattttaacggttacaagcgttcccagtcaacgcatccacaaagcattaggccacctataaactaggaatttaaaaggcaccaaaatcctaga

SEQ ID NO: 290920 - DNA, 122 bp, Homo sapiens
agggctggaggaaacgcggagaactcctcggtgctggaggaaacgaggggaactcctcgccggccttgcggtcccccacagcccacggagtgccactcccagtccccacagaccccacctgc

SEQ ID NO: 290921 - DNA, 122 bp, Homo sapiens
gaatgcagttccctcaactgagggcatgtggatgatatggtgcactgggagaggatggaccgagtggccaaagggatcccatgctgcagggtgatggaacaaagacctgtgaacagctgcat

SEQ ID NO: 290922 - DNA, 122 bp, Homo sapiens
ggggacatgggcatttggggcgcctgaacccaagacctctggatggtagggatgcccgggcgtcctggataccctgcgggactcggggctcctgcggggaagatggcacgttttactgccca

SEQ ID NO: 290923 - DNA, 122 bp, Homo sapiens
gacctcggtttccgggctcccggccggccctcgagggcttcccttcacggccccgattcccggcccctcccacccggaaacccgcggtcggatccacgtctcccagccccctctttacccgc

SEQ ID NO: 290924 - DNA, 122 bp, Homo sapiens
cccatctgggaagtgaggggcacctctgcccagccgccctgtctgggaggaagtgaggagcgcctctgcccagcccccccgtctgggaggtgaggaacgtctctgcccggccgccccatctg

SEQ ID NO: 290925 - DNA, 122 bp, Homo sapiens
cggtgccgggccgcctgtaatcaaaaccaaagcggcggccagggtgctctctggcaacgacgatgtcaaactcaatctggccctcacctgggacagcttctctgggagccctatgcacgttg

SEQ ID NO: 290926 - DNA, 122 bp, Homo sapiens
cttcccagcccccgggactgcagcatcaactgtggctggagaggttggggtggctggggtcgcagggggcacagaccgccgggggttgacggtgaaggtgtgtccactgcggcggggggccc

SEQ ID NO: 290927 - DNA, 122 bp, Homo sapiens
acgtcagcgtccgttccaggccgactggcagtctccgttctacattaacgtcagcactcccgttaaaaataatgcatctctcccatgccaggaggacttaggtgctgctaaagaccagccct

SEQ ID NO: 290928 - DNA, 122 bp, Homo sapiens
gaggaaagtcccgcctcttctttgattcaaactcgcttccggaattaaataccaacgagacggcgccgggaactcggcgatcatagagagggagcggctggcgccgggcgaagaggaaggcg

SEQ ID NO: 290929 - DNA, 122 bp, Homo sapiens
ttaaaccaacagtattttgttaaaaggagatagctaagtatttcttgtagccctctagaacgtcgtcatcagaatccctggcaagttggttaaaaatgtagttttccccagaattattgaaa

SEQ ID NO: 290930 - DNA, 122 bp, Homo sapiens
gtcttcctcatgctggctttagatgaaagaagtttggcattttaaggaagcccgatttgtcggtttcttttgtgtgctgtgtgtgtccggtttggacatcctctgcccctccgagggcgtga

SEQ ID NO: 290931 - DNA, 122 bp, Homo sapiens
cctgctgaccccagccggcgccgagggcttggaatctcgagcgggaaaaggttcggaattcgcagctagtttagccgcacactcagtatggttctttcagatttgtttttttaaacgtctag

SEQ ID NO: 290932 - DNA, 122 bp, Homo sapiens
cccccactcccccactcccccacaccctccccccgccgccccccgctctcccccgccccccgccgtgggctcctgcacggcccgagcctccccgacaagccccaccccctgttccatggcac

SEQ ID NO: 290933 - DNA, 122 bp, Homo sapiens
agcggtagtcaccctcggagggcacacagtcgcccggcacctccacggctccggctttctcgatgctgaagcactgaatccagtcttcagagcccacttcctgccgctccagccggtagatg

SEQ ID NO: 290934 - DNA, 122 bp, Homo sapiens
gctgtgagaactctcccggctcctaccgctgtgtccgggactgcgatcctgggtaccacgcgggccccgagggcacctgtgacggtgagcctgcccccacccgccttcgctagcgcttgcaa

SEQ ID NO: 290935 - DNA, 122 bp, Homo sapiens
accctgcctctggtgtctctagcaggagaccccacaaagcaccagccctcccaggtctgccggctccagcccgtaggattggcttaaacaatgtgtgagagccatggagcaccatctaataa

SEQ ID NO: 290936 - DNA, 122 bp, Homo sapiens
gggttgggcggaagaactcacgagccgtaaagcgaaggtccacccggaaatccgttactgcgtttcgccaggcgtcctcattagcctccgaggcgccgagacgcgagaggtgtgattggcac

SEQ ID NO: 290937 - DNA, 122 bp, Homo sapiens
gtcgcgccttggcctgggggaaaggggtgggcggcggcggcggcacgggtggtgcagccacgccactgcttccagggatgtccgccaccagaggtttagggaagtccgccgcggcggcgctg

SEQ ID NO: 290938 - DNA, 122 bp, Homo sapiens
tccgtttcacaaactgcgaacctgaaacttcggatatccctttctcgatgacagccgaaacgcaaagtggcttagagtacttttgattcttgaaaccttttgtatataaacaagatctcagc

SEQ ID NO: 290939 - DNA, 122 bp, Homo sapiens
tccgcgaaaaaaaaatcctagcaacttaaactccagcccggcctcccgataggcggagctcgggagaatgtcatccaatccacatccaagaaggagaaaaaaagggagtctcgcctagccag

SEQ ID NO: 290940 - DNA, 122 bp, Homo sapiens
tctagaactcctgagctcaagtgatctgcccgccttggcctcttgtgctgggattacaggcgtgagtcactgttcctagcagggctttctttaaatctgtaaattcctgttggtttcttgaa

SEQ ID NO: 290941 - DNA, 122 bp, Homo sapiens
gcccaccgcaggcgggtacaccctgcgcggtgcagtcactccgggcgcagcctggcaacgcggccacaaagggagcccgggaggcggaatctttccacatgcctgatcaatgggggcgcgga

SEQ ID NO: 290942 - DNA, 122 bp, Homo sapiens
ggcgtgagccactgtgaccggccaagtttactgcttttctattgaaactgttctcatacccgtgttcccaactacaccttaattgaataataaaagaaaataaggacattaaatgagaacag

SEQ ID NO: 290943 - DNA, 122 bp, Homo sapiens
ttcacgccctgcgccaggcggagcttccgggagggtggccgctctcccgggccccaagctcgctagtcctcggatcccagaaacataactccgggggtgcagacctgcttggaggcccggcc

SEQ ID NO: 290944 - DNA, 122 bp, Homo sapiens
gcaacttctagccggcctcccccttcatcggcttgggccgcgtcccagtgaaactgtggtcgataacccgtagcctctcccggttgccgcacatatttgcgctctcggttcctcctcttccc

SEQ ID NO: 290945 - DNA, 122 bp, Homo sapiens
gactggcagggaggccaggcccaaccacggggctgccgggaccaggccatgtgtctggggcggccggcttagctggctgggattgtccacccaaattaaattttaacccagctcataaatct

SEQ ID NO: 290946 - DNA, 122 bp, Homo sapiens
aagatccacaggctcatgccccctagtgctgccccgcctctgccaacggagctccaacagcgaggcgacagctgaggttcgtgaactaaagagacggctctaattctgtccccttttccctt

SEQ ID NO: 290947 - DNA, 122 bp, Homo sapiens
tcccggaaagggggaaatgtagccgcaaaagcaaagccgggggcctggcgcccactctggcggcgactacagcccccacgctgggcacactgcgagctgggggtgcccggcgcgggagaagc

SEQ ID NO: 290948 - DNA, 122 bp, Homo sapiens
gctggggcagggcgttttcacatgctctcagtcacagaggctgcggtcttgcccttaccccgctcctcgccagccagcagaagctctgcagcctcatcgaatctcaggttctttatttggaa

SEQ ID NO: 290949 - DNA, 122 bp, Homo sapiens
cctagcgcgagttcggacaggcagcgcccccctccgactgtgagctgggacgctcccgcacgcttcccggcaccccttcagtcttcatggtacaccccgcccgcaggtacccggacggcgga

SEQ ID NO: 290950 - DNA, 122 bp, Homo sapiens
ggtccgggactctccaatgctgtgttccagcctgacagtgcccggtgcacggaagggagtcggcaaatgcagggagacaaatgaacggcggaggccccggcacacagtggaggggctggcat

SEQ ID NO: 290951 - DNA, 122 bp, Homo sapiens
atgtcattatgtcaaatgatgtcatttgtcaacggacaaacaggtagaaaggagtggatccgagtctaattagattttgggactccaaagagcaagctgttaatcaccattttaaaacatgg

SEQ ID NO: 290952 - DNA, 122 bp, Homo sapiens
cgggtaagccggggttccagggaggtctctggccccgctggggctctggagggggcggcccggggagccgaggcctgagtgtcaggccccgcaggcctggtctacgtcacgcgctacctgga

SEQ ID NO: 290953 - DNA, 122 bp, Homo sapiens
agtcccagctgtctcccactttgaaatcaaaggatgaatcagacaagtcaaaaaaaccaccgatctggctgattgtcagaaaggctaaatttgatgtcttcattctccagaaactgattttt

SEQ ID NO: 290954 - DNA, 122 bp, Homo sapiens
tccaacaccaggtgcaccgccagggtatttactgatccagtgagtgaaggtgggcccggccgggctggttcccatcctctgatcaacgcctaggggaaccagtgaactccaatgctgaccat

SEQ ID NO: 290955 - DNA, 122 bp, Homo sapiens
acgatcaccccggaaccgggaatggagaatatgggctcccaagccggtcgccggcctgaccgcagccccagagcttcacccgtcacgggcggccagagagatgcccgggccgcgcggaggct

SEQ ID NO: 290956 - DNA, 122 bp, Homo sapiens
agaggatttgcgcatgcactagctggccgcaagctcgcaaagacgctggctctaggtagccggttttcgcgagtttgtggcacagtgttggactgaacgagttaaggaacctgttcaaggag

SEQ ID NO: 290957 - DNA, 122 bp, Homo sapiens
gcagccttgcggccctggcaggcgtcctgggggctttgttggagcaccgtggccatgccccgtaccggaacagcaggctcacccacctccttcaggactgcctcggtaaccgttttccccaa

SEQ ID NO: 290958 - DNA, 122 bp, Homo sapiens
ggtcttgctatgctgcccaggctcgtcttgaacttctggcctcaggcagtcctccggcctcggctacaggcctgagctgccacacccagtcttgctggtgtttcataaggtccggcccctcc

SEQ ID NO: 290959 - DNA, 122 bp, Homo sapiens
ggtcctcaagtctcttgagccatttcggttccgggcgcgccccccagggctgcagtcgcgcgaggttccagatagtgcagctgtgtggcgccaggcttccagcgggttcttggtgggggttc

SEQ ID NO: 290960 - DNA, 122 bp, Homo sapiens
gtgccagccagtgtgagctgttctacagcgtgtcccgcatgcacagtgatgaccaggaaacggtggaggtcaaccatccatccccagaaggaaaatcaaacaatcacatgatcaggatgaca

SEQ ID NO: 290961 - DNA, 122 bp, Homo sapiens
acctatctgtacttaggtttacataaaattctgggagattatatgcccacatattaacagcgcttatatctgagaaatggaattcaaaatgctttctgacttttgtctactcaaatgtacgc

SEQ ID NO: 290962 - DNA, 122 bp, Homo sapiens
agagaagaaagctgcaggcctccgtggggagcggggctttgggcctctctctcctctcagcgtcctgggcttgccccactcctcctgcaggtgagccgtggggaggccttgagcgccccctg

SEQ ID NO: 290963 - DNA, 122 bp, Homo sapiens
cctggtcccggctgggagaacagaggcccaggtgtatgccaggggctcctgagcccagcccgccggtctggaggggtgtggacagttgcactgtgctggtatggtgtgaagagtagaatgac

SEQ ID NO: 290964 - DNA, 122 bp, Homo sapiens
ttcaagaacaaattacatttaggataaccttctacgccagttaccacccatcaagccccacgggttgcacacttgccgtgatgtgacacgcagttacaaagttggggtgtggaagctgcggg

SEQ ID NO: 290965 - DNA, 122 bp, Homo sapiens
acgcagtgacccgaacaaagcccgtgggaatcatggggcgttcctggagggtcgcctagacgacccagcccaaccccacccacagtgcctggcaacctagaccagtcagggacgcggcagga

SEQ ID NO: 290966 - DNA, 122 bp, Homo sapiens
gaattactggtattttacccgggaagcctgcaggggcgagctgagctcgggcagagcctgcgcggctcagggacggtcactgtgtcctcacacgggcagaacgggctctgaaaacagccatt

SEQ ID NO: 290967 - DNA, 122 bp, Homo sapiens
tgacttcacgcctgttactacagctggagggaaaccgatttcagaatctatctgatatgtcggatttctttgtggcatccacttcatcgctcagcagccagccatgatgtcataagcccatc

SEQ ID NO: 290968 - DNA, 122 bp, Homo sapiens
cttgtgatcccgaacaaaaacccgtcttcccaagcctgttgacgatgatggtaacggcaccgtgctcactccaacgccgtggctgtgagcggagccagcttcaaagcactgggtccagggcg

SEQ ID NO: 290969 - DNA, 122 bp, Homo sapiens
atcatgtattatttgcatgattattcataaggaggtgggaagaagtgttaccgttaggttcgtgcaagagtaatcgcggttttggccattactttaaatgcaaaaaccacaattacttttgc

SEQ ID NO: 290970 - DNA, 122 bp, Homo sapiens
gaagggacagtcaagagcagtcagttgcttacttattttgctctggatgagtctgggacacgctgtaactttaacacatttaagaagaaggtgtgtggccttttcagaaggtggcatggtcc

SEQ ID NO: 290971 - DNA, 122 bp, Homo sapiens
caaccgcggccggccccaatactacactttcttgtttactgtgtagtccttatcttctggcgcaaagcgggcactcgctaaaaacctgaatgaaagtataaagcaggccgggcgcagtggct

SEQ ID NO: 290972 - DNA, 122 bp, Homo sapiens
gcttccacccctgggctgtggaagtgtggactgtggccagtccagatgctcttgagtgggcgtggtggcgggcagggagggtggccgtggccctgctggccctcagtgtctgtgtcatctca

SEQ ID NO: 290973 - DNA, 122 bp, Homo sapiens
ataattgcccttgacactaaaatcatgtgaaacacagccagtttctttgatgactcaaaacgtactttgtgatcttgccaagctttgagatcatcgttacaagcagcattttggttgtgaaa

SEQ ID NO: 290974 - DNA, 122 bp, Homo sapiens
ttgatgctcccccaacagaacggcttgagctttccccagcgcaattcagaaatgctgtggcggtcgccagactcttcgggtagctcccggcagctccgaggtagcgctcccctccccaacca

SEQ ID NO: 290975 - DNA, 122 bp, Homo sapiens
agaaacttagccaggcactgagtgcgtgggaaggcaaaacactcttttctcctcccacggcgggggcgctccctgggcgatgctcacggagagtgggagggcgtcccgcaccgggcagagct

SEQ ID NO: 290976 - DNA, 122 bp, Homo sapiens
agcgtctctgcccggcagcccatcgtctgggatgtggggagcgcctctgccccgccgccccgtctgagatgtgaagagcgcctctgtccagccgcgaccccgtctgagaactgaggagtgtc

SEQ ID NO: 290977 - DNA, 122 bp, Homo sapiens
tgggcagctccaggggcgacacccatgggggtgggggcgtccagatagagctgccctgggcgccactgcggacccctccatccgaccaggtgctggggatacagactggaagacggtctgga

SEQ ID NO: 290978 - DNA, 122 bp, Homo sapiens
ggattagacagtcctggctgtctgccttcccctaagccagggggagaggagcaaagggcacgaaatgtggcctccaggaggattagaccgccacatgatcatttgcacaccctggggtttag

SEQ ID NO: 290979 - DNA, 122 bp, Homo sapiens
tctctattactgtctcagaggaacatcactaaagaactttggcagcgaaggaaggtaactcgcactattgttttagtgtatcaccagcactggaatttacgacctgtgcaaaagaacctaga

SEQ ID NO: 290980 - DNA, 122 bp, Homo sapiens
aggagtggaaagccattttatgttgtttatgggcttggggagtttgccagcaactccccacggactcatcttaaaggtgagctcagcagcgactctggggctccctgaagtcttgaagatgt

SEQ ID NO: 290981 - DNA, 122 bp, Homo sapiens
cttcattattattttaaaggtctctggggaacaagactcatggaggaaagcagcactaaccgagagaaataccttaaaagtgttttacgggaactggtcacatacctcctttttctcatagt

SEQ ID NO: 290982 - DNA, 122 bp, Homo sapiens
tgaactttggagtgaagatcaatcttgcacttggtgaagagtgcacattggacctcaaggcgaaagccagtggtttgcttggataaaatgttcccgcatgaggccacaggactgaggatggg

SEQ ID NO: 290983 - DNA, 122 bp, Homo sapiens
cccagctgatgggtgagtccattccggtccccggaccgagagcaagagtgcgagcgagagcggcggccccgcggggagcgggcagatttgctgggcttcggactcttcgacgaactgcgacg

SEQ ID NO: 290984 - DNA, 122 bp, Homo sapiens
gcaggtgcttcctgctgagccctggcactctacactccctgccctgaaccacttttttaccgactagaaacgggggtgcccaggagacaaagccctatggctccctctaggggctggggagg

SEQ ID NO: 290985 - DNA, 122 bp, Homo sapiens
cgccctggctctgattggcaaggaggccacccttttgccgggcggaattgcacgaagccacgcccacccactgaggagccggccaatagacggacaggtgtggcccagccctccgcgtcagc

SEQ ID NO: 290986 - DNA, 122 bp, Homo sapiens
actccagcctgggcaacaaaagcgaaactccatctcaaaataaataaataaaataaaatgcgtcagggagggtcgggccttgtggctaatgcctgtaatccaggtactttgggaggctgagg

SEQ ID NO: 290987 - DNA, 122 bp, Homo sapiens
cctggggtgactggaaggacctggcctgttttcccatacacctcacgggccaagcagtcacgttataagggagggaggcccagtaaaacatggtaagtggcaactgactttgtatctcagtt

SEQ ID NO: 290988 - DNA, 122 bp, Homo sapiens
atccggtccgcgccccctccccggtctcctcccctcccctcccctccgcccccctccctccggcccacacagcctcttccagaaagaagtcactctagagccgcgcgacccagccccagagt

SEQ ID NO: 290989 - DNA, 122 bp, Homo sapiens
tggggaaggaacatttctccaacagagaggtgctgggtatacgagaatgttggccatgttcgccctccttctttatggctcagttcataggtcacttccttagggaatcttaccctcccttc

SEQ ID NO: 290990 - DNA, 122 bp, Homo sapiens
ggccaccgcttagccagagctggtcttctctcttggcctggctcagttcagaaaagtctgcgttcctcctctcgggggaccataagggtcataatgactcccgttccgggtaactttagcag

SEQ ID NO: 290991 - DNA, 122 bp, Homo sapiens
agtgggtgcgcgcaccgtgcgctagccgaagccgggtgaggcattgactcacttgggaagcgcaaggggtcagggagttcccattccgagtcaaagaaaggggtgacagacgcacctggaaa

SEQ ID NO: 290992 - DNA, 122 bp, Homo sapiens
gggatgtgaggagcccctctgcctggctgcccagtctggaaaatgaggagcgtctctgcccggccgccatcccatataggaagtgaggagggcctcttcccgacagccatcccatctaggaa

SEQ ID NO: 290993 - DNA, 122 bp, Homo sapiens
agcactggagagacagaggtccttcattcactccaggtcacaggctgtgcgtgtgcatgccgaacacccacatgcacacagttggtggctcagtctgatgtacctgacttctcacgccttcc

SEQ ID NO: 290994 - DNA, 122 bp, Homo sapiens
tgttctggtttgggtcagtgacctgaggtggttacaacgaagtcagtgaggtcattgccacggatgtgggttacaacttggaatgcttgaggctgcagaacccctccccttcttgactgagc

SEQ ID NO: 290995 - DNA, 122 bp, Homo sapiens
ctcctaaagttgagatggtcagggaccccacagccagatgggaaaccagctcagactcaccgggtgcaacctgtcaaagcctttattcctatcatagataagaccctgacaataatagtgta

SEQ ID NO: 290996 - DNA, 122 bp, Homo sapiens
gtccgggtcgcggcagcagcggcggcggagcgttgtatggagctggatttaaaatggcggcggaagagatccgggcgccgcctgcgccctccctttatagccgccccgcccgccaatcggga

SEQ ID NO: 290997 - DNA, 122 bp, Homo sapiens
cagagtccaattgagcatggaatgatttgcagattgggtagcctgtggatccagagtaggcgcagagagactctagcacagccacatgatgaaaacagattgatagacagcaaaagcaaagt

SEQ ID NO: 290998 - DNA, 122 bp, Homo sapiens
ctttgcgctgcaaaactgcctgcacctagatcagattgcaggaggacagataaggaaggacgtcgaattacaaacacacaaggctgctacagcaggcaacgtgacacacgccacatcacagg

SEQ ID NO: 290999 - DNA, 122 bp, Homo sapiens
gccggtgccttggttttcctggccttcatgtcctcctatgtaaacgcggggtgatgacggcgccgacctcttggcgctgttgtgagagtgaagtgggcgcgtggttagacgccagccacagt

SEQ ID NO: 291000 - DNA, 122 bp, Homo sapiens
ccccaatgtcacgaaacaagaatgctgctgtacatcaggcgtgggatggggagataactgcgaaatcttcccctgcccggtcttgggaactggtaagaatccgcttagtggtagagtcacac

SEQ ID NO: 291001 - DNA, 122 bp, Homo sapiens
tgcctctatccttcccccgcacaactaacgcaatagcctgaggggtttggtaaacagaagcggccccaggagggggtgggattcgccccgggtgtgacccaaaggcacctgcggcggcccag

SEQ ID NO: 291002 - DNA, 122 bp, Homo sapiens
agaactgagacagctcctctgcgggactgggatgctggaagcgcgtgttcaactgctccgcgggagcttcagggagggaaagatgctgcgaagctattacagactgttataaacggcggcgg

SEQ ID NO: 291003 - DNA, 122 bp, Homo sapiens
cgaggtctgcgcgggccatgtggggacccggggtcactgctgagggcctgtcggtggctccggcgccgccgcctctgctgccgctgctgctactgctggcgctggcgctggtggcgccctcg

SEQ ID NO: 291004 - DNA, 122 bp, Homo sapiens
cgggaattcctgctcagccccctgtgctacccatcagaccaccacatctattaccatctgcgtgctagccgacggaaccagagaaaaactgcaacaggacaacataatgatgctgatagcta

SEQ ID NO: 291005 - DNA, 122 bp, Homo sapiens
cccaggcagctccgagctgtccccgtgtgcgagcctcctctcctcaaagggttaacccggcggggctcgctggcctgaaatactatactagcaacacatccttgcagcacaaacttcactgt

SEQ ID NO: 291006 - DNA, 122 bp, Homo sapiens
ctgctgaagtccccatgtgacagtgagcggggtccccgctccaggagacgctcgagtctgcgtcccggccctcagcactgtccactgtttcggtgccagcagagaccagcaggcccgggaca

SEQ ID NO: 291007 - DNA, 122 bp, Homo sapiens
tctacacacaggtgaagatagagccatgtgtcatggtaagccactctcaggcaactcagtcggctttaattaagtaactttaatgtgtttagctttgtaatagatttgtcattactatgaac

SEQ ID NO: 291008 - DNA, 122 bp, Homo sapiens
ctccctttagttgtgtttgggggacgagtatcgcgggggaggggagggagtcaccatgcccgccggaaaccccccgctgagtcgtccgccctgcacctgcctcggagcccatggttcggacg

SEQ ID NO: 291009 - DNA, 122 bp, Homo sapiens
actacgggcagcctgcggagaggcgggaggcggcgccaatcggggcgagcagctggagcccggcggagcagttggctgagttgttgcaacttttttcgaaagctgggtttcccgggagatcc

SEQ ID NO: 291010 - DNA, 122 bp, Homo sapiens
gcccccgcccctgtggatggccgctgatgggggggaacacaagtgtcctttgtccgtccccgaaagaaaaccttttccagagaaggccattcaggccagtggagattcacctagaatattag

SEQ ID NO: 291011 - DNA, 122 bp, Homo sapiens
tacaatatactattttctattttgtttattttgagtctgtccttacaagaacataaactccgggaaggcagagatttttgtccgttttgttcaatgatgcctaaggtcgtagatcagtcccc

SEQ ID NO: 291012 - DNA, 122 bp, Homo sapiens
cgggggaggagggagggagggggcggggaaggccgcaccgccgcgctcgggagccgccgccggatcccacgcagcctccagctgtcggggaaactcctgcctgggcgcacgtgaccctcgcc

SEQ ID NO: 291013 - DNA, 122 bp, Homo sapiens
gggggcggggacccggaggctcgcaggcttccctacctcctggagatgcacggccttgggcgtttctccgcagctgcaaagctgtgctgtgacccacccgctcagcgagcctttataccggg

SEQ ID NO: 291014 - DNA, 122 bp, Homo sapiens
gggaccctgggttcctcccgggacagcccgggagcggtggggcctcggcgggggcggagacgcccccacctgcaaaggcagcccctggggcgtgcgaggtttcctcccctgagtcccggttt

SEQ ID NO: 291015 - DNA, 122 bp, Homo sapiens
ggtgtgggtggtgaggatggagttgtagggctcaactacagctgtggaaacctggggcgccgggtaaatagagaactccagcttggacttcttgccataatcaactgagagacgttccatga

SEQ ID NO: 291016 - DNA, 122 bp, Homo sapiens
acacctcacacgccaccaccgcatccacacgggcgagaagccctaccagtgcggctcctgcggcaaggccttcacctgccactcatccctcaccgtgcatgagaagatccacagcggggaca

SEQ ID NO: 291017 - DNA, 122 bp, Homo sapiens
tgaattgcataaatgccatccactgtggctaaagggctcctgctccatctgcatcatttccgaggctgtcattcggcgtgacatgtgtgcgccgggcctctcgccgccatctggcagcctct

SEQ ID NO: 291018 - DNA, 122 bp, Homo sapiens
tgtggccagatgcccagtaagctccatgtggccgagggcaaaggcacacatgggcttttgcgtgggtgtccccgtgtgtgtccgtgtgtctgggtgtgtgtggctgtttttttcctggcttt

SEQ ID NO: 291019 - DNA, 122 bp, Homo sapiens
cgcatcgctgagcacagcccatccttgcaccggccttgagagctgggggctgtgctggggcggagggcgccccaggtgaggagccgcgcgcccgtgggccggaatgctgagcctccccgtgg

SEQ ID NO: 291020 - DNA, 122 bp, Homo sapiens
gcactccttgtcacccattgtcatttatgagccctgtgtcacttgttgcttcagagggagcgctccttgtcacccgttgtcaggtgtactcactttgcttctcccttcctgcttttggggac

SEQ ID NO: 291021 - DNA, 122 bp, Homo sapiens
ttttttcttcatggctcctgcctttggtcataaactcttacaggtactacaatgaacactcgccactgtggttaccatggtgcagatgtcttttgtatccttccagaaaaccatttgaggag

SEQ ID NO: 291022 - DNA, 122 bp, Homo sapiens
ccgctggtctcgcgggcctgggtggggagcggccgcagagctgctggaaccaggaggaggcgccgctcccccgagggccccggagacctcttgtcctcgcgccgcgggaagggcctggggag

SEQ ID NO: 291023 - DNA, 122 bp, Homo sapiens
aaagcgggcgagttggtaaccagggggaactgcacttctccagcgcgcgggatccgctggcgactgacaaaatggctgctgcaccaccggaagtgacgcaaggcaagggcggggactgagcc

SEQ ID NO: 291024 - DNA, 122 bp, Homo sapiens
caggatgagggtgacagatctctggcagtttctggatcttagagctgtgagagtcaccctcgtccccacccactcaccctacctgcagccagaatccacttaatgcaatcagcgcattaggg

SEQ ID NO: 291025 - DNA, 122 bp, Homo sapiens
gacactgctgaccttacagccttgcaaatgatgtcatcaccatacgttcttcactcatgacgtggcatggatttgaccaaaggcgtgatcatgtttaaaataaaaaccctttatgagagttc

SEQ ID NO: 291026 - DNA, 122 bp, Homo sapiens
ccacacctccctccggctccctcctcccgcccgccctcccctgccctgcccgcccgcccccgccgcagctcctttaatacactttggttctccgcctggctttggactcttctcctcctcca

SEQ ID NO: 291027 - DNA, 122 bp, Homo sapiens
ccccgccccccccggccccgggaagaactcagagttccaactcagccagagttggtcccccggggcaccatccactcttagtccaggcaccacgactctgtctcatactcagaaataaagaa

SEQ ID NO: 291028 - DNA, 122 bp, Homo sapiens
taaagcagtagcggggcccgcggtcacgtgaggccgattcctggaaagttcctggaaagccgcctccgcagcagccgggcggggcgcgagcggagcgctgactggggagggaggcggggagc

SEQ ID NO: 291029 - DNA, 122 bp, Homo sapiens
ttgtaccaagcagtgtttcccaagggggcacagagggagggcccctctccgggcactgtgcgggagccacttccccaaacagtccccgttctgcaagggccccggcgttgctgcccccgaga

SEQ ID NO: 291030 - DNA, 122 bp, Homo sapiens
ccagggggctgagagcacacacagcataggggggtcacagacactcagcaggggcacagacgctggtggggcgggttcacagacgctcgcgaagtgggatcacagacgctcggcctgcgcgc

SEQ ID NO: 291031 - DNA, 122 bp, Homo sapiens
tcttcctttctgtatcttttataaactgatttcagaattacctggtttttgtcatcccaccgcctggattaaacacccttgaaattataggctaacgcaaacttttctgctcttcatcccgc

SEQ ID NO: 291032 - DNA, 122 bp, Homo sapiens
gagagagctgggagacccagagagggaagaacagatgctcaggataaggggagccgagaccgagtctgtgcctgtgcagtgctgctttcgggttctggggtcagaatctgggttgcagctct

SEQ ID NO: 291033 - DNA, 122 bp, Homo sapiens
agaaactgatatactcccattttcatgccccatctcagtccagtcttggtgtagacagagcgagaggatgtgcatggccttatgaaacacttctggttcctccttcccatctgtccttaaaa

SEQ ID NO: 291034 - DNA, 122 bp, Homo sapiens
gtcagaaccctgcaaaagcaaagctgttcagtggcctttctggagagggcagaaaaaccccgctttagtttgtcattacagtgctttgtaaattgggtatttaataattactgggtgaatga

SEQ ID NO: 291035 - DNA, 122 bp, Homo sapiens
catggtaacagatgaatctgctcttctgtgagttttatatttataaatgatcttagctcacgaagccatggcattaaatttacattagaaaaggtttgacccttgggtccgtgcatgcagtt

SEQ ID NO: 291036 - DNA, 122 bp, Homo sapiens
taccctgtgcccgcctgcagcccctcaatgcctgcccctagcttccccagcagacccctccggtgtccgcctgcagtccccgtggctgtcccctgtgcctgcgtgcagcacccctcggcaga

SEQ ID NO: 291037 - DNA, 122 bp, Homo sapiens
caccgaagaattaacccaaggcagaggatgggcattgccacccagcaacgccagtgtcaccgaagaattaacccaagccagaggacgggcatcaccacccagcaatgccagtgtcaccgaag

SEQ ID NO: 291038 - DNA, 122 bp, Homo sapiens
gagctgcccctgtcccctcctcaacctgagatccaggagctgggccctggcgctgggcatcgtgcagcctccagggtggcgctgagcgtcggttcccggcctcttgcagccagggacccatc

SEQ ID NO: 291039 - DNA, 122 bp, Homo sapiens
gtgcaatccgggagtggctgaaatccaagctgagggtaatgaaaggtgctgctcctaagccgcacgtctctgatccgccctccccgcccgccctctgctgcccgcgggccctctaagagctg

SEQ ID NO: 291040 - DNA, 122 bp, Homo sapiens
gcgccacggggaacgtgagagccgcggtggagaaactgctggaaggtttccctgaagctgcgagttcagagtcagccatgtgtcctcgcacctcagcgagggtccctgccgactgagcggag

SEQ ID NO: 291041 - DNA, 122 bp, Homo sapiens
tgcgctgcggggctgtgagtgccgggttgggatggtcgtggccctagatcctggacgcagcgctcctgctctgacggcgcggcggctccgggccggcagccttatatagtagcgccttacgg

SEQ ID NO: 291042 - DNA, 122 bp, Homo sapiens
caagaaactgcctcttgtattttcatttctgctatgtgtacaattttcttacagatttaacgtttaaagaatcttggctttattgctggtcaattacatatgggttctgtaaattgttacag

SEQ ID NO: 291043 - DNA, 122 bp, Homo sapiens
caggatattcactgctgtggcaaggcctgtagagagtttcgaagttaggaggactcaagacggtccctccctggacttttctgaaggtagaaccagcctcataagtaactaggctgggtgaa

SEQ ID NO: 291044 - DNA, 122 bp, Homo sapiens
cccagtaggggcggctgggcagaggcgcccctcacctcctggatggggtggctggccgggcggggggctgacccccccgcccccctcctggacgcggcggctggccgggcggggggctgacc

SEQ ID NO: 291045 - DNA, 122 bp, Homo sapiens
ccctgtgtgcgcgccgggccggctagctgcggggcgggggagcggcgccccagagcgccccgcctagcctcccgcgcgcagcctctaccctgctccgccacagacacacacccaccaagcac

SEQ ID NO: 291046 - DNA, 122 bp, Homo sapiens
tggtggacactagggaagcacgaggaggcggcagagggtgggaaaggggagtcagggacccgctccccaacagatgacaggcttctgctgcttatacccctagcagtggtcaggacaagggg

SEQ ID NO: 291047 - DNA, 122 bp, Homo sapiens
ccagtgaaaggacaaattggacctgtcccgaaagacaatttataagcgaactgtttgaaacgcacaaagtattaactgcgcagtccagatcctttatcctgggcgcagcaggacgggacgga

SEQ ID NO: 291048 - DNA, 122 bp, Homo sapiens
tcagagccctatggcgcaacatctgtactttttcatatggttaactgtccattccagaaacgtctgtgagcctctcatgttgcagccacaacatggacagcccagtcaaatgccccgcaagt

SEQ ID NO: 291049 - DNA, 122 bp, Homo sapiens
agctttctttcctcatccactttttaaacaaacgcaggcttaaaaagcaaggaatatacccgccacactctcggctcccaaaccgctctttccctccctctgccggccacgcctcttatagg

SEQ ID NO: 291050 - DNA, 122 bp, Homo sapiens
gcacagctgtttcgtcatctaaggtaacatagtcacaggttctgaggattaggacatggacgtctttggtgggttacgattttgttgaccacaccatgtgcatccacacttcttcattctca

SEQ ID NO: 291051 - DNA, 122 bp, Homo sapiens
tgttcggaggccctgccggtgggtaactagcctcccgtcttctgcagactggcagaagaccgaggcccagaagcgacgcgaacagcttctgctagatgagctggtggccctggtgaacaagc

SEQ ID NO: 291052 - DNA, 122 bp, Homo sapiens
gaggcggtgacactagtccgagtggggcgtggagaccgaccagcacgaagggcggagttccggcccgcacccctccgccgcctgccgcttggtacgtcccgcttccccgccctgcggctcgc

SEQ ID NO: 291053 - DNA, 122 bp, Homo sapiens
ccccttggagctgaaaggagcgccaggatcgggggcgctgcaccgggctgggcccctcaacgctcgcagaccgggccgggctgcagctggagatggcagcaatcccgggaggtctccgggcc

SEQ ID NO: 291054 - DNA, 122 bp, Homo sapiens
gctgcctctcgctgagggaatccacactctcgaggcagcacctcgcagagcaggtcacctcgactgccccatgatgtccacgaggcttgttcctgtcttactacgatcgagaagacagcatg

SEQ ID NO: 291055 - DNA, 122 bp, Homo sapiens
atcctcctgcctcagcctcccaacatgctgggattacaagtgtaagttactgcaccaggtcgggaggcttttttaaaatggtaaaacaacaatgcatttgtatgatgatgtaaatgatcagg

SEQ ID NO: 291056 - DNA, 122 bp, Homo sapiens
attccctcatgtttaaccttgaaacccgactgccaatgcactgacatcggtgcctacagacggccgcacgggctgctgcgccggctcctggcagggtgtgtgctttgatgggctctgggggc

SEQ ID NO: 291057 - DNA, 122 bp, Homo sapiens
tctgtgggatgttaaatataatttacagtgggaaggatgctcctcgccgtcataaacccgcgtgcaccgcgtcactccccgggcgccgagttccgccggcctggcacgggctcacgggcacc

SEQ ID NO: 291058 - DNA, 122 bp, Homo sapiens
gacccgccccccgggccctaggcggcggagcttgactgcgaccccccaaaaccgggacggcggggcgggctgcgacccccaccccagctcaggcccctccaggagcccccagtcccctcgaa

SEQ ID NO: 291059 - DNA, 122 bp, Homo sapiens
agagggataaagtgatttattagtttccttctgaacacggaggaggttcaagggtgaggacgaatggataccctattatccagttagcttccagatggaatggtgatcccctaacccaaact

SEQ ID NO: 291060 - DNA, 122 bp, Homo sapiens
caggtatctgcccactcgcagggtacctctctcctgcaggtgagacgagccagagcagggcgttggagaggccctgcgagccggccaaggcattctctagggctcctctggacaccggggcg

SEQ ID NO: 291061 - DNA, 122 bp, Homo sapiens
cctcagaacccagccaagtcctctaggcctccttgggggtccttccagcctgaggggcttcggagctgaggagcagctgttctggtaagtgtccctgagtgtggggatgacacatttgccat

SEQ ID NO: 291062 - DNA, 122 bp, Homo sapiens
gagccctgcggttccagcgcgttcctgttcccgcctctccttttaccacgaagccagcttcgctcccaggcaccaccctggccatctggactctcacgaaggttcgtgccctgagaacttca

SEQ ID NO: 291063 - DNA, 122 bp, Homo sapiens
gcggcatcgacgcgtcttcggggccaatggaagcgaggctctggtgttgctgggcggggccgggagggctgcgcgggcccgagacccactgcgcacgcgcgctcgctacccgcccttcccgc

SEQ ID NO: 291064 - DNA, 122 bp, Homo sapiens
ggcagtgccccagtctgaacgcagcctctctctgcatctggagggcacggggacttggcgcgtgtttggaaagggggatctgtttgtatcgaccagcagccgaggggacgccgtcttctcta

SEQ ID NO: 291065 - DNA, 122 bp, Homo sapiens
ccctattataaccacatcaaactctgtgggaagattgtccgccattttaggaagtaacagcgtctggtgacaactgctgatgaaagaaatgaggtgtgattatgctgtaataaaatctgtcc

SEQ ID NO: 291066 - DNA, 122 bp, Homo sapiens
atgtatccagcaagggtgcatcatgcttagcgcgcgcccgttagggagcgcgggcctgagcgcaccagcaccgctagcggctcagctcttgaattgagcgagggaaaagggaaagttgggaa

SEQ ID NO: 291067 - DNA, 122 bp, Homo sapiens
aacggccaggcctcacctccctccaggaagatgtgtaccagctgaggcagggctgggccccgcagggccggtgcgcaggcggcttggcaggcccgggctgacaatggaagggccgcagtggc

SEQ ID NO: 291068 - DNA, 122 bp, Homo sapiens
gctgtgctcccccagtggctggcctgccctccaccatataacccactggcagcacctcaccgtagatgggacctggctgggtgcccgttctagtcttcagcccagctccccgcttggctggg

SEQ ID NO: 291069 - DNA, 122 bp, Homo sapiens
cctagtctctcctgtccatcaggccatagtgtcctgctttaaaacttttgctcttggccacgtgtggtggctcatgcctgtgatgccagcacttttcgaggccagggtgggaagatctcttg

SEQ ID NO: 291070 - DNA, 122 bp, Homo sapiens
aaacatgttttcccctttctcttgggtttccaaatacaaccttgaggcagctgcaaaggccgttttcctcagcctaaaaatagacttcacgcccctcccttttctcacgatctgtacacact

SEQ ID NO: 291071 - DNA, 122 bp, Homo sapiens
tgaaatgacgacctcagaagggcgcccagggacatgggtttggcagccccgagcggaggccgccaggcagccgttcctttcggaattcggtctcccgcagtgctcccggctgcggcgctcct

SEQ ID NO: 291072 - DNA, 122 bp, Homo sapiens
ccccaccaccagtacaatatttaggtctcacgagccaggttcatgtacttcaacattcagcgaccttgaacatcacattttgtggtctctgaagataattaggaactagattcctgcagcct

SEQ ID NO: 291073 - DNA, 122 bp, Homo sapiens
ggccagtgttggccaaagcatttcctctttcggcctcagtcagctagcggctgctaggtgcgggcaccatgctactgatccttcttgctgtctcttggactccatgtagtaaccatgtacaa

SEQ ID NO: 291074 - DNA, 122 bp, Homo sapiens
ccaccgcgcccggcaataactgttagcttagcttccgtagctgctgcctttaccacttgacgtacagataattgatgcgaatgcagaggaaacctgaatgtttggctttcctatcttgaccc

SEQ ID NO: 291075 - DNA, 122 bp, Homo sapiens
gtgtcaagggaaagcctttattacaaagcattggaccattgttttggttcgtcctcagttcggcatgtagcaaccaaaagtcacgcagcagaagcatccccgagcctccattcaaaccaacc

SEQ ID NO: 291076 - DNA, 122 bp, Homo sapiens
ctgctcgggtctctgacgggccccgcccctcccccgcacagagaaggaagcccgggcacacgttctccctgcctgccgctgacctgccctcccaaggcaaaacccgtcagtaatgaaagaga

SEQ ID NO: 291077 - DNA, 122 bp, Homo sapiens
ccttttctttcaccagccatgtgttctgaatgggaccatggccttcttcctttgccagaacgttaggtccagaagatgggtgtgtgacccaagtcaggccaatcaagttctctcctggaact

SEQ ID NO: 291078 - DNA, 122 bp, Homo sapiens
caggctgtcataaatttcctgtcttcttgtcttgctagatcggggcagcagtgcttagggcgggcctcagaggctcacacacgtatcgccagggggagaaccagctctctccggcttggact

SEQ ID NO: 291079 - DNA, 122 bp, Homo sapiens
agccctgtaaacttataaaagtagggttgcttcctctccatgcttgttataaagcttctacgtgcatccaaggcttcacgtaaatattctctttctctttttcccctttctcccactgcaga

SEQ ID NO: 291080 - DNA, 122 bp, Homo sapiens
gctgagctcttttcccaccctagctttaagacaaaacaaaggtgctttctgttccaacagcggcaagcctgctaaactcacgtggcatggggctcggtgggcatgcttgtcattcttctaac

SEQ ID NO: 291081 - DNA, 122 bp, Homo sapiens
ggggtcccagctactctaggtcccgcagcagatctcactatggggggtctcgctatagcccgtctccctacaggagatctcgctacagccgatctccctacagacgatctcattacagggga

SEQ ID NO: 291082 - DNA, 122 bp, Homo sapiens
aaaatatgcccacaagcttaatttggctctctagccaccagtttgcaacctaaacaaaaccggttcaataaattaaacacagtgttttctctgtgctctgacctgtctgtctcctgctcaga

SEQ ID NO: 291083 - DNA, 122 bp, Homo sapiens
tccgactctatcttctgctcttttcctgcttcctgcagcttttctctgtcctgttagggacgcagacaccttttaggtgttctaccaaatgccctatgaatcccgcttgtacccaaggtaga

SEQ ID NO: 291084 - DNA, 122 bp, Homo sapiens
taagtatttacaggttagttgaagttgtttctcctatcttttttctgattgtgacagccacgtggccggctgagtgtaatagagtgcgctagcggcactaggggctgaggtttctctggtag

SEQ ID NO: 291085 - DNA, 122 bp, Homo sapiens
aaagggaagcaggtcaaagaagtgacgctcaccttgcggaaaggacagtcatccctcgcccgcgcctgctcaccgtcttgacattccgcaaagggacttatctccctgactaatgtgcagca

SEQ ID NO: 291086 - DNA, 122 bp, Homo sapiens
ggataacaactgttcctgtcccgtagatctgctatgaaaattagatgcctgaggagtcagcgctccagaagggttgctgcagttattactattctccttgacttacagaaaaggaaactgag

SEQ ID NO: 291087 - DNA, 122 bp, Homo sapiens
gggcttgaccttagtggaaagccgagactgcgtccaggttgctggactacaccgggggcacggtcagaggtctttaggggagggcggcggtctgagagtcctgggtgccgacctgttgggac

SEQ ID NO: 291088 - DNA, 122 bp, Homo sapiens
cgaggcagagcaaggttattggcccctggcccccctcacgcacaccctgccacgcatgcgcggggtcccagagaccctggggtcccagcttcacgccctggagcagctggaccctgcggggt

SEQ ID NO: 291089 - DNA, 122 bp, Homo sapiens
tgagtaagggcagtcaagcatccacagcagcatctaatgatagacattcacactcaaatacgcatagccacacattcaaagtcactcctcaatcacttggtcaacctcacaaagtcatactc

SEQ ID NO: 291090 - DNA, 122 bp, Homo sapiens
cccagttccgctgtcaaccacacaatctcagggaaaactgaaagtagcaatgcaaaaacccgcaaacaggtgctatccctcgggggggcgtccaagtccactgggcccgccgtcaatggcct

SEQ ID NO: 291091 - DNA, 122 bp, Homo sapiens
caagaggcctatcaggtctcttgcagcagccaaacataggcaccttagactccagcctgccgaaggcccaggcccctgtgaccttgcacccggcccactccctgacctgcctccttaatgcg

SEQ ID NO: 291092 - DNA, 122 bp, Homo sapiens
acctgggaaatcaggtggggaaccttacagggtcattcagaccccatcttagccctagatcggtgcttgctctactcacctgcactgtcctggggacctgggctctggcctgtcaccttgag

SEQ ID NO: 291093 - DNA, 122 bp, Homo sapiens
cagcggctggacagctagataaatcaggccctgccttctctgagggtgcctcagtgtagtcgtgctatctgtcatctcatcctgaaaactgcacagtacaaacacagatactgttgactctt

SEQ ID NO: 291094 - DNA, 122 bp, Homo sapiens
gagagagggagagagagagagagagagagagagagagagagagagagggaggagagggcgcgttagtgagcagcgactgtggcattgatgtttgagcatacttctgaactggcttttgttga

SEQ ID NO: 291095 - DNA, 122 bp, Homo sapiens
cctcagtgctgcgcagcctcgggcacgaacagccgcctagcgcaccctcatggcgcccggcgcccggcggcgccaccagcccagggtggacatctcccgcgcctcccaaacctctcctcccg

SEQ ID NO: 291096 - DNA, 122 bp, Homo sapiens
aagcgggaagggggcgggtctcctgtacagcctgaggcaggggagatgggcgcagggatacgaggttctccacgttctccatccatcgctcccgcaagctgggaaggagtccagggcagagc

SEQ ID NO: 291097 - DNA, 122 bp, Homo sapiens
cgcgtggggctggcggcgcggatgccctggggcgctgcagaccccgagaggccgcttgcccgcggggacgtcagccgcttttgctgttaaaatctgaaatgttcagcaagttagaaacttga

SEQ ID NO: 291098 - DNA, 122 bp, Homo sapiens
aggtaaggagcagggagtcggcgcccgggtcggctggtggtcggtcggctcactggtagtcggtcggctcacgggtagtctgagcagaacttttttttcccagttgccccgcgccgcggcgg

SEQ ID NO: 291099 - DNA, 122 bp, Homo sapiens
ccactgcgcagccctgccacatgcagatcacttgggccagcggaagtgcccctggctgcccgcccctaggtgggaacaccgaggctcaaggcgggacggggctgagccaggcgtggcttgca

SEQ ID NO: 291100 - DNA, 122 bp, Homo sapiens
ttttttaatacaaagtgcgagatttcactaaaaaaggttaaaattgaagtgagtaatcttcggtgcataatgcaattgttaattttagctccttgcgtgggtgccgttctgacttgaacagc

SEQ ID NO: 291101 - DNA, 122 bp, Homo sapiens
aaccagcagttctctatcttaaagccttgggcagtgttcttcctcctcctttctcttacccgttagaactaattgaataggcccagaagaaatcgcattggtttagaagtcaggccaggatt

SEQ ID NO: 291102 - DNA, 122 bp, Homo sapiens
tccgcagccgacctcgcactcccctgcgttcgaggctgcggacttcggcggcaggacggacggcgcctctgcttctcattccgcccagggccagcccgggcccaggggtacctgctgtgcgt

SEQ ID NO: 291103 - DNA, 122 bp, Homo sapiens
cggcgtccgcggaccaactctcgcgacagccagctcaaagcaggcaagaaccggaaggggcggggacgttccccgtgagccttcgcggtgctggctgctcatctgcatacggaagttcggca

SEQ ID NO: 291104 - DNA, 122 bp, Homo sapiens
gatcacgtcattattcagatggagaaactgaagggcaggcgtgggaccaagggcccaccacgagcccaaggctccatcctcccaagcacgtaacaaaggtggaggcggaagacggaggagag

SEQ ID NO: 291105 - DNA, 122 bp, Homo sapiens
tgggcttggcggaatggggcgggacttccagtaggaggcggcaagtttgaaaagtgatgacggttgacgtttgctgatttttgactttgcttgtagctgctccccgaactcgccgtcttcct

SEQ ID NO: 291106 - DNA, 122 bp, Homo sapiens
aggaaccaccattcgcgtgaggctctgctccccgcgcctgcgcagagtgcagggccacgtcgcttttgctgtaccggggaccacgcgtctcatccatggcttccgcggactcgcgccgggtg

SEQ ID NO: 291107 - DNA, 122 bp, Homo sapiens
aattgtttaagaaaggataatttctgacacacacatacacacacaccacaccacaccacacgcaggaaatgaagaccatcatttgtgtaataaagagcaggtcttgaattgtgtgccattag

SEQ ID NO: 291108 - DNA, 122 bp, Homo sapiens
cctgctgaattcttttaatgtccagctgtgtttgtactgttcagcacactgctccacagccggtgttcatcattagtgtcactggggataaagttggcagaaaaaagctgccccaatccaaa

SEQ ID NO: 291109 - DNA, 122 bp, Homo sapiens
cctggccctgtgccgggtagagctgaggatgccaaggtgaattcctcctgtgcctggccccggccccagtctgctggaagaaccagacacagacaatcacactgcggggaaacacgtgctcc

SEQ ID NO: 291110 - DNA, 122 bp, Homo sapiens
cgcgaggacctgccccagagtttaaatgtcaatgataagaaaagagggtgctcaggcaggcgctaactttccttaatatccacgccagcgccgtcctcattggctgcccggcccgcgtgacg

SEQ ID NO: 291111 - DNA, 122 bp, Homo sapiens
aggtgcccacgttttacgctgtccggtagaagcccgcgggctcaggccgacttgcgcggccgcttctccccagggagagaagctggagcttcccccacgcggccctaaggcggggccggctg

SEQ ID NO: 291112 - DNA, 122 bp, Homo sapiens
ccagctacagcggcctgatgcgcatcgaacggctgcagttcattgctgatcactgccccacgctgcgggtggaggccctgaagatggccctctccttcgtgcagagaacctttaacgtggac

SEQ ID NO: 291113 - DNA, 122 bp, Homo sapiens
gctccgtctgtgttgcaacctggaaattgtcctcagttggctcatttttaattcagcaagcgtaggatcaatatgcccaccctcaaaactctcccctcacctctcctcggtccgctgtgctg

SEQ ID NO: 291114 - DNA, 122 bp, Homo sapiens
accccgcgatcgcgccttaacacgtattggagcgagtgtgcgagtgatcatgagtgtgagcgggtgcgagcgctcggcggggctgaccgtcacgttggcggggccggcggggccaggcagtc

SEQ ID NO: 291115 - DNA, 122 bp, Homo sapiens
catgggagtattctacctgtgggaacagcaagtcccaagcttccaagtgtgaaggcgcttcggacaccctgaagctgaaagaagggccatgtgctggaaggtaacggcgagaggaatgcctg

SEQ ID NO: 291116 - DNA, 122 bp, Homo sapiens
agatgttggtcttcggagttctccggggccagcagctgcctgaccaggggcccggggccacgggctcagccgacgaccataggctccgtgtccacccagcagtttgcaagtggctgcgccaa

SEQ ID NO: 291117 - DNA, 122 bp, Homo sapiens
tacctcccaataaaaccttcttttaggaagacacgaacctctgtgaaggtgaaagaaaagcggagacagcactaaagccgaggtctggagggactaaaagcccacctctcagaatcgcggta

SEQ ID NO: 291118 - DNA, 122 bp, Homo sapiens
taacaccctttgtcgtagagtttggaggatgcaatgaggtaatgtggttgctgccctcgacgcggtggaaggctggcttaggaattatcttcctgagactcttcctactttctttctcctcc

SEQ ID NO: 291119 - DNA, 122 bp, Homo sapiens
atattcgcttgggacgctggggaatcttatgcaaatcaacgtgacgtcacagagatgactcggttgagacttgaattttgagcgaggagagtgagcagtgggaaagcgagcctggagggcgc

SEQ ID NO: 291120 - DNA, 122 bp, Homo sapiens
gccccggccaggccccggaaacggtcctggcacgctggggctggtctccgaacggcccgccggactaaccttgaccctgagcgaacggccttgaactttgaaacaaatgctcccatggccag

SEQ ID NO: 291121 - DNA, 122 bp, Homo sapiens
tcggggtgcacctgcagctgccgcaggaggtccagggctgcctggtacacagacaccacgcggcgcagctcctcgggcagttcgggggccgaggaccagctctcacggcgctccgtctggaa

SEQ ID NO: 291122 - DNA, 122 bp, Homo sapiens
caggagccggggagccacgccgcgcgtgggaagcgggggctcatgcgtggtgccatgatccgccccgcgctggggagaacatgaggactagaactcagagttcatgcccccaactttgacct

SEQ ID NO: 291123 - DNA, 122 bp, Homo sapiens
ttcaaaacactcaaagttaaagcattttcatcccatcttaattcgtaacccagggaaggtcggctcatactcatttcagatgagcgacttgctccagtcccgccgtgcacggcagcagagct

SEQ ID NO: 291124 - DNA, 122 bp, Homo sapiens
cgcccatagaggaagccagtctaccttcccttttctgtcgaggagacaaaggccattatgcgcctcgttttggagaagaatcctatttgtgggccacccaagccctggatcctctgctactt

SEQ ID NO: 291125 - DNA, 122 bp, Homo sapiens
tatggtggcggagagtaaaggggacgaacacagcctggggccatccccggagtcccccagcgtccgcctgtggccgtgcctggttggccgcggatcccggcgggcgccgcaaagcggcggga

SEQ ID NO: 291126 - DNA, 122 bp, Homo sapiens
gccccactgcaggacgcccaggataccacaaaggccccccacaatccctgctggcaaggccgtccttccacagcacacaccggagaggccttctctatgtgcctcgataacctcagacctgg

SEQ ID NO: 291127 - DNA, 122 bp, Homo sapiens
ctctcttcatgagagagtctaaggagggggtccccaaactccccaagcctggtcactgcccgcagccctccaccggatgccccccgcccggaaaagcgctgctgcaagggtttctgcatcga

SEQ ID NO: 291128 - DNA, 122 bp, Homo sapiens
acagccagggacgttttaccagctcatcctttttaaatccattgcaaaaattagaaacatcggcaacaaaccaaatcaagatgaagaattaactataatatataagagacttattaacactt

SEQ ID NO: 291129 - DNA, 122 bp, Homo sapiens
tacaccatttcattaatcttcacaatagtcctaccagatagtatatttgctggcaaatatcgatgaataatataatagggttaaagcagttctacatttaaatctaaatggttaggggaata

SEQ ID NO: 291130 - DNA, 122 bp, Homo sapiens
agaaccagaaccccaaccccattttctggtcccagatggggttcttcctctgacagcaggcgacttcccaagcctcatcctttccccagcgctttggagtatactcatgtgagcctgaggac

SEQ ID NO: 291131 - DNA, 122 bp, Homo sapiens
agggtctgctgcaagcacttgccaggccatttcagtctcctttagaaggaaatcagagcacgctggtggagagcaaggcccctcatggggcccaaccactttagttcactgtcttgtccgcc

SEQ ID NO: 291132 - DNA, 122 bp, Homo sapiens
ggaaattcacctcatttacttagttttccccccttccaaattggggagagttaaacccaccgtcctgaccgccagcgcatccatgttccgactgcaggagcgtcatgtgagggctgccctgt

SEQ ID NO: 291133 - DNA, 122 bp, Homo sapiens
cctcatcgccgctgccggagtcactggcgccatccacgtccagggtgggcgcgttgagaacgaccacgtctgcctccgtcccgatgtcctcgccaaaccagacagccttgtacccgccctcc

SEQ ID NO: 291134 - DNA, 122 bp, Homo sapiens
taccgtgaatgagggagaggtacacgtcccccttcttccccgcctcctatcttcgcggctcgctaaagcgttatcagccgccccacggtactaccgtccgtctaggaacgcctccggggcgg

SEQ ID NO: 291135 - DNA, 122 bp, Homo sapiens
ggaggcccagagggctttggaatgtggtgcaggggtcacagctaagaaatctcccagggccgggcgcagtggttcacacctgtgatcccagcactttgggaggcccaggtgggaggatctct

SEQ ID NO: 291136 - DNA, 122 bp, Homo sapiens
gcccagttttatgcacagaatgggtcctcccaaggctcgggtgcctgatctgcaattctgcgctccgccgcagggcgacgctcggagaccagccacactgtcccaagtcccggcgaagaccc

SEQ ID NO: 291137 - DNA, 122 bp, Homo sapiens
acagaaagacgccgtaaataaaagacacaattcccagcacatccgaattgccttgtttttcgaaccaaagcacgctgcgttgcgaccgtcaccacatttgaaagcatgcaccaccagcagca

SEQ ID NO: 291138 - DNA, 122 bp, Homo sapiens
gggtgaaagggcatgatgtcttggggtttatagtccactgagcctcgccggaggtaaccccggctcagggatgctttcgttgccatggcaaccgccgggccggcgcgggcccctgagtgcag

SEQ ID NO: 291139 - DNA, 122 bp, Homo sapiens
gccagaaagcctggaaactttctttccagatcacagatagttgacactcaatcagggaaacgttgagttctgcatgcctaagaggttgttgtccaggcttgggtccagattgagatccaggc

SEQ ID NO: 291140 - DNA, 122 bp, Homo sapiens
ggagcagcgcgaggaatgctgggatactggaggtcggcccagcgcttcctgcggggttagcgctttttccgagttgtagaggtgatttttttttttttttttttttggtctctaccttgtta

SEQ ID NO: 291141 - DNA, 122 bp, Homo sapiens
attcctcaaagcccaacgggagacgggaaagaactgattggttgggaatcttggaaggggcgagaagccacatgaagtggccaatggagaaacccggtgggcatatcaaagcctgcccccgg

SEQ ID NO: 291142 - DNA, 122 bp, Homo sapiens
cctggcgttcgcttggaactccggctgcgagaggcggggcccggcgggtgggggcgggggcgggggcggcggtcgcggcccggcggcctgcggaagctcggcggcctggcctggcctgctcg

SEQ ID NO: 291143 - DNA, 122 bp, Homo sapiens
caggcaaagctcatgttcctgccccgcggctggtccagggtctcggcatcatattgacggcggctatgcaggacacgcgcgccaggccgcaacctatgccccgagcagactacattacggaa

SEQ ID NO: 291144 - DNA, 122 bp, Homo sapiens
atttttccttggccctctttattttcctaagtggtcttatctactctcatgacatcaactcgagtctacaaacagatgaattactaatatatattcccagatccttctaggttcatcttacc

SEQ ID NO: 291145 - DNA, 122 bp, Homo sapiens
aaaaacagaagtacgcctttctctgagaatgtgtccatactcaccttacagtctggatggcgtgagcgagccactgtccggagagctcgcacttcacctcccagcctccgtactgcttggct

SEQ ID NO: 291146 - DNA, 122 bp, Homo sapiens
aataataatgagtgatgatgatagatgcttctcgagcacctgccaggggccgggtgataccgtgaaccctccatgtggatttactgagaatcctggaagctgcagattttgatgggttatct

SEQ ID NO: 291147 - DNA, 122 bp, Homo sapiens
ggggcctggccgttaaagcacctcaaggggtggggcccggctgttgtggcgctcgaggggcggggcctggagttagagcatctccacccgccgagcctagttattagagcgcctcgagaggc

SEQ ID NO: 291148 - DNA, 122 bp, Homo sapiens
ttggagaccattttcagagatctatggccttcaaagatctgcagcctggcaggccactctcgcaccaggtcaggggagtgggcagcaggctctctggggcttcatgaataggtaaatgtcat

SEQ ID NO: 291149 - DNA, 122 bp, Homo sapiens
ggtagcataccaaattaaaatacagaacagcctgtttctttcccccagggtccactagggcgcgtcggagaaagggttaaccgggcgggtgggagggaaggtcgggctcacacctttcgcag

SEQ ID NO: 291150 - DNA, 122 bp, Homo sapiens
caaagcctgccgggagcttggtgcgctatggcgacacccagcctgcggggtcgtctggcgcggtttgggaacccgcggaagcctgtgctgaagcccaataaacctctcattctagctaaccg

SEQ ID NO: 291151 - DNA, 122 bp, Homo sapiens
gcccagctattgggagctggcctaagtattgctccccacctccttgtgaggaaaggctagcgctaagcctattggagagaactttcagcccctgaactccccggtggtgacccctcacccct

SEQ ID NO: 291152 - DNA, 122 bp, Homo sapiens
tgtaccccgcatttttacccagagagactggcaaagttacttgtgattcataaacacccgcggtaggcatccaaactgtgaccaaggtaagcctggtcagcagtacaataaagatccagagc

SEQ ID NO: 291153 - DNA, 122 bp, Homo sapiens
aaaattagcttcctctggaacttctttttattgttctttgtgctgtcctgtggaattaaccgaatacatctaattaactcctgtttcacatgacagtctttcaaatatttgatgatacctac

SEQ ID NO: 291154 - DNA, 122 bp, Homo sapiens
cggcacttagaggggcgcgggcggcgatgcccccgctggctcccaccttctggcctgcagcggccggctctactgaacttcagagttactcatttcctggatgtcacaaaaactttttcctc

SEQ ID NO: 291155 - DNA, 122 bp, Homo sapiens
ctccctcctcctggccttcaggttctccagccgggccctacaccgggctccgtaggaagtcgctggcgttcctctcaccgagggtccaggctgagggtgaaaccgcttctctgttgacgccg

SEQ ID NO: 291156 - DNA, 122 bp, Homo sapiens
ccaattcccggggcaggaaaagcccctcctagccccaggcgtccgggccagcaccctgatcgcactgctcggacagggcaccggggcacccagccccctcgatgcccagagtcctgggccag

SEQ ID NO: 291157 - DNA, 122 bp, Homo sapiens
gaaagtctgtaagccagttgttaaacacagccattactaaaattaaattatatgaacttacgatgaaatacattacacttacaatggagcaatacatactcaaaacttatcacttcctaatg

SEQ ID NO: 291158 - DNA, 122 bp, Homo sapiens
gctcagggctgggaactgggtactggcaggagattcagatcggggttggtgtctgggcatcgctctaagcttttgtgatcctgggcctggctcttactctctctggcttcagtctcctcatc

SEQ ID NO: 291159 - DNA, 122 bp, Homo sapiens
atgtggggtgggggtctctgtccaagtctgcaaccaggttaaaggcacctgtgttcaaatcgcagctttgtctgagaaatctgtgttttctcaggccagttagggaacccttctgtgcctca

SEQ ID NO: 291160 - DNA, 122 bp, Homo sapiens
ttggcgatttgtttcttggaaacttggggtgatgcggaggcggcggcggcgaacatttttcggttgctttcggggtttgtcttctctgccgggagctcgcaggaacgcgctgcgccccgggc

SEQ ID NO: 291161 - DNA, 122 bp, Homo sapiens
cagcaaggccccgccgcaggcccctcccccgtgcctcgccgccctcaccccgactccacgcgccactccagctcggtagggcccgggctgctgcggccttaatggatcccgcgggctgtgtg

SEQ ID NO: 291162 - DNA, 122 bp, Homo sapiens
tatggaaacaagtgtagaagtaaaacagctcagctcgctgatggtttaaatgggtgtttgcggcaagcctgattcgtgtttaaaacattattttgaggtttgtggagaagtgctttctgttt

SEQ ID NO: 291163 - DNA, 122 bp, Homo sapiens
tcgaactcctgacctcaagtgatccacccgcctgagcttcccaaagtgctgggttataagcgtgagccactgcacccagccccaaggcttcttactgcactcagaataaaatccaaatgaat

SEQ ID NO: 291164 - DNA, 122 bp, Homo sapiens
acgactaatttcttccccctgtttgtcctaccgtggaggtcgagttaaaaggcagcacttcgggggttgaaaagctacccgcaggggtctgctcgtgagggacccccgggcctctgcagcct

SEQ ID NO: 291165 - DNA, 122 bp, Homo sapiens
ggacaagatatgcaaagtctgagccctccaaggtgtgtatgacacaaaatagaataatcacgggaaatgttgagaaatgtcctggcttggatctagttatttctaatacaagaaactaagag

SEQ ID NO: 291166 - DNA, 122 bp, Homo sapiens
tcggccaggcgctctccgatcttgcggtgggccacggcacagcccagagggtcgtcagcgcgctcccgaagctgcagctcctgccagtgctgctccagagcctcggcgtagcggcctaggcg

SEQ ID NO: 291167 - DNA, 122 bp, Homo sapiens
gaatgtaggcagcacagagggcttatactgtgtctttttttttttttttttttaaatatacggtgtctattttgctcaccactctatgcccggtgcctggaagtgcgactggcacatagtag

SEQ ID NO: 291168 - DNA, 122 bp, Homo sapiens
gtgcaccgggttgcaaggactgggtgggaggacaagcgcacctgtcggaaggctctggctcgggaatatgtatgagggggcggggctgggggtgtggaatcttggagaatccgacgtccggg

SEQ ID NO: 291169 - DNA, 122 bp, Homo sapiens
tgctaggtactgttcaaagcaccttatgtaattatcataattatttcatgatatgagtgacgtgggtaccattattgtccccattcaaggaatgaggaaacacaggcccagagaggtggtca

SEQ ID NO: 291170 - DNA, 122 bp, Homo sapiens
ttctttgttattctctttggagcaacagaattttttctcttggcagccatgtcctatgaccgctatgtggccatctgtaaaccccttcattatgtggtcatcatgaacaacagggtgtgtac

SEQ ID NO: 291171 - DNA, 122 bp, Homo sapiens
ctcaattgagtggatggggctaggacagagagagttaggggcagggttttcactggtctccgtaatcagtcgctgccgtccgccaaggtgtagatgtgggaacaagcttaaattctcaaact

SEQ ID NO: 291172 - DNA, 122 bp, Homo sapiens
gacctggagcggagaagagaggtcggtgcctccaacccggggccgcggtcgaggggcgcgcgtcgttgctctgggactcactgtcgaccaacccccattcctcaggggctcggctccttccc

SEQ ID NO: 291173 - DNA, 122 bp, Homo sapiens
agtaaagtcagtctgtattgattttgtgaacccggggaacagtaagccagccttcagtgccgcctggctgccgggcgcatgccgttgtcagaccgatgagcgaggctccatgcagacaggtg

SEQ ID NO: 291174 - DNA, 122 bp, Homo sapiens
ttggggacaatttcgggctcaggtgcagggggcgcttccccagcgcgggcgcgtcctgggcgccatctgaggccgtgggctcctggcaggaggacctggagctttcagatccccgggaagga

SEQ ID NO: 291175 - DNA, 122 bp, Homo sapiens
taataaaaaaacatgctcagtccccagcaggttcctttgccaaactgcattagagtaatccgtcataacatcagaacattccagatactccaggtcatcatctgaaaactcctcggtgtagg

SEQ ID NO: 291176 - DNA, 122 bp, Homo sapiens
agcagggacactggacctgagaggctagtgtgaggcaggactgagcaaagagtcctctggcggaaacctgagagaaacctgagatggagagtccttgggtttgagaaggcagactcaaagac

SEQ ID NO: 291177 - DNA, 122 bp, Homo sapiens
tggacggccacgaggggtccccgggccacggccatggcagcgccacgcgtggggagaaggcggccttgcaatagaggctgccagatcaacagcatgtttcacagaacaaaagcagcaacata

SEQ ID NO: 291178 - DNA, 122 bp, Homo sapiens
ggccgtaagcggggaggcggggcggaagacagtgggcgtggccgtgctggatgcggcgggcggggctggggacgctgggaacccgcgggagtggtgctcgctgcttggccgccaggtgggga

SEQ ID NO: 291179 - DNA, 122 bp, Homo sapiens
tcagggcacagactggggtcccaggtgttgggcagcccctctcccattgtcagggttcagcgccagcccagggctggatgttttattttggcatgccccaggtgctcttccgggaacctttc

SEQ ID NO: 291180 - DNA, 122 bp, Homo sapiens
gcacttggccatccaccagcgcacgcacaccggcgagaagcccttcccgtgcccggactgcggcaagcgcttcgtctacaagtcgcacctggttacgcaccgacgcatccatactggcgagc

SEQ ID NO: 291181 - DNA, 122 bp, Homo sapiens
ctcgggagctgaaagccgagaggaaaacagggacagaggtcggcggcctctgaaggtcctcgaatcaagatgctgggatttttgtgacccaggaaacagaagggaggccagggtacgaatag

SEQ ID NO: 291182 - DNA, 122 bp, Homo sapiens
tctaccgcccacgaggcccgcggggcctatttatccccaaggcacggccggccccagggacggcccaccacagccctgcccaacgtccagcctcaaggtaaacagatggcgctggcccctgc

SEQ ID NO: 291183 - DNA, 122 bp, Homo sapiens
gtctgggaggtgaggagcgtctctgcctggctgccccgtctgagacgtgaggagcccctacgcccggcagccgccccgtctgagaagtgaggagcccctccgcccggcagtcgccccgtctg

SEQ ID NO: 291184 - DNA, 122 bp, Homo sapiens
acacagggctggcaccgagaggcaggagggcttgatgaggaggccgttccttgtggctcacggagggctcttggccgtttccgcgtggcacccagaagctgctcaccagctctagaagacgt

SEQ ID NO: 291185 - DNA, 122 bp, Homo sapiens
tgacccctgactaattcttctctcctcttctccatctccctttgaaggtgcctccatatgcgtcggagaaccagacctgcagggaccaggaaaaggaatactatgagccccagcaccgcatc

SEQ ID NO: 291186 - DNA, 122 bp, Homo sapiens
gaccaatttttagacccacccagctcttgtccttccagggctgtttcctggactattcttcgcatcttttccccaatctttttcaggaaatcaaattctggaattagagatcatatctcggt

SEQ ID NO: 291187 - DNA, 122 bp, Homo sapiens
actagtgcacaggtcatatgctattacagcttcaaggagctgccagaagctcattccttccgtttgcatttttgtgaatgtcagttctgaaataaatgaacaaacccaggacttgaaaataa

SEQ ID NO: 291188 - DNA, 122 bp, Homo sapiens
gtgtaaagcctggggagcacgtgtgagcgccttccccatggcacttcagggtctgcggggcggacacaggactggactaagcaacaggaggaggtgggggacggtacagccctctgggagaa

SEQ ID NO: 291189 - DNA, 122 bp, Homo sapiens
atggcctcgtgttcgctcagtctctgcaaacacccatttcaaagagggtggccctgctggcggtcagggcttccacgtgggaattccgggagacgccatccgcccctaaggagggctcacac

SEQ ID NO: 291190 - DNA, 122 bp, Homo sapiens
ccggtcactcgggcgacaggaggcggggcggcgcggaagttatcttccaatcaggtgctccgggggcgggtccggaaaactgtccaatcaaggcacggggcggacaccgggaagcggattgc

SEQ ID NO: 291191 - DNA, 122 bp, Homo sapiens
tgagtgactggctgattgccagcgtggaggtgagtgccgcctgccccggagccagccccacgtccccaggggttcctgccatccgcctggctccccggctcggccgtactagaggggagccg

SEQ ID NO: 291192 - DNA, 122 bp, Homo sapiens
cagcagcagggggcattcggtctcccatccctcttgttctgggcaccaagcgtaagctgccgtcacctcttcaccagccctaaatatgggtgcccctctcccacagaacctgtctccagaga

SEQ ID NO: 291193 - DNA, 122 bp, Homo sapiens
taagacaccaaagtgaaaacaacagccatggaaaacacttccagttaagttgagggagaccgagatttcactatgtatagcagggagacttgcattcctgttagctcaaacagattctgaag

SEQ ID NO: 291194 - DNA, 122 bp, Homo sapiens
ttataaagaagcccaacgtcttcactggcaattccgggtgctgcacggccgagtccacctcgtcctcactgtcaaggaccacaccatcttccgcgagcacctctggcttgagaggaatatct

SEQ ID NO: 291195 - DNA, 122 bp, Homo sapiens
cctcacctgtcagttttattctccctttggggttcccttacatgcacgctcacctgatggcgggtgttgtacaccttctccgctgctattgtgaagggcatgtgcagcagagaaaggagggt

SEQ ID NO: 291196 - DNA, 122 bp, Homo sapiens
gtgctgtttggggtccgggagcaagggcgtggcctggatgcgcgggcgcccgggacggcacgtcctcagaccaaactacaactcccaggacccagcgggcgctgccgcccacgcgacgtcac

SEQ ID NO: 291197 - DNA, 122 bp, Homo sapiens
gccgggcggcgggccgggggcggggccgcaggggcgggcgggctggcaggccgagctgggcgccagcacctgcttccgcgatagctgtaaagacagtagtggctgctggacggcggctcgag

SEQ ID NO: 291198 - DNA, 122 bp, Homo sapiens
atcggtcccctcgtccacccgcgtgcgtcccagcgcggccccacggaggggccggcccggcgagctcagcccacggcgacaatagcgactacttttgaatggggccctcctcgcggcgtcag

SEQ ID NO: 291199 - DNA, 122 bp, Homo sapiens
ttccttagcagctctgtatacttggacttattagttgactgttctttgccttagtttcctcgtctttaaggtgagaatgaatagtattgtgtccagaagctgcagaccttcgcagtgagtgt

SEQ ID NO: 291200 - DNA, 122 bp, Homo sapiens
gggctcggggcgggggtgagaacgaggaggcgcgcacaaaagggccgctttattacctcccgcgggccgggaattgctgctctctcccagcagcggccggagccgctttattgtgttaaccc

SEQ ID NO: 291201 - DNA, 122 bp, Homo sapiens
atttattggctctgtaaacagtattaatcacagtagtattaaccttccctggagcgcttccgagtgtaaatggcagttcttggcactcaccgttttcttttactgtgtttcaagcagagcag

SEQ ID NO: 291202 - DNA, 122 bp, Homo sapiens
gtagcgagccgagatcacgccactgcactccagcctgggcgccattgagcacggagtgaacgagactctgtctgcaatccccgcacctcaggatgccgaggctggcggatcactcgcggtta

SEQ ID NO: 291203 - DNA, 122 bp, Homo sapiens
catggcggggggtggcttcccatgcgatgaggatcgtggagccccctggggcggaggcggcgcgggctaggggcgagggctgtgagtgtgagcggtggtggggactcctccgagtggggtta

SEQ ID NO: 291204 - DNA, 122 bp, Homo sapiens
aaagtggcagaaagaggtagactcaagtactgaaagcagaaagaatcgttggtgggagggcggtatggtgtgaatcctgacccaaaagccagctcttaacggaaggaacttagtggcctctt

SEQ ID NO: 291205 - DNA, 122 bp, Homo sapiens
gtcactgcacaggagcctatagttgttggtcttttaaactcttattggtgtaaccagccacggaactctgaggcaaggggttgggggtgggaagggaaacagagaaaaggcaagtgaaacag

SEQ ID NO: 291206 - DNA, 122 bp, Homo sapiens
ctgctcttctccaggctctgtggtaggtgaacctcggcggccggcgtgggctgagggagccgccactgagggtgcgggcgccgcggccggctctgccagccgttctctggagcagcgaggcg

SEQ ID NO: 291207 - DNA, 122 bp, Homo sapiens
ccaccagattagttagatacagagttttgacacacaggttctccacggccccaccagagccgctagatacagtgtcgattggtgcactcacaaaccctgagctagacacagggtgctgattg

SEQ ID NO: 291208 - DNA, 122 bp, Homo sapiens
ttgttaaggtgtgagggatcttggaagacagaagccaggaataaagtaaacctacagagacgtccctccccaaaccccggccgctacccctgcaagaccttgtggagcatgttaggtttcgt

SEQ ID NO: 291209 - DNA, 122 bp, Homo sapiens
gagcccaccgggagaaacgaacaactccagacgcgctgccttaagagctgtaacactcaccgcgaaggtctgcagcttcacttctgaaccaacgagaccacgaacccaccagaaggaagaaa

SEQ ID NO: 291210 - DNA, 122 bp, Homo sapiens
ggagccaggctttgtgggtgcaggagccggagagcagcccccagccacacacctcaggctcggtggacatctgggaggggtgcctgggccggtgcaggcgagcactgcgctgcccctgtggc

SEQ ID NO: 291211 - DNA, 122 bp, Homo sapiens
ctgattcgggtgaggctgagggaagaggcgggagacacgaacgtagacgtagaagacatgcgatctggatggaacccaggacactccacttccggacctgaaggggaaatggagcctctaga

SEQ ID NO: 291212 - DNA, 122 bp, Homo sapiens
tggttaaaaacttccagccagggtgatacttcatcacgtgtgtgtcttgagcgccagagacgttccagagcagctggttttaggcatacaggaggggaaaccctgacacccttggaaaactc

SEQ ID NO: 291213 - DNA, 122 bp, Homo sapiens
gcgccctggaacctctgctcaggctagtccctccaccgacctggaaggccgtgcggacagcgtagatgcagaggggaaactggcccccggctgtggaatggttcaagttgaaggagaccagc

SEQ ID NO: 291214 - DNA, 122 bp, Homo sapiens
gcctgtccccccactcacccgtgatgcccacggtggacactgggcccacgcgctgcccctcgtggaggccgtacagatgcatcttgtatttgcgcccgggctccaggccccccacggtgacc

SEQ ID NO: 291215 - DNA, 122 bp, Homo sapiens
gaggtggcggggggaggcggagaggaggaggaggcggaggagagagggcgcgtgggggggcgggggggacctcggcctgcagcatccgccggcccgcacctcagacccccccggcgggggga

SEQ ID NO: 291216 - DNA, 122 bp, Homo sapiens
atcagtaaggggaagggagtactgagggaggagattgtgtagttcatcaaatcagagcggcgtttgctgggatgacatcctgcattcagagtggacaagggaaagatggagatggagagcct

SEQ ID NO: 291217 - DNA, 122 bp, Homo sapiens
cgacgcgttccccttgctcgcttcttggttacgggccaggggatactcctgcccgaccctcggcattgcccaagggagtttgcacttcccactgtgctctgccaagcctctgtggagaggag

SEQ ID NO: 291218 - DNA, 122 bp, Homo sapiens
aaccaaggcttctcctccccaagccgacaccccacacttcctacatgtggtggctgcccacgggctggaagacagtgcctctcccatgacccctcagtgcatcaccccacccatctgagcaa

SEQ ID NO: 291219 - DNA, 122 bp, Homo sapiens
ctccgtggggcctctggtctcttagggtcgccgggggctggaacccatggggccaccctccgagggtcagcagcggccgaggccgttgccacagaaggtggcagcacctccttgcgggtcgc

SEQ ID NO: 291220 - DNA, 122 bp, Homo sapiens
gggccccgccccctcagccgtgagtgacaatagaagcccttggtaacggggctctgaaaacgggtttgaccggatccagcgatagattctttaagccagaggtctgtaacctttttagcacc

SEQ ID NO: 291221 - DNA, 122 bp, Homo sapiens
ttctttctctgtctctctttcttttcttttctttctttctttttggagacagtctcgctccgtcacccaggctggagtgcagtggcacaatcttgcctctctgcaaccaccactttccaggc

SEQ ID NO: 291222 - DNA, 122 bp, Homo sapiens
aattctcctcaagtgcaaagtgagtctgtggttgaatgagggctcagaaaggtttttactcgccaccctgtttctgggatcattctccagttgtctgcaaagattcaaaattcaaaaggcaa

SEQ ID NO: 291223 - DNA, 122 bp, Homo sapiens
tacaatatcagggtcacgatacaacattcctgtttgattccaaccgaggaagcaacacatcgagaatgatttgcattctccgctcctgctgagcggaccccagcacagagagcaccatctgg

SEQ ID NO: 291224 - DNA, 122 bp, Homo sapiens
ccttggatttggagctggtaccaaacagttcaggtaccagttaataccggggggagggggcggttatggtcaactcccttacgtggcactaccaatgatgttactgttggtcagaaagcgaa

SEQ ID NO: 291225 - DNA, 122 bp, Homo sapiens
tacgagtaccgacagccttcgcggtagtgccccaccccctttctcccaccactcagcgcgcgtcaccctgggctcagccaatggagacagagccagggaaaaagggcgcccgggtccggatg

SEQ ID NO: 291226 - DNA, 122 bp, Homo sapiens
acaattccacgcccaaagtaatgattggccgaaagaatgcagccctgcgcaagcattggtcgcgccctccccgtccatccgaccccgccctcgggccagcccctcactcacaggcgttcgcg

SEQ ID NO: 291227 - DNA, 122 bp, Homo sapiens
gccggtcctcccaagagagaatggtgcaaaagccaataagcctggaacacacgcaggtcccgccgggcctgggacaatggtttccatttaataaatatttcccccaagggcatttcacatcg

SEQ ID NO: 291228 - DNA, 122 bp, Homo sapiens
cgcgcggctgcggtcccacgatggagcgtgcagccaactctgggtgggggcattgggccccgtgctctcctggtggagttgggggcacacagaacgagcacagaagcctctggtttccagcc

SEQ ID NO: 291229 - DNA, 122 bp, Homo sapiens
agtatgtatgtcactcagtaagtgcccagcaccagggcaagatacaggattttcaggacccggtgcaaaatgaacacgtggtcctctagttcgaaaactaagaatttcaggccaagcatggc

SEQ ID NO: 291230 - DNA, 122 bp, Homo sapiens
tcctgtgtcaacgtcccacatcacatggaattgggcatgaaaatgtttttttggaaagagcgtcttctcagggaaactgttgtctaaaaagtaaagtggttgtggagtttcttcttcctcaa

SEQ ID NO: 291231 - DNA, 122 bp, Homo sapiens
gggcttcccgtgcgtcccggggctcctgggcctgtgcgtcccggggctcccgggcccgcgcggccgcggcagcagcagaccgcacacccccgcccaccgtcttggtgcatcccggcgctacg

SEQ ID NO: 291232 - DNA, 122 bp, Homo sapiens
gaggctgggggcggggcctggttctaggagacacgttctagggatggggcttgcgctctgcggagatgctgggggtgaggcttgagctctgggaggggttggaggtgggggtggaggactag

SEQ ID NO: 291233 - DNA, 122 bp, Homo sapiens
gggttctgaaattcctaattttaaagcatggccatttgcaaaagctttagtttgataaagcggccacagaactggccacaaggctatcaagttcctttcctcctgtgcatgcatggctgttt

SEQ ID NO: 291234 - DNA, 122 bp, Homo sapiens
tgaggtttcaaacctgagagcggtacaggcagcagccagggtggaggcgagggtcaggctcgagctggcaggtggctggagtggggaccaccaggagctggcagacccttggtggccaaggt

SEQ ID NO: 291235 - DNA, 122 bp, Homo sapiens
tattttttttttatttttgcgacagggtctcactctatggccaaggctggagtgaaatggcgtgatcatggctcactgtggccacttgagtagctgtgattacaggcttgagccaccatgcc

SEQ ID NO: 291236 - DNA, 122 bp, Homo sapiens
cccgcggactaggggacggacagcacgcgaggcagacagacacgtgctggggcgggcaggcgagcgcctcagtctggtcgcctggcggtgcctccggccccaacgcgcccgggccgccgcgg

SEQ ID NO: 291237 - DNA, 122 bp, Homo sapiens
gctcctcttctccagcccactaggcaggaccacggtgacgtccatggtgctggccctcagcgcctccttcatgcgaaccaagttctgctgcgacccgagggccccatcgtgggggggcttct

SEQ ID NO: 291238 - DNA, 122 bp, Homo sapiens
tgccccggcgcgttccccctataagtagcagagggcgtgacggtcacgctctagcggaggcgaagagtcgcgaacgcgcgggacttcctttccctgcccaacgttttactattaaatagatg

SEQ ID NO: 291239 - DNA, 122 bp, Homo sapiens
accttcccgccatcaatgatgccaagagctcttcccatcatctctgcatctttctgacttcggcttctggccttggccagtgaagctctgcttgtatgagctcctctccctatgttaaggtc

SEQ ID NO: 291240 - DNA, 122 bp, Homo sapiens
agtgatttgattgatcccgggtgaaagttgcgtggggggaacaccgtcgtgtaccatcctcggcgcgtctccgtgagtggtgctgcgagtgcgcatgtctgcacgcatctccaggtgtgcat

SEQ ID NO: 291241 - DNA, 122 bp, Homo sapiens
atcggctccctaattagcagcgcgcggcgcgattacacattctctgcagctcgctgggtccggcccccgcaatgagtgtttgtggacagctgggagcccgcccagcagcccgcggagccagg

SEQ ID NO: 291242 - DNA, 122 bp, Homo sapiens
atcaactcaggaaataattcttgaactactttttgttcagagaaaaagtgcaggatctagcgaagtaatgtgattgctcagggtatcactgaccatgcccagttgttcctattcttctttcc

SEQ ID NO: 291243 - DNA, 122 bp, Homo sapiens
cagagtttctcttctccctctcccagcctgcgacgggtccttcttcctggacactcacgacgcggacccagttctcactcccactgagtgtcgggtttctagggaagccaatcagcgtcgcg

SEQ ID NO: 291244 - DNA, 122 bp, Homo sapiens
gcggagccggacacagaacgcgcaaaacgccgtgtaggcctggaggagccgaagagcaggcggaccccctccgcgggggaacagtttccgccgggagcacaaagcaacggaccggaagtggg

SEQ ID NO: 291245 - DNA, 122 bp, Homo sapiens
tccccgccaaacacacttgcacaggggctctcaaggtgttctccgcacagcggaagatggcgacagactgagggtgcatggccagcgggagccacggggccgtgccgctgggctgcagccac

SEQ ID NO: 291246 - DNA, 122 bp, Homo sapiens
tcgaccgcaggccgccacctcccggctggagaaggagttgcttcctgttcggggctaacccgcttgcagactgagaaatgaaaagtttggaacccagaagctgcagcctgcggaaaatgctg

SEQ ID NO: 291247 - DNA, 122 bp, Homo sapiens
ccagcctggagggcgtcagtgaaaagcagtacaccatctacatcgcacctggaggcggggcgttcacggtgagagcttctgagggcagtggtagaagaggggagaggagggagggtggtctg

SEQ ID NO: 291248 - DNA, 122 bp, Homo sapiens
ggagcagatactgaacggggttcgtgcccataacccttctcgtctctctcccatcggtcccgttctgaaaggcgccccacccaggttcccaagccttactgggacagtcccccagcatccaa

SEQ ID NO: 291249 - DNA, 122 bp, Homo sapiens
agaggtccttcactgtgtgtacacagcaagagcatgtgtgtgccacttcccctaccccaacgtgaaaacctcaataaactgcccgaagcagcttgagtgtgtgtggaggctgcgctgggcag

SEQ ID NO: 291250 - DNA, 122 bp, Homo sapiens
tgtgggacaggcctttccgaggctgtgtgagaaatgggatcttgaagtgggcacagccatcgatttctgggattgtgggatagatagggagctttaagtttttcctccatccgtgctggggc

SEQ ID NO: 291251 - DNA, 122 bp, Homo sapiens
ctcccctctcctcccttcccctccccttccctaagacagggtctcactctgctgctcaggcgagagtgtactggcatgatcttggttcactacagcctagacttcccaggttcaagggatct

SEQ ID NO: 291252 - DNA, 122 bp, Homo sapiens
tccattcccaaaggtctcagctttttaaaagctaccttgatggctgggcgcggtggctcacgcctgtaatcccagcacttttgggaggctgaggagggtgaatcacctgaggtcaagaattc

SEQ ID NO: 291253 - DNA, 122 bp, Homo sapiens
tatttatttcagcaccaaatatccggacagcgcctctcgggaggtccgagaagagaaccgcgatctgtttcagcaccggggctcaggacagttcccagcgggctccgtttcgtctccagaac

SEQ ID NO: 291254 - DNA, 122 bp, Homo sapiens
ccttttcagtcttaggcttaaagttcaacatccctctggatacagtctaaatctttaacacggctgaaaaggcccagcaagagctggaccaagcccacctctccagcttcacctttcctcat

SEQ ID NO: 291255 - DNA, 122 bp, Homo sapiens
ctcaaataaatgaatgggcctgtaaggtcataataaaagcatgtcctgtgtgccaggtaccgtgctgagctccatcagacattggtcaggccagccacgtgacagccacactgttattactc

SEQ ID NO: 291256 - DNA, 122 bp, Homo sapiens
gtgatgaccaccacctgcaggccctcgccggcaaagccgtcattgtgaatgcggcagaggcggcctgggctgccgggctgtttgggtgcagtcctgtttctgagctttccctgctctgggtc

SEQ ID NO: 291257 - DNA, 122 bp, Homo sapiens
cccgaagaccaagggactgtgtgcccccaccagacctcccaggaaggagatagcgctccccgcaggctggggacctctgcccaccgtaccgcgtctgcttcccacccagctccgacacctgc

SEQ ID NO: 291258 - DNA, 122 bp, Homo sapiens
aagccgccgggacgcgccgggctggagtgggcggttataggctttgagctaggccgtttccgggaggcggagctcagaccccatttcctttctccacatccaggtcaggtggcgtttgctgt

SEQ ID NO: 291259 - DNA, 122 bp, Homo sapiens
ccagctgctccaggaggcagcccggctgccggacgctctccaccagctgcaggatgccggcgtcccccaggcagttgttgctgaggtccagctcacgcaggctgtggttggccaacagggtt

SEQ ID NO: 291260 - DNA, 122 bp, Homo sapiens
tacaggcaacaaatcctatagagatacatccccaacttaccaacagctacccaggtgagacgaatggtaactttttaatttacatatttatatgttttgaattaaatataaaataagcctgc

SEQ ID NO: 291261 - DNA, 122 bp, Homo sapiens
ctggacgcagcgcctttgggtggcggcgggagtagcgtgccgggaagcatggcggccgctcgaacgccgcgcggcggagggcgttagggcatggagggcccgggaaggcggcctagggacgc

SEQ ID NO: 291262 - DNA, 122 bp, Homo sapiens
gtgggcactcagggacctgcctaattcccgcaaaatctgaactacaaatcagagtcaggccgggcacggcggctcatgcctgaaatcccagcactttgggaggccgaggcgggggatctctt

SEQ ID NO: 291263 - DNA, 122 bp, Homo sapiens
tttgcctgtgatcgaacagctggcagtagggctcagggcccaactttactccaggtcttccggtttcaagactgtgtgtgtgtgtgtgtgtgtgtgtgtgtgtgtgtgtgtgtgtgtgtgtg

SEQ ID NO: 291264 - DNA, 122 bp, Homo sapiens
tcatacgaatgccttatatgtgcttcatctcatttgatattcactgccatatttatacatcgggaaaccgaggcataaagaaagcagtgaaggcatttgtctcaggtcaaacagctaataag

SEQ ID NO: 291265 - DNA, 122 bp, Homo sapiens
taacaaagctgggttcctgctgggccccgccctgctcctcgcccccgcgactgggctgggcgcgctgtcccctagcgcagctatgtcccgagcgcgcccccacctgtgcgttaatctactgg

SEQ ID NO: 291266 - DNA, 122 bp, Homo sapiens
aacagcgatagcagcagcgacgattgttggtgcggaggctccaatagatgcgcgtggcctcgtagcccacgggatagagggcagtggcactatgaaagtcagccatctggtgaggcagcagc

SEQ ID NO: 291267 - DNA, 122 bp, Homo sapiens
ggcggtggcggcgctgcagcagcgggcgggactggtatggtggttccacagggcagaccccgctgcactcacagggaggaggaggcggcagcggcggaggaaggcggcgcaccccgagaggt

SEQ ID NO: 291268 - DNA, 122 bp, Homo sapiens
ctacaacctcatgcaaagagctgctaatcccaatgcaaaccagctgtaacggagagatcccgggtactcgggagatagagcaggtgggcatggcaaacggtgccaccgcaccagacgcgtac

SEQ ID NO: 291269 - DNA, 122 bp, Homo sapiens
ggacgctgctgccactgccgtttctggccgccggcttcctccccctcctctgttttgattcgagtgaccacgtcactcttagccacaagacccggatctgccggctcccgcgggcggcggcg

SEQ ID NO: 291270 - DNA, 122 bp, Homo sapiens
tcagtgcagagtcctagagtgactgagattggaaagtacttgggtcctttgggtttgcaacggattgtgttgtttctgggttcaggtttttacaagaagcagaccggccctatgtccacacc

SEQ ID NO: 291271 - DNA, 122 bp, Homo sapiens
tctatgagggtcccaagagccaagggaagattcttgataaactccaaagttcaggccgggcgcagtggctcacgcctgtgaggccagcagtttgggaggccgaggcgggcggatcacctgaa

SEQ ID NO: 291272 - DNA, 122 bp, Homo sapiens
aaaatacacttgaccttgagtcaagagacccagctcagccacatcctaactgagtgaccccgaccagccctatttactccaaggtggctcatcctgttacccagaaaacacgacttcatgct

SEQ ID NO: 291273 - DNA, 122 bp, Homo sapiens
cccagccacataatttaggttttgtggtccaccgggaactggaccctgtaaattctacagcgatgctgttggcttccagaagtctccagcctgcagtgaatgtctaggaagcaaagagtaag

SEQ ID NO: 291274 - DNA, 122 bp, Homo sapiens
aggtgccgtaggacctggaagattctcgaaagttctggaaggttctctcagggatcgccgcgggcgggggagcctgttttcccaccgagacccgcgagggcggtgtccggggtctgactgca

SEQ ID NO: 291275 - DNA, 122 bp, Homo sapiens
atgaatgatgtgagggacttgagtacagccatacctcgctttattgcacttcacagataccgtgttttttacaaattgaaagtttgtagcaagcagccctgcaccgagcaactattttttca

SEQ ID NO: 291276 - DNA, 122 bp, Homo sapiens
tcccagtgctctggttaactctggaccatctacatgtgtgaattagtggaaggagcaaatcgtgttgttgaacagccatctccaaacacctgcacatcaggagggatgctggatgtctattc

SEQ ID NO: 291277 - DNA, 122 bp, Homo sapiens
tgctcgtgggaggagtctgcggattccttccttgtatgacctgcatggtgctgtgtgtggcgctgcctgggtgtatctgcatcacccatgtttgtgccacctgcacctgtacttataggtgt

SEQ ID NO: 291278 - DNA, 122 bp, Homo sapiens
caggttgtccgggtgccaaaaagcatgagtttctgaccagcgttctggacgcgctgtccacggacatggtccacgccgcctccgacccctcctcctcgtcaggcaggtacgctgtgttcgcc

SEQ ID NO: 291279 - DNA, 122 bp, Homo sapiens
gcccgcgcgcccctgcgaaggcccctagtattttgcattgcagccctcttcgtagttccgcgggcttccttccagcatctgagaagcaggcagttcagacttggggttcctgtgagtgtttc

SEQ ID NO: 291280 - DNA, 122 bp, Homo sapiens
ttctagtttccagttaaacacagaacccagactctgctctaacgtcacgggctggcactgcgggggaggaagccgcggccagatgggggaggggaaggcttgaagataaccactacagcgat

SEQ ID NO: 291281 - DNA, 122 bp, Homo sapiens
ccgcagcgctaaaatgcgctcagccaatccggcagctggcgcagacacgtggttcgggggcgcgctccgttgctggccctggatgctaaccctaggaaggcttttcaaagagaaaccagatt

SEQ ID NO: 291282 - DNA, 122 bp, Homo sapiens
ccgcggcccggggctcggcggtccagtcttctgcccgtggcgcggctggagcggcggcgtcggcaacaggcaagcttaaaggaaaaggagatgatcgtgtcaatcgcccgcccgcgggggcg

SEQ ID NO: 291283 - DNA, 122 bp, Homo sapiens
aatgttgactttgcagctttcatctggtattttggagctaacaattttctttttctttttcgggtcttttgtggactcttgaaaagcttataagctctgggcactatttctattatgccaga

SEQ ID NO: 291284 - DNA, 122 bp, Homo sapiens
caaactcgtcgtcttcctctaacagacctaagtctaccggctgctttttctctgacatctcgactgtccgcgcccaacacctcccagataagcagaaaagttggaaccctcactcttcctca

SEQ ID NO: 291285 - DNA, 122 bp, Homo sapiens
agtgctgtctgtcatctgtcggtggcgggcttggcagttgctcgaggcaggatcaagtcccgggggcggggcgggtgggctggcggctgtcctccagcaacaggtgcacattcccgggctcc

SEQ ID NO: 291286 - DNA, 122 bp, Homo sapiens
gccagaaaaagggccctagattgatgcctttcacttacctttgaaaggctataaaagcaacgccatacattgggatgaaattagacagcgacaaaatcattaccttgacttcccacaataaa

SEQ ID NO: 291287 - DNA, 122 bp, Homo sapiens
gtctgtgaatggagttcccgctcagccctctgtcctcagtcccctccggtgagggacccgcgctcttgtcagtccccgtacagcggctctggcccagcctgcagccctccttgtgcagctct

SEQ ID NO: 291288 - DNA, 122 bp, Homo sapiens
ggctggaactgtgatttaatattaattcaagaaaactacctctaacaatcactgcagtggcggaggaaaagaaatcctaagaattggggcaagatgcagcacaattcatctctggctcttgg

SEQ ID NO: 291289 - DNA, 122 bp, Homo sapiens
tcctccggccggctgatccagaacttaggtcgccgggacgtgtggcttctgcttctcagacgctcggactcgcgccgggaagggtttcgcctcccctggtccccgctttttttttttttttc

SEQ ID NO: 291290 - DNA, 122 bp, Homo sapiens
tttacagtgcacttcagaaggagatcacaacgcgttatcaactggatccaaaatttatcacgagtattttggtatgattttttaataagtgagctttagcagacagttggtgagacagtatg

SEQ ID NO: 291291 - DNA, 122 bp, Homo sapiens
taacttctttttgtattcctagtcaagagagcactaaatgttctgaaactgtttcttgggcgttgcttttctctcctcagctgcacttggtgctaagtcaggagccatccctggtgctgggc

SEQ ID NO: 291292 - DNA, 122 bp, Homo sapiens
agcctatgcatcatatcccatctatactgcaggatgggctgcctaacgcggaaccgcctacgatttcctctaggcacacagtattcaccagcatccaaagggagggccaagggctccccttt

SEQ ID NO: 291293 - DNA, 122 bp, Homo sapiens
cccgcgcgcccgccgagccttcggtgactgacgggaggtgggaatgtgggcggagcctcacgccggagctgtgattggaacaaccaacacctcccaatctctcccaagagagggagacagca

SEQ ID NO: 291294 - DNA, 122 bp, Homo sapiens
gcgcgtgccggccatggactccggaggcggcgcagggcctgaaggcagctgctccagcagcgatggtggaacggaagtggaatccagggccggttgggggtggggtgtgcctggcacatgcg

SEQ ID NO: 291295 - DNA, 122 bp, Homo sapiens
aggttgctatgggctccctaggccctagctgcaaccgggacccagagttgggctgcagggcggaaatggtgctgcaggggacctgggagcagctccagggcctggttcccaggactcacagc

SEQ ID NO: 291296 - DNA, 122 bp, Homo sapiens
ccccgagggcagctcctcaccccacagtcctcgccagtgtagccggggttacacacgcagcgcccattctcacagcgccccctctgactgcaaccgcgagggcagctcctcatgccacagtc

SEQ ID NO: 291297 - DNA, 122 bp, Homo sapiens
cctcggcggcggggacacggtggactcgtccatctttcggaagctaaggagcagcaaacccgagggggaggctgggcgttccccgggggaggccgacgagggccggagccccccggaagcca

SEQ ID NO: 291298 - DNA, 122 bp, Homo sapiens
tctctaaaagatgcttaaaattaagcaatagaaaaatttagataacttacattgttgttgcgggtttctacagcagggaattttctgactatgaatttcacagcagattccaggtttttgtc

SEQ ID NO: 291299 - DNA, 122 bp, Homo sapiens
gagaggggctgggccaggacaggggactgggcagggctgcccgaaagtcggggccggggccggggccggggccggggcggggccgcgccgggggcggaccccgggcccggcgcgttcacctt

SEQ ID NO: 291300 - DNA, 122 bp, Homo sapiens
ccagctgcgccgtgtcgctctgctggcccgtgcggtcccgcagcagggccaccgcctgctcggtctgcaccgcctgcgcctgcagcccccacagcgcgccctccagccgctgcactgcgccc

SEQ ID NO: 291301 - DNA, 122 bp, Homo sapiens
cgggaacatatgctgcctgttactcactgaccatctgttcacagagctgatgaagtgtcccggttaccctggcaacgaagcccttgattggcggcggctccacaaacatttgctgctcaggt

SEQ ID NO: 291302 - DNA, 122 bp, Homo sapiens
ctgttgcaaacagacaagggcaagattcctgccgagagaattatgtgcgtatggagcacacggagcactctaagtggcttcctgaaatgtgtggaggaaaatgatcagaaaaagaaagaagc

SEQ ID NO: 291303 - DNA, 122 bp, Homo sapiens
caggggctgggccgtggcaggggccaacaggggggtgtgctcgcctggctcctccgcatgcggccggcgcctctcccgggtgcccaggtggaatagcagtgagaacacggcgccgacaccca

SEQ ID NO: 291304 - DNA, 122 bp, Homo sapiens
ccaagctcaactgaaagactgctgcgagcactctaggttaggctcagagcaaaccaaacacgtgccttctgaagtggttgcagagatgcaaacaggaacctctaaatcaaggttctcatttc

SEQ ID NO: 291305 - DNA, 122 bp, Homo sapiens
gccagttgcaaaaccccaaagcaaggggagccgcggagcagctcagcgctggagagagtccgtgggaggaggcacgctggcggtgaagggcggggacccacaacccagcggccgctcacctg

SEQ ID NO: 291306 - DNA, 122 bp, Homo sapiens
gaggctcctgcgccacctggcccgggcacccgctggccctatcggtcccgggacacccgccgctccttcccagagcccgaggagcctcctgaaggtggaagctatgctggtgagcactgcca

SEQ ID NO: 291307 - DNA, 122 bp, Homo sapiens
caaccgagcccgggagctcggtgtcagaattgcctacaaatccgaccgtccagtcctacccgcggcgcgcatgcaaagtgcaccgcaagttcgcgctctctcggaagtgtctatagcttccg

SEQ ID NO: 291308 - DNA, 122 bp, Homo sapiens
tgactaacggctttctgccccttctctcgccacccctgcccaaggtcgcccctctgccttcgcccctgtcccgggagggtgggaagctttgaccccgccctgcccactcgcgtctccgcagc

SEQ ID NO: 291309 - DNA, 122 bp, Homo sapiens
ccgcggcgcccatgggccagcgagggctcggcgggccctgcattcagagcagctggcaggcgccgcccgccccgggcagtgaggggcttagcacccgggccagcagctgcggaaggtgcgcc

SEQ ID NO: 291310 - DNA, 122 bp, Homo sapiens
ggccgaggagcctgcgacccgggtccctcactgccccagcgcagcccgcggcggccgatgcgccagatgccaccggggctgtttaatgttcggggttatgaccgcagtgtttacaagacgtc

SEQ ID NO: 291311 - DNA, 122 bp, Homo sapiens
gctgctgattgtaaagaagcgcctgacaatgcagacacggctgagtgcatcctgtgtaaccggcgcatgcgcgcccagaggcgccccacacgctcttcaaggttagagcgggaatgcagagg

SEQ ID NO: 291312 - DNA, 122 bp, Homo sapiens
tcttacgtagaagcaaagagatcagttggctggagctggagttcaggcaatagataatggcggtttgggctagagttgacacaatgaccatggtaagaagtggtcatgtttgggatgtgttt

SEQ ID NO: 291313 - DNA, 122 bp, Homo sapiens
cagcgcattctgtattcacacccattagactccatgggctatggaagtcattcccctgtgcgtgtgtgctgagttcaatctcagctccttgcctgggtacagccctcactaccaatgaccat

SEQ ID NO: 291314 - DNA, 122 bp, Homo sapiens
tacctgtaccattgactgttggtgaggtgttgggtacatgttccaagttcactgaacctccgtttactcatctgtaaaataagcacttttactcacacagtctcagagcactgaacactgtg

SEQ ID NO: 291315 - DNA, 122 bp, Homo sapiens
ccgggaacagcaggaggggcgcgggggctcaccttgggggccggggtcaagtcctctttccgctcacccccccagcggcctagtgcagcggaaagggggctgggtgtgcggcaatcagcctc

SEQ ID NO: 291316 - DNA, 122 bp, Homo sapiens
cctccctggcggccagataccaacaagcacgctaaactccgggagatttacagcgggcggcggggcggcggggcggccgccggtgagatatctccaaacagcgcactaaccactttccattt

SEQ ID NO: 291317 - DNA, 122 bp, Homo sapiens
tgaacaggtccaaagttccctgaaacaaattcctggaaaggcaagccaaactccaggtgacgcttcttcaatggaaggacctgcacaatgggactgtcaaagtaaaattacaatggacaaaa

SEQ ID NO: 291318 - DNA, 122 bp, Homo sapiens
tcttattatctttgagcactggtctgaacccacttgcttgccttctcccaggggctgccccgtgcaccccttgttcctagggtggggatggggttggatgcctggggttgcagaggggacta

SEQ ID NO: 291319 - DNA, 122 bp, Homo sapiens
tcagaccaagccgtcagctgaatctttgctggcgctccttaatccctgtaaatatcattgcgtttgcttcaccccttccttctctttatcacatcgttttagggagccaggaccatggactt

SEQ ID NO: 291320 - DNA, 122 bp, Homo sapiens
aggattcaaaatccaaaggtaggtctctagtgagggacagtagggctctagtcattccatcgatgtgatcgctgggcaaagggagggtggaggaccttgggctgacctcagggatggtgcca

SEQ ID NO: 291321 - DNA, 122 bp, Homo sapiens
ccgcgggcagaaaattacgataagtaaagcatagtctcttctcgcctttatggacatccccgcattttttggcggtcttagcctcggccaagtgcaagccgtccgtttcaaggcaggggtgg

SEQ ID NO: 291322 - DNA, 122 bp, Homo sapiens
tttccactgagagccactttccctggcaataaaatctctcgcatttaccatccttcaattcgtttgagcgacctcattcttttctggatgccagacaagagctcaggagccacgagtgtgga

SEQ ID NO: 291323 - DNA, 122 bp, Homo sapiens
cgaccctacagttgtggcctccaatatcatggtaagacagccgggagccccgtgcttctgcggcagcgtagaccacaagggcatttgcagtctgaggaagtgggggaccgggtccggctcgg

SEQ ID NO: 291324 - DNA, 122 bp, Homo sapiens
tcccatgcgtattcaaagccactataattgccctttgccattcttacctgtctcggaaaccgggaccagagccctgagtgaatgtaatcctagcaatagcaaaggagctcggtgtttgagtt

SEQ ID NO: 291325 - DNA, 122 bp, Homo sapiens
atggcaatccgtgtagcagcctgtcgcacagctattcaaaatgatgctgcaggtcaggcgcggtggctcatgcctgtaatcccagcacttggggaggctgaggcgggcagatcacctgaggt

SEQ ID NO: 291326 - DNA, 122 bp, Homo sapiens
ccatgacgcgtgggcggtgggggctctgcagcagatgggggcgcataccttgaagtacaccggttccaccttgtgcttgagggcgtgggctttccccacaagggcgagcacagaggacacct

SEQ ID NO: 291327 - DNA, 122 bp, Homo sapiens
aggaaggaggagctcctggctggggtccgcaggggcgcggctgggagaggcgctggcccacgcatgcttctgtgtcctcacctgccggcggggtggcactaagctcagggtcaggacgcccg

SEQ ID NO: 291328 - DNA, 122 bp, Homo sapiens
tgtttggcacaagcgcacgtgcgctgtgtgcggtcctcaagccccctgcactgtttggcacgagcgtgtgccctgtgtgcggtccccaagccccctgcactgtttggcacgagagtgagcgc

SEQ ID NO: 291329 - DNA, 122 bp, Homo sapiens
tgcgtagctcgctggaatctaaggcactagagggcttgacggccacgtgaggacgaaccacgcaggcgcagccccgcgccccgggcaaggacttccggcaagccccaaaggggagcgtgcac

SEQ ID NO: 291330 - DNA, 122 bp, Homo sapiens
caccttcacagcagtcctgccacacccggaggtctaccctggggatctcgtcacagctgccgtagccgtgagggaactccgccaccctgaacacgtcgctctgcacccgggtgatgttgtcc

SEQ ID NO: 291331 - DNA, 122 bp, Homo sapiens
cccatgaagaagaaacggttatgagtgcattttacagatgaggaaagggagactgagaaacgtttaatgctgtatctgatctcacagttagcaggtggcatgtcagggtttgaacccacatg

SEQ ID NO: 291332 - DNA, 122 bp, Homo sapiens
ctgaagaaaatccaggggaaaatgtaccacagcgaggaaatcgccatctaaagggctgaacgctcaagaacggcgttgggtgggctccgcgttggagttgagtcccgaaggatgttctaaca

SEQ ID NO: 291333 - DNA, 122 bp, Homo sapiens
aaaagtgaaatgcgaaccgcaggggagagagcgaccgtcaggcagacaccttgtgaaccgcggtggagagcacacctaggtggggaggtcaccggcccaacccaccaccctccgggagaatg

SEQ ID NO: 291334 - DNA, 122 bp, Homo sapiens
tctcagaggcatggggtggtaaaaacaaccaccaagttttgggttctcatcaccctaaaacgtgggggaaatttgatagggcaaagcgtttttctccaagcttccagggaaagggggccaaa

SEQ ID NO: 291335 - DNA, 122 bp, Homo sapiens
agccggggctgcgggaggcgcttgcgggccagatagagttcggagtgggcgtgggctcggcgggccccgcactcggagtggctggctggccggccctgccaccccgggcagtgaggggctta

SEQ ID NO: 291336 - DNA, 122 bp, Homo sapiens
gctggggaggctggaagcatattccccaagagcactgccctgggcatcatctccctcctgcgaggagctgagccagtcccctcacagatggataaatgaggctgatgtttggagggagaggc

SEQ ID NO: 291337 - DNA, 122 bp, Homo sapiens
attgacatccaatgggtatgcaaaagagaccctggctgaacttaccatttgagggcagggcgccaatgatctgtggccacccgtagatgccagttataccctactcaggctaggaaaggacc

SEQ ID NO: 291338 - DNA, 122 bp, Homo sapiens
acaccaaaccccattttcttttggacggagctcgccgcagcacgtgaccgcccacatgaccgcctccgccaatctcagcagtcctcacaggtggtctcgctccgcagggcccgcagccgcct

SEQ ID NO: 291339 - DNA, 122 bp, Homo sapiens
agttctggggtacatgcgcaggatgtgcaggtttgtttcataggtaaacgtgtgccatggcggtttgctgcacagatggatccatcccctaggtattaagttcagcacccattagcggttct

SEQ ID NO: 291340 - DNA, 122 bp, Homo sapiens
ggctgggattgaggggtgatcggctcatgctgccttgcctttcgctttgtcttggctgcccgggaccagagttaagtagagagagtaagaggtcagagtttgggtgaagcctggggtgggga

SEQ ID NO: 291341 - DNA, 122 bp, Homo sapiens
tagtgtcaggctcccagagagcaggaaccaggtgaaatataagagcacagtcctcccagccggtggcatggggataatcggacaatacaactctccacccttttttatggtaagatatgaat

SEQ ID NO: 291342 - DNA, 122 bp, Homo sapiens
attctctccgattgtaaaaggcggatggaaacaacacttttgtcagcctttcttctaatccgatcacagctgtaaagaccataaagccaagccccgacgtcaattattcttctccctgttcc

SEQ ID NO: 291343 - DNA, 122 bp, Homo sapiens
ctcttcttttatagagtcagaccaccaactattggacccaagaaaattcaaaaatccccgcgcccttcttggattggtccatctctgtgcctggttgcagattaagagaggctcctgcccat

SEQ ID NO: 291344 - DNA, 122 bp, Homo sapiens
acagaggccaggccagggctggaaggacaggcctgcccatgcaggagaccatctggacaccgggcagggaaggggttgggcctcaggcagggaggggggtggagacgaggagatgccaagtg

SEQ ID NO: 291345 - DNA, 122 bp, Homo sapiens
gaaaagagaagctgcaaaggcaagtgcaatgacagcatgagtaattgaaacctgagagcacggaagtagaaaaatcataaaacaaataaaaatttaatatttatactactcgatggtcatct

SEQ ID NO: 291346 - DNA, 122 bp, Homo sapiens
cgggctaacaaaggccgccgggaggtgggggcttctccagccgctccagcggcgggcgggcggcggaagggttaactgcaccaccaactcccgcgcgcatcccggcccctacccccgccgtc

SEQ ID NO: 291347 - DNA, 122 bp, Homo sapiens
ggaaccggggtccacgggggcgggcgcggagaaactcggggcgagtggaggtgttggagccgcgttctcaggcctaggatggtgggggccgcggagggctggccttggcgggagggaagcgg

SEQ ID NO: 291348 - DNA, 122 bp, Homo sapiens
agggctgggcagaggctgatcccagcaggtccagtgatcctagggaaatccccgcctctccggtgtggaactgagaacagagagaatgtataagtctacttgaatgggagaataatcttcgc

SEQ ID NO: 291349 - DNA, 122 bp, Homo sapiens
aagtcgaccccgaagccgggcctggggtcgtgggaaccccttcggcctcagccatctccccgcggcagccacaacatccggggccgtggcccgacaagtcacaataacagcaactgcgcaga

SEQ ID NO: 291350 - DNA, 122 bp, Homo sapiens
tccctgcccccagccaccacctggtacccgctgcagtgtttccatggcaaccaggattggcgctggaaggaggctggagagaaagagagcgtgaacgggagcatggggtggggggggcgggc

SEQ ID NO: 291351 - DNA, 122 bp, Homo sapiens
cgtccagaagaaccaatcgtagcttgccttttatatccacctatgaacggctgagttggccggggtttgtttgaataaaccaatcaggttagggaggcgggactagagaggcttcaaaaggc

SEQ ID NO: 291352 - DNA, 122 bp, Homo sapiens
tggcatcgagcagggagagtcaccccacaccttggccttctcccaacaagggtctggcagcggccgcaggagcgaggaaagcaggacgctcccgggagcacaggagcccagcgccagcttcg

SEQ ID NO: 291353 - DNA, 122 bp, Homo sapiens
gaaacagagccttcgagcttcaaggatccgagccgagatgttcgccaagggccagccggtcgcgccctataacaccacgcagttcctcatggatgatcacgaccaggaggagccggatctca

SEQ ID NO: 291354 - DNA, 122 bp, Homo sapiens
tgcaaatcaatatctttctgaaaagacagtgtgttgtgaattgccttgacagcatatgcacggttactttggctgcaatgctgctgcagagcccggttactctgccttcgtgggaactccac

SEQ ID NO: 291355 - DNA, 122 bp, Homo sapiens
aacgacagtcacgtagaattacacccgacggtcacatagcattacacccaacgacagtcacgtagcattatacccaacaacgacagtcatgtagaattacacccaacaatgacagtcacgta

SEQ ID NO: 291356 - DNA, 122 bp, Homo sapiens
ccctgagagaggaagagagctgcctctagatcatcacacggccggtggcagatggcagaacggttctaagcatccttttctccccctcgggctgcccctccctgaaaagttcctaaagttca

SEQ ID NO: 291357 - DNA, 122 bp, Homo sapiens
gcaggatgacgatggccgccaggtgggacaggtccccagtcagccggaaaatgttcatggcggcggcggcggtggcggtcggcgcagcgcggcggccccggggctgggcggctcaggaggcg

SEQ ID NO: 291358 - DNA, 122 bp, Homo sapiens
tagaaactctccccacccaacatacctggagtgcaggcgaggtccaggcaaacgggaaagcgacttcttgtacgaatagccatctcaagatgaagccaggctgtggaaaacttaaggccatc

SEQ ID NO: 291359 - DNA, 122 bp, Homo sapiens
agcgggagaaggtggtaataaaggtggtgggcgacatccttgtcactgtttcttccaggacgcgcccagtgtccccagccgtctgctgcttttggatctgggtattttcccaagtgcaccaa

SEQ ID NO: 291360 - DNA, 122 bp, Homo sapiens
ctaagccggtcacggggtagctcttcctctagacacagaagagcttgaaatgacctgatacgacctcagcatgctttatataccgaggttatgcaaatgcgtttcctggactacatgttctg

SEQ ID NO: 291361 - DNA, 122 bp, Homo sapiens
gcccatactgcatccccaaccctccctggcccccttgttacactttacatcctgaggcagcgctggtcccagcccgacccgcttcagttctggcagttttcacatcacatattttgaagcac

SEQ ID NO: 291362 - DNA, 122 bp, Homo sapiens
atcactagaattactttgtgagtaaagcaactgggcactaattgtacatccagatcaatgcgcactgaaatcctaacacaaccacattagttgagatttatttagctgcattatcaaagtta

SEQ ID NO: 291363 - DNA, 122 bp, Homo sapiens
cagctaccagcaggttaggatttggatatacgtgtgtgtgtgtgtgtgtaaatttttttacgactgcgtccctcttgcccaggttggagtatagtggtgccatatggcttattgcatccgca

SEQ ID NO: 291364 - DNA, 122 bp, Homo sapiens
tacatataacttaccaaatatgtgttaatcgactatgttattggtaagactactagtcaacgggaggctattagcagttaagttttagggaagtccaaagttacatgtggattttcagctgc

SEQ ID NO: 291365 - DNA, 122 bp, Homo sapiens
gaggtgttacagctccatgactgctcctgcagatataacaactcagggcagtttttcagtcgtatttatacctacttttaattacatgtagattaaggcagagtttatgcagtaatttctag

SEQ ID NO: 291366 - DNA, 122 bp, Homo sapiens
ggcggcagcgtggagccttcctttgagcgtccccacggctacccccacgtcggtggcttccgccaggggacctcagccagcctcaaactaactattcttgccttctgggacagaacccattc

SEQ ID NO: 291367 - DNA, 122 bp, Homo sapiens
gggaagcgtagttctcgctgcagtcccgctaggcacgccgggatttgtagtcccgctcagcggactaaggcttacagggaaagaggctcttgacttggaacctctgatccacttctacctct

SEQ ID NO: 291368 - DNA, 122 bp, Homo sapiens
gaccccagactcccttgtccctgtgatgttcatgccagggtaatgcaagttgaatcaaatcgtggtgccacaacgccccctggagtagtttgtgcccgaagcggctgtctgactcttccgcg

SEQ ID NO: 291369 - DNA, 122 bp, Homo sapiens
accctggcgaccgccgcaggtttgggcggctccagaccgcgcggccgcccacagcccacccggccaaagcctctgccagacccggtacgtgagtcccggccccagctccccgcacctccctg

SEQ ID NO: 291370 - DNA, 122 bp, Homo sapiens
cgccgcgcgctctccagtgccggctctagagggcgctcctgggctagcgtgtagggctggcggcggcggcgctcgggtcacctctgggagcggagtgggggcggagcgagacggaagcagct

SEQ ID NO: 291371 - DNA, 122 bp, Homo sapiens
gcagaggggaagaggtggatgcgtttccaggcaaggtcgctgcagagaggaagagggggtcgcatttccaggcagcatggctgcagagaggaagaggaggacgtgtttccaggcgacgttgc

SEQ ID NO: 291372 - DNA, 122 bp, Homo sapiens
acttcttgcttccacatttcatttttctttttgtaacttattaaccaggaggctcataaacgcaagtggccttgactctcccagaactgagaggacctgccctggcccgaagccaaaggcat

SEQ ID NO: 291373 - DNA, 122 bp, Homo sapiens
tggagagcagcgtggggtgggttttctttcttattgcgggcgttcagcggatcgtgtctccgagtccgggcgtccggctgcaagcccgtggctggcggcggctgcgggaggcacggcacgag

SEQ ID NO: 291374 - DNA, 122 bp, Homo sapiens
tgtcactgagaagcagaaactgtatgctcgacacacactccctgagtccttagggaattgcgtagtttttttcttttcttttctgggttcatcttaccagcagtcgtgtttgagaatgtgca

SEQ ID NO: 291375 - DNA, 122 bp, Homo sapiens
ctctctcttgatacctcccaccgaagtcaggagcatgggagaggcagatctgctccttcccgggtgccatcctcgctgccctgcacccaggtccctgtcccggtctctggtgaccctactgg

SEQ ID NO: 291376 - DNA, 122 bp, Homo sapiens
ctttttagaggagtccactgggcttggagtcagtggcaataaccaggggcaataaccaggcgtgtcccaggggggagccccgctctgcagccctgtgcgccgtagagagctggacttaggct

SEQ ID NO: 291377 - DNA, 122 bp, Homo sapiens
aacctctccggatccagcagcaagatcccaaagcaaggaaagaaagaaaaagcgagggggcgggggcgctgcagaatccagcgtcctcccaagtcctcctgtgggaagacagcagcgctgct

SEQ ID NO: 291378 - DNA, 122 bp, Homo sapiens
ggagtggagacgctgagggatggaggcaggctcaccagcgagcgtacggctgtgcacatgcgtgcctgcagagttcacagaagccctgtgcgggcaagaatgttgtgactacttgatgacgc

SEQ ID NO: 291379 - DNA, 122 bp, Homo sapiens
ctccaggcagtctcctgctgcacagggcacaaagcatgtgcacagccaggtatcatcctgcgtgactcagaacagccttgagatgtaaggagtgtcatcccagcctcgaacctggggagctt

SEQ ID NO: 291380 - DNA, 122 bp, Homo sapiens
ttccccaccatgttacattccctttgtgtgctatataagcatctgtctttggcggttggccgcgtggcctaatggataaggcgtctgattccggatcagaagattgagggttcgagtccctt

SEQ ID NO: 291381 - DNA, 122 bp, Homo sapiens
ggttgggcacgcgtcttctttgcagctggctctatggttctgtggcttggcccttggtgacgacccccgccatcctccccgcaattccccggctggcccccagtcaaaagcatccttggttt

SEQ ID NO: 291382 - DNA, 122 bp, Homo sapiens
cctctaaaaatagccctttcttcctgtgtccagggctctgccacgggccctgcaggaaaacgtctgtttccaaggcggacggagcatctggaagctccgagcagccacgcgcttatgctcag

SEQ ID NO: 291383 - DNA, 122 bp, Homo sapiens
ttttgcatttaacaagctgcactgtgattatttttgtttgcatttgcctctcccactaaacgacaagcagaagctgcatcttctcgtccttatttccctccttacctgccaggtaagtggta

SEQ ID NO: 291384 - DNA, 122 bp, Homo sapiens
cctggatcaggaaggtcaccggccgatcggcctgatgccctggggtgatggggaccccctcgctgtctccacaggacccttcccctccaggggtgcagtggggtgggtgaggacgggtggga

SEQ ID NO: 291385 - DNA, 122 bp, Homo sapiens
acagcacctaaacaatgaaagtgctcaaaacaaccccaggcggcaagtattcctaatatccgtaatttacagagaggaaaaccgagtctcccgtggataattgtgtctaattcatttgtcgc

SEQ ID NO: 291386 - DNA, 122 bp, Homo sapiens
gagagagcgagagcgcaagagcagggcagagaaggaggcgggctcacagcagggcgcctgcgcacattagacaactttgggcctgtgtgggttagagatgggcctcgctaggccgtggggcg

SEQ ID NO: 291387 - DNA, 122 bp, Homo sapiens
tagagtaactgtctgccttttctcttttccagctgggtttgctcccagtttccgggctaccgaggatttcagtatgtgctggaatgcgatcaccattccggtgactacaaacatttccggga

SEQ ID NO: 291388 - DNA, 122 bp, Homo sapiens
aaaaaaatacacaaacaaataaatgttagaagcaacttgggagttctccatgtgctttgccgttgcgcgctcagaccaactgccgatggacaggagagtttggtatcaccatcttctccacc

SEQ ID NO: 291389 - DNA, 122 bp, Homo sapiens
gctgcccgcgtcctgggctgtttacagctgagttgagtcacgctgcctgcatcctgcacgcggccctgtgctctgcatgtttgaggtaggctgctttctccacacgcatggacatctttcct

SEQ ID NO: 291390 - DNA, 122 bp, Homo sapiens
agacagagcgcttgggggcgaaaggagagagggagggaagggtgggtaaggaggagagagcggtctgctgcaaaccccaggaggagagcttggagcccaagccagaactcgagccctagccg

SEQ ID NO: 291391 - DNA, 122 bp, Homo sapiens
ggcagcccccagtcgtcgtcacacacggtgccccacaggccactgtgcaggatctccactcggccctgacacaggttcgcgccccctaccaggcgtacgctgccctcacctggggatggggg

SEQ ID NO: 291392 - DNA, 122 bp, Homo sapiens
ttgaggtaggaatcaatgtcctccttttacataaactaagttttagactaaacttgtccacggttccacaactagcaaaaacagtctgcctatttccaaggacggtgctatttactgctata

SEQ ID NO: 291393 - DNA, 122 bp, Homo sapiens
cgtcttacgcttgtgttgctcgggcagctccccgtgtgcgcgcccatccggcgtgaacggcgtgcagaacaggaatgtgcgaagcccatagttgcggtcaaagtaggtcacccggtccttga

SEQ ID NO: 291394 - DNA, 122 bp, Homo sapiens
cccccgccccccacccctcaccgcccttctccccgcctctggctcggccccgccccctcccgccctccagcccaccctccggtccagcccgcgccgccggcacctgtttccgggcgggcctc

SEQ ID NO: 291395 - DNA, 122 bp, Homo sapiens
tacaagcaatgtgaggtcggggatatttttgggctctgtctctttctaccctgcgttaagcggaaaaaaaaaattctgacagtgtttttcttcctctttcataccaccaccaccacaatcat

SEQ ID NO: 291396 - DNA, 122 bp, Homo sapiens
ctcccgtttagggggagtcatgacaattagtccaccatcaccaggctgaagtcaagataacgccaatcatacctttggacaggtgattacccaagatagccaccagaacaagacacacagga

SEQ ID NO: 291397 - DNA, 122 bp, Homo sapiens
aaacctcattttatttatacatatatataaaaaaaaaaacttgacctcaggggaggtgagcgatctagagaagcataactgatgtcccaccacagacctcaggctgctgggggcagcgtctg

SEQ ID NO: 291398 - DNA, 122 bp, Homo sapiens
tcctaactgaactgaaagccttcattctaaccattagtttggtcaggaacatttcagggacgccagggtggctgttttattttgcacttcctttactgccctcccagcagcctacctagcag

SEQ ID NO: 291399 - DNA, 122 bp, Homo sapiens
gtcgcggcggcggcggccgcgccggggcggcgggcttgtggggggagggtgggggcggcgcggggctgcttttcctgcaacttgtttacgcctgccttattctggggaggaaaagaggggtc

SEQ ID NO: 291400 - DNA, 122 bp, Homo sapiens
aatggacgaattgagaaatcaacagcatttggttaagtctggcgactgctggaaatccggcggctccccaggccacacgggaccaccgagcagggcagggcgggccagccgcagggcactgg

SEQ ID NO: 291401 - DNA, 122 bp, Homo sapiens
gttgggcaggagcagaggcaggtgtctaagccggaccattggctcccttccgcgccagcccggtgtgctatgagaaccttgttgccgcctagctgaagctgggaaaagcagccgccgcactt

SEQ ID NO: 291402 - DNA, 122 bp, Homo sapiens
tgaatgcaaacatcagaacgaaatttctgagaatgctgctgtccactttttatatgaatgcgcgctttcaacgaaatcctcaaagcaatccaaatatccacttgcagattccacaaaaagag

SEQ ID NO: 291403 - DNA, 122 bp, Homo sapiens
aggggccagggtgcatgaccggcacctgcgcctgagtgccctcaccaggaggggctttgtcgttgggcatcagaacatgccctgtgagcctgagcatgttcttaggctcaacggcatcgacc

SEQ ID NO: 291404 - DNA, 122 bp, Homo sapiens
cggacgacgagaccttcatcaaaaacatcatcatccaggactgtatgtggagcggcttctcggccgccgccaagctcgtctcagagaagctggcctcctaccaggctgcgcgcaaagacagc

SEQ ID NO: 291405 - DNA, 122 bp, Homo sapiens
caggcaaagccagggacactgtcctcaggctccttacgagaacgacagaggcatctccagcgcgtcaccgagccctaaatagagtagcccagccacggcaccccccaccaagacttcttgga

SEQ ID NO: 291406 - DNA, 122 bp, Homo sapiens
gcatgtcagcagtgatctggaggagattccggggcgcatgagtatgtgaactctggagcacgttactgtcccgggctggcactctgtggcaggtgtgtgcactcattctgctgttactggag

SEQ ID NO: 291407 - DNA, 122 bp, Homo sapiens
agaatcaggtttcaaaacatgacagagccgagctgcaccagcaccccacgttgccgcggccgctaagggaaccataggggcagggtgaatgattaactctgtcatatgaaacctcgacgttc

SEQ ID NO: 291408 - DNA, 122 bp, Homo sapiens
agctgcagcggcgtgaggccatcgttgttgcgagtggtctccagctcccagttgccactccgcagtaggatcatgtcgtacatgcgcttcacaaagtcattctgcgtcttgaagtcctcggc

SEQ ID NO: 291409 - DNA, 122 bp, Homo sapiens
gctgctggggttctaactaagggcccggcggttaagacccaacgccggcggatgagacggcgcaggctctaagcctccatctaacaggctagggagtgaacgcaaccctgagtctcccgctt

SEQ ID NO: 291410 - DNA, 122 bp, Homo sapiens
accgccgccgacaagagcaccggtaaggaaaacaaaatcaccatcaccaatgacaaaggtcgtctgagcaaggacgacattgaccggatggtgcaggaggcggagcggtacaaatcggaaga

SEQ ID NO: 291411 - DNA, 122 bp, Homo sapiens
agctgtcctctctcccgcaggcctgctgctcttggtgagcctggaggtgttccggcattccgtgagggccctgctgcagagagtcagcccggagcctcccccggccccacgcctcacctacg

SEQ ID NO: 291412 - DNA, 122 bp, Homo sapiens
tgcacacgttcagtgctactggttcccaagggctaaaaccggagcccctaggggcctggacgcaacaaaccaaagcccagcggccggccactgaaaatgggggcaggggccgctgcggagcg

SEQ ID NO: 291413 - DNA, 122 bp, Homo sapiens
caagacccggggagacccacctccaggaggccctgtcgtcaggacaacaggggggtggggcgtggcctggggccgaccaaactcctgagcgcagaagggatccgctagccccgcctctcctg

SEQ ID NO: 291414 - DNA, 122 bp, Homo sapiens
gaaaggagaaagtccgaagtaagcatccaggtcccaaagcacagctcagtaaccccccgccgcaagcagtattaatgacacttaagcccagttacgtggaacctgagccacccggcctcaaa

SEQ ID NO: 291415 - DNA, 122 bp, Homo sapiens
gcggcaaggcctctccgcgagggggcggaggtccggaggagaggggaggtgaggagaacgcggaggccggcacaactcggaggaagtagtctttcccagcagctggtacgggggcagccagg

SEQ ID NO: 291416 - DNA, 122 bp, Homo sapiens
gcaaaaccaagggaagataatttcagaaagaaatagacatggccagagatgagaatttttcggtaagactgaagaccatactctttgggttgctaatcaaggttgtatatgatcttaatgaa

SEQ ID NO: 291417 - DNA, 122 bp, Homo sapiens
gggtgagaagcataagtggcaccggaagtggaattaatccgcctacctctcctgcgcctgcgaaacagaaaagacaaggcgcctgtcgggcggggtgtggcttcgggtggcggagaacgctg

SEQ ID NO: 291418 - DNA, 122 bp, Homo sapiens
tctcggccaattctcaccctctcaggacaaaaaagtgagatgagcccgtcctttcacctgcgagtccaagcccttggcagaggcctgaaaagtccgaaaactccgagttcgggcgctgaggt

SEQ ID NO: 291419 - DNA, 122 bp, Homo sapiens
accaagttgaacggagatgtgttcccatagtaagagtgaggcccctgcatttgctgccctcggttttcccaactaacaccagggcctcccccctgtaccccattcatatgcctcagaagctg

SEQ ID NO: 291420 - DNA, 122 bp, Homo sapiens
aacactaactgctgcgggaagatcccagcttctggctaaagctggggcggtaggagctgccggccagctcgccatctagtccccagagcccgggctttagggcgcccggatgcaaaccagtt

SEQ ID NO: 291421 - DNA, 122 bp, Homo sapiens
ggaagcagggagtccatttcagggacaggaattcccggatgaaaagtgaaaggagagggacggggcccaagctgagggtttcttcctggtttctcggacagctcctggaccaagactcaggg

SEQ ID NO: 291422 - DNA, 122 bp, Homo sapiens
gcgactcccggaaccagccattggcgccagcgcggggagctgggggtgcagagctgcgggcgcggcgggccacgcaggcggcccccacccccggcctggcctggtctggtctggtctgcgct

SEQ ID NO: 291423 - DNA, 122 bp, Homo sapiens
atccagacgggagcgggagacagctccggcccagcaggcgggaaggggcctggggaagcgcggcccagcactgctggggcagtttcccgtgcgccggccctcagggcaaagggtcccgccat

SEQ ID NO: 291424 - DNA, 122 bp, Homo sapiens
gcaggaccctgccccgtccgcttcaacacccttttcccgagctccttcggacccaggactcggcctggacacatcccagtcaggtggcctctgaagcccggtggggcttccaccccctaaga

SEQ ID NO: 291425 - DNA, 122 bp, Homo sapiens
cccaggcgtctgccttaatagcatcacctgtgccgtctgcgtttctagcgtcacctgtgccgtctgcgtttctagcgtcacctgtgccgtctgccttcctagcatgacctgtgccgtctgcc

SEQ ID NO: 291426 - DNA, 122 bp, Homo sapiens
gccttgtcagcacagacacctctggggtccccagaagacctgtggcaaagttctctaaaccgaacctggagaggggaaggttttcaagcaggaaccacataaattcacctaaaactcacgcc

SEQ ID NO: 291427 - DNA, 122 bp, Homo sapiens
cttcctgagggaagccattcttgtgacacatttatagaacgcctactgtgtgccaggccccgctgctccagggccctggggtggggcggggcgggggtgggtccctgccctggtggtggtgc

SEQ ID NO: 291428 - DNA, 122 bp, Homo sapiens
gatgcctagtaggaccactgcaggaaaaaaaaaaaagttaatgagactgttgctaggagacgggagagccaaaagctcatagtcttgtaggggttcctctggaaatcaaggcaacttaagtg

SEQ ID NO: 291429 - DNA, 122 bp, Homo sapiens
gcaaaacttacagcttaacccattttcaagcaaaacagttctcagaaatgtcatgattgccggggtgaaggcaagagatgaattgcattattttatatattttttattaatatttgcacatg

SEQ ID NO: 291430 - DNA, 122 bp, Homo sapiens
taagaagccgtcgccagagctattattagcacagccatcccttggaaatttcgcagaatacgcctgaatgtacgaacagttactctgctaacagggtactggagaaaaaggcaccaagtcgc

SEQ ID NO: 291431 - DNA, 122 bp, Homo sapiens
ttttaactgtctctgcttaaaacaaggtgtttttgagtcagcagccctttgggtgggtctcgtcctcttgggcacccgacacccaccccacggcgggagccccaggtggccccggaggccac

SEQ ID NO: 291432 - DNA, 122 bp, Homo sapiens
aaggtcagggccagtggtggccctcggagttttgaacccagaacagacagccgccgagaccggcaggacactgaggaggcgtcgaggggctgagtgagggttggacctggtccccgtgcttg

SEQ ID NO: 291433 - DNA, 122 bp, Homo sapiens
cctcccttccgcgcagcctcggccactcttccagagcgccccggtgcgtactgcggcgggcgcagggaatcgaattaaacgtctctgggcggttattgtctttctctaattgctccaacaat

SEQ ID NO: 291434 - DNA, 122 bp, Homo sapiens
cggtcggctctgggactcgtctggcgtccctcaggtgagcgacggtgttggtctgttgggcgcccggcccaagccaagccgtagcgtccgccctcggctcagtccgcgcgctgtggctgaca

SEQ ID NO: 291435 - DNA, 122 bp, Homo sapiens
ttcactttcattgaacaaggctgcagacatcctcaccccatgggaaggtggctgcctggacggcagtccacccagcctaacccacatgctgacagcagtgtcttccatctcaaacatttctg

SEQ ID NO: 291436 - DNA, 122 bp, Homo sapiens
gggtgggaattggtttaccagaacagtgtctgttccagtctaaatttcaggtctccccttcgaagtgtgctttagtgagggtctctttacatactcttgattttctcccgtccctttctcag

SEQ ID NO: 291437 - DNA, 122 bp, Homo sapiens
cccgcatagggcgtcacgtacgtttaacgtcggcccggcgcgcgcgtccgggaggttgcccgtaggccgctaactggtggttcccagtccccgccgactcggcctctttcttctgcggccac

SEQ ID NO: 291438 - DNA, 122 bp, Homo sapiens
ggctcccgtggtcagggccacccaggtggagcccaggatcgctagtccccaaagccactgcgctaatttcgtcatggtcactgcgagagaaggaagcaatgctcccctgaggagcagaaagg

SEQ ID NO: 291439 - DNA, 122 bp, Homo sapiens
ggtgggactgtcaggtggggatgcgcccgcccagccagaaggtcagtgtcctgcccagtgcggcctccactggacgtgcccctctctacccagggcggcctgtgagccccgactagcctcac

SEQ ID NO: 291440 - DNA, 122 bp, Homo sapiens
agcgggcctggacgggggattctacatcttgtgcattgtcccgcaggtacatccgcccgtcgatgctgcagcacctgttgcgccgcctggtgttcgacgtgcccatcctcaacgagttcgcc

SEQ ID NO: 291441 - DNA, 122 bp, Homo sapiens
gtcgttccctggactgaatgggcaggacggcccagacgccacgaggccacagacagaagccgagggaggaggggctgagccaaggccaagccaaggccgcccgggcccgagctccggcaccg

SEQ ID NO: 291442 - DNA, 122 bp, Homo sapiens
gttacggagcgccattaaggacaagcccggccacgtgattctcctgggcgtttcctggtgcgaacctaaggaagaggtctaagaagagaaagtttgattggactaattcgaggggagacgtt

SEQ ID NO: 291443 - DNA, 122 bp, Homo sapiens
ctggaatgtcagggatgctattaaggaagcaataagaagaaagggtcactgggtgtgtggcgaaggagaagtggaaagggcgccaagattttaggcctcagtgactggtatggagggttctc

SEQ ID NO: 291444 - DNA, 122 bp, Homo sapiens
cctgagtacatgcctttttcacatcctcagatgaaatccagcacttctgctgcacggcagcgtgacagttgacggcagggggcgctcatgcggtcgttggagtgagagttcgctgcctactt

SEQ ID NO: 291445 - DNA, 122 bp, Homo sapiens
ccatatcggggtgactgatgttgacgtacaccctctcgcccctccggagctgcaccaggccgccgaaccccacgctcgtgtaccagagaggcccgtacccttgtctcctggccgggtccagc

SEQ ID NO: 291446 - DNA, 122 bp, Homo sapiens
ggcgcctgggcctgaccgggtccccggggctgagcgccgggctccgcgccgcccctcccgcgcccctgccaagcgggcgcctatcctctccgagcaagatggcaaccccggcggcggtcaac

SEQ ID NO: 291447 - DNA, 122 bp, Homo sapiens
gaaggctgctcctgccccgagggaggcagcgggagggtcctgagtcactgggctgtagggcgccgggaagggaccccgcgtcggggctgcgaagggagacccgcctcgcccggtatgcaggg

SEQ ID NO: 291448 - DNA, 122 bp, Homo sapiens
ggctaaattgatcaggttctcccatgtacttttccttttaaaatttccagtggctcattccgttatcagtaatgagtaattgattagtgccaactgccgaaggacttagtattctcatttag

SEQ ID NO: 291449 - DNA, 122 bp, Homo sapiens
gccgccctctgcggctcctttggggagcactgaccagcactcagggatggatccgtgcagcgagttgtcgagaggagagagtggaggaggactccgcagtatcccggctgatgcatattgag

SEQ ID NO: 291450 - DNA, 122 bp, Homo sapiens
gcacttgttgcttctgcgccccgcctgcgtccccgtcaaacccacccttcgcggccccctcgcctctccacacgctcgcactcaggccccgaccctgccccgcgaccccctcacccacgcca

SEQ ID NO: 291451 - DNA, 122 bp, Homo sapiens
ccacacgcacaagcgcgttcgcacgattggtgcaggcggacgcgcgaggtcccgcgcctgcgcacacccccgaggctggcacgcacaccggtctcctaggggactggcgcctggccctgctt

SEQ ID NO: 291452 - DNA, 122 bp, Homo sapiens
cagaggatactaagcaatgaagatggaccctgagctctggctggagcgagacaaaggccccgccagctccaggacaccgccccctctaccttggctgcgcacctgattggacagttcccact

SEQ ID NO: 291453 - DNA, 122 bp, Homo sapiens
cccttggtggtgtttttaaaaatcttctattttgtagatgtaaatatatgccataattagcgggaagtaacttgaagagccacggctgagtttattcctattattcttatttaaaacagctg

SEQ ID NO: 291454 - DNA, 122 bp, Homo sapiens
gcctgcagccagcacatgcccggcgcacacgggaacacgccgtggcgccgagaccacctgcgttctgcaaaactttggaggaataaacgtgtcactagtcctcacgtggggcatatgttact

SEQ ID NO: 291455 - DNA, 122 bp, Homo sapiens
ccgctgcctagccccagcctggcagctgggctcctgactagagccagcaatcctggtcagcggttctcaagccaggcttgagcggcagaggcggtgggctgacctcctctcagctacttttg

SEQ ID NO: 291456 - DNA, 122 bp, Homo sapiens
tgccttgcgaggacgtcatctcaacatgtttgtggctcaggctgtttacggaggacttcccgtggaccaggagctgtgctgactcaggaaggctacgagggcagggtgccaggtgtgactgg

SEQ ID NO: 291457 - DNA, 122 bp, Homo sapiens
tcttggtcacacatttatggagtttctgaagggcagtggagattactgccaggcacagcacgacctctatgcagacaagtgaactgtagaaactgattactgctccaccaagaagcccccat

SEQ ID NO: 291458 - DNA, 122 bp, Homo sapiens
ggtggggtgatcccagggaaatacttccgggacatcctcccgttccgcgcgctctagttccgaaagtaccttttttagaccggactggggctcagaggggtttccatgactacgggactcct

SEQ ID NO: 291459 - DNA, 122 bp, Homo sapiens
gagacaggcattaaccaacatcatcaacaaactcaaagcagtcaatgctaggaaggatcccgggggcctactggggtcagggataaaggcataaattcagaacagcatcctctcagccacct

SEQ ID NO: 291460 - DNA, 122 bp, Homo sapiens
cccaggcggggacacgcagcccaccaccacagaccaacacgcaacgcacctcgacacagtcggcaagaaaggccaggacattcagactgggccccaaggccatgagcaacacccctccccca

SEQ ID NO: 291461 - DNA, 122 bp, Homo sapiens
gagtgcagccctcctagccaagcttgggtttccccttatccccgcctccttctctaagctcgacccactttagggcgggaccacccacttcagccaattctggaagccgaaccctggcggtt

SEQ ID NO: 291462 - DNA, 122 bp, Homo sapiens
gcagtgacaactcgctgaggcccagtttacgttggcgaagctttgttctttcactctttgcgataaatcttgttgttgttcaccgtttgggtccgcgctgcctttatgagccgtaacactca

SEQ ID NO: 291463 - DNA, 122 bp, Homo sapiens
caacccacacctctcggaaccctaagggcgccgggcaacacttgactgtgatcagcacgacgtcagcaacagctggcgtttccactgccacattttgttttcacacactcatctccaaaacg

SEQ ID NO: 291464 - DNA, 122 bp, Homo sapiens
gacctcaaaaaatggaacaaactagcagacatgctgcgcatccccagaactgcccaggaccggctggccaagctgcaggaggcctactgccagtacctactctcctacgactccctgtcccc

SEQ ID NO: 291465 - DNA, 122 bp, Homo sapiens
agaacctctactagtcaacggctggtgaaactggacaatgctgtgaaataaagcatgtttcgcctgatggagaagatgctgtagcaggaaatctcatgagatctgaccatcctcttgcagag

SEQ ID NO: 291466 - DNA, 122 bp, Homo sapiens
gtgcaagcgacgccccggcatagcggcaccattggacacttcctgcgctgcttcaatcgccgggattgcctctttgaccttgaactagtattcatttggcctcctgttgggtctccaatgct

SEQ ID NO: 291467 - DNA, 122 bp, Homo sapiens
ggcgggaggtctggctgaggcagcgaggggtccctgcgcgcgggcgctgcaggagtcacgcgtgtgacatccaaccaggagccgtgccctgagcaggccaggaaggaggagacagggccgct

SEQ ID NO: 291468 - DNA, 122 bp, Homo sapiens
agctagcccaagccaataaagggctgtgatgagtggctgcgcctgtgctctgcttgtgcacggactctgggactctcaccctgcggagcgtttccctgggggtctgcccacttcctgggagg

SEQ ID NO: 291469 - DNA, 122 bp, Homo sapiens
cacagtcagggcactggttcctgtcattgggtgcagtacaaagaaggaccccaggacatgcggtgcagacgggagcacagagagggtgggtgctactggggtgcacaggcagcttgaggagg

SEQ ID NO: 291470 - DNA, 122 bp, Homo sapiens
ccttcccccccccgtttccaagtcaccagcttgaggatgcccaaggctcaaaggctcctccgagtggcaccccgcatcgggctgcagaggtcggagaggggaggggatggtgggtgcaaagg

SEQ ID NO: 291471 - DNA, 122 bp, Homo sapiens
gtttgacataatttaacttgtctgtttttccatcttccttcctgctcaccccaccatcaccgtggccccatctagttgaggcacacagctctgggcttaaaggaaccaaggggcatgtctca

SEQ ID NO: 291472 - DNA, 122 bp, Homo sapiens
cacagcagcccgcatggagtaatcgccaaatggcgacagaccctctcccagtgcggccaccgcccaggctttcggggaatgtctcccaagtgctccgcgctagctcgtcccccatctcgggg

SEQ ID NO: 291473 - DNA, 122 bp, Homo sapiens
ttgttcagcagcgagaggactcagtcaaggtcatgtgtgaactcttggagcctgcgtggccgtcgcggcaatgacctggtgagaaggtgatgcctcagcatgcccaaagctgcatggcagga

SEQ ID NO: 291474 - DNA, 122 bp, Homo sapiens
ctgatggggctcttggtgggttctcacatcacagggcactgcagctgagacttgcttgaacggcccccgttttctacccgcaaattctcaattgctagataaacaacaataacaacacttta

SEQ ID NO: 291475 - DNA, 122 bp, Homo sapiens
agcacttccggcgtcgctggcaacgggggctgaaggggcggggcaaacgccgcactagaacgattgatcttagagattctggttcctagagaggccagagatgtttgaagtatatcgcccca

SEQ ID NO: 291476 - DNA, 122 bp, Homo sapiens
cttacagtgtgacttgtggtggggcccagcctcaggcggacctgcaggcacgtgccgcaccggatccccagagtccgagcccgccccaccccccacgccctccgtggggctggtgcggcctc

SEQ ID NO: 291477 - DNA, 122 bp, Homo sapiens
actactggccagatccagaagatctagtgaaggacaataagcccttggggacagcagacccgaccatctgggtctggtcagcagctaagggaaaaaagaggactataaagccctaggcaaca

SEQ ID NO: 291478 - DNA, 122 bp, Homo sapiens
atgcagggggcgggaggctcggctagcaagggcggcgcggggcgcggcgggggcggcgcgcgctcgttggaacagcccaggcggctgcagccccgcccctcgcgccccctccttgcccgcca

SEQ ID NO: 291479 - DNA, 122 bp, Homo sapiens
aaaggggatttctgcgcacggcacctggttttccgagctgtgctcacttttcctgagagccgaggtgggcaatgtatccgacctgctcccaggccccaaaagatgctagtgtgcccatgcac

SEQ ID NO: 291480 - DNA, 122 bp, Homo sapiens
caactccgctgttctgcttcctcggtggaagccacacgaaccccactggtacagcggcagcgatagaccccaggcggctgaaagcttatttggagcgtcccggagcatgtcgattgtgctgt

SEQ ID NO: 291481 - DNA, 122 bp, Homo sapiens
cctgccgcccacacctcgtaatcaggagtcacgttgagaaacagctggtttccctggatccgaaatgcaaagggggtggacaaggctccgagggtcacctcctggccctccgggacgtggat

SEQ ID NO: 291482 - DNA, 122 bp, Homo sapiens
gatgtgctctactgtttgggctggggatattagctcaacaaactctggccacaaggatcacgcggatattcttggggatgcctagcgaaatgcgctgtacctaggcctcgaactctcgcctg

SEQ ID NO: 291483 - DNA, 122 bp, Homo sapiens
ctgtggctgcctggcgcgtgggctgatgggggagagggacccagcccattggcagaggcacgacagaggtccccagaaggaggaatggccaagagagtcgctctttgtgggaagaattataa

SEQ ID NO: 291484 - DNA, 122 bp, Homo sapiens
gggagcacaatccgggccgaggctcctggtaagggagcagagcgggaagctgatcccccacggattcttagggggccgacttcccctgtgttgaagattcatcaaagactgattcgagtctg

SEQ ID NO: 291485 - DNA, 122 bp, Homo sapiens
atggtccgccccgactgcgggtttctagccctcgcgtggcgtggggacaattaggcgccacgccctgtcgcttcactgcgcgacgctcgcgaggccggggacgccactcccagaccgggcgg

SEQ ID NO: 291486 - DNA, 122 bp, Homo sapiens
ggaacccctgaaagggtgttggctccggataaacggacaccactgaaagggtgtcagctccggataaacgggaacccctgaaagggtgtcgcctctggataaacgggaacccttgaaagggt

SEQ ID NO: 291487 - DNA, 122 bp, Homo sapiens
ttgggaccaaaggcaccaccacgcctggcaaatttttgtagatatgggtggggtgggtctcgctatgttgtccggactggtctcttaactccaggcctcaagcgatcctcccgcctcggact

SEQ ID NO: 291488 - DNA, 122 bp, Homo sapiens
ttaaaccaaaacagttaattacctcctctaacccggagaagtggggaaacataaatatagcgagttaagagggagagagcagctttgctcctgactgtactttgtaccagtcggttggggaa

SEQ ID NO: 291489 - DNA, 122 bp, Homo sapiens
taatgtgtgatgttctttcatgcttttctctttgttcatgtctttctcatctgtaccccacgtcccctccagtggcatgcactgtccagagaagagcaagcgaaatactacgagctggcccg

SEQ ID NO: 291490 - DNA, 122 bp, Homo sapiens
ctattcccaaacaaggttcccttcctaggtattgggtgttaggacttcaacgtatcctttcggaggacacagcttaacccctaacaggaaacaactaatataaaccctctctttatagtttc

SEQ ID NO: 291491 - DNA, 122 bp, Homo sapiens
ggtggagttccaggagctgtggtgtgctaaggtcaagagcaactgggccaggcgcagtggcgcacccctgtaatcccagcactttgggaggccgaggcgggcagatcacgaggtcaggagat

SEQ ID NO: 291492 - DNA, 122 bp, Homo sapiens
tggggtaggggtgagggccccagtgggcactgctgcttccaggcaggtccagtgaggaggcgtttggcccgggaaagggcaggcccaatcaggcctgagcagagccgtcagcacaacagagg

SEQ ID NO: 291493 - DNA, 122 bp, Homo sapiens
ccccacctccttcctccaacagccgctcgctccgtcactccgcttcccacagtccccgcgcggccgcccgaccccgcagccaatcgcgcagccgcttactcaaaccgccgcgcaggcgctgc

SEQ ID NO: 291494 - DNA, 122 bp, Homo sapiens
ccgctggaggcgtggtccggtcagcaggttgggattagtgtgtcataaggaacttctcaccgcccacagtttccgttaaatcgggctcacaggaggccctcagtggggcaaaggaagaccca

SEQ ID NO: 291495 - DNA, 122 bp, Homo sapiens
cagttggttacataggaacaaacaacgcaaacatattgatttgttccttcttgctgaaaacgttaggcagagatatgcttttcgccatgactcatgcaacatttttatacttatgtaaacgc

SEQ ID NO: 291496 - DNA, 122 bp, Homo sapiens
tgtgttcctgagggtaggcctctaaaatggccgctttgaggggtggccgtcttttatggccgaagacgtagggatgaaataagccccagtctcccgtagcactcccaggcttattaggatga

SEQ ID NO: 291497 - DNA, 122 bp, Homo sapiens
aatctaacgtttggccgggaatggtccctggcattccaactcatgtgtgatggatttgggcggtcagaggctcacggaacgctttgagggctgaaatccaccgataaaaaggcgggggattc

SEQ ID NO: 291498 - DNA, 122 bp, Homo sapiens
ggcgtacgcaaagccgctggccttggggcgtctgtcgcagggtacctcgaacataacctacgtgctcatcagctagagatggaccagctcggtaccacacccccctgcaaccacgccgcggg

SEQ ID NO: 291499 - DNA, 122 bp, Homo sapiens
ccatccaccacctgcagcttgagatgttaactattagagctccattcttttggttcaaaacgttgatacttacttagatgttccctgagaggagtgtttatttctgagtaaggggctttgtt

SEQ ID NO: 291500 - DNA, 122 bp, Homo sapiens
tctttatggcgcttccccctctgaaatactctttgcggggagttttgtggctctatcactcgcttcttccctggctccccagatgcctggagagcggggacctacttggtccccaacgtcca

SEQ ID NO: 291501 - DNA, 122 bp, Homo sapiens
gaacttgtgaccttctggaaattgtcaaaatctctacaggtgtccagagtcatctagatccgtattgcaagccactgactgggttccaccattattaaagcaaatgcaaaatatgccatgcc

SEQ ID NO: 291502 - DNA, 122 bp, Homo sapiens
aaggtctccgcagccttaaccggctgctatgctggggatgtttgatgcccatctgggccccggctttcttattctcagaggcccttcccacatctttaggcaagtccattaaatcctccgcg

SEQ ID NO: 291503 - DNA, 122 bp, Homo sapiens
ggtgcttggcttgcaaggggttaacagtattgctcatgaacttggcctgtctgtctggctcgtgatgaatggtgagacccgctgacaagttcagcctagggacctcccctactgtggaagtg

SEQ ID NO: 291504 - DNA, 122 bp, Homo sapiens
tatccgcagaaattcctttcacatgaaatgtgagtctgttgggttcccccccgagaccagcggtggaagaagaagctggaggtggctgatgagacacttcatgctggaccaagaaacgggga

SEQ ID NO: 291505 - DNA, 122 bp, Homo sapiens
atcaggaaaattaagaaaatgatggtgccatcttgaccagacttctgcacagtaatttaacgctatcctagggagacttggttgaaggcacagttctgggatcagggtctaaatgtgcagtt

SEQ ID NO: 291506 - DNA, 122 bp, Homo sapiens
ctaaaaagcagttacacttgctaaagtcacagtgggaggccttgagaagagccagcaatccgtttcgaagtcgtgactctcacctctaatggagcaatatgttctagatgaacaggctggga

SEQ ID NO: 291507 - DNA, 122 bp, Homo sapiens
tccacccggacaaggaccctttctgccccatcttgcgggtaggggacgtggtcaagtttgcggggcaggattttgccaaactggcgcgcacggtgaggacctagccattcttccgcgacccc

SEQ ID NO: 291508 - DNA, 122 bp, Homo sapiens
ttcttttccctccagagccggggtttgtaaaccgaggccagagtgtccccgtgggccgagcgcacttttttcttgtccgggtgcgctcagtcactggtgcctgagaggaaacagtggaggca

SEQ ID NO: 291509 - DNA, 122 bp, Homo sapiens
gtgctgaccacctccctcagaaatgacttcagcaacaatcaccccgagtgtctgactcaccggctgctctggttcttccctgccagccgcagtggcacagcaaggcagcaaatctttggagc

SEQ ID NO: 291510 - DNA, 122 bp, Homo sapiens
ctaattctctttggcactagccaaaactaaagtgaatgtgcttgaacgtgctcttcaaaacgaaaggcagaaggggtcaagccatccgggattcagagctaggtaatccacaagaggaaacc

SEQ ID NO: 291511 - DNA, 122 bp, Homo sapiens
atacacaccctcgagtccggcgttacccgccaccaggctcccgcccggcccccggcccagcgtgctctcaccgcaaagctgcttcggccgctcgtcactgcgtgtccctctcagcgtgagcc

SEQ ID NO: 291512 - DNA, 122 bp, Homo sapiens
ccccgcaggcatcagcaacatggctgtcggggacatgagctccatgctcaccagcctcgccgaggagagcaagttcctgaacatgatgacctagaggcccgagcgcctggtgctgagtgcac

SEQ ID NO: 291513 - DNA, 122 bp, Homo sapiens
acagtcgaggtggaagctcgagaggttctctttatatcatcttatgggtgtagctagagacgggcagaaccggaagggccaactaggcccaaaacctcatgttaaagatgattgctgctttt

SEQ ID NO: 291514 - DNA, 122 bp, Homo sapiens
tgtgcattccaggaaacgcgaacagcaggcgcaagggtccctatgagagaatgtgcttggcgggctcgacgcacatttatttacttgggacacaccctattttggtttctcttctccacttt

SEQ ID NO: 291515 - DNA, 122 bp, Homo sapiens
gggccttgcaccgcaggcctaggcaggttgctgccctcggagtagacagccataatcctccggtggctccagcacttctctcttccagctgctctgtgctgcaagaggctcaggctggtgct

SEQ ID NO: 291516 - DNA, 122 bp, Homo sapiens
tcaccggctctgctcacaccagcctccaagggtgtgggtgtcccgggagtgtgggtgtcccgggggcgtgggtgtcccaggagtgtgggtgtcccgggggcgtgggtgtcccgggagtgtgg

SEQ ID NO: 291517 - DNA, 122 bp, Homo sapiens
tcatcactgtggaggctccaagggccagggccttaaccacgtgccccacggtctagatgccgccatcggctatgatggacacaccaaagcacagggcatactcggccaccttgtacaatgca

SEQ ID NO: 291518 - DNA, 122 bp, Homo sapiens
ctcccgcctgccgcgcgcccgcagcaccgccctctcccccccccatcccgccccaccgcgcgcgcccgaccttcccattggctgagccgcgccgagtgctcccccaacgccagcccctcgct

SEQ ID NO: 291519 - DNA, 122 bp, Homo sapiens
aaagttaatggggactctaaaaatggttgctctgaacaatgttaactgttttcaaatgctcgcagatcacttagtgcttttctgactgtccattaaagtcatgcccaatgccacagctactt

SEQ ID NO: 291520 - DNA, 122 bp, Homo sapiens
aaatccacatgacctagtccctaatttgaaagcagttaccattccgtatttgctagggaacggtacaaaagatgaaacagatgcataaatattttaaatatgtaatgccacccctctctcct

SEQ ID NO: 291521 - DNA, 122 bp, Homo sapiens
tccagagttagggctttttctctgggcgcccggctgcgggtcattgggaagctgaggatgcggcggaacctcggaggagccccgggtgctggcacacgcctgggcacggagaggggcggccg

SEQ ID NO: 291522 - DNA, 122 bp, Homo sapiens
cccggggcagcccccgccgcaggggcccgggaccctagaggaggcggggctagcaggtgacgtcagcgggcgggcccgacagaattaccgccgcggcggcgatggaaggcggacgggggaga

SEQ ID NO: 291523 - DNA, 122 bp, Homo sapiens
tggggagggagggtggactgggcgggcagtacctggggagcgcagcttggtctggctggccgagcgggagagaggcaggctctgtcggaagcggttcatcctgctgaagcccaggggcagct

SEQ ID NO: 291524 - DNA, 122 bp, Homo sapiens
gggacgcctgctggcggtaacgacaggccggggccccgccccccgaagtagggcgtgtggcgtcacttccggcttccttcagtccgctggtcccgagcacgagctgtgaggggattcacttg

SEQ ID NO: 291525 - DNA, 122 bp, Homo sapiens
ccgcccctggcttttccgggatccctttcgcctcatcaccgcagtcaccgcccacggctacgcccctgcggggaaggccgcggccaccgcccacccgccccaccccctgtgctccgggcacc

SEQ ID NO: 291526 - DNA, 122 bp, Homo sapiens
tagcactttataattttccagtatggtgcataagttacttattaatatatacattgtttacggtggttctaccttcgctaaaatctaggctcttaggctccatgagggcaggaatttttgtc

SEQ ID NO: 291527 - DNA, 122 bp, Homo sapiens
ggtgggaggcaccaagctggagagtggtggacaggggccccgggagggcaagaaactgaacgtagtacagctgctgggacacagggctcgagtggccagcaaagcccccgctcccaggaatg

SEQ ID NO: 291528 - DNA, 122 bp, Homo sapiens
acccccatacacacgtcatacgggcatgtaaacttagaagcaaccctgtctgcttgaagacggtgacactttgggacatacacatcacacacgcaaagccatggaccaaattgtgtcccccc

SEQ ID NO: 291529 - DNA, 122 bp, Homo sapiens
ctgaccaactctgcagtgtgtctgcagttcactcttgataatgatacttatttacacaagcgataaaaggtgccaacagttagatgaatgccttttcggttggcaatagaaattgaaataat

SEQ ID NO: 291530 - DNA, 122 bp, Homo sapiens
cagctcgtcccggccggctgccccagcgccacccccggcgtctcggcgggacctgggccgcgagttcgacatggcagtcaccacttgtatggccaaagggaagatattttgtaaacgtaatt

SEQ ID NO: 291531 - DNA, 122 bp, Homo sapiens
atggagtcactctggttcaaacacctctgacacttccactccaggattggggttgggggccgagggtggccaggacacaagcaagccccaagcacttgctttccccctgactctctaaacct

SEQ ID NO: 291532 - DNA, 122 bp, Homo sapiens
agattgcgaacacaacaggaagaagccccaggctgagtggcaaaggttgagattttctatcgtaagcacacctcacccaaacgcttgctccctgaaagctgctgacggagctttggcgaggg

SEQ ID NO: 291533 - DNA, 122 bp, Homo sapiens
tgtggcgcaatcccctgcaatactacaagaggatgaagccacctgaagagggaacagagacgtcaggtgagccgttagttggcactggagctgtttgatgcgcagtataagggggttgacac

SEQ ID NO: 291534 - DNA, 122 bp, Homo sapiens
tttgttttaacaaaataccttttgctactgtgtagagaacagctctgaagagagcagaagcgggagaccatttaggaggtcattgtgagcgtctggttagtgtggtagcaggacaggtgatg

SEQ ID NO: 291535 - DNA, 122 bp, Homo sapiens
ccatgccggccagctccccagtcatctgcgcgggcggccaagatcggtgcagcgacgctgcgggctacccccatgccacccatgacctggagggaccacctctagatgcctactcgattcaa

SEQ ID NO: 291536 - DNA, 122 bp, Homo sapiens
gctaggttgagcccggcaagacgttttctcgtcccctgccgatttatgaggagtcgaggtcgttggaaggcctctgaccgttcttgtcctacccaaagttacacatctggcagaagtgatga

SEQ ID NO: 291537 - DNA, 122 bp, Homo sapiens
cttcgcgttcttgctcctcataatggcatccgcaggagtctccaggattgggtgaggccccgccttcccggcccccgacggaacgcacacctccaaggggccccattaccgcccccaacaaa

SEQ ID NO: 291538 - DNA, 122 bp, Homo sapiens
acccgcacagccacgcgcacccactgcctcgcggggtcggcctgcgcgctgccatggacgcgtcaacctccgcggcctggcactgctgggcacttacgcgggtcaggacccgtgtccttagt

SEQ ID NO: 291539 - DNA, 122 bp, Homo sapiens
gtgctgccggccaacatctgctccttgcccagtcgcaaaagaggtaccttggccttgccgcgcaccccccacctcggggaccctggccgctgtcgcgaaggcccagacagcctagctcggcc

SEQ ID NO: 291540 - DNA, 122 bp, Homo sapiens
agaaacagacaggcaggctgactgacaccttctgtctaattttaccccaggaattgcccccgccgtttctcatctcgcactagtttaacctctggtcctaagcaaacctctcaaaagtcttc

SEQ ID NO: 291541 - DNA, 122 bp, Homo sapiens
tgtttgtacccatatgtaagtgtgtatgttggtcacagtaagaataaaaagtttgaaaaacgcccatctacagtatcttctatctgtagatgtagctcggctcggcaaatttctaatactca

SEQ ID NO: 291542 - DNA, 122 bp, Homo sapiens
ggggcagggagacacccccccgccggttgggcattgacaagaagtctcagtgcagcagagcgtctattttcggggtcccatgctagcattgcatatgcaaacggggtgagggcgtcctggca

SEQ ID NO: 291543 - DNA, 122 bp, Homo sapiens
ctgtgtctacttggtgcccgcgtatttgctttagtggaggcgtccattcgtcctatcttgcgtgcgttccgcagaccccaggcatggccgacccccatgtaaatttagccccattgtcccat

SEQ ID NO: 291544 - DNA, 122 bp, Homo sapiens
actctcaggaatcagtggaagttgctcttgattaaaatctcatgaccctggcctgctgggcgtggtgtctcatgcctgtaatcccagcattttgggaggctgaggtgggcagatcacgaggt

SEQ ID NO: 291545 - DNA, 122 bp, Homo sapiens
agagggcagggctgtattccgctactgggtcctatgcaccatgcagaaccagtgtcttcacgtggagactcatcactgatccgaaaggtgactgcttctgtattacactcatttccccatga

SEQ ID NO: 291546 - DNA, 122 bp, Homo sapiens
attactctcttttctcttgaacttttgtaacctctggaacttatcagttgtgaattccttcgacctcttctgttatattgtgaggaccttaatggttgaaactctgtcttaaaatctttgaa

SEQ ID NO: 291547 - DNA, 122 bp, Homo sapiens
tctcgcggcgcaggcggcggcggcagaggtggggtcgcgcagcggaggcagctcgagcttcgggatgcgcgctcgcttcttgggctcctcgctcgatcttactgcccccttttttctctccc

SEQ ID NO: 291548 - DNA, 122 bp, Homo sapiens
tttccttctgtgagtttacagaatggtttggttaggatggcaaaacctggtatccaaaggcggaagtatccaacaatgcctaagaaggaggagttgtttggtggtggggattggagtttggg

SEQ ID NO: 291549 - DNA, 122 bp, Homo sapiens
ctcgagccgcgccctcgccccgcctccagcccctctccggcgctcgcaggagtacgcagccgactgccaggcgcaccggcccgccccgccccgcgctgcactctacttccagggcggcgccc

SEQ ID NO: 291550 - DNA, 122 bp, Homo sapiens
ggtgctgagatgtgtatttgtgtgtaaagtatctggttagagttattttatgtggtgtcccggcttgctacatgataagaagtcagcacaattaaagcaaacctatcataggtttgtcagtt

SEQ ID NO: 291551 - DNA, 122 bp, Homo sapiens
ctcgcctccctcccagacatcttcccagggaaaagtgtgctttcttgaacacctgggggccggggaaggggctgccctaccactttgaatcgggtttcccgaaaagtttggtgagagtttat

SEQ ID NO: 291552 - DNA, 122 bp, Homo sapiens
ccgcgctggggatgagcaccactgtcatcgcggggaccctcgggctgcgcctctgcccctcggtccccagcacccctgggaggagctgctgcgatgacacccagtccctgggcgccgccgca

SEQ ID NO: 291553 - DNA, 122 bp, Homo sapiens
cggcaaagcgcccggaactagaagcagcgaagaacccgggtgggcagcgaccgtgacagccgagccggaagcggagctgcgggaggggcctcgacgctcctccatcttttattggagctcac

SEQ ID NO: 291554 - DNA, 122 bp, Homo sapiens
agcgtgggaagttgacgcggtgctccttctggatacgcagcatcttcttgatgttggagtcgtcgtagggcatggagccgcagaccatgatgtagaggatcacgcctaggctccagatgtcg

SEQ ID NO: 291555 - DNA, 122 bp, Homo sapiens
aagctcttcggggctcctttcgccaatgggaggaggctgatcttgtggccgggcattcaacgccctgggccctgccgcctcccgcagatcttcccgggccttagggcttcacctggagtccc

SEQ ID NO: 291556 - DNA, 122 bp, Homo sapiens
tgaaaacaaaggtgctccaaggacaggctgcctctgagaaccaggagggggctctctgcccggctccagccctgctgcctgtttcatccctgccagggttctgaagcctgtcggtgtcgttg

SEQ ID NO: 291557 - DNA, 122 bp, Homo sapiens
cggtccctgctagggacgctgcgctctccgagtgcgagttttcgccaaactgataaagcacgcagaaccgcaatccccaaactaacactgaacccggacccgcgatccccaaactgacaagg

SEQ ID NO: 291558 - DNA, 122 bp, Homo sapiens
ggcatttcagacacagggcgagcacattccctagttaccagggttcattcgagtcagtcacgtcacaggctggcaatgggctaactcctcctcaacaatcacacggggcttgcctcatagaa

SEQ ID NO: 291559 - DNA, 122 bp, Homo sapiens
tttccccacccattggtggatgcgttcatcagagtcttccagaaaccgcggtggggggatcgcccaggatcgcactcaggaatcccgccgagggagctctgtgaatgcaatttaggcgaccg

SEQ ID NO: 291560 - DNA, 122 bp, Homo sapiens
tgctgtggtgacacaggacctgtcatgtgcgaattcacccctccttgttccctctaccagcgtgattaagtcctttatagaataaggacttgtctcctgccagagagaaccacccccgtcag

SEQ ID NO: 291561 - DNA, 122 bp, Homo sapiens
cttatccaggtgacacccacaccttatccaggcgacacccacacccacaccttatacaggcgacacccacgcccacaccttatccgggtgacacccacaccttatccgggtgacacccacac

SEQ ID NO: 291562 - DNA, 122 bp, Homo sapiens
tcctcacttcccagtaggggcggcagccaggcagaggcgcccctcacttcccagatgggtcggctggccgggcggggggctgacccccccacctccctcccggacagggcagctggctgggt

SEQ ID NO: 291563 - DNA, 122 bp, Homo sapiens
ggtgaaatcctcttagcagctttatgatattgaataagtcactcaacctgcggcaccctccgttttcttcatctgtgaaacgaaaacaacagcagctttttcactggggttcgctaaatgaa

SEQ ID NO: 291564 - DNA, 122 bp, Homo sapiens
caaacctaggcagagttccgtgcgtgattcacaactttggaggcctgcaggtttgggggacgcggggagggcggagggtcccggacgcggcgcccccaaagggcccctgggtatcagtctag

SEQ ID NO: 291565 - DNA, 122 bp, Homo sapiens
cgcgcgcagcggctaagcgatgcgttgctgcctccacgtggtggctgagtgatcatgctccggtttgggaatggggcccagaagggtagggttaggggcggggacggtgctggggatgctga

SEQ ID NO: 291566 - DNA, 122 bp, Homo sapiens
tggggtaagtataaaattggaaaggatatttttgtagttttaagaagagtaagacttctccgcgtgaaaaagtgttttcttgtgaattagctgaagctaccctgtattttaatagttaggct

SEQ ID NO: 291567 - DNA, 122 bp, Homo sapiens
tgaattccaagaggggagctccagagagggcgccacctggagcccaaggcggttcaaatgcgcagcccctttgggatcttcgtcaagaaaaggcagtcgttgacggagaaaagacggggatg

SEQ ID NO: 291568 - DNA, 122 bp, Homo sapiens
ctcccttcctggctactaggaaccatatcagagggtgggtgtacacagcctgcgatattgcgagtaatatcaccctctacccctccggatattaggaacaatatcacagaaggggtgtacac

SEQ ID NO: 291569 - DNA, 122 bp, Homo sapiens
gtttgggatataaggcccctctgtgggtgtttaaggcacaatatttcaggcctaaaccaccgaatgacacatgcctaaacccagaatcctgtattctccaccaggactccagggtatgtgag

SEQ ID NO: 291570 - DNA, 122 bp, Homo sapiens
tctcacaatgggcgggcgcacacacacagcaaagcacccgaatgcagcttctaatggtaacgaaccacactcctgcaccagccgcccagagccctctctcacaatgggtgggcgcacacata

SEQ ID NO: 291571 - DNA, 122 bp, Homo sapiens
gcaggcgccggtcactttatataatcctgctgctcgcagggtgcaagagcgggaaaagtgcggagtagggaattcttttgctgcgctgcctcctacgcggagcctgctttccactgctgaaa

SEQ ID NO: 291572 - DNA, 122 bp, Homo sapiens
ccgcgcacacccagctcgtgccgtccaatccggaggccacgggccgtcgtgggggctgaacgtttgaaaggtgcccggcccacccccatgcatgggtccgttgacacaaaatacccagaata

SEQ ID NO: 291573 - DNA, 122 bp, Homo sapiens
ttttagtaggaagtttccaggcttttgttctgaaacccccaggttgcttcatttagcttccgacctccctgtaggaggaggtgggcacagaacgtgtttggaagcgtctgggagaataagga

SEQ ID NO: 291574 - DNA, 122 bp, Homo sapiens
aagaggccgggaggacccgcgtgtttgggtggatgtgaatgcttattggcccagtgaaggcgcacctgcagagcggttgacatggggctcctgagtgggaagcagcagtgtgggcctgacgt

SEQ ID NO: 291575 - DNA, 122 bp, Homo sapiens
gccccctggatcacatgtaacagaaactgcacgtcctccagagcacagatcagtatgaagcgaggtaaactgtgattctaaatgcgtagtttcctttgctcacccagctcggaataggtcgc

SEQ ID NO: 291576 - DNA, 122 bp, Homo sapiens
agccaagtgctggccatgggcctctcctccaggaagcgactcaggaccggccctctgcagcgcggcccagtgacccacattcattctccaagacctgcgctgctgggcctctgaggggcccc

SEQ ID NO: 291577 - DNA, 122 bp, Homo sapiens
gaaaacacattgtaagtgaaaccttcacacaacagaaaaggattgcttaagacttgacagcgagtctccactctgagctgagccctttcacacgtgagacttgtaggggagcagcttcttca

SEQ ID NO: 291578 - DNA, 122 bp, Homo sapiens
gcgccgtccacctcctgcacacagaagtctcagctggaagtggcggtccccgagagcctgcgctccgcagcttgttttagccttcagaaaaaacgctttctttctgtagcttaactgcttgg

SEQ ID NO: 291579 - DNA, 122 bp, Homo sapiens
gcccattgataaaaacgaggtggctatgtgagatggccttcagcggtctttccagctccacggttttacagtgtggagcggggaaagaaaaactctaaggtcctcgctgcaaagcaaccatc

SEQ ID NO: 291580 - DNA, 122 bp, Homo sapiens
cgcgttgccccctttctggctctcagcgccgtcgccactcgggagaggctgggtgaggcccgtgtgaggactgaccctggattcctcgaaactgccattgtgatcattactctgctctttgg

SEQ ID NO: 291581 - DNA, 122 bp, Homo sapiens
gcttttaactaaattcctgcctgtcagatgtaggccccattttgagcgtggagctgccttcgagcgagcgtgagcggcgcctcccgcccatggtgcgtggggccgggccggggccctcgctg

SEQ ID NO: 291582 - DNA, 122 bp, Homo sapiens
ggacaccactttaccaaggggcacgctggtcagctgggggacgggcacgcccgggccaagcgccagctgggcagactgggtgagcacctgcgaggccatggcggccggtcctgatgtggcac

SEQ ID NO: 291583 - DNA, 122 bp, Homo sapiens
ggcgtaggtgtgtgacaaagtatgagggcgcgccaagctctccagttccacatctgctgtcgagtccagcgcctgccacgctcccgtgcggggacccgcccaaaactccctggaagccaggc

SEQ ID NO: 291584 - DNA, 122 bp, Homo sapiens
aaacatcttcttggtccaccgccacgcccaccttcaataagccgagaagaggtgaggaggcgggtggctgggtgccaatcatgctgaggagagatttccagtggttccccgcggggctcata

SEQ ID NO: 291585 - DNA, 122 bp, Homo sapiens
ctgcagcagcacatggaggtccacgcgggcgtgcgcagctacatctgcagtgagtgcaaccgcaccttccccagccacacggctctcaaacgccacctgcgctcacatacaggtaggtcagt

SEQ ID NO: 291586 - DNA, 122 bp, Homo sapiens
aacacagtgagaccctaacaatcaatcagtcaatcaacaaaataagaatctggccaggcacggtggctcatgcctgtaatcccagcactttgggaggctgaggcgggtggatcacctaaggt

SEQ ID NO: 291587 - DNA, 122 bp, Homo sapiens
ccccggtacccatatgcccgtttcagtgtcgcacgctgtaatgggtgggagccccgagggcgcacttctaccaagatattcctgaatccggagatcagatgtcagaccacttgagaggggaa

SEQ ID NO: 291588 - DNA, 122 bp, Homo sapiens
ccaggagcaacgagactgcggtctctctgagcccggctagagtggcctgtgaacaccggtcgggcgagctggcagttgggagtttccctagcgactcagttcgggtgggcgttgggcgcctg

SEQ ID NO: 291589 - DNA, 122 bp, Homo sapiens
aaaattatatacataattctcactctcccttcctcctcagttgaagattaaagtggccggcgataaggacgtgaaattgccgttaggctcatcctgggctaaaagggattgttaaaaagact

SEQ ID NO: 291590 - DNA, 122 bp, Homo sapiens
ggggtcagggagttccctttcctagtcaaagaaaggggtgacggacggtacctggaaaatcgggtcactcccacccaaatactgcgcttttccgatggacttaaaaaacggcgcaccacgag

SEQ ID NO: 291591 - DNA, 122 bp, Homo sapiens
tgaacagctgaagacagggtggcttggacaccagaggggctccctgagctacctggacaacgattaagtatccccttcagccccagggtccacaggacagcccagctcctggaagccgaatt

SEQ ID NO: 291592 - DNA, 122 bp, Homo sapiens
tctgattttctgattttaccggagattggactggaggtcttctttactaagagtaacaggcgtagccacaaaagagcctggtctggtcgcaaagtaaaggcaaaactagtgtgggcccttag

SEQ ID NO: 291593 - DNA, 122 bp, Homo sapiens
cgggggcgcgcagagctcgggggccgtgtaggggatgggcggcccggccaggcgcagcagcgtcccgcgaggcctcgtgtggccgaagtcggtcagcttgaagcgccggcaggccgggtcgc

SEQ ID NO: 291594 - DNA, 122 bp, Homo sapiens
gacctttaggaagtgtttatcacaccagtgctactccaagtgtggtttgctaactgggcacgatcttggctcactgcagcctccgcctcccaggttcaagcaattctcccacctcagcctcc

SEQ ID NO: 291595 - DNA, 122 bp, Homo sapiens
gaaccacgcaagcgttcccgcccatccaggaggctgaggtgcagaggggagggaggttctcgggcaaggggagagggaagcaacctccaatttctctgagtaggactccccggcagcgggaa

SEQ ID NO: 291596 - DNA, 122 bp, Homo sapiens
ggcccttctctttcaggagttgatcaggttggcagatctggagggctaatccaaacaaggcgcttgacttgtgaggtcgcgagtctagacagagctggtggctcggcggctccttatctttc

SEQ ID NO: 291597 - DNA, 122 bp, Homo sapiens
ttcccatgcaccattcacatacatgcaagtcatttcatggaaaagctgttttcttacctgcgtctaggccttcatctgtgagagtcatgcttcactcattttgaaatacctctcattgtagg

SEQ ID NO: 291598 - DNA, 122 bp, Homo sapiens
agctgaagccgctcatgttccatgtctaaatgccgcagcctctctttctcgatttgtaggcgttccttttctacctgcagcctttcggcctcgatatccagtcgtcgtttttccaactctag

SEQ ID NO: 291599 - DNA, 122 bp, Homo sapiens
tgtactacttcctctgccacctggccttggtagacgcgggcttcactactagcgtggtgccgccgctgctggccaacctgcgcggaccagcgctctggctgccgcgcagccactgcacggcc

SEQ ID NO: 291600 - DNA, 122 bp, Homo sapiens
ggcagaatcccgccaccgcctgccgcgtgtgcgcgaagcgagccgccgggtacctgttggcggggcgctgagtgctaccgtcctttgggaattgtagtcccgcgctcactgggtcccggcca

SEQ ID NO: 291601 - DNA, 122 bp, Homo sapiens
gaaaatgtcagcacctaacattgaaccttagacatagtaagtgcttaataagaaatgtttcgagttattcaaattgttccaaggctgaaaattgggcagataaattgaagagttaaaatgga

SEQ ID NO: 291602 - DNA, 122 bp, Homo sapiens
cccggggcttcgcagaccttgacccgccgggtaggagccgcccctgcgggctcgagggcgcgctctggtcgcccgatctgtgtagccggtgggtgttatctctgcctggcttctgggtgggg

SEQ ID NO: 291603 - DNA, 122 bp, Homo sapiens
gcccaagatctctgccgctgtctgtgacgcccccgcagcccgccgctcattggcctaggccgccctgactgacggctcagcgccgcctcccattggccctcccgcgaccttcccgcgccact

SEQ ID NO: 291604 - DNA, 122 bp, Homo sapiens
ttgggaactgaagaaatgcccattgatttggtggatccagtagacctgctgtgagttggacgtgggccacaattccatttattccatggtccccacgtgccccagtgccatgatgatgcttc

SEQ ID NO: 291605 - DNA, 122 bp, Homo sapiens
gccgagtggacaggcccaagttcgcccagaggtgacacacttgggaatttgtggtgccatcgtgccaggtccctcctcgtaaaagtgcctacccagcgcctgcaaccagagccaaagcctgg

SEQ ID NO: 291606 - DNA, 122 bp, Homo sapiens
gcgttgcccaggagaccaccggcctgcaggaagtgttgccctggtgacgtcaccagtgcgcgggagggacaatggggcattgttctggggtcggtgagaccgggagacagtctccccccacg

SEQ ID NO: 291607 - DNA, 122 bp, Homo sapiens
gcagccctgtgtggttgacaggctcttgggatgagggatgaagagaaggcagggcttcaccgaataagcatctagctgagggcagaaaatctcgtgaaggttggctggggctacaaaggttc

SEQ ID NO: 291608 - DNA, 122 bp, Homo sapiens
gcatccagcctccactcctcagccagcctgcccttttgggtaataaaacttggctcctaacgttaatacagaggtttctaagtggtgcctgcttcatggccactgtatattttagcttttgt

SEQ ID NO: 291609 - DNA, 122 bp, Homo sapiens
gggaactcccactccctccttaacggtcccgcgggaagcttcgcgccgcagcgcccttaccggaagtgactgggcagacacttttcatagcgcccagatcccgaagcccccaggtccgcagg

SEQ ID NO: 291610 - DNA, 122 bp, Homo sapiens
ggaacctgaggcgggagaatggcatgtatccaggaggtggagcttgcagtgagccaagatcgtgccacttactccagcctgagcgacagagcgaaactccgtctaaaaaaaaaaaaattaga

SEQ ID NO: 291611 - DNA, 122 bp, Homo sapiens
agcgtgtgaaggatggtcctgagtgcaggctgcaggtgccaggtggtgatcggcacataacgtgacagatgggcaggtgtgtttgtcacgcacagacctgcatggtaggcacctgccccatg

SEQ ID NO: 291612 - DNA, 122 bp, Homo sapiens
ccgctccagcagccgtccccggccccgagcaccgccccgcggccccgccctccgcgatgacgccagcagctgcgggcccggctgctgcgcctgagccccaagaccccgcacctgggcgcgcg

SEQ ID NO: 291613 - DNA, 122 bp, Homo sapiens
gcaggcccgccccgagtccgaatccctccccgcgctgcctagcccgtcctcacctgctctcgtagccacagaaaaccgaattagtcaaggtgcacgtttcccgaattaggacctgggcgccg

SEQ ID NO: 291614 - DNA, 122 bp, Homo sapiens
tccagatggcctaaaggctacactggcaatcttgctgagctttccctcccatagatgagacgacctgggatcaccatgacaacagtgttcaagagtctcgttttcccttgccatacagaagg

SEQ ID NO: 291615 - DNA, 122 bp, Homo sapiens
ctcccctcgccgatacgcggtagtagccggggcaggtgggcagccgccaggctgaggtggcgcccaagacgcggctgagctcgcccagggtgggcagcagtagccggaggaagccaccgccg

SEQ ID NO: 291616 - DNA, 122 bp, Homo sapiens
cgccccgccccactgaaaaaacactaaacgattgcactgacagacagaccccagagcgcccggcctcccacacacccacggggctgtcagagtcaaccagggctttggcgtcactcggcggt

SEQ ID NO: 291617 - DNA, 122 bp, Homo sapiens
gggctaaacaaattaataaatatgctcagcttttccttcttggtttgtgaattctctctacgttttggctatcatcctaaccacttgccacaagcagcacaattaatgttttttctgcaatt

SEQ ID NO: 291618 - DNA, 122 bp, Homo sapiens
tattttaaaggtttcaaatcatacttaagctcagcgtactattgcttttgagagatagttcgaatataacaaggttttaaagcagaaacagaacccagtttgcccacacccctgcagggctg

SEQ ID NO: 291619 - DNA, 122 bp, Homo sapiens
cataatccacccacctcagcctcccaaagtgctgggattacaggcatgagccactgtgcccggccaagaggtagttttgttgctaaaaatcaacatatagtgagccggtatgccacagtgct

SEQ ID NO: 291620 - DNA, 122 bp, Homo sapiens
acagcgggccaagcgcagtcgtgacgtggcgttcagagagcggaagttgtcagatttcaccgggccgtaaagcgcgctggctgtgtcatcttccggttagcgacaacggctctgaccgtctg

SEQ ID NO: 291621 - DNA, 122 bp, Homo sapiens
atcttcctactcggcctccctgcttcacagttccttaactgtcctgtacttatttcccaccgccccctagtgctgtgatgcagaaggtatcttatgaggccttttttggctctaccctctct

SEQ ID NO: 291622 - DNA, 122 bp, Homo sapiens
ccttggagacaccctcaacagtgggcatgtggtttgtgtgtctgtgctttgggtgactgccgtggctcacttcactgtttgctttttggcctgaggcagagagtgcctcccatggcagctcg

SEQ ID NO: 291623 - DNA, 122 bp, Homo sapiens
agaggagaggagaggagagaaaagagattttgagaatgaattacgatgtgagcctggccacgacagactaaaggaattgggcctcctagaaaggccacttttagtaaaggtgccaatgggaa

SEQ ID NO: 291624 - DNA, 122 bp, Homo sapiens
ccgcgggaggggcccgggttggcgcggggcggggagagccgcctggcccctcccctccgccgccctccccaaagttgccgtctcccccggggccggccggtcttatgatccggcggatcctc

SEQ ID NO: 291625 - DNA, 122 bp, Homo sapiens
acatcacaacactcaaaggttccaggtgccgagtttctagctaggtccttgccccaaagccgacacttccaaactgagccccagctctcacctcttcctcagcctcaagaccaactgccttc

SEQ ID NO: 291626 - DNA, 122 bp, Homo sapiens
ccgagtcctttggctgctgaatgtgtctctctcctcttacgctgttcctactttggctggcgaataagatgaacagagccactccctggaaaggacttcagatttggcctccgctgaaacaa

SEQ ID NO: 291627 - DNA, 122 bp, Homo sapiens
agctccagaaacattttccctgactgaggtcaacaatcaggttagcctgggccggaattccgttccgttcccactgtagaaacgcactcacctgtgtgcacctaagccgggcggccaggagc

SEQ ID NO: 291628 - DNA, 122 bp, Homo sapiens
ggtggctgtgatcttcggaagcaagtggataaacgggagcatgtgaaatgcgaatctccacgaggcgttatttgtagctaaatattctattcaatgggtaagatggttttgagaaatcctag

SEQ ID NO: 291629 - DNA, 122 bp, Homo sapiens
ctcaccaaggcagagcagggctgtgagggcgggcgtcatggcgtctcctcccggtgaccccgcgctctgcagagggatgagccctcagtgctggcaggacagagagacacacagggtgtggc

SEQ ID NO: 291630 - DNA, 122 bp, Homo sapiens
ggccacacccgggggaggagcctgcggacgcccagtcgggtggagcacgccaggtgagcacgcctgcgcagtcgggccgtaaacaagcccaccccttccctttggcccgccctcgcagggct

SEQ ID NO: 291631 - DNA, 122 bp, Homo sapiens
tgccggacccagctccattcccagccgcgcctccttcggtgggcagccggccggaactcacgaatcagagcagccgacacatcgtccgctcagccaatcgtagcagatgtgtgatcccgcca

SEQ ID NO: 291632 - DNA, 122 bp, Homo sapiens
gcctgcggccccaggtgcactattcctgcatccggaaggaggacatcagcggcatcgcttcgtgcgtctttacgcgccatggccagggtgaggcggggcagaggccgaggaggccttcctca

SEQ ID NO: 291633 - DNA, 122 bp, Homo sapiens
gctggtttaggggaatcgggagggctcacttaagcatcccttccctgcgtgctcttccatcgcgggacagaagacccgactgctgccagcaccaaagggtgttcccacggcacacgccgctt

SEQ ID NO: 291634 - DNA, 122 bp, Homo sapiens
agacgcgctgcgattggccgtggtgggtgccggtaacccgtgctagcgtctttggctccccgcaccgtagatgtcaaaggctgaagctgctccctttgccacattataactagtaggggatc

SEQ ID NO: 291635 - DNA, 122 bp, Homo sapiens
gggcgggactgactaaggggcggggccagggtctcacaccctgcagtggatgcatggctgcgagctggggcccgacgggcgcttcctccgcgggtatgaacagttcgcctacgacggcaagg

SEQ ID NO: 291636 - DNA, 122 bp, Homo sapiens
agaggcggcagctctgagcgggctggatcagccggcgaccaacgctgacatgagggaagtcgcagccatagcccgcgccggtgcccgcgctcggctgacagtgattttaaataaagttttgt

SEQ ID NO: 291637 - DNA, 122 bp, Homo sapiens
aggcctgggtgggaggcttgtcactgactctggccacacacataggcttggtcgccacctcggtcagtggcaaacagctgctgagaggggaggggaggagtagacccaggggtgctgtgtgc

SEQ ID NO: 291638 - DNA, 122 bp, Homo sapiens
ggggggttcctgtccctgagcaggtgcaggtgaccaggcccagcgcatcgcaggaggggccgggaggagagaagcctgggagaagccattcgtgacctaacaaagctggcactggccacccc

SEQ ID NO: 291639 - DNA, 122 bp, Homo sapiens
tctgaccggctttgtgacttccaccacattagatctgagtttcctccatgtaaaatggggcgggaatggaggctggacctgggaggtgtcgctgatgatcgtctctgactcgctaagtcgcg

SEQ ID NO: 291640 - DNA, 122 bp, Homo sapiens
gcttgagatccatgtggccctctctgccactggagatacttagtgggaaaggctgaggagcgctgctttatactagagtagtagggagaagaaatcttaatgtgttcacagacttagaagtg

SEQ ID NO: 291641 - DNA, 122 bp, Homo sapiens
ccaggttggccttgaactcgtaccctcgaacccctgcctccctgagggcccgagggcaggcgcatccagccggagccacagtggctccgggtgtcggggctgtcctttcttccctttctccc

SEQ ID NO: 291642 - DNA, 122 bp, Homo sapiens
tatcgggagtgttgcagaatctgtgtgccaagtgcactgactctcacaagaggctgcacgcggggctgtaagggtggctctggatgtgcctttggccaccagccttttcctctcaggggaca

SEQ ID NO: 291643 - DNA, 122 bp, Homo sapiens
gaccggtcctaaaagatggtccctcttgtggattacggtctgtcacgcgacatccattagcgccggagcgcggggtcctcatcatgttggtatcattgggaccagcgcacgccactgcaaga

SEQ ID NO: 291644 - DNA, 122 bp, Homo sapiens
agcaagcaaggagtgcaaatcctcctgcctgcaaattgcgggctgtgaggcctgagccaacgcactggagctctctgagaacggctgtgacgagccgagctaacaatagccctgcttagcag

SEQ ID NO: 291645 - DNA, 122 bp, Homo sapiens
tgacgtgataggaactgctgaagacacttttgactgcaggggcaaactaaccatcatgcacgcatcaacaaatgtgtaattacatttcagggcccaaagattcttgattttaaaagccaatc

SEQ ID NO: 291646 - DNA, 122 bp, Homo sapiens
gctggagagttgactcctcgcactcctgtttgtcttgactgtgcctcagatggcgtctcgcgcccgtttggttttgtctttcacagacgtttgccagggaccatgtttttccatctcccctc

SEQ ID NO: 291647 - DNA, 122 bp, Homo sapiens
agcaaaactccgtctcagaaaaaaataaaataaaccattattttaaacttctaatgtttccgggttgtttccacagtataacccagtctagcactattagtacacctggtcttagtaacggg

SEQ ID NO: 291648 - DNA, 122 bp, Homo sapiens
tgcggcggcggctggggctgcggggtcgacggctggggctggaacttgttaaaggagccccgcgccccagctccactctccaggggtgtcgccaggtcctgctgcccagcgccgtaacgggc

SEQ ID NO: 291649 - DNA, 122 bp, Homo sapiens
aaagatatacctaaaagaaactaaatttgacagtaaataagaatgagctaaatgttatatcgtattgcatttgattgtggggtttcaatggactggaccactaatttctaataattttaaaa

SEQ ID NO: 291650 - DNA, 122 bp, Homo sapiens
ttcctgataagagaccaccaaccacagagaagttctggccaatctaccagggactcacagcgagggttttcatgtcctctgctttgccatttgacatcagagggctgaaaacttcacactgg

SEQ ID NO: 291651 - DNA, 122 bp, Homo sapiens
tagttgaaattgtagtggccagaggctcccatcttcttgacagctgagtaacaccaggaacgtcagacacaggagaggggtcctccttttcttcctcagtcttgccactgtctctgataagc

SEQ ID NO: 291652 - DNA, 122 bp, Homo sapiens
acctcgtgatctgctcgcctcggccttccaaagtgctgggattacaggcatgagccacggcgcctggccagcattggggtattttattgaagatggaagccatgaatgttgagaaagcctca

SEQ ID NO: 291653 - DNA, 122 bp, Homo sapiens
gatcctgccaccagggggcagcaagtggaagggaccctagagccctcacctgggagcggccgtagctgccttggtcaccattcccagaactgccctagatgggggagaggaggatcatacgg

SEQ ID NO: 291654 - DNA, 122 bp, Homo sapiens
gggtaggagcagacactatagtaacctctatagtgttattataggatgcatgaggaagggcgtcggaaccagggctgcagtcagacagacacaggttcacatctgggctctggcactccttg

SEQ ID NO: 291655 - DNA, 122 bp, Homo sapiens
gaagggggtcccccgggggccgaaccccagtagcggctccttcccgacagagctgcctctcggtggccagcaggactctgcccagaccacacgtagcccccaggctgctggacacgtcggac

SEQ ID NO: 291656 - DNA, 122 bp, Homo sapiens
cctggagagcctgcctctgggtttcctttcaggttgacagtttgggagctaacaggaccacgtgaggggtgcagcggggaagatcagccaggttctcagggaccttctccggaagtacgcaa

SEQ ID NO: 291657 - DNA, 122 bp, Homo sapiens
taccaaacgagtcagcttatgaccagagcaacatcgatggcgcgtctactatgccttaaacgtgctgatggccatgaacatctccaaggagaagaaggagatcaagtgagttggtctgccca

SEQ ID NO: 291658 - DNA, 122 bp, Homo sapiens
tagcttcacagggacttggagagaggcgagtgggaagaggttgctgctagtgccattgtacgggaagctcaatggcatttatctggtccaaggtcattcaacaagaacaggttgaaatcacc

SEQ ID NO: 291659 - DNA, 122 bp, Homo sapiens
aagagctccagcgagactcaggtgaacgcgcaggcagcaccggggacggactcgaagctccggttccaccaactgccgccaagacgctgaggacccaacgggtctcctcaggccgcgacgcc

SEQ ID NO: 291660 - DNA, 122 bp, Homo sapiens
tatgggggaatttattctggactcaccttcaaaattaggggtctggaaaaacaggctgctcgaaattttagcacagaaggtggaattcagggcagtaaaaggttattttttcaggcctcggt

SEQ ID NO: 291661 - DNA, 122 bp, Homo sapiens
ttgaatagattagacatcaacgcaatcaggctgttcacctagggactctttgctaggcggcggagaggtacgttacagttctctacgcaaaacgcatgcgcgaaagatccgggaagtgtgat

SEQ ID NO: 291662 - DNA, 122 bp, Homo sapiens
cagccgagctggcgtgtggggctgcggcgcggcgcggtccaggcgtggctgctcttcctgcgggccctacaccagggtgtaggatttggagtaggccccggccccctgcttctgagacctcc

SEQ ID NO: 291663 - DNA, 122 bp, Homo sapiens
tcttgtttaattctcttcaaaagtcaacaaacattccccaaattctcactgttgccagaccgtgtattaatgctgaggaaacaaaaatgaaaatgacagactgtattctcaaaatgctcaca

SEQ ID NO: 291664 - DNA, 122 bp, Homo sapiens
ctgtatctccacttcagttatgttctcaggttcaggagcttgccactgtgcctctaagaccgtcatgtattgatctttcacgtaatacgtggagttgctgtagcaatttttatccgctcttt

SEQ ID NO: 291665 - DNA, 122 bp, Homo sapiens
ttcagtggaattgcaaatatattgccctagcttactcagggaaagggaattaccagctggcgaaaaagcagtagaatgaagtgtagtcaggcgttatctcacattgagattcttaggtgggg

SEQ ID NO: 291666 - DNA, 122 bp, Homo sapiens
gctcccttctctccactggcaccaggaaagccaggaaatcctagggacccctggtgagaacggagaaggggggaaattgagaagttatgaaaggtagggttcaggaaggggcaaagggggtc

SEQ ID NO: 291667 - DNA, 122 bp, Homo sapiens
gggacaaagggtcgggaaacttgagctccggccagtcccagagaaacccgggctggtggtcgccatggcaacggagtccgaccctccgaggcctgccgccctggcgcggcagtggcttgagt

SEQ ID NO: 291668 - DNA, 122 bp, Homo sapiens
gttccatgggttaatggtgagcaccctggactctgaatcaagcgatccgagttcaaatctcggtggtaccttggtgtctgctggccttttactctggagccagaagccactttgggaagcaa

SEQ ID NO: 291669 - DNA, 122 bp, Homo sapiens
gtgccgcccgctgcgctatgcggggctcgtctccccgcgcctatgtcgcacgctggccagcgcctcctggctaagcggcctcaccaactcggttgcgcaaaccgcgctcctggctgagcggc

SEQ ID NO: 291670 - DNA, 122 bp, Homo sapiens
gggcggtcccacaggtcctttctgcatgggctggatgtacttcactggggcatagcccgccgccccaccggccccgccaccagaggacgcccgcggcccacaccccagcaccagcaccagta

SEQ ID NO: 291671 - DNA, 122 bp, Homo sapiens
aactgggtccatcggcccggagggcggggatgctcgctttcgattggcctcaaaggtgcccgccccgcctactccccgccccttccttggcagggaagaggcgcgtgcgccgtggctgggga

SEQ ID NO: 291672 - DNA, 122 bp, Homo sapiens
ccagagggaactcggtgcgcacgcggctcgagaactgcaccagccccacccgcgtgccctcgggggacacatctaggaagtccacaatctggttcacgaagcgcttcactagctcgaagttt

SEQ ID NO: 291673 - DNA, 122 bp, Homo sapiens
gcgtgtcactccccattggccagcatccccaggagcccccaacgtcccatccccaggaaacgccagagagggctgtcaacaaaccaccttggctcccacggccctgagcccagagcccggca

SEQ ID NO: 291674 - DNA, 122 bp, Homo sapiens
ctatgtgcggaaaactgccaggctgagagacaaagcagacctcctggtgaatgaaattaacgcgtatgctgctacagagaccccgcatttaaagctgggcctgatgaactttgcagatgagt

SEQ ID NO: 291675 - DNA, 122 bp, Homo sapiens
gctcagctctcctcctgctcctcctccctctggccccagcggacgagcaaacactcttcccgagagatagtggctcccatccaacgcacctcagctaatcaccagccatcgtgggaaaagcc

SEQ ID NO: 291676 - DNA, 122 bp, Homo sapiens
gcgtccaaatgtggaagcgttcctccagcatgcgtggatatcctgaggactcacggacaccgattccctcttccgggcccagacgtcctaattcccgtcccccttgaggtgagatcccgttt

SEQ ID NO: 291677 - DNA, 122 bp, Homo sapiens
tgagtggggtcaggaagtgactcactcctccgagggcttgtgggagcctcagctcaggggcgggcagggggcgtggggaagtctgcagccgagagtccaggtaggagtctcctgcgtggtcc

SEQ ID NO: 291678 - DNA, 122 bp, Homo sapiens
gaggcggcgggagccggctgccggacgggcgggtgggtaggcgggcggggccgcagccagcgctacgttccgaagaccctcgcccccaggcctacacacagctgtagaggcagcgcccggcg

SEQ ID NO: 291679 - DNA, 122 bp, Homo sapiens
tgtttccgggcggaagtgaggcgcccagcggaacggcctctggtgacattttcttgggggcggcgcggacgactgaagggacttggtggtagaggctgcggaggcggcgaggttcactttgg

SEQ ID NO: 291680 - DNA, 122 bp, Homo sapiens
gaggcggaggttgcagtgagccgagatcacggcactgcattccgtcccgtgtgacaagagcgaaactctgtctaaaaaataataatttaaaaaaaaatgaaaataaaagtgactcacgcaga

SEQ ID NO: 291681 - DNA, 122 bp, Homo sapiens
tgaacgctactattttaaattttcttttttaagatggcattttattttgttccagaaaagcgcctgatgtagaccctccctctgagaatagccgtggagccatgtagagaggtgtagctcag

SEQ ID NO: 291682 - DNA, 122 bp, Homo sapiens
agccctaccaccgacgcgtccggacgtaacgtgctccctaggtcccgccttttccgcttccgccacctcctacttaggggaaggcccttcggcttctacagccaccgtcccctccctgtggc

SEQ ID NO: 291683 - DNA, 122 bp, Homo sapiens
gaccccggccgaggggcacaggtggcacggctcactccggctcccttgcaggctactgcacgggctggggcgacccgcactatgtcaccttcgacggactctactacagctaccagggcaac

SEQ ID NO: 291684 - DNA, 122 bp, Homo sapiens
ctgccacttatgctgagcacaggaaatcaagttatttatagttgcagaacggtgtttcagcgaagttgattggagagttacctgattatagtgagattcttatccaatccctacagaattgt

SEQ ID NO: 291685 - DNA, 122 bp, Homo sapiens
tctgtaaaaggctaagcgtgcccactggggcctgtggtcaggattggctgcagtgaggtccgcaaagcccctaccgcatcctgcgccttcgttagggtgagcagtcatggggactcgcattg

SEQ ID NO: 291686 - DNA, 122 bp, Homo sapiens
ccctctgctgcccacagcccgcacctgtgagctgagtgacggctgtcgctgccagtgcctcggtagccagcgtgaccatgtcatccacagtgaccacgctgacctcactgccctcctcgggc

SEQ ID NO: 291687 - DNA, 122 bp, Homo sapiens
agaagcccttcagctcggaagtgagtaagcattggcggtggggatggtgctctgagcagacgcgactcagtgccatgcgggcgtctctcccagggcggctttcagactgacccccaaacaga

SEQ ID NO: 291688 - DNA, 122 bp, Homo sapiens
cagaaattctttagcttttaaaagccatggaaacattctagataagttgttaaccattaacgggaacaaattctctttacacaaagctcaggcacattcaatcaaggggagccaggcctaag

SEQ ID NO: 291689 - DNA, 122 bp, Homo sapiens
aggccagggagcagccaggatgaaggtcagggcctcccttggccccaccagacccagggccgcttccctccagccccggctcccgtttggctggaggtgccctgggccattggcctgccctc

SEQ ID NO: 291690 - DNA, 122 bp, Homo sapiens
agccgcggtcattaaaagctcctttatttcatgggtgttgcagctgtctggctgcccgcccgtccccccactaactctcacactctggtggcagagaccttctcttgcccatctctgtatct

SEQ ID NO: 291691 - DNA, 122 bp, Homo sapiens
cccactctgctctgtttctccccagcggcaaccacagacacaaactctgtcaatcattcacgctctctgcgacgcgtctaattactcacaatgccacctctctaacctctttcttgaatcca

SEQ ID NO: 291692 - DNA, 122 bp, Homo sapiens
tgtgtagatggtgtcaactcatgtcgaaatcctttcccctccctattttacaaaccactccgctccatctgtattagttttctagggcagtggtaataaagtatcacaaactaggtgattca

SEQ ID NO: 291693 - DNA, 122 bp, Homo sapiens
ccagaagtgaccccgcccatgcaaggccggcatggacgaggccggtcagagcagagcaatcggtgtgcggctcacattaaaccaggccctccccgtgctcctctcaggaacacggccgcaga

SEQ ID NO: 291694 - DNA, 122 bp, Homo sapiens
tgttccccagaccacaggagcccatttttccaagagttccactagctttttgtttgataacgtctatttctagcagcatttactccttcaacaacaaattcaatggaacgaaaatttactga

SEQ ID NO: 291695 - DNA, 122 bp, Homo sapiens
ggggtcacccgagtgctgggagtgacgctggaggtatcggcccagcgatgctggagtggtcgggtcggaggcccagcagcgtctggggaggggcgtgggggaggcgtgtccaaggccggctg

SEQ ID NO: 291696 - DNA, 122 bp, Homo sapiens
cacttcttcaagctggcaaagaaagataaatagatatagacaataaatttaaaataaaggcgcctgtatatctgtgccaaagcaaagagaagacttctgaggctgctgataaaggtgtatga

SEQ ID NO: 291697 - DNA, 122 bp, Homo sapiens
ggcaccactcccagccttaaatagcgatgttgacgatgcagttcagtataggtgcaggatcgaggtctgagctggacatataaatttggaaactgtcagcatatcaatgatatttaaaggca

SEQ ID NO: 291698 - DNA, 122 bp, Homo sapiens
cttaggccaaccaatttaactgcagtgtcatgtttcacaggccttcctacatttagaaatcgtcacacagctgtgataagagtagattattttactatgaaataattctgaatagatgaaag

SEQ ID NO: 291699 - DNA, 122 bp, Homo sapiens
gggccccacagctccaggccatcccctacgggctgcccacagtgcccccttttctctagccgaatctttttcgaacagcccgggaaaggaaaacggattcacttgctgattttgttcacggc

SEQ ID NO: 291700 - DNA, 122 bp, Homo sapiens
cggcggcggtaagcgtgagctggcgcaggttgctccgcagcttcctggcacgcagggcggcgtcccgccacagcctcgcggtcttcaggttgccactgtccatcccagccatggcggggccc

SEQ ID NO: 291701 - DNA, 122 bp, Homo sapiens
ggtgggggaagggcccaaacaagaccaaggacagtgataagcatggcacaaacagggaagcgtgatgagcagggaactgtatcagaaagttgtaggaattgaggccaggtgctatggctcac

SEQ ID NO: 291702 - DNA, 122 bp, Homo sapiens
acccgcgggcccggggccttgcacaactctttaaataaccatgttttgcaaggcccgcgccgagcgggtgacctctctccggaggcctggggggaggagggtgtggcccaggatccctccgc

SEQ ID NO: 291703 - DNA, 122 bp, Homo sapiens
gccttcactgattattaaatgtctccgtcttgtttattttctctgctttacagcccttatcgtaatctgtaattatcttgttcattggtttgtgtgtttttcatttcctccagtagagtgta

SEQ ID NO: 291704 - DNA, 122 bp, Homo sapiens
acccacgtggcttgtggatcagcacagacttttaggccacgtttggtaataaaactgtaacgcaaggaaaagacagatgaagttagccacgttctcaaagcctcagggtcaggagttaagat

SEQ ID NO: 291705 - DNA, 122 bp, Homo sapiens
ccccgggcagtgccactgtccgattccaggatgccgagtggctgccggtgaataactgggcgctcttagcgctcaccaccgggcgggaggacatggcctcctgcacaccccccacagccctg

SEQ ID NO: 291706 - DNA, 122 bp, Homo sapiens
ctgcccgtggtcccgcttacttttggactctgtcccccatggggctggggtccgggtccgcgccctgacccccgcctccgccgtcagtctctctccgctcccagccgggtggcgccgcaggg

SEQ ID NO: 291707 - DNA, 122 bp, Homo sapiens
gatttgttttctcctttttttttttttttttttaaatacaaatggctgactgctctcagtcgtcaggctgcatgcatgaaaaactggccggcccaaacagtgtattaatcatgactaaatgg

SEQ ID NO: 291708 - DNA, 122 bp, Homo sapiens
cgctgctggcggggaaaggctgggtggtccacgcctttcttccctcccagctgcgggttccgctggcggcggtggcgctgacaagcccgcgtcggggaagcaggggagtccctgctcacaca

SEQ ID NO: 291709 - DNA, 122 bp, Homo sapiens
ttacgcggaagattcagagcccgagtctgatggcgaggctggaatcgaggcggtgggcagcgcggctggtaaggcccaagtgcgaagctggaagggggaatcgggtgtctgcccggaatgct

SEQ ID NO: 291710 - DNA, 122 bp, Homo sapiens
taacctgtaatcagccggcggtgcgcagcccacacagcacgtggtccgcatcacaggctgcgttattgagtgagccagtctccagatgccaggcgcatgacgagtccacggagcgggacctc

SEQ ID NO: 291711 - DNA, 122 bp, Homo sapiens
cctcggctacgggggccactgggtatcatgccaagagggccgtgcccactgcctgcacctcggctacgtgggtcgctgggggtcatgccaagagggccgcgcccaccggttgccctcggcta

SEQ ID NO: 291712 - DNA, 122 bp, Homo sapiens
ttaaaaggctgtgtgcagtcctaggaacccgctgcaccagtcctaggtgttagagaaactcgggctgctgcatgcagaacagaggcacaagtcaggggtggactcctgcaaacaggactgag

SEQ ID NO: 291713 - DNA, 122 bp, Homo sapiens
ctgcagggaaatatatgggtgagcggagagccacacatacttccccagtgagcttcagctcgccccctcaccatcaatctccaggaggctggctccccaagtggctcattgtttctggtttt

SEQ ID NO: 291714 - DNA, 122 bp, Homo sapiens
caccccgggctccatggccctgggccctttgtttctcttggggactcagtcagtggttaccgtctctgccccacgcctctcagagcacaaaggcttgagagccaagaacacctcctaaattt

SEQ ID NO: 291715 - DNA, 122 bp, Homo sapiens
cacccgcgagtgatttgcagcgcaggggcctctgctgcctcggaaaccttcaaaggtgggcgggtcggggaccaagtccccctagggatggagaaggaaacggggccaaggaaaaggacatc

SEQ ID NO: 291716 - DNA, 122 bp, Homo sapiens
gtttgctgggagccgctccctttcccttttctttccaagctgccgaattctgtccctagacgctacgttcccagtagagggtagggccaggatccaaagatgccgaccgtggccgtggctct

SEQ ID NO: 291717 - DNA, 122 bp, Homo sapiens
gtggggtgtccaccttatcccacgcggtgtttatcggagtggggtgtccaccttatcccacgcggtgtttatcggagtgggggtgtccaccttatcccgcgtggtgtttatcggagtggggt

SEQ ID NO: 291718 - DNA, 122 bp, Homo sapiens
cgcggcgcgtgaggcgcgcgcactgcgtccccgcgcagccgtcgcagccaggtgctggcccggagcgctgcgtccccagacagaaaccacggctccccctggcggacaccggttccccagcg

SEQ ID NO: 291719 - DNA, 122 bp, Homo sapiens
cctgaggaagggccgaggaaaggcttcgtaacgggacgcccagaaagtccggaacaggaacgtgcacacggagcggcgcgcagccgcccgccctcgcttgcccacgcgccctgcacaggtgc

SEQ ID NO: 291720 - DNA, 122 bp, Homo sapiens
gtgcgggcagtgtggggagagactcggcctagccttccattgcagctcctatccctgctgcgccaccccctcggcctgtcatctgtccccatccaggaacccccaggacactgtcagcagag

SEQ ID NO: 291721 - DNA, 122 bp, Homo sapiens
gtaacttccgctctaggaggctgaggccgtctccctgatcccgtcgagaattctgggaagcgtagtccaggaggtctccgtagggagagccacttccgcccaaggtacgctaggccgcggcc

SEQ ID NO: 291722 - DNA, 122 bp, Homo sapiens
ttttcctcacttaatcctgtcgtggtcctgcaaggtaggtattatcaattccattttactcgtgagaaaaaagtcacatgaactgtgcacagtaacactgtatcactggtggtgtttgaacg

SEQ ID NO: 291723 - DNA, 122 bp, Homo sapiens
taccctatcaatgtgttaaggtcaactgtgtaatcaaagtatgcagggggctgagatgatcgatcaaggactcaaagtcagctgttgacagaacaactctgttttaccataattaatatttt

SEQ ID NO: 291724 - DNA, 122 bp, Homo sapiens
gtctattccaactccatcaactgcaactgcaggcttgtctctgctttcggttattacctgcgtgacagcaattgtcctcacggccttttcggggactgctgcaggtgaacctgcacgtggag

SEQ ID NO: 291725 - DNA, 122 bp, Homo sapiens
cccaaaggcctgtgcgtgtcagggtgggcctctgttcaggattggcctggcagtgggcaccgggcatgacctgcagggacagagcaggttccagatgaagcagggagagcaagcctgggtcc

SEQ ID NO: 291726 - DNA, 122 bp, Homo sapiens
ttaagagctgtaacactcaccgcgaaggtctgcagcttcactcctgagccagcgagaccacgaacccatcagaaggaagaaactccgaacgcatcttaacatcagaaaggacagactccaga

SEQ ID NO: 291727 - DNA, 122 bp, Homo sapiens
ttaggaaaactattttggaggagggggcagcgttaggaaaactattccgaagcctggccacgtcccaaccggtttcaacttcctgcagctcagaagaggggtccccacccgagagcgccggg

SEQ ID NO: 291728 - DNA, 122 bp, Homo sapiens
gcacagacaatgaggctgtattgattagtacaattcctgggcacctccggcccgtctccccgggagctaggacaatgcagctttgatacacagagcagattctcagcaggtccttgggctgg

SEQ ID NO: 291729 - DNA, 122 bp, Homo sapiens
atcgcgttggttcttagtgctggccctgtgggtggggtagggagccgacaatcctcaccacgcagatgctgccaggcctggagacacgggcagcacgttggttcttggtgcctggagacact

SEQ ID NO: 291730 - DNA, 122 bp, Homo sapiens
ctggagaccgatagggatggaaaccgaggtctcccaagtctagcgtggagtcccgtccaccgtctgggctgatgtctgagcttccctctcgggactccgtgtgtgccctgaggcccttcatt

SEQ ID NO: 291731 - DNA, 122 bp, Homo sapiens
tccactgcctcccatttctggggggactcaagaagctaactgtccagcaatggttcttaacgtggcctggagttgtcagattcagggaggctgaggtggggtggggacagcagggaaaggct

SEQ ID NO: 291732 - DNA, 122 bp, Homo sapiens
ttcacatagttacgtgttttgttaatgaggttatgagaccacatatatattccatatcatcgtgtgttactttataaaatgtctgaagcttagttgttttctagaactgtcacttcaattga

SEQ ID NO: 291733 - DNA, 122 bp, Homo sapiens
tgaaatctaggagaccacatttttggttgttgttgtaaaatgaccttgatttgacaggcgcgatctcaggtttcaacagatgctgtgggaaagcttacagaagccaacaagttctccaggca

SEQ ID NO: 291734 - DNA, 122 bp, Homo sapiens
cctgttacctccactgctctatctgccaacacatgtctcccaggcagctgtcagggctaccggaaggaatgtctggagcctgggaagcatgtcacatatgaggagtgttgttagcagaagcc

SEQ ID NO: 291735 - DNA, 122 bp, Homo sapiens
cgtgacgccgcgcgggctgcgcgggcagtggtgggaaggctggcgcgaggcgtgaggtggcgtgaggcgaagctggaatctgcctctgtcacgggggctggtgcctcacgggtttgtgtcct

SEQ ID NO: 291736 - DNA, 122 bp, Homo sapiens
tgcctgtaatcccagcattttgggatgctgaggcgggcggatcatttgaggccaggagatcgagaccagcctagctgacatggtgaaaccacatctctactaaaaatacaaaaattaactgg

SEQ ID NO: 291737 - DNA, 122 bp, Homo sapiens
tccccgggaccccacaaccgtgggtcctcctgacaccgtcctcctgctgaggcacctcctcgcttctccatcccaacacagaccccaggagcacagggtttccaagatggggccaaaggtca

SEQ ID NO: 291738 - DNA, 122 bp, Homo sapiens
gcttccagccgtttttcactgtccagactcagatgcattaatagttaaaacaagtcgtttcgaggattctggttttcctttatctgtacacgcagacgcaaaccttagagtagcacactacg

SEQ ID NO: 291739 - DNA, 122 bp, Homo sapiens
tactggagatgcacaatacattcctgagcaaatcaatcacttccccactccgggcctcagcggcccacactgcctcccagagtccccaggtcacacccagcagggtctaggatctgacaagt

SEQ ID NO: 291740 - DNA, 122 bp, Homo sapiens
taacgtgggcggttcagtgagttctgaggaacgcatagcaggtggatccgtcgccacagtcgggaaagcgagcacggcctctccgaagcctgcccggctcctcgggaacctgcctcccgcat

SEQ ID NO: 291741 - DNA, 122 bp, Homo sapiens
cagcccccatcccacctttgcaccctcccgtgcactgtgatgcgttggccctggtcccctcggccctgcacacgtgtccactgtgacgcgtctgtcatggtcccctcggccctgcacacgtg

SEQ ID NO: 291742 - DNA, 122 bp, Homo sapiens
ctattccggaattgtgggttcacctgaagtttgaggccaaacccccagcggtcagtgggacgccagtcgcctttgacctcttggtcaagctggccttgccgtgacccgtgagaatgcccaag

SEQ ID NO: 291743 - DNA, 122 bp, Homo sapiens
gggtggagaagttcatgggaaaaaaattctgagggctctgtttatatcaaactagctaggcggtctgagagtcacaattctaataaatcttttgaagaagttagtactacatcctaatacga

SEQ ID NO: 291744 - DNA, 122 bp, Homo sapiens
cccttccccctcgactggtaggggagggggagccgctctccttctccacgcccctattggcggggagcttccctaactcaaccccgcctattggagacggactgctgaagcccacccccgag

SEQ ID NO: 291745 - DNA, 122 bp, Homo sapiens
ctcgcggcagggaggatgctgaacagtagagggcgctggagacacgctgcgggaggctgtcgctcgggtccggctgcgggccacaggccgcggatcgcgctctgccagcgccccacgcccgc

SEQ ID NO: 291746 - DNA, 122 bp, Homo sapiens
gattgcagacggagtctcgctcactcagtgctcaatgttgcccaggctggagtgcagtggcgtgatctgggctcgctgcggcctccacctcccagccgcctgccttggcctcccaaggtgcc

SEQ ID NO: 291747 - DNA, 122 bp, Homo sapiens
gaagcggaccccagttcccaccctcttgctgatcctaaagcctttctatgcaaaaactagcggaatgctattgaatgtaggtttccgagccagccctattctctccgactacttcaacatca

SEQ ID NO: 291748 - DNA, 122 bp, Homo sapiens
atgctgatcaaagactaaaaggaacacaaatgcttggcttttcaatatgctctctcttcccgcttgtttttccttttgccttcccctactggccactctttttccatttacttattcattca

SEQ ID NO: 291749 - DNA, 122 bp, Homo sapiens
agctctcgggcaaacaaaggtgcggtcgccaggtggacttaaccctttccctggcactggcggggcctggggggaggcagcaggaggggcggccgggtggtcagtttgaggacctggcccca

SEQ ID NO: 291750 - DNA, 122 bp, Homo sapiens
ggctcagtcgggggtgcggggctgtgacctagaggcttcagtgtcgatccccgaggtgttcgcgcgcgccagctgtcctcgcggccgcctgcgcgctggccgcctgcgcgctgccagcccgc

SEQ ID NO: 291751 - DNA, 122 bp, Homo sapiens
cctcaccatgtgcatcgcctcctccatccacttttcggtctcctctgccgacaccgagcacgcgccgcttgcagctggcttgggtgccgccttcgcctccatacccagccaccactcagcta

SEQ ID NO: 291752 - DNA, 122 bp, Homo sapiens
cttctaacactggccgccacacttaatatggcggccagggaaatttcctggagaaaatcacgcgagagttgcatcacggcggctgtgcgcgagttaagctgggggtgtggagcagccaagat

SEQ ID NO: 291753 - DNA, 122 bp, Homo sapiens
tcacaggaccccagatcttctggggctttataacctgcggatgtccgcctccgagaattccgttaattccacaacgtcaagcccagggtcttacggacctgagcgttgttgaatttcaaact

SEQ ID NO: 291754 - DNA, 122 bp, Homo sapiens
ccaggagatgagaaggagggcaggcctttttaatctgatcagaatgttaacccatctctccgccttgcggtagaacccctggatacattatttgccctctcgaaaggcaggctctgaatttg

SEQ ID NO: 291755 - DNA, 122 bp, Homo sapiens
tgccagccaatcaaggagccgtgtggctcgccactaacctctgccctgcagccgcgagggcgcgcgggaaatcccgagtgcatctggaatacgcagagtcagtaagaccatggctacgtcct

SEQ ID NO: 291756 - DNA, 122 bp, Homo sapiens
taagaattttcttactattcctccactacattacagttacttcctcatccctatacataccgcaataatgagtcagctacatccatttagattatcaacccaaccctaaaagaaagaaaatt

SEQ ID NO: 291757 - DNA, 122 bp, Homo sapiens
agcaaaatgtgtagggctactgctggctgcaggacagccctgtagagaggctgtggtccccgaccaagaggactaatgggtgtcactatgcaaatttgctgtcccacacatcaaaggtctga

SEQ ID NO: 291758 - DNA, 122 bp, Homo sapiens
cgcccgcccgcctgcctcgcgggacccagggccgggggcaggccggccagcccaccaggtcgcctccaggttcaagccggtgcctgcaaagagggcaggcccctttaaactcttttccgtct

SEQ ID NO: 291759 - DNA, 122 bp, Homo sapiens
cgccccgttttttcgtagagttccgtcggccaaaaccacttgaaactcgctcagcggcgtcggggctccagccaggcgtcaccttccacagcgaacctgcgaaccacagcgtcccctggggg

SEQ ID NO: 291760 - DNA, 122 bp, Homo sapiens
gattgtaggaaattcagagttatattttccagcctctccagccagaagtctccactacgtcgtgggaaacatatatcaaatggagttgaaaggcaaaaggaagtgagcaaatactgggctag

SEQ ID NO: 291761 - DNA, 122 bp, Homo sapiens
tcctccctctggttccctctgctgctgacacgagcactgcacccaggcgacggccccgggcgcccaggctgactcccgcactcgggcgctgagctcatggccggttctgaagaactctggtt

SEQ ID NO: 291762 - DNA, 122 bp, Homo sapiens
tgtgcggagtgggcgggaaaacgcgaaggaggacaggaggtcaggccggaaggtatacttcggcatttgacagttgacgacaccagcaacaacattgaaatcctattaaattgcgcgtggga

SEQ ID NO: 291763 - DNA, 122 bp, Homo sapiens
accgccgttcccacgctccctgtcccatggcgaaggtcgccggtgcccggtattcacctacggcattcgcggctgcagccttcagcacccgcgccattttggaaagcaacccgccacgtcaa

SEQ ID NO: 291764 - DNA, 122 bp, Homo sapiens
agagcaagacaatcaccatctgaattccagaagccctgttcatggttggggatattttctcgactgcatggaatcagaaagaagcaaaaggatgggaaatgcctgcattcccctgaaaagaa

SEQ ID NO: 291765 - DNA, 122 bp, Homo sapiens
ggagtagttgggattttgctctgtcagtaacacatgtgtaagagccgcggagggagcgagcgagccggctagaggccagcgccgccgccgccgccgcctccgagccgggcagcaacagcccc

SEQ ID NO: 291766 - DNA, 122 bp, Homo sapiens
ctgcttcactactaggatgcagagcccatgggatggatgatgcatgctgtcttcccaccccgctagatcggagggccctagtctgcggcttggcagtccaccccgtacccacatggtgccag

SEQ ID NO: 291767 - DNA, 122 bp, Homo sapiens
gtgtcgtgaaaaaccagtgagagatgtgagaaagaggtgccagcgtgcatcgtttgagaacggaacatctttggttttttgatgtccattgggtggcactgtgatcttatttttgtttccat

SEQ ID NO: 291768 - DNA, 122 bp, Homo sapiens
ccggggccgccgaggggcgcgggctggggcgcgtggcgggcggggctgggcgggggcgggcgcgagggcggagttgcggccgaggcggccgtgaccggagcgcggctcaggggccccagtgg

SEQ ID NO: 291769 - DNA, 122 bp, Homo sapiens
agaaatccatactcatcattcatcgggggccttattaaccttcttacgatgtgataggagcggcttggcctcctgactccaggggcctgggagaggccatccttgtctccggcttggaggag

SEQ ID NO: 291770 - DNA, 122 bp, Homo sapiens
acaccttcagccgcctacagaacctcacagagctctcgctggtgcgcaattcgctggccgcgccacccctcaacctgcccagcgcccacctgcagaagctctacctgcaggacaatgccatc

SEQ ID NO: 291771 - DNA, 122 bp, Homo sapiens
ccggaacaaaggccgcggcgtgtttatccaccctaaaggccgcgcagacagcccagaccccggaaacagccaatcgtgtcgaaattgatggcccactcaggatgcctcatttattaccagag

SEQ ID NO: 291772 - DNA, 122 bp, Homo sapiens
ccccgtgcgccttgtcactgtggacggcgggggggccttggtggaggtgacagagcatgtcggctgcgagtctgccaacacacaggtcctgcaggtgagtggcaggtgcccagctcatgtga

SEQ ID NO: 291773 - DNA, 122 bp, Homo sapiens
cacccgggtggagatagtgttcaccgcgtggtgggggtggaccactttgaaatacctgtccgcagccaccaccgtaaggaacacgatgctcccggccctgttcatggccaacgtgaagagcc

SEQ ID NO: 291774 - DNA, 122 bp, Homo sapiens
gcccattttccttctctcccctcgcacgctaattgctcaacgttgatttgatctcccgttcggcacagaggaaattgccctattagccattttcatcccgggatttttttttttttttaaat

SEQ ID NO: 291775 - DNA, 122 bp, Homo sapiens
aaaagaaaggagaatgcacaggctgcattttgttgtctaaggagagaagtgaaatcagttcggtgtggccactcttcactggatgccagcagggctcctctcaaattttctgacctgactgc

SEQ ID NO: 291776 - DNA, 122 bp, Homo sapiens
atttttgcagcttattgtgatgacaacagtggaggatggtcttccacttcaccttaaaagcggctgttctctgattatcattaagcatggccacgcccgcacttaacttctgacagtgggga

SEQ ID NO: 291777 - DNA, 122 bp, Homo sapiens
tcggcttagtggctgaagactgacactgcccgatcgcctcggaagccccctagaccatcacggacatcgagcttcgggtaactcacagtggaaggtaagcccgtccacttcttaatcaatac

SEQ ID NO: 291778 - DNA, 122 bp, Homo sapiens
ccccctgcgcgaagccctcaccttctcgcttccttctcttaggctagggagacaccgccccgcgaccacacctgccccgaggccccgcctcctacgcagagccccgccctcctcttaaccac

SEQ ID NO: 291779 - DNA, 122 bp, Homo sapiens
ttcacagggcttctaggctgggaaggagaagatgccgtcttgctggcctgctgctgcccccggtctgaaagaaggagaaaagggccatcattggaggggctttcactgccaaattgtggacc

SEQ ID NO: 291780 - DNA, 122 bp, Homo sapiens
ccctgctagggtgcgtctgcatctggaaaagcagctctgccccagcaaggcctggggcagcgggatcctgggggcctggggcaggatgggtggggctggtgctgagggcatcttcctgtctc

SEQ ID NO: 291781 - DNA, 122 bp, Homo sapiens
cattcagtgtttatggagagaataaaggcgctggcccctccagtgaggatatggagtaaacgagacaatcaagtccatcactcctggagcctgcattctagtgtggaagacagacagcaaat

SEQ ID NO: 291782 - DNA, 122 bp, Homo sapiens
ggataatagcagaggaggggagacatcagatgggtgtgtgtccccgggtcgctgtcgagccgggccaggctgctgtcatcggctgaggctgcacttctgacccctgcggtgaagccaagcca

SEQ ID NO: 291783 - DNA, 122 bp, Homo sapiens
tctcaaatgggatggggttgggggtgcttcttcacctacgcccctctctgttgcagccaccggcgttactttaaccaattcctcactttccagacactctcagtcctctggctgctgcttca

SEQ ID NO: 291784 - DNA, 122 bp, Homo sapiens
cgcgcgggtcacacagctgggctccttgggctagagaggaaacgccaagccaggagacgccgactcctggcggttcctcaccaccgatgctcagcttttcgcaattcctaaccgcctccacc

SEQ ID NO: 291785 - DNA, 122 bp, Homo sapiens
aagtcagggtcacgtggtaagtgggggtcgtggtctggggatcacggctccaggtctcttcgcgacaacgcaccgttgacccccaacacctctccctggcggggtcggtgaccgcaacagcc

SEQ ID NO: 291786 - DNA, 122 bp, Homo sapiens
aaggaaaaggcccaaatttgtttagggtcacaacctgttagtgggcaggtttagaccttacgtctaagatagatgtaagacagacgataagctcaagatattttctaatcatttagagtgtg

SEQ ID NO: 291787 - DNA, 122 bp, Homo sapiens
tgcctgactcacccattcatcaggtgggggccttgacgctctgggagccctttcaaaggacgttgccttacacgaaatcgtacttatcgttattcactctgcagtaaccacctggatttgag

SEQ ID NO: 291788 - DNA, 122 bp, Homo sapiens
cctgaactaccagtcagaggggcggatgctgcagctgaaccgagccaagttcagcgccaacggtggctgcggctacgtactcaagcctgggtgcatgtgccagggtgaggcactcggacact

SEQ ID NO: 291789 - DNA, 122 bp, Homo sapiens
atggtacactaaaaatgagtgagatgacagtaaatgtgacagctcctgtctgtcatcagtcgtcttgccaccagaggacacagcccactcattctgagatgcggttcctcaaaatatctttt

SEQ ID NO: 291790 - DNA, 122 bp, Homo sapiens
gcaaagcgtgatgaccgtggggaccagagctcggactggtaccggccggaaaggccccgacgaacttaccgtacagggcagcctcccatagtcctgccctcggaaccatagcaaccgcgcag

SEQ ID NO: 291791 - DNA, 122 bp, Homo sapiens
ttacctcccctttggggctcaagattttctgctgagactctgagcaaaagctgcttgtgacgtttgcccggggaaggtctcggaggcgggaaaaggctaggtagcgaaagaatccctggggg

SEQ ID NO: 291792 - DNA, 122 bp, Homo sapiens
aaaaaaaaaaaaaggaaacactattttaaaccaaaaacaaaattaagatcttcatcaagtcgtctgcatccatatatttaacaaaggtttttttcccccacacaatgaagcaaatactgtat

SEQ ID NO: 291793 - DNA, 122 bp, Homo sapiens
ccatccaaaatgttcttcctgtccctgggattgggcagcctcagcctggcccctttcagtcgcgggagcccctggcctctccaacaggagagagagaaggtagggagaagtggatgggaccc

SEQ ID NO: 291794 - DNA, 122 bp, Homo sapiens
agagatatgcaggtggacccagctcagccatgtgcacatgtgtgctcatctctgtacatgcgcgcgcacacacacacacacacacagctgacagcctcacgcgctggaggggcgcacgcgcg

SEQ ID NO: 291795 - DNA, 122 bp, Homo sapiens
agttgtttttttttaaagatgattcacgttgctccaggcgaaagcatgatcctgatgacacgtggggaaaagcaggctggagcctcagaagagctggccctgcacactcaggtacttacagc

SEQ ID NO: 291796 - DNA, 122 bp, Homo sapiens
caaagaacccacaggaaaaaaaaataaaaccccaaagcaattctgttcacgcagtcactgcgctggggtggcctggaggtacaggacaacgacccccactgacaacgaggcaacgaggcatc

SEQ ID NO: 291797 - DNA, 122 bp, Homo sapiens
aaggcacagtcactgcgcagggaggagacatgacgcccggggtccggctgtcagcccagccgccatcttatggctgaaggggactgaggaccgagctgcgccaaggacaactcgggccgcgg

SEQ ID NO: 291798 - DNA, 122 bp, Homo sapiens
gctctcacttataaaaagcatgcagtttatatacatagcgtcttcacttagctccctccccgccataacctccatgtggtagccctcatttcttaagttattgctgtcaggtatgtctacca

SEQ ID NO: 291799 - DNA, 122 bp, Homo sapiens
ctcggaggcagggcgcagaggcccaaggtgacacagcaggcggccgtcggccggggagcgcgggccccgccagccactttcccgacacaggaaccctcctaccggctggcggcccccgcgcc

SEQ ID NO: 291800 - DNA, 122 bp, Homo sapiens
gtcgggccccgacgccagctgtccccccgagaagctccgcagcgcgtcgctccaggagtgcgaggagccatagatggcgctgccgtccagccagcccgtcacctggttggcctgcggggcac

SEQ ID NO: 291801 - DNA, 122 bp, Homo sapiens
tttctttggggtgggacttgccctgagcttggagctgccacctggaggacttgcctgttccgactccacctgtgcagccggggccaccccaggagaaagtgtccaggtgggggctggcagtc

SEQ ID NO: 291802 - DNA, 122 bp, Homo sapiens
cgatagccaacagccaagcgtcccccccacaccccctcgtggcccaggagcccgctgtcacgggcgagcaaaccccaaatactcagcaacacaaaaatatgcctccgtgtgtgtgtgtgagt

SEQ ID NO: 291803 - DNA, 122 bp, Homo sapiens
tacatcaggcatctcacctgacgctccagcagacagaagcacagccgcctccaggctgcgcgtctcacgtctagaattctaagacatcccatgatgtctcaggacaacagcagcaaaccctt

SEQ ID NO: 291804 - DNA, 122 bp, Homo sapiens
caagtttatcctgtactatagccaatgaacaaccaggtggtgatcacatccccggggaagcggggagggcgatgcaggcacacatggggtcctgttgtaggagagagaccagagggcaggaa

SEQ ID NO: 291805 - DNA, 122 bp, Homo sapiens
gcagcaggaaccgaacatccaaaatggcggctccctcggcctcaccaccgctaccgcaggcggagggatcctgaggaaggagggagtttttaactaacttcacacactattgaggaaacttc

SEQ ID NO: 291806 - DNA, 122 bp, Homo sapiens
cacgtggggttgcacgtcaactgggaactaggtgcagccacaaccagggagccaaggcctcggatgtgtggaaatcattgatggtttctgctagagactgtccttctggtcacgggatgcct

SEQ ID NO: 291807 - DNA, 122 bp, Homo sapiens
ttgagcttgtaggacgttgtgaaggcccaaccacagccctccagtgggcacttgaagggccgccggccctgaccgccgccgtgcgtgagcaggtgcaccttgagctggtgcttcttggcgaa

SEQ ID NO: 291808 - DNA, 122 bp, Homo sapiens
gagacttggctgttaggtttgaagatcctggactgggaaggagaaaagggcctacctgagcggaatttagatttgcaacaaagaacgtttacattattttggcaggttttagccaactagaa

SEQ ID NO: 291809 - DNA, 122 bp, Homo sapiens
ccagagtcggaaccctccaccattaggctacactgccttccggaatgagtccgaagattgcggcttggagacagtgactggcccacgttcacagccagtaaggagccacttggccggaacgt

SEQ ID NO: 291810 - DNA, 122 bp, Homo sapiens
tcaaatgtaacaaacttcagtcggtatcagccatttcctgggttccgctcaggattgcagcgtaaaacggccatcactgcttcatctgccaaatgtctgtgatctcacattcatgacaacac

SEQ ID NO: 291811 - DNA, 122 bp, Homo sapiens
acccgccaacctccaagagccctcttgcagaaagctgcccggctccccacggtggccctgcgcgcgcaccatcctcgcggtctcgcttcttcgccccggaaaactctatgaggggcacccca

SEQ ID NO: 291812 - DNA, 122 bp, Homo sapiens
caaccacaccaacgagaccctgggtctggacagccgcttcgtggacaagctgtggctgcccgacaccttcatcgtgaacgccaagtcggcctggttccacgacgtgacggtggagaacaagc

SEQ ID NO: 291813 - DNA, 122 bp, Homo sapiens
atcaacggcaaaggtgtgtgaggcgccggccaatgggctcgcggggccacgcgtgatcggcgactgcccggcagcgtgaagctggtgtcagtggagcgtgtacacaatccccggcagcgtgt

SEQ ID NO: 291814 - DNA, 122 bp, Homo sapiens
ccccggcccgggcggactggagactcgaacttgagcgggtgcccgaaaggccgcaggagccgcgggcggaaggcggccgcacgatggccgaggggcagggcggcggagggcagcgctgggac

SEQ ID NO: 291815 - DNA, 122 bp, Homo sapiens
ccgactcccagggtccgttgcggcgcggcggagcagccaatggcgagccccacagtctcgcgagagtgctcaggcgctcttcgtggctgccctcttagctgctagcggagctcctcaggggg

SEQ ID NO: 291816 - DNA, 122 bp, Homo sapiens
ggtcccagcgggtcgggctcatgattccccggccccgcattcaccctcacccggtaaccccgggcgtgccccgcacacagttcacccccaccgagcgcctcccccgggacgcccaccaccca

SEQ ID NO: 291817 - DNA, 122 bp, Homo sapiens
ttcagtgtagactttaagaacctaaactaacgcttctcgcgagaggaaagattgaccgctcgcaagcgtacatcagctggtgccccgccttccctgggccccacccactgcctgtcctcatt

SEQ ID NO: 291818 - DNA, 122 bp, Homo sapiens
atctgtggttgagttaaagatacgtatggacagcgggtgaaggggctgttgcggctggtgcgagccgtggcatttcattttctatgccaggcctgctgagctgagcagaggatccaggcagc

SEQ ID NO: 291819 - DNA, 122 bp, Homo sapiens
taggccacaccttgttggtcgctgcccctctatgccgtgtcaccagccggcaccacccatcgctgtggaccgcggcccccatcacaagctggtgcccagggcagtccccatctctgtggagg

SEQ ID NO: 291820 - DNA, 122 bp, Homo sapiens
gaaaaccgccttccagcgcagctcttcgctttccccatcctttcctcgctcagagctctgcgcacagtaggggtttaaggatgttcaggataaaaacccattgctccttctccctgagggct

SEQ ID NO: 291821 - DNA, 122 bp, Homo sapiens
cacgtggagacggacactgagggcgcggcgggcgcggggcctggggggcgcctgacacgccggccgtccttcagctcgcaccacctcatgccctgcgacactctggcgcgccgccgcctggc

SEQ ID NO: 291822 - DNA, 122 bp, Homo sapiens
ttttcaaggttctttcacatgaatcagtgcctcagtccttttcatggctgcataatattccgttgtgtggacattccacactttgtgtgtccatccatcactgatggacatgtgctccgttc

SEQ ID NO: 291823 - DNA, 122 bp, Homo sapiens
tggagggaccctggaggtgccgccggcctcagcccatggcccaaaggtacgatgagctgccgcactacccaggcatcgcggatggccccgcagccctggctggcttcccagaggcagtgccc

SEQ ID NO: 291824 - DNA, 122 bp, Homo sapiens
tgagccccctggagagcctggcctgggcccgggtgtggagaccctcccgggctttcaatccgggcaggaggcagatggcagactcagcagtcacgtaagagaaccgaattaggtgggtggcc

SEQ ID NO: 291825 - DNA, 122 bp, Homo sapiens
ccaaagagctggcggcgtcattcccattttacaaatgcgaacacgggctcagagatggagcgactcacgttgtaagcgatggaactgggatttgaaaacactgtatcccgcctggcagaaaa

SEQ ID NO: 291826 - DNA, 122 bp, Homo sapiens
aatgggtctgagagcaacaggcaaatgccccagtgtgtgaggtgcatgttcaagcctacacgtgacgtgaacgttcaagaatacgcgtgtgtattatatcagcttcaaaggtgtgtcggcag

SEQ ID NO: 291827 - DNA, 122 bp, Homo sapiens
gcgtgggctcggcgggcttagcacctgggccagcagctgcggagggggcaccaggtcccccggcactgtgggcccgccctcactgcgctggaattctccccgggcctcagccgcctccccgc

SEQ ID NO: 291828 - DNA, 122 bp, Homo sapiens
acctactgcaaaggtcgctgggtgggccacagcttgctgcacgtcttcagtaccgagttccgagctcagcccctggcctactatgaggccgcggtccgggcgggccgcctgcaactcaacga

SEQ ID NO: 291829 - DNA, 122 bp, Homo sapiens
tccttgggtggtctgcatcacagtaaccaggctggtacccatgcttcaggacaaagttcccgttaatcttccttctttcctcaagcagaacgagtctctttccatggccaacacactgggaa

SEQ ID NO: 291830 - DNA, 122 bp, Homo sapiens
gagtgacgtcacatagtggcaaccaatcacaagtctgctttgaaagatactgttagggagcggacactgtattggtagagatgctctgtcagtctcgcagaggactcgcctcttttctctta

SEQ ID NO: 291831 - DNA, 122 bp, Homo sapiens
aattttagtgaagttggaggccaccaaactaccgactccaggggaacagccagagaagaccgaggcctccgcctcagtggtccttgggagggagtcagtgacattcgggacccgcgaactag

SEQ ID NO: 291832 - DNA, 122 bp, Homo sapiens
tccccagcccacacaagcttcctgtcacccttcccggggctacgccaggtggagggcagccgtggatcccagttctttaggtgtgggtgggaatagaggagcgcaagcttctgaatagggga

SEQ ID NO: 291833 - DNA, 122 bp, Homo sapiens
ggtgctggggagcgagcgcggagcgaggtgtctctttaaatacgctctgcagtgtgacggcggccgcccggctggaagagccatccccaccctgcggcaggagcccgcccgccgccatcgcc

SEQ ID NO: 291834 - DNA, 122 bp, Homo sapiens
ctcaggcaatccacctcccttggcctcccaaagtgcggggtttacaggcgtgagccaccgcgcccggcaaggaattaatattttactaaaacagtttttagaaacaccagggaaaggctcag

SEQ ID NO: 291835 - DNA, 122 bp, Homo sapiens
tgactggtctgggagttcagtgacaaccactcctagatctacttgcacttgccacaacctcgttgtgtgatcttgccattctaactctcagattcaatgaaagctgtatgtcttttaaaatt

SEQ ID NO: 291836 - DNA, 122 bp, Homo sapiens
ttgaaccgccggaggggcttgagcattcagcccctggggatggtgttgtagggaccagcgcgacatcgggtctaacccgcccgagggacaagggggtggcaatcagaggggccgacagaccg

SEQ ID NO: 291837 - DNA, 122 bp, Homo sapiens
gtcttgacggaagacatagtacaccgggaggtgacccctgaccagaaactgctgtcccggcgactcctgaccaagaccaacaggatgccccgctgagccgagcgactgtttcctgccaatgt

SEQ ID NO: 291838 - DNA, 122 bp, Homo sapiens
cctgaatatttcagttactcccccaaaaccccggcctccatcccatccccagcctccatccgacgtcacccctgttaggtcacaggcccactctgagagtgggtctcgggcctcaagtcccc

SEQ ID NO: 291839 - DNA, 122 bp, Homo sapiens
gggtaaaaggcagggctgtggacacacccttctcttcttgctacccccaccctcagaaaccgtctatgactcttccatgctctgtgatgcaggtctgggcctatagttaagactgggcacct

SEQ ID NO: 291840 - DNA, 122 bp, Homo sapiens
tggagtccgagtctcaggcccagagtgggtgcgatggtcttgcttgcaccctgtatcccccggcagacgcccgggaactctactaagtgggtgaccccagagagctcgcccccacactccga

SEQ ID NO: 291841 - DNA, 122 bp, Homo sapiens
tctcctgcagaaaaattagggtgagccccatcctcgatctgctccgccaagttgcgggaccgcggggcgtggcacgctcggggcaggcggtccgaggctccgcaatccctactccagcctcg

SEQ ID NO: 291842 - DNA, 122 bp, Homo sapiens
ggcgggaaggtgagatggccaacactgggctcctgcctcgtgcccttgcactccctcctccgggagaagcaagcagcttggttgataagctgacccaggccgagtcctgttgcctggtctgt

SEQ ID NO: 291843 - DNA, 122 bp, Homo sapiens
ctcctcctgtcctgccttagctggcgcccttcactccctgtctcctgcctctgactggaacgagaaaataccttgcacatcccaggtccacccagccaaccctgactggtccagtaagctgt

SEQ ID NO: 291844 - DNA, 122 bp, Homo sapiens
ggagaaatttctgaagaagcagacgtcgcagctggcgggccgaacggtggcgggaggtcccggcgggggtctggggagctgcggtgggcctggagggggtgggggacccggcgggggcggcg

SEQ ID NO: 291845 - DNA, 122 bp, Homo sapiens
tttcaccccagtccctgggagtagctgagcttccctccttaggacccacagtgtcccttccgtgccagtggaacctgaccccaagtttgcagcagcttcaagaaagaggagatgagttccaa

SEQ ID NO: 291846 - DNA, 122 bp, Homo sapiens
ccaactgcaactgaggactgagctgctgtggaggtgggctcctcaccatgggagcatcaccgggggctctgcagggctgtctgccacgaaaacaatgcccagagctctctcctcccctcatc

SEQ ID NO: 291847 - DNA, 122 bp, Homo sapiens
gcgaatcgacgtcgtcacgtgacggtctgcctccgcccttattaactctcagcccagcggcggtttccaggacctcagactttttgccgaggcggcagtccctagacgaagcgaaggaggcg

SEQ ID NO: 291848 - DNA, 122 bp, Homo sapiens
tcagtatttgcctaacaataagcatttcccagcctggagggagggcaggcttctaacgggcgaggcacctgccctgccaccatttccctgtggtcagtcatgtcctgttccccacctcatgg

SEQ ID NO: 291849 - DNA, 122 bp, Homo sapiens
tggtcagggatgttggtcttgctgaacaggacctccagaccgtcctccagctcatgctggcggtgtgccggcggcacctccacggtgcaggtcagttcccaccctggccctcccctgcgtct

SEQ ID NO: 291850 - DNA, 122 bp, Homo sapiens
catagggctgctggaagcctagcttcaacccttccagctgcagcacatcccaaactggggcgagaagcgagtgaggaggagatgcagaggaaggcaaagaacaactctagcgacccagggtg

SEQ ID NO: 291851 - DNA, 122 bp, Homo sapiens
tcccacccaagactagaatttcagctggcatgaaacagctgtctgcttacaggtttattccggtagtaaccaaagacaaaactattttaattgaaggccctaggctgttctccaaaccctca

SEQ ID NO: 291852 - DNA, 122 bp, Homo sapiens
tagtatacaggcttactgaaaggcagggaatgagataggtgaatgagataaactgtatgacgtatgtataaataaagtgctcaagaaatggtagttacttctgttactattatatgagttcc

SEQ ID NO: 291853 - DNA, 122 bp, Homo sapiens
gggcctagcaggtcctgtgcggggcttagggccggggcggggcccaggaagactcagcagcgggtgggtgagggtctaaaggcggcaattccgggccgggtgcggtggctcacgcctgtaat

SEQ ID NO: 291854 - DNA, 122 bp, Homo sapiens
cctccaggggcgggggtggggtaacggcgggcggggggcactcaagcgacagggcaggggcgggaaggccgcgggcgggggcggtccctccggggacggggcgggtgggggcaccgcgggcg

SEQ ID NO: 291855 - DNA, 122 bp, Homo sapiens
agtcttggaacttcccgcgtcggtatccgctaactgcagctatatgagttcgcgcatgagcgcgcagtttggttctccaagtaactgcttttgtgagagtagttaagaattggtaggtcgct

SEQ ID NO: 291856 - DNA, 122 bp, Homo sapiens
ctaattttcacatcaaaccagaaacaaatcaggataatagttctccattaattcttttcacggatacaaaatgctaatatgatactccactattctgtactaaagtgacgtgctgcaaagtt

SEQ ID NO: 291857 - DNA, 122 bp, Homo sapiens
agcatgactctttcagctactaattaatcccactgttaggtggtaatgggagaaagatcccgggggtttaggttgaaattctgtctagctgagtacttgaaaatctgataggcttataggaa

SEQ ID NO: 291858 - DNA, 122 bp, Homo sapiens
ctctattgctgcttagagaatggataggtgaaaggaaggcatggctagaaaaccacgcatcgtgttagcgtggatcaggcactttcagtaacagcctgctgaccatggcacaggcagtctcc

SEQ ID NO: 291859 - DNA, 122 bp, Homo sapiens
ctgcagaagaagtgctgaggaggagcagccaggttcctcgggtgcctgcaagctcagcctcgcgctgtgctgggcagtgggtatgggtggaagacgagggctcggtccctatgttcaagctg

SEQ ID NO: 291860 - DNA, 122 bp, Homo sapiens
taaatgccttgtttgtaatgaaagtcattttttgcaactagtctcaaagatcctcacatacgacattgctcaatccgaaacttgaacacagccttcctgggcctacataaacgtagtctctc

SEQ ID NO: 291861 - DNA, 122 bp, Homo sapiens
gccagggcagagctggaggatggactggagtctcctggttccaggtccaggacttctttccgctgtgttgacagagccaggaggaggggcacccggggagcaggggaggcaagggctgctgg

SEQ ID NO: 291862 - DNA, 122 bp, Homo sapiens
ctatgtgtgtctcaagataattactctacttcagagctgaacctcctgttttcatcaaaacgggtattaagtggtgtagtgacccattactcacctacattcctttttaatgacttttggct

SEQ ID NO: 291863 - DNA, 122 bp, Homo sapiens
aagagaaggaaaaaagagaaggcgctgtcccgctcttgctacggtggcctggaggagtggcgaaaccggaacagagaatttatcacttctgggactcacagtcgtgatgtctttcaagaggg

SEQ ID NO: 291864 - DNA, 122 bp, Homo sapiens
tacacgtagagtggtggtattacagactttcttgagaatcatatctagctatttcccccccgtatagaggcataacataccatttggcacaatattcaaagagtctatgctgaagcctattc

SEQ ID NO: 291865 - DNA, 122 bp, Homo sapiens
gttagatacaaaacgatcgatctgccccaggggagcccttccctgagcccccttacttaccggagccccacagtaggttttcgggcctgggacactctcgccccagccgttgccttgaagtt

SEQ ID NO: 291866 - DNA, 122 bp, Homo sapiens
agaccgccagaagctcggaaaagcgatccaggtgctgcagaagggattccatgaggtgcgcgaaggccctacttccgctttcaccttggagacggcgactctctgcgtactgattggaacat

SEQ ID NO: 291867 - DNA, 122 bp, Homo sapiens
ggatagcccgaggcagcacggcgttcccgcagacgctgggcctgccgctgggcctcaactcgcttggcttgcagcttgcccagctcccgtgcagggtccaccagcccctgaagctgcaggtg

SEQ ID NO: 291868 - DNA, 122 bp, Homo sapiens
ccaggacggccagaccggccccgggacctggagctgaccgacctggccgagaggagcgtgcggctgacctggatccccggggatgctaacaacagccccatcacaggtagctcagggccttg

SEQ ID NO: 291869 - DNA, 122 bp, Homo sapiens
tgcagcttgttcccggaagttttgctgctagtcgcggacgcaatggcttcaaggttacttcgcggagctggaacgctggccgcgcaggccctgagggctcgcggccccagtggcgcggccgc

SEQ ID NO: 291870 - DNA, 122 bp, Homo sapiens
caaaataaataaatacataaatgtccaatgctagggcaccgcatttgagcctagctcggacggggcctctgcgacggagtatcctgggcgaccccgtcccctctctggcccgtttcccagtc

SEQ ID NO: 291871 - DNA, 122 bp, Homo sapiens
ggagatctcaggcttgtaccaatacttagaagtgtcctggacaaacttcactttagcccgcgtctccgggctgttgtctaaagcaggagaagggaagaaagtgttatgggttaaattgtgtt

SEQ ID NO: 291872 - DNA, 122 bp, Homo sapiens
gtcacgtgggaggcggagtcggaagtgtgacggcgtgcgcggggcggggctactgctgcgcgcgggcgcgggggcggggcggggcgcggcgcggcgcggcgctcgcggctgctgcctgggag

SEQ ID NO: 291873 - DNA, 122 bp, Homo sapiens
tcacaggctgaaaacctggagaaaggtccgcgacgccggggacacacgccgcagaggcgacgcccgcccggcccaacgtccagtctcgtctgtttcccgaggagccaatcagcacgcggccc

SEQ ID NO: 291874 - DNA, 122 bp, Homo sapiens
tttcctggagcttgcggaaggtcaccgaaatcgtgggggtatctgagagcttctggggcgcgcgggtgcaggggaaggggtcatgcttccgtggaagcggtggcctccaggtggagccgatg

SEQ ID NO: 291875 - DNA, 122 bp, Homo sapiens
ccctggtgttagtcaaacgacaccagcttccctttgatgacagaaaaaagggtgtgcgtgcgtgcctaaagctctaacggcattcaaaaattctgaaactgttcacagctcctgcctcttca

SEQ ID NO: 291876 - DNA, 122 bp, Homo sapiens
gaggccggccagagaccgccgcacagaagtgggcgttccccgctgaggggccgggggccgcggtcagcttctctgagtgtcctggtcttggaggacacacgtcacgtgtgttggccaaggag

SEQ ID NO: 291877 - DNA, 122 bp, Homo sapiens
cgggcagctcaggcgggctggaaaacggctcgatgcacagggtctcaaagctgtcgtctgcgcggaaggcgagccccactgtggctggggcctgtggccgtgctgtttggctggtgaagcca

SEQ ID NO: 291878 - DNA, 122 bp, Homo sapiens
gggtaggccccccacacatccccttggctcagccctgccggggcccgaacccgcgccgcccgccgtgtttacattccacccgcgccagccacgcggctttttgccgctccagcgccgctcgg

SEQ ID NO: 291879 - DNA, 122 bp, Homo sapiens
ggagacgatgatattacgcccaataccacaggtgcggtacacccgtcctgtgatattgttcgtaatatcccagggaagagaggatgatatgacacccaatatcgcaggcggtgtacaccctc

SEQ ID NO: 291880 - DNA, 122 bp, Homo sapiens
caggcatgagccaccatgctgagcctttaaaatttttttttaacaaatttattgagccaacgttccagaggccacagcctgaaatgaaggtgttggcagagctgtgctccctctgaaaacca

SEQ ID NO: 291881 - DNA, 122 bp, Homo sapiens
ttcactctgccaggtgccaggcccagggctgtccaggcaggggctccacactcctccaaacgttcactcaaactgcattttctggttggtgcacgcctggctcccggctcctacaggaagtt

SEQ ID NO: 291882 - DNA, 122 bp, Homo sapiens
gccggccgctctctagcaataggaatttgaacctagagccccgtcccacatcttctcaaccggaccgaagggacaagcaatgcactgcttcaccccataggtcaggcagtttaagggttttt

SEQ ID NO: 291883 - DNA, 122 bp, Homo sapiens
gttgtcctggggctctttggaacgccatcttcctcccacttacctgcctcccctccttttcgcaaatgtacagaagccatttgtcacctcagcattcgctgccgaaatgagcaactccattc

SEQ ID NO: 291884 - DNA, 122 bp, Homo sapiens
gctttaacgaaggcatctgttatatgtgacactgagcttagaaacccaaaggcccctttccgagttcaaggagtagagattggaactcttgcctcttttcccagagccagaaatatgcagtt

SEQ ID NO: 291885 - DNA, 122 bp, Homo sapiens
agacagactaaagatgtcagtctgaagatgcagctcttctttgtcttgccaagataacaccgataagtgacccaggtgggaagccacttggtttgggtgggctttctctctcccatgcacag

SEQ ID NO: 291886 - DNA, 122 bp, Homo sapiens
gcagatacatgaggcttaaaacctgcccttttattaattcaagtactgttgaggggctggcgacaggccagaggacaaaatcaaaatagggatcttctggcttggagttcaaccactgacgt

SEQ ID NO: 291887 - DNA, 122 bp, Homo sapiens
accaaagaaaatagttgcagcttaatgcctcacttgggagtttgcaaagtctctgctctccgaaggccttggtgggtgaaaagcctaaatcgtccttatttcccaccttgcttctctccttc

SEQ ID NO: 291888 - DNA, 122 bp, Homo sapiens
ccgcacacggagatacacagcgacatccgcccgcaagagcatggtgggtgccggagctcccggctgtgggcccaggaactacatttcctagaaggatgtgctagatactcgttcgcgtcggg

SEQ ID NO: 291889 - DNA, 122 bp, Homo sapiens
atgcacacacacgcgcgcgcgcacacgcacacacacacacacacacacacacgcgcggcgcgcagaggactgccttgtcaagtcttccaggagatccggtctggaaacctctctgggcagcc

SEQ ID NO: 291890 - DNA, 122 bp, Homo sapiens
tatttttgtgtgtgtggtgggggcagggcacagtgtggggtatatttgcttcccctcacccgcctccttcctgggccggggtctccatcccagccagcctttgctgcaggtttaactgggct

SEQ ID NO: 291891 - DNA, 122 bp, Homo sapiens
ccagaggcctcatggagtcccgcctcaggctcgggccttggcccccaaagaaagccactccgacgtgtttgagatgggcttagttcccggacccgtcctactgcccccaggcgctggacagc

SEQ ID NO: 291892 - DNA, 122 bp, Homo sapiens
ttagtcccaaacatctcccacacataggggtcccagacaaagaagctggtagccaacaatcggttttgactaagaaagagaaatacatgcccttaaaaaaaaagcctaagaaaatattttga

SEQ ID NO: 291893 - DNA, 122 bp, Homo sapiens
tacaggatttcccagaaaaaacaaatgaatgctgtgcgtgcacatcctatttaagcctggcgccactgaggctggcaaaaaatggaactccaggaactgtaaagccttttccttctagatat

SEQ ID NO: 291894 - DNA, 122 bp, Homo sapiens
gcccggaagctcctcagcctcctcttcctcatcctgatgggcactgaactcactcaagtacgtgcatccaacgccattttcctccctgccaggcgcccggcccggcccctcgggagccccac

SEQ ID NO: 291895 - DNA, 122 bp, Homo sapiens
cgtggtggctgaaattccctgtcatgctgtaaaatccccttttgaagcggctcaccagcgcggagatcgtggagagccctgcccggagctgcgggccagggccgccgcccgtaacacaagcg

SEQ ID NO: 291896 - DNA, 122 bp, Homo sapiens
tgtgagccacctcgcccggccagtaatgcatttttgatggggtttctacagaagtgaggtcgtatcttcagtgtatcacctcatgaagtacattatatccagtaaggtagttttgagtgtcc

SEQ ID NO: 291897 - DNA, 122 bp, Homo sapiens
tggagcccaggatgtcatcggggtcggcgccaatgcgctcagcgtagtaaatcatggtggcgaagatgagcacccccagggccaggaagatgatgagcagcaggaactcgttggtgctggcg

SEQ ID NO: 291898 - DNA, 122 bp, Homo sapiens
caggccttaagtatgctaagagtcgtcggctggcaatcggtgcaacgtggggtaacacaccgtaagtgccactttctccccatccattcattcattcataagcctaatgagctgggtcccta

SEQ ID NO: 291899 - DNA, 122 bp, Homo sapiens
gccgccgggaacctcgcagagcggcggggtggccctggcgaggcgcggttgttgggggttcgctcgagcctcacgacgcccgcgactggggactcggaacctgggccaggctgggacgaggc

SEQ ID NO: 291900 - DNA, 122 bp, Homo sapiens
cgtgcggatcatcatctttacgttgctattaaaacagctcctggcactacaaagtagctgcgttggagccaacaggaatccataaatcagcagcaggttaaagattgttgaacttctctgtg

SEQ ID NO: 291901 - DNA, 122 bp, Homo sapiens
gacctgccgggagagtggcctggggcagctggaggcagccacctccaggcctccttactgcgggggctcccgcctgttcgcaggtggcaggaaagggaatacactgagatcctctttccagc

SEQ ID NO: 291902 - DNA, 122 bp, Homo sapiens
gcggggccccgcgcgggggtgcgcacattcccgccagccccgccccgcgcccggacgccccgcccccagacctcagccggttccgcccccacccgcaactcccgtgggaatccagctgctgg

SEQ ID NO: 291903 - DNA, 122 bp, Homo sapiens
gttagggggtggggacaccgcggaagcccggaaatggtgactgtgcggggcctggaatcccgagacctgaagagctgctggccggaaccggctgtcgcgggaaccgggcctgcccgcggcca

SEQ ID NO: 291904 - DNA, 122 bp, Homo sapiens
gaagacggcgctgagctggctgaccgtgggggacacggcgtcagcgtccagcttgtccagcgcctcggtgctgccgttgaagcgcaccacgacgtccagcttccggtcctgcaggccggcgc

SEQ ID NO: 291905 - DNA, 122 bp, Homo sapiens
tggttggaggacaggcacggcctagcattgaagctggtgagtcagagccggacctgtgagcggggccagaatggggcgcgggcttcagacttcacaaagcagaccacgcggcagcctggggc

SEQ ID NO: 291906 - DNA, 122 bp, Homo sapiens
cattgctgggtcccttcactctgctttactctcctcccaagacagacgtagcatgggccacgtgaattcatccatgtcctgaactaatctggttgttctaccaggttactcttaagttcatg

SEQ ID NO: 291907 - DNA, 122 bp, Homo sapiens
ctgcagcgccgaggtgagtgagggctttgggccggcggtcccagggcagccccgcgggcccgtgcccagggcgcaggagcagccgggttggcctaagggaccttagtgccgggcggaaaggg

SEQ ID NO: 291908 - DNA, 122 bp, Homo sapiens
tgcccaactggggacgaaggaggtcagtggcttcccctaaaggtcaaggctttggagccacgtttccttctggggctgggagcagagctggaacgcccccgcgaaaatccgtaccccgaagc

SEQ ID NO: 291909 - DNA, 122 bp, Homo sapiens
cccgggacacacggactcaccagctgtgcagagggtgtctggagccccctagggggcacccggaccctgttacccaggccctgggatgatggtggggcctcacagtcagcaccctggtcctg

SEQ ID NO: 291910 - DNA, 122 bp, Homo sapiens
caatgcccccgaagtgatcctcacctctctgaccagttcgatctctgaagactgtcttcccggaactgtaatcgcgctgtttagcgtacatgatggtgattctggagaaaatggtgagattg

SEQ ID NO: 291911 - DNA, 122 bp, Homo sapiens
ttctacttgattattcttggagccagagaatgtcaagatgcagcgggactctagaagcctcggagtctcagcctgactttagaactgaatttttgtccaaccaagggtgtgaataaatgcaa

SEQ ID NO: 291912 - DNA, 122 bp, Homo sapiens
atacccttctagtcagaggtctcccctcccccttcttcccacccccaggtgtaagaaggacgattccaggaacctaaggctttgttactctgccccattttcaatgaagggtaggagggagt

SEQ ID NO: 291913 - DNA, 122 bp, Homo sapiens
atagtgactgcctgggcccttctcgcgttcatccttggaagatctggtacctgagtgcagcgaggcctcctgcggccaccctcgggtccccatgctctctgggaggtgtgctgggtgtgttc

SEQ ID NO: 291914 - DNA, 122 bp, Homo sapiens
ctgctgctgccatatcacacacaaactcttcccctttcaccgcgctcggagagagccccacgctgtgtatacctggctcacttcccccagtagacagggagctccagatgctcagggccata

SEQ ID NO: 291915 - DNA, 122 bp, Homo sapiens
caggcagggaactagcccgaagacccagcgtgggcaggccaacgcccctagcctgattctcgaatcttcgccaaaccctcttacaggccaacagtcggggcctttgtgaagggaaactcgct

SEQ ID NO: 291916 - DNA, 122 bp, Homo sapiens
ggactctgaatccagccatctgagttcgagtctctgtggaacctttctgtgtaactgggacgataatgccgtcttttactccctaaatggaatggggattccgctgacgttcttcagaagct

SEQ ID NO: 291917 - DNA, 122 bp, Homo sapiens
tgggccaggactcattctcctgaccactgccgagagcgccacggtacaggccgctgccagcgccgcatggatccctggcacgtgccaggaagtgtccatttcacaggcagggaactagcccg

SEQ ID NO: 291918 - DNA, 122 bp, Homo sapiens
gagtgagccgcgcctggccagccatgtggcagcagacacagcccaacccaggccgactggcgaaaaaggaggcaacataatggccagcgatcgcctcgaaagaacaaaccagctgaaaatcg

SEQ ID NO: 291919 - DNA, 122 bp, Homo sapiens
gcgccggctctgggctccgccgctgcggcagccgagggcctcagctgggaaatccaaacccgggctggacctgggctcaaggaggtttctgtccccaggctagaccaccacggccacggcca

SEQ ID NO: 291920 - DNA, 122 bp, Homo sapiens
gactcgccgtgtgcagtgggagtggctagccagtctcgctagcgcaggcgcaggccctcccgcccaggcccttgcgcaaggcaggccatctccccgcagcgtctcaatcccgcgtttacaac

SEQ ID NO: 291921 - DNA, 122 bp, Homo sapiens
aggctgaggcaggagaatcacttgatcacttgagcccgggaggcagcggttgcagtgagccgagatggcgccactgcactccagcctgggtgatagagtgagactccatctcaaaaaaaaac

SEQ ID NO: 291922 - DNA, 122 bp, Homo sapiens
atctcgccttcccaaattttcccccctcgctagaccgggtccaaaacctccatccggagccggcaggagaggagaacgatgtttaactcggtcaacctgggcaacttctgctctccgtcgcg

SEQ ID NO: 291923 - DNA, 122 bp, Homo sapiens
cattacggatcccggctgaaagccattttgtttttcagctcacttcaagggtacctgaagcgaattggcaccaaagcagcagctgtattgccgcagttctagcttcaccttcacgatgtttc

SEQ ID NO: 291924 - DNA, 122 bp, Homo sapiens
ctgcccaaccttggctcatagcgacattggaggggccgggacagccagacctcacctcctcgaggagcttcctcctccaaggaggggctcaggtgagcatccggtccccagaagggccctgg

SEQ ID NO: 291925 - DNA, 122 bp, Homo sapiens
aaggccatcctttggacacatgtaaaaagctgtcttgttggcctgttattcccactgacccgtctgagtgatcacccaggagcgcggcggcagcaagcagagctcaccggatttgggacaag

SEQ ID NO: 291926 - DNA, 122 bp, Homo sapiens
ttccacccacgtctctcactgcccattaacaagacccagaggctctcgtgctttcttggtcgaaggtatgagacctgagatcccatgaaatttaatgtaaagtctcagggtttgattttgca

SEQ ID NO: 291927 - DNA, 122 bp, Homo sapiens
acggggcaccagagaaaaacacaggctccctacgcgctgaaggaggcttggcccttgcgacgctccgtcgtcgggctcgttgccggtgcaaacagggaggaaacagccggcgttgctgtagc

SEQ ID NO: 291928 - DNA, 122 bp, Homo sapiens
ccgggcgctggagggggcggggcccgggcgctgggcggggcgcagatggctgagcgcaaccgcgtccccgcatgggatccttccgccaaacgggccgagtaaataggcccgcccccaatgcc

SEQ ID NO: 291929 - DNA, 122 bp, Homo sapiens
ctcaggccatcctcctgcctcggcctcctgagtagctgggacgacaggcgtgcaccactgcgcctagctccagtaccatgtttaaacggtgctcagaaaacgtgctaaacttggtggatggg

SEQ ID NO: 291930 - DNA, 122 bp, Homo sapiens
gagctcccttgcagtcccctccatgttccccggcgccactactccccttcctaaggccgccgcttaccccggggtctatggaagtaatggaaggacccctcaacctggtgagtgtcccacag

SEQ ID NO: 291931 - DNA, 122 bp, Homo sapiens
gccctgacccaaagtgctggttggcctccctcccagggaagactgcttcttgcgtaacgccggccacagaaagagactccgatggacttacaccgggcagccttcaagatggagaactcatc

SEQ ID NO: 291932 - DNA, 122 bp, Homo sapiens
attacattagatgcagcctatttagtctgaaccaagccagacaaattggtgtgtcctgcccgctgcttctaaaatattgtaaacatgtctcagctcataggaaaataaatgttccgggtaaa

SEQ ID NO: 291933 - DNA, 122 bp, Homo sapiens
gaggggggaggggcgcgcaccctttccgcccaggcttttgcgggctcctcgggccgaacccgaaggggctgttcctgaaccttgacttgttatcatagggacccaagctctatttttgtgtg

SEQ ID NO: 291934 - DNA, 122 bp, Homo sapiens
cctgcaatactggagagctgcccctggagggcgcaagggaatcccgttgctgcactcggacgcgcagtcactagacatgagagatgacggtggtggtagcagtaatggagcatttgccttta

SEQ ID NO: 291935 - DNA, 122 bp, Homo sapiens
atcgaccgcaacgtgacagagatcctccgcgtagggaacatcaccagcgtgcacttccggcgggaggtagagacagagcccatcctgacctacatcgagggcgtatgtgtgctgtggttcac

SEQ ID NO: 291936 - DNA, 122 bp, Homo sapiens
actgctgctaccttaatatttttacataggaacagcaagcaaatggtacttttcacctttcgctcagttgcttatcattgactggaaaacactgtagtatcccgcaaatgactgctactttt

SEQ ID NO: 291937 - DNA, 122 bp, Homo sapiens
tgactctgtcaacagtatatccagacagttctccttcgaccattgtgtttttactattctcgtaaattttaaaccttatttgttttccattgctactgattacagttacccctttttacttg

SEQ ID NO: 291938 - DNA, 122 bp, Homo sapiens
tcactgtgatgacggatgttagacttcaaaaaggagaggctccatccagtgggagagccacggaagggagaccagctgaaaaaacagcagcccagagaggtgaaggaatttgcctgagcaaa

SEQ ID NO: 291939 - DNA, 122 bp, Homo sapiens
gcgtaagcgtctgtgtgcagggggtcggcacatgggggaggatgcccatggttgggtaaccgcaggtccgcttgaccctctgccacctaggactgtgtctatacggcgtctgggctacagtg

SEQ ID NO: 291940 - DNA, 122 bp, Homo sapiens
tcggagaccgaggccgtgtatgggatgaccttcaaaattctttgcatctcctgcaagcgccgcagcgagaccaacgctgagaccttcaccgagtggaccttccgccagaagggcactgagga

SEQ ID NO: 291941 - DNA, 122 bp, Homo sapiens
cgactggagtgaagcctgggacctgccccgcgactggagtgaagcctgggacctgccccgcgactggagtgaagcctgggacctgccccgcgactggagtgaagcctcagacctgccccgcg

SEQ ID NO: 291942 - DNA, 122 bp, Homo sapiens
ccaccgccccgcccatcgtgccagcccgactccacccctgtggctacacccactgccccgcgccttacccactggtgggccacgcccacagcccccagctaggtgcctccgctgtccgggct

SEQ ID NO: 291943 - DNA, 122 bp, Homo sapiens
actcaggggaccttggttcgaggccgacttcggcgcttggctttcaagactgagggttttcggagttggccccccaaatccgcagctctgatgtcaatgcacatttaattaccggatggacc

SEQ ID NO: 291944 - DNA, 122 bp, Homo sapiens
atgaaaagcgcagacccgcagttgtaaagcctctcagtaagcgctgcaggctcattgtggcggggggcagtgggaagatgtaaggctacagaagttggctgttggtattactaagtaatagt

SEQ ID NO: 291945 - DNA, 122 bp, Homo sapiens
ctggttcttgtgatcacacagtagtgcacagatacaaaacaggtacacacagttgacacccggaaacctatccaccgcaccacagaggtcaccgtctgtctcccacacactcggtcacattt

SEQ ID NO: 291946 - DNA, 122 bp, Homo sapiens
agggcagaggggatttctgctgcgggttccgcctgtggtcattgcgtccccattccgggccgtccggtcccagtccaatcggctctgggagcagaagaacacgtgaaagctgaacatgggtt

SEQ ID NO: 291947 - DNA, 122 bp, Homo sapiens
cacggagcagctgtacctgcgcccacatgggctgagagacagggacggttatagccatctcgcgtccatctggaacgccccacgtggacttcccctgaaatagctactgtcttcctctcccc

SEQ ID NO: 291948 - DNA, 122 bp, Homo sapiens
cgccaaggctgctctggcggttgctgcagtaaccccagccacaacaagtcgtggacaacacgcagcattccatctggaacccagatccccaccgggcaagcggagcgaaccactgcggagcc

SEQ ID NO: 291949 - DNA, 122 bp, Homo sapiens
gagcccaggcccccagggcgcagtggctataggcgcagcaggcgagtgggagcccccggccgcttcagccactgaggaagagacgcttgtaggccttgttcatctgctccaagaagatgaag

SEQ ID NO: 291950 - DNA, 122 bp, Homo sapiens
ccctgcttccagggctcccctctacccctgctttccaacaggctctgacctccagacagacggttcaaagttacaagtgctttaggccctcccttgagttcccccaggcccatcccttgcgc

SEQ ID NO: 291951 - DNA, 122 bp, Homo sapiens
tcccacttgttttattttagaggtcattaatcaatgaagaaaaacaccaccgtgtccccccgtttgcatttaatacactcaaggctcctcatttattcctctggaacaaattcccagcaaat

SEQ ID NO: 291952 - DNA, 122 bp, Homo sapiens
caggcgggcgccgccacacctgactggtttttgctggagtgcagtggcgtgatcttggctcgctacaacctccacctcccagccgcctgccttggcctcccaaagtgcggagactgcagcct

SEQ ID NO: 291953 - DNA, 122 bp, Homo sapiens
cgcgcgctcgtgcttgctcgctctcgctctctctctctcttttctaaggctccaggcatccgtccctggagaagtgcaccttgggaaggcgatgaaatgaaagaagggcacatcctccttta

SEQ ID NO: 291954 - DNA, 122 bp, Homo sapiens
aaaatattaaaaaaaaaaaaaaacagagttcaagaacccacccagagatcgaaattcactcgatggatttgggtttgggtttgggacccagaactctgcattttaaacaaacactccaagtg

SEQ ID NO: 291955 - DNA, 122 bp, Homo sapiens
tcttcttttgttttggtccatcattatgctaaataaacggaagccttttccctcttcacacgcagagctgagccaatcacaggcacaaatgaaaattgcctatctctagaaacaaatccctt

SEQ ID NO: 291956 - DNA, 122 bp, Homo sapiens
tttctcaccataaccttttcttgtggaattctgcctcagctcttctgggaacagtgagtgcgtgttttatttagtaggattgcatttttctaaactggctgcaaacctgcctcctccatcca

SEQ ID NO: 291957 - DNA, 122 bp, Homo sapiens
gacaggctggccaggcaggcagaaatgctgacaggtgggtgaagctcagtcctgggctttcggtccctttcttttaatgcccatcctcattcctactctgaattgtcacacttttcccttcc

SEQ ID NO: 291958 - DNA, 122 bp, Homo sapiens
cctcctcctactccactcgctgctgccgccgctgcttcgctattcccaatcctgttattacgcaggtgaaaatggcctgcttggtccgggtcctcctgggcacgtcagcccccaacctgcaa

SEQ ID NO: 291959 - DNA, 122 bp, Homo sapiens
tggtggccgctttcctccgggcgccctttgacccggcgcccctctggcaggcgctggtggcgcccagcggcgagcctgtagccccctcgattaacctaggctgtcactcttaggcctgtttt

SEQ ID NO: 291960 - DNA, 122 bp, Homo sapiens
gtggttggccttgtaacaacctgcaataattgcaccatctagatcaagagggcccagatccgtgtgactcagaggagagagcaacaaccttagtaggttctgcagcttctcactgtatctgt

SEQ ID NO: 291961 - DNA, 122 bp, Homo sapiens
cccgtggaggcttcaaagcgggctgagaacaacctggatgggggtgccagcccctggctgcgctgagaggggcgtgtgcaccgccacaggctgctggaatgaatgaccacgaacgagtcgct

SEQ ID NO: 291962 - DNA, 122 bp, Homo sapiens
aacattgcaaggggccgagcaaaattccgaccgtcgccagaagcgcagtcggagcgccgtcgccagtgcggattctgtccctaacacaggctctggaagcgccagagagtccctgaatcctc

SEQ ID NO: 291963 - DNA, 122 bp, Homo sapiens
tgctcgttatttattcagttttccaaaactcttcagagacatgaccaagttgcacagccccgttttaaagtagaggaaagggaggttgagagaggtggaatgaccagtttagggtcacacct

SEQ ID NO: 291964 - DNA, 122 bp, Homo sapiens
acacgcagggaggcaatgggtcccccagtaagacccaaaggcaggacgtgcagtgcagcccgggtatcccctccgtgtggctggtgtctgtctgcaccaaaaggcagttgggttaccttagc

SEQ ID NO: 291965 - DNA, 122 bp, Homo sapiens
tgctttgctgcggtttcctgaaagagccccacagagagtgggtctcgatgggtcctgaaccgcaccacaaccggccagtgaggtgaggggcgaaggtgaggggcggcggcggggcgaaggtg

SEQ ID NO: 291966 - DNA, 122 bp, Homo sapiens
gttcaggtatttgctagaaggacccacgcgactcagcatatatgactaagatttattcttcgataaaataaggacacatctggatcataagggaaaaggacactggcagagtctggaggaat

SEQ ID NO: 291967 - DNA, 122 bp, Homo sapiens
cccctcagtagatggaaaactctttgaggccagaggacctcattttctttcatgtgccttcgtgtgctttactcattgaaagcatttagcgaatatgaaatgtaattttccatttgccatgg

SEQ ID NO: 291968 - DNA, 122 bp, Homo sapiens
aagtttcatgtgtattttaatgaaaaaaactctgtacaagattgatgcactgagttactgcgtggtaaaaaggttatacaaaaagtccatgggagttcctctacaaaaacccaaggctaagt

SEQ ID NO: 291969 - DNA, 122 bp, Homo sapiens
gcccccaccgctaacaaagctgccggctgcaggaatgagagagtggtagaacgacacccccgtctcactccttgggactcctcagttgctggcggctccaagttttcaggagccacggtgtt

SEQ ID NO: 291970 - DNA, 122 bp, Homo sapiens
ggaatgagtaatcgtttttcattctgtatagcatctttctccacctaccaaatggggggccgtgccatctctgcctctcggtgaggagatattacgacacagccagtgagattcacaaagca

SEQ ID NO: 291971 - DNA, 122 bp, Homo sapiens
gcaggccctgagccaaagatttggatgcaaatgacttgttaagaaagggctcttcgagaccgtgccattgcactccagcccgggcaagaagagtgaaactctgtttcaaaaaaaaaaaagtg

SEQ ID NO: 291972 - DNA, 122 bp, Homo sapiens
tggctccagcgccctccaatgatgtcggcgtacagagggctgttccgcccaatcaggtgtcggaaagcccagccagtccccgggagtgtagccaatagaaggcgactccggcaacacacccg

SEQ ID NO: 291973 - DNA, 122 bp, Homo sapiens
tttccggcgcggaagcggagggatctcaggaattgtagtccgcggggtgggcgcggttctcgcttccggccagtttgtctggcctgcgcttgcgcgggtctccgccgcctgggctcctaggg

SEQ ID NO: 291974 - DNA, 122 bp, Homo sapiens
ggcacagaatggctcccgaacccatcgctccggtccggagaaggagccctccaccctccacgctccattcgctgtccccttgcgggcccctgtgaggaaccccagccagaggcaccaatggc

SEQ ID NO: 291975 - DNA, 122 bp, Homo sapiens
ggcaaccccgcctcatagcgacacaggggagggaagcagggggtctgcggaggttgctcccgagagactaaagctgttgcccccgattttccaaggacgccagtgaggaaggcccgcctgtc

SEQ ID NO: 291976 - DNA, 122 bp, Homo sapiens
gggggatggtaggggttggcctctgtctgcgactgttactgttctttcgttttaaacgaacgctggacaggatttgcgtgctcttcctcctcgggtggcatcggaagccgcgcagtgatgga

SEQ ID NO: 291977 - DNA, 122 bp, Homo sapiens
gcgcgtacatgcgcactccaccaccgacagcgcccgctttgtgcagcgcccgttgctcttcgcgtcccggcgccagtcctctgcaaggagaactgagaagattttcttaagcacttttcaga

SEQ ID NO: 291978 - DNA, 122 bp, Homo sapiens
tggggggagcggcggtaggggagatcctcacgctgtgttcggcagcgaggcggcgagacgcgccggttcagccggagaccgctgtgggaaccgcgccgaacacgctttgggcggccattttg

SEQ ID NO: 291979 - DNA, 122 bp, Homo sapiens
cccagccccaacgccaaatccagccttccgccgccattctcctctcctctcggccacttccgccctagaacttccgccttccgggggtcccatctattggcctccggccggaagctcttcaa

SEQ ID NO: 291980 - DNA, 122 bp, Homo sapiens
gtcccggccttggcgtcctggcacctaccgcggcaggaacttgagctgcacggagtaggacgactgtgcctggatatagcctgtcttgggcaggagctccaggtgggccctcagctccttgc

SEQ ID NO: 291981 - DNA, 122 bp, Homo sapiens
ctctggtgcccaggtccacgtgactggcaccctttctaggggtctagtacttgtttcttacggctcacaaatcttgagggacagttgataactggagggtagagttttcgcttcctcggaag

SEQ ID NO: 291982 - DNA, 122 bp, Homo sapiens
aaaatcataaccgagcccaactagaaaaaaaggaaataaagccaattccgagttttctggcgcttggcctggttgtgccctgcttttgctttttaaagagaagatttgaaaacgtgaaggca

SEQ ID NO: 291983 - DNA, 122 bp, Homo sapiens
tttctctgtctgtttcagcaatattagacttttatctcctccagggttccacattcccttcggcctttggacttttgtacttgctgctttttgtttctctctgcctgatatagtcattttac

SEQ ID NO: 291984 - DNA, 122 bp, Homo sapiens
ttcaacactgggtagacgggcattcagcttcatcactgcgtcacacaccgggcagacgtgcgttcagcttcctgtgtcacacaacatgccaccactggatgagagtctttcagattcaagcc

SEQ ID NO: 291985 - DNA, 122 bp, Homo sapiens
gctccctgcccgggctgccgctttaaatagccctcgcatcacatgaggagacgtggcccacgcccccggctcccgaaataggaagccccaggctagggctcacccaggaggggctggtgcgc

SEQ ID NO: 291986 - DNA, 122 bp, Homo sapiens
tttattactgcactgattgggactctgaatgctccaaggtcaggaaaagtcacactcaatcgtagacatcaaccctccctttggcagtttctcctgctgcaccctcccaggggagagggaga

SEQ ID NO: 291987 - DNA, 122 bp, Homo sapiens
ctgtttcccgccggagctcgttgggcctccccggcccgcccggcccatggcccagacccccgacggcatctcctgtgagctccgaggtaagcgctggcccttcctgccttcttggccgggag

SEQ ID NO: 291988 - DNA, 122 bp, Homo sapiens
ggccaggatgagcgttatgaggcgggacctggggtggggccaggatgagcgtcatgagggcgaggcctggggtagggccaggataagcgtcgttggggcaggtcctggggagagttctggtt

SEQ ID NO: 291989 - DNA, 122 bp, Homo sapiens
ttattaacaccgcccccagccctattagttaccaagcaacagtgccaccaggctcctcggcgctgggaaactcaggagcttgtgatctctctggttccgacttccagccgccttcccgagcc

SEQ ID NO: 291990 - DNA, 122 bp, Homo sapiens
gagggcagtgagcaggtgcaccagctggaggagcagctggaggcacgagaggccagcgtgcgcaggctcgcagagcacgtgcagagcctctgtgacgagcgggacctcctcagacagcggtt

SEQ ID NO: 291991 - DNA, 122 bp, Homo sapiens
attccacttctcagcctcacctgggggcattgtcagctaataatatgtgaaagtccctggcgcttagtaggtgctcaataaatgttaattgaatctgcaacgtcacttcgcttgctccttta

SEQ ID NO: 291992 - DNA, 122 bp, Homo sapiens
gccctgcccagccagaagctggggcagtatcggggcaggggctgagggctggagccactgcggagactgggttcctgtggggctttggtgcacaggctgggccctgtctctctgcttaagtc

SEQ ID NO: 291993 - DNA, 122 bp, Homo sapiens
gaataagccggtatgggggactagacaggggcatgtccaggtgccagggaacatgagtaccggtaggcagctccaccaagcctggctgctgacggcagagagcagactgggggagtccaggc

SEQ ID NO: 291994 - DNA, 122 bp, Homo sapiens
attggtccagctggatcaggtgtcctctccctgtccaatcatcaatgccgagagggattacggagagaaaaacatggctcccaccatcccattgctgtggctgcttgggccacgggagaggg

SEQ ID NO: 291995 - DNA, 122 bp, Homo sapiens
attcaaacaaattctttctctctctgagtctgttttctcctctgttaaatggaaaaccaacgacatctaccttatagggttgtcagaaggacagaacgtgaggatccagattaatgatatag

SEQ ID NO: 291996 - DNA, 122 bp, Homo sapiens
gaaggcggccccggaggaaggctctgtccggccctgcagggtggtcgccagcctggccgccggggcagagctgcccactcccactgagaagggaacctcaatctcagaaagacctcggggag

SEQ ID NO: 291997 - DNA, 122 bp, Homo sapiens
cacatccttccccagcgactcagcctggggtcacaaaggcctttacgtcccactgaaaaacggttttctttcatttgtgcccattcgttcttgcagccccttccccagatcgaagactaggg

SEQ ID NO: 291998 - DNA, 122 bp, Homo sapiens
tcagaaacggccatcactgaagagcagacccgtttgggttctccacgcattctagactcccgaagaggtaagaatttattatagggggccactcccaggacctgctgtatgcttttaaacat

SEQ ID NO: 291999 - DNA, 122 bp, Homo sapiens
ctaattgtatttaattttaatgtgataggtatgggttcaggttcttaccccggaagttatcgggcacaccaagtccttgggaggctctgggcacctgcgttgactgtgccgtcccgtgagat

SEQ ID NO: 292000 - DNA, 122 bp, Homo sapiens
cagcctaacatcctctacctccttcctactccacctccccaaaatcctttgactccagttcgatatcctcttgagatgttgccaaggtaaataattccttgcagtggttcctaaccagatgc

SEQ ID NO: 292001 - DNA, 122 bp, Homo sapiens
tcggtggcgcgcacgcgacagacctcggcgcccggctgggcgtcctcgcgcaccgcggcgcggtactcgtcctgctcaaagaccggcgggttgtcgttctcatccagcacgcgcagctccac

SEQ ID NO: 292002 - DNA, 122 bp, Homo sapiens
gtgaatgaggttagcacattattatgtggttgtgaatatcatacttggcttcctggagaccgaatattcatgtatcagggccctcctgtgatgacacagtcagtggcgccctcacaagggca

SEQ ID NO: 292003 - DNA, 122 bp, Homo sapiens
gcagctcaaccctcctcctcgtgtgtgtgagcggatctcctcccacccaaccacctccgacggcctcacagccaaccccacccccggcgcggattgacccctcgccgccacccgtaccttcg

SEQ ID NO: 292004 - DNA, 122 bp, Homo sapiens
gggctgagcctggggagggtcgagatggggccccagccgaggactgggatgcgggaggaccgcggtaaggagggtagggggcgggttcaggactgtcggccgcctcccggacaccgcagttc

SEQ ID NO: 292005 - DNA, 122 bp, Homo sapiens
cttattattgaggttaatcatggtaatgatctggtatggctgggtcagcccaggagaccgcgctctccaaagttctttctcacagaggtttctctgggggagtcaagggttccccaacttca

SEQ ID NO: 292006 - DNA, 122 bp, Homo sapiens
gcatccactcaggtgaggctgggggcgtccttaccttgcgctttggctgctcaggacaaacgccctgccattcgtcccttctctctgtccggacgccctcctccatccctgcacttggggcc

SEQ ID NO: 292007 - DNA, 122 bp, Homo sapiens
acgagagcgctttctctgcgtcagccccagcaccccagcgcccctgcctccgggcgcccgcggcctccgcactccagtggcccagacctggctgaggcagctcccgtggtagatcaagcctc

SEQ ID NO: 292008 - DNA, 122 bp, Homo sapiens
cccagagcagcataaaagccagcactgcagccccgaagggagcggctactcagccgagcccgcaggcacaccgctgtcagagccgccgagcagcacgccacagtccacgcatgcggagccgc

SEQ ID NO: 292009 - DNA, 122 bp, Homo sapiens
gagaggcaaggactgggggcggagctaggaataactcgtttgagaagggggtggagttttcgttgttcatttccatgttcagttctgtgacgtgacgatgacagatcaccactgcaggatcc

SEQ ID NO: 292010 - DNA, 122 bp, Homo sapiens
cttcctgaagggcctaggagtggggaggcctgggtagggcagccacaggctgggtagagccgccctggcaggaagcagggggtaaggtggccataccagcacatgctgcactaggagcagag

SEQ ID NO: 292011 - DNA, 122 bp, Homo sapiens
tttcaggattctctccagttgataacctgccaatccacaaaatggcctgcttcctgcattcgatcacgtctttagaactttattttctcttatttctttttatttatctgaccttgctaaac

SEQ ID NO: 292012 - DNA, 122 bp, Homo sapiens
ttctcaatgatcaacacacagtcactagggacatgaacacattgtggcataaaccgtgtccgggtgtgaatgtccacagactccaatgtccctgtatacactcaggtgcacagccccttcca

SEQ ID NO: 292013 - DNA, 122 bp, Homo sapiens
ccctgccgcgcaggggcacccacaccccgcccccgcacgcaggcacaaacccccacaacacgcacacccccgcgcgcaggcgcaccacacccctcgcgcaggcgcatcacagacacactcgc

SEQ ID NO: 292014 - DNA, 122 bp, Homo sapiens
tttaaacaaccagcccagctctcacgtgacgtaatagaacaagaactcactaattaccaacgggaaggcaccaaaccattgaggagggatttgtcctcattacccaaacacttcccaccggg

SEQ ID NO: 292015 - DNA, 122 bp, Homo sapiens
ataaagctcccagaggaggtgaatttggtaaagtatttcaaagtaattgacatttgattccggtcttatgtatgtatataggagagcagacttttaccaagtgcaagatcttggtaaaaatt

SEQ ID NO: 292016 - DNA, 122 bp, Homo sapiens
cgtcctctcctgcctctggatgtttccttggagcctctggccttcgggaagaccggtaaacgtccctgtggagccagccagccagccacctctgacccccgggctcaagcagccagccgcgt

SEQ ID NO: 292017 - DNA, 122 bp, Homo sapiens
ctgctcagagtaggtgacagcgctgccctggggtgcaggaggccagattggccttcatggcgctgtcgttaacccctccccccgcctctgggaagaactggcttccatacctctctgcctgc

SEQ ID NO: 292018 - DNA, 122 bp, Homo sapiens
tgtaacaagcacctgtaatgctaatgcactgcctcaatataaaaatattaatataagatccgcaatcccctcactgccgtgcagtcctaagacagtgatcataataatcaacattgacatag

SEQ ID NO: 292019 - DNA, 122 bp, Homo sapiens
tccgcggccgggcacgcccgctggagcatcccccaaccccgctcccgccctgtcccgcggcgccccggccccgcgctgatgaaattgaggagctcacccagcacccttcctccccttcctcc

SEQ ID NO: 292020 - DNA, 122 bp, Homo sapiens
tttgttgttcgtccagcctcattttgttgaatcacttcttctctattgtatgtgttctgacggtgctgataaaaccatgcacaggttacttccttttgtccttcagggccacattctacttt

SEQ ID NO: 292021 - DNA, 122 bp, Homo sapiens
taaataaataaaacaaaaggtctaggccaaggtggaaaatctctggtaaagcactggctccggggtcagccacacaggagctggaattgctcacaattgcgccactgtctaccggcagggct

SEQ ID NO: 292022 - DNA, 122 bp, Homo sapiens
ggcggggcgctggacttcgtgggtggtccccgcccccgcggcggcctaggcccgcgcctgcgtcccccaacccggaggagatggggggctgtgctagctgcttgcccagcgagtgttcccgg

SEQ ID NO: 292023 - DNA, 122 bp, Homo sapiens
acattcccttggttctaatcattgaaatatcctccttcagcctccttctatccctgagtgcgtccccttggctccagtgtccatgctggctgccaggtgacctttctgaaaacaaatctgac

SEQ ID NO: 292024 - DNA, 122 bp, Homo sapiens
caacattcttgaccttggccgcgtggtgaagggcagtctcatgaagctttgccgcattcacgttggcccctggaggtcaagagtgcagaagagatttcaccaagaagagaacttgaagtcag

SEQ ID NO: 292025 - DNA, 122 bp, Homo sapiens
aaaggagtgccacctggctgactggcagatttgaatggagctccctccagcatggcttgccgaaggggcaggggttctgaggctcttgtagactgccactgaaggtatttggcgccacctgt

SEQ ID NO: 292026 - DNA, 122 bp, Homo sapiens
ccccatgcaaacagtgcccccgcctgagatcaggacactgagtgagggccgcctcctctgcgctgcccatacgagaaggaagccctggagccgggccttccgtcgctgcgccctcctgcacc

SEQ ID NO: 292027 - DNA, 122 bp, Homo sapiens
gtagctgagaggagtacggttgagttacagtaacaagctacaagctgaaggaaagtgctgcggtttttggctggtccagtcccagatatacaccctcacatctggacaagagatcatgtgac

SEQ ID NO: 292028 - DNA, 122 bp, Homo sapiens
gccttacctgtgcgcagccagttagcagccgcagccacaagcacagctcgggttctgatccgcaaacagatgaggctgcagccctggctccctctggtaaatgaggctgcggatgtcgcaga

SEQ ID NO: 292029 - DNA, 122 bp, Homo sapiens
cctgggtgacagagtgagacttcatctcaaaaataaataaataaataaattagaattcttcgatgagtgagtgatagtttcattgaactggtgaaatctgcatgtaaatgtgacctcatcca

SEQ ID NO: 292030 - DNA, 122 bp, Homo sapiens
aagttaggcatggggctgggactggggtgtggagacagcacctttcctgggaagatggagcgggagtgccagactgctgtcctcgaaagcaggagaccagtctgatgactcagagatgagac

SEQ ID NO: 292031 - DNA, 122 bp, Homo sapiens
ggaaacacaagagaagaaagtcaattccccttagggcctccttcctccagtagctcacttcgtagtgcagtctctcttggatacggcctatcttgtgataggcaaaatttgggttacatgcc

SEQ ID NO: 292032 - DNA, 122 bp, Homo sapiens
acgtttgtttgtccaaagcagcatacgatccagccccgctgcccacccttacctgggaaacggggctcctctcatagacccacagtgctccccctagcctgttcatacgtgccctcacatct

SEQ ID NO: 292033 - DNA, 122 bp, Homo sapiens
gtcaatcctggtccctggtcatgcatgaccttgagcaagacacatgacccctctgagccacggttcttccatggaatgggaccatgcctggccacttctggtaatggccatgaggacagatg

SEQ ID NO: 292034 - DNA, 122 bp, Homo sapiens
caggggagagataatggggtgggatctcagccactcagccccgctgtgtgctatattgtacgcataggcataaacacatctgttggagggaaattttcagggggaaaaggcttctttaactt

SEQ ID NO: 292035 - DNA, 122 bp, Homo sapiens
ttcctccctccctctgtgcctgttatgttccaggtgctttatataaatatttattttgatcgttgcaactgctgtctgcattttacagacaaggacaatgaggttctgagagggaaatgatt

SEQ ID NO: 292036 - DNA, 122 bp, Homo sapiens
tctacaagtgaagaaattctgagaggtgatgtcgtcgatgcagggtcggcccgaaataggcggagttgggattcgaactcatttcacaggcagagggaggagagcagccatagccacctcca

SEQ ID NO: 292037 - DNA, 122 bp, Homo sapiens
cgcctactgactgaaaccacgggcaaagttccttttcgtctttcttcctcttctctgggccgcgccgcttcgaacccgagccgggggtggaagagtcgcccaggcggcggcgctgagggagc

SEQ ID NO: 292038 - DNA, 122 bp, Homo sapiens
tcagctgatggcttacgtagggctagatctccacttggataaggcaggtctcggtgggcgcgccagcattcgctctccggagctgcagcctccgaaggggtggcgggggcaacagggacaga

SEQ ID NO: 292039 - DNA, 122 bp, Homo sapiens
agggtaagaaattggggttcatgagggtgagttgtctggcctgcggtcacacactgtggtcgtacaggtccttacttcgaaacattgtgagctgactcagataatgagtttataaagcccac

SEQ ID NO: 292040 - DNA, 122 bp, Homo sapiens
gcagcccggccccagtcaccatcactgcaaccatgagcagcgaggcggagacccagcagccgccgcccgcccccgccctcagctccacctacaccaagcccggcactacgggcagcggcgca

SEQ ID NO: 292041 - DNA, 122 bp, Homo sapiens
tataaaagatgcgcagaggagagacacacagagaagagcaggaagcaatgtgacgtgcagcgcagctctagtgatgcaacctcatgcccaagaatgctgcagctaccagaagctaaaagagg

SEQ ID NO: 292042 - DNA, 122 bp, Homo sapiens
gaaagcacggagcctgtagagaggcctcagcaaggcacccctgagagagtgacgcccagccgttgactcccagttgaggacagttatgcagattccaggctgcataagctccatggtggcct

SEQ ID NO: 292043 - DNA, 122 bp, Homo sapiens
tgacagccaggaggctgctgcaacagtccaggagaccttggtgacccagcatgaggagtgcggggctgaggggtgtggagagagaaaggatagcattagggtttcaggcctaagctagtgtg

SEQ ID NO: 292044 - DNA, 122 bp, Homo sapiens
aaaaacttttgctgttccaaagatagcattaggcaaatgaaaagatgagccgtaggtggacggaaagcatttgcaaagacatatctgataaaggacttatatccgcaataggtaaagaactc

SEQ ID NO: 292045 - DNA, 122 bp, Homo sapiens
cttatttcacttaacatagtgacctctggtagccatccatgtttttgcaaatgacaggctcgctgtatcacccaggctggagtcagtgacgtgatctcggctcactaccggttcaagcgatt

SEQ ID NO: 292046 - DNA, 122 bp, Homo sapiens
catggaagaaagggcttaatatcattgctaaaattgaagggctgagcgtggatgattttccgatgacttactgggatcctcacactcagtgcatgccaggtagtccttcaaggcataccata

SEQ ID NO: 292047 - DNA, 122 bp, Homo sapiens
atgaataaagttggaagacacctcaggaagcacacagtgcctcctgaagtgagagagtggcgcctgaggaaagtcttaggtggtagagtttaaacggtgtgagtctcacagatgggttccac

SEQ ID NO: 292048 - DNA, 122 bp, Homo sapiens
cgccacctctccccacgaggcgttctgaaggccgtgctccccaaggcggccctgttggaccgttgccgggcctttgggcacccacatctcacatttgcaagcccacagctacagaggcttcc

SEQ ID NO: 292049 - DNA, 122 bp, Homo sapiens
acagagagcggctgcagagctcacccggctggcaggagccaccgaggccggacacgtgggcgacttattgaccaagtggggaggaagcagccccgcactgctctcccgactgcggaccaccg

SEQ ID NO: 292050 - DNA, 122 bp, Homo sapiens
agtggcttccttcacggagcataaggtcctcaagactcacccgtgttgtgggtgttgtggcgggatgtcagaatttccttccttttgaaggcagaatgacattcctctgtgtgtggccgcat

SEQ ID NO: 292051 - DNA, 122 bp, Homo sapiens
aggacacagaccagtgaagacgagacctgaaacgccggctgcagctagagacaaaggccgcgccaaaagcggaaagccgtcctcgtcgctccagctgcgtgcctgattggacggtttccagc

SEQ ID NO: 292052 - DNA, 122 bp, Homo sapiens
tttattgagactcagccatactcatgtatttatgtatagtctgtgggtactttcacactacgagggcagaattgactggttgcagtagagactgtaatggcccataagcctaaaattttttt

SEQ ID NO: 292053 - DNA, 122 bp, Homo sapiens
caaggcgctgcccggggagcgagtcctcgaagacggcagcggagagggacgggcgcaggtcgtaggccaccaccgcgtacagtatgtgctgccgctcccccgaatacggcgcctgcttggta

SEQ ID NO: 292054 - DNA, 122 bp, Homo sapiens
ttttgaacctggagatggacatttgaccttcagcaaggaaatggttctcctcttagcattcgtggtgggtgctgttatgtgcttccttctccctctttgccccatgttggaggatagttgag

SEQ ID NO: 292055 - DNA, 122 bp, Homo sapiens
aactctttcacgtaacgggaggaatacagacacgtcttagttaagcgtgcgtgggaaccgcggaattaaggcacctagaggccaagggcttgtgtcaagctctgcattttgccccgcagggg

SEQ ID NO: 292056 - DNA, 122 bp, Homo sapiens
acagaaattaggagcctttacctcttgcaggtcatcatcagcagatatgctcctctggaacggctggaaagtggggactggtcccttctcggggtcctggagtggtgagagacctacctcag

SEQ ID NO: 292057 - DNA, 122 bp, Homo sapiens
aaaaccctcccttgtgggagtctctgggctgcctgttggtgggacgatttctcaggagcacgacttccggcctgaaaaggaagtctcctcctttttctcccaaaccacttcttcccccctac

SEQ ID NO: 292058 - DNA, 122 bp, Homo sapiens
ctgctcatgttactggtctcagcgtctccactgacctgtaataagccatcatttcactggcgagctcaggtacttctgccatggctgcttcagacacctgtgtaaaaaggagaaaatgagtg

SEQ ID NO: 292059 - DNA, 122 bp, Homo sapiens
tctcagctttagtcctctgcctgtaaaaatgatatgttagcaagctatgtcaggaggatacgtaggaggatagcgtaagatgaagaacaatatgtagtgcccctaataaagtgccttacaca

SEQ ID NO: 292060 - DNA, 122 bp, Homo sapiens
ggtgaagtaaggaaagagactaagagctgaacagtgccgttctttgcgagcccccactggcgcaggctgagccggctgcggctagggctgcgaagagttaacgagggaccgagccccagcgc

SEQ ID NO: 292061 - DNA, 122 bp, Homo sapiens
caggccatacaatgtagcagtatctaatcagattcgtggataggtcacaatcctcccctgcgttctccctctcccacctcccccagatgccctggccccctagacacaactctgtcaagaaa

SEQ ID NO: 292062 - DNA, 122 bp, Homo sapiens
gctccggccccccaggtagagggaccccagcagcctgtgtccgcagcacagacccagcctcgcccctcctgcccgctctcccgctcctcgctctccgccctgcctgcgtctctgttctgctg

SEQ ID NO: 292063 - DNA, 122 bp, Homo sapiens
attatgaactgtcccatcacaagacatacagttggctttcttgtgagtcagatatttttacgtaaactacacgaattttcttggacacatcaaagacaacagaatagatttttcacaagtaa

SEQ ID NO: 292064 - DNA, 122 bp, Homo sapiens
ctgactgctaaattctgcaagctcttggggctgcagggtagagaagcttctcagtttcttcgggtttgtccatcctgcctgttggacactgtcaggatcttccagatcagccagcccatcct

SEQ ID NO: 292065 - DNA, 122 bp, Homo sapiens
gctctcgcgctggcaccttcagctctgtcagagtctgaggggaaaccaaaggaggccaggcggtgtctggaatgccccatccgactgcttcaggctcccagaccgctgacaaaaggaaaact

SEQ ID NO: 292066 - DNA, 122 bp, Homo sapiens
acttttggtaatttgtaaggagctgaagactgctgatatcacacatcccatggcaaactccgtaagatttcttctaaacatctttgttattttcttaaaattgttctggaggcagctgatgc

SEQ ID NO: 292067 - DNA, 122 bp, Homo sapiens
ctgcggcgtcccacaatgcaccgggctctggggcctgcacgacagtcttgaacccagctgcggggccgcgagaaggcgggcccgggagccggcgagggcggggcctccgaggaaagggccgg

SEQ ID NO: 292068 - DNA, 122 bp, Homo sapiens
cctagaaaaggcgcagatgcgtggtcgcaaactgatttccaagtccgttgtctgatgctgcgagacactatccgtttgttacagcgaattgggggccgatgacgctggaggtggaagaagcc

SEQ ID NO: 292069 - DNA, 122 bp, Homo sapiens
tcctgcctgagaagcgggccctgctgcccaccccttatcatggatcccttagctactgtccgtcttccattgctgcctggggctgggctgccgtttttgaacacctggcagtgtctttgtcg

SEQ ID NO: 292070 - DNA, 122 bp, Homo sapiens
ggggaaataggggcaagtttaccacggtttaattaagccacagccctagcacgaggaccccggcgacccatccgggctgggggatggactggagtgccccccaccccaggccgcgaaccggc

SEQ ID NO: 292071 - DNA, 122 bp, Homo sapiens
agcagcaaacctcgggttccagaacacgggtgaaggccagtctttcatgattactgcgtgcgcggctttttcctaggggtttctgaaacaatctagaaaaaggagagatatcacctgaacaa

SEQ ID NO: 292072 - DNA, 122 bp, Homo sapiens
ctggctctgaaaggctgtgttggggccatttacaaagatctcttggaaattcctaggactcgaggctatgagagttaaaagaaaaaaaaaagagtagggtttatcactaaattttcctttta

SEQ ID NO: 292073 - DNA, 122 bp, Homo sapiens
agaccctttcctcttgacctttgaaaatacagtatgggactcatagcacagagaaacagacggcctggctcatactccgttgtcaatttctggccgtgtgacctccataggcgtcttcagcc

SEQ ID NO: 292074 - DNA, 122 bp, Homo sapiens
taagttgggtggcagatgtgtatggatgtaagagcaccaggcattagtggagtattaagccgtaccctaagattataaactgcaaagatgtgcaaagttggctaagggctggtgtatttggc

SEQ ID NO: 292075 - DNA, 122 bp, Homo sapiens
atcaaaggtgcgtatggtggtaccagagcaaggcggaacagctgctcagtggtccgcaaccgggtcaagggacaagaagacgattctggattgtaggccgcccgagagcgcccccaggagcc

SEQ ID NO: 292076 - DNA, 122 bp, Homo sapiens
gctgtttgcattcctggactcttctccgctccagctccgccaccgcccggaactttccgacgtccctatggaagcgcgcatactccttccggtgtggatgagtctctgcacaaaccgcatcc

SEQ ID NO: 292077 - DNA, 122 bp, Homo sapiens
ttgttttatggttaagatccaaaatttgttactgatactagagaaaaaaatcgggattaccgtcagtgttagtttgaagatttgatagtgccagagagcacatggggaaattaaatgtattc

SEQ ID NO: 292078 - DNA, 122 bp, Homo sapiens
acctgaagccccaggtgctcctgttccgacaaggtcaaatccccacattttccaccaaagcgcggcgcgttcgagcgccccctggtggcgccgttctcaacagctcgcagcagagccggttt

SEQ ID NO: 292079 - DNA, 122 bp, Homo sapiens
gttgtcatggagatgatggcccaccaataggaggcggggatgctggtgaactccagcacccgcccggactccttctcggccacgtagaccaaaggggagaagagggtgatggccacggccag

SEQ ID NO: 292080 - DNA, 122 bp, Homo sapiens
cctttgggttgtttcaggtaaagtacatcaatgggactacaggaaagagaatttcacacacggtctttctgcatcagtaattttaatagagactcttagtggttatcaacaactggtcagtt

SEQ ID NO: 292081 - DNA, 122 bp, Homo sapiens
agtctgcggccgggggccagcggggctgaaacgcgcctcctgagtgttgaaagcggcaggcgccggcctttgcacccagaggccagggcgtctcactcaccttcacatccaggcctcttagg

SEQ ID NO: 292082 - DNA, 122 bp, Homo sapiens
agtgcatgtggcacagacagtggccaatgcgtgcaaccgcgtgtttaaatcttggcgccacgaatgtcaccgacagccttatgttcctggcaaacttcatgggactcagctgagctttcagg

SEQ ID NO: 292083 - DNA, 122 bp, Homo sapiens
gtatttcatgtcctccatgaagactgctcagcccgtacacagccagcttgtcctggaatccgagggtatctgcagcaaggccattgctcttaaatgactcccttccacctttggttcttttt

SEQ ID NO: 292084 - DNA, 122 bp, Homo sapiens
tgttattcgttgctccgggttccgtttgtaaagagcaaggctgcacagacctgtctgctccgttgagacagtgaaggccgtctcacaaccgcaccttgggactcgcttccacataacacctc

SEQ ID NO: 292085 - DNA, 122 bp, Homo sapiens
ggaagcggcaggtcccgcggggtttaggtgcaggtgcggccgccggggaagcggtgggtccggctgggtttaggtgcaggagcggtcgcccaggtagcggcgggtccggcaggatttaggtg

SEQ ID NO: 292086 - DNA, 122 bp, Homo sapiens
agctgctccttggtgaggcccggaggcaggcggcggatgaccagctgcggggagcgcggccgttcccacaggggcggagcgtggacaaggagctcaaaaggcaccgcgtaccgcgctgggag

SEQ ID NO: 292087 - DNA, 122 bp, Homo sapiens
cttccctcgttgctcgcagccaaggcagccgcgaagctgggggcctcgggtgaatgctttcgccctctggccggcgaccaggagacctgcgcacactggccgccgagtgaccccagctcgag

SEQ ID NO: 292088 - DNA, 122 bp, Homo sapiens
gccttaatccttagggtggcagaatatcagggaccctgagcattcttaaaagatgtagctcgggatgggaagttcttttaatgacaaagcaaatgaagtttcattatgtcgaggaactttga

SEQ ID NO: 292089 - DNA, 122 bp, Homo sapiens
catcgttaaatcggcttgcagttaatttggacattgttactgggggatggggcccgggagcgctcccttccagctgtgggggtctgccgagttaatgctacagttggctggtttccccctga

SEQ ID NO: 292090 - DNA, 122 bp, Homo sapiens
cagctgagagaggagtggtcacgagctcacagcctgaccgcagcagagatgacacacggacgcacaggaggctgcgagggaacaggaggctggagaagagccggcgaggcccgtggaggtca

SEQ ID NO: 292091 - DNA, 122 bp, Homo sapiens
cttgaagaggccctaccacaccctaactgcacctgtctccctggagatgaaaatatatgacgctgccctgcctcctgcttttggccaatcacggcagacaggggttggggaaatattttatt

SEQ ID NO: 292092 - DNA, 122 bp, Homo sapiens
ctgcagctgctgcacatagcgacccagtccgttgtggagaacgctggccaagaagcggctcggagtcccgcgcgccgtcatagctacagcttggaggccgcggagcctaagcagcgaggaga

SEQ ID NO: 292093 - DNA, 122 bp, Homo sapiens
gacagtgggatgcaggagcctggagacgctggccgccagtcgctgtgactagtcaggctgcgagtctccgtcagatccactcggaatggttttctgaagcagtcgcccttctgtgaagaatt

SEQ ID NO: 292094 - DNA, 122 bp, Homo sapiens
gctgcggatgggaaacccggcagacaccatggggcaaggtcagcttggggatgggaaactcgtcagcctttttttaaaaaaatgtagaaattctcacattcccagaggaggcggcttcctta

SEQ ID NO: 292095 - DNA, 122 bp, Homo sapiens
tctgaagcatcgggagtggggagtgaatgatcctttgctgcctaactacctcaacggcttcgagtgtttcgtctgtgactacgaactggctcggctggatgccgagaaagcccacgcggcct

SEQ ID NO: 292096 - DNA, 122 bp, Homo sapiens
ttgctatgactggcctgcgctcgcctaatcaccgactagggggaaattcatataaaatatcgccggccattgtgggcctaactcggcgtgacagtggcgcacaaagccggattcaagcgccc

SEQ ID NO: 292097 - DNA, 122 bp, Homo sapiens
gtcagcattcaaggcgaggcggtggccgtgcggcctggagaggacgtcctgtttgtggtgcggcaggagcaggtgagtgagcacctcccagcaggctcctgggactgtcgggcaggggcggc

SEQ ID NO: 292098 - DNA, 122 bp, Homo sapiens
atcctaacagtgggtcctgcctgtcatttaatacacttcttgcagtctgcacagtcatcccgatgaggttggtgctagtgttcccatttacagaggcagagactgaggcttggagatggaga

SEQ ID NO: 292099 - DNA, 122 bp, Homo sapiens
tccctcctcagaaaagggctccagaggccgaccgggctggacgaggccagtgagggcgcccgcacctgcaaggcagccgggtagtcctccatctcggccaggcgctctccgatcttgcggtg

SEQ ID NO: 292100 - DNA, 122 bp, Homo sapiens
tttaccgtctcatttattcacagaaatggaaatgttcctggtggtactaagcataattggcgcagaggagtctgaatggttcatcagaccatcattggtcttggaggcctagactggaacac

SEQ ID NO: 292101 - DNA, 122 bp, Homo sapiens
gtgaggctgccaccaccaggactcttctgcaggatgcgaagggaacagtctggatgtgtgcgcctatgtgtgcacgttcttcctaaaacatggttcttcttgaagacacggtgggagcggag

SEQ ID NO: 292102 - DNA, 122 bp, Homo sapiens
caacatagccttcctaaattgaactccctcccaaacctgctccagtcgaggttaccacatcgactcagttgcccagaccagaaacgtggaaaccatcctagatttcctccccttcaccttta

SEQ ID NO: 292103 - DNA, 122 bp, Homo sapiens
tgcttgattccatcaaatgcttttgctgattaaaggcttagaaactgccagagttcctaacgcctgtctctctcaaactagcatggtacaggagaccaagcagatagtgatctgaattcgaa

SEQ ID NO: 292104 - DNA, 122 bp, Homo sapiens
tctgtccctgagtgagtctctggcgtcccaaattgcctgtttttctcgcaggctctattccgttcgctggttcgccacctcaggggaacgatggccatggagtccacagccactgccgccgt

SEQ ID NO: 292105 - DNA, 122 bp, Homo sapiens
tccctgcagggaccggagacttactactacctcaaccaggtcgggggagcccttgtggtgcggcggggaggcctgcccagaggaggatctcggcccggaggtctgaggagtagccggagtag

SEQ ID NO: 292106 - DNA, 122 bp, Homo sapiens
cttgcatttgtatatggatgtaacagagagaggaagtcggcgccacagagcaatcacaggcgcggtcccaaaacgcctgctttgccaacagttcctcctggagcctcggatccagcagtgtt

SEQ ID NO: 292107 - DNA, 122 bp, Homo sapiens
ccctcccagttccctagttcaatcccgtccgcggcgggtcggtgcctccagcactccgtgcgcccgctgatgtgagaaccccacctcccatgtcgtcccctcgcgctactccttgagaacat

SEQ ID NO: 292108 - DNA, 122 bp, Homo sapiens
gagctggcgagagggaaggagtggcctcctgtttacgaagcttcccctctgggccctgcacggtgctgtgctgatcgtttcagcgtgtcatctccctggagaggacagacagccttgtggtt

SEQ ID NO: 292109 - DNA, 122 bp, Homo sapiens
gctgtgggctcctggcacgaaagggtgaagtccgtctgagtccaccgaccaatggtgacgcgcagcgccttcgcggcgcttcctgattggcgggcatgcagggtgggcgggagggaggagaa

SEQ ID NO: 292110 - DNA, 122 bp, Homo sapiens
cgcgaccggcggctctttggcgcggattagggggtctcggcgaggtgaggcgccaggcagcgctgggcgggcgggcgggtggcggagcgcgagcccctctagcgggactagggagaagcggg

SEQ ID NO: 292111 - DNA, 122 bp, Homo sapiens
ttgtggcacagccgcaggtccgcggggatgtccacgcactgaggtggcttggtgtagaagcgcccgctctggtacgggccgatgtccgactggaagctcacgtagtcgtactcgctggccga

SEQ ID NO: 292112 - DNA, 122 bp, Homo sapiens
tcagttacagctttataagcaagataaaggtcaccgtacgacctcgggggcctcgggaaccgagaggctgagccagcccgggacgggatcgggcagcttgaccgctctggagggaaattcca

SEQ ID NO: 292113 - DNA, 122 bp, Homo sapiens
cctgggggcctctctcaaggacgaggttttgaagattatgcctgtgcggaaggagacccgcgccggccagcgcaccaggttcaaggcgtttgttgccatcagggactacaatggctacgctg

SEQ ID NO: 292114 - DNA, 122 bp, Homo sapiens
gtggagagttgaattattaatctaattaggagttgaactgggcttaggtttgctgtgctacggtcacctctaggtaccacaggtttaaacttcctctggagatatattgggtttagggttgt

SEQ ID NO: 292115 - DNA, 122 bp, Homo sapiens
ggatgaagatggggaaaagtaggagggtagaatctgaggcgtgagactgctggaaatcggcggtggtggcgctggcactgtaaacagggggtcaacctgaaagacagacaggcttactgcag

SEQ ID NO: 292116 - DNA, 122 bp, Homo sapiens
tatggacagagaaaaattctagccatggaaactgaaaagccaatagcaagaggatgggggcggtactttccggccgctggctgtcgaagccggagtcccacctgtgtccccacagccctgtc

SEQ ID NO: 292117 - DNA, 122 bp, Homo sapiens
aatcctggagggcaagcatgtttacgtcatttggcccgcctgcccgcccgaagcctttctcggtgaccgactgcagggagctctcaggagccaccgagagccagacctccgcgatccctaga

SEQ ID NO: 292118 - DNA, 122 bp, Homo sapiens
gggggaattgtcatgggtctggtctgtgtggccatcaccttctaccagacactgtgggcccggccccggagggctcggcaggcccggagagtggggggtggtggggggaccaaagcgggtgg

SEQ ID NO: 292119 - DNA, 122 bp, Homo sapiens
acgcgcggttgctggcgggaccttataaatccccggagagccgccggttgtgtctcctggcggggactcccattgggtcgcagctggacagagatcggatcgtcccccgcgcgactctcact

SEQ ID NO: 292120 - DNA, 122 bp, Homo sapiens
ctaattggcctctggggcggtgctgcacctgacctgggctgtcttcaggggctagtgattcgctgaaaaaagcccacattctgccaaggctcagcctccacacctcctcacatcccagccag

SEQ ID NO: 292121 - DNA, 122 bp, Homo sapiens
gttgttaacttctcccctgcagttgtccacgggcccttccaagttaaacattactcatggcgacaagagcccgcagggcagtgcctggcctggaggtggacccgcgtgcggaaggtgctggg

SEQ ID NO: 292122 - DNA, 122 bp, Homo sapiens
cagtcactcctcttccaggttccagcctgaactgtctgcccctgatctgcggcgatttatcgatggtccaaaccgggctgtggccctgcttccggagctacgggaggtcgtctcctctatca

SEQ ID NO: 292123 - DNA, 122 bp, Homo sapiens
ggtgaaaagcattactcttctttccatttctgaggactaattgtgcttcttcgctagacacgagttcaaaacagtgggttgaaagagggcaagtttatgccaaagaatcagaaatagtcata

SEQ ID NO: 292124 - DNA, 122 bp, Homo sapiens
caggtggttggcatctggccccgtttgaccccctccctcctttcctgtccctgcagctcccgtcccatgtgtccctgaattctggttctgactcaggtgtcagatgccttcacaagtgagct

SEQ ID NO: 292125 - DNA, 122 bp, Homo sapiens
gtctcacagcaggtcctcttatttccccgtgtcctgccccacagccccgccccacagtcccgccccacactatgccacctgattatccggaccagagatttcggagattttccattggggcc

SEQ ID NO: 292126 - DNA, 122 bp, Homo sapiens
aaaatctctctcactggctttcactagtctcttcagccttagctcctcatgcttgatcaacgccacactatccatcattctcaaaacaagcgtctgagctattgttcacagtcccctcatgt

SEQ ID NO: 292127 - DNA, 122 bp, Homo sapiens
acatctatgtatgtaataaatctttgctaaaaaaacttctaaccataagctcacccaggacgaggagcctgttgaaccgatgagatgatggataagatggatttcacgataatattggtcta

SEQ ID NO: 292128 - DNA, 122 bp, Homo sapiens
aagccacgcaaaatagcaaaccgggatcctagaggggcggggcccacctcagcgcgcaggcgcaaccaggcccaggtggccgccgcggaagcgaagccacctatacgcgccgcgccgcttgg

SEQ ID NO: 292129 - DNA, 122 bp, Homo sapiens
actgcctttctccccaaggtccaatcacatgtgtgggtgcgaggaggctgtgagtccgggcgctgcgaccgctgtcagaaaaagatccggatctaccacagtctgaccgggctgcattgtgt

SEQ ID NO: 292130 - DNA, 122 bp, Homo sapiens
ttcaactcaaaacccttgtctgacatcccattgaattataccactggtctgcaatggatacgtaaaaatattggcctgtattaaaatatccaagaaaatggaactctcacctacagtcatac

SEQ ID NO: 292131 - DNA, 122 bp, Homo sapiens
gcgagggagaggcggcggcccgcgcggggcggggagggctgcgcccttccagcatcccagcgcccaggagcttcgccacctaccagggtccgagaccttaactcggttccggaaagggcgtc

SEQ ID NO: 292132 - DNA, 122 bp, Homo sapiens
agctggcaggctgggagggcagtggtgagcctaggttagtcagagtctcagtgtaggccacgggagatctgcagagagaaacgagtcaaaccgagggggcctccaatgggggacaaggggca

SEQ ID NO: 292133 - DNA, 122 bp, Homo sapiens
cgcctacctcggagcccacatttgggatttctactccgggagaattctgccctcctcccacgatgagcctggaggactggagccgggacctggcacccccagggctgtgactgggtgaactc

SEQ ID NO: 292134 - DNA, 122 bp, Homo sapiens
gggccatggagcagatccctcatgaatagcttggcaccgtccttgccatgggagctcatgcgcaatgtggtggtttaaagagcctgctacctgcccctgcttgctcccgctctcgccctgtg

SEQ ID NO: 292135 - DNA, 122 bp, Homo sapiens
ggaagtcgatgctcaggaagcgcaggtccgtcagcctctccagcagccgctccacactggcgtagcggatctgcagcactttgcaggagttcatggttttgctgaagcgaatgtcaacatca

SEQ ID NO: 292136 - DNA, 122 bp, Homo sapiens
ggcccgcgggagcaggcggcgctagtgacagcgctggtgccaagcctgggaataaagctccgctccagccgctgctgcctccagcgccaccatcttctcccgccgcagctgccgccgccgcc

SEQ ID NO: 292137 - DNA, 122 bp, Homo sapiens
tctagctgctgctctgctgctcctgctcatggatgagtttggcgatggggccggtgatgccgcctatcaaggtccagtactcatcgaagctgatgcgcccatcatgattggcatccaggttc

SEQ ID NO: 292138 - DNA, 122 bp, Homo sapiens
ccccgagacggcgaccgctcggaggtctccgctcacaggcactgcctggggctgcccctgcgcgtccctgtactgtaccaggaaggagtcaaaggggccctgggccaccgtccatgagaggc

SEQ ID NO: 292139 - DNA, 122 bp, Homo sapiens
acttcctgtgtggggagcagtgctgagctggcagtgagttatccgtttatcccttgtgcacggtggctaatgtacttactctgcagccactcctacaatagaagacttcctctaggatgttg

SEQ ID NO: 292140 - DNA, 122 bp, Homo sapiens
aattaaagagtgaattccttccaaagagaatttgggaaaataatttaggaaaagaagaggcgagaaggtcatgggaaaggttgtctttgctgatttatctgccccaactggataaagttact

SEQ ID NO: 292141 - DNA, 122 bp, Homo sapiens
acagcagagggaggtcagattccattatcctcagtggggatgggaatcgagggttgggggcgtggggctgggaacggcagccttccccaacccgcagctgtacatgctccttggctcccgcc

SEQ ID NO: 292142 - DNA, 122 bp, Homo sapiens
catgcagcaggattatgataaatgcttaacagacacacggctgggctggggtgaggcgcgcgaactctcaggtttgtgcgagtgcttccttaaattgagtgtcctaggtcactcactggcct

SEQ ID NO: 292143 - DNA, 122 bp, Homo sapiens
caagcgccaccagcaggagcacctgcgcgagcagacggcgctcatgatgcagagcttcggcgcttacagcctggcggcggcggccggcgccgcgggaccctacggccgcccctacggcctgc

SEQ ID NO: 292144 - DNA, 122 bp, Homo sapiens
attttaattatgcttgtaggcgatacaccacaataatatgaagagaacctttgactttgtcgtcaataaaaagtcccttgagggacttcagatgtaagtcccttagctgctcgttaaaactc

SEQ ID NO: 292145 - DNA, 122 bp, Homo sapiens
accccaggaacatattcgatgatctcagccccagtatctcacataggcctacccatagtgcgtgcttataactaaccatcaacacttcagttcaagccagttattattttttaaattgccca

SEQ ID NO: 292146 - DNA, 122 bp, Homo sapiens
gtttcctctcgcttcgccctgcccaggcatagtttatcatcttttggtgcctaacacaagcgctcattctccacctgcccagcacagtgggcgagagtggacggtggtgctcccttggcaaa

SEQ ID NO: 292147 - DNA, 122 bp, Homo sapiens
acgggcgaccttcgctggccggtcggtgggttcctggttttctgctgccgagtaaacaaacgttccctttcctaacttagcagtcacagagctatttccaagagttgttcttaatttcctgt

SEQ ID NO: 292148 - DNA, 122 bp, Homo sapiens
ggcattctgtcctcctgctgccattcttcatctccactgagagccagagctggtaggagccgagtgccacaggcattctgcattgctctactcttaggtttgtgtgtgtgatccttcccctc

SEQ ID NO: 292149 - DNA, 122 bp, Homo sapiens
tagattcccgggcttaatcaatcctcccgcctcagcctcccaaagtgctgagattataggcgtgagccactgtgcacgacctgatattatttttagggagtctcccagtaagaatatttgac

SEQ ID NO: 292150 - DNA, 122 bp, Homo sapiens
cgcctcctcttcatcgtgattgggctgtcaaagtgatgttggcaagtagattggctactgcggttgccagttctgtttcgggccctacttatactgctctgtggggcggggacgaagagtca

SEQ ID NO: 292151 - DNA, 122 bp, Homo sapiens
ttatttttcaattcttcctagtcccggttttgcatttctaatgacagtgaactgacaaagcgtgaaagtggtctaaggagcaaaacaaagccagcaagcctgcttctggtgtgccaagatta

SEQ ID NO: 292152 - DNA, 122 bp, Homo sapiens
ttcttggatggccagaaatcctccggaggcagacggtctggggctgaaaccgccacaggccggaaaggtgcgggcgtgaacgtcctgcgcgccgacgtccccccgcgccggtctcccctcaa

SEQ ID NO: 292153 - DNA, 122 bp, Homo sapiens
ccgagccctgcccggccgggaggcggctgaggccccgcgagaattccagcgtggcgcgggcgggccggcagtactaggggaccctgcgccccctccgcagctgctggcccaggtgctaagcc

SEQ ID NO: 292154 - DNA, 122 bp, Homo sapiens
ccaccaccacccacagacctcgcgggcctcacttagcgcgctcctccctgtccgagaacccgagggtccccatgtggattatccagccagtgtgtggtcctttgaggccccaagcgcaggcc

SEQ ID NO: 292155 - DNA, 122 bp, Homo sapiens
caaatgatggtgatgagagcggtggggagggaagcctcacactgccggagcctcaccgtccgctctgcacctttccagctaccacgtctgcaggggcgcggcaggaattatgacgattttta

SEQ ID NO: 292156 - DNA, 122 bp, Homo sapiens
tttgcctgcctccaaaaattaagctgtgttggaagctgcctgataaatcactctttgcaccgtggctgccatggggcttgcagagagtggctgcctagtgatttaccgcggctgtctgagag

SEQ ID NO: 292157 - DNA, 122 bp, Homo sapiens
acaacataattttgggtcccattgtctcaataatcccatttccatttggcatctagaaggcgtgaagtggccctgctctctgcttccctggaagccatttcctgcccacttctggacagtgg

SEQ ID NO: 292158 - DNA, 122 bp, Homo sapiens
tactttatttcctttcttctcaccatcagagaatgtttcctttttccctatgtctcagagcgcatgagactctatgagtccttttggctctatttcttgctatttatcttattactttttct

SEQ ID NO: 292159 - DNA, 122 bp, Homo sapiens
gtgcatacacaatggaatatgattcagtcttagaaaaggcgattctgccatttgcaacaacgtagatggaactggaggacattatgctatgtgaaatgctccagagacagaaatacatatat

SEQ ID NO: 292160 - DNA, 122 bp, Homo sapiens
gccttaccttatcctgtgcgttcaggtgggcgccacactcgatgaggtgctccaggcagtcggggtgccgggtgcgcactgccacgtgcaggggggtgctcccgatctgagagcaagtgggg

SEQ ID NO: 292161 - DNA, 122 bp, Homo sapiens
tgcagtggacgccccccccctcccccgcttgccctggtgcagcctccgggcgtgtccccacggtgccccatagtcctagctcaccgcccaggcctctagccagcctgcactgctactttcca

SEQ ID NO: 292162 - DNA, 122 bp, Homo sapiens
acacgtgtgggcaatacacaggttgcccaagcgccgagagaggcccaggaggacgggccccgggcatggcaagcgcactgccccctctcactcctccggcggccgccgtccactcccagtcc

SEQ ID NO: 292163 - DNA, 122 bp, Homo sapiens
gcccgcactccgccacaggctgtccagggcccgcgggcagatagcagtccaggaggaagccgcatccagacaaaagctgccgcatccctgccctgcccaacccctggagggattcgagtttg

SEQ ID NO: 292164 - DNA, 122 bp, Homo sapiens
agcttggtttgggcacaaagccaagtaagcttggacttcccaagctcccgtctgcgcccacgttccagacagagaccacagagaaatggccttgcacatccattcaggagagcggggcccgg

SEQ ID NO: 292165 - DNA, 122 bp, Homo sapiens
ccaggcacctgctgggctcggggtggcagagacagctgtgcggtcccagctgttcctgagcgcaccgctgagggacgcactcccttctacaacggctgcaccccaagtcctcctcccattcc

SEQ ID NO: 292166 - DNA, 122 bp, Homo sapiens
agctgcagacagagagccccgcgccctcctcctggctggggcgcagcccggcccggcgcgcgcgctcacaccaagaggccgttcttgcactgcaccggcccctcggcgcagtcagccggctc

SEQ ID NO: 292167 - DNA, 122 bp, Homo sapiens
gccctcagagagggtatcgatcttatttctgggtctacggcaaactccaaggtctacaaacgtagaggtcagctgtgaccccgggccaggccgtgaaggtccccaggacacagagctgctct

SEQ ID NO: 292168 - DNA, 122 bp, Homo sapiens
aagtccatctgaggacaccaatgctcagagttgtgaatcaggttagagattcagtaagggcgggaacacttctcatggtaaatgaggacagagcactagtttaaacggtagactctttcaaa

SEQ ID NO: 292169 - DNA, 122 bp, Homo sapiens
ctcccgggttcaagcgattctcatgcctcaacctccggattagcgcggactacaggcatgcgccaccacgcccagctaattttttgtatttttagtaaagaacaagtttcaccatgttggac

SEQ ID NO: 292170 - DNA, 122 bp, Homo sapiens
gtgcactgcatctgaagtccatttgtgggagaggccgaccagaaagccttggacaagaagcgcagggtcctgagtgtccattgcccacaggatactcggctcaggagctttgcggcgtttcc

SEQ ID NO: 292171 - DNA, 122 bp, Homo sapiens
ggtgatccacccaccttggcctcacaaaatgctgcatttacaggcgcgagccactgtgcccggccgattttcctcttcttaaaaagtgaatagtattcctttatatatacatatatatatgt

SEQ ID NO: 292172 - DNA, 122 bp, Homo sapiens
cagaggctgtggcccccaggacgggcgggtagttaaggcaaagtgggcgggcaggacaggcgaagctgagtgcggagctaggaacgagggtttagtgcaatccccgaggtctgtgtaagtgt

SEQ ID NO: 292173 - DNA, 122 bp, Homo sapiens
agtccagaggacagcagtttagaaagtcagcaggtgtggaacaaaggtgagggacttctgcgaactggcagcccttggtgagcccatggccttctgagggccagtgtcagaagcgcccttca

SEQ ID NO: 292174 - DNA, 122 bp, Homo sapiens
gcgcccgcacgttggagagctgccctggggtcataggcttgtactgtggtccaccaaagccgccttagaaataacccacgtgggccgggcgcggtggctcacgcctgtaatcccagcacttt

SEQ ID NO: 292175 - DNA, 122 bp, Homo sapiens
ttgccaaggcaacaactctcaccactctctggtcatttttagtttcaatgacaaagtttgcgttgacttagctgtaagtctgatgcagaaaacttttactcactggaatgcatgaggaatgg

SEQ ID NO: 292176 - DNA, 122 bp, Homo sapiens
aagcatttctgggagctgcatgtgggtgacgcagcagcattgttcgcaggcacaggaagccgcggctgagctgaagggctcgagaaggagcccagagcgctgcacgctgctccctctgggta

SEQ ID NO: 292177 - DNA, 122 bp, Homo sapiens
ggggaaaacgtatggggctggggtcgctctggaggccggggactcggactcgggtagccgcggaggcctttctcaccatcgcgccaaactctcttcgctacagcagctgccgacaccgccgc

SEQ ID NO: 292178 - DNA, 122 bp, Homo sapiens
gactctgacccctaacccgacccctgaccctaacaccgacccttaaccctgccgggagggcgctcagtcccggctcccacaaaggacagcagcacccgtactggacggcacccccggaggga

SEQ ID NO: 292179 - DNA, 122 bp, Homo sapiens
ttcacagcgagttcctgaacattcttcttcccccacaacttcccccagcttgtcagatgccgcgctgcgagctgttcagcatccccagcccacttggtgcagaacacgcacccggcccggta

SEQ ID NO: 292180 - DNA, 122 bp, Homo sapiens
agaggccatacgggaggcccttgtggacaaggctgaggccttctctggccggggaaaaatcgccatggtcgacccattcttccggggatatggtgagagcctcagaggcactgggagggggc

SEQ ID NO: 292181 - DNA, 122 bp, Homo sapiens
ccccagcctgccagaaggtctgcaccctaacgccggagtgcgttgatctgtgggtccaaccgctccctggcctggggccctagccacttttgaagccccgggctcctctgggcacccagggg

SEQ ID NO: 292182 - DNA, 122 bp, Homo sapiens
ccgccccctcgcagtgcggtgcagcctcagtggaagctttggcgaacctggcgcgcgctgcggtgcacagagggttaactggagttggcgctgggtggagaggaggagacgcgctcccattg

SEQ ID NO: 292183 - DNA, 122 bp, Homo sapiens
caggcgggagaggctgaggattcttttgggaagcccctccgccggctgtaaccccagggccgtgccaccctcctgatcaccgcaagcatggaccccccagcacgctgcgggtgggacaggca

SEQ ID NO: 292184 - DNA, 122 bp, Homo sapiens
attagataatcacttaagctaacaacagcagcaaaagaaattcagagataatggctttaacgtgattgctaccaatttattttaaaatatgtgcatttcttttgcatatgtaaataatgtta

SEQ ID NO: 292185 - DNA, 122 bp, Homo sapiens
tacaggcggcccagttcttcccctgctcggctgcccctgcccgcccctcgagggagcgcccgtagccagcgcccccgtaaagaaataaggaggcgcccggcttcccgcccaggtacgtgtcg

SEQ ID NO: 292186 - DNA, 122 bp, Homo sapiens
acacacccacactagcctgcctcaggtttgacgctgtggctgcacgtggcaggttgtgcccgagaaagctccggaaggactcatgtgcacaatctgcagtgcactgccctaaagaagccccc

SEQ ID NO: 292187 - DNA, 122 bp, Homo sapiens
gtcaaagcacaaatcacgatgcacacgtcagatggacgcccacacagcccctgtgttacacgcgtttagttttaagttaaaaacctgcctgtgctgacacacagttctctaaggaaccaagg

SEQ ID NO: 292188 - DNA, 122 bp, Homo sapiens
ccacagccaggcacccttccatgagtgcatgaaaatacgtagagaacctgccctggtcaccggccgccgcccccccggagcccccgcaggcgccgcctgagacccagttctgcgtctcctcg

SEQ ID NO: 292189 - DNA, 122 bp, Homo sapiens
aacttggcccagctctgggcacatggctcaccccctaggaccgcctcctcaccccctcgccggctgcccagccaggacactcccccgcgccctccagggttgcctacctgtctgcagcacag

SEQ ID NO: 292190 - DNA, 122 bp, Homo sapiens
aaccctcccttcccccggcctctcccaacagatccactctctggctctgcaggtttccctcgtctggacatttggcatgaatgaaatggcacaatgcaaggtccctgtggcagcttctttag

SEQ ID NO: 292191 - DNA, 122 bp, Homo sapiens
agagggagaggggcgtggctgagactagccccgaccacgcgcgcgcggcccctcggcaaccggcacaacacaacaaaatggctgccgcgccgctgggcccctgaggaaagagcccgaacttc

SEQ ID NO: 292192 - DNA, 122 bp, Homo sapiens
cccgcaggggatcctagttatttacactctttttcaagcttcgaagctgttataatcattcgctgtcaactttgtgctgacactgaattttactttgtgttttttatgctcggtttgggtct

SEQ ID NO: 292193 - DNA, 122 bp, Homo sapiens
tgttttaagcccgtcggaaaagcgcagtactcgggtgggagtgtcccgattttccaggtgcgtccatcacccctttctttgactcagaaagggaactccctgaccccttgcacttcccaagt

SEQ ID NO: 292194 - DNA, 122 bp, Homo sapiens
gagctcgccccagcagctcaccctgtcccaggaaggtctccgggccttgactctgccgatcggactggcatcccagacagtcaactctgggatccctagtccaacaggagggcctgggagtg

SEQ ID NO: 292195 - DNA, 122 bp, Homo sapiens
ccaatgaaaagcatttcctattgagacccccaagagttcccctggccgtcggctccagctcggacttcaggcctttttgtgtcctgtttgctaaaggcatgcgggctacagcattcaagaga

SEQ ID NO: 292196 - DNA, 122 bp, Homo sapiens
ggagggggcggggcctggggggtagggtcaggaggtgcgtcctgggggcggactctagggcggggctaaggtgagccttaggagggcggggcctggggtggggccaggatgagcgccatgag

SEQ ID NO: 292197 - DNA, 122 bp, Homo sapiens
cctcagtcccgcccctaggcgccacctgagggaaaaagactctcccttcgggtggcccagcggatttttaatcacatttatctgtcgcaaggaccctgcaccaatcccttttaaggctgcct

SEQ ID NO: 292198 - DNA, 122 bp, Homo sapiens
cctgggtgttgatcggcaggaaacagtggtttcctgttcatatcctgcctgagcctgggccgggtggaggtgtcctgcatggagtcttgtgaaatcgcgtggactgcaacacccagcagcgc

SEQ ID NO: 292199 - DNA, 122 bp, Homo sapiens
ttgagaatggcctgggaaaagagtggtccggaccttgcattctttgcatacccaataagacgtgtaggagcaaaactcataagagactccctggaggtgtgtttctcaagaaaaatatgtct

SEQ ID NO: 292200 - DNA, 122 bp, Homo sapiens
tttcccgtttgcgccaacgcttggttaattcacgcagcactgtgaacgcatgcgtgtttccgtactttgttttccctgttggctaggtttttagctggtgctggtgctgccttgcgaatgct

SEQ ID NO: 292201 - DNA, 122 bp, Homo sapiens
ggccagcattgattaaagctagcccagcaagcttggttggaagatgaggtctccctggttcgcacatggcccctccctgtatccctactccaacactcacacagacacgcgccacagagaca

SEQ ID NO: 292202 - DNA, 122 bp, Homo sapiens
cgtctctccgcgcccgcccgcccgggaacctcagcccaagatctctgccgctgtctgtgacgcccccgcagcccgccgctcattggcctaggccgccctgactgacggctcagcgccgcctc

SEQ ID NO: 292203 - DNA, 122 bp, Homo sapiens
tgggagaacttgcctttatttctaggcaggaggctgcactgcaagggagcgtcagtggcccggctggctttccccggccctcagcccgcactcgtccaccaaagcaagctcctttgtggggc

SEQ ID NO: 292204 - DNA, 122 bp, Homo sapiens
ggagtgaagtttgaagactgtctgtgaattttagctttaaatattgtaagtcagcgctggcggcaatggccatctttaacttcgtgatactaagaaaaagataggctcttcagacaagaaca

SEQ ID NO: 292205 - DNA, 122 bp, Homo sapiens
aaactgaaattattactagctgacctccacgtgaagagcaaggtagagtgaagccaatggcgagagatcaggtccgaaatgctgcattgctgcagtttccaccactcttatacaggaaaact

SEQ ID NO: 292206 - DNA, 122 bp, Homo sapiens
tcctaaaagttcttatgacatagatccttcagttcttcagggagactttctcttccacatcgtgtatacttcacgagtcagttaatcaaattccttgcagttgtgtaactgattgtttttaa

SEQ ID NO: 292207 - DNA, 122 bp, Homo sapiens
ttcaatggtacttttcttccccctcaatagctgccaagcaatagagaagacaatttgtcccgggaagtggacactttggcccatatattaggaccctgacagatgaaggcaaaaatcaggat

SEQ ID NO: 292208 - DNA, 122 bp, Homo sapiens
attggagaagggagagacttaaggtagttattccaataacataaaaggagagatcaaaaacggtgacaccaccaaacgctggtgaggatgtacagaaactggatcacttatatgttggtggt

SEQ ID NO: 292209 - DNA, 122 bp, Homo sapiens
gttattgctcagtttgactttcttgcacaggctcccggggatctccatgaccgcggagcgcgctgagcagccggggttctctgcgccgggagggtagcaagaggagggcaggccagcgagcg

SEQ ID NO: 292210 - DNA, 122 bp, Homo sapiens
cacagccgagccagggagggaaggcccagggccctttgagctctgtcacagagacacaggcgtggggtccttggagctctagctccgactgcagactctgtggttctcacaaccacccgttt

SEQ ID NO: 292211 - DNA, 122 bp, Homo sapiens
aggcctgagtggcaggagggcgaggccgggaccaatcccaggaggaggcggtgtctgccacgacagaaaatgagtgtctgccccttgccggggctcacgcccctaactccagcactttggga

SEQ ID NO: 292212 - DNA, 122 bp, Homo sapiens
ggtaccctttgtctaagaggtcctgggggccccccgcggccgggctgctggaaacggaggcgtctttggccctcgctgtacaacagaggcaggacaggcaggtcctgctcagggggacccag

SEQ ID NO: 292213 - DNA, 122 bp, Homo sapiens
gtaccatcttacatcccaccagccccgcgtgagtgagtgatctccaacccgttttccaggcggctgtaccatcttacatcccaccagccccgtgtgagtgagtgatctccaagttgttttcc

SEQ ID NO: 292214 - DNA, 122 bp, Homo sapiens
gatggcctcctcctccggcgagggcaaggtgcgccccctcagcccccgcaacctccgccccgtcaccccgccgttttccgagctccgtgggccccaatcagccccatctcacccccgtgtct

SEQ ID NO: 292215 - DNA, 122 bp, Homo sapiens
tatacctgtcctcaattttcaaaaattcagaatcagaattccatattctatcagtaggtacgtttgtgatacaccttgcctggctacctcttagctaccctgtttacaatggaaagattagg

SEQ ID NO: 292216 - DNA, 122 bp, Homo sapiens
gaaggcgcactaaattagccctaaagatcgctgggaattgtagtttaatctttccatcagcgttaaatcaggaagtcttgagaagtgaaaagccacagcctgtaagtacctaggaaatcctg

SEQ ID NO: 292217 - DNA, 122 bp, Homo sapiens
gggggccaccgagaaactaaacctgttactgctgcgaatacgccggcagggtccgggtggcggggcgggcggggcggacgcagcgtccgctgggcggtgggaagaaccccaggcatctgagt

SEQ ID NO: 292218 - DNA, 122 bp, Homo sapiens
tttgtcccagaagtgtgaagtccacctagggcatagccgtgaagggctcccagaactgtacggggaattttgaggctggggtaccgcagtgaagtgcagctcacccgggcggagcgcacctg

SEQ ID NO: 292219 - DNA, 122 bp, Homo sapiens
caaccgcccccatacccccttgggtgtgctctcaagtgtactgagtgtggagttctctgccgccagtgccacctctgatgccacaagtgtgcaagtgtatgtgtacatgtgtaagagtgtgc

SEQ ID NO: 292220 - DNA, 122 bp, Homo sapiens
ccagatcagagtgaggggcattcctttaacatccaggagttcttcatctcttttttgtaccgtgaacctccttggcagtaaggtgaagtccctggactccttctcagaataatttttttttt

SEQ ID NO: 292221 - DNA, 122 bp, Homo sapiens
tgggtcccctctgtccatctgcaaaatggacagctttggctctctttctctgggcaccagcgcctgcactagagccatgttgagttgagccaagccccaaaagtccctgtatagtgttagca

SEQ ID NO: 292222 - DNA, 122 bp, Homo sapiens
tttaccgcagactgtgatgaggttcaaagcccaatttgctgacctccaacaaaagtgcaacgtactcttttcagcacgtctccttcagctacgtggttaaaaggattcacctggctggctgg

SEQ ID NO: 292223 - DNA, 122 bp, Homo sapiens
tctgccactctccaacctctatatcctatcatctagatttaaatcaagatataccactagcggaacatacttattattgaacattaaactatgagattagcactatgtctggtactagttaa

SEQ ID NO: 292224 - DNA, 122 bp, Homo sapiens
ctggtcctgagaagagggaagaggcagagtgagtcactgcacgcacctggcctccatggacgagcaagggcatcccagaaacgtgtaaatgaccccgagtgtgactgggaaggagaacttat

SEQ ID NO: 292225 - DNA, 122 bp, Homo sapiens
aaactgggtgttagcatcagtttctccctttttcataaagtctaagtgttattataagatcgttagatccattgaataattgaatttgtttaactactacgtcacaagggcttggtagacac

SEQ ID NO: 292226 - DNA, 122 bp, Homo sapiens
ggcggcgggggacctccccgagcagcgtcagagccgcccggagccgcagcagccgcaccacgcgcatctgccagcctccgggaaagagcgacaagctgggccccgccccagcggccagcccc

SEQ ID NO: 292227 - DNA, 122 bp, Homo sapiens
ccagccaccagaatcttcccagtacagagcttagcatacattgaataactggcatctgctcggcccagtgcctggcacgggggaggcattcaacaacagtgcacagaatgactcacagaaac

SEQ ID NO: 292228 - DNA, 122 bp, Homo sapiens
aaaacatcgtggactttggagtaaaaacaaatgtctgcaatttgttgtgttctgttactacggattggcctgatttgagatacttatttaacttctttgagcctctgtttcctcatctttca

SEQ ID NO: 292229 - DNA, 122 bp, Homo sapiens
gttgcgcagcgacgcgggggccttcgggaaatgtagtctacaactggaaaccggccggatcgtgtctgcgcaggcccagcagctaagatcgggtccggcgctccagaacagaacgatccctg

SEQ ID NO: 292230 - DNA, 122 bp, Homo sapiens
caggagaacattccacattccactgccacacagctctgcaaaccccaaatcctgactctccgaagaaggatatgggcaaggaaaacaaagaaggcatttgaaaaaaccaaaccttgcaagaa

SEQ ID NO: 292231 - DNA, 122 bp, Homo sapiens
ataatgagtgaggcagttagtcaggaacaaaatgtctttaaataattactcctgcgcatgcgtacggggggacgtgactgaagtctcacactcctatctctctgggcctgataaattgtgta

SEQ ID NO: 292232 - DNA, 122 bp, Homo sapiens
tcaccgccaccctagaggtgggccattacgacacacctgtttggcacatggggaaattgacgcacagagacggagctgggatttgaacacaggcactctggctctagagcccacactcttca

SEQ ID NO: 292233 - DNA, 122 bp, Homo sapiens
gcgtgcagggacatgtaattctctaggagacggtggtccggacttggttcccgactccctcgtggctgcaaacaggggcagctgatttgggtggatgcagaggttgtggccaggggaagggc

SEQ ID NO: 292234 - DNA, 122 bp, Homo sapiens
tacgaggagccgtatcagcctggcacacaatagttaaccactaagtctgggctgaatgcccggctaagctggtgccctagtgcaaacaatcgctttcattatcccagttgctgggagaattg

SEQ ID NO: 292235 - DNA, 122 bp, Homo sapiens
gcagctgcagcgagggaggcggtggcgctcactgcggctcttgggcaatgcaagttcagccgccggcccgcaggttttgcctgcccccctgccgccccccgccccccgcgcgccaccaccgt

SEQ ID NO: 292236 - DNA, 122 bp, Homo sapiens
ctgtggaagcctgagatcgccctggagaaacgcaagcatgacctggaggtgcccaagccccgactgcacctggtgccgctgaccacgcagcagcacttggcgcctgccgctcctggacacac

SEQ ID NO: 292237 - DNA, 122 bp, Homo sapiens
accctgcctggcccgaggtaatcgcgctagggacgctttttctgcagcaatgatataccccgccgaactgtcccacgtcctggttgggacctcttggtttcgcttggctgggctcaatccat

SEQ ID NO: 292238 - DNA, 122 bp, Homo sapiens
tcccctgctcagcggtcaaggaccttgtggtgagcgcctccccacaaacgcagcctcctgcggaattcagccctgcacttttgcagagcttggagccaagacaaatgacatttgtgatcatg

SEQ ID NO: 292239 - DNA, 122 bp, Homo sapiens
tatgaagagaagactaggaaggaccggagtagaagcactaaaggaggtagaggcaacacgcggtgttcttgaagagtttccagacagatgtattaaattccacagtgtatcaggaaagagca

SEQ ID NO: 292240 - DNA, 122 bp, Homo sapiens
cgaggcgcacggaattgcaagttcagcaaagaaatgggtgggggggctccggcggggagacgcgacttgctccgggtcgggcaggctaggatgcatccccctcgcacccaccccgaggggaa

SEQ ID NO: 292241 - DNA, 122 bp, Homo sapiens
gtcatggtcactgtataaataggctcattgagaaagcacctggatggctgccaccttcagcgtaattcatatgctctatctcatttgggagagctttatccatagtggcagcttgctagtca

SEQ ID NO: 292242 - DNA, 122 bp, Homo sapiens
gcacatgggtgaatttcaaaagcattgtgctaattgcaagaaatgaaacacaagagactgcgtattgtgattccattacatggagagtcaaaatgctgtctccaggatgatcgaaagcagac

SEQ ID NO: 292243 - DNA, 122 bp, Homo sapiens
tttcagtcaagccagagtaacactactttaagttacagcaatgctttaccgttcctaaagcgctttcaaagcccaggcaatggcggaaggtcttgcggaaacccacataacgtggggtgtcg

SEQ ID NO: 292244 - DNA, 122 bp, Homo sapiens
ccagacccccgcccccgccaggctaggacgagcagccgccaccgctgccaccgccaccaccgccgccgcagcgcctcagtgcggccccgcctccgccgccccaccaccttcaccacctccac

SEQ ID NO: 292245 - DNA, 122 bp, Homo sapiens
gtaacggcctggggcgagaggaatagacggaagggaaagtaaggtcagggaaaaaggacacgaatcaaggtgacttcattagccgccttcggcacccctcccaggtgagggttttctgtcgt

SEQ ID NO: 292246 - DNA, 122 bp, Homo sapiens
aaaaaagatgtgtttgtgtagcggggacgcagcttgacacccatttcctttggctcgcatcgcggtcgcagagcccaatcgcggggaaacgggccccccagaaaaacaggcaacgaccccca

SEQ ID NO: 292247 - DNA, 122 bp, Homo sapiens
gggacagaccccacggaggacagcgagccgcggggacagaccccatggaggacagcgagccgggggacacagaccctacagagaacagagagccggggagacagaccccatggagaacagtg

SEQ ID NO: 292248 - DNA, 122 bp, Homo sapiens
gcgggggaaacaaggaaatccccaccttctatccctgtctcgtggtgcggtcccctgtgacggcctcagacctgcggggaacccaggactttgccgcctaccacggtctcagccttattctc

SEQ ID NO: 292249 - DNA, 122 bp, Homo sapiens
gcgctcccaggggagtgggccggacagcccaggccccgcccccggacgctgcccgggccccgccccgacgcacacgcccaggtgcggctgcacttcgcctttgttctcgccacctagcggtc

SEQ ID NO: 292250 - DNA, 122 bp, Homo sapiens
tgttctgtgtctttttcagccaacgaggctagaaaatgatctattgcccaagcaggcgcacgaggatacggctgtcacagctgccacactggcacctcgtggtcccttgaagaccgcccagg

SEQ ID NO: 292251 - DNA, 122 bp, Homo sapiens
tccgcgaagcctcacccacagggtgtccgagagcagccacggcaggtcttgcccccggagcgtcccttggtgcccacgtccccccagctgcacacaggcccaggcattgtggcgggctgtga

SEQ ID NO: 292252 - DNA, 122 bp, Homo sapiens
ttgctgccctgcctccctccttctccctttatccccccgcccccccccatgctctccctccgcgggaatcacgtgtcgccatcatactcattgggagtctctgcctcgcctgtcgccacgtt

SEQ ID NO: 292253 - DNA, 122 bp, Homo sapiens
acagcggctcctcagtttacttgaaataaaacgccaaagtccttacaatggctgcagagccggacaacccactggcctgcctagctgtctgacctgctctccccttcctctgttagctgcat

SEQ ID NO: 292254 - DNA, 122 bp, Homo sapiens
tacctctgaatggccacccttagaccctgtgatccatcctctctcctagctgagtaaatccgggtctctaggatgccagaggcagcgcacacaagctgggaaatcctcagggctcctaccag

SEQ ID NO: 292255 - DNA, 122 bp, Homo sapiens
ggatttacaaagagaccgttttgcaagaaaagaagctggtctgggggtccccgcaggaggcggggttccgtgcaacagataccaagatgcctccagggcggaccacgacccagcgggccgcc

SEQ ID NO: 292256 - DNA, 122 bp, Homo sapiens
agggcgttctgagaagtcactacagtcataaatgggagggtgacacccagagaccggcaacggcaacgcctaggtcgggatccaggtttgggagaaccattcgcgcggtagtcacacacaca

SEQ ID NO: 292257 - DNA, 122 bp, Homo sapiens
cctgcctccgactcgccaggaatgcgctgtgtgcgcggggcttccagggtggcgggtccccgcgagccggcgccggcggcctggttacccgggctccaggggctcggagggtcgcggccggg

SEQ ID NO: 292258 - DNA, 122 bp, Homo sapiens
aacctccctctgaggggtggagacatccatgccctgagcaaaaacagagccctgggaccccggatctgaaaccttgatgaccacttgggccagattccctgacttcttcagggaaaggtgac

SEQ ID NO: 292259 - DNA, 122 bp, Homo sapiens
ccttaaattttgctcctggggcaaatgtcttacttgcctcagcctagcctggggcctgagcgggcacctccttcagccttctttcctccaacctctccctgatccaggctgttttccgcaac

SEQ ID NO: 292260 - DNA, 122 bp, Homo sapiens
gtggggtcgtctgggtaccacaagaagtcggatcgaaatcggggcgtctggtgggaaggccggggtctgggcgggtgcgcgtttggtctgggcgagctggtgaagaagatggtgatcgtgtc

SEQ ID NO: 292261 - DNA, 122 bp, Homo sapiens
tttagggtagtttttttttttcatttcgttccaggttaattttgatttcctttgtaataacgggaaattattttgagataggcttgttggtatccttgattatctgtgtggtgtctgcatga

SEQ ID NO: 292262 - DNA, 122 bp, Homo sapiens
accgggttcatctcactagggagtgccagacagtgggtgccggtcagtgggcgcgcgcaccgtgcacgagccgaagcagggcaaggcattgcctcacctgggaagctcaaggggtcagggag

SEQ ID NO: 292263 - DNA, 122 bp, Homo sapiens
gcccccagaccctggtcggccacctcccacctccccggccccagcagtgtgccccttccccgggcgtctcgcctctgcgcagccctgggtcaggcaccttgtacactggctccaaagatgac

SEQ ID NO: 292264 - DNA, 122 bp, Homo sapiens
agaaagactcggtctcaaaaaaaaaaaaaaaaaaatctcatttaggacctcagccagaaacggttggcagctaataaagtagaagaaagggccaatgacacacaaaggaatgaacaaacttt

SEQ ID NO: 292265 - DNA, 122 bp, Homo sapiens
ggaccgcacacaggctttgtcaactgccgggttccaggcagtgcagagccctgggacctgcgctggggttgagctccatccggatctcactggcagtagatcgagtcctgccagggcccgcg

SEQ ID NO: 292266 - DNA, 122 bp, Homo sapiens
gtcacagagctcagcttcagggagaactggttcttagacgtgtctactgatatggtaactcgactcttgagggacgggttgtagtaggtgctcccactgtaatagatgtacccaatccactc

SEQ ID NO: 292267 - DNA, 122 bp, Homo sapiens
tgcaaagctcactttttggtaattcatatgagaatagaatgttctagtttttcttgttggcgtctgctgtggaaaatttaaataatgggcagggaaaataactaaaactgactagtgctatt

SEQ ID NO: 292268 - DNA, 122 bp, Homo sapiens
gcgaatggtagcagcagagccactgccgccctggctcttgtaggtgggtctggagtgtcacgtaggcaccccaactcgcgccgggggccgtggtccgcagactcccacttcattgccccgga

SEQ ID NO: 292269 - DNA, 122 bp, Homo sapiens
ccacaacaatagacattccatttagaactttgaagctgactagttctatgaataattgtacgcataccaggatataaagcttgtaattctcccatggtgttggaatggcagcaaaggctcaa

SEQ ID NO: 292270 - DNA, 122 bp, Homo sapiens
gcgagcccgggcgctccgggggagggcgacgccgagcggctttccacgccgcgcaggtctcgaggggcccagctcccacgcaggcgcctctcccgttcgcaccaaccgcttcctgcccctcc

SEQ ID NO: 292271 - DNA, 122 bp, Homo sapiens
ctgccccgcagggagacagcgaggaggctcctgcagcctcttcctggtttaatctccccgcgcggcttcccaggtccatgtcccgtatcagctgcggggccggcagcaccaggcccaggagg

SEQ ID NO: 292272 - DNA, 122 bp, Homo sapiens
gggccactagtccagctgtggggacagtgtccgaagcccctgccccactgactggggatccggaaaaagggtgccacctccccaccccaggcatctactttgcttaatggaggctgagccca

SEQ ID NO: 292273 - DNA, 122 bp, Homo sapiens
ggaacttctcccctgcggggttgcaatgggaattggagaaaatatatttcaagtgccttgcgcgatgcccggcaccgaggcacttggcggcactcaatatctggtattgtttggctattatt

SEQ ID NO: 292274 - DNA, 122 bp, Homo sapiens
gggcagggtgcactggagagtggtggggtggtggtgggggaaccaacgtgctcgccaggccgtcattagcccagaattatcaggcacctgaaacaacaaggtcaagaatgtgacctgaacga

SEQ ID NO: 292275 - DNA, 122 bp, Homo sapiens
catggattaacattaaacagaaacagcaaaagaaaatggagtgctggcgaacagagaccacgcagcggaaaaacagtatttaaagtgcaccagaaaagtagctgcagaatgaggagaaaatg

SEQ ID NO: 292276 - DNA, 122 bp, Homo sapiens
atggtaagtgggacaaactggtggtggttgaaagtggactagcatgagagggagaaatgccgggaccacaactttccagggttgcaatcacactaggttttcaagatctgagaaagatcccc

SEQ ID NO: 292277 - DNA, 122 bp, Homo sapiens
ccagggctgcgggaatggccccgggtcctctgcccagggcctgcaggtgctccaggtcagcgggcgactttggccgctgcagagaccgagatacgcggggtaacagcccgttccggagccgg

SEQ ID NO: 292278 - DNA, 122 bp, Homo sapiens
atccatcagggcaggatccatcaggaaggaaagagtgtggagcgactcctttgcttaatgcgggcttctggtcagtccctggagcttgtcatgtgacagcaggattctcctgctgctggaga

SEQ ID NO: 292279 - DNA, 122 bp, Homo sapiens
gcgtccactggaggaagccggatggcgcgggcttggtctttcaggaaggctggctggcaccgggcttccttctggctccagggggaaccgtacaggacggggagaaagggggaagctggtga

SEQ ID NO: 292280 - DNA, 122 bp, Homo sapiens
ctggcttcgacataaagcagacaatgccatgaaccagtgtcctgttcatttcattcagcacggcaagctcgttcggaaacaaagtcgaaagctgcgagtaagtgacacccgacacatttacg

SEQ ID NO: 292281 - DNA, 122 bp, Homo sapiens
tctctccccgcttgggggtgctcaggagggcccagggtacctgcgcgggcaccttggcggcgggtcaccctccctccgagccactccgtccgtgggcagcggccttaccaggtccgagccgg

SEQ ID NO: 292282 - DNA, 122 bp, Homo sapiens
aggaccaagcgcatagaccacgcctctgaaattggggaacgaggaggggtttgatcttgtcgatgattggctggtctctgaccaatcacggacagcgattgatatttctaatcgtcgtgatc

SEQ ID NO: 292283 - DNA, 122 bp, Homo sapiens
gctgcgaggggccgggtttagcggggtgggcgtggccgtcgaggtggggctcggcgggtccgaaggaacctggggcagagctggaagaggaaaggtcttgggggccctgggcctgggtctgc

SEQ ID NO: 292284 - DNA, 122 bp, Homo sapiens
gaacagatctcggcccctttccaaacactcctgatgcctcatttgcctctcgcctcttttcgaccaccattttgggggctgaggcactcacggggcctccccaggtttcactccgtttctac

SEQ ID NO: 292285 - DNA, 122 bp, Homo sapiens
tttacagctaagtctggactgcaactctgcagttttgttagcataaacgtttcataaccacgaaatatatgatgagcagacaatgggtgtggtatacagcaagatgaaacctcgattcccac

SEQ ID NO: 292286 - DNA, 122 bp, Homo sapiens
cagaagctcctgggtttagagtcagcagaggaatctgtgctgtgagaagtcgacgcatctcggtcagcgtgggtggcacagtgcacgcctgatcgcgtgttcttttgttttaaaattctacc

SEQ ID NO: 292287 - DNA, 122 bp, Homo sapiens
ccacccccaaggagctcctctgacccaaattcctgctgagctcactccaggccaacaccccgagccacgcgcttccccagggaggattccagccccctccagtacggcctcagccgaggagc

SEQ ID NO: 292288 - DNA, 122 bp, Homo sapiens
ttcacagaaaaacctgttctggtgagaactcgcttctgctcttcaaaaagatgccccaaacgtctgatgctcagcatcacgaagggtttctccgctgcatgcaggaagatagtacccgcctc

SEQ ID NO: 292289 - DNA, 122 bp, Homo sapiens
ctgaaccaggcttggtgtgtaaaccacgcgtgccacacctgggagacgcacgcccatgcccgccaaggattcagagagctgcagatttccacaaagaggtgtggaggcgattcctgctacca

SEQ ID NO: 292290 - DNA, 122 bp, Homo sapiens
tctaggcaatatttgggtcatttaataaggctcttttgcatccatcactataacctgaagcgaaaaatgtagctttggaaatggtgtttatagcaggcccatgggcaaaacgtttcaaccgg

SEQ ID NO: 292291 - DNA, 122 bp, Homo sapiens
ttcacgtcgtccaccagatcccagcggtgtcggtcaccagtgtggccggactggccccagcgaacacgtacactgtctctggacaagctgtggtcaccccggcagccgtgctggcccctcct

SEQ ID NO: 292292 - DNA, 122 bp, Homo sapiens
gcggggatgcgctaggcatcccggtttgtcaccagggggcgtgcgaggccctcagcttggcgggcggtgaggcgtggggtgacggggggatggcgggggccggcatgcgcgcgcatgcgccg

SEQ ID NO: 292293 - DNA, 122 bp, Homo sapiens
tggaagagggactaacatgtatcaagcactttcttgctttttcaaagtcccagaagcatgcgatggccctttacatacattgtaatttaattggtgtaattttaagagaaaaataatacttc

SEQ ID NO: 292294 - DNA, 122 bp, Homo sapiens
taaataatggaaatgaccattatgaacacaacgagggcagggattccgtagccagagctgcgagaccgtgacaaatggctctccagggaaacggggtgcagcctcctctcctggaagtcagg

SEQ ID NO: 292295 - DNA, 122 bp, Homo sapiens
aggtgggggtgcagaccagacgggggcgtgcctttgcccggattggctgcaggagcctgacgcgaggccccgggggttggcttggggagtgggagcggggtggggtgggtgctgggtgccgg

SEQ ID NO: 292296 - DNA, 122 bp, Homo sapiens
ttgggttcagacaacttgtctttttagtttataggtctctggatcaagataaatcataatcgaacctgatgtggagacaaagtatccttcatggactttgaatttgatatgattgtttttct

SEQ ID NO: 292297 - DNA, 122 bp, Homo sapiens
agcgggtcgccgactcctacgcccgcgctcctcctacgcccgcgctcgtccggcgccccgcgccgcgccccgctcagcgtctgccgcccagctcctcgcccagcctcgccgagcctcgccct

SEQ ID NO: 292298 - DNA, 122 bp, Homo sapiens
gctcacagtttggggggaggcagtacatctagctgtctgtgactccaggcagcagagggacggagaatccccagggcaggggactaggaagatgctgtggaaaggaccccaggtctgacctt

SEQ ID NO: 292299 - DNA, 122 bp, Homo sapiens
ttgaacccggaaggcggaggttgccgtgggccgagatcgtgccactgcactccagcctggcgacagagcgagactacatctcaaaaaaagaaagaaaaagaaatatggctgagaaagtggca

SEQ ID NO: 292300 - DNA, 122 bp, Homo sapiens
gggaatgtgagcgttgtttctgtaaccagttttactgaacctcacagatccattatacgacgtgaattttgtgggaataacataggctgggagtctgctctcttccagcctggtccctctct

SEQ ID NO: 292301 - DNA, 122 bp, Homo sapiens
ccaactcctggcttcaagtgatccacccgcctcagcctcccaaagtgctgggattacaggcgtgagccacagtgcctggcctttttgaggattattataagtaaaagaaaattcagaccacg

SEQ ID NO: 292302 - DNA, 122 bp, Homo sapiens
agctcccagctgatgccaatgcaaccggtccaaggagcttagagagcatctagttccacccgctccccacacagagaagacagtggagccactgagacggttaatgactcaccagttgctgg

SEQ ID NO: 292303 - DNA, 122 bp, Homo sapiens
ggatttatgtcatataaggaaacgatttaggggtggataattctctcactaaatctgaagcgtttattttggaagagcagtttcagacttattctggctccagagtacaggactaaagctaa

SEQ ID NO: 292304 - DNA, 122 bp, Homo sapiens
atttgccacctagtttctaaatatctctgaaatccgaattcattgttctacatcctttagcgtgctattttctgttcccgcctctaccggatctattttccatgcttctctgccctttcgtt

SEQ ID NO: 292305 - DNA, 122 bp, Homo sapiens
catcaatagagaacttgctaaatgatttatactacctttacatattgaaatacgcatagccgtggaagataatttagtagatctatatgtcccattatggaacaatccccatggtgggggga

SEQ ID NO: 292306 - DNA, 122 bp, Homo sapiens
gctcgcctttccctggcatttttgcccctcagctgggtctccgactttcctcttgggaggcgaccgggttcgtctggatgcagagtcccggccttcccgcaaccctcctggagagggggctt

SEQ ID NO: 292307 - DNA, 122 bp, Homo sapiens
accgggggcctggacaacactggctcgtggggctgaggactgaggagagcctggcccagccgtggcagttacaagaggcttaacctgaggggcagcagagtctcaggaagagattctgggat

SEQ ID NO: 292308 - DNA, 122 bp, Homo sapiens
cagagagtggacgacatgggtacccatgtggatgacatgaccacccagaaggcagtgttacggtagctcagagaagaggtggtttgggaacagtgattaggaaagagggatgttcagaggcc

SEQ ID NO: 292309 - DNA, 122 bp, Homo sapiens
cgggccccaggtgttggaagctcgggagctcaagagcctggggaaggcctggagtctcagcgagagggtggccgcctggagagtccagagccctggcaggggatggaggcctctggcgcctg

SEQ ID NO: 292310 - DNA, 122 bp, Homo sapiens
agggcgtgaaccaggcctttgcggccaagttctagggggctttggagacccggaacctcccgaatgtcagcgagaggcaggcgccagccgctctgcccaggcctgccccgcgctgcacatga

SEQ ID NO: 292311 - DNA, 122 bp, Homo sapiens
gctattttttattgtttcactccagttctttgaatatgtacagccatcacctgtttgcagcgggctgcctccctctttgggctctttactccaggagccccacacaactatgtgacccatta

SEQ ID NO: 292312 - DNA, 122 bp, Homo sapiens
gctttgtacataaaagatgatacagcttggtctaatgtggttctaaggaggctctgccggcgagtcttaggggttccggcgggcagccgcgtgaacctggagcttggggtctgcagtgctgg

SEQ ID NO: 292313 - DNA, 122 bp, Homo sapiens
aaataaacactagggctgacacttgtcctcctaaatgaagtccacaaagatgagctcttgcgtgatcctctgaaccagttccttcctggagataaagggtgctgaaaagaaagtatgtctta

SEQ ID NO: 292314 - DNA, 122 bp, Homo sapiens
gcggcagcgcgagagaagtcaaagcgatcgcgatcacagcctaaccagcaagccagtgggcgactgctgggagccagggcgagggaagtggccgttccactttaatcttaaccggggctggg

SEQ ID NO: 292315 - DNA, 122 bp, Homo sapiens
atgacagtgctgaggttgagagaccctggcctagtccaagggttctcaaactttgggtctcgggattcctttatgttcttaaaagtttaagatattcaaaagagtttttgcttatgtcatat

SEQ ID NO: 292316 - DNA, 122 bp, Homo sapiens
cgtggccgggcccgaggaccgagctaggactctcagtggggcaggctggggccccaggcgcggctcagtggatttggaagaagcccagccaagtgtccagaatcattgctatttttacggta

SEQ ID NO: 292317 - DNA, 122 bp, Homo sapiens
gcgaggagctgagggaccctgtgagtacctgtcctcgtcccccggtgtgggctggggtgtcgtccccgtcctctgtggccgggccaagcgtggactcaggcagattcgtgtcctgcccatgc

SEQ ID NO: 292318 - DNA, 122 bp, Homo sapiens
cttcaagcccattggtcagtgagaaagatgaaagggaaaggaggcggggccaggcagccacgtgtcatgaaggacctgtgatgtcacaaggaaagccgcccatgcaactgctgtccccgccc

SEQ ID NO: 292319 - DNA, 122 bp, Homo sapiens
gagaacgtagtccacggagcgcacggagccctgcagctccagcaggcacgagtcctccgacgggctagagcccccagggaggtcaccaatggctgacagcaccagagacccgctgtccatgg

SEQ ID NO: 292320 - DNA, 122 bp, Homo sapiens
ccaggccccgccccgccacagcccccgctgtcctcctccctccctcagccgtgccagcagcggcacagaactggaattgccctggacggccacagctctgcatatcccccaggagtgtggac

SEQ ID NO: 292321 - DNA, 122 bp, Homo sapiens
gaaggacatagaagtatggccagttaggcccatccagtctttaggtgaaggaagaggccacgatggatatgttcaggtcagaaagtttcatggaggagtgacattcaccgagaatctgaaag

SEQ ID NO: 292322 - DNA, 122 bp, Homo sapiens
tctgcccctcgctgacgctggcgcgcagcggctgtggcagcacccgggacagcggccgcccgcacttcccgcctctggctcgcccgaggacgcgctggcacgcctcccaccccctcactctg

SEQ ID NO: 292323 - DNA, 122 bp, Homo sapiens
tcagctcggtcccagggcccgcagggcccacaccacgtcgggccggccagaccgagcggccggcggactagccccccaaacgcctgagattggggggaccaaattaaaagcagctgtttaac

SEQ ID NO: 292324 - DNA, 122 bp, Homo sapiens
cccgttgaagtcaaatgagccgtcttcagcagagattttcaggcaaatagcagaggcctacgacgtgctgagtgaccgtgagtaggtgtggggctgagcaccccgcttgattaggatcattc

SEQ ID NO: 292325 - DNA, 122 bp, Homo sapiens
ggtccctttgtgtttctgagtctttgtttcctcctctataaattaaggattcagtttctacgggttattatgtgctgagaaaccataccccagctcagatattccctgaaaacagaactcac

SEQ ID NO: 292326 - DNA, 122 bp, Homo sapiens
gtttgtggctaagcaaggcacctccttcgaggtgattctcatctctgatgctaacaccttcggcatggagagcacgcagcgcgccaccggccaccagagcctgttcctccgcatcctcagca

SEQ ID NO: 292327 - DNA, 122 bp, Homo sapiens
acgcctcagtcccaggcctggcactgcggtgttgccgccccggaggaggtgggacaacggcggttgtgccagtccgggcgctgcacccccttcccggaactctaatcgtatccccaaataga

SEQ ID NO: 292328 - DNA, 122 bp, Homo sapiens
ttttaaaaggtggagccaagagctaaaccgagctgtgctatccaaaggtttccaccaccccgggccacctctttacagatcaatacacccacagagagaagactccagactccagggtgacc

SEQ ID NO: 292329 - DNA, 122 bp, Homo sapiens
gcacattccttctgacaataacatgacaggtcccacacatccctgcctgtgccctaaccccggtgacagtgccagagtgcattaaggcgaagccttgcagtggcttgccaagaaaccagtgt

SEQ ID NO: 292330 - DNA, 122 bp, Homo sapiens
atacaatcaagaaacagctttcacagatagcattgttaggaggtgctaaggctgttttgccgaaaattaaatgctgcaatagtagcatgctggtttcacactctccctggagctcttcatct

SEQ ID NO: 292331 - DNA, 122 bp, Homo sapiens
acacggcccacctgcacccgggcgctgcctccctcggtgactggtcccaccacgcacccacgggagggtaaaactggctctgcggacatcccgacatcccgacatccccacatcccgagagg

SEQ ID NO: 292332 - DNA, 122 bp, Homo sapiens
ggacacgccgaggtaacttccagggtgcgccttcgttgtcttctccaagctgtagttctacgtcccgacctccctatcataccacactcttcagcgaccacgcaggcactttcccggtcccc

SEQ ID NO: 292333 - DNA, 122 bp, Homo sapiens
tgaagtgtgatcatctcgcatttgcccctctccctggctcacaaatgtgacagggaaaggcggtggcacaaaacaccaggcacagtgactgcacacaaaaccattgctcaaaagctacttgt

SEQ ID NO: 292334 - DNA, 122 bp, Homo sapiens
atcaacaccattctggggcggtgaagtagttttcgattccgggtgatttttgtccctctgcgcttgcgcttgcgcttgcccccgctcaccttcccccagctccggcccctagccccagcatt

SEQ ID NO: 292335 - DNA, 122 bp, Homo sapiens
tctgcacccgatcttgtgcttgcttctgccagccaccactaacacctttgtccacccttacgatcttgcacattttgggaagtcctttggccacctgaccccccatcggtctgcattctatt

SEQ ID NO: 292336 - DNA, 122 bp, Homo sapiens
aacacactgatggggcacccagagtgctgcctccttttatccctgttgagcccaggacaccggaaaagggcgtctctccactatctcctttcccctgctgatgggccaggggccatgggcaa

SEQ ID NO: 292337 - DNA, 122 bp, Homo sapiens
acataatgaagttatcaggagatattgtttatgaaacattcctttactaagttttccatacgagcaattagtggcattaggccatatgccctttagtattttctgtattttccaggtaaacc

SEQ ID NO: 292338 - DNA, 122 bp, Homo sapiens
gtccacccgacccgaatgaattggcaggagccgcggccacatttaaagggccagagcgcgcgttccctcccgtccgcccccaagccccgcgggcctcgcccaccctgcccgccgcccctccg

SEQ ID NO: 292339 - DNA, 122 bp, Homo sapiens
cccgcctctggcctgtcgcagcctagctcacggtcaagggcgggagcctgctgggaagcacggccgcgggggctcgctcggggccacctgcctggaactcagcgcgaggtccagagttccct

SEQ ID NO: 292340 - DNA, 122 bp, Homo sapiens
gctgccggggtgtgctgctggggagcgtgacgtgggcaggaccacgctggacacgcagttcgcgtgcggccgctccccgagcagtgcgcggcgtgggcggaggagcggctccgcgaggagat

SEQ ID NO: 292341 - DNA, 122 bp, Homo sapiens
gttggtcaggggtccctgggggagaggcaggcaggatgctaggcctcccaaacagggaggcggccccacagggagccctggtggagcttgaggcttcctgcatttagtgttggtctgtccag

SEQ ID NO: 292342 - DNA, 122 bp, Homo sapiens
aaccccagccttttgtttatgatgagtgtgtacctcagagggtgacaaattgctacatagcgatcatatcccatcacagcaatgaggaggcagttggtgcaagcaaagccaaggaaaaagaa

SEQ ID NO: 292343 - DNA, 122 bp, Homo sapiens
cgctctcctcgcggggcaggctcctggggaggccacgtggggacaggccctgagatcctgcgccacccgcgctgcagagggcagggcaccgccacgagccttacctcttcttgcgagagccc

SEQ ID NO: 292344 - DNA, 122 bp, Homo sapiens
atccagataggtgagaggggtcacaaacggcccgcaggctggagactgagatgaaactaacgtttctcgtatcactgctgtgtgctggctgttgcgcaggttgcttctcatctttcgtctca

SEQ ID NO: 292345 - DNA, 122 bp, Homo sapiens
cctccgcccgcgctggtgtcaccaaccttgggcgtacggatgtgctccatggctggcccacgtctgcagggtcccgggcgggcgcggcctcacgcacctgcgcgcctctgcggcgcgatggg

SEQ ID NO: 292346 - DNA, 122 bp, Homo sapiens
tcatatttcgtggagaatgggggaggtgagccctgggtatagggataactttttaactagcgttaattggggtctttgcggccaggctgtaaagattcccgccacactaatatgaatcagcc

SEQ ID NO: 292347 - DNA, 122 bp, Homo sapiens
gaaggtcttggcagcaagtcccagggtattttcattatttagcatcctgattgaggtgtgcgtctgtgtgagagaatgaagcacacaggtcctgcatctcattgcttcctctgctgaaagaa

SEQ ID NO: 292348 - DNA, 122 bp, Homo sapiens
tcgctcctcatcactgcccctcctagaccctgctgtgtagacgggacctcaaggagttcccgagggaacagatttgaaagcccagctccgggttccatggacagtgtttgacaggtcagccc

SEQ ID NO: 292349 - DNA, 122 bp, Homo sapiens
tcccgggcgctgggcagcccccgccggccgccgtcggagcctttgtgcccacgccgggggcgtcgctgcaggtttaggagaagacccgtgcctccgagcagccgctcctaaaaattaaataa

SEQ ID NO: 292350 - DNA, 122 bp, Homo sapiens
ccccatccccacctccaaccccagctctacaaaaaaattaaaaaattagctagggccaggcgccgtggctcacgcctgtaatcccagaattttgggaggccgaggcgggcggatcacgaggt

SEQ ID NO: 292351 - DNA, 122 bp, Homo sapiens
aataaagaacgcaaatattcagtgtaatttttgtctcttcacactcaccacatgcagatccggggtcggggcagcggcggctgcggaaagaaagcgaattggggaaggcagctgcggtgtcc

SEQ ID NO: 292352 - DNA, 122 bp, Homo sapiens
ggagaatgagcctacgcgcctggcaagaagctgagctgtgattggtcaattggagataaacgaggagggggcggggccaggtcagtcccgcgcctccgctcccggaagaaatttccgccgga

SEQ ID NO: 292353 - DNA, 122 bp, Homo sapiens
ctggtatgccttagccaaatgcatctcctggtctggtgatgtatattgagagccctacgacgcttattgagtatggagtgatttaaggaaaccatttttctatcccctgggaactttctttc

SEQ ID NO: 292354 - DNA, 122 bp, Homo sapiens
aataacacgtcttgagcgagcctgacaagtcagaaaatgcagtatgttctgggaaaggagcgtcctgagggagaagaagcacaggtgtgagggaacatgtgatgaagaaaggaccacagaaa

SEQ ID NO: 292355 - DNA, 122 bp, Homo sapiens
agaccagtcagcttccgggtgtgactggagcagggtttgtcggcctcctcagagtcacttcgcaggggttgtccgggctcggttttgcctcccaggtttcagcggctgccagtttcacatgg

SEQ ID NO: 292356 - DNA, 122 bp, Homo sapiens
gctccggcggccgcggaccccacctgctccgccagtccagcccctgcgcccggccgggtccgctcctcagtccaagccgcgcccccgccggaagtgaccctcgtacttcctgcccgcgccga

SEQ ID NO: 292357 - DNA, 122 bp, Homo sapiens
cctagggcaggggcagagcaggggtcagagcgggccatgaccctggcgtgacctgagggtcgcccccacctgcgctctctgggcctgccgctcatattggcccgccagcccagggcgcgacg

SEQ ID NO: 292358 - DNA, 122 bp, Homo sapiens
gctccctctgttcagtcaaaaagcaccattctccacaatagaccacacactgacagccagcgtgacatcaactcacactttcatacttttccccccatccatagttctgagttcacaaagtg

SEQ ID NO: 292359 - DNA, 122 bp, Homo sapiens
acaatggaattttatttctcgtgcacctaacagtccagtgtggatatttgggttattggacggatttcctttatgtggtcattcagagcccctctggtgaggcctctggttatatgcagcca

SEQ ID NO: 292360 - DNA, 122 bp, Homo sapiens
gaaaactcttttttgcacttttaaaagtccacccaggtagacgtgtttgggaagttttttcgggtgggaaatgggcttcgcccgtacgaacaatccggggaaatcgcctcaaggaggatcct

SEQ ID NO: 292361 - DNA, 122 bp, Homo sapiens
cgtggggtttgggccttacgcttacctgctgggcagagtaagtgactcgggcagggttcacgcagacctcctgggctcctctgtaaaatccggaaactacagttgcagtttacctctcgcaa

SEQ ID NO: 292362 - DNA, 122 bp, Homo sapiens
cctgcacctccccaggggagactgagagcccagctgagaaatgctggcctggcttcagggcgcagagaaggtgggcgtcggagagggcaggtcacagtctctgacacctggtcggtgcttcc

SEQ ID NO: 292363 - DNA, 122 bp, Homo sapiens
ctgcgagggtggccagaatgtggcggcgggacgggtcactcaccgggtggctttgagcctcgggaggggctgttgcgagcagtggtcagctctgcttcacccgccacactcgcctgggcctt

SEQ ID NO: 292364 - DNA, 122 bp, Homo sapiens
tgtctacgacagagggtggggcagacgctccgtttccggtggcagggtctggggaagcggcggcaggcgccatgtccggccgcgaaggtaagtgttccggaaccgtgaggactgcggggacg

SEQ ID NO: 292365 - DNA, 122 bp, Homo sapiens
ctgtgaggcaccgtcagcatcctcgcgtcctgtgtggctgtgaggcactgtcagcatcctcgcgtcctgtgtggctgtgaggcaccgtcagcatcctcgcgtcctgtgtggctgtgaggcac

SEQ ID NO: 292366 - DNA, 122 bp, Homo sapiens
tccggcctcaggacgcaggcgcgggccgctcatttcgctctttccggcggtgctcgcaagcgaggcagccatgtcttatcccgctgatgattatgagtctgaggtaaggtggccgtaagggc

SEQ ID NO: 292367 - DNA, 122 bp, Homo sapiens
gctgctgtgctcagccaattcggaggcatggcgagccacacggtgggaggtgggtaaagccggggccctccaaggctgggcgccacgttgcttttctcttctgaaataggaagacaatgctt

SEQ ID NO: 292368 - DNA, 122 bp, Homo sapiens
tttatctaacatgaatgaaattcatcttgcaacatttgtagtgcacaaaagagtagctatcggaatgacctgtgttacttttgctaactgggttaaatattttgctagctggttaaacgtta

SEQ ID NO: 292369 - DNA, 122 bp, Homo sapiens
atccataatcaacaatctgaagaaatccattacttaaacctgctgctcattctaattgcacggtattccttttcttccttttattgcttaatttatctaataggaagcttgtgtttcctacc

SEQ ID NO: 292370 - DNA, 122 bp, Homo sapiens
gaattgtttatgatctctgcattcctcctaccctgaccaacaaattactttcatggacttcggaatggtaaaaacataatgtggagagaaactgttggacttattcagaatctgattcagtt

SEQ ID NO: 292371 - DNA, 122 bp, Homo sapiens
gttttgttggttgttttttctccacgctggggctgcggaggggtggggggtttacagtcccgcaccctcgcactgcactgtctctctgccccaggggcagaggggtcttcccaaccctaccc

SEQ ID NO: 292372 - DNA, 122 bp, Homo sapiens
gtacccacggtgctctcatacccgcagtgctcccgtaccctcccatacccacggtgctcccgtacccgcggcgctctcgtacccgcagtgctcccgtaccctcccatacccacggtgctccc

SEQ ID NO: 292373 - DNA, 122 bp, Homo sapiens
ccatgtagtgagctggggttttagtctactaatcccataaggggtgagaagctcttgatccgttcagccaacattctgggccttggccaagacaatgaggcaatacctgctccttagaataa

SEQ ID NO: 292374 - DNA, 122 bp, Homo sapiens
tcagccccaacagggactggggtttcctctggaattctagctggaaagacaggtttgacccgggaactcagctctgccctggtgttggtgacaatcttagatcaataggcagagggcaagtc

SEQ ID NO: 292375 - DNA, 122 bp, Homo sapiens
gttgaggcaggcgttgaccgtaaagaagacggagcagagctgcagccacggggccatggccgtgcgctcgcccagccaggccgttctctgcgccccggccgcccgccgctggccagccccga

SEQ ID NO: 292376 - DNA, 122 bp, Homo sapiens
gcaaagcccaggccccctttctttttcaagcgtgcttccagcctctgaagttcctccgtacggacccccagctctgcctgcaataaggaatattcactttgccaacaaatatttattgagtg

SEQ ID NO: 292377 - DNA, 122 bp, Homo sapiens
cctcccagtttcaagcgattctcctgcttcagcctcccaaggtgttgggattacaggcaccggccaccacgcacagataattgttgcattttttgtagagacggggtttctccacgttggcc

SEQ ID NO: 292378 - DNA, 122 bp, Homo sapiens
tccggagcaaagccgctgacccccgcccccagggtcttggcgccgattggccaacgagagcgcagggcggagccaaatcttaaaggatccgggagctaagccagacccgggtggcggtggca

SEQ ID NO: 292379 - DNA, 122 bp, Homo sapiens
aggatgggttcctcttagacccactgaatgtgataggccctctggacggtcggctggagacgcaggactaaagcttgagactagtggggacagagatgctgacctgagaatcacacagaaag

SEQ ID NO: 292380 - DNA, 122 bp, Homo sapiens
gacgagaaagctctgcctcgtagagctagttggatggggtggggaagactggaggacagacggaactggctgcacctcaagctcttggagtggattgcctaaggctctcttcttctcctcac

SEQ ID NO: 292381 - DNA, 122 bp, Homo sapiens
ccagatgtagttctgggttcctcagctgcattgtcacggtgaccggacagcataaatttccgcgggtaacctgggcttttaagattaacctcaggggcggaccaatcaccgatgacttatta

SEQ ID NO: 292382 - DNA, 122 bp, Homo sapiens
ggagaatggttactttggcattagggccttcaagggctggcagtcttacagaggctggagcggtgagaatgagaggccagagggaccatagtgttgggcactgtctgaccatgttgcatttg

SEQ ID NO: 292383 - DNA, 122 bp, Homo sapiens
aaatattcagaaggcacactgagccacgaatctcattccctccccagctgcacagccacccggctccccaggagttgccagtgatgtcttctgcggacgcttcagactctgttgtccctaca

SEQ ID NO: 292384 - DNA, 122 bp, Homo sapiens
tggataccccctcagctcatccgcgagatccgcaacagcaccgtcacctgacgaggaacccgacacacatggctcccacctgggctcctgttttctgctaagaaaatggtacaactgccaaa

SEQ ID NO: 292385 - DNA, 122 bp, Homo sapiens
aacaacaacaatggacattctcactattgcaagatgcccatcacaggcagggcaggggtgcgttctgtgtgtatccctcactaccggaacagtacctggcagaggggcagagagtggagctc

SEQ ID NO: 292386 - DNA, 122 bp, Homo sapiens
ctgacacgccatttcctttagcagcacaaggggggctcgtctttaaattaaactcgtctccggcccctccgatctgcagctcgatcaggggcagacactgttgagggaagccagagagaagg

SEQ ID NO: 292387 - DNA, 122 bp, Homo sapiens
gctgggattcctcgcggaatctgggaatcatatcggtgtgtggggccatggggcctgcggcgctttacaggtttcccgagaggaaagcaaggcccaggaagcttgagcaccttatccagtgc

SEQ ID NO: 292388 - DNA, 122 bp, Homo sapiens
tgcttggccccgcggggcgttcttaaagggaccgaagcctcccggctgctggggctggggcgggggctggggcgggggctggggcgggggctggggcgggggcgggggaccctgggctggac

SEQ ID NO: 292389 - DNA, 122 bp, Homo sapiens
cctgaggccagcgagaccacaaacccactgggaggaacgaacaactctggaccagaggaacgaacaactccggaccggaggaacgagcaactccagacgcaccaccttaagagctgtaacac

SEQ ID NO: 292390 - DNA, 122 bp, Homo sapiens
ggggttgccctgccggtaggcccccagtccacacctgaaacttcagcaccagaggtaaaccgtctccataagtgccctccgttgccgttgcccccagctacagtgggcatcagcaaatctaa

SEQ ID NO: 292391 - DNA, 122 bp, Homo sapiens
gcaggctttcaagtttggggacttcgtgctgaagagcgggctttcctcccccatctacatcgatctgcggggcatcgtgtctcgaccgcgtcttctgagtcaggtgctggcctaggaaggga

SEQ ID NO: 292392 - DNA, 122 bp, Homo sapiens
caggcgtgcaccaccacatccaactcatttttccatctactttttgtagacatggagactcgccgtgttgcccaggctggttttgaactcctgggctcaggcagtcccaccacttcagcctc

SEQ ID NO: 292393 - DNA, 122 bp, Homo sapiens
ccagctttctgtcaccgccgccgccaccagcgttgtgaacctctgaccctcgcggctctgcgtccattctcaggtactgaaagttttccgggctcttccgcacccgcggatgtggcgaagcc

SEQ ID NO: 292394 - DNA, 122 bp, Homo sapiens
gaatcagccctcaagcaactcaagacaagttagcaatttccgccgggaagccgtgaacatcggcagccactggcgtttcctccgagtcctcggaactccggaaactctgggagcttttagcc

SEQ ID NO: 292395 - DNA, 122 bp, Homo sapiens
cccactgatgctccacggtggtagggaagtccttctgatcttcaaccctctgaccaagctcggagggcttctcataattggcacttctatcaggttgctcagaacccccttccgtccctagg

SEQ ID NO: 292396 - DNA, 122 bp, Homo sapiens
cacacccccatgggccgatcacacacacttcactgacagttgtgcacacacactctcacgcggcagtactgtgcactcccacacccccaggcaaggggccttccaaacccgctccagcccct

SEQ ID NO: 292397 - DNA, 122 bp, Homo sapiens
cccccacagccagctttcaccacggtggctttggcccacagctgccctagcccagggacccgatggcaggcagaagcagacctactttggtttccatggtaaccgcgggagtgcgccgcagc

SEQ ID NO: 292398 - DNA, 122 bp, Homo sapiens
ttttcccacgaccctttctcgctgagcgtgtgattccaaaactgtccacaagaaggtgctcgggagccagaattcaggcgttcccggcccgcggacgcttagagaggggagcttcggagtta

SEQ ID NO: 292399 - DNA, 122 bp, Homo sapiens
agggctcccactgcccaccagcgccaagcccttctgctcaggtcgcctgctcctgagtggcggggacacggctctgggatcctatggccacagatccgttcctcacccctttgctgtaaaat

SEQ ID NO: 292400 - DNA, 122 bp, Homo sapiens
acacacaaaacagccatcagcaagagtgtctgtggccccagtgctgccctaggcagcacacgagagtgatggactttgagtccctttattttctgctctctggaaggaggggttttaataga

SEQ ID NO: 292401 - DNA, 122 bp, Homo sapiens
gagggaggggaccatgggtcccactctcacagacaggtctccggactgcatcagagcactcgggaagcagcaatgccccaggctgtttttagcccccaggggccagttagggtcccagtgca

SEQ ID NO: 292402 - DNA, 122 bp, Homo sapiens
cgccgcggacccgggcgtccgcgggcgaggggacgggactgggccctgaaccaataaagccgtcgggcctcaccgactccgcctgctcctgcgtcctgcccgcgcccggagagaagggcact

SEQ ID NO: 292403 - DNA, 122 bp, Homo sapiens
gcacagccccggttcccggtggtgcctctccctctacgcctcctcacaagcagagggagccggcttcggcctcagtcagcccagagatgggcccccacagctcagtggcgggctgaaaggct

SEQ ID NO: 292404 - DNA, 122 bp, Homo sapiens
aaataaaaagaaatgtggaatggggctatgcttagcgtcattaagctgacaggaatacagcgcattcaacttgcaaacacccttccactcccacaaagagcaagctgtcactggccaatcaa

SEQ ID NO: 292405 - DNA, 122 bp, Homo sapiens
agatgtgctggcacaacagggctcaaagaaggtagacagaaaattcttccaagaaatagccggatgtcctcatagtatctcccagagatggtgtgtcacgatcattccttgcaaaacacgtt

SEQ ID NO: 292406 - DNA, 122 bp, Homo sapiens
tgatgctgtggatgagggtggaaagtcacggatgatgctgtggatgagggtggaaagtcacggatgattctgtggatgaaggtggaaagtcacggaaatgtgcgttgtatgttttaagtggc

SEQ ID NO: 292407 - DNA, 122 bp, Homo sapiens
cttgtgcaccactagcacatttctaagaacacgagcctgaaacctgtgtaagagggcagccgttagcagggctggggagaaagcctggacttcgcaagcggtagccctgagtcctggcctga

SEQ ID NO: 292408 - DNA, 122 bp, Homo sapiens
aatctcaagaatgtaagtctttgcgcagtttccaaatcgagtccatttagcagctttcttcggagcccgggtaccccaagtggcaacttaggaactgggagaaggaacgtgccaccaccgac

SEQ ID NO: 292409 - DNA, 122 bp, Homo sapiens
caagtgcagaacaggacaaggctgtggccatgcatggtatttagtcccagctgggagaaacgatgtgaaagatcccccacaaaccctgccctcccccctcatcctcgtatcacagagaatga

SEQ ID NO: 292410 - DNA, 122 bp, Homo sapiens
agagacactatctccaaaagaaaaaaagagaaacgtatggttacatgatttccttctgtgcgatcatcagagtcactcgcagacctggatggtgtacggcctacaatgcacctaaaccacct

SEQ ID NO: 292411 - DNA, 122 bp, Homo sapiens
cctcccacagagacctgtactggaggtgatgctgaccagctctgactagtgcgttgcaaccggggagccgcttagctgtgcacagcctgcagtgaatcctgaactccatccttacggcgttc

SEQ ID NO: 292412 - DNA, 122 bp, Homo sapiens
gggagaccaagtggggaaaagcgctgtctgggaaagcgaactacaagtcccagagttcctcgcgccgggggctgtcctcggactgctccaggcattgtaaggctcttctgttggcccagtct

SEQ ID NO: 292413 - DNA, 122 bp, Homo sapiens
acgcccacccggaactccagctggcccgcaagcgcggcgcgcagccccggttcccgctcgcgcctctcgctccacacctccctgcaagctaagggagccggctctggccttagccagcccag

SEQ ID NO: 292414 - DNA, 122 bp, Homo sapiens
cagcgggtgggacacgatcccgcgtcccctgaactccagctggtgactcaccccggctctcgaagaggaggagctgagcgacatgaacaaaatcggactcaggaaccatctgagggcttaag

SEQ ID NO: 292415 - DNA, 122 bp, Homo sapiens
gcccctgcctgcgagggccgacgacacggagaacaggatcctgcgcccaacccaggtccccgccttctttcagaggcccaggcctggaccccgctgagccgcagatgtgcgagcaggagcgc

SEQ ID NO: 292416 - DNA, 122 bp, Homo sapiens
tacatctgtccgcggtgtccctttggtttatttctgtggtcttcctgcgcagtccctcagcggctcggagtttggccttccagctctccaactcagatcctgagcctcctaagctcccgcgg

SEQ ID NO: 292417 - DNA, 122 bp, Homo sapiens
ctgcttgtctgaggcattccataattcaagcaaaggctgtgccgcttaatggcccttcttcgtcagatcttccaggactcggtgcctccttaatgagttatttgcttgggatgaaattaagc

SEQ ID NO: 292418 - DNA, 122 bp, Homo sapiens
gtctaagcaagtctaagtcactatttaaaaaagtgtgtttgacttcattcactttgccttcgtggggagctcttctgggctgttttctcattgactactggttttgtctctcatctccctga

SEQ ID NO: 292419 - DNA, 122 bp, Homo sapiens
cccacctgaggcatgggcaaagtgtggggtctgctgccccctgtcggtgtggctgacgttcgcttctctttccacgctgcccagcagtgttccaactggaacattccttttttttttttttt

SEQ ID NO: 292420 - DNA, 122 bp, Homo sapiens
ggacccacgaagggttcagagatactggcatcgttttatttcttgaaaaagtagtactttcgccagcatttactttataatttgtcattaaattgtacagagatcgcctaaatttacatgga

SEQ ID NO: 292421 - DNA, 122 bp, Homo sapiens
agcactctctgatccaaagtgtttctcagggagagcggccaagtgagcacaggagccgctcggccgtctgggactgtgatgtgatgtctgaacagcctctttagaaacactgcagccttttc

SEQ ID NO: 292422 - DNA, 122 bp, Homo sapiens
ctcatggtattttcctggctgttcatggccatgcacagagtagcaaaaaaatctgagtcacgatgcacacatttccagctcagatgaaaaaggtgatacactgccatcttgtttggtctctc

SEQ ID NO: 292423 - DNA, 122 bp, Homo sapiens
ggtgtccaggcacgttagccccccagcctcattcaccccactccggagccaaccccaggacggtctccaggggaggccacccgaagatagaaggtggctccaagagaggagcccagcatcag

SEQ ID NO: 292424 - DNA, 122 bp, Homo sapiens
aatggggttgagaaagtcatctgaagcatttttggggattaaggtgataccctaaaaccccggagggcgcacgtaggatcaggtgcacccttcctgcagcgccttggtgtctgcagccgtgg

SEQ ID NO: 292425 - DNA, 122 bp, Homo sapiens
caagacggaggacgggaagaaggagaaatatttcctcttctacgacggggagacggtctccgggaaggtgagccttgccctcaagaaccccaacaagcggctggagcaccagggcatcaaga

SEQ ID NO: 292426 - DNA, 122 bp, Homo sapiens
tagtatcatgactacaggaatcttgaaacagatgatatatagacaatccactgtgaaaaccgcagggctgccctggccccgggctacaatcactgattgatacatgctgcctacagatgccc

SEQ ID NO: 292427 - DNA, 122 bp, Homo sapiens
cccgtggtacgcttcagagtgcggtattcccggtagagcgctgcgtgggcgagcgggaggcggggtcagggtggggcctgggcccctgccgacccggtgtcttctcgcccccgccgccccgc

SEQ ID NO: 292428 - DNA, 122 bp, Homo sapiens
gggcaagtgtcccaatggcaatatcaccaatagggccagaagtgacaagcacagagcagacgttcgcagggctgtggagcggggagggagaagccttcatatctttgaaggaaaccaggaaa

SEQ ID NO: 292429 - DNA, 122 bp, Homo sapiens
gtacttgaagaagcggagccagggctgagatcccgaaggcgggcgaggtctgggatggggcggggcctatgggagcggggctgaagccctgggcccggcagaggaaggtcgagatggaccat

SEQ ID NO: 292430 - DNA, 122 bp, Homo sapiens
tccctttctcagggcccaccatgccctgggggtggggatcatggacacagagagagacatcgtcccatccacaggctccagagattggggcagggaatcttgctgggcactgctaggggtct

SEQ ID NO: 292431 - DNA, 122 bp, Homo sapiens
ccccctaaacacaccacccacccaggctggaggcacctggggctttgtcagaggctgggccggcctgggctgccaggttcagtcccatgtgacacagtctctctggccccgccagacacaca

SEQ ID NO: 292432 - DNA, 122 bp, Homo sapiens
cctcaacttactcatcctgggaacgggagacgattcacagaagaaagcatgcaagagcagcgtccaggctgaaagaactttggccacctggcactgagaactgaattccataggctgtgagc

SEQ ID NO: 292433 - DNA, 122 bp, Homo sapiens
tatcacacgtgaccgcttgacattgctctgaggagcagaggtgtggctacgcggcgggcacgtgactggctgccacaacccccgctgcagggggggagcggtgagggggacaagagagggtg

SEQ ID NO: 292434 - DNA, 122 bp, Homo sapiens
cctagttaccagtgaccgtttaggattcagctgagaagccactccctgtgcaaagtcttccggaattgaccatgacctttcctcccctggtccttcagcatttttctgtggctgtcagattt

SEQ ID NO: 292435 - DNA, 122 bp, Homo sapiens
agtgcactgatccatcagccctctgcctccctcgtcctttgaaagagcagtggcctgccccgcttctaaaagccctggggctccggaaagcagaccacgctttatgggacacgtgcaaacag

SEQ ID NO: 292436 - DNA, 122 bp, Homo sapiens
tcattgtcacctcacctgagttaaattgttgccaaaaagactatgccagggttgccagctcgcgctccggccagtggagaaggtggacactgaccgacgtttccatggcaggtcgtctgcag

SEQ ID NO: 292437 - DNA, 122 bp, Homo sapiens
gctccagcaaaatctgggaacacggtagatcccaacatggccacctccactctgcagtcacgggtaacctgagcttatcaggcgtgtccagtcctttgtgtttctcaaccacctgggaccat

SEQ ID NO: 292438 - DNA, 122 bp, Homo sapiens
gcatgcaagattgaagtaaagcacttcccatttgaccagcagaactgcaccatgaagttccgttcgtggacctacgaccgcacagagatcgacttggtgctgaagagtgaggtggccagcct

SEQ ID NO: 292439 - DNA, 122 bp, Homo sapiens
aacaccaaattcacaaatttccatcacctaaaatggattcaggaaagaagcacccaagagcgggagactacacaggtaacagctgcgaagctggggtaaatcacagaggcaggattcactgg

SEQ ID NO: 292440 - DNA, 122 bp, Homo sapiens
gaggccctgcttgtggagctcctcggagcagctcctcagctcccccaggctgaggaaccccgaccaccccccacctgcgtcagaagctgcagttcaggaagcagaggcaggtcagagcaggc

SEQ ID NO: 292441 - DNA, 122 bp, Homo sapiens
ggggactactccggagtcaggaggcagcagcggcggaggacgaggatctctggcagtcagcgccgctcggacgccgccggcaccatgggctgctgcaccggacgctgctcgctcatctgcct

SEQ ID NO: 292442 - DNA, 122 bp, Homo sapiens
tttcgtattcgcttgctctctacttgagggaaaagctctgtgagaacagagaattggtttcgcttgccgttgcgaccccgcacctagcacagtgcctgatgtgcactaaccgcgctgacggt

SEQ ID NO: 292443 - DNA, 122 bp, Homo sapiens
atttcacaccttaaatgctaaaaacttctaacttgctttaggaattgggggcagtgaacacgcaacccgaatccctctcacttatccatcgtgttgaggagcatttcacaggtcacgccttc

SEQ ID NO: 292444 - DNA, 122 bp, Homo sapiens
aaagacaatttcacaaaggtgtttaaaaccatcctttggtttttgatcctgagtcagagacggacatgtgcttatgaaagaaggtagagtttcaacccttaggtaaccttaaaagagcagga

SEQ ID NO: 292445 - DNA, 122 bp, Homo sapiens
cagagcggatctcagcccaccatggaggccctgtgaactcggtggaaggtgggatcatctcggcgtctgactgactgattctgcttctgcttctaagataaagtggatcaccgagaagacag

SEQ ID NO: 292446 - DNA, 122 bp, Homo sapiens
aaaccactggccaggaatggagggggtagaacctaattccgaagggcagcattttggagacgcagagaagagaacgaaaccgacgagtcaggtgaactgtaatacaacgttctacccgaatg

SEQ ID NO: 292447 - DNA, 122 bp, Homo sapiens
ccgcccccaacccagagcgctgcggcctccgtgagcggggcctgggcgaagggggcggggcgtcgagggggcgccccggcggtcgcagggaagggggagaggggagcgaggcgcggggggcg

SEQ ID NO: 292448 - DNA, 122 bp, Homo sapiens
gtggaatgtttcttctgtagaatatcttatattttttgacaaatttaaattatttactgacgttttttaaggtaaactaaatggacaaatttcaaaatgcccatttggagctgagtctcttt

SEQ ID NO: 292449 - DNA, 122 bp, Homo sapiens
aagagaggaagaagaaataaggtctttttgaccagcatcatcatcaatatggtagattttcgcttagagcaaggggtaaaaagaggaagcaaaaagaaagcacctaggaatttttatttggt

SEQ ID NO: 292450 - DNA, 122 bp, Homo sapiens
ctgggacacggtgcctgcagggccctctgtccttggacctcctccttcaaggatccacttcgcacatgtgcccttctgcaaacttccgtgacaccgatgcaaatttgctctttctgtatttc

SEQ ID NO: 292451 - DNA, 122 bp, Homo sapiens
ttgtttataccaattttaggacaattatttcctaaaccaaatttttactaccctgaagttcggtacttatgaaaacactgccaacataatgaaatgactgtgcaaaaagcaacagctgatca

SEQ ID NO: 292452 - DNA, 122 bp, Homo sapiens
tgcgagggtttcctttcctttacatcatcaccaacacttgttcattgtttttatagtagccgttctaacgagtgctaggtgatatctcattttggtttgttttttatttatctatttttgat

SEQ ID NO: 292453 - DNA, 122 bp, Homo sapiens
cgcggtgcagaccccgggggtggacggtgaaggagttgctgccggtcttctggaggaagtcgctgcgccgggccccggggctcgccccgccaccgcggggcccgggcgcggcgggcgggctg

SEQ ID NO: 292454 - DNA, 122 bp, Homo sapiens
ggaagaggaaagaagagcggagtgtgtgaatcaccagccccagtgacagactgttggagccgagcagaagtttcaagagaagccactgggttgtgggtgagttggggtggtgtgtcgtgggg

SEQ ID NO: 292455 - DNA, 122 bp, Homo sapiens
cagctgaggcctggtgagaattcgaatgtggcacaggtgggctggcggtgctgggggacccggtgccccctccacatctgctggcctgggtgctaagcccctcactgccccaggccggtggc

SEQ ID NO: 292456 - DNA, 122 bp, Homo sapiens
gtaccaccacacccaaccaaaggtagttattacttctttggctcccagcactcaagtgagcgccccagctctcccttacctgctggcacactccagctgactccagattctgacgtaggcgt

SEQ ID NO: 292457 - DNA, 122 bp, Homo sapiens
ctaaataaagactacatgttttctctgctggcataaattcctctgtgtgtgtgtgtgtgtcggtgtgtaaatgcatgtccgcaggtgtacacgtgagtgattcagcctggggttcacaatga

SEQ ID NO: 292458 - DNA, 122 bp, Homo sapiens
aaggcattcacattgtccacccgctcctgcccaatcgccccggtctcccgggcaaagtcccggaacttgtcccgcagaagctaggcatggggcagacagaaatgtggttatggggggcacag

SEQ ID NO: 292459 - DNA, 122 bp, Homo sapiens
acagctggacttccaatcaaactggtgggggcgcccgggcttgagttcggccagcagcagcggttcctctggggcaggagacaacatgcttcaaacacacacccccttgctccctgaccacc

SEQ ID NO: 292460 - DNA, 122 bp, Homo sapiens
tcctaaatttgaagctctttgtaaaatcctgtgacaagtggtcagtaatttatatgattccgaaattgtattggcacgcagttttttaaactattaaaaagtaacttgggtcgggcggggtg

SEQ ID NO: 292461 - DNA, 122 bp, Homo sapiens
acccgcttccttcagtgcctaaatttaacggctgcagctgcagctgcaacctgtttcccccgtaataggaatgaaagtggaggataaaagaggttaggaagaaggcaagccagcagtctgac

SEQ ID NO: 292462 - DNA, 122 bp, Homo sapiens
tctgaggtttggattcggaatcgtgacatcttgtcccgtgcaagacgaaggcgaggacggcgagggcacacccttccagtcccgaccccacagaggccaagcggcccttcgcccccaccccg

SEQ ID NO: 292463 - DNA, 122 bp, Homo sapiens
gcccatctgacacatcaactcgcctccctcgcaccgcccctcgcccatacccggcacccccgctcatcctggcaccatcccagtcaccctgacaggacaaacactcgcgcgcagcgacaagt

SEQ ID NO: 292464 - DNA, 122 bp, Homo sapiens
gaaggggcctatgcctttcctcctgatcattgccgcaggcagggctccgggacagcgtgccggggtcctggtcccaccatgtggctttaacatgactgaccgcccagtgctctgtgcgggcg

SEQ ID NO: 292465 - DNA, 122 bp, Homo sapiens
aacacagaagcctttcattgagagtgttcagctcttcccattgctcaagatgcttgtacccgtgatgcttcttttctctgcttaggtcacaatatgtggagctgacaaggttcccctattat

SEQ ID NO: 292466 - DNA, 122 bp, Homo sapiens
gtgaggcaatgtagagggatttataagatcagtacttagtttgttaaactctgtcactgtcgtggctgggcaactgaattccaggtcttaatgtatttataagctctttgttcctttcaata

SEQ ID NO: 292467 - DNA, 122 bp, Homo sapiens
cgccggctgcgcctgtttctcggccaggggagcaaggccacgcggcctacgcagccgagtcggaaccaaccggttgtttggtgaaacctaccccagagcctcccgcggcccacagagcacag

SEQ ID NO: 292468 - DNA, 122 bp, Homo sapiens
ctgtctccaagaccagggcagatcaaccaccaagggaaagggagggagaagcagcctcagcggtcagaggggaggggcagggctcaaccactgaggaacattcactgttgcctgccgagtgc

SEQ ID NO: 292469 - DNA, 122 bp, Homo sapiens
acatacacacaaatacgtatagcggctaaggcaaaaatgaaacaggcatactttttctttcggtagatctttattgtgaaggcttgagttgatctaatcaggagttaaactgtgtttaggtg

SEQ ID NO: 292470 - DNA, 122 bp, Homo sapiens
ttagggagagggtgatggtggaggaaagggagcctcagaggaggccaagtgtaaagcacccggtctcctgtgcctcccagccccaagacgacctctgggccaccggagtccagacctggtcc

SEQ ID NO: 292471 - DNA, 122 bp, Homo sapiens
tcagttccgcccccgtggtaggcagacgcgcggggaaattcggacccaggagcccagccccggctgtgccatcttgtgtatgggcagatatgacctgacagccccctccagtgccacagggt

SEQ ID NO: 292472 - DNA, 122 bp, Homo sapiens
gtctgtgcggagacctcctggctctccccacacgcggtaggtattcatgcagccgcgtcacgcggaggccccactccgtgcggccaacacagggtcttccagcccctccttccctggctatg

SEQ ID NO: 292473 - DNA, 122 bp, Homo sapiens
gaagctgatggcaggcgtcccggtctgcgctgggagcccacggggctgaggcggccgcgccgggttgacctggtgcctctgagctacgttcctcaaagtcacccctctccccctgctccacc

SEQ ID NO: 292474 - DNA, 122 bp, Homo sapiens
cagcggaaggccacgagaaacgctggtgaagccaaaccgaccccgggagcgcagcggccccggaccctccctggaagctccctccgcgtccccgcgcgcccacctggaggcgccgcgccctc

SEQ ID NO: 292475 - DNA, 122 bp, Homo sapiens
tcaggattggaggtggagtgggtggggtctgcttctgagaagctacttgcttctagtaaacggaggacagggatgctacaaaacagttcatagggacagcacccccacaacagagaattata

SEQ ID NO: 292476 - DNA, 122 bp, Homo sapiens
agctctggagaaacatgaagttcgggactatcttctggtgggtgtttcttgtccaccacccgcctctccctgcccgcaggtggtgtagaaagttgcctccttcccggcgatattgcacttgt

SEQ ID NO: 292477 - DNA, 122 bp, Homo sapiens
tagaagatgagcaagccttggtcatagtccaggaagacacccaccttgtcaagcttgtcccggacgttaagccgcgtccagggctccgtgcaggcgctgtactggttgccatcgtgcatcac

SEQ ID NO: 292478 - DNA, 122 bp, Homo sapiens
gactttgctgatgaaacagcttgcggcaaagaagccagccaggggcgggcgcggggctcacgccagtaatcccaacactgggaggccgaggcaggcggatcactggaggtcaggagttccag

SEQ ID NO: 292479 - DNA, 122 bp, Homo sapiens
cattaagtggggagcgacagcagctaaacaacccaagcccataaagccttctaattgctccgacccacgtggtcacagtctccccacttatataaaaggcctacagaggtgcaagtagtgaa

SEQ ID NO: 292480 - DNA, 122 bp, Homo sapiens
ttagaacttgaatggctcttacatggagcaggccattttctatgtgcccatattatggaccgaaagaactacatgcagccagggagcaactcatgatttcccacatcaggaagagccaggat

SEQ ID NO: 292481 - DNA, 122 bp, Homo sapiens
gaggggacagaaagtggagtagcaagaggcacagattctctttgaactgagggagctgaacgactccttggatggacagtagctctctctgcaagtctgcttttattcggcgctgctggcag

SEQ ID NO: 292482 - DNA, 122 bp, Homo sapiens
ttttctgcccggggagttgtgcctgtcaggggagacagccccatgacactgctgtgcctccggggaggccaggagggacaaggagcggttcctttgggtgagggtctgtggtgaggcaccag

SEQ ID NO: 292483 - DNA, 122 bp, Homo sapiens
cgcgctgggcctgattatcactataaacaggcgtccgcggagggcgggggcggaggcccgcgtctagaggacgtgcggctggtcttcttcttcttcttcttctttttttttgtttttgtttt

SEQ ID NO: 292484 - DNA, 122 bp, Homo sapiens
taggagcgccctggcccagaggcggcggtgaagcgctggactgggtccctccgagccccacgggcctctgagctggggcctagggttattttttatgcctcgggacctttagaaagagacct

SEQ ID NO: 292485 - DNA, 122 bp, Homo sapiens
ggccgctgtcaccgcgggctttgcgacacacccacagcagggcagggccagcgccggatgcgcccagcagcccgggctcacaccagagcagtgcatcccgccctaagccagcggggcgacct

SEQ ID NO: 292486 - DNA, 122 bp, Homo sapiens
atgtcgtgcctttgggttgggttgccatagtgacacgcaaagcgtgctgggaacgccctgcggcatgtcgcacgcgtacttcatacaccatagagtatggttccgggtctgctggctagagc

SEQ ID NO: 292487 - DNA, 122 bp, Homo sapiens
cctggtctggccgcccctccatccttgtcggtttctcgggtcgcggaccccgcgcggcgccgggcgatgctggcctgcccgtggccaccacctcgcttcattcccgtctctttgggccgccg

SEQ ID NO: 292488 - DNA, 122 bp, Homo sapiens
agcccagtgcaactcccatctcacaggccaccagcaagttgctcacatccagacaggagacgctagtcctacaggtgcagtgggaggatctgcagatgactacagctcttggcccttccata

SEQ ID NO: 292489 - DNA, 122 bp, Homo sapiens
ttggtgggtgcccggtggcccacctgtctctggtgctgccatctgtcctgggtgtgccttcgccccagtgcctgctggaagtgccctccgtcgcacccctgtgccctgagctcccgtgaggg

SEQ ID NO: 292490 - DNA, 122 bp, Homo sapiens
cacctctgctactcaactcccacctcccacctcctgtctttaacctagagcagtgggcttcgctggccccaaaggagaaggaggcctgagccaacaagaaaactgctgaagcaaagtgagag

SEQ ID NO: 292491 - DNA, 122 bp, Homo sapiens
cgtctggtctacccagtgccatgtagattcggggaatcttcctggaggtgacaccaacatcggcgaagattcggcagttctgttttgattttttttgtttgttttttgatcagtgctaatct

SEQ ID NO: 292492 - DNA, 122 bp, Homo sapiens
cctttaagccttaattggagccacttcttctattggataaacgccttccctggttggcctcgtttctctcaggtcccttgtttcactttgtgtttcctcagttgccagtaggctgtgctgtg

SEQ ID NO: 292493 - DNA, 122 bp, Homo sapiens
gtttgggaagttttttcgggtgggaaatgggcttcgcccgtacgaacaatccggggaaatcgcctcaaggaggatccttacgcagcatgtggaaaaaagttgagggcaggggtctgtggcca

SEQ ID NO: 292494 - DNA, 122 bp, Homo sapiens
agcgcacctcggggtgcgcgtccagcatggcgcgcatcaacgtggtgccactgcgaggcacgccacccacgaagatgagcggcatggccttgccatagcggtattccacgtggttggtgccc

SEQ ID NO: 292495 - DNA, 122 bp, Homo sapiens
gtgccctgggccctggacgatagctgtacctgaccctccggggtagggctcctctaacatcgtggatatcttcacgtttgctgatattttttaaaagttgctgaattcggccgggcgcgatg

SEQ ID NO: 292496 - DNA, 122 bp, Homo sapiens
tccagaaatccacagaggaggcagaggaagagcgtaccagagagctgctgtgaggcaggacgtgaagggaaattaacagcacagcgtgacttatttttattaagattatgaaatgccacggg

SEQ ID NO: 292497 - DNA, 122 bp, Homo sapiens
tttctcatcgccagcctgtctcagggcagattaaatgcagctgagaatgttgggctcactcggcggcgggcgtcctccgggaataggcaggaacctcggcccggcctggccttggcggtgcc

SEQ ID NO: 292498 - DNA, 122 bp, Homo sapiens
cgccgggctcctgctccgagacccgcagttcacgagtcgacgcccccgagtcccgagccgcgcccactggtcccacctctgcagcaagtggagtcggccccgccctgtggcttcgaggcccc

SEQ ID NO: 292499 - DNA, 122 bp, Homo sapiens
ctgcaagtacagccaagccttttctgaggctatttttaaacttacaaatcagaggacaatcgcgacattagaggaaaattacccaggtttacgccatcactaacgatgatagcttacgatga

SEQ ID NO: 292500 - DNA, 122 bp, Homo sapiens
cttccgtttccgccttgacagcaccagcgggggctattgggagcaggtgattccggcaggcggacggccccctgctgccactggccactccatggtgttccatgccccctcccgtgccctgc

SEQ ID NO: 292501 - DNA, 122 bp, Homo sapiens
caatcaggagggcgcagagcgggctggggcggtgcagggggcggggctgccgcggcattgcggatcggcgggcactagggcagcgcggagctccggcggtgggcggggcgtggcggcgcgcg

SEQ ID NO: 292502 - DNA, 122 bp, Homo sapiens
agccgcggcgtgtccttgtcctccttcggggggctacagcggcatcctgtctgggtccaacggattgcttgcgggcaacgagaagctcaccatgcataacctcaacaactgcctggcctcct

SEQ ID NO: 292503 - DNA, 122 bp, Homo sapiens
aaacataatgcttttccctaggcatgaactcgcttaaaactactgagaagcttatactcacgcaggttgaatggagtgaatagtggtttagagaattgagctgattaataagaagtccctga

SEQ ID NO: 292504 - DNA, 122 bp, Homo sapiens
aggcagcctcgccacttaaaaaacaaagaacactttattcccttgacagtttctgtacagcgacaccaggctgtgcaaagcccagtgtcgtcttcactgagcacattccccaggacgcctgg

SEQ ID NO: 292505 - DNA, 122 bp, Homo sapiens
ctggtggggctgggcgggcgggggaggggccgcgcagcagcagcggaagccagacctcggcgataagaggctgcacagcgacatgcaacagtcttttcactgcagctgaatgagttgtggcg

SEQ ID NO: 292506 - DNA, 122 bp, Homo sapiens
gtcacaattagggagggtaccagtggcatcttgtgggtagaggacagatatactactaaacgtcatagtgtaatggtggggtggccagcccccccaacattacaaaggattaactattttaa

SEQ ID NO: 292507 - DNA, 122 bp, Homo sapiens
gggaattcactttgctgcttgttcgcttctcccttcctcaggcttcttctgatggttttccgtctcctgcccgagcctttcctttaaaaggaaaactttactgcgatacccttttccccttg

SEQ ID NO: 292508 - DNA, 122 bp, Homo sapiens
cagcccagtatgagtgggtgagggcaagtctggtccagtcaccctggggaccacagcccacgccgggctcccggggccgggcagaagcggcgggggtggggctggcccggctcacctttgaa

SEQ ID NO: 292509 - DNA, 122 bp, Homo sapiens
tgaggaggcattctttggaaagagcaagcagctctgtagctgcagtcgggagcctgactccgcagcatccacagcctctatccctcgactcccgggaagcacggggtcagatacctgggggt

SEQ ID NO: 292510 - DNA, 122 bp, Homo sapiens
tgaaagaaataaggttagtagtgaaattcattcttcaataaataaaacactttgaaactccggaggaccacatctttcaagacttctgatgggtcaaggaaaaagatgccaacatacccgta

SEQ ID NO: 292511 - DNA, 122 bp, Homo sapiens
atggcgggccggaagctctgtgccagccgcctcaggctgctcaggtcccgttggaagccacgcagctcaagggcggaagcctggggcctgctgctggtgccctgggctgctggggccggggc

SEQ ID NO: 292512 - DNA, 122 bp, Homo sapiens
gccccgcggctgctcttggaggcggcggaaaaggcgcgtccgcggcttgggggacggaggcggggtcgggggcgaagggaggcggctcctggggcccagaaagctggcgaggatgaggaacc

SEQ ID NO: 292513 - DNA, 122 bp, Homo sapiens
cccgctctctccccagcgagggcagcgtcatcgcctactactggtctgagttcagcatcccgcagcacctggtggaggaggccgagcgcgtcatggccgaggagcgcgtagtcatgctgccc

SEQ ID NO: 292514 - DNA, 122 bp, Homo sapiens
acaaacctacaaacaaaattttaaaaattcaaaacaatctcattcatctgtgctatatcacgtgctgccctcagaactccagtgcagagggactctggcacttcattcctaggacatgattt

SEQ ID NO: 292515 - DNA, 122 bp, Homo sapiens
tggcagtacttgcattgttttcagaatctagtgcccaggttttcctactgtttttcttgccgtctttaagacagaatttctatttacatccttgtcgatttttgtatccctaaataaattat

SEQ ID NO: 292516 - DNA, 122 bp, Homo sapiens
aattctggatttaagcaaagtaggccggcttctttgtcaatagacgtattgggttattcccgggggggctgcagccggagcacctcccactccttcgcaggggttatttctgaagaccccct

SEQ ID NO: 292517 - DNA, 122 bp, Homo sapiens
ggcggctcatggtgggtcagggggcgaccgaggagggaccacgcggcctgtagggggcagcgccgagctcgggaggagacagcagccggcgggtggggtgggtctgggctgccccctccggg

SEQ ID NO: 292518 - DNA, 122 bp, Homo sapiens
gccttctcttgattctccaggttgccctgtgtgcagcaggatgccaacttgtcctggccccgaggaagtgaatgctaggagttgctcctctagtctaggtgacaatcaagtcagttcagtgg

SEQ ID NO: 292519 - DNA, 122 bp, Homo sapiens
caggaggtgcctgggcttgacctatcctgcaagcactactccaattgagctaaaaagcctcggaaaaacagttatgagaagactttacagaagagatgagtaacaagataagacattatcac

SEQ ID NO: 292520 - DNA, 122 bp, Homo sapiens
gcggacgactggcggcggaggaggacggtgcagctgcgagggtctcagttgcccgcagggcggctccacgctagctgcggccgggcggggcggcagggcgtgccgggtgggagggggcgcgg

SEQ ID NO: 292521 - DNA, 122 bp, Homo sapiens
cccccacctcgatccgcccctcgctcctccctgccccgcccaccgcgccccgtccctgtccgccccttctggctctcagcacccccaagaccggtgcgcgccccgcccctcctcctcctctc

SEQ ID NO: 292522 - DNA, 122 bp, Homo sapiens
ccgtatcctgggcgagccgcccggctccggatagcaggaaactggggagggctccggcctcgcctcgtcagccccggagccttcaccaatcccgggcccggaaagaccacgcccactgctgg

SEQ ID NO: 292523 - DNA, 122 bp, Homo sapiens
agcctggcaagtgcatttcttggagggacggtatgatgaggtttgtctgtatcatatccgcgcaccttcccagtttagccgcccgtcccgcccccaaggtcgcacactgagatcactgggag

SEQ ID NO: 292524 - DNA, 122 bp, Homo sapiens
cctcggggcctagagagaggtgcagaaattcagactcagccagctggggaccctcttggacggccatactaggtttcagatggggtattttagatgcccgaggtcttgcccatgctgacctc

SEQ ID NO: 292525 - DNA, 122 bp, Homo sapiens
gcagcactcgtcaccccggccgcgtggttgtggcggtctcggcggggcagggggtccccacgcgggctgattctagtttcgcgtgaccgatggtgctcattagccatatctgtacatctttt

SEQ ID NO: 292526 - DNA, 122 bp, Homo sapiens
ctccccgcggaagtgcttgtcgaaattctcgatcgctgattggtccttctgcttcaggggcggagcccctggcaggcgtgatgcgtagttccggctgccggttgacatgaagaagcagcagc

SEQ ID NO: 292527 - DNA, 122 bp, Homo sapiens
ggcaggcccaggcagtcccggaatgggcgccttcctgcaccccttgccatccaggctccccgggcctgtccccgtctggcccccacaccgagcccttgactcggttttggcttccggtgctg

SEQ ID NO: 292528 - DNA, 122 bp, Homo sapiens
atagagcacagctcccgggggccgccatcttggtagtcgagtgacaacggccagagagtacgccttgttgcgtcactccacgaacgacggcggctggccggcaacattattagccgaacgcg

SEQ ID NO: 292529 - DNA, 122 bp, Homo sapiens
cagttatattccaatgtttttaatacttggttcacattttggatgctctccccagggatccgacggcgctgcggaggcggcagcgatgtttgggatcctaaagaaagcatcagaccagactc

SEQ ID NO: 292530 - DNA, 122 bp, Homo sapiens
tcctcaaatacatcctcaaagaaacttgattgtttattgtggtgtcacatttatgacccacgtaagtagcagtcaactaatatctttataaaactctgatttataggtactttgattgggct

SEQ ID NO: 292531 - DNA, 122 bp, Homo sapiens
cgacagaagcacgcatgcgcacacctctgtgtgcggaggtttccgacagacgcacgcatgcgcacacttctatgcgcggaggtctccgcagacagaagcacgcatgcgcacatcgctgtgcc

SEQ ID NO: 292532 - DNA, 122 bp, Homo sapiens
ctccacattctcaatgcttcacaaactctgctcctgatttgggtacaagctgcaagctcacgacttaccattccgtaacgcttttatgggctctgatgaccgaggtctcaatgtcgattggg

SEQ ID NO: 292533 - DNA, 122 bp, Homo sapiens
gtaataacctgccagccctatggggccaaagtaaacaccaggcccatggattaaggccttcggcaaggattaggctgcagttcactaggtactccttctgagtaggcccttgtaagcagtga

SEQ ID NO: 292534 - DNA, 122 bp, Homo sapiens
agcaggctttcctgactctgtcctaacaactggccactattttgaggtgaaaaatggtctcgagcagagagatgtctcagatgactatgtatatagttgattcccattatttgagaaattgg

SEQ ID NO: 292535 - DNA, 122 bp, Homo sapiens
cttgcttcgcagatcagccaatagagatgagggctggttccggaagtatcttcccgggggcgggcacagcgcctcccccgcgcgggtccccgggcgctggttgggggcgctcccgtccctct

SEQ ID NO: 292536 - DNA, 122 bp, Homo sapiens
gaatttaaagcctcacatccttttgtcttccgacgccccctcccgccccacccctcccggcggctgcaagctcttcgggcctccttcccggggcaacagccctgaacccctcttgctgccag

SEQ ID NO: 292537 - DNA, 122 bp, Homo sapiens
agggacacacgcccctccaacttcccttccctccactcccggtgcagaggaaggctcacccgagaacttgctcttgaagtagatcaagcgtggaggctcgcagttgaggaggttgagggtgc

SEQ ID NO: 292538 - DNA, 122 bp, Homo sapiens
aaggtgttagttggatcatttaaatgcatagtactgtttgctataattgctctaatggcccgtctcctcaatatggactagagtatttactccctggggagactggtgtatttgttttggat

SEQ ID NO: 292539 - DNA, 122 bp, Homo sapiens
tggcatcaaaacctgggctgaccatgtgctgcaggtggaatgcacacactcacccagtttcgcagcagaagcagctgacactagtagggagacagcgccgtcttcagttcctaaagccattg

SEQ ID NO: 292540 - DNA, 122 bp, Homo sapiens
gccggtcaatttcccgagggatataatcatgatctatcagagagtagagctggaaagtgacgaagggatagctatgttttttccattgaatctgagtgtgtctttctgcatccagaagcaaa

SEQ ID NO: 292541 - DNA, 122 bp, Homo sapiens
actgaaaacccatgagcagccccatcccttacaaccaaacacagctccgtttgcctcccacggcttcttcatatgcttcccagggggttcattctcgctctgtttggagacaccacagggtt

SEQ ID NO: 292542 - DNA, 122 bp, Homo sapiens
gcggcactcttagccgcgctcccttcggcttcgctagccctctccaagcgagttcctgatcggctcctaaatactccccccaggggcggggcccgggctcctattggttcccgtttgaggag

SEQ ID NO: 292543 - DNA, 122 bp, Homo sapiens
tttacagctgctgggcacgctgtatttgccttacttaagcccctggtaattgctgtattccgaagacatgctgatgggaattaccaggcggcgttggtctctaactggagccctctgtcccc

SEQ ID NO: 292544 - DNA, 122 bp, Homo sapiens
tgcggagctcctgggctgcagctcctggagtttccgaggttcgtgcgcgtctggtggcggcggcgtgatgttctcggcaggagcggagagtttgctccaccaggccaggtacgggggagctg

SEQ ID NO: 292545 - DNA, 122 bp, Homo sapiens
catgcgcagggtcccaggactgtggggttctgggttcgctccaccagagcagctggacctcgtggggtgctgcccaaaaaggcagggaggcttgaaaggggagatggaggcaccggtggaag

SEQ ID NO: 292546 - DNA, 122 bp, Homo sapiens
agcaggtgttgctgacaaccagttcccaggaagcaaggccttccagagcgctctctcgctcgctctcgcgctctctctctctctctctctctctctctctctctctctctccctctccctct

SEQ ID NO: 292547 - DNA, 122 bp, Homo sapiens
tgcctgctggtccagaagattttagagctcagaggccatggatttcaatcccggcctcctcgtaatctcagaatttacagatagggagacgaaggaactaagcacccgggtgactagtccga

SEQ ID NO: 292548 - DNA, 122 bp, Homo sapiens
ctaggacaaaatgagtcctttctccaccaccggctacacaccagatctgtccaccccacacgctaacaacgacacactggccttggggtgcacggaagagggtggagctccgaaagtgctga

SEQ ID NO: 292549 - DNA, 122 bp, Homo sapiens
gccgaagcgcgggcgcggggacttccgggaggcagcttgaggcgcgtgtggaagcgcttccgggcggtagcacgctgtgttggcggcggctccccgcttgcctcagctgcagcagcgggaag

SEQ ID NO: 292550 - DNA, 122 bp, Homo sapiens
gggatcgggacctgcagcccgccacgctcgagcgccccaccttcccgcagtgggctctcgcgcagcccgagcctccctgacccgcgttgccccctgccctggggcgctaccccctgctcagg

SEQ ID NO: 292551 - DNA, 122 bp, Homo sapiens
ccattggatagtggggcggcagctctcctctctgattggtttagtatacccgcccgtcatcgctctttaccgccccttttcctaaacccggtattcgcccccgcccggacctggagcgtcct

SEQ ID NO: 292552 - DNA, 122 bp, Homo sapiens
ccgtgctgcaggcggcacgctgcgcacccttaataaattacacggacttctctgctctctcgaatctggccgcaataatttgcacactcgccggcatcgtaaggaagcagttgtgaaaataa

SEQ ID NO: 292553 - DNA, 122 bp, Homo sapiens
ctcagtagttcttgaaaaatcaccttacctattaagctgagattcccccttcccgcaagacggtgccattaagtaggcagggatcaccaaggttcagagatgtctcttgctcaaaaatcata

SEQ ID NO: 292554 - DNA, 122 bp, Homo sapiens
ggctcctctctgtccttagctgattggctgcagcctctgataaggcaaagcaaggcaaggcggcgggggggcactgtttctggggcacaaacttcacgttggcctgtctggggctggggtta

SEQ ID NO: 292555 - DNA, 122 bp, Homo sapiens
aggaaatgaagtgggtcagagcatccacagatcgatgtggctcaggtctggatggttctgcgggaggttgaggctggatggcagggggacgggggggggaggtgtggaggatgccctcagac

SEQ ID NO: 292556 - DNA, 122 bp, Homo sapiens
cttcccagcgtcacctaagaggcgacccacatccgctgtgcgggggcaactgcgacttgacgaacttccgctaagcgtcgaccgccgggttgttacttgcctccgtagaggaagcaaaagtc

SEQ ID NO: 292557 - DNA, 122 bp, Homo sapiens
cccaatcctctacaacctcatttcaaagaagtacagagcggcggcctttaaactgctgctcgcaaggaagtccaggccgagaggcttccacagaagcagggacactgcgggggaagttgcag

SEQ ID NO: 292558 - DNA, 122 bp, Homo sapiens
tgatccgggtggaaagacggtcaacgctgctgccactgtggaagcgagacctgccggggccgggactgaagcctccagggcgctgcagctgtcttcccggccacggccactccggctgtttg

SEQ ID NO: 292559 - DNA, 122 bp, Homo sapiens
ctattgagagagggaaacatttagtaacatatggaaatattaagagggtatgaatgtctacgtgtggtaactcagctaactgcttttggttggtcaggtcgggttttatttcagatatttta

SEQ ID NO: 292560 - DNA, 122 bp, Homo sapiens
gtcctgagccgggcgctgtgttccaggaccatgtaccgcgttatgtggcgggaggtgaggcgggaggttcagcagacccatgcagtgtgctgccagggctggaagaagcggcacccgggggc

SEQ ID NO: 292561 - DNA, 122 bp, Homo sapiens
tccctctcatcccccagtgcccaggcccagagcaggccgtgggggattcggaccccggcccgcatcgccccacctcgcgcagccctggggccccgctctcaccgcggccagcgcgggcggcc

SEQ ID NO: 292562 - DNA, 122 bp, Homo sapiens
tgggactaacgaagcaaaggcgggaggtgcctccatcgccttctgcctgatcctggccttcgtggagacccaggcaggccaggcagttcagacagccgctccgggtggggttggtggctgca

SEQ ID NO: 292563 - DNA, 122 bp, Homo sapiens
tcagccccctcctcaaggccaccaaggagagatcacaggggcctcagcccaagaagtccccggctcttgcagttgggaccagccagtgtggctgccaccaggaggggaagcaggggacaggg

SEQ ID NO: 292564 - DNA, 122 bp, Homo sapiens
tgggaagccggattgtttgaagaccaactttaaagttgggagcagtgcccagagcggggccgatgtctgctaggtggttgtctctgctttttgaaaaagaagtccccgcccgacccccgccc

SEQ ID NO: 292565 - DNA, 122 bp, Homo sapiens
aaggaggtgacagccgccgtggcccactctcccggcccgtccggagggccccccgccacccgatgcagaccccctgggggagccggtccagggccaacttcggccaatcccctcagtgacag

SEQ ID NO: 292566 - DNA, 122 bp, Homo sapiens
ggttgacgtggctttagcgtacggccctaaccgcagatgccaccgtcttcgtcatctgagcgcatgacccttaccaaaggaataaggcttcgggctggttctgcaacagtagcttcctttta

SEQ ID NO: 292567 - DNA, 122 bp, Homo sapiens
aagaagctgtgggtggatagcaggaggccctgagggtgagtcacccggtttgctgccttgcggtcacagacctttggctattgtcactgcccctgggatgagtcacactgagccttagtgcc

SEQ ID NO: 292568 - DNA, 122 bp, Homo sapiens
gtcacacgtgaaactacctactccaagagccctttaggatggtgctgtgaggtggaagggcgaggccgaggcggcggtggcgtcgcgtcccccctctccgcccctggcctcggggacgcggc

SEQ ID NO: 292569 - DNA, 122 bp, Homo sapiens
gctgagtccactgacaatgcagcctgctctaggaaccatggctctgcggaaatgggcctgcgtcatctgtgcaggaaattgtcaggtcttgagtaaagaaacatagttgttctaggcagaat

SEQ ID NO: 292570 - DNA, 122 bp, Homo sapiens
tgagtctttgagacctttttgtgctttgtcactggggagctcaaggtgccttggtagtgccggtactggttgggcagcttttggcaatgtcagccaggcagaaactcagcccacatggagac

SEQ ID NO: 292571 - DNA, 122 bp, Homo sapiens
atggctccctttaagagtcaagggtgccagcaccttcatttccaggcctctctcgctgtgcggctgtgaacatgttgttctctatctctaaactcaggatcttcatctatgaagtgtcatca

SEQ ID NO: 292572 - DNA, 122 bp, Homo sapiens
tccctccttgttccagagcacacagaggctccagggtgcatgtccagccctcacaccaaccgcgcagcagctgagagcctcacacccatcagcttgcctgtggagtgaggtcacaagatatt

SEQ ID NO: 292573 - DNA, 122 bp, Homo sapiens
tccgcggatcggcgctgcgagccccgcggctgcctgcgggacacctgagcgcggagggtgcggcaccttggcaccttgaccctgtggcagggacatctcggcccaggaaagaatgaggttta

SEQ ID NO: 292574 - DNA, 122 bp, Homo sapiens
ggacctggtcaagggatgtggggcgctttcttcaccttaaagttccccccaagccctctccggggctgtattgtgttgtaactttgttgaatttccttagcgggtctgaagctagcgagttt

SEQ ID NO: 292575 - DNA, 122 bp, Homo sapiens
caattcaggcagagatcactatcattctcccacctgctgcagatactagctggaaaggtacgtttttctttcctagtgtctctgggccaaggcaatgctaagaggtttggagcccaagatgc

SEQ ID NO: 292576 - DNA, 122 bp, Homo sapiens
gccctgagcgcgggactcgtcgccctccgggtcaggcgccaagcttccaagcggctagagcgcgggccttggagcgcccccaggatcgcttcagtaaggcgcttccccactccaggcccgac

SEQ ID NO: 292577 - DNA, 122 bp, Homo sapiens
aggccctcagtgaatgccgaatgaatgaatgaatgaatgaatgaatgaatgaatgaaaaccggcaagcaagaaatatctggctgggagtgcatccgatgccagtttgggagctgagcccacc

SEQ ID NO: 292578 - DNA, 122 bp, Homo sapiens
aaatcttcattgtgtttattctgcattggctgctgttgctggatttcataaaagcatttccgccagcagggctctaaaatctcccactaggcttattaaatgggcaacagcagctccctttc

SEQ ID NO: 292579 - DNA, 122 bp, Homo sapiens
agttacccagaggcggctacgaactccctgccccgcccaacccagcccagcactaggccccgcctctacctggtgcccaatgctcgagtgcctcctcgaatcctgcccctcgcgagacccgc

SEQ ID NO: 292580 - DNA, 122 bp, Homo sapiens
ctgatcccctccgcggcgcccgcccgcggctctctgctcgcattgacattccgctcgtgtcgctttaaaaattcaatctgctcgggcagcagcagaaggggagagggcgactgccctgctct

SEQ ID NO: 292581 - DNA, 122 bp, Homo sapiens
ccgcggcgccagcggctgcagggtgacctgtttcgggcggggacactcaccagaagaacacgcgtgagcagaggttcgcgtcctgcagcgggttgggcttcacctcctggtacacgggcagc

SEQ ID NO: 292582 - DNA, 122 bp, Homo sapiens
gatgatagaaaacagaagtataattggtaaacccttaggaagaaattagaaaaacatggacgtaagacaagaagtctctgtgaagggttgaagagtgacaagcattggtaacagtgccttag

SEQ ID NO: 292583 - DNA, 122 bp, Homo sapiens
ctggtcctgggcctggagtggagttgtgcttggatggacaggcatggatggctgtggagacgctgggctgctttccattccggctgatggcctttcagagcaggggctgtgtcctcaggcac

SEQ ID NO: 292584 - DNA, 122 bp, Homo sapiens
gtagcatagcacggaggctgctgcaggggtccaggcagaggtgagaacacctggtggggccgggtttgaaactcagagtgtggacagagaaactggggagggagataccacgtctgcagcag

SEQ ID NO: 292585 - DNA, 122 bp, Homo sapiens
ccttcacaggactttattctctccggtaactcaaaggaaaggttccctgagtgcctatctcgcctctgggagagagagttttattatcagggcagcagtggcccagacggcagggccccaca

SEQ ID NO: 292586 - DNA, 122 bp, Homo sapiens
gtctggaaggctccttccggtggaagaggggcccggagccagccggcgcctggcacaaggcgtctcagaggccgcccactgggagccaaccgttgcagccagttgtccccgcgagcgaggcc

SEQ ID NO: 292587 - DNA, 122 bp, Homo sapiens
tagagaacgctgatgaatacaccaccctgtttaaaactgcaatctgcttatttcacattgcgtgcctttatcaaaacatctcatataccccataaatatttaatatatacatccattatgaa

SEQ ID NO: 292588 - DNA, 122 bp, Homo sapiens
ctcctgtgccgtgtgcatgcgggggactggggtgcatgtgccgcgcggctgcccccaccccgctcgctccctgcgcctccccgtagcctattaggaagcttgtcctgcccccaccgcccccc

SEQ ID NO: 292589 - DNA, 122 bp, Homo sapiens
taaacgagaggtgccggtggctagtgggtctgggtttattgtgtcggaagatggactgatcgtgacaaatgcccacgtggtgaccaacaagcaccgggtcaaagttgagctgaagaacggtg

SEQ ID NO: 292590 - DNA, 122 bp, Homo sapiens
gtctggatgcgcgcagtgcgagtgtgccaggccgggagattcagtcccatccaggcgggccgggccgggctgggggcagggctttctgctgccccgcccattcgtcgccccgcccctcggac

SEQ ID NO: 292591 - DNA, 122 bp, Homo sapiens
ccttgccagcagcccagggaggtcaggccccttgctcagataggatggctgaggcccaggcgggaccagagctttccagggtcacagtctggccaggacccagacctgctgtattccagctg

SEQ ID NO: 292592 - DNA, 122 bp, Homo sapiens
tcgggtgcgcgcgtgcagggctgtttccggcttagactcagtggaccggaatctggccagcgggtgtacctggctgagtctctgtggccgcggaggcgcggagctaagcggctcggattatc

SEQ ID NO: 292593 - DNA, 122 bp, Homo sapiens
tgcaggattctttaaagaacactgaggcaaaccagaccttatagggaaaaacaggcctcacggagactgaagttaaaatatggaccagggccagtgtttcttcatgaagggggtgagcagag

SEQ ID NO: 292594 - DNA, 122 bp, Homo sapiens
agagtgaagcggggcccatctcagaccaaactgcaacaatcagtatcagaactcctcaaacgggggacagaaagggagaagaaacctcagcaaacctgaaaccaaccagaaagctgtttaaa

SEQ ID NO: 292595 - DNA, 122 bp, Homo sapiens
caggctctgtaacttccaaggccatgagagtggtcaggccctgcttggtttcccggcccccgatcacagatcgtgctggaactgctggccccaacgccctgaggtgactggccctttcttca

SEQ ID NO: 292596 - DNA, 122 bp, Homo sapiens
tctttaccgccttggaactgtcttggaacctgaggaaactacataacccagaaatctctgcgtcgaatgacagcgcgtcagagccaatgagggctcaaaataaaggcgtttccgcggaaaca

SEQ ID NO: 292597 - DNA, 122 bp, Homo sapiens
tcgaccgcgcggctccggcgctgccaggtttcctgtatagcactataaccagtgaggcaccggcggagagcgcccggcagaacttcctcccggactggggctgggctgcggttgcgagagac

SEQ ID NO: 292598 - DNA, 122 bp, Homo sapiens
tttagctggcagagttcaggacttgatggaaacataacgaagggctcagaatgtactcatcgcagactgagcccatatggtcacagtggggagagcacgctgcactcaagatgctagcaagc

SEQ ID NO: 292599 - DNA, 122 bp, Homo sapiens
ataccaagagctattgcgaggatcagatccctttaaaaatggtgacgagacaggagagggcggctcctctagagctttccggaacgtctttacctctgtgtcctttataccttttatctccc

SEQ ID NO: 292600 - DNA, 122 bp, Homo sapiens
tctaagaaacgagggtaacctttattatatgcattgctctaatcgaagcattgttttttgcggtgaactcaaggttacatgtttaagaaaagcatcgggttaattccattaggaaaagtgtc

SEQ ID NO: 292601 - DNA, 122 bp, Homo sapiens
gggatttttcaggaggctcttgtggcgtccgaatggctcttaattaaccacttaggtatccgccttcactcccctgcctggcactttccaaatggtaggggttgcactgtggatctaaacac

SEQ ID NO: 292602 - DNA, 122 bp, Homo sapiens
tctgctcctcctgttcgacagtcagccgcatcttcttttgcgtcgccaggtgaagacgggcggagagaaacccgggaggctagggacggcctgaaggcggcaggggcgggcgcaggccggat

SEQ ID NO: 292603 - DNA, 122 bp, Homo sapiens
cccgggagctggtggccagccctagcccctgcccgcctggcctttggccagcacttagcgcgggcagccctgcccgcccccagacccttctggggacttgggccgcgcctttgtcccagccc

SEQ ID NO: 292604 - DNA, 122 bp, Homo sapiens
gccgcggggaggccagacgacttccgaaccgccgtcaccgcctcacgtaaaagggtacaacgcagtttctcttccggggttcaggacccaaaaagaacgcacggacgttgcccggcctgagc

SEQ ID NO: 292605 - DNA, 122 bp, Homo sapiens
gttccctggggtcagtctggagatctgagcagaaagcccctacagcaagggacaagaccacgtgcgtatcagggggaggagcatccgcctgccactggccaaacagatcgctgctcccaagc

SEQ ID NO: 292606 - DNA, 122 bp, Homo sapiens
ttgggattcagtattatctgttcaatttgggtaacatacctattcctaaactactgcttgcgagaaggaatatgctgatttcccagacccaggttatgttcctaccccagaaacattagagt

SEQ ID NO: 292607 - DNA, 122 bp, Homo sapiens
tcccccttccacctggtctacatactggacttctatgtctgattttctccccacagtgggcggcattgctcttagtttaaaaaaataaaaatacgtcaatgagtaaatacaaaattgaaata

SEQ ID NO: 292608 - DNA, 122 bp, Homo sapiens
cttagcacctgggcgggcagctgctgcgctcgatttctccccgggccttagctgcctccccgtgaggcagcgctccggacctgcagcctgccatgcctgagccccccgcacccctcccccca

SEQ ID NO: 292609 - DNA, 122 bp, Homo sapiens
ggctgctgtaaaagatcttcagggatagtcactggtgatattgcaagcattagaacattgcgggaagggctggctttgctatatatagacttcaagcaatgaatggattagatcaaatggac

SEQ ID NO: 292610 - DNA, 122 bp, Homo sapiens
tatctcagctctgcgccgtgccccttccccccacgctcgaggacctttgccctgggccgccgggcccgcccccccacaggaacccgaagccctcgggcgcccgccacactctggggataata

SEQ ID NO: 292611 - DNA, 122 bp, Homo sapiens
gcagccggttgaatggggttacgccagagacacaggtattgatttacgcagagagtacgtcgagggaagaagcttggagactcgtatagggttcttaccctggcactggcacttagaagcac

SEQ ID NO: 292612 - DNA, 122 bp, Homo sapiens
aaagttttttgagtctcagtttctatagcctctgtagggggcagctttgattcacagatccgttaaaaagcccacctgcatttagtctagtggccagcattggctggggccctcattagttg

SEQ ID NO: 292613 - DNA, 122 bp, Homo sapiens
gagtggaaacacacgtgtgttgtaaactgctgagacgccgagattgctggggccacagcccggcctggcatcagctgactcgaggagaaactggcacctagaattcgttgctgtcacacaca

SEQ ID NO: 292614 - DNA, 122 bp, Homo sapiens
gcgagggcaggttctccacagccaggggcaccaccgtgtcatctgccaggtataccagcacgtcagccgctcgggctcccacggaggacacgctgcttcggtgggaccgctcagtggggccg

SEQ ID NO: 292615 - DNA, 122 bp, Homo sapiens
agaactgtcacaagacggtggccaaagcaatttgcagtgagggagtcagctgtgagtagtcggcagccaatattcttagcagctaggggatgagggtgtatactctgaagagagaacctaga

SEQ ID NO: 292616 - DNA, 122 bp, Homo sapiens
cgagaccggcggtgaggatgggctgcctccctcatcctgcgctaaactcgctttgtctgtcgcctctaggctaagtgggactgaccggggcccagagtggacgaaccgccagcatggggaga

SEQ ID NO: 292617 - DNA, 122 bp, Homo sapiens
gcaagcaggaggagctgtggcagaaggcgatcagagaggataaagacaaaggtatgtgttcgagattgtcaaatgaaagccatgcacagtccaggggcttcaggaatattctcatctcaggg

SEQ ID NO: 292618 - DNA, 122 bp, Homo sapiens
aggatggagaagcagcgggcactcgtggccgccaaggatggggatgtggcgacgttggagcggctgctggaggctggcgccctgggcccgggcatcaccgatgctctgggggccggcctggt

SEQ ID NO: 292619 - DNA, 122 bp, Homo sapiens
cttggctatgtgcctcaccgtcccgcagccccatgttaaccccgcaaaaccgcatccccccgaccctccagcagcctccgaccaaggaagctccaggaatcccgggtcggcctggcaaatga

SEQ ID NO: 292620 - DNA, 122 bp, Homo sapiens
ctagttcacttgtttagtcacgggatcatagcagcttgctcatctctagtggtatgaagccgtatttgagaggttgggcaatagagccctacagtgttatgtgatttgctcagtaacagagg

SEQ ID NO: 292621 - DNA, 122 bp, Homo sapiens
tcacaaatatctatatcccccgttactcttatcatagctctattgttggtgaagattagccgaactgaacatgccatctctattgctgttattttcacgggtttgggtgtcaattatgggtt

SEQ ID NO: 292622 - DNA, 122 bp, Homo sapiens
ggataataaaagcatgttaaacaaataactcttaaaagaagtaggagaaaaacattttaacgtgaagctctaagcgatactgatgtttataattatgacgaggaaggaaaaaaatttctgag

SEQ ID NO: 292623 - DNA, 122 bp, Homo sapiens
ttccctttggggtgcccttcgcggtttctgcgtttcccccgcgttgccagcagccactcgcgccgcgcccctagcccagaaccgcccctcccaagggcgataaccccgagggcaacggccgc

SEQ ID NO: 292624 - DNA, 122 bp, Homo sapiens
ataatgcttccagtttacaagtaagccttttgatatcacctgtatgcatttgcttctctgcggtcaatagaacaacagttttaatggaaataatccctcaatgcatatttcataatgtggtt

SEQ ID NO: 292625 - DNA, 122 bp, Homo sapiens
aagaggagctctttgttctgtccttggtgtgtggtgcattcgtgaaattctgcagcacatcggcgaaaggtgggttatgaaaagaacggattttaacgctggcgaaggtgaaacaaagaggc

SEQ ID NO: 292626 - DNA, 122 bp, Homo sapiens
ggacaaaaaaaagatcctgattcctaaggcctgtgatatttccccattttaaataagcttcgaggaaccatagacataacaagcacatccacaatttttctaccccaaaatgcaaactaatg

SEQ ID NO: 292627 - DNA, 122 bp, Homo sapiens
ctgagatgagagagcctaggtccggcaggtgcaataggcagcggagctcccggctggctgcgggtggtaattcctgtaatcctcaaagcaggagatgcttacgtaatgacacggaaggtacc

SEQ ID NO: 292628 - DNA, 122 bp, Homo sapiens
ctcaacgcgccgcagaacctaaagcctacggatgaaaagggaaagggtggtgaaggagggcgcgagtccctgagtcattgccctcggagccccccttgttcattttttcatttgaaataccg

SEQ ID NO: 292629 - DNA, 122 bp, Homo sapiens
gaccacttcctaacttgtttatgtgtagagtgattttgttactcctgtgatttggttttccgagttgtgttatttctactacgtaattcttccgccttggaataaggagagttttaggtatg

SEQ ID NO: 292630 - DNA, 122 bp, Homo sapiens
tctgacaatagcgtcgcgttgtttgcttagctcaggcaaacatgctgctctgtacctggccgggggttgggggttgggctcagggactcagaggaggaagcagctcagcttctctccagggg

SEQ ID NO: 292631 - DNA, 122 bp, Homo sapiens
tcctcaccctattcccagttactcaaattttagctttagttttccatcttcagaattttacggattggaataacataatgaggacagataaccatccgaaggttaagtgtttttcaatttct

SEQ ID NO: 292632 - DNA, 122 bp, Homo sapiens
agcttgatggattttagcaacttaactgcatagcagtctagacaccttcctttctctccccgtgtttcaaagaaaataaaaatgcttaggtgaaaaccaaatcattattgtttattccccat

SEQ ID NO: 292633 - DNA, 122 bp, Homo sapiens
aggagaggggcggctgccccacgaggaggacgacccccaagagctcgagagtgagggggccgggaagtgactcacctcaggaagggacttgccgcagctgaggctgtaaatcttcacctcat

SEQ ID NO: 292634 - DNA, 122 bp, Homo sapiens
actgcttgagtgaattctttatctgctccatacgtgtccctcacagcctggaccaggcatcggctgcccccacctccatgtaggttgcacagagttggacttagcaaggtttatttggaagg

SEQ ID NO: 292635 - DNA, 122 bp, Homo sapiens
caccatgcctggctgtaaatgcttttcttgctgtttgtttagtatgtggtgcattttgttcgtctgcagtttggtttctaacagtgctgtcatagccagtcatggaggtaccctggttgtgt

SEQ ID NO: 292636 - DNA, 122 bp, Homo sapiens
tgctgccaccgagggcaggaggtggtgctgctggtgggcactccgtcccggtttgggctccggtgatgtcggggcccttccctgcctgcctacctggccttcctgccccgcgatggcgtcgt

SEQ ID NO: 292637 - DNA, 122 bp, Homo sapiens
cacccccgctcatcctggcaccatcccagtcaccctgacaggacaaacactcgcgcgcagcgacaagtgcactcctctcaccagcccgttcctgccaggtgagccaccacacactcaacctc

SEQ ID NO: 292638 - DNA, 122 bp, Homo sapiens
actgccatctggtggtagattcttatatgacatcggtggtggattcttgcgtgacactgccgcctagcggtagctttttatgatactgccatctggtgatggttttatatgttacatatatt

SEQ ID NO: 292639 - DNA, 122 bp, Homo sapiens
aaaacattttgatttcctttagccacttgcagggtcttgcgccatccttttgtctgggtgcgtagctgtccagcagctctagcactacctggaagttgaggcatggtcatgcagaactaagg

SEQ ID NO: 292640 - DNA, 122 bp, Homo sapiens
ccagccccctcccccagcctctcgtagactggtatataatattcatgagcctcatgaatacgcaatgttctaattatggggcgggggtctcactccgctctgcctcccgctttaccactccc

SEQ ID NO: 292641 - DNA, 122 bp, Homo sapiens
cgctggcgcttccaacgcactccttgggtgccctgtcacttacatggaggcttatttgcccggaagacgtcagaaatacttgtggccgtgggtgaaagtgaagcctgggttacctggccacc

SEQ ID NO: 292642 - DNA, 122 bp, Homo sapiens
agcacctggctggcgaggaaccccctcttaacccgacgcagggcgcggggcggggcttgccgtgacagctaccactcctattggtcaacgcgaacagcgacgtcctctgcgataggctgtag

SEQ ID NO: 292643 - DNA, 122 bp, Homo sapiens
gcgcggcggaggtgaggggggccgggtctgggaggcggcctggggagcccccaacttatgcgcggtggaatccagccggggggacggcgttccccagtcgcccccactttctggaagggggg

SEQ ID NO: 292644 - DNA, 122 bp, Homo sapiens
tttcaccagtggattcaaagacgcttgctctgaaagcccgaaattcagtctttctgaagacgtgtgcagcagagagcagatctgcccacacactgcagtgaggcaggacggcgggcaggaag

SEQ ID NO: 292645 - DNA, 122 bp, Homo sapiens
attttaaaaggaagccggacctatagtttacgtcagttctttgaccattcgttggagctccggttttcagcctctttccgggctacctggtagcaatttgaggctctgtcatcagtttctgc

SEQ ID NO: 292646 - DNA, 122 bp, Homo sapiens
gtcgctggctaggctcccaaaatagtgcggcggggtagctgcacgtgtttgttttcaaaccgcgctggtttaagtgagttcacactgcggagccgacagcagagggtagagcaacctggggc

SEQ ID NO: 292647 - DNA, 122 bp, Homo sapiens
aaaggaggtggttcttttcctcctcactacagggtgttcgtgcttgtgtgcgtgtgtgcgcgcgtgattgggatgactcctttcgttctcacctccgcatagggaggctgacacctcttatc

SEQ ID NO: 292648 - DNA, 122 bp, Homo sapiens
cgagcgtggtcgtggaaaacccgtaaccgctaaattcatctgggtccccaaagactgagccggctggcctcgttatttatgtgagcggctatgtaaatgaggattcggagattgctctattg

SEQ ID NO: 292649 - DNA, 122 bp, Homo sapiens
cgggatcccggctttggccgccagagagcagcaagcgcctgggatctgcggactgcggaccggacggcgcagtgccgctgcgggttgcctcctgggactgcccgcatggatctgccgcacct

SEQ ID NO: 292650 - DNA, 122 bp, Homo sapiens
ggctactccgcggggccggctcagctgccgctgcagcgctacgcacgcctccctcagacgcgggctcagctcgcacctgcagaggaggccaggagagactcaggatggatcggggacagcgc

SEQ ID NO: 292651 - DNA, 122 bp, Homo sapiens
ccaaaaaatactgtgttctacaaaggaggagcatctttatctcaaagcagcagttcttatcgccaagtattcagcatctctttggaattcatttgtcagcctctctggttccgggagctgta

SEQ ID NO: 292652 - DNA, 122 bp, Homo sapiens
gcaaatgaaattctgcaggtgtttgttctggtgtttcggtaagcagctttaaaaccctcacgaggcaaagttatttttgtttatacaagtcatattccttagacgcaccagtgtatttatcc

SEQ ID NO: 292653 - DNA, 122 bp, Homo sapiens
gtaatttaaatactcataatttatttcagctaacgaataaaactgcagtactgcacttgccgcatctgggaactaactgcccaatgcggctgaaacctcatgccctttcaaaaggagtggcg

SEQ ID NO: 292654 - DNA, 122 bp, Homo sapiens
gtggcgagaaaggaaatccaggctcccctttccttaaagccactgcagcagctgggaaggcgcccacagagcgggcgcgccaagcgggacgcgggagtcgcagagagggaccccgggcgcct

SEQ ID NO: 292655 - DNA, 122 bp, Homo sapiens
ggactccccaggaatgtgccaggatgtttttgctgcctgggcttggtaactccccctcaacgtgtctgcagagtcttccaaacttaactgtttattaactcgcgctgcagcggcgcagagga

SEQ ID NO: 292656 - DNA, 122 bp, Homo sapiens
attcaagccctgcagaagttgttcagaatgcaagtgggttaagttagcaagcatgtaggtcggggatgtgtggtccatctacagaaaaataaaaaagcatagacagttatttcaaagtaaac

SEQ ID NO: 292657 - DNA, 122 bp, Homo sapiens
cgagaccccgtcgagcccgccgacccccgttagggccggaagacgacctgaggggcaggacgagacccctccccggcagagactaaccgggacgcaggggagacccccacccgtggccgaga

SEQ ID NO: 292658 - DNA, 122 bp, Homo sapiens
ctgcctttattttggtcatcgcagcggccgctgaaacctagtcccagggaggcgagcccacgcggtccacagctttaggcatcacttccaggtcatcagctgcgcgagaagccgccgtacaa

SEQ ID NO: 292659 - DNA, 122 bp, Homo sapiens
gatcgatcattttgtaggcctgttcttccttgggggggtgtttttactatcaaagctggccgcaaagcagtatcctgtacaccactctatgttgaaataagactgaaaaatacctgcaccat

SEQ ID NO: 292660 - DNA, 122 bp, Homo sapiens
cccccagcctctggcttcggccgcgctccctgctcgctcctcgcctaccagccccgcgcgcgccccagagaagttgtcaccagcgcggctggctctccggctgctcacacgccccctggcac

SEQ ID NO: 292661 - DNA, 122 bp, Homo sapiens
aggacccggggagctccgcctgcaccggacccgccgagcctccctcgaacgcccaaagcccgtagccgctacccggagctcggcttgcctgcatggggcaggcttccactggcggagccggc

SEQ ID NO: 292662 - DNA, 122 bp, Homo sapiens
ctgttagcagagacagacctgttagcggagtggatagctgggccagcaggtctgaagtaacgctatggaagagcaggccagtaacagctgaagagcttcagaaactcccacttctaacaagg

SEQ ID NO: 292663 - DNA, 122 bp, Homo sapiens
aaggggtgatggatggcacctggaaaatcgggtcactcccaccctaatactgtgcttttccgacgggctaaaaaaacggcgcaccacgagattatatcctgcacatggctcggagggtccta

SEQ ID NO: 292664 - DNA, 122 bp, Homo sapiens
gtcagggagagggcgagtgagtgaccgtctacagggtcagggagagggcgagtgagtgaccgtctacaaggcagacatggcctttctgctgctaaatggaaccccctagagggaagagcctc

SEQ ID NO: 292665 - DNA, 122 bp, Homo sapiens
acttttctgctgctgaggaatttgagcccattagcagtgatgaaggccctggaacttatccgggtagaaaaaagaagaaaaagcaaacccagcagattgactacagtaggggttccatatat

SEQ ID NO: 292666 - DNA, 122 bp, Homo sapiens
ccatcgctggccgagggccgacgtgaagcagctttccggtgcggccctgctgggctggctcgccaggcttggcgcccccacgcccgcctcccaggcccagctgcaccgctagcggctccgag

SEQ ID NO: 292667 - DNA, 122 bp, Homo sapiens
ggcatgaggctgcaggagtcaaccagggcaggaagcctggggcctcccctccctggcacccggcatagccatgcccaggcccaagatggccctgactccagggacagacttcaggcaacagg

SEQ ID NO: 292668 - DNA, 122 bp, Homo sapiens
atgttaaattatttaactaaaaaatgcttttgttcctgagatgagcacaataaaattaaacgagcttcctctgaagctgctgtcaggactctgagctcctggttccactctccttatcttca

SEQ ID NO: 292669 - DNA, 122 bp, Homo sapiens
aaagttattagatgatggcacttttatgattaacaacgctaacatgtcgtagcctacctacggtgtattaaatgttcccttgtcaacacacataatttcacatgtccattatcagtttagac

SEQ ID NO: 292670 - DNA, 122 bp, Homo sapiens
cgtggcatcaggagggcagtggttctgtactcatgcagcccgcacacccgtgcccagagacgtgcgctggcggaagccatttctcaaatcggcaattatgaaaacgccctgcccggcgctta

SEQ ID NO: 292671 - DNA, 122 bp, Homo sapiens
ctgctccatccagttcgctcccaggaccccgggcagcggcgggtgctggaccgggctgcccggcagcgtcgcatcaaccggcagctggaggccctggagaatgacaacttccaggatgaccc

SEQ ID NO: 292672 - DNA, 122 bp, Homo sapiens
aacctgagatgccgccccccaccacgaccacgtcgcatttgttgctcatggcgctcgccccgttccaggcctccctggtgcccgctgctccgttttctgggcctcgatcccagtcctgcgtg

SEQ ID NO: 292673 - DNA, 122 bp, Homo sapiens
cgggaggtgaggcgggaggttcagcagacccatgcagtgtgctgccagggctggaagaagcggcacccgggggcgctcacctgtgaaggtgaggctgggtcttccgggccttgcgggaggcg

SEQ ID NO: 292674 - DNA, 122 bp, Homo sapiens
ctaaaacgagaaactaagaataacaaaaggcaaccttgcatccggcggaacctgcaggcacgggccattcttcccgcgacccagggctctgccggaccgcttcccccgtcgctccagtcaga

SEQ ID NO: 292675 - DNA, 122 bp, Homo sapiens
tctcctgcctcagcctccccagcagctgggactgagaagtgataacgtactagcagccctcgctcactctcggtgccgcctcagcctcggcgtccactctcgccacgcttgatgagcccttc

SEQ ID NO: 292676 - DNA, 122 bp, Homo sapiens
atctttacagcagtgtgaaaacaggctaatacagtttatgtggcccacggttttgcaggccgtacaggaagcagggcagcagcatctgcttctagcaaggcctcaggctgcttccactcatg

SEQ ID NO: 292677 - DNA, 122 bp, Homo sapiens
tgacctaacaaagctctcagcaccatttatgttttaggtcacaaagtacttgtggactcccgctcttgcctgagtgaggttcttgccagcatttgtgttgcatctgcaggacacataagtgt

SEQ ID NO: 292678 - DNA, 122 bp, Homo sapiens
cacagaggagcacagctgtgtttggctgcagggccaagagcgctgtcaagaagacccacacgcccccctccagcagctgaattcctgcagctcagcagccgccgccagagcaggacgaaccg

SEQ ID NO: 292679 - DNA, 122 bp, Homo sapiens
ttggccttgatttctgtgctctttctcctcgcggtgattctagctattgctctacgcctgcgacagtctttcagccctactgcaggagactgctttgagtcagttctctgctccaagtccgg

SEQ ID NO: 292680 - DNA, 122 bp, Homo sapiens
ctctcacaccagcccatcggcaagtccttctggctctgcctcctgaacatgtaacaaacccgtctacgtctctccatctctctgctgcagtacaggacttcgctcccatcatctcccacctg

SEQ ID NO: 292681 - DNA, 122 bp, Homo sapiens
ggcgctgggcggctgtgggctgcaggcaagcggtcgggtggggagggagggcgcaggcggcgggtgcgcgaggagaaagccccagccctggcagccccactggcccccctcagctgggatgt

SEQ ID NO: 292682 - DNA, 122 bp, Homo sapiens
agtgggacgagtcactccatataattctgtgaagtcaaccattcctatcaaggagagagtcggggccgccgcgagcgcgtgaaccgtgggctccggggtggtgccgacgcggctgcgggccg

SEQ ID NO: 292683 - DNA, 122 bp, Homo sapiens
tcatctgccggcaatgccatagaggcggtcccgggggcgggccttcttgggtcacgtggacggcctcgccccgcccccgtcgaggcgccgcgcacgtctggagctctggctcgtgcagtagc

SEQ ID NO: 292684 - DNA, 122 bp, Homo sapiens
ttaaggctgagggcccggaagtcccctccccggaagtgaaattggaggcggaaacaggcacggaaagcggtggaagtagcttctgacctttctgaactgtctgggaccctttggtggggtgg

SEQ ID NO: 292685 - DNA, 122 bp, Homo sapiens
tgtgacctcccaagatgagtcgggccacgagcctggcctggggctccaatcactacagcacgctccttccccgagtcggcctcctgggcctcactttccccagctgcacaacagagagtgag

SEQ ID NO: 292686 - DNA, 122 bp, Homo sapiens
cggggccgccgggggggcgcggcgtgtgcatccgcgagttccgtgcggccgagcaggaggcggcgcgccgcatcttctacgacggcatcatggagcgcatccctaacacggccttccgcggc

SEQ ID NO: 292687 - DNA, 122 bp, Homo sapiens
cagactagggtcagactttaccaaagtcagaactcgaggttcatgtaagtccttagatcccgctcccaagccctgtctttctcctccctccttctctcctccctccagctcagtgtggccac

SEQ ID NO: 292688 - DNA, 122 bp, Homo sapiens
aagcaggcttgtgagcctcgtgtcgggggcgttggggtaaggtgctgaggcctgggattccgtgcagtgcttatcctgggtcccgccgcaccggaacaggacgatggctgagccacatccca

SEQ ID NO: 292689 - DNA, 122 bp, Homo sapiens
cctctcatcagtcatcaggagccgtggggaaatcactctgagccccgaggcgggagctgccggcaattgcctgtgattgatagcactaaatatgaaaccgcatgtacctcatccatgcagca

SEQ ID NO: 292690 - DNA, 122 bp, Homo sapiens
acgtgacaatcgcggccaccgccaggtggaacggcaggtgggttcaggtaccagcctggccgggacccggctgtgggaccaacgcttccggtgagcgacagaggcagctccccagggcctgg

SEQ ID NO: 292691 - DNA, 122 bp, Homo sapiens
agtctcgctctgtcacccagactggagtgcagtggcgcaatcttggctcactgcaacctccgcctcccgtgttcaagcaattctcctggcccagccttcctagtagctgggattacaagtgc

SEQ ID NO: 292692 - DNA, 122 bp, Homo sapiens
ctgtggtctccaagtacctgctcctcaccttgtttctttccctgaaactctcaggctgcccgcacagcagaggcaccccaaccccttcccaattctgtccctggcctggtgctgggatggca

SEQ ID NO: 292693 - DNA, 122 bp, Homo sapiens
gaagaaacagcgcatgcgtatagcacatagtggccttgtcactgaggagctgccacttcacgtcccaccccacactccccgcaggacctcggccagttcaattaacaggcaagggtttactt

SEQ ID NO: 292694 - DNA, 122 bp, Homo sapiens
cgatagaggaaaggagcctggtagcgaggagagcggctgaggctcagtgcgcctgcgcggcgcggatgggcgaggcgtgaccgaggggcgaggcgtgaccgaggggcgaggcgtgaccgagg

SEQ ID NO: 292695 - DNA, 122 bp, Homo sapiens
gaaacacgggatttctcttagttgctatagggtcattggaagtctccagcagggagtgaacgcatctgatttacctgttgaaaggatcacaatggttccctaaggggggcccaggaccagct

SEQ ID NO: 292696 - DNA, 122 bp, Homo sapiens
gcctaagcagttctgatgatttgatagttgaaatgtttatgcttttgttcacttagataacgttcttaggacatctattttaaacaacagataatcgtagttagtactgagggggctgacat

SEQ ID NO: 292697 - DNA, 122 bp, Homo sapiens
gagcaagcagaaagggagatttgcaagagttttaatgagacgaggagggagaaggaaccacgaaaatgagggaggagggacaagaggatcaacataaaatgaatatgaaaaggatatggaat

SEQ ID NO: 292698 - DNA, 122 bp, Homo sapiens
tacccagcgcctctgcccctgggttgcagggactgcgggcacgcgggctaggaaaggcctcgccggaatctccctcctcgcgttctaggagtacgtgctccctctgcgcccccaaaccgacg

SEQ ID NO: 292699 - DNA, 122 bp, Homo sapiens
tcatcgcctccgactggctggttggggggaagcaggctgtgactgcctcctgggaccggacggcaaacctgtacgacgtggagacgtccgagctcgttcactctctgacaggtgcctgggtt

SEQ ID NO: 292700 - DNA, 122 bp, Homo sapiens
tgtaggagcagtacgagtcgcggtgttggttcaccagccactcccacttggtggtgtcggcgtggcccgtgccgatgtacttggactgcaggtgctccagctggctatggatggtgtagcgg

SEQ ID NO: 292701 - DNA, 122 bp, Homo sapiens
cggggaaccgggctcagcccggtgactgtggcccggcgaagtccccccggaagcctcgcgcgtccacctgcacccagcccctgaccttcccagcggggagcttcaatgaccactcgcttccc

SEQ ID NO: 292702 - DNA, 122 bp, Homo sapiens
tgtggttacaaaccagccaaatggcttacgtttgtatttattttctattccatacgtctccgcccaatgtttttcctctcaaaatcccttcctttaaaaaataaatctgttgcagatgtggg

SEQ ID NO: 292703 - DNA, 122 bp, Homo sapiens
agttcattgcggccgcgcacgcccagctcggggggaagaagacggcccgcaccagagtcgcgtcgctgccctgcgggatcgcagcgccaccccttcggccagcccagagccgcactgccccg

SEQ ID NO: 292704 - DNA, 122 bp, Homo sapiens
gctagccccattctggctcacttttttctttttttataggacgcccattgcaatgcgagccggcagataaaagccgtgacgtgctgtctgcccaagcgcaaggatcgcctgcaatcccccag

SEQ ID NO: 292705 - DNA, 122 bp, Homo sapiens
tccctccctcccttccgtccttccttttttgcaaaaccaatgcaatcactcttggggtctcgggggcaatgggatcacgtcaggctcaggcgctcccctgggcgcacgctgggtgaacaagc

SEQ ID NO: 292706 - DNA, 122 bp, Homo sapiens
gggggatgcagacctgagcctctcccgggttttggcaccaaaatgtaaggttcttgtatccgtttgaaccccgagagggagccaacagacaacacgacgcggtgtggagcaacatgctgttt

SEQ ID NO: 292707 - DNA, 122 bp, Homo sapiens
agtgaggctcctcagtggctccagctaggccaccgcctgttgtggggatggttccctcagcggccctagtcatacagccaactggctgctgggctttttggcattgactgtggttggtttgt

SEQ ID NO: 292708 - DNA, 122 bp, Homo sapiens
agctgagctcccagagagggacggacctagatcttcatcgggcgcccctttctcatctctcgggctctgactcctcttggggtgcttagttcaaggctggacagcctagaagacacccacca

SEQ ID NO: 292709 - DNA, 122 bp, Homo sapiens
tgagattactaaggaagacaaaatgatagccaacatgaacatttccgaaggctaggggtccgtacgctggagtgagccattctaagataaatgtaggctcggttctttttgtaaatgggact

SEQ ID NO: 292710 - DNA, 122 bp, Homo sapiens
cggcctggcccggccggaggcgctttactaccccggtgagtggcccccgagggtccgggccgggtgggatccacacagagcatagggtcaccagagccaggaggcagagcttgaggcacaaa

SEQ ID NO: 292711 - DNA, 122 bp, Homo sapiens
ggaaggcagggtgttggatgagtgctgacagctgtcccgaatgtggcatcttgtttcctacgggcccaggtctgcttagcattacacagtgcttagcttcgttcaggatgtggtcagtgttt

SEQ ID NO: 292712 - DNA, 122 bp, Homo sapiens
agggtgcagacggcgtctccgtttccacggaaacaggccgagccatgtcgtcacttccgccgacctgtctggactccagactgttgggaggaaaagaggaaaactgagcaacagccacgaca

SEQ ID NO: 292713 - DNA, 122 bp, Homo sapiens
tgcgggaggacggagagaaggcggcgcgggaggtgaagttgctgctgttgggtgaggccgcgtcccgcactgggatccttgattcccagctcgaatccccagacaaggactttgacctccca

SEQ ID NO: 292714 - DNA, 122 bp, Homo sapiens
actgttccatttaatcaaataccatgcaaactattaagagctccctctgactttaacagccgatttcccagagaaagagcaactcgctactaaaagatcttaataatacacagggcctggag

SEQ ID NO: 292715 - DNA, 122 bp, Homo sapiens
cccccactgcctagaacagagctggtatattacaggcatttgataaatatctgttgctcacgcaagcattcaaccactatttattcagggcctactactatattccaggctgcatgttaaaa

SEQ ID NO: 292716 - DNA, 122 bp, Homo sapiens
ttgcatgactgtttctctttgattcatgtgtcaatgaggttagggtcatgtagggaaagtcgtgtcttactatctttgtacgaccaaagaatatgtcattaaattgtatggcaaagaaccag

SEQ ID NO: 292717 - DNA, 122 bp, Homo sapiens
gacggagttcaggctttggaagtagacagacctgggttcaaatcacagctccgcttcttccgcctgaagctccataacctaggataagtcgctaagcctccccaagtctcagatttcttacc

SEQ ID NO: 292718 - DNA, 122 bp, Homo sapiens
agccctgcgcacccagcacagctgggagctgatcgaagcgcttggggccgtcagggggcgcgggcgtccctggtggggccagttgtacgctgcggcggtcggcggagatgagcaggcggcgg

SEQ ID NO: 292719 - DNA, 122 bp, Homo sapiens
tgtttgctgtggttgctttaaacgagtctcatcttctgctctactgttgctccatctcctcgctcttcctttgtgcttattatcctctatgttacatctatttgttataactccaacaatac

SEQ ID NO: 292720 - DNA, 122 bp, Homo sapiens
cctccctcgaggggcacctgacctcgcccagagcacaccgggggtcaggtggcagcagtccggcccgacgcccatgcagcccaggtccctcgacttgatccgaggcagtgcctcctccacac

SEQ ID NO: 292721 - DNA, 122 bp, Homo sapiens
cttattccaaaatgaaacccaatgtttataggaccaagccctgaatcaaaatgttttcagcgaagttaaattaaaagtcattataacttttaaaagccaagcatgtattcttttttcccatt

SEQ ID NO: 292722 - DNA, 122 bp, Homo sapiens
agatttcactcgagtgagcatattactccggcgcccggctgcagcggtgcgagcaggaggcggcgggggccgggcaaggcgcagcgcggggcatgcaggctgcggtgggcgccgggcgcacg

SEQ ID NO: 292723 - DNA, 122 bp, Homo sapiens
ggaccgcgtacaagatggcggcgcgtcacgtgggcagcgcggtgacgcaggacggcggcccgcgcggaggcagcgccatagcctaccccaaacgcacactagtgctcagttttgcccccctc

SEQ ID NO: 292724 - DNA, 122 bp, Homo sapiens
ttttctgcccaggcacaggtctttcttggtagtatttccatgcagctaaaaatgcatgcacgtgaataatacacaagacagcaacagagtgtggggcccatggcaggaaagaggttgcattg

SEQ ID NO: 292725 - DNA, 122 bp, Homo sapiens
cgtgatctgcctgccttggcctcctaaagtgctgggattacaggcgtgagccaccgtgcccggcctggcagagtttcttttaaaggtgaggagagtctacaaatgaaagcagtagggaagag

SEQ ID NO: 292726 - DNA, 122 bp, Homo sapiens
tgtttcttactctacatactcttctggttctggcctttgttatacttgaaacttctcccccgtattagcccgttttcatgctgctgataaagacataattgagactgggtaatttataaaga

SEQ ID NO: 292727 - DNA, 122 bp, Homo sapiens
atcactgagacacctagcggaaaacagctaattctttctaagccgcccaaagcggggttgcgccggggcctccggggccgaggtgggcctgctcattggaagatcgcatcgcagccatgagc

SEQ ID NO: 292728 - DNA, 122 bp, Homo sapiens
ctcaggtctagatcccctagtacctgagctggaggcggggccaaggcgaacttgaccttgcgctcccttagcggccccgggcagatggagtctgagggaaacagatctgcgccccgcccctt

SEQ ID NO: 292729 - DNA, 122 bp, Homo sapiens
gtgcactctgcgcgccaggcttgggcttggccccgcccccggaggcgcccaatcagagagcgcagccaagcatgggccgccaccaaacgcacccgcgctattggctgcggcgcagcggcggg

SEQ ID NO: 292730 - DNA, 122 bp, Homo sapiens
ggtcgctgtctccttgcgctcgccactggctctctctgcggcaggtttccctccggttaccgtgaccaaaggggaaagacgcctgcctccctgcaggccccaagatgtgccccaggggatgc

SEQ ID NO: 292731 - DNA, 122 bp, Homo sapiens
tataagaagttacagaccttataagagttcttataaagcttgctttacagatgagaaaaccgaggctcagagaagagccctgttcaaacccacacggctcctatggaacagaaggcttgctt

SEQ ID NO: 292732 - DNA, 122 bp, Homo sapiens
ctggcggatcccgccaggccccgcccacccgtcctaggcccgcctccccgcctttttaagcgagcccccctagctccgattggctgctggagcccggcccccggccacgcgaccaggctgcg

SEQ ID NO: 292733 - DNA, 122 bp, Homo sapiens
gcagaacctcgctctggcgtttacaatgccatctcccttcgtcacagcacgacaccatggcggcagtcacttccgctatgcctcacgacacttctgctacgccttgcatcacttacggtgca

SEQ ID NO: 292734 - DNA, 122 bp, Homo sapiens
gtttgacaagaagaccaaggtgtcttcaaagtctgccctaaggtccagatctcctacccacgtaggagacttctagtttcacaaatccccgatgtcggtttctctaaactattttattcttt

SEQ ID NO: 292735 - DNA, 122 bp, Homo sapiens
tagtgatgtccaaagcacggccttcgtagtggagtgaatcctgagcgtggtggccgtcctcgtcccagccctcagtcactcgtaggcgcactccgggccacatgttcatcacggcaatggcc

SEQ ID NO: 292736 - DNA, 122 bp, Homo sapiens
gcctcattataccctcccccctttctgaattcaggaaaaactcactagcactaccatcaacgcagactttaaaaccaatagaacagactcactaattttgataagaaacatttacaatctat

SEQ ID NO: 292737 - DNA, 122 bp, Homo sapiens
gagcttctgggaaaaggatccctcctagggggagtgtcttgggcctggggccacgtggcacggagagagacgggtccatggcagtgtctgcttttctctgtgaaggcaaagggcctctgagg

SEQ ID NO: 292738 - DNA, 122 bp, Homo sapiens
cgtgatccgaccgcctcggcctcccaaagtgctgggattacaggcgtgagccactgtgcccggcccataatctgaaatgtttttgatttgtgacttaattgaaaaacttacagatttttact

SEQ ID NO: 292739 - DNA, 122 bp, Homo sapiens
aggaataagcccaaagcgcacaacccgtctttcagaaaagcggcgtgacagggaaaacagcgaacagctctaaggggaaaaaaatgctccaggaagcagccacaaaggcgtctccgcgcgaa

SEQ ID NO: 292740 - DNA, 122 bp, Homo sapiens
ggcagagctcaagtccagcaccgtgggtgagcagggtgcgggtgcccctcacccgggccccgggccactcttccgctggccctgcgactaccttgccccttgtgcctccttgcttcaaaggt

SEQ ID NO: 292741 - DNA, 122 bp, Homo sapiens
gtctgactttaaatacacccttttaaccaccgcccttggctgccccggccgcctcacgaacgtaagcagagctctctctgggttgaaggaagctagagaatttacattccctgtatttccca

SEQ ID NO: 292742 - DNA, 122 bp, Homo sapiens
catttacgcagcaacgctttccgaagagcgtgtgacgtatgtggcgcgacggcgcgacggcgctcgcgggggcaggatacatgcgtcatatcttcgaaaatcaggattagggggtcgggcgc

SEQ ID NO: 292743 - DNA, 122 bp, Homo sapiens
aaggcccgcagtagcaccagcagcaccaaaggacttgttggaaacaccagttttctaggccgggcacagtggctcatgcctgtaatcccagcactttcggaggccgaactcctgaggtcagg

SEQ ID NO: 292744 - DNA, 122 bp, Homo sapiens
ctccctggactttgaagcccaataggcagctaccggatctgcgtcccacttggtttaaagcgcaacttttaaatgaaagaagaaaaccccggttgacataagggatttggagaggacggcgg

SEQ ID NO: 292745 - DNA, 122 bp, Homo sapiens
gcgtgtgtttgtttgaatcccaccgtgctcagggacaggcggttacctgcgaatccgctccgcttcctccctggtgatgacgacatcggtgacacctctgccgcactttcggggagtgcagc

SEQ ID NO: 292746 - DNA, 122 bp, Homo sapiens
cgcgtaacgctgacgactataaagcgcgccggagcgccagaaaccgtcagggaaactgcccggtttggactgatgatcggaagcaagaaggcccttcgagaataaccaaagagtgaagggaa

SEQ ID NO: 292747 - DNA, 122 bp, Homo sapiens
tgacttcttgtgtacttaatagttactcacttgaatctcatctaaagtcattacagaatccgctaacaaatgtctcatatcatagatagcactgtgaggtaaatgaccttttgaggattcta

SEQ ID NO: 292748 - DNA, 122 bp, Homo sapiens
cggcccggcccggcgagaaagccttaattggtaaaattgcccaggagcccgggacgggtgcgtggggggcgggggtgcgggggcacgccgtgagctccagcgacccgccgccgggcgacgcc

SEQ ID NO: 292749 - DNA, 122 bp, Homo sapiens
cagacccacaataaaaaaagctgtggattttggaacattcccgacttcaggttttcgaatcggggaggctggacctgtatacctttccccctcatccatatgacaaacccggtaggtcgaca

SEQ ID NO: 292750 - DNA, 122 bp, Homo sapiens
gagtcagccagggtgtggcaggcaggttggttaaccccctccacagacaagaccacagaccgatgctcaacttgcagcagcctctgcctcaccccttaaaggagctgattatagattccctt

SEQ ID NO: 292751 - DNA, 122 bp, Homo sapiens
tacacccagctcctgccgagacgtgaccttacagctggggtccttggggctccaaaagtgcggcttccgcgcggatcccattcctgcttgctttgaggctgctggtgagcggcgcctgcgca

SEQ ID NO: 292752 - DNA, 122 bp, Homo sapiens
caaaaccagataataaagtagttgttattcatgtaaataataatattgataaataaaatacgaggtattacaaattattgctgataattgagtattagaaatgtgcatgtaacttccagatt

SEQ ID NO: 292753 - DNA, 122 bp, Homo sapiens
aacatggcttatgtgatgcttagtgttttggaaccatcaagatctttgcaatggcatcaccgataacaaccccatcatcttgtaaaacatggacatgttgggaaataatgttttagttcagt

SEQ ID NO: 292754 - DNA, 122 bp, Homo sapiens
cggaacccggttctgttgctcaccataaagctctgccgagcgccctcaggtgagcagaggcggccctggcctatcactgtgtgccgaggaccaaccccagggcagagatggaggctgtgctg

SEQ ID NO: 292755 - DNA, 122 bp, Homo sapiens
cttcccacccctcgttctaggtgaaggccgcgctggaatcccggccggcttcccacccctcgttctaggtgaaggccgcgctgcaatgccagccagcttcccacctcattctaggtgaaggc

SEQ ID NO: 292756 - DNA, 122 bp, Homo sapiens
tgtgtgcaccctgacctctctctccttcctccaacgtcctcctcccgtccgccaccaaagcgttattcctcttggtcaaaagcacccttagctccctgtggctgcgaacagctgaccttgac

SEQ ID NO: 292757 - DNA, 122 bp, Homo sapiens
aaatgtatgtattatttaaggtcaattttagtggtttaattctgtgatccatgtatttcacggcacatgataaatcctaataaggttagggattagtatcatcttagatacccatttagtgg

SEQ ID NO: 292758 - DNA, 122 bp, Homo sapiens
ttcgtgtcagtgctctggttccctggagcagggcacgtgggtggctcatccctgaagtcacgttctccctttgtgtctttcagtgagctcttccgcccatgagggccccctggccttgagca

SEQ ID NO: 292759 - DNA, 122 bp, Homo sapiens
agcgtttcctccaaagtacaaacagctgaaaggtggtgtgctggccccacctgaatcactcgcaactccaaagaggtgtgtgatgcaacttcccatttccacgggaaaggactgcagagaat

SEQ ID NO: 292760 - DNA, 122 bp, Homo sapiens
gtcccgagccctgccccgtggggaggcagctaaggcccggcgagaaatcgagtgcagcgccggtgggccggcactcctgggaaacccagcacaccctccgcagccactggcccaggtgctaa

SEQ ID NO: 292761 - DNA, 122 bp, Homo sapiens
gggaaaccgcctttgtcttggcctttccggagtccttcccagccttaccgtcagccatttcgagttctgctgaagctcaagcaaggcagagaaagggctaatcagacccgtggtgagatccc

SEQ ID NO: 292762 - DNA, 122 bp, Homo sapiens
tcttctcctgcgagtgaacacaagctcacaagagcatgtctccacgtgctgtcccctctacgtgttggcattgcaaagcatcaggccagtaagctgtgaagtgcagctctcaggctctgagg

SEQ ID NO: 292763 - DNA, 122 bp, Homo sapiens
tcaggagcgtgaatggggctgtttaaacacaatttacaatccagaacaactattgtctctcggttgattagtcatttattcacagctggaatttacacaattctcagttattgaaacagcta

SEQ ID NO: 292764 - DNA, 122 bp, Homo sapiens
tggagccagtctagctgctgcacaggctggctggctggctggctgctaagggctgctccacgcttttgccggaggacagagactgacatggaacaggggaagggcctggctgtcctcatcct

SEQ ID NO: 292765 - DNA, 122 bp, Homo sapiens
gcggcgagtcctaggcgctcgggtctgccgccctctttatacggtggccctgaccgcagccggcagccgagccagctcctacgtggagcatcgaggccactgggcttaactcgctcgcgccc

SEQ ID NO: 292766 - DNA, 122 bp, Homo sapiens
accagtcctgtcaccgcactgagagaggctgtaaacggcacatgctctacggggagaggccgcgggcgccccggcccggaccccgaaaacaagacacatcaccaccctcagagttccattcc

SEQ ID NO: 292767 - DNA, 122 bp, Homo sapiens
aagcatgaaagtaccaagctctttcgcctagaagaacgctttcaaagcgtatcaaattcacgggtttggagacaaagagaaagatgctgctcttatcgacttacgaaaagctccagcagcaa

SEQ ID NO: 292768 - DNA, 122 bp, Homo sapiens
tccgggcgaggagatcagcaggggttttcgagggagcctggggcccagggcaggggtacgcgggtcaactcaacagatgtaaggcgtggccgaaccccattcagctagcagtacccagcctc

SEQ ID NO: 292769 - DNA, 122 bp, Homo sapiens
tatgagctgtaacactcaccgggaaggtctgcagcttcactcctgaagccagccagaccacgaaaccagccagaccacgaacccaccgggaggaaccccacggggaggaacgaacaactcca

SEQ ID NO: 292770 - DNA, 122 bp, Homo sapiens
tccaagggccgaagcacagccaaacaccccacggaacttaacaaatgtttgtggggagaacgccgaaaacgcggggaggcggggctggcgcacagtcaccctctcgcgacatctaagtgacg

SEQ ID NO: 292771 - DNA, 122 bp, Homo sapiens
gaaaagctaactccggaaaaaacaacaaagccaaagccacaccttgtagcattagcaaagcgtgtctgctggaaatagagcaaaaagaaaaaaaacgccggtggaggaaatgtcaggaggga

SEQ ID NO: 292772 - DNA, 122 bp, Homo sapiens
tgcaacacttcctctgcatctggatatgaagggagccccagaaaagcggaagaatttagacgcacactgggtaggtttgaatttgttttgttttcaaaaattaaacaaatgatccttcagca

SEQ ID NO: 292773 - DNA, 122 bp, Homo sapiens
accggcctggcctccccgcgcagaatgggaagaaggggcgccctcgctgtgcaagggagacgcccccaaccccaccagcatcctctgggcagtcatctcaagggtgactttgtcgggggtgt

SEQ ID NO: 292774 - DNA, 122 bp, Homo sapiens
gagctaatgctgctgcttcttccagttccaggcccgagcagggaggtggatccagagtttcgcccgtctcagttcgacgcacgggactcctggcggcggggagggcgttaaagccgtatcta

SEQ ID NO: 292775 - DNA, 122 bp, Homo sapiens
agaaaaaagaaggaaatactgggggaggcacagtaggagatcacagcaggggcccacctccggaacctcaagtaaggacttgagagagaaggtagagtcagagtaacagagacacaggcggg

SEQ ID NO: 292776 - DNA, 122 bp, Homo sapiens
cccccaccggtaggatccacggtgcggccccccagttggggggcctagacaaacttgatgcgtggctcctcctcctcccccactgcctgggtggggggaggggcaggcccctccccctggcc

SEQ ID NO: 292777 - DNA, 122 bp, Homo sapiens
ttttttcttttaataagctgtttaagcagaccttgtacttcactttggacatgattctgccggggaaggttttaatcaggcggcttccccagtaaagtttgtatgtttacttagaagtatcc

SEQ ID NO: 292778 - DNA, 122 bp, Homo sapiens
cctgcttcatgtctcagcccagacgggtccttgcgacgcgccccgaggcaggttattgtacgtggttctggggatgaccgttcacatttaatgaataaaaatgtaacttgccttgcgaacca

SEQ ID NO: 292779 - DNA, 122 bp, Homo sapiens
tactaacggggatatgaacaattgttcactggaagaatgcaggagatttgattacacttgcgctctgaaaagaagtgggtcatatcatttatataaataaatatttggcacagactctgaag

SEQ ID NO: 292780 - DNA, 122 bp, Homo sapiens
acggcccgaggggcggggaaacacccatatttggccttatatgggcagccgcgtcacggacggcactcattcacataaaacgctgcgcggccggcggaatccccggcttctagggcggcgag

SEQ ID NO: 292781 - DNA, 122 bp, Homo sapiens
tcgcttcggcccccctcaggaggctgcgaggagggtgggtttctccccagtgtagaggtacggggcgagggtcgcggggccctgaccctacggcagttcagctcacttcagcccccatcgca

SEQ ID NO: 292782 - DNA, 122 bp, Homo sapiens
gtgattaacggatgatgtcacaaaagcatgcattggggaaaaggcaatagatttatctcacgcaggatatggccagaaaaaaaagaaaaccataggcccggtgcagtggctcatgcctgtaa

SEQ ID NO: 292783 - DNA, 122 bp, Homo sapiens
aatctaaaacagagggagtgaagataaattgacttccaaactgctttaaatggttgtagtcgtttaagttcacaggaaatttaacaggctagtaatgaacagacagccctttcactctattg

SEQ ID NO: 292784 - DNA, 122 bp, Homo sapiens
actccagggagctgcagcgccggaggacggcgggcagccccggggctgagctactgcaggcggccagcggggagcgccactctctgctgctgctgaccaaccacagggtcctctcgtgcgga

SEQ ID NO: 292785 - DNA, 122 bp, Homo sapiens
aactctggtgcctcccaggaggcaatcctccatgatgcgcgtgccatggccatctccacacggaccaagttccagaggatctgtcagcatatggtctaaggaatccattgtttcttctccac

SEQ ID NO: 292786 - DNA, 122 bp, Homo sapiens
ggggggctcctgatggaggcacagactggggcctggagggccagtgctggtgggagggctcgctcgcctcccgtgggccctggtgaactcggccccagttgggaaatggccctgggtgcggc

SEQ ID NO: 292787 - DNA, 122 bp, Homo sapiens
ttgcttatactaactcttgtgaatttctgtcacttacaagtaagaaggccaaaaatcacacgtttggcctccctgaaacctattactcaagtaaggttggctgttggggaagagggcttggc

SEQ ID NO: 292788 - DNA, 122 bp, Homo sapiens
tcaccggtacccagaaactacaaaaataagctggtgagtctcctgtggcgtcgggtgctccgaggccggctaagtgcctcctcctcctacttgggccagccaggctcctggaggaagacagg

SEQ ID NO: 292789 - DNA, 122 bp, Homo sapiens
acatggaggtgcaaacagaccgtcacctactctcatgccaatcactgagctttggccagtcgcaggtggtcaactgttcaaaccgtgttcaaataagacaaatgccgagctgccgccaatcc

SEQ ID NO: 292790 - DNA, 122 bp, Homo sapiens
ctaccagccctgaaccgggagtggaggataccgaggcagctcctgttcctgaggagcccacggtttaggactggagatggacacgcagtgcagccccttagattacagagcacagcagcatg

SEQ ID NO: 292791 - DNA, 122 bp, Homo sapiens
ggtgaagtacacatttccaaggctgcttaaacccccatgaccaagtaactgggtcctgaccggggaggtgttggggaagctccttgacaaaagagccagagccagagccggcacgtccttcc

SEQ ID NO: 292792 - DNA, 122 bp, Homo sapiens
aactaccagggttgtccgccggcgagtgattattcaggtacccactgttaaattactgcacgtcagggacagtcctgtccccatattctaagagtgatcaacctggatcaatgaaggcttgg

SEQ ID NO: 292793 - DNA, 122 bp, Homo sapiens
gccagaatctcaatttcccggggaaggaatttctccaagaagtctgcgggggccttcttgcggtcgatgatcttgatcgccacattgaacttcaggcgctcagagtaagcagattttacttt

SEQ ID NO: 292794 - DNA, 122 bp, Homo sapiens
ggtgtaggacggttttgaggccttcctctttcatcccaagtctgttcctgcaggatcatgcgcgcacagcccagtgtggtgctgagtgcggcgcacacggtggcagccaggatgtcgccctt

SEQ ID NO: 292795 - DNA, 122 bp, Homo sapiens
ccaaggcaaagcaacgcccttatatgccgggaattcggacctaattgaagactgaaagcgcgcataccggaactttggtcctgcttcttggccccaccccgcatagcccagccctggatgac

SEQ ID NO: 292796 - DNA, 122 bp, Homo sapiens
gctttttataaggctggggccctgttgcaataagagtccctaccagacttcttccctccccgcatggtgagtttgggggtggtgtctccagcctgaaggaggggcagggatttggcaaagtt

SEQ ID NO: 292797 - DNA, 122 bp, Homo sapiens
tagcctctcattggctcccgacaagaactttttctgccttggcttctaattggtggctttcgcctgcaccttccacgggtctggaatggctgcccctttcggtagcacggactctgcgcctc

SEQ ID NO: 292798 - DNA, 122 bp, Homo sapiens
aggttaatggctggggcagaggcccagggaggccaagagcaggacgtgacacaagggtttcggaaggatccccgattttgaacgcttgtggggtgagaggggtctgggtgagagccaaggag

SEQ ID NO: 292799 - DNA, 122 bp, Homo sapiens
cgcccagattcctcccagccggcccctcctccgcgcctccgccctcccctcccccctcgccgtgtgtgtacaacagctgaggcccggcgagctaatgctggaagtccagagctgggggtgga

SEQ ID NO: 292800 - DNA, 122 bp, Homo sapiens
aagctgatttttaaaaacaacagccgccggccagtgctgcaaagaaatagccaggccacgcggctgacagtgtagcgtgcacagtgggcgccctgcagggctgcgtggcagaacagttgagc

SEQ ID NO: 292801 - DNA, 122 bp, Homo sapiens
acccggttctagaagccgcgtcgctgagccgcagcgcgtcgcgcccgggcagcgggtgaacgcaaaccccgccctccaggaggctccgcccctgcgccggcggttgctaggcggcaagaaag

SEQ ID NO: 292802 - DNA, 122 bp, Homo sapiens
ctccgcaagcggatgaacagcaacccttcccgaggcccctaccccctccaggcccccagccgcatcttctggcagaccatgcgaggtatgccgccccacaagaccaagccaggccaggccgc

SEQ ID NO: 292803 - DNA, 122 bp, Homo sapiens
acggggtaccaggaggctcagggaaacagcgcaggcgcctccccggtggcttctctctggcgccctctggtgggcggggcccgggtgagcggggtcccctcggggcctcagggagccgcagc

SEQ ID NO: 292804 - DNA, 122 bp, Homo sapiens
gtggatgtactagtttcctggagcttctagaatagaatatcacagactgggaggcttaaacgacagaaatcattttctcacagttctggaggctggaggtctgagatcaagttgtgggcaga

SEQ ID NO: 292805 - DNA, 122 bp, Homo sapiens
cgactgggcctggcctcggaagcctatgcgagcgccattttgtcctacggctccagtcaccggagatcctggctcctggaagcctgcaggaaggagactgactctgacactgctttgaggcg

SEQ ID NO: 292806 - DNA, 122 bp, Homo sapiens
tcttggacttttgccactcttggaaaagcagaaaaatttccttttgacttcccaactacacgaactctttcagggcagcctggttttagctccagggtagtctgccatgatgctcagggcca

SEQ ID NO: 292807 - DNA, 122 bp, Homo sapiens
aacaggatacagaaagtggcagcgccgccaggtgatccaggaggtcccgcgagggggcaacggacacttcagggcaccagagtttgctcttcggcctgaattccctagggaccttctgcgat

SEQ ID NO: 292808 - DNA, 122 bp, Homo sapiens
tcagccccccaaagtgctgggattacaggcgcccggcctacatgtttattgtttaaaaaccgggaaagtatagagaagaaagtaaaggctccccacccctagagataaccgctgaaagtatt

SEQ ID NO: 292809 - DNA, 122 bp, Homo sapiens
agcttgaggctgaagctgacaatcttaagagaccttagagccgccaagctcaggttagtccgttaagcgccgcccagccagtcctccccgtcacagggggcgctgtccgccttcctctcgcc

SEQ ID NO: 292810 - DNA, 122 bp, Homo sapiens
aattggtcgcagccggtgctagggaaagacaggctcccagtagatagaaaacacctgaaacgggtgataagcagcttcccggtaagatcttagcagttgggcgagtgtactcaagcatgagc

SEQ ID NO: 292811 - DNA, 122 bp, Homo sapiens
gacccccttctacttgcccggccctctgccacgttccctctgtacaagtaaggaattttgcgctccttaggccacactacacttgtttactctgtcgctacatttacctgaataactttatt

SEQ ID NO: 292812 - DNA, 122 bp, Homo sapiens
ttagacattgctttggaaagaattcctgtattagtttatagaagatgagaggtcacttgacgaaatgggtgacagaactaagacaatggagaaggtaactggctgatctcttttttttacac

SEQ ID NO: 292813 - DNA, 122 bp, Homo sapiens
ccaatcagggtctataaaccattccaatctcatcatcctcttgatatctcttctcaaatacgtccaacgccaaacccttctcagaaatgaggagcaaatgacagtttagaaatgacttaaat

SEQ ID NO: 292814 - DNA, 122 bp, Homo sapiens
ggctgccccagaggaagacaccaagcagtggtggatgttaaaatagcctctgggtctcctcggagtacaagatccccaaaggggagccccgtgatgtggccccagcaatgacattatcacct

SEQ ID NO: 292815 - DNA, 122 bp, Homo sapiens
tcaagagcccctgcaccccaagtcagggtactgcacctaccccttggggagaccaacgaccgctcggtcctctgctgctcctgcctggcggttgctaggagccggggaagcgcaggcgcatt

SEQ ID NO: 292816 - DNA, 122 bp, Homo sapiens
gctctcaccatctcagggcagtaccactgctgtgcggctgtcagtcagtgctgcaggcgccgagaggaggggcttgtgaccgccccagggaagctgggcatcaccaaagggagcttgtttgc

SEQ ID NO: 292817 - DNA, 122 bp, Homo sapiens
tggatttatggaatctttaaggtccttctcaaaagaaccaaagagctttgactagcctatcgagataaccttttttctaaggttaccttttccttttgtaggtatattttagtctacaactt

SEQ ID NO: 292818 - DNA, 122 bp, Homo sapiens
gttagccacgccgagaagggctttacaggcaaagaagtctgcgactgttgggaggaaaaacgtcagcagacaagctgaaatgtcaagggaattgtgttagctgcagaggcaggaaaatggga

SEQ ID NO: 292819 - DNA, 122 bp, Homo sapiens
acctctccgggattcaagcgatcctcctgtctcagcctccccagtagctggggccacagacgtgcaccaccaagtccagttgcgtttcatagttatagtagagaaggggtttcgtgatgttg

SEQ ID NO: 292820 - DNA, 122 bp, Homo sapiens
ggccttccagggtgagtggtggcttggggtgcaggctccagaccccccgctctttgctgccggccagggccagatgcgcggggtcccctcccacgcgtggaactgcagactgggggcctgga

SEQ ID NO: 292821 - DNA, 122 bp, Homo sapiens
atgactggcaaagaaatcctgcatgtttatcaagcaaattgaaaaacagcctgaggacaacgctatctgacttcaccgctgggtccagtccccagtcgccacgggtggagtgacctccagca

SEQ ID NO: 292822 - DNA, 122 bp, Homo sapiens
caccgcccgctgttcgtatgtccgaggtgacgccccgctgtggcgggctggcggaagtgacgcgctgctgtggcgcgccggcggacgtgacgccactgtcgctgcgacgataaggcctggcg

SEQ ID NO: 292823 - DNA, 122 bp, Homo sapiens
tgtctccctagcccttacctccctgcacattccaaataatcttttgtaattcactgtctccgcccaccccatttactttatgccactcctagttactgtcacactaggaagaagtctaacat

SEQ ID NO: 292824 - DNA, 122 bp, Homo sapiens
atcatccagccctgcagagtcacctgggtttatttttacttctgtttgcttctgaaaatgcgtgtggatttccagaaatgacccccgcctcctaccccacttcccgcagcctgctctggaag

SEQ ID NO: 292825 - DNA, 122 bp, Homo sapiens
atcagggggaaagctggccacaggaaccactaggtgtcactaataggccaaagttagaagcgcggaaaaggaaaggctaaaagaacaaatgaaggaaggaaagaaaaggtagtacctgccct

SEQ ID NO: 292826 - DNA, 122 bp, Homo sapiens
ctgggagccttcccagccccacagccagatgccataaaaggcagcacagggcatgtctggcgagcctgtggcagccagggctgtcatacacgctctccaagccccccagctaggcagatgtg

SEQ ID NO: 292827 - DNA, 122 bp, Homo sapiens
tggaggcggcactgcgagaaccccggactgggcgctgcgaccgcagactcaaggtcgcggcgcctcagggatcactgggggcttgagtgagccctgaccctctcctgggccttcctatgcag

SEQ ID NO: 292828 - DNA, 122 bp, Homo sapiens
atggggctgttttgctgtgggagtgggttcagaggatactgtgtgatctgataactgcagcgtcttcgagctcccactatttagcattccccaggccctcggttatttccagtccctcctgt

SEQ ID NO: 292829 - DNA, 122 bp, Homo sapiens
cggccgcccccggcctccgcgccgccttcctcccgggagcagccccgacgcgcgcgggcccggaccgccggggttgtcatggcagcagctccatccctgaccgccactttctcccggtgccg

SEQ ID NO: 292830 - DNA, 122 bp, Homo sapiens
ctcaggggaaagcgatattttgttatggtggccctagataactaacatcatgtttcagcacgacctctgactcaccactggcatgggcagattcagaagaagactcagactgaatagggctt

SEQ ID NO: 292831 - DNA, 122 bp, Homo sapiens
aaggttaatgtggggggccgcgccttggggactggggacccgggaagagaggcgcggggccgagtcccacccaggcctcctgggcccttggggctattcctggagagagcgcgaaaatgccg

SEQ ID NO: 292832 - DNA, 122 bp, Homo sapiens
ctccccagcccccggcggcgcgggctgagagcagctccgtctaaggccacgccgccccggcgtccccgacagcgctctccgcggggatagtttccagctttacctctaaagaggcggcccag

SEQ ID NO: 292833 - DNA, 122 bp, Homo sapiens
ttgcagtagaacgtatcccaaccccagagggtgggttctggcttccctgcctcagacctgcgggcaggtccgggaacccgacagggacagagaagcccgttttccagcctaaatagaagctc

SEQ ID NO: 292834 - DNA, 122 bp, Homo sapiens
ggtccctgccatcggggagattgtctggattgcacctctgcccggaatagaccagggagacgtgtgcgcgagtggagtagcttcttctagcgctggggataggatggttataaataggtccg

SEQ ID NO: 292835 - DNA, 122 bp, Homo sapiens
tacagaaactgggctattccctttcttcaagtgaaggctgtgggatctattactgcaggccggtgtatataccatacaaaagaggaccacacatctgttggtcacagagttcatgtcacacc

SEQ ID NO: 292836 - DNA, 122 bp, Homo sapiens
aacaccttcctttcaggttcttaacttgggggacccatagaaccttagagaggcaatgcacggggattcaggaattctctggaatccgttcagaactgagtgctcggcacttcttctgggaa

SEQ ID NO: 292837 - DNA, 122 bp, Homo sapiens
ggggcctgctcactgacgagttgccacccgggattggggtaggggtgggcgcggtggtctcgggctctgagcggctctgcaccggcaggagcaggactggcagcagcagcagcagcgccagt

SEQ ID NO: 292838 - DNA, 122 bp, Homo sapiens
ctcccacccttctccccggaaccccgtgccccgtgttcacaagagaagagggtgacactgcgacccttcctggactctgacccccacccgtccgccctgcggacgaccctcgctctaactgc

SEQ ID NO: 292839 - DNA, 122 bp, Homo sapiens
cacacactctgcatgcaacacactacaaagcattcactgaatgggcacaatcctatggctcgcgacggctacacggagtttgtggtaatcacagcaacaatgaaagacaaactaaaacggag

SEQ ID NO: 292840 - DNA, 122 bp, Homo sapiens
gacgagggcagcggaggggcgacaaagtgagtggtgcgtgggtcgctgggtgcttcctggcgggtagtgacctggggaagctgccttctggcctgccagcccagctggtgttttgctcagag

SEQ ID NO: 292841 - DNA, 122 bp, Homo sapiens
gccgcaaaccccctggtgggcgcggtgccagccccccaggccgattcccatccagttgaccgagcttgtgctggtcaccgcggtttccgcaggacagagtccccacagccgctgggcacccc

SEQ ID NO: 292842 - DNA, 122 bp, Homo sapiens
gcctcctcgcgccgccaaggccccctgcagtcacacactcgcccgcacgcacgacctcctcgctccatcctggggacatccaggattcacccccgaggggaagagtcccatgtgacaaatgg

SEQ ID NO: 292843 - DNA, 122 bp, Homo sapiens
acacaacaatgccctcgatgacgttgaaaggctgtttccagactcaggggctccccgcctcgctcagttgaggacctgccctggccgcagcccaccctcagccctcagcagagctggggcct

SEQ ID NO: 292844 - DNA, 122 bp, Homo sapiens
caaggagttggtgacagtcattgagactgtctgaaaggacactttaaaataaattatagacgagatacttaaacaggcacttcaccaaaaaggaaatccagatgaccaacaaatgtgtgaaa

SEQ ID NO: 292845 - DNA, 122 bp, Homo sapiens
gaacggtcccgggcctcccgcccgcctccctccagcccctccgggtcccctacttcgccccgccaggcccccacgaccctacttcccgcggccccggacgcctcctacctgcgagccgccct

SEQ ID NO: 292846 - DNA, 122 bp, Homo sapiens
agaggtgttggtgtgctggaccgggggcagctgggtgtggcgtgagtggggccgcccagtcggggcaactgcagtgcagccagatagggtctggactttgcgtaaagggacaggcgggaact

SEQ ID NO: 292847 - DNA, 122 bp, Homo sapiens
cggacgacccacccatcatggctgcgcgtcgcaaaagtggcggcgcgcgcccggctgccccgcaacgactcacccgtggtgtgcaggaagcgcagcccctcggtctccagggccggccgcgc

SEQ ID NO: 292848 - DNA, 122 bp, Homo sapiens
tttaagccggcctgaaaagcgcaatatttgggtgggagtgacccgatttccaggtgcgtccgtcacccctttctttgactcggaaagggaactccctgaccccttgtgcttcccaggtgagg

SEQ ID NO: 292849 - DNA, 122 bp, Homo sapiens
ttccccctgcctggtccccttccctagagagcccttcgccaaccctgggaaagccccaaacgacagctcccgagcgccacccggaccagactccaggaccgccctgtcccgccacccttttt

SEQ ID NO: 292850 - DNA, 122 bp, Homo sapiens
ttttgtttttcctttaacaaggtccaaagaaagatgcaaaaggagatcacacccttgccccgctgagccccgtgataacaagtcactccagactaacctgtgtgccagacatttgtgcattg

SEQ ID NO: 292851 - DNA, 122 bp, Homo sapiens
gtaactactgaattagataacatggatacaataggtggtttaataagaacaaattctacacgagtcaaaagaacacaaaccatattagaatgggttaaggtgagaatggaagattggagata

SEQ ID NO: 292852 - DNA, 122 bp, Homo sapiens
acttccgatttcgtcatcagcacgcgcacccagtcaccagactcccttctctagccacagcgcaggccctccctgggccgggagaagtagcctggaagccaatcgagccctggcggaagtcg

SEQ ID NO: 292853 - DNA, 122 bp, Homo sapiens
accgcaggggcgggtaggagcctggctctgcctgagctccggagggagcagagctggcaccgcgcaagggcccctgcctcccgggagactgggatttctggcctcctcacctcgggaccgct

SEQ ID NO: 292854 - DNA, 122 bp, Homo sapiens
aggggcaagaccctgtgcagcggggacagaggctgacaacctgtcggagagaatgagcaacgcggagcccactccactggcacgggctggccgcagacgcagctagaacgtgccgctgtctc

SEQ ID NO: 292855 - DNA, 122 bp, Homo sapiens
tgaggacctaaaacgccgaggagttccaatttgtcctcgagaacacggggtttctccattcgcggccgtcaacagcactagatcacagttacattttttttcctttcgcgaaacctcattcg

SEQ ID NO: 292856 - DNA, 122 bp, Homo sapiens
agcgtggatcggcccgtccacgaccttcagttaggaacagggccagactgtgggtccagtcgcagggacaggcagtcgtgtggcaggacggggtggccttgcgcccgccaacccaagcattc

SEQ ID NO: 292857 - DNA, 122 bp, Homo sapiens
gttctttctcttttttaaactttccggccttggcgaacgggcagggtttccagtcctccccggcccccacccagttcggggaggggcggggcggggcggggctggccctcctaacccctccg

SEQ ID NO: 292858 - DNA, 122 bp, Homo sapiens
acttctccgaggttacacagctaggaaatggtggcaacagtaagagcccacgaagagctgcggttggtagttcattctggacagccctcccgtgaaccgtccctgtactggcacttgttgct

SEQ ID NO: 292859 - DNA, 122 bp, Homo sapiens
tggaggaagaggaaatgcttgacgcatcatcgctcagattgccttggtggaaactgctttcgatggttcacgtctagcagtgtaactcgatgactcacaaaacagcctttattcattgacgt

SEQ ID NO: 292860 - DNA, 122 bp, Homo sapiens
cgcgccctacccgttgacgccggccgctctgcgcccaggcaccagcccgcaccccggacgcgaggtctgacccatgaccccggggacgcccagagcccagtccttgggaagggccaggcccc

SEQ ID NO: 292861 - DNA, 122 bp, Homo sapiens
aaaaagaacagcccctggcaccctcagaagagcacaaagccctctgacaacctgagatggcgcccaggtagacttccctcaaaaaaaaaaaaaatggcaaggctgcttcagcaggtctttca

SEQ ID NO: 292862 - DNA, 122 bp, Homo sapiens
ggacactttcctccttcctctcattacccctttccctgtctcaggaagaccggaggagagcgagcgcctggatgctgttgcaactctttccattgaaccctcgcatctaatttgttcccttt
